United States Patent Application Publication US 2013/0332133 A1 - sequence listing, part 46

SEQ ID NO: 294309 - DNA, 799 bp, Unknown
  Bacterial polypeptide expressing nucleotide sequence isolated from the Sargasso Sea
attgacaacgagaacatttcaacagaagatcttatgggtcttcattaaaggcccagactttcctacagcgggtttaattttgggaatggatgggctaaaacaggcctatgaaacagggcgaggaaaaattaaaatgcgagcccgggcacacatagagtcaaacaaaaaaggtcgggacagtatagtcataacagaggttgcatatcaaacaaacaaagcaacgcttgttgaaaaaattgcagatttagtaagagataaaaaggtggcgggaataagagacctaagagacgagtcagataaagatggaataagggttgttattgacactaaaaaagatgctgtgcctgaggttattttgaaccaactatacaaacacacacaacttcaagacacgtttggaataattttacttgccctagttgatggcgttcctaaaattatgccactaaaaaccattttaactcattttgtagattttaggcatgaggttgttgttaagcgaacggaatttgatttaaaagaggcagaggccagggcacacatacttgaaggtttaaaaacagcgcttgataatattgataaggtaattgaaataataaaaggaagcaaagacccaacgcaagcaaaagaaggcctgatggatggttttaaactaagcgaggtacagtcacaggcaattttagacatgcgtctccaaaggctaactggtctagaggttgaaaaagttgtagaagaatacaaagagcttattaaacacatttcccatctaaagggcatacttgaaagcaaaccccaaaga

SEQ ID NO: 294310 - DNA, 1343 bp, Unknown
  Bacterial polypeptide expressing nucleotide sequence isolated from the Sargasso Sea
tcttgagaatccaaaactatccattgatcagatcattgattcaattagcggaccagatttcccaactgggggcaccattgatggaaaaatgggtatctacgaggcatataaaacaggaagaggaataatttatgtcagatctaaatcaaaagtagaggaaagcaaaactggaaagaaatctcttgttatctatgaaatacctttcatggtaaacaaagctagaacccttgagaaaattgcagaacttgtcaaagagaaaaagattgatggaattagtgaaattagagatgaaagcgacaaagatgggttaagaatagttatcgatgttaaaaagggagagtccgttgaggttttagaaaataatctttttgcacaaactcagcttgaacagtcatttggaataaatttcaccgttttggttgatggtcaaccacgggtactcaatttaaaagagattcttcaagaattcttaaaacatagaaaagacgtagtacttaaaagaacaaaattcgagctcaggaaggctaaagaaagaggccatattgtagaaggcttgatggttgccattgctaacattgatgaaatcataaaaattattaaaaaatcaaaggacccaaagatagcagctcaggagttagttaaaaagaaatggaaagctggacctgtagaagcaattcttaagaaggtaggaaaagatgcatgtaagccaaaaggtgtagcaaaaggtattgggttgtcagggaagtcatataaactctctaatgatcaagcaaaagctattcttgaattaaggcttggaagattaacaggacttgagcaagataatctatctagtgagtttaattctttaattgaaaagattacttcgcttcaagaaatcattgatgataaaggggttcttcaaaaggtcatagaggacgagcttaatgaaataaaagaaacttatggtgatgatagaagaacagacataaatgatactagacaagatatttcaaatgaagatttaataccagaggaaacaagagtactaacaatatccaggacaggatatgcaaaaactcaaccgcttgaagaatatagagagcagagaagaggaggccagggcaaagccgctgcctcagttaaagaagaagatgttattcaaaatctttatgtactaagcagccactcgcaaatgctttgttttacaacaaagggcaaggtttactggttgaaggtttatgaagttcctgttgcaagcagaacatcaaaaggaagacctcttgtgaacatgcttaatttagatgatgatgaaaaggtcagtgacattttacctgtagatgagttttcagaggatagatata

SEQ ID NO: 294311 - DNA, 655 bp, Unknown
  Bacterial polypeptide expressing nucleotide sequence isolated from the Sargasso Sea
ggagaattatttttagtggagggggagtcagctggcggatctgccaaaagggcaagagatagaaacttccaagctattcttccactcaaaggaaaaattatgaatacttgggaagtagatgttagtgaagtattagcttctcaagaggtaaataacattgcaatagctcttggcgttgagcctggaagcaataatttagacggactcagatatggcaaagtttgcattttagctgatgcagattcagatggacttcatattgccaccttattatgtgctcttttcttgaaacatttccgacctctagtggaagcaggaagagtttatgtttcgatgccacctctctatagaattgatcaaggtaaagatgtgtattacgctttggatgatccagaaaaagataaattggtggatgaattacagaagaaaaataaaagaacaaaaatagaagttcaaagatttaaaggtctcggagaaatgaatgcttcccaactgagagagactactatgttgcctggagctagaagactggttcaacttacagttaaaaatggagataaatcatctcaattggttgatatgttgctgtcaaaaaagaggtctcaagatagaaaagaatggcttgaagataaaggaaacttagctaatgtctgaa

SEQ ID NO: 294312 - DNA, 1135 bp, Unknown
  Bacterial polypeptide expressing nucleotide sequence isolated from the Sargasso Sea
agcacttcctaatattggtgatggtctcaagcctgttcaaagaagaattttatatgcaatgtctgagctaggattagacgcgtcttcaaaatataaaaaatcagcaaggaccgttggtgatgttataggtaaatttcatccgcatggagatagtgctgcatacgaagcaatggtattaatggctcaaaacttttcatttaaataccctttagtagatggtcaaggcaactggggttcgcaggatgatccaaaatcatttgcagccatgcggtatacagaatcaaaattaacaagctttgcaaatctacttatttctgaattaaaatctggaactgtagattggcaacccaattttgatggatctttattagagcctgtaatatttccatcaaaactaccggtaattttactaaatgggacatctggaattgcagtaggtatggctacggatataccatcacataatatcaatgaagtcatagatgcaacaattaaaattcttgagcagccaaaatctgacttaaaagatcttttgaagattataaaaggaccagatttttcaaatgcagctcctattattgttaataatgatgaattgcaggaaatgtattcttctggaagaggtggttttaaaattcaagctcaatggaagcaagaaaagaactcaatcattataaattcattgccatatcaagcatctggttcgaagattctcgaacagatagctgaacagatgttaaataaaaaacttccaatggtggttgatcttgctgacgaaggagatcacgaggatcctgttagattagtgattactctcaaatcaaacagagtaaatgctgaagatttaatgaatcatctttttgcatcaaccgatcttcaaaaatcttacagaatgaatatgaatttgatatctcttaaaggcgggcctcgtgtttttccattagttgatttattgaaagaatggctggcttttagaaaggatactgttaaaagaaaacttgaacataggcttgatcaagttaatgacagattacatattttagagggattattatcaatattcattgatattgatgaagttataaagattattagaaaatcagatgagcccaaaaaagatcttataaaagctttt

SEQ ID NO: 294313 - DNA, 1723 bp, Unknown
  Bacterial polypeptide expressing nucleotide sequence isolated from the Sargasso Sea
gaggttccttatcaaacaaataaagcagcgctagttgaaaagattgcagacctggttcgcgacaaaaaggttgtaggtataagcgacctacgagatgaatcagataaagatggaatacgtgtagttgtggaaactaagcgagatgccgttcctgaggtgatattaaaccaactctacaaacacacacaactacaagacacatttggaataatactattagcccttgtagatggaataccaaaaataatgccacttaaaacggttttaaatcattttattgattttagacatgaagtagttgttaggcgcaccgaatttgaattaaaagaggccgaaggaagagcccacatattggaggggttaaaaattgcactagacaatattgatgaggttatcaaagttattaggggcagcaaagaccccgcacaagccaaagaaggccttatgaatagttttaatttatctgaagcgcaatcccaagccattcttgacatgcgccttcaaaaacttaccggcttagaggttgataaagtggtggccgagtataaagaattaatccaaattatttcaaatttaaaaagcgttctagaaaacaaaacaaaacgcatgaatattattaaaacagagctccttgaaataaaagatcaatacggcgatgagcgaagaacagaaattataccagtggacacagatttttctatggaggacatgatagctgaagaagaggttgtgcttacaataacccaccaaggctatataaaaagaacagccctaaatacatatagaactcagcgcaggggtggtcgcggcgttcaaggagcaatgagcaaagatgaagattttgtagaacatttatttattgcaaacacacacaattatatgcttttctttaccgacacagggaagtgttattggttaaaagtatatgatatacctcaagcgggacgcgcttccagaggacgcgcaattgtaaatctaattggctgtaaccccgaagaaagagttgaggcctttgttagtgttaaggaatttgatgatgaccactatattgttatggcaacaagaaatggcgttattaaaaaaacagtattgtcagcatatgggaagccaagaaaaggtggaatatatgctattgaaatacgcgacggtgataaacttatccaggcgcgagtttcaaatggagaaaatgatattttattaggaacacatgaaggcaaatctattcgtttctcagaaaatgatgtaagggcaagcggaagaaaaacaatgggtgttaaggggattaagctaagctcaaaagatgattatgttgttggaatgttaatagtaaagcgcgaaggcactatcttagttgccacagaaaaaggatatggaaaaaggacagaggttcttcaataccgcacacagacgcgcgcgggtaagggtgtattaactatgcgctgtacagataaaaccggtaagatggttaatataatggaggttgttgactctgatgatttgatagttattaccgattcaggcgtattaatgcgtcaaccagttgaggcaattcgttcaattgggcgcgtaacacagggagtgcgccttgtaaaattagataagggcactaatatctcttcaattacaagagttattagtgaggaaacagcaacccaaaaacaagataataatcaaatatctattgagaccggggaagatgaatcaacacccgatcctaattaat

SEQ ID NO: 294314 - DNA, 696 bp, Unknown
  Bacterial polypeptide expressing nucleotide sequence isolated from the Sargasso Sea
ctggaaagctttcagactgtaactgcgacaatatcgaagaaagcgagctttttttagttgagggagactcagcaggagggtctgcaaaacaagctcgagatagaaggtttcaagcaataatgcctttaagaggaaaaattcttaatacctgggatttagaaagtgcagacataataaaatctcaagaaattaaagatcttgcgactgctattggatctttgccaggagatacagatatttccaacctaagatatggaaagatttgtattcttgctgatgccgactcagatggactgcacatagcaactttattatgtgcattatttctaagacactataagaatttagtaacctcaggaaaaatctttgtctccatgcctccgttatataggattgatgctgcaaaagaagttttttatgccctcgatgagaatgaaaaagaatctattgttaagaaaattaaaaaacagaactcgaaaattaagatagatattcaaagatttaaagggcttggagaaatgaatccttctcaattaagagagacggttatgaagcctgaatctagaagattagttcaactaactttaagtagttctgataatgcaaactcagtatttgatctactactttctaaaaagagagccccagatagaaaagaatggcttgaaaagaaaggtaacttagcggagatttaat

SEQ ID NO: 294315 - DNA, 598 bp, Unknown
  Bacterial polypeptide expressing nucleotide sequence isolated from the Sargasso Sea
atgactaaaggaaatttagataaacaaagcattaaaaaatatgcagaaaatgcatatctcaattattcgatgtatgtcattttggatcgagccttacccaatattggagatgggctgaagccagtacaaagaaggattttatatgcaatgtcagaacttggactaaatgcatcatcaaagtacaagaaatctgctagaactgttggagatgtaataggtaaattccatccacatggtgatagtgctgcgtatgaagcgatggttttaatggcacaagatttttcatttaggtacccatttgtagatggtcaaggaaattggggatcgcaagatgatcctaaatcttttgcggcaatgagatatacagaatctaaactaacaaaattttcagatcttctaatagatgagttgaagcaaggaacagttgattggcagccaaattttgacggatcacttcttgagccagtaatctttccagcaaaagttccatccattttacttaatgggactacaggcatagcagttggtatggctacagatatcccatcacacaatatgacagaggtaattgatgcaactatccatgttttagaaaatc

SEQ ID NO: 294316 - DNA, 992 bp, Unknown
  Bacterial polypeptide expressing nucleotide sequence isolated from the Sargasso Sea
aatgagatataccctaatacagggtcagggtaactttggttctatagatggggatcctccagcagcaatgagatatacagaagttaggatgcagaaaatttctgatgagattcttgcagatttagaaaaagaaacggtttctttctcagaaaattatgatggctctgaacaaatgcctgatgtaatgccaaccaaaataccaaatcttttaattaacggatcgtcaggaatagctgtgggtatggctacaaatgttcctccgcataatcttactgaagtcataaatggctctttgaatctacttgagaatccaaaactatctatcgatcagattattgattcaataagcgggcctgatttcccaactggggggaccattgatgggaaaatgggtatctatgaggcatataaaactggaagaggaataatttatgttagatctaagtcaaaagtagaggaaagcaaaactggaaagaagtcccttgttatctatgaaataccttacatggtaaataaagctagaacccttgagaaaattgcagaacttgtcaaagagaaaaagattgatggaattagtgaaatcagagatgaaagtgataaagatggacttagaatagttatcgatgtaaaaaagggagagtccgttgaagttttagagaataatcttttttcacaaactcaacttgaacaatcatttgggataaactttaccgtcttagttgatggccaacctagagtacttaatctaaaagatattcttcaagaatttttaaaacatagaaaagacgttgttttaaaaagaacaaaattcgagcttaggaaggctaaagaaagaggccatattgtagaaggcttgatggttgccattgctaacattgatgaaatcataaagattattaaaaaatctaaggatccaaagatagcagctctggagttagtaaaaaagaaatggaaagctggccctgtagaagcaattcttaagaaagtaggaa

SEQ ID NO: 294317 - DNA, 433 bp, Unknown
  Bacterial polypeptide expressing nucleotide sequence isolated from the Sargasso Sea
atgacaaaaaataacacatatcaagcagatgccattaaagttttaaaaggtctagaagcagttcgaaaaagaccaggaatgtatattggtgatacggatgatggaactggattgcatcatatggtttatgaagttgttgataattccattgatgaagctttagcaggctattgcaataatatttcagtaaaaataaattctgacggtacaataacagttaaagatgatggacgaggaatacctgtagacatacacaaaggtgaaaaaaaatcagcagcagaagtaattatgacacaattacatgcgggtggtaagtttgatcatgactcttacaaagtttctggaggtttacatggtgtaggtgtttcagttgtcaatgctttatctgaaaaactaaaattagagataaatagagatggtaaaaaatatttta

SEQ ID NO: 294318 - DNA, 640 bp, Unknown
  Bacterial polypeptide expressing nucleotide sequence isolated from the Sargasso Sea
atggaaaaaaccccaattcaaaataaaaatttatttagtcctattcttgtacaagatgaaatgagctcatcttacttgtcttacgctatgagcgtaattgttagtagggcattaccagatgttcgtgatgggcttaaacctgttcatagaagaataatttatgcaatgtataaaggcggttatgactggtcaaaaccttttagaaagtctgcaagaattgtaggagatgtaattggtaaatatcaccctcatggagatcaagcagtttatgatgcattagttagattagttcaggatttttctatgagtttaccgttaatttctgggcaaggaaattttggttctatagatggtgaccctcctgccgctatgagatatacagaaaccaaactagcaaaaattgctcaacatttaactgaggatttagagaaaaatactgttctttatagaaataattacgatgagactgagaaagaacctactgttttaccctctcaatatccaaatttactagttaatggcgctggaggaatagcagtaggtatggcaacgagtatacctccgcacaatttaaaagaaattataaatggcacagtcgcttttataaataataaagatattactatttccgcaaattaat

SEQ ID NO: 294319 - DNA, 923 bp, Unknown
  Bacterial polypeptide expressing nucleotide sequence isolated from the Sargasso Sea
cgtaatgccctatcaaaagaacttactttaacaatatgcagagatggtggcatgtatcagcaaaaatatagtgaaggtttggctaaaactaagcttaaaaaaattaaagcttctaaggaaacaggcactgaaataacattctctgcatcagataaaatttttacttctattaattttgaagctgatagagttaataaaagagttcaagagctatcatttttaaatgctggcgttagtatcgaagtcacagacgctagaacgggaaaatctaaaaagttcaaaaacgaaggaggggtttcaagttatgttgactatctaagaggaagaaagccttcattatgtcagacaatacaatgtgagggtggtcaggacggagtaactgttgaggttgcaatgcagtggaatgattcctataacgagaacgttttgtgttacacgaataatattcctcaaaaagatggcggcacccatctctcaggattcaggtctagcttaactcgcgtattgaaagcctttattaaaaaggaggaattaaataagaatgttcctgtagatttacttggtgaggatgtaagagagggattgatagctgtaatatcagtaaaagtgcctgaccctaaattttcttctcaaactaaagaaaaattagtttcatcagaggtagaaagcattgttagtagtgttcttaataaaggattaaatgagttcttgcttgaaaatccaaaagaagcccatggcattctatcaaaagtttcagaggcagcattagcaagagaagctgcaagaaaagcaagagaaatgacaaggagaaagggagttctagagttagcagggcttcctggtaaacttgctgattgccaagaaaaaaatccagaactttcagaaatatacttagttgagggtgattctgctggcggatcagc

SEQ ID NO: 294320 - DNA, 901 bp, Unknown
  Bacterial polypeptide expressing nucleotide sequence isolated from the Sargasso Sea
atgttcaataaggttaaactcaagttctgttttaagaaatcagcaagaatagttggcgatgtaattggtaaatttcacccacacggagatcagtctgtttatgaagcactcgtgagattagctcagaatttttcaacaaggtatccgttagttgatggccaaggaaattttggcaacattgatggagataatgcagctgcaatgagatatacagaggcaagattgactgcgttagcagagctaatgctcaaagatatatcagaggataccattgattatattaatacatatgatggcatcgatcacgagccaatagttcttccatcagcgtttccaaatttgctagctaatggaagttcaggaattgcagttggaatggcgacaaatattcctccccataacataaatgaattgtttaaggctttatcaaaattattaaaaaatccaaattatactaactcacaattactaaagcttattccaggaccagattttccaacagggggagaaatcattgatagtgatgatgccttgaaagatgcctatgtcaaaggaaagggaacaataaggctccgggcaagatggaaaaaagaagaccttggaagaggtcaatatcaaattatcgtgtatgaaattccctatcaagttaataaagccagaattatagaaaaaatatctgatcttattgataataagaaagcaaattacttagaggcaattcaagatgagtctgcagaagacatcagaatagttctcattccaaaaaatagaagttttaaagctgaagtaatttttgaggacttatgtaagaattcagatttagaaattagatacgccatcaattttaatgcaattaatcataaactcgagccaaaattattttcacttaaagagagcttaa

SEQ ID NO: 294321 - DNA, 1036 bp, Unknown
  Bacterial polypeptide expressing nucleotide sequence isolated from the Sargasso Sea
ttcaaagggttagacgctgtccgaaacagacctgttatgtacattggtgatactgatgacggcacaggacttcaccacatggtttttgaggtcgttgataactctgttgatgaggctttggcaggttcttgtactcacatagaggtaatcattcatgaggatgactctataactgtaaaagataacgggcgtggcatacctgttgataaacacaaaacagaaaagacttctgcagctgaggtcatcatgaccgtattgcacgctggaggtaagtttgatgatgattcatacaaggtttctggaggcttacacggtgttggagtttcagtggtaaatgctttgtcagaaacgttaaacctaagaatacataaaaacggtcatacctatgagcaagactatgtacacggtgttccgcaaaaaccgcttaaaaaaggctctaaaacaaacagatgtgggacaacagtaaccttcaagccaagcgctaaaacatttactaataccacgtacagttttgatattttatctaaaagattaagagagctttcattcttaaactcggggttaagcattaaacttactgatgctaggtctggaaaagaagatgagttttactttgaaggcggtatcagtgcatttgtatctcatctaaacaaagttcaaagccccgtacatgagtctgtcatcaatttcagcaagacaattgatgatataactgtagacatcgccatacagtggaatgagtcttacagagaaaacatgtattgttttgcaaataccataaggcaaaaagatggcggaacacacttagctggttttaggggcgcgctcacaagaacaataaatacatatatagacaaggaaatcgcaaaggccgatatatctgtttctggagaagactgtagagagggcatgacagctataatttctgttaaacacccagatcccaagttttcatcacaaaccaaagataagctagtctcttctgaggttaaaggcgtagtcgaatcagtagttaacaaacaccttaaggagtttt

SEQ ID NO: 294322 - DNA, 895 bp, Unknown
  Bacterial polypeptide expressing nucleotide sequence isolated from the Sargasso Sea
caaactaaagagaggcttgactctaaagatcatatgagctttgtttcatcttcaacaaaagattctctgagtatttggcttaaccaacataccgaagagggtgaaaagattgcggatcttgcaattgccgctgctcaaaagaggattaaaagctcaacaaaagttgatagaaagaaaacatttaaaggcccggctctccctggaaagctttcagactgtaactgcgataatatcgaagaaagcgagctatttttagttgagggagactcagcaggagggtctgcaaaacaagctcgagatagaaggtttcaggcaataatgcctttaagaggaaaaattcttaatacctgggatttagaaagtgcagacataataaaatctcaagaaattaaagatcttgcaactgctattggatctttgccaggagatacagatatttccaacctaagatatggaaagatttgtatacttgctgatgccgactcagatggactgcacatagcaactttattatgtgcattatttctcagacactataagaatttagtaacctcaggaaaaatctttgtctccatgcctccgttatataggattgatgctgcaaaagaagttttttatgccctcgatgagaatgaaaaagaatctattgttaagaaaattaaaaaacagaactcgaaaattaagatagatattcaaagatttaaagggcttggagaaatgaatccatctcaattaagagagactgttatgaagcctgaatcaagaagattagttcaactaactttaagtagttctgataatgcaaactcagtatttgatttactactttctaaaaagagagccccagatagaaaagaatggcttgaaaagaaaggtaacttagcggagatttaat

SEQ ID NO: 294323 - DNA, 942 bp, Unknown
  Bacterial polypeptide expressing nucleotide sequence isolated from the Sargasso Sea
tcatccacatggagatcaagctgtatatgatgctttggtaagaatggttcaagaattttcaatgagtttacctttgatagatggacaaggtaattttggatctattgacggagatcctccagctgcaatgagatacactgaaactaaattatcaaaaatatcacaatatttaattgatgatattgagaaaaataccgtaaattttaaaagtaattatgatgaaactgaaaatgagccagtagtattacctgctcaatatcctaatttattagttaatggagctggtggtattgccgtaggaatggcaacaagcataccaccacataatttaggagagattataaatggtacattagccctaattgagaacaaagatattaaattgaatgaattaatgaaacatatacctggacctgattttcctactggtggaacaattataggaaaaaatattattaaagagggttataaagttggaagaggatcatttaaaattagaggaaatattaatattgaacaaagaaaaaacggtaaagaaagaattgtaataacttcaattccatatcaagtaaataaatctacacttaatgaaagaatagttgaacttgttagagataaaaaaattgagggaataagtgacattagagatgagtctaatagagaagggattagagtatctattgatctaagaagaggtgtagagccagagactgtaaaaagacaactttataaatatacatcaattgaaagttcttttggttttaatacgttggcaatagtaaataaaaaaccacaaacatgttcattaaaagattttttagaaaattttttatcatttagagaagatgttgttgtcaaaagaaccaaatatgatttaaataaagctgaagaaagagctcatatactaattggtctcactgtatcaattgaaaatttagataa

SEQ ID NO: 294324 - DNA, 934 bp, Unknown
  Bacterial polypeptide expressing nucleotide sequence isolated from the Sargasso Sea
ctggtatgtatatttggagatacagatgacggaactggtcttcatcacatggtatatgaggtggttgataattctgttgatgaggccttagcaggtcattgtaaaatgatctcagttattttgaatgctgatgagtctgtaaccgttaaggatgacggaagaggaataccaactgagatccataaagaagaaggaatttcagctgctgaagtaataatgacacagttacatgctggaggaaaatttgaccaaaattcttacaaagtttctggaggcctccatggagttggtgtctcagttgttaatgcattatcggaaaaattagatttatcgataaagagagatggtaaagaacatgctatgtcttttcaaaatggtgaaacagttaaagctttgaaagccgttaaagattgtaaagatgaaactggaacagaaattactttttatccatcgaagtcagtttttacaatgaccgaatttagtcgcagaactttagaagcaagattgagagaaatggcttttctgaattcaggcatatcaatacatttggaggataaaagaaaagatgagccttgggctaagacaatgtcttatgaaggtggcttagaagaatttgttaaacatattgatcagacaagaaagtctctaatggatttgccaatcagtttttctggtaaaaaagatgaaattgaagtcgatgtttcaatgtggtggaatgatagttattatgaaactgtaaattgctttacaaataatattcctcaaaaagatggaggcactcatttggctggtctcagatcagcattgacaagagttgtaaattcttatgcacaagatacaggtttaacaaaaaaagaaaatgttcaacttgtaggtgaagacattagagagggctttacatgcgttttatctgtaaaagtcgctgatcctaaat

SEQ ID NO: 294325 - DNA, 864 bp, Unknown
  Bacterial polypeptide expressing nucleotide sequence isolated from the Sargasso Sea
gataagttggtttcatcagaagtaagaaatattgttgaaaattttatgaatgaaaaattatctatttggtttgatcaaaacccaagcataataaaggttgttttgttaaagataattcaagcagcgcaagcaagagatgttgctagaaaagcccgagaaagtgttagacgaaaaggggcacttgagctcacaggtttacctggaaaacttgctgattgtcaaaattcaaaaagagatggaactgaattatttatcgtagagggagattctgctggtggttctgcaaaacaaggaagaaacagagagtttcaagctgtattacctctaagaggaaaaatattaaacacatatgtagaagaagtaaattcaaagagaaatggaaattcgaacgatagtaaaactaaagcattatcaaaaatgatttcatcaaatgaaatcgtcacattaataaatgcgttaggtctagatccaaaagctgaagaaattgatttagatgatcttaggtatggcaaaataattattatgactgacgcagatgttgatggatctcatattagagcgttattattaacattttttaataataaaccatttaacaagcttatagaaaatggaaatattttcctagcacaaccccctttattcaaaataaataaatcaggcaaaagtatttacattaaagatgaaaaaagtttggaaaactttattttaaataattctaaaaattcaaaaaaaatcaaaaaagggtcaaaggaatttgaaaaaatgttgtcagaggaaaagtcaaaactaaatattcaaaggttcaagggtcttggcgaaatgaacccagatgaactttggaacactacgttagatcctgat

SEQ ID NO: 294326 - DNA, 980 bp, Unknown
  Bacterial polypeptide expressing nucleotide sequence isolated from the Sargasso Sea
aaatatgcagactcttctggacttacagataaacttaaatttgatatttcaggagatgattttagagaaggattaacagctgttatatcagttaaagtagctgaacctcaatttgagggtcaaacaaaaactaagctaggtaacagagaggtaagtgctgctgtttctcaggctgtatctgaaatgcttgaaaattatctggaagagaatccaaatgattctaaaataatcgttcagaaggtaatacttgctgctcaagcaagacatgcagcaagacaggcaagggagatgattcagagaaagactgttatgacaggaggaggtctacctggtaaattatctgactgctcagagactgatccattaaagtgtgaggtctttcttgttgagggggactctgctggtggtaccgctaaacagggaagggatagagtatttcaagcaattcttccattaagaggaaagattttgaatgttgaaaaagctcaacaacatagagtatttgaaaatgaagaaattaggaatatatatactgctcttggtgtttctataggtactgaagatgatagtaaagctttaaaccttgaaaaattgagatataataaaattattatcatgtgtgatgccgatgtagatggtagccatatttcaacactaattttaacttttttctttagatatatgagagaacttgttgagggaggtaatgtatatattgctacccctccattatatttagttaaaaaagggaataaaaaagcatatgcatggaatgataaagagagggataatcttgcaaaagaatttggttcaggtgtatctattcaaaggtataaaggtcttggtgagatgaacgcagatcaattgtgggatacaactatgaatccagagaccagaacccttagacaaatatcactaaactttgataattctcaagaagctgaaaggtggttttctactttaatgggtgatgatgtccc

SEQ ID NO: 294327 - DNA, 967 bp, Unknown
  Bacterial polypeptide expressing nucleotide sequence isolated from the Sargasso Sea
aattcttataaagtttctggaggactacacggagtaggggtttcagttgttaatgctctttctgagagattaaaacttacaattaatagagataataaaaaatattatatagaatttaaaaatggagacgctaaaatttctttaaaagaagttggaaaatcaaaaaccagtggtaccgagattaattttgttccatccaaagatatattttcatccattaaatttagtttttctattttagaaaaaaggatgagggagttagcttttttaaataagggcataaaaatagttttaagtgatttaagacaaaaaaaaccaaaaacattagagtttaaatttgaaggaggtatcagtgaatttgtacaattcattgatgaaaaaaaagaaagtttaaaaaacaaaaatgaaaatgatctttttaaaaaacccatttatattgaaggtctaaaaaataatattgatgttcaatgctcccttaagtggaatgcagggtatagcgaagatgtattgccttatactaataacatttatcaaaaagatggaggaacacatcttcttggatttcgaagtgcattaacaagagtagtaaataaatatgcaaatgaacaaaacctattaaaaaaaaataaagtttctttatcaggggatgatgttaaagagggattaacttcagttctctctatcaaaattcctgatccaaaattttcatctcaaacaaaagataaattagtatcatcagaagttagaaatattgttgaaactatcattaacgagaagttgtctatttggtttgatcaaaatccatcaatttcaaaaattatcttaactaaaattatccaggctgctgtagcaagagatgtggctagaaaggcaagagaaaatgtaagaagaaaaggagccttagaattaacaggattgcccggaaaattagccgattgtcaaaattcaaaacaagatggcaccgaac

SEQ ID NO: 294328 - DNA, 241 bp, Unknown
  Bacterial polypeptide expressing nucleotide sequence isolated from the Sargasso Sea
atgaacaactatcaagcagattcaataaaggttttaaaaggcttagaggctgtaagaaaaagacctggaatgtatattggtgatacagatgatggtacgggtttacatcatatgatttatgaagttgtggataattctattgatgaagcacttgctggtcattgtaaaaaaatcgaggtaattttaaattcaaacggatcagtgactgttaaagatgacggaagaagaattcctgtagata

SEQ ID NO: 294329 - DNA, 295 bp, Unknown
  Bacterial polypeptide expressing nucleotide sequence isolated from the Sargasso Sea
tttgataaacgagcatgaaaataattatgatgcagactccataaaagtcctaaagggcttagaagctgttagaaaacgtcctggtatgtatattggagatacagacgatggttctggtcttcatcacatggtttatgaagtagttgacaattgtgtagatgaagcattagcagggcattgttcagagataagcgtttcactttttgatggatcattagtaactgttagagacaatggtcgtggaatacccaccgatattcatcctggtgaaggtatatctgcagcagaagtataa

SEQ ID NO: 294330 - DNA, 443 bp, Unknown
  Bacterial polypeptide expressing nucleotide sequence isolated from the Sargasso Sea
aatggcaaaaaaatctaaggaagccaaatacgactcaagtaacattcaagttctaaaaggtttagaagcggttaaaaaaagaccaggcatgtacataggtgacacagatgatgggtctggattacatcacatggtttttgaggttttagataactgtattgacgaagcaatggcgggttattgttcagacattaatgtcataatcaataaaaatggctctgtaacaatcgaagataacggaagaggaatacctgttgatgttcataaaaaagaaggagtgtctgctgcgcaattaataatgaccacccttcactctgggggtaaatttgatgataactcttataaagtttcgggggggcttcatggtgtaggtgtttctgttgtaaatgctttatcaaagaaattaactttagaagttcatagagatggtggtgagtatttcc

SEQ ID NO: 294331 - DNA, 385 bp, Unknown
  Bacterial polypeptide expressing nucleotide sequence isolated from the Sargasso Sea
atgcccaagaaaaacaattatgattcatctaacattaaggtcttaaagggcctagaggcagtacaaaaaagaccaggcatgtatataggagatacagatgatggtagcggacttcatcaaatggtatacgaggtcatggataactctatagacgaagcgcttgctggccattgctcgaacataacagttacggtgcatgaagacaatgccgtcacagtagaggataatgggagaggaatacctgttgacgagcacccaactgaaaaaaaatcagcagcagaagttatcatgacagtattacatgccgggggtaagtttgatgataattcatataaagtctctggcggactacatggagttggggtatcggttgtaaacgcattgt

SEQ ID NO: 294332 - DNA, 1038 bp, Unknown
  Bacterial polypeptide expressing nucleotide sequence isolated from the Sargasso Sea
tcatcctcatggcgaccaagcagtatacgatgctatggtgagattagttcaagaattttcagttcggtaccctttggttgacgggcaaggtaattttggaagtatagatggagatagagctgcagccatgcgttatacggaagcgcgattaactgaaattgcagaattactactaaaggatatagataaaaacactgttggttttgtcagtacatatgatggggaatatgatgaacctatagtacttccggctttattccccaatttactagccaacggtgcaagtggaattgcggtaggtatggctactaatataccgtcacataatataattgagttattaatggctataaggcatttaatcaaaaggccaaacgcttcaataacttcaattatgaaatatattaaaggtccagatttttcaactggaggaattttaatagatgataatgatactattacaaaagcatatgaaactggcagaggttcatttagattaagagctaactggtttgttgaaaagaaaactcatggacaatatgtaattgtaataaatgaaataccatggagtataacaaaagctagaataatagaaaaaattgaagagattatatctaataaacgtatttcaattttatcagatatagtggatgagtcctccgaagatattagaatattgattattccaaagaatagggatgttaatccagaccaacttatgtctagattgtttaaaatctcagatttagagctaaaaattaatatgaatatgaatgtaatagattcaaataaaactccaagagttatgaatgtcaaagaggtattattatcttttattaaccataggctagaggtagtagttagatatagtaaaaatagattaagaattgctgttgatagaaaagaagttttagaaggttatttgatcgtttttgataatctagacgaaattattgaaataataagagaagatgataatccaaaagaaacaattatgaagaaatggaatttgacggatatgcagtcagagtcaatttt

SEQ ID NO: 294333 - DNA, 433 bp, Unknown
  Bacterial polypeptide expressing nucleotide sequence isolated from the Sargasso Sea
tatgcaaaaagaacagatctctaaagataataatataaaaccaatttcaatgtatgatgagatgagttcatcatatctttcatacgcaatgagcgtcataattagtagagcgcttcctgatattagagatggtttgaaacctgtgcatagaagaatattatatgcaatgcacaaaggcggttttgattggtcaaaacaatttagaaaatcagctagaatagtaggagatgtaattggtaaatatcacccacatggagatcaagctgtgtatgatgctttagttagaatggtgcaagatttttcaatgagcttacctttaattgatggacaaggtaactttggttctatagatggagatcctcctgcagctatgaggtatacggaaacaagattagctaaagttgctcaatacttaattgatgacatagaaaaa

SEQ ID NO: 294334 - DNA, 924 bp, Unknown
  Bacterial polypeptide expressing nucleotide sequence isolated from the Sargasso Sea
acggagaggttaaggggcttgttgataaagtggtttatgagggaatattggactttctagaagaaaacccatccattggaagaaaggtgattgaaaaagcattgttggctgcacgaagtcgttcggcggcaagaaaagctagggagctaataagaaggaaaagtgctcttggtggttcatctttacctggaaaactagcagactgttcaaacaaagaccctgttttttgtgagctttatttggttgagggtgactcagctggcggctcagcaaaacaagggagggacagaaaaaaccaagcaattttaccactccgcggaaaggtaattaattctgaaaaagcaagggttgataaattactttccaacaatgagatacagtccataataacagcactgggaacgggttttggtggtggcgatgaagaaacaggagaaaggtcggcgggggactttgatattgaaaaaataagataccataaaattattataatgacagacgcagatgtcgatggctctcacataagaacacttttgcttacatttttttacagaaaaatgaaacaattaatagatggtggttatttatatttggcgctaccacccttatatagagttcaccaagggaaaaaagcagcatacgcttatgatgacaacgaaagagaccttttaattgagagaatgaaaaaagacaacaaaaacacaaaggttggtatacaaaggtataaggggcttggtgaaatgaacccagaacaattgtgggatacaacaatggatccagaaaaaagaactcttttgcaagtaacagttgaaagcgctgaggccgcggcggtcacttttcaaaatctaatgggaagcgatgttgaggcaagaaggacttttattgagaaaaatgcaaaatttgtagcaaacctagacatttaga

SEQ ID NO: 294335 - DNA, 865 bp, Unknown
  Bacterial polypeptide expressing nucleotide sequence isolated from the Sargasso Sea
catggtgggacgcatgtatcaggctttagatcaggattatcagagtcagtgaaagagtttgctgattaccggaatcttctaccgagaggtataaaactttcacctgaagatgtttggatgggtctgagctacattatttcagtcagaattgaggatccacaattctcaggacaaacgaaagagaaactcagttcgagagctgtttcaggttttgttacaggcctcattaaagatgctttcacgctttggttgaatcaacatcctgaagcgggagatcaaattgtcgcaagggcaattgagaacgctcaaaaaagagccaaaaagaatgtaaaggtaaaacgaaagaaggccacgggtggaccaacattgcctggcaaactcgcagactgcacgagcgacgagcctgatctttgtgaattatttattgttgaaggtgattctgctggtggatctgcaaagcaagccagagatagagtctttcaggcaattcttccacttcgaggaaaaattcttaatagctgggaagtcgatgagagcaatctactttcttctcaagaaatcagcaatatctctcaggcactaggtattgagcctggggccgatgagcttggtaatcttagataccataaaatttgtatacttgcagatgctgattcggatggactccatatcgcaacattgatttgcgccctgtttttgaaacattttagaaaattggtcgaagatggtcatgtctacgtatcaatgccacctttgtatcgaatcgatgtcggaaaagacgtgcattatgcgcttgatgagactgagaaggattcgattttaaaggcattagaaaaaaagaagccaaatacgaaaacaactgtta

SEQ ID NO: 294336 - DNA, 547 bp, Unknown
  Bacterial polypeptide expressing nucleotide sequence isolated from the Sargasso Sea
atggcaaaaaaatcaagtgaagccaaatatgactcaagtaatattcaagttctcaaaggtttagaagctgtaaaaaaaagaccgggtatgtatattggagatacagatgatggctctggtttacatcatatggtatttgaagttttagataactgtatagatgaagcaatggctggacattgctcagatataaaagtaactattaataaaaacggttctgtaactgtagaagataatggaagaggaataccagttgatgttcataaaaaagaaggtgtatctgcggcgcaacttattctaacaacacttcattcgggtggtaaatttgatgacaattcatacaaggtttcaggcggtctccatggtgttggtgtatcagttgtaaatgcactttcaaaaaaacttacacttgaagttcacagagacggaggagaatattttcaggaatatgaaaatggaaaaccaaaagcaaaattaaaacaagtaaaaaaatctgagaagactggaacaaaaattacgttttttccttctgaacaaatatttacat

SEQ ID NO: 294337 - DNA, 625 bp, Unknown
  Bacterial polypeptide expressing nucleotide sequence isolated from the Sargasso Sea
gatgagttcatcttatctttcttatgcaatgagtgttatcataagcagagctttaccagatattagagacggcttaaaacctgttcatagaagaattctttatgcaatgcacaaaggtggttatgattggtcaaaacaatttagaaaatcagcaagaatagttggagatgttataggtaaataccatccacatggagatcaatcagtatatgatgcacttgtaagaatggtacaagatttttctatgagtttacctttggtcgatggacaaggtaattttggatcagttgatggagatccagctgcagcaatgagatatacagaaactagactttcaaaagtatcaaaatttttaattgatgatattgaaaaaaacactgtagattttaaaaataattatgatgaaacagaaaaagaaccaatagttcttcctgcccaatatccaaatttattagtaaatggagctgggggtattgcagttggaatggccacaagtataccacctcataatttaggtgaaataattgatggaactttagcattaatagaaaatagagaaattaagataaaagaattaatgaaacatataccaggtccagattttcccacaggggaatcgttatag

SEQ ID NO: 294338 - DNA, 801 bp, Unknown
  Bacterial polypeptide expressing nucleotide sequence isolated from the Sargasso Sea
gatggcgaaaaagaagaagcaggagagcagcgagtacactgccggccaaatccaagttcttaaggggctcgaggcggttagaaaacgccctggcatgtacatcgggtcaacttcgggtcgtggtctccatcacctcgtttatgaggtcgtcgataattcgattgacgaggcgatggctggacattgtacgcgggttacagtcactgtgcatgaggatgactccgtcacggtggaggatgatggtcggggcataccggtcgatatacacccgacggagcaggtcccgggcgttgaactcgcaatgacgacgttgcacgctggtggaaagttcgataaggacacctataaagtgtccggtggcttgcacggcgtgggtgtctcggtcgtaaatgcgctgtctgcttttttggaggttgagatccgacgcggagggaagctttatcaccaacgttacgagagagggataaagacgaaggaactggaggagaaaggaaaagcgaaaggcagcggtacacaggtcaccttcaagccggatgacgagatctttaccgatcttgtgtactcgttcgaaatcctgtctaaccggcttcgcgaactcgcatttctgaacaaagggttacaaatcgtccttgtggacgagagaggagatcgtgtagaggaatcttaccagtatgagggcggaattgctgagtacgtaacttttctgcgcggctcgcgcggttccctccatgacaagatatgctacttcgaagcctcgaagcctgaggctgagatcgaactcgcccttcagtacgatcaggg

SEQ ID NO: 294339 - DNA, 832 bp, Unknown
  Bacterial polypeptide expressing nucleotide sequence isolated from the Sargasso Sea
atgagtaaaaataactacggtgcagataaaatttctgtattaaaaggtctagaagctgttagaaaaagaccggccatgtatattggtgacgtaggaaaaagaggatatcatcatttggtcagtgaggttgttgataacagtattgatgaagctctggcaggcttttgtacatctataatagttactataaaaaatgatggttttatatctattgaagataatggaagaggaattcctgttgaaatccataaaacagaaggaaaaccagcgcttgaagtggtcatgacagtattacatgccggaggtaaatttgataaaaatacttataaagtatctgggggtttacatggtgttggtgtttctgttgtaaacgctctttcagaaaccttaatagccgaagttcatagggatgggttttattataagcaagaatataaaataggagaacctacaacagaggtagaaaaaattggaaaaagcgacaaaacaggaacaattatttcatttaaacccgaccaatctgttttttctcataaaggctttgaagaagaaataataaaaggaagacttaaagagctggcttatttaaataaaaacctttcaattaaattaataaatgaacccgaagaaactgaaacggaatattgttttcctggaggattatctgattttgttaaatatttagacggaaacgaagatcttattcatgacgaagttatttctgttacaaaagaagacatagaggttccagtagatttagctttaagatatagcacaaactataatagcaatattttttcttttgtaaaacatattaacacaattgaagggg

SEQ ID NO: 294340 - DNA, 608 bp, Unknown
  Bacterial polypeptide expressing nucleotide sequence isolated from the Sargasso Sea
aatgatagaaaataaatcaaagccagaatatagtgctgacaaaattacagttttaaaaggacttgaagccgtaagaaaaagacccgctatgtatataggagatgttggtgtaaagggattacatcatttaatttgggaagttgttgataactcaattgatgaagctatggctggacactgtacagaaataaaagtatctattttgccaaatggtggagtttgtgttgaggataatggtagagggattcctgtagatataaataaaaaagaaggaaaatctggtttagagttggttatgactgttttacatgctggtggaaaatttgataaagattcttataaggtttcaggaggacttcatggtgttggaatttctgttgttaatgctctttcaaaaaaatgttctgtttttgttaaaagagatggagggcttttttctcaatcttatgaatatggaaaaagcacaaccgaggttttaagagacggagactcaagttcaacaggaactaaagtaatattttatcctgatgatgaaatttttactgaacatgtatatctttttgatacagttgatgaaaggcttagggaattagcatatcttaatagtg

SEQ ID NO: 294341 - DNA, 451 bp, Unknown
  Bacterial polypeptide expressing nucleotide sequence isolated from the Sargasso Sea
aatgagcaataattacggcgcagataaaatatctgtcttaaaaggattagaagcagttagaaaaagacctgctatgtatattggtgatgttggtaaaagaggatatcatcacctggttagtgaggttgttgataatagtattgatgaggcgctggctggtttttgtagttctataattgtaacaataaaaaatgatggttttatttctattgaagataatgggagaggtattcctgtagaaactcataaaacagaaggaaagccagcactagaagtagtaatgacagtcttgcatgctggcggtaagtttgacaaaaacacttacaaggtttctggtggattgcacggtgttggtgtgtctgtagtaaatgcgctttcagaaagcttaattgctgaagttcatagagatggttttcattataagcaggaatataaaataggacaacctaca

SEQ ID NO: 294342 - DNA, 997 bp, Unknown
  Bacterial polypeptide expressing nucleotide sequence isolated from the Sargasso Sea
agaattgactgattccaaggatcaaaatgaagatcttaaaacaggtaaagagcaatctgtaatccccatactaatcgatacagaaatgcaaaattcttacctcgattacgctatgagcgtaatcgttagcagggcattacccgatgttagagacggactaaaaccagttcatagacggattttatatgcaatgcatgagtcaggctatgagtggaataagcaacatagaaagagtgctcgagttgtcggtgatgttattggtaaataccatccgcatggagatcaagctgtttatgatgcgttggtcagacttgcccaagacttttcaatgagcgtacctctattagatggtcaaggtaattttggatcaatggacggtgatagggctgctgcaatgagatatacggaagttagaatggcaaaaattgctagcttccttcttgaagatatagaaaaagaaacggtcgactttagacctaattatgatgaaactgaaagtgagccatcagttcttcctgcaaaatatccaaatctgctcgtcaacggtgcaggtggtatagccgttggtatggcgactaacattttacctcataatttaggagaggtcattgacgctagtattgcttaccttgaaaataccgacgtaacttttgaggaaataaatcaaattataaaaggcccagactttcccactggcggaacaattattggcataaaagggataaaagactctcagtcatcaggtagaggctcaatcattgttcaggcaaaatcaaacatagaggaatttaaaacagatcgagaggcaatcgtttttactgaagtaccttaccaagtaaacaaatcatctttgcttgagaaaatagctgaacttgtcagagataaaaaaattgatggtataagtgatttaagagatgagtctgaccgccaaggagtaagagttgttgttgaattaaaaaaaggggtaatatcacaagttgtattaaataaaatatat

SEQ ID NO: 294343 - DNA, 538 bp, Unknown
  Bacterial polypeptide expressing nucleotide sequence isolated from the Sargasso Sea
aaagtggtgcgctttaaagagagcgcggtccgtgccatgggccgtaccgcaaccggcgttcgcggcatcaagctggcgggtgacgataaagtggtctcgctgatcattccacgcggcgaaggcgctatcctgaccgtcacgcagaatggttacggtaaacgtacggcggcggcagagtatccgactaagtcccgtgcaacgcagggcgtgatctccattaaggtcaccgagcgtaacggttccgtggtcggtgccgtgcaggtcgatgattgcgatcagatcatgatgatcaccgatgcgggtacgctggtgcgtacgcgcgtgtcggaagtcagcatcgtcggtcgtaacacgcagggcgttattctgatccgtaccgcggaagatgaaaacgttgtgggtctgcagcgcgtagccgagccggttgatgacgaagagctggatgccatcgacggcagcgtggcggaaggtgacgacgagatcgcgccggaaactgacgctgacgccgatgatgacactgtcgaagatgaagaataat

SEQ ID NO: 294344 - DNA, 928 bp, Unknown
  Bacterial polypeptide expressing nucleotide sequence isolated from the Sargasso Sea
tatgcctaaatcaaaaaaaaataccaatactaaaaattacgattcatccaacattaaggtcttaaaaggattagatgcagtccgaaaaagacctggtatgtacattggtgatactgatgatggcacagggcttcaccacatggtttttgaggtagttgacaactctgttgatgaggccttggcaggtttttgcacacacatagaggtaattattcatgaggatgactctataactgtaaaagataacgggcggggcatacctgttgataaacataaaacagaaaagacctctgcagctgaggtcatcatgaccgtattgcatgctggaggtaagtttgatgatgattcatacaaggtttctggaggcttacacggtgtcggggtttcagtggtaaatgctttgtcagaaacgttaaacctaagaatacataaaaacggacatacttatgagcaagactatgtacatggtgttccgcaaaaaccgcttaaaaaaggttctaaaacagacaggagcgggacaacagtaaccttcaagccaagccctaaaacatttactaataccacctacagttttgatattttgtctaaaagattaagagagctttcattcttaaactcgggactaagcattaaacttactgatacaaggtctggaaaagaagaagagttttactttgaaggcgggatcagtgcatttgtatctcatctaaacaaagttcaaagccccgtacacgagtctgtcatcaatttcagcaagacaattgatgatataaccgtagacatcgccttacagtggaatgagtcttacagagaaaacatgtattgttttgcaaacaccataaggcaaaaagatggcggaacacacttagctggttttaggggtgcgctcacaagaacaataaatacatatatagacaaggaaattgca

SEQ ID NO: 294345 - DNA, 1051 bp, Unknown
  Bacterial polypeptide expressing nucleotide sequence isolated from the Sargasso Sea
gatgcacaagggtggttttgactggtcaaaacaatttagaaaatcagcaagaatagttggagatgttattggtaaatatcatccacatggcgaccaagctgtttatgatgctttagtaagaatggttcaagatttttcaatgagtttacctttaattgatggacaaggaaattttggatctattgacggtgatccaccggctgcaatgaggtacacggaaaccagattatccaaaatttctcaatttttaatagatgatatcgaaaaaaatacagttgattttaaaagtaattatgatgaaactgaaagagaaccaacagttcttccggcgcaatatccaaatttgcttgtaaatggagctggtgggattgccgtaggtatggctactagtattcctcctcataatttaggtgaagttataaatggaacgctagctttaattgacaacaaagatattaaaattaaagagctaatgaaacatataccggggccagattttccaacaggtggaattataattggaaaaaatattattaaagaaggatacaaaagtggaagaggttctttcaaaataagaggtgaaatagctgtagagaacttaaaaaataatagagatagattggtaataacttcaataccttaccaagttaataaatcagttttaaatgaaaaaattgctgatttagttagggaaaaaaaaattgaaggaataagggacattagagatgagtctaatagagaagggattagagtcgcaatagatttaaggactggagttgaaccagaaacaatcaaaagacagttgtttaaatatacatctatagaaagttcttttggttttaatacattggctattgtagataataaacctaagacatgtaatcttaaagaatttatagaacaatttttaaaatttagagaagacgtagtaataaaaaaaactaaatttgatttaaaaaaagctgaagatagagctcatatacttattggtttatctatatcagtagaaaatttagataaagttattaaaattattcgatcatcaaaaaat

SEQ ID NO: 294346 - DNA, 979 bp, Unknown
  Bacterial polypeptide expressing nucleotide sequence isolated from the Sargasso Sea
tcgggtggcttacatggtgtgggtgtgtctgttgtaaatgctctttctgaggaattaacacttaaaatttgcagagatggtgggcaatatgaacaaaaatatgcaaacggtaaagctcaaaccaaactcaaaaaagttaaaacctcaaaagaaacaggtacagagatcacatttaagccatctaaggaaatattttcgttcgttaactttgatatagataaaataaataaaagagttcaggagttatcttttcttaatgcaggtgtgaatattcttgttgaagataagaaaacaggcaaatctaaaaagttctcaaacagtggaggcctatctagctatgttaagtttttaaaaggaagaaaacaaaacatatccgaaatatttcactgtgaaggagagcaagatgggcttagtgttgaaatagcgcttcagtggaatgatgcatactcagaaaacgttctttgttacacaaacaacatacctcaaaaagacggcggaacacatctttcaggatttcgatcaagtttaacaagagtgatgaaaacatttatcagaaaggaagaattaaataagaaatcgcctgttgagttactcggtgaagatgttagagagggtttaacagcaatagtttcagtgaaaatacctgatcctaaattctcatcacaaacaaaagaaaaactcgtttcctcagaggttgagagtgttgttagcaatgtttttaataagaattttaatgaataccttttagaaaatcctaaggaagcaatgtcaattttaacaaaaatatctgaagcagctttagctagggaggcagcaagaaaagctagagaaatgactagaaggaaaggggttttagaggttgcaggtttaccaggaaaattagcagattgccaagaaaaagaccctgcgctgtcagagatatatatcgttgagggtgattccgcaggtggatcagccaaacaaggaagaaatagacaaa

SEQ ID NO: 294347 - DNA, 748 bp, Unknown
  Bacterial polypeptide expressing nucleotide sequence isolated from the Sargasso Sea
atgagtgattttgctaaagaaataatatctgtaaacatcgaagatgaacttaaacagtcatatttaagctatgctcttagcgtcatacatggaagagcacttcctgatataagagatggcctcaaaccagtccatcgaagaatattatatgcaatgtatgatcttaaaaatttctacaacaggccgtataaaaaatcggcaagagttgtaggtgatgttattggaaaataccatccccatggtgactcagctgtttatgatgctatggtgagaatggctcaagatttttcaatgcgatacccaattgtagagggtcaaggaaattttggttcaattgatggcgatcctccagcagcaatgagatataccgaggtgcgtatggccaaaattgctgatcaaatgcttggagacattgaaaaagatacagtttcatattcacccaattatgatggtagcgaaaatattcctgatgttttgcctactaaaatacctaatttgcttatcaatggctcatcaggtattgcagttggtatggcaacaaacatacctccacacaatttgactgaagttttaaacggttgtgtaaatcttatcaacaatccaaaaatatctattgatgaacttataaaagatatatctggacctgattttccaactggtggaacaaaattgatggaaaagctggtatttacgaagcttataaaactggaagaggaattattcatatcagatcaaatacttctattga

SEQ ID NO: 294348 - DNA, 898 bp, Unknown
  Bacterial polypeptide expressing nucleotide sequence isolated from the Sargasso Sea
tgatgaagccttagcaggttactgcaaaaatatagaaattgatattaacaaagatgatactgtaacggttaaggatgatggtagaggcatacctgttgatatgcataaaggtgaaaaaaaatctgcagcagaagtaataatgacacaattgcacgcaggtggaaagtttgatcataattcttataaagtatcaggaggcctccatggagtgggtgtttcagttgttaatgccctatccgaaaatcttaaattagaaattgatagagatgggaaaaaatatttcatggaatttaaaaatggaaaagctagatctccacttaaagtaataggaaaatctaaaactagtggaacaaaaataaatttttttccttctaaagaaattttttcctcagtaaaatttaactcaaatattatacaaaaaagaatgagagaacttgcttttcttaacaaaggtataaagatctctgtaaatgattttactcaaaaaaaagagaagaaaattgaatttaaatttgagggcggaattgttgaatttgtaaattatctagatgaaaaaaaagagaaacttcaaaacaaaaatggaaatgatttatttaagaagccaatatttattgagggaaagaaaaatgatattttgcttgaatgttctttaaagtggaacgcaggttatggagaagatgtaaattcatatactaataatatatttcaaaaagatggaggaacccatttactaggatttagaagtgcattaacaagagtaattaataagtatgccaccgaaaataatttgcttaaaaaaaataaactttcaatttctggtgatgatataaaagagggtttaacttgtattttatctataaaaattcctgatccaaaattttctttcaaacaaaagata

SEQ ID NO: 294349 - DNA, 640 bp, Unknown
  Bacterial polypeptide expressing nucleotide sequence isolated from the Sargasso Sea
atgacaaataacaatacatatcaggcggattccatcaaagttttaaaaggtcttgaagcggttagaaaaagaccgggtatgtatattggagatacagatgatggaactggtttgcatcatatggtttatgaagttgttgataactcaattgatgaggcattagcaggatattgtaaaaatattaatgtgaaaattaattctgatggaacaattacagtaaatgatgatggtagaggtattccagttgatatccataaaggagaaaaaaaatcagcagcagaagtaattatgacccaacttcatgctggtggtaagtttgatcatgactcgtataaagtttcaggtggattgcatggtgttggtgtttctgttgttaatgcactatcagaaaaattacaattagaaatatttagagatggaaaaaaacactatatagaatttaaaaacggagaagctaaagctccattgaaagtggtaggaagagcaaaaaatactggaactcaaataacttttttaccttctaaagaaattttttcttcaactaaatttagtgcaaatattttaataaaaaggatgcgagaattagcgtttttaaataaagggattaaaattatttttacagatgcaaaagttcaaaaaa

SEQ ID NO: 294350 - DNA, 1102 bp, Unknown
  Bacterial polypeptide expressing nucleotide sequence isolated from the Sargasso Sea
aacaggcgttgaattaattatgtgtaagcttcatgctggagcaaagttctctggagaagattatggtttttctggagggcttcatggagtcggagtttctgtagtaaatgctttatccaccaaacttaatgtaaaaattaaacgtgattcaaaagagtatgaaataaatttctctgccggagacaaagacaatgatttgaaatcaattggtgatgttggagctacgaattcaggaaccacaattagattttatccagacaaacaatacttcgaaacattagagataaacaaaaagagcttaaaacatcttctaaaggctaaggcagttctttgcccaggtcttcaaatagattactttgatgaaaaaaagaatgagagaattaaatggatttttgatgagggactgagtgactacctcgatgagttttcaggttgtaatgagaaacttcttgatgaaactattattctttctaagacttccgatgatcaagcattagatgtagcagtgaattggactgaagaggcttcaaataatttgctcaaagaaacttatgtgaacttaattcctactgcattaggtggctctcatttaaatgggtttaaatctggtcttcttgaggcaataaaagaattctgcgactacaggaatttgattccaaaaggtataaaaattaactcggatgacattcttgctaactgcatttttgttatttcctcaaaattaaaaaatcctcagtttgctggtcaaactaaagagaggcttgattctaaagatcatatgagctttgtttcatcttcaacaaaagattctctaagtatttggcttaaccaacataccgaagagggtgaaaagattgcagatcttgcaattgccgctgctcaaaagaggattaaaagctcaacaaaagttgatagaaagaaaacatttaaaggcccggctcttcctggaaagctttcagactgtaactgcgataatatcgaagaaagcgagctatttttagttgagggagactcagcaggagggtctgcaaaacaagctcgagatagaaggtttcaagcaataatgcctttaagaggaaaaattcttaatacctgggattag

SEQ ID NO: 294351 - DNA, 757 bp, Unknown
  Bacterial polypeptide expressing nucleotide sequence isolated from the Sargasso Sea
atgagtaaagaagaaagtctaccgattggaggttacgcagaaaaagcatatttggaatactccatgtatgtaattctagacagagctttaccttttgtaggagatggattaaaaccggttcaacgaaggataatatatgccatgtctgaattgggtctaaaatcttcggctaaattcaaaaaaagtgctaggactgtaggtgatgttatcggaaaatttcatccccatggtgacagtgcagcttacgaagcaatggttttgatggctcaaaatttttctactagataccctttaatagaaggacaaggaaattttggatctttggatgacccaaaaagttttgcagcaatgcgatacacagaatgcagactatcggcttattctcagaatcttttaactgaaatatcacaaggcacagttgactggatgcctaattttgatggaactttgatcgaaccaaaatttttgcctgcgagattaccgaatgtacttttgaatggagcatctggcattgctgttgggatggctacggatataccgcctcataatctcaccgatgttgtaaaagctacaattgcacttttggaaagtccaaaaatgtcaattaaagaattgatgaaatatatccctagtccggattttcccaccaaggcaaaaataatttcaactcctgatgagattgaggaaatttatacaactggaagaggttctataaagctaagagccacttatgacgtagaaaatggagaaatcgtca

SEQ ID NO: 294352 - DNA, 992 bp, Unknown
  Bacterial polypeptide expressing nucleotide sequence isolated from the Sargasso Sea
caatatccatcaaaaagacggaggaactcacttgttaggttttagaagcgctatcacaagagtaattaacaaatatgctactgatggaaatctattaaaaaagaataaagttacaattgaaggtaatgataccagagaaggtttaacgggtgttttatctgtaaaaattccagatccaaaattttcttcacaaacaaaagataagctcgtttcttcagaaattagatttattgtagaatctatagtgactgataaattgtcaacttggtttgatcaaaatccaggaattagaaaaatagtattattaaaaatagttcaagctgccattgctagagatgttgcacgaaaagcaagagaaggagtaagaagaaaaggatcattagaattatcagggctaccgggaaaacttgctgactgtcaaataggtaaagctgaaggtacagaattattcattgttgagggtgattcagcgggaggctcagcaaaacagggaagaaatcgtgaatttcaggcagtacttccattaagaggaaaaatattaaacacttacattgatacaaacggttcaaaaaacagaaatggtaatgggcaagacgcacaaacaaaagctttatcaaaaatgatgtcttctaatgaaattgttactttaataaatgcgttgggtaccggatcaaaggatttcaatattgataatcttagatatgaaaaaattgttataatgaccgatgctgacgtagatggatctcatataaggactcttttgttaactttgtttaataattatccttttaatgagcttatagaaaaaaatcacatttatttagcacagcctccactttataaaattaccaagggttcaaagagctactatataaaagatgataaagaactagagaattttttaattaaatcatcagaaaaaaacaaaaactctattaagaaaaacagtaaagaatttgaaaaatttattcaaaaagaaaaaagtaaaatta

SEQ ID NO: 294353 - DNA, 520 bp, Unknown
  Bacterial polypeptide expressing nucleotide sequence isolated from the Sargasso Sea
tatgagcaataaaaacacaaacacagaatatagcgcagaaaatataaaagtacttgaggggctagaagcggttagaaaaagaccagcaatgtatataggagatgttgggaaaagaggtctccaccaccttatttatgaggttgttgacaactcaatcgatgaggctctcgctggctattgcgacagggttattgttgtctttaacccagatggttcggttaccgttgaagataacgggaggggaatcccggtagatatacacaaagaagaaaaaaaacccgcagtcgaggttgttatgacagttttacacgccggcggaaagtttgacaaggggtcctacaaggtctcgggcggtttacacggtgttggtgtttctgtggttaatgccctttctgaatggctgtgggtagaggtaagaagggatggaaaaaaacacagacaagactataaaattggagaaccacaaaacaaattaaaaacaacaggagaagctaaaaaaacaggtacaaaagtttgtttt

SEQ ID NO: 294354 - DNA, 946 bp, Unknown
  Bacterial polypeptide expressing nucleotide sequence isolated from the Sargasso Sea
acctaaaggccttaaattgaatgcagatgatgttcttaataatgcaatttttgtagtttcttctaaattacagaatccacagtttgcaggacaaactaaagaaagacttgattcaaaagatcatatgtcttttgttagcagttcgaccaaggacattttaagtatatggctaaatactcataccgaagaaggcgagcagatagcagaactagcaataatttctgctcaagcaagagctaaggcttctaatacggttgagagaaaaaaaacatttaaaggaccggcattacctggaaaattatctgattgtaatagcgaagatttaaataagacagagttatttttagttgagggtgattcggcaggaggctctgcaaaacaagctagagaaagatcatttcaagcaataatgcctttgagagggaaaatattaaatacttgggagctagaaagtgaagaaataataaaatcacaagaaataaaaaatctttctacagctattggagttttgcctggcaataatgatctttcaggacttcgttatggaaagatatgtattttagctgatgctgattcagatggtttgcatatagctacattattatgcgccttatttttaagacattataaaagtctggtaaaagacggtagaatttttatagccatgccaccactttatagaatagattgtggtaaagaagttttatatgcattagatgaaaaacaaaaagatgatgttgtaaaagaatttaggaacaaaaaaggaaaaccaaagatcaatattcagagatttaagggtcttggagaaatgaacccatcacaactgagagaaactgtgatggatcctaatacaagacaattagtaagactgtcagtgtcagcaaccgataacgctaatgcaatgatggatcttcttttatcaaagaagaatgcaccagcaagaaaa

SEQ ID NO: 294355 - DNA, 877 bp, Unknown
  Bacterial polypeptide expressing nucleotide sequence isolated from the Sargasso Sea
ttagactttttagaacaaaacccctcaattggaaggcgcgttatagaaaaagcccttttagccgcaaggagtagaagtgcggcaagaaaggcgcgggagcttataagaagaaaaagcgcgctcggaggatcctctctcccaggaaagctagcggactgttcaaacagagaccctgttttttgtgagctttatttggtagagggagactcagctggtggttcggcaaaacaaggaagagacagaagaacccaggcgattttgcccctaagaggaaaagtaattaattcagagaaagcaagaattgataagcttctttctaacaatgaggttcaatctatgataaccgcccttggtgcggggtttggtggcgcagaagatgagggtggagaaaaatctgcgggggattttgatatagaaaaactaagataccacaaaattattataatgacagatgctgatgtagacggttctcacattagaacccttttgctaacttttttctacagaaaaatgaaagaaattattgagggtggctttttataccttgcgctccccccgctttaccgcgtttcacaaggaaaaaaagagtcatatgcttatgatgacaacgaaagagaccttttaatcgaaagaatgtcaaaagacaacaaaaacacaaaggtttctattcagcggtataaagggcttggagaaatgaacccaggacaactttgggaaacaacaatggatcccgaaacaagaacacttatgcaagttacggttgaaagcgcaggcgaagcagcagaaacctttcaaaacctaatgggtaatgatgtagaagcgaggcgaacctttatagaaaaaaatgcaaagtttgttgcaaacctagacatataaa

SEQ ID NO: 294356 - DNA, 874 bp, Unknown
  Bacterial polypeptide expressing nucleotide sequence isolated from the Sargasso Sea
cggttcgaccgcatcatctcgtccaaggaagtcggcacgctgatccaggcgatgggtaccggcatccgcgacgatttcacgctcgacaagctgcgctaccacaagatcgtcatcatgaccgacgcagacgtcgacggtgcgcacatccgcaccctgctgctgacgttcttccaccgccagatgcccgacatcatccgcgccgggcacctcttcatcgcccagccgccgctctacaaggtgtcgaagggtcgctcggaggtctacctcaaggacggtgcccacctcgaccgctatctggtcgaggccggcctcaacggccgcgtgctcgaaacctcgggcggcgcgcgtctcgggtctgacctcgaagcgctggtcgagcacgcgatccgcatgcgcaacctgatggccttcgtgccacgccgctacgaccccgtcatcatcgaggcactgggcctcgccggcgtgttcgagcccgacctgtcgatcgaggcccgcggcgccgccctcacccgcaccgcggcatggctcgatcgcggcgacaccgaagcccgctggtcggcccgcctgtccgaagacggcaccgtcgaggtcgaacgcctgtggcgcggcgtcaccgatcaccacaagatcgaaggcagcttcctctcgagcgccgaggcccgcaagctcgcccgcctcgccgccgagaacgccgaagtctacgccggtaccgcgcgcctggtgcgcgccagcgcagccgaggcagagcccgaggcgaccgtggatgcagacggcgaggacgaacccgtcgtcgctgcccgcccgacccagggcgcggacgtcatcacccgtcccagccagctcctcgcgctggtgcttgccgccggtcgcaagg

SEQ ID NO: 294357 - DNA, 932 bp, Unknown
  Bacterial polypeptide expressing nucleotide sequence isolated from the Sargasso Sea
aacacctcggacgacaatgcctacaaggtctcgggcggccttcacggcgtcggcgtttcggtggtgaacgcgctgtcggaatggctggagctgacgatctggcgcgagggccaggagcactggatgaagttcgcgcacggcgatgccgtggcgccgctggtggtcaagggccccgcccccaaggccgaacagaacccggacgataacggcttcaagaagggcacgcgcgtgaccttcctcgcctcgaccgacacgttcaagaacgtcaccgagttcgacttcgacaagctggagcaccgctaccgcgaactggcgttcctcaattcaggcgtgcgcatcaagctgcgcgacaagcgccacgaagaggtcaaggagcacgacctgttctacgaaggcggcatcgcggccttcgtgaagtatctcgaccgcaacaagaccgcgctcttggccgagccgatcgcgatctcgtccgagcgcgacggcatcggcatcgacgtcgcgctggagtggaacgattcgtactacgagaacgtcctgtgcttcaccaacaacatcccgcagcgtgacggcggcacccaccttgccgccttccgcgcagcgctgacccgcacgctcaacaactattccgagaagtcgggcctgctcaagaaggagaaggtctcgctgacgggcgacgacatgcgcgagggtctgaccgcgatcgtctcggtcaagctgcccgatcctaaattctcctcgcagaccaaggacaagctggtctcctccgaagtgcgccagcccctggaaagcctgatggcggaccgcatgaacgactggctggaggagaaccccgcccatgccaagtcgatcgtccagaagatcatcgacgccgccgccgcccgcgaagccgccaagcgtgcccgcgaaactgaccgcccgcagggcgcgatgga

SEQ ID NO: 294358 - DNA, 652 bp, Unknown
  Bacterial polypeptide expressing nucleotide sequence isolated from the Sargasso Sea
ggaggtacagctaaacagggaagagatagaagaactcaggccattttacccttgcgcggaaaggttattaattcagaaaaggcaagagaagataagcttttagctaacaatgaaattcaatctatgataacagcactagggtgcggttttggagaagacgaagacgacccgaatagcttcaaccccgaaaaactaagataccataaaatagtaattatgacagatgcagacgttgatggtagtcatataagaaccctattattaacattcttttggagaaaaatgaaaagccttgttcagggtggttatttatatatggcaatgccgcctctttataaattaaagcaaggcaaaaaagaaagatatgcatatacagacgaagaaagagatagtcttttaagaaggcttgaatctgaaaacaaaacaaaaatcgatattcaaagatataaaggtttaggagaaatgaacgcagatcagctctgggaaacaacgatgaatgcagaaaccagaactctaattcaggtaaccgttgatcatattatggaagaggaaacaaacgtaaggtttagagaattaatgggttcagaggtagaacacagaagaagatttataacagaaagagcaaagtttgcaaccaacatagatatataaa

SEQ ID NO: 294359 - DNA, 942 bp, Unknown
  Bacterial polypeptide expressing nucleotide sequence isolated from the Sargasso Sea
aacaggtcctaatggattacaccacttaatttgggaagtggttgataactcagtggatgaagcaatggcgggaagatgtaattcaatagaagtccgtcttgagaaaaatggatcagtaactgttacagacaatggaagcggaatacctgtaaaaccaagaccaaaaacaaaagaatcagcactcacaactgtcttaacaacactacatgccggtggtaagtttgaatcagaagcatatagtgttagtgggggtctccacggcgtcggcatatctgtagttaatgctctttcagtctttgtaaaagcggaagtacaaagagatggtttcttttggaatcaaaattttgactttggtaagccagtttcaaaaataaaaaaaggaaaagctacaaaaaagacaggaacaaaaataaattttttagctgacccagaaatttttgaagaaacacagagttttgaatataacattgtatcggagagactaagacaaacagcatttttaaacaaaggattgaagatcgttcttgtagacaacagagttaaaccagccacaaaggataaatttttatacaaaggaggtttggttgattttgtggactatttgaatgatggatttgaggttcttcacgaaaaaacaatatctttttctgatcaaagcaaggattctgaaatagaagttgctcttcagtggaaaaacgaagacgatgtgaatattaagagttttgccaacaatatacacacacttgagggagggactcacgaagaaggcctaagaacagcgataacaaaagcgattaatgactttgcaaaatcaagaaacctacattccgacatttcattaactggtgacgatatcagagaaggaattaccggagtgatttccgttagggtaaaagagcctcaatttgaaggccagacaaaaaccaagctaggaaacacaga

SEQ ID NO: 294360 - DNA, 986 bp, Unknown
  Bacterial polypeptide expressing nucleotide sequence isolated from the Sargasso Sea
aatagagatggtaaaatttacaatttagaatttagtaatggtacagtaacaaaaaaattaaatgtcattggtacttctccagaaaaagaaaaaaatttttacactggaactaaaattacttttttacctacaaaaaatatttttaaaaatattgattttaattttaaaattatagaaaaaagacttagggaacttgcatttttaaatacaggagtaagtatagatcttatagataagaggcaatctcaagaaatcaaaattaattttaaatatgatggaggtattaaagagtatgtaaattttattaataatggtaaaaatgtaattcacaataatccaatttcttttaatggtgagaaaaataacatctcaattgaatgtgccttgcagtggactgatagttaccatgaaaatactatttgttttactaataatatagttcaaagagatggtggtactcatcttgcaggttttaggggtgcattaacaagatcaattgtaaactatataaataaaaatactaaaaactcaggtagcattacaggtgatgatgcaagagaaggacttacatgtattatttcagtcaaattaccagatcctaaattttcaagtcaaacgaaagataagcttgtatcatcagaggttagacctgtagttgaatcaattagtttagataaaattgagcaatggattgaggaaaatccaagtcaaattaaaaaagttatagataaaataattgaagcgtcaaatgctagagaagcagcaagaaaggctagggagctaacaagaagaaaaactggtttggaaaatacatcacttccaggaaaacttgctgattgtcaggaaaagaatccagaattatcagaattatttatagtagagggtgattctgcaggcggatctgcaaaacaaggtagagatagaaaaaatcaagcaattttacctcttaggggaaaaattttaaatgtagaaagagcaaagaaaaa

SEQ ID NO: 294361 - DNA, 990 bp, Unknown
  Bacterial polypeptide expressing nucleotide sequence isolated from the Sargasso Sea
cccagattaatcaagaggatctttttggttcttctggatcaattttatctgtgtttatagagaacccagagtttcagggtcaaacaaaagagaaattatcaagcatagagcctgggcgtaaaattgaaatgaaagcaaaacaactttttgaacaatggcttgctaaaaaaactaggtctgcagaagaattatttcaatacgcttacaatcgatctcaattaagactgcaaagtaaatcaaaccaaattatagaaaaaaatataaaaagaaaaaaaacaaccttgccaggaaaacttgctgattgttcaattgatggaaataaagggactgaaatttttcttgttgaaggtgactcggcaggaggatccgctaagcaagctagagatcgacaaacgcaggccatattgcctttaaggggaaaaattttaaatgtgattagcgctggacgagataaaataaatgcaaaccaagaaattacagatttaatgcaggccattggatgtaaacgaggagataaatttaatagtaaagacattagatatgaaaaaattataattatgactgatgctgatgttgacggagctcatatatcaactttattgatggcgtttttctataaagagtttccaaagcttatagatgaagggcatctatatttatctgttccccctttatacaaaatatcaaaaggagcaaaaacgtattatgctgtaaatgataagcacaaagatgaaataataaagaaagaatttaaaaattcagacgttacgataaatagatttaaaggattgggtgaaatgatgcccgctcaattgaaagaaacaactatgtcacaagaaaatagaaccttattaaaagttcaaatagcctcaaaagataaaaagaaaactcataaatctgtagattctttaatgggtaaaaaacctgagttgagatttaagtttattgtcgaaaactctaaaaaaattgcagctgagagtattctctaag

SEQ ID NO: 294362 - DNA, 1105 bp, Unknown
  Bacterial polypeptide expressing nucleotide sequence isolated from the Sargasso Sea
cttaacgctggagttctgatcaatgtagaagataaaaaaacaggaaaatcaaagaagtttaaaaataatggcggattatcaagttatgtgacgcatttgaaaggaagaaaacagcctgtttctgaaatatttgagtgttcagcaatagataatgatgttggtgttgaaattgcgatgcaatggactgactcatattctgaaaatgtactttgttacactaataacatacctcaaaaagatggtggaactcatttagcaggctttagaggaagtctaacaagggttttaaaagcctttataaaaaaagagaatgctaaaaaaacacccacagacttacttggagaagatgttagagagggtttgatagcaataatttcagtaaaagttccagatcctaagttttcatctcaaaccaaagaaaaacttgtgtcatctgaggttgaaagcgttgtaagtacagtttttaacaaatattttaatgaattccttcttgaaaatcccaaagatgcaataagtattatttctaaagtttctgaagctgcacttgcaagagaagcagcaagaaaagcaagggaaatgacaagaagaaaaggagttctagagatagcaggattaccgggtaaattggcagattgtcaggaaaaagatcctacactctcagaaatttacatagtagagggtgattcggctggtggatcagcaaaacagggcagaaatagaaaaaaccaagctattttacctttaaaaggaaaaattattaatgttgaaaaagcaagaatagataaagttttaggttctgcagaggtgggaacattgataaaagcactaggttgcgggattggcaaggatgatttcgatatcaataatcttagatatcatagaataataataatgacagatgctgatgtagatggatcacacataagaactctacttttaacgtttttctatagacaaatgtatgagattgtagaaaaaggccatatatatattgctttgccacctttgtacaaaataacaaaaggtaaggagttttactatgcttctgatgaaaatgaaaaagataaagcaataaaaaaactctctaagtctggttcacgaggtt

SEQ ID NO: 294363 - DNA, 913 bp, Unknown
  Bacterial polypeptide expressing nucleotide sequence isolated from the Sargasso Sea
atgaaaaataaaaacaattatcaagcagactctataaaagttttaaaaggtctagaagcagtaagaaaaagacctggtatgtatattggagacactgatgatggcactggccttcatcatatgatttatgaagttgtggataattcaattgatgaagcattggcaggatactgtaaaaatattgaaatttatataaattcggatggaacaattactgtgcgagatgatggtaggggaataccagtagatattcacaaaggagaaaaaaaatctgcagcagaagttattatgacacaacttcatgctggaggtaaatttgatcatgactcttataaagtttctggaggactacatggagttggggtttcagtagttaatgctttatcagaaaaattaaaattggaaatcaacagagacggcaaaaaatactttattgaatttaaaaatggaactgcaaaagaacctttaaaaatagttggcaaatctaagaataatggtaccgaaataacttttttaccgtcaaaagaaattttttcctcaattaaatttagttttggaataattgaaaaaagaattcgtgaacttgcttttttaaataaaggaataaaaatttcaataactgatacaactcaaaaaaaacaaaaaattaaagaattcaaatttgatggtggaattatacaatttgttgattatctagatgaaaaaagagaaaaattaaaaaataaaaatggaaatgatctttttaaaaaacctatatatatagaaaaaaaaaaggataatattgaacttgaatgttctttaaaatggaacgcaggatattcggaagatgtttatccttttacaaataatatttatcaaaaagatggaggaactcatattttgggttttagaagtgctttaacgagagtaatta

SEQ ID NO: 294364 - DNA, 958 bp, Unknown
  Bacterial polypeptide expressing nucleotide sequence isolated from the Sargasso Sea
gtacatagaagaataatctattccatgtatcaacttaagctttttaacgattctccatataaaaaatgtgcaagaattgttggagatgttatgggaaagttccatcctcatggtgatcaagcaatctatgatagtttagtaagattatctcaagatttttctacaagagccccattgattgatggtcaaggaaattttggaaatattgatggagataatgctgcggcaatgcgttatactgaagctcgattagaaaaaatagctgattatttttttgatggcattgaagaaaattctgttaatcttatagaaaattatgatggtcaaaatctagaacctgaaattctgccggctaaattacccaacatacttcttaatggatctacaggtatagctgttggtatggcaactaatattccacctcataatttgtatgaattaaatgaagctataataaaattaattaaaaatcctaaaatatcattaaatgaccttctaaaaaatttctcaggcccagattttcctacaggtggtgaaataatttttacacctaatgaaaaaaaagaaatttacaaaaaagggagaggatctttttatattagatccagatttgaaaaagaaaatttaggcaatggtacttatcaaattgttatcaaagaaattccttatcaagtaaataaaacaagattaattgaacaattagcaaatttgattaataataaaaaattaccactagatgatgtaatagatgaatcagatgaaaacattcgaatagttttaaagcctaaaaatagaaatattgattcaaataagttaattgaattatgttttaaactatcagatttatctattaaattttcttgtaattttaatgttttagtcaatgggattaatccaaaacaattaggtttaaaagatattttaatttattttattgaacatagatttacagcaatta

SEQ ID NO: 294365 - DNA, 993 bp, Unknown
  Bacterial polypeptide expressing nucleotide sequence isolated from the Sargasso Sea
ctcaccattaatctcaatgacgaaagaacaaacaaagcagattcttattgttatgaaggaggcttaaaggattttgttcgtcaccttaataaaccacaaaaaccaacacatcaaagcattgcatatattaacaagaaatctaagaaagacggagatattgaggtagaggttgccatacaatggaatgagtcttatagagaaaatacattttgttttgcaaacacaattcgacagagagacggagggacacaccttgctggatttaggggcgccttaacaaggacaatcaacacttatattgataaagaaattccaaaaaatgatacgtctgtagtgggagatgactgtcgagaagggatgacagcaatcatctctgttaagcacccggacccgaagttttcatctcaaaccaaagataagttggtttcttccgaggttaagggtgtcgttgaatctgcagttaataaacacctcaaggagttcttagaagaaaaccccgtagaggcaaaaataataatcggaaaaatattagacgcggctcgcgccagggaagctgcaagaaaagccagagagatgactagaaaaaaaggagctctcgatattgcgggattgccaggaaagcttgctgactgccaagagaaggatccttcactgagcgagctttttattgttgagggagattctgcaggaggctctgccaaacaaggtagagacaggaaaacacaagcaatattgcccctaaagggaaaaatcttaaatgtagaaaaagcacaaagagcaaaaatgtattcttctgttgagattggaacacttattacagcattaggatgcggtattcacgatgaatttgatatggataaccttagataccataaaattgttatcatgactgatgctgatgttgatggttctcatattaggacactcttattaacattcttttacagagagcttcaagatcttatcagcggcggctacttgtatattgcacaa

SEQ ID NO: 294366 - DNA, 1015 bp, Unknown
  Bacterial polypeptide expressing nucleotide sequence isolated from the Sargasso Sea
accgctgagcgattaccaagcccagcgccgtggtggtttggggaaagccgcaactaaagtgaaagacgaagatttcgttgaaaaactgctggttgcgaatactcacgataccattctgtgcttctcagacttcggtaagatgtactggctcaaggtctatcaattaccgctggcgagccgcacatcgcgcggtcgtccgattgttaacctgctaccgctgtccgatggtgagcgcattacggcgattctaccggtgcgtgaatacgcagaagataagtacatcatcatggcgacctctaacggtaccgtgaagaagactgcgctgacggcttacagcaacccacgtgctaacggcattatcgccgtgaacctgaaagacggtgaccaactgatcggtgtcgatatcaccaatggtgatgatgagatcatgttgttctcgaatgaaggtaaagtggttcgctttaaagaaggcgaagaagtggccgtgctcgatgaaaacggtaaccctgtgctggatgaagaaggcaacccacaaatcaacttcaagggcgtgcgtccaatgggccgcggcgcgaccggtgttcgcggtatcaagcttgaagaaggtcaaagagtggtgtctctcatcgtacctaagggcgatggcgctatcttaaccgtgactgaaaacggctatggtaaacgtaccgaactgtctgaatacccatcgaagagccgcgcgaccaaaggtgtggtatcgatcaaggtgagcgagcgtaacggtgcggtggttggcgcggtacaagttggcggtaatgacgaaatcatgctgatcagcgataaaggtaccttagtccgtacgcctgcgaacggtgtgtctattatcggccgtaacacccaaggtgtgaccattatccgtactgcaagtgatgagaaagtggttggtctgcaacgtatcgatgagatccaaggcgacgaagatgaagtcgagctggatgaaaaccggtatgccaatagtcccccagttgtcgctgaa

SEQ ID NO: 294367 - DNA, 794 bp, Unknown
  Bacterial polypeptide expressing nucleotide sequence isolated from the Sargasso Sea
ctcttatacaaataatatttttcagaaagatggaggtactcatcttctaggatttagaagtgctttaacgagggttataaataaatatgcaaatgaaaataatttattaaaaaaaaataaactatctatatctggagatgatataaaagagggactaacatgtattctatcaattaaaatcccagatcccaaattttcatcacaaactaaagataagcttgtatcttcagaggtgagaccaatagtggaaacaattataaatgaaaaattgtcaatttggtttgatcagaatcccccagtaactaaagtaatattggcaaaagttatacaagcttctttagcaagggatgttgcaagaaaggcaagagaaaatgttagaagaaaaggtgctttagagttaacaggattgccaggaaaattagctgattgtcaaatttcaaagcaagaaggaactgaactttttatagttgaaggtgattctgctggaggttctgccaagcaaggcagaaatagagaaaaccaagcagtcttgccactgagaggaaaaatactaaatacttatgttgattcaaatggatcaaaaagaaacggaaacagtgcggacttaaaaacaaaagcactatcaaagatgatttcttcaagcgaaatagtaactttaattaatgctttgggactcgatcctaaagttgaagatatagatttaaaagatttaagatatggtaaaattattataatgactgatgccgatgtagacggatctcacataagagctcttttgttaactttttttaata

SEQ ID NO: 294368 - DNA, 397 bp, Unknown
  Bacterial polypeptide expressing nucleotide sequence isolated from the Sargasso Sea
attcctacagcaattcctcaagctatttacgacgcacttgtaaggatggctcaagatttttcaatgagcctaccattagtagaaggccaaggtaattttggttctattgatggtgatccgcctgctgctatgaggtacactgaaacacgattatctaaagtgtctcaacatttagtagatgatataaacaaggaaacagtacaatttaaaagtaattatgatgaaactgataatgaaccagaaatcctgcctgcgcaatacccaaatcttcttgtaaatggagctggaggaattgctgtaggaatggccaccagcattccaccacataacttgggagaaattattgatggaacattggctctaatagaaaatagagatatcaaaataccagaattga

SEQ ID NO: 294369 - DNA, 892 bp, Unknown
  Bacterial polypeptide expressing nucleotide sequence isolated from the Sargasso Sea
tatgaagatgtatatccctatactaataacatttaccaaaaggatggaggtacacacttattaggttttagaactgcgcttacacgtgtgataaataaatatgcatctgagcaaaatttattaaaaaaaaataaagttacgctttctggcgatgatgtaaaagaaggtttgacctgtgtcttatctattaaaatacctgatcctaaattttcatctcaaactaaagataagttagtttcctcagaagttagaaatattgttgaaactattgtcagtgaaaaactctctatatggttcgatcagaatccctctgtatcaaaaattattttaacaaaaattattcaagcagctgtagcaagagatgttgcaagaaaagcaagagaaaatgttagaagaaaaggtgctttagagcttactggtctgcctggtaaattagcagattgccaaaattctaaacaagaaggaacagaattatttatagtagagggagattctgcggggggatcagctaaacaaggaagaaatagagaaaaccaggcagttttgcctcttagaggaaaaatactaaatacatttacagaaataaatggatctaagaaaaatggtaattcaaatgatcttagaacaaaaactctttcaaaaatgatttcttctaatgaaatcataacattaattaatgctttaggtttagaccctaagaatgaagagattgatttaaaagatttaagatatggaaagattataattatgaccgatgccgatgtagatggctctcatattagggcattgttattaactttttttaacaataaaccattcaataaattaatagaaaaaggccatgtttacttagcacaaccacctttatttaaggttaatagaggttctaaag

SEQ ID NO: 294370 - DNA, 811 bp, Unknown
  Bacterial polypeptide expressing nucleotide sequence isolated from the Sargasso Sea
cttctaccgagaggtgtaaaactttcacctgaagatgtttggatgggtttgagctacattatttcagtcagaattgaggatccacaattctcaggacaaacgaaagagaaactcagttcgagagctgtttcaggttttgttacaggcctcattaaagatgctttcacgctttggttgaatcaacatcctgaagcgggagaccaaattgtcgcaagggcaattgagaatgctcaaaaaagagccaaaaagaatgtaaaggtaaaacgaaagaaggccacaggtggaccaacattgcctggcaaactcgcagactgtacgagcgacgagcctgatctttgtgaattatttattgttgaaggtgattctgctggcggatctgcaaagcaagccagagatagagtctttcaggcaattcttccacttagaggaaaaattcttaatagttgggaagtcgatgagagcaatctactttcttctcaagaaatcagcaatatttctcaggcactaggtgttgagcctggtgccgatgagcttggtaatcttcgataccataaaatttgtatacttgcagatgctgattcggatggactccatatcgcaacattgatttgcgccctgtttttgaaacattttagaaaattggtcgaagatggtcatgtgtacgtagcaatgccacctttgtatcgaatcgatgttggaaaagaggtgcattatgcgcttgatgagactgagaaggattcgattttaaaggcattagaaaaaaagaagccaaatacgaaaacaaccgttactcgctttaaaggcctgggtg

SEQ ID NO: 294371 - DNA, 894 bp, Unknown
  Bacterial polypeptide expressing nucleotide sequence isolated from the Sargasso Sea
attagctccaatagcttacactggatttctagaagaaattgcatcagaaacggtaaacttctcaaataactttgacggttcacaaaaagaaccagatgttcttccagctcaacttccgtttttatttttgaacggatcatcaggaattgccgttggaatggcaactaatatcccccctcacaaccttggagaaatagtagatgctttaattgctttagtagaaaataaagatataaataataaaaaactctctaaaataattaaaggacctgatttccctactggaggagaattaattaataatcaagcaatagaggaactttacgaaactggaaaaggatcagtaataataagaggggtaataaataaagaagaaataaatttaggcaaaggtaaacacaaaagaaatgcattaatcattacggaacttccttatcaaattagtaaagcaggttggattgaaaaactagctgaacttgttaattcaaacaaaatcaatggtatcgctgatattcgggatgaaagcgatagagatggcatgagaattgtaatagagttaaaaaaagattctaatactgaacttgtaatttccaatttatataaaaaaacaactctccaaaccaactttggtgcaatatttttaactttagtacaagggaaacctgttcaactaaacttaaagcaatatcttaactattttcttgaattccgagaagaaactattagaaaaagaactggttattttctaaaaaatacacttgaaaaactagaaatattagaaggtttgtctaaagcaacaaaagacataaaaagaattattgagattattgaagaatcagaaaattctggagaagcaaaatcaaaactaattgaaattttttcattaagtgaaaa

SEQ ID NO: 294372 - DNA, 934 bp, Unknown
  Bacterial polypeptide expressing nucleotide sequence isolated from the Sargasso Sea
gataagactatatttagcggtaacaaattttttaatccagagaaaatatatgatttagctaaatcaaaggcttatctattttctggggtaacaattgactggaaagcaccaaatattagagaatataatctaaataaaatacccacctccgagaggtttcactttgaaaacggtttgatggatctagttagatctaacacagcggtagaatacaatattacaaatgattattttataggggaagcagatttcaaagaaaaatttgatctaaaggaaaaaggttccattcaatggtgtgcttgtttcaatacttataaccctgtcatcaagtcattttgcaatacaattcctactggcgagggaggaacacacctgactggctttctaaacgcaattgctaagggatttaagtcgtatgttgagctaataggagacaaaaaattctctgcgattaataaagatgacgtactagaaattttatctagctcaatatcggtctttgttgaacaacctcaatttgttggacagacaaaagacaaactatcaaatctggaggtacaaaagaaagttgaaagcttaataaaagaccgtttcgagaattggttagcaaatgacaagtctagaacactactgttaattgaaaacctgcgaatgagggcagaggagagaataaagactaaacaaaaaaaagaaactctaaggaaaacaccattaaaaagacttatgcttcctggcaaactcgcagactgttctatctcagacaaagatggaactgaactgtttctagttgagggcgacagcgctggtgggagcgcaaagcaagcaagaaataggacgacccaagccattcttcctttaaaaggaaaaattttaaacgttgtaggctctagcaacaaaaaagtctccgaaaatcaagagattgatgatctttgca

SEQ ID NO: 294373 - DNA, 667 bp, Unknown
  Bacterial polypeptide expressing nucleotide sequence isolated from the Sargasso Sea
atggcaaaaaaagaaaacaaaaagaaaactggaaaagataaaaaagataataacgattatggtgcagagtccatcaaggtacttaaaggtttagaggctgtgagaaagagacctggtatgtatattggagatacagatgacggaactggtcttcatcatatggtatatgaggtagttgataattctgttgatgaggccttagcaggtcattgtaaaatgatctcagttattttgaatgctgatgagtctgtaaccgttaaggatgatggaagaggaataccaactgagatccataaagaagaaggaatttcagctgctgaagttataatgacacagttacatgctggaggaaaatttgaccaaaattcatataaagtttctggaggtctccatggagttggtgtctcagttgttaatgcattatcggaaaaattagatctatcgataaagagagatggtaaagaacacgctatgtcttttcaaaatggtgaaacggttaaagctttgaaagccgttaaagattgtaaagatgaaaccggaacagaaattactttttatccatctaagtcagtttttacaatgaccgaatttagtcgtagaactttagaagcaagattgagagaaatggcttttctgaattcaggtatatcaatacatttgaagaaaa

SEQ ID NO: 294374 - DNA, 1060 bp, Unknown
  Bacterial polypeptide expressing nucleotide sequence isolated from the Sargasso Sea
ttatctgtgaaggttcaagacccaaaattttcatcacaaacaaaagataaacttgtttcctcagaagtcagaccggttgttgagagtctggtgaacgaaaaattaactgattggtttgaaagaaatccaaatattgcaaaagaaatttttcttaaaatacaaaaagccgctgaagctagagaagctgccagaaaagcaagagagttgacaagaagaaaatctgctttagagataactaacttaccaggtaagctagctgattgtcaggaaaaagacccgtcaatgtcagaaatattcattgttgagggagactcggcgggcggatctgcaaaacagggaagagatagaaagtttcaggcaatattaccactgagaggcaagattcttaatacttggaagtccagaacagataaaattttaggatcacaagaaataggtactttgataactgcgctcggtacaggcataggaccaaatgaatttgattctgacaaattgagatatcataaagtaattattatgacggacgctgatgttgatggctctcacattagaacacttttactcacattcttttttaaggaaatgagaggactgattgataatggtaatttatatatagcaaggccacctttatttaaaataaaaagaggaaaagaagaactgtacataagcgatgaaaacaaccttcaaagatctctaataaaatatggtgctgaggacgtgatatttaaaactgctcaaggcagcaatttaaataaaaaaaatttaatagatattttaaataaaatttctgaagttattgaaatttataataaagtacctgatagatatgataaaaaagttttagagcaaattgccattgcaggatgtctagacataaataaatttattgactcaaaagagaagactaaagaagcaatcaattatatttccaagagagttaatgtcagtcgacctgattatgatagaggttggaaaggtgagtattctaaagaaaaaggatttatatttaggcgtgagttaagaggtttaagagataatataattattgataata

SEQ ID NO: 294375 - DNA, 706 bp, Unknown
  Bacterial polypeptide expressing nucleotide sequence isolated from the Sargasso Sea
atgaatcaaagttattcatcagaatcaataaaagtacttaaaggtcttgaagcagtaagaaaaagaccaggtatgtatattggagatacagatgatggatctggccttcatcaaatgatttatgaagttgtggacaactccattgacgaatctttggctggttattgtgataaaattgaagtacttttaaactcagatgggacagtgacaatttcagataatggtagaggcattccagtagataatcataaggaggaaggaattcctgcagcacaactcattatgacagaattacacgctggtgggaagtttgatcaaaactcctataaagtgtcgggaggtcttcacggtgtgggtgtttcagttgttaatgctttatctgaaaaattattattagaaattaatcgtgaaggcagtatttataatatgcagtttgctaatggtgctgtccttgatacattaaaagaagtaggtggctcagaaataataaatggaaaaacatatacaggaactaaaattacttttttacctgctacaaatatctttaaaaatattgaatttaatttctcgactattgaaaagaggttaagagaacttgcttttttaaatacaggagtaaacattatactcagagacaatagagcagcaaaaaagaaggaaatcagttttaagtatgagggaggtattattgagtatgttaattatt

SEQ ID NO: 294376 - DNA, 988 bp, Unknown
  Bacterial polypeptide expressing nucleotide sequence isolated from the Sargasso Sea
ttctttatggtggaatgatagttactatgagcaaatacttacatttactaataatataagacaaaaagatggtggaactcacttatcagggtttagatcagctctaacacgtgttgttaataattatttagatggtagcaaaagtgtaaaaaaacagaccgtaagtcccaacagtgatgatattagagaaggacttacctcagtattatctgtaaaggttcaagacccaaaattttcatcacaaacaaaagataaacttgtttcctcagaagtcagaccagttgtagagagtctggtgaacgaaaaattaactgattggtttgaaagaaatccaaatattgcaaaagaaatttttcttaaaatacaaaaagctgctgaagctagagaagctgccagaaaagcaagagagttgacaagaaggaaatctgctttagagataactaacttaccaggtaagctagccgattgtcaggaaaaagacccatcaatgtcagaaatatttattgttgagggagactcagcggggggatctgcaaaacagggaagagatagaaagtttcaggcaatattacctctgagaggcaagattcttaatacttggaagtctagaacagataaaattttaggatcacaagaaataggtactttgataactgcactcggtacaggtataggaccaaatgaatttgattctgacaaattgagatatcataaagtaattattatgacggatgctgatgttgacggctctcacattagaacacttttactaacgttcttttttaaggaaatgagaggactgattgagaatggtaatttatatatagcaaggccacctttatttaaaataaaaagaggaaaagaagaactgtacataagtgatgaaaacaaccttcaaagatctctaatacaatatggtgctgaggacgtaacatttaaaaccgcccaaggtagcaatttaaatgaaaaaaatttggtagatatttaa

SEQ ID NO: 294377 - DNA, 893 bp, Unknown
  Bacterial polypeptide expressing nucleotide sequence isolated from the Sargasso Sea
aatgatagaaaaaagttaattaataaaaatggcaatgaagtatttaaaaaacccatttttataagtggcaaaaaaaatgatgttgagcttgaatgttctttgcaatggaacacagggtattccgaaaatgtttttgcatatacaaataacataaatcaaaaagatggtggtacacacttattgggttttagaagtgctttaacaagattaataaataaatttgcagctgataagaatttattaaaaaaaaataaagtagtgttgtcaggagatgatgttagagaaggtttaaccggtgttttatcgattaaaatgaaagatcctaagttttcatcacaaactaaggataaattagtttcctcagaagtgagattaattgttgaaactattttaaacgatagactttctacttggtttgatcaaaatcccagtacaatcagaatagttcttgaaaaagtaatacaagcagcagtagcaagagatgttgcaagaaaagctagagaaaatgtgagaagaaagggtgctctagaattatctggtttaccaggcaagcttgctgattgtcagttaaattcgaaagaaaaaacagagctttttattgttgagggtgattcagctggtggttcagctaaacaaggtcgaaatagagaatatcaagctgttttgcctctcagagggaaaatattaaatacttttgtagaaataaacggtaagcgaaaaaatggttcatcagaagatattcaaaacaaaactctttcaaaaattatgtcatcaagcgaaattgtaactttaataaatgcacttggaaccggatcaaaagaatttgatattaacaatttaagatatgacaaaattattattatgaccgatgctgatgttgacggatcacatat

SEQ ID NO: 294378 - DNA, 804 bp, Unknown
  Bacterial polypeptide expressing nucleotide sequence isolated from the Sargasso Sea
cctagggggattacaccatttagtatatgaggtagttgataactcggttgatgaagcacttgcaggccattgcgatcatatagaaatagttcttcgtgcagatggttctgctttaatttctgataatggacgaggtattccaacagatattcatccaagaacagggaaaagtgccttagaaactgtactaactgttcttcatgcgggaggtaaatttggaagtggtggttataaagtttcagggggtttgcatggagtaggaatatctgtagttaatgctttaagcgaatgggttaatgtgactgtttatagggatggaagcgaatttaatcaaagatttgaaaaaggcgtatcaaagggtgaattggaaactaaaaagcagactggcagaccttctaagaaaggaacaactatttgcttcaaacccgacaaaacaattttttctggaggaattgaatttgaatatactcttctttcatctagattaagggagctagcttatcttaatggcggagtaaaaattgtttttagagatgaaagaaatcaattatcagatggttcttttaaagaagaaatttacttgtatcaaggaggtattaaagaatatgttgaatacatgaatgctgaaaaagattctattcatcctgaaataatttatgttgactcagagaaagaaaatgtatatgtagaagcggctttgcaatggtgttcagatgtatattcagataatattttaggatttgcaaataatattagaactattgatggaggaactcatattgaagggctaaaaacagttctgac

SEQ ID NO: 294379 - DNA, 865 bp, Unknown
  Bacterial polypeptide expressing nucleotide sequence isolated from the Sargasso Sea
tgacggaagtgaggatatacctgatgtattaccaacaaagattccaaatttattagtaaacggatcatctggtattgccgtaggtatggctacaaatattccgcctcataatttaaatgaagtattaaatggatgtattaatttaattaataatccaaagataacaattgatgaactaatcaaagatatttcaggtccagattttcctactggcggaaccatcgatggtaaggctggtatatatgaggcatataaaactggtagaggaattattcatattagatccaatacatccattgaagaggataagtctggcaaacaatccctgataattaacgaaattccatttatggttaataaagcaaaaatgcttgaaaagatagctgagttagtaaaagaaaaaaaaatcgagggaataactgaaatacgagatgagtcagataaagatggcttgagggttgttattgaagtaagaaaaggagactccgtagacgttttagaaaataatctttttgcacaaactcaactagagcaatcttttggtataaattttactgttttatctgaaggacagcctaaagaagttaatctcaaagaaatgctgcaagcatttatcaagcatagaaaagatattattacaaaaagaactaaatatgacttaaagaaggcaaaagaaaggggccatgtggttgaaggcctaatggttgcaatagcaaatattgatgagattatttcaatcattaaaaaatcaaaagacccaaaattagctgctgaagcattatgtaagaaagtttggaagtcaggacctgttgaagctattctaaagaaaaaaggaagcgatgcttgcaagccaaaagggttaagt

SEQ ID NO: 294380 - DNA, 439 bp, Unknown
  Bacterial polypeptide expressing nucleotide sequence isolated from the Sargasso Sea
aatggattttgctaaagaaattcttcctgtaaatattgaggacgaactaaaacaatcatacctaagctatgcaatgagcgtcattcatggaagggcgcttcctgatgttagagatggcttaaaacccgtccatagaaggattctttatgccatgcatgatttgaaaaataattacaataagccctataaaaaatcagcaagagttgttggtgatgttattggtaaatatcatcctcatggagacactgcagcatatgacgcaattgttaggatggctcaagatttctcaatgagatataccctaattcaaggtcagggcaacttcggctcaatagatggggatcctccagcagctatgaggtatacagaagtcagaatgcagaaaatctccgatgaaattttggcagacttagaaaaagaaacggtttcattctcagaa

SEQ ID NO: 294381 - DNA, 862 bp, Unknown
  Bacterial polypeptide expressing nucleotide sequence isolated from the Sargasso Sea
agagacggtggagaatattttcaagagtactcagatggaaagcctaaagcaaaattaaaaaaagtaaaaaaatcagacaagactggaacaaaaataaccttcttcccttctgagaaaatattcacatcgattgattttgaggttgatagaatttacaaaagaattcaagaactgtcatttttgaatgccggagtttcaattaatgttgaagataaaaaatcaggcaagtcaaaaaaatttaaaaataatggagggctatctagttacgtcactcacttaagaggaagaaaacaaacagtctctgatatttttgaatgttcagcaactgataatgatgttggagttgagatcgctatgcaatggacagattcttatactgaaaatgttttgtgctatacaaataatattcctcaaaaagatggtggaacacatttagctggatttagaggaagtcttacaagggtgctgaaatcttttattaaaaaagagaatgctaaaaaaactcctacagatttgcttggagaagatgttcgtgaaggtttaatagcaataatatctgtaaaagtgccagatcctaagttttcatctcaaaccaaagaaaagctagtgtcttcagaggttgaaggagttgttagcaccatatttagtaagtattttaatgaatttttgctagaaaaccctaaagatgccatgagtatcgtaagcaaagtatcagaagctgcccttgctagagaggcagcaagaaaagcaagagaaatgacaaggagaaagggagttcttgaaatagctggattgcctggaaagttggcggattgtcaagaaaaagatcctagcttgtcagagatatatatagttgagggtg

SEQ ID NO: 294382 - DNA, 829 bp, Unknown
  Bacterial polypeptide expressing nucleotide sequence isolated from the Sargasso Sea
gttcaatccatccgtgattggcctgatcctggaaaaggcgatccaggcgttcaatgccgctgaagctgcccgccgggcccgtgaactggtgcggcgcaagagtgttcttgaaagctcaactctgcctggaaaactcgccgattgcagctcccgcgaccccggtgaatccgagatttacatcgtggagggagactccgctggtggctccgccaagcagggccgcgaccgtcgtttccaggcgatcctgccgctgcggggcaagatcctcaacatcgaaaagaccgacgacgccaagatttataagaacacggagatccaggcgctgatcaccgccctaggcctggggattaagggtgaggacttcgacgtgaagaacctccggtaccaccgggtcgtgatcatgaccgacgccgacgtggacggcgcccacatccgcaccctgctgctcacctttttctaccgctaccagaaggagctggtggagggcggctacatctacatcgcctgcccgccgctctacaaagttgagcgcggcaagaaccacacctattgttacaacgagggcgatctgcagaagaccctggagggcttcggcgagaaggccaactacacgatccagcgcttcaagggccttggcgaaatgatgcccaagcagctctgggaaaccaccatggatcccaccacgcgcacgatgaagcgggtggagattgaggatgcccttgaggccgatcgcattttcacgatcctgatgggcgacaaggttgctccccgccgtgaattcatcgaaacccacagcgccgagctggacatggcagctctcgatatttga

SEQ ID NO: 294383 - DNA, 1087 bp, Unknown
  Bacterial polypeptide expressing nucleotide sequence isolated from the Sargasso Sea
acacacctctgaaaagaagtatagcaagtcagcacgctctgttggagaggtgatgggaaagtaccaccctcacggggatcagtcgatctatgacactatggtcaggatggcccaagatttctccctaaggtatccgctcgtcgatggccaggggaacttcggttcgattgatggagaccctccagcagctatgagatataccgaaagtaggctggataaaatctcgaaacacatgctggaggacattgaaaagaaaatagtcgacttccaagccaacttcgacgattccgagatggagccaaccgtacttcccgcaaggttgccaaatctgctattgaatggtagtgacggcatagcagtcggaatggcgacaagaatacccccgcacaaccttacagaggttgcaggagcgattagattgcatgtcaatactatccttaaggagtcgaaagactcctctggtattcccaacatccctcttgaagagtacatgcagcacgtgaaagggcctgactttcccaccggcgcaaccatccatggaattgatggcatcgttgacatgtactctacgggcaagggaaggttccacgtacgctcgaaatgcgatgttctagacgatactagtggtaagaaaatcataattcacgagataccataccaagtcaaaaaatcagacatgctagtccatattgcagaattagtgtcgaaggaagtagtcacgggaatcagagacattcgtgatgagtcttccaaagaagggattcgagtggtgatagaggtgaagagcaattccgatccacatgcagtactgaaccagctattcaaatcaagcagattgcaagagtcatattctgccaatatgatgggcatccttgatggaaagccggttctcctatccttgccggtgatgctacacacgtatgtccgtcacagagaagagataatcgaaaggagagcggttttcgaccttgaaaaggccgagtcgagagcccatatcctcgaaggactagtgaaggcacaagagcgaattgaggacgtactaaaggcaggtagggaaagttctggaagagagcaatttgagtcgata

SEQ ID NO: 294384 - DNA, 1009 bp, Unknown
  Bacterial polypeptide expressing nucleotide sequence isolated from the Sargasso Sea
ttaggtagagacaacatattagacaaacaattagtaaaagagcttgaagaaagctatctaaactattcaatgtccgtcattatgtcgagagcacttcccgacgcaagagacgggttaaaacctgtacacagaagaattttatttagcatgagcgaaatgtctgctatgtggaacaggccttataaaaaatctgccagagtggtgggagaggttttaggtaaatatcacccacacggagacagctctatatatgacgccctcgtaagaatggcacaagagttttctatgagacacgaactagtgcaaggccaaggaaactttgggtctgttgatggcgacagggccgccgcaatgagatatacagagtctagaatgtctagaattggaagtgaacttttaagagatattgaaaaagaaacaataccatggacaacaaattttgatgaaaccctaaaagaaccagcagttttaccagcagtttatccaaacttgttagtaaatggatcagagggtatagctgttggtatggcaacaaaaattccgccacacaatctttctgaattggtgggaggccttgttgaactaatggataatcctgaatgtgaaacaaaagatttaatgaaacatattaaaggtccagactttcctaccgcaggaaaagcgcttggaattaaaggaattcaagacgcatatgaaacaggaagaggaaaggttattatgcagggaagggcacatgtagaaccttcaaacagaggaagagattctttaataataacagagcttccatatcaggttaataaagcaaacctaatagaaaaaattgcagagctagcaagagataaaaaaattgaaggaattgccgaacttagagacgagtcagacaaagacggaatgagggtggtaattgaaaccaaaagagatgcagtgccagaggtggtactaaaccaactgtataaacaaactcagctccaggatactttttggaataattttacttgctctggttgat

SEQ ID NO: 294385 - DNA, 966 bp, Unknown
  Bacterial polypeptide expressing nucleotide sequence isolated from the Sargasso Sea
gacattgaaaagctacgttaccacaaagtcattataatgacggacgcggataccgatggttcacatattaggacgctacttctaaccttcttcttcagacaaatgccacaattgctcgaaaacggacacatctatatcgcgcaagccccactatacaagatgaaaaaaagcggtcgtgaggagtatttaaaagatgaccttgagctagaagagtattacttgcagggagcagttgacgatgcgaaattgatgattaatgaatctgcaccgcccatacaagctgacaaactttacgagctgatgaggctctacacgaatagtctgaaaatactgcacgggaatgctcgagaactaccaatagaactatctgagtcctttcttaaaatcccaatgtgcgaggcgagcaacttaagtgatgagactaaattgcaagattggtgcgatgcgttagaaaaagcgataggtcaaacgccagaaaatcagctttcagttagagttgctcgagggagtgaatcggagtcggaagaaagtcaaagtgaagaagagagcactaatttatatgtatcgatagaaatgatcataaagggggctcgaactaacattgaactcaagaaatcattttttgaaagtaggaattacaaagctttagagcctgcggtaacgcaactggaaggattgcttgaggaaaacgcgtcgatagaaaggggaggaaaaatgttatcaaccccgatttacttctctgatgtctattactggttgatggaagaagctaaaaagggagttaacgttcaacgatacaaaggtctgggcgaaatgaacgccgaccagcttcaggaaaccaccatggatcctaatgcaaggagaatgcttaaaatatcagttgaggacgctgtcggcgcagaccgtatcttcaatacgcttatgggagatcaggtcgagcctcgcagggactttatcgataaaaat

SEQ ID NO: 294386 - DNA, 898 bp, Unknown
  Bacterial polypeptide expressing nucleotide sequence isolated from the Sargasso Sea
atgtcattactaaataataaaagctaccaagcagactcaataaaagttcttaaaggtttagaagcagtaagaaaaagacctggtatgtatattggtgatactgacgatggtacaggtcttcatcatatggtctacgaagttgttgataattcgatagacgaagctcttgcaggatactgtaaaaatattgaagttagtattaattctaatggttcagttacagttaaagatgatggaagaggcataccaatagatatgcacaaaggagaaaagaaatcagctgcagaagtaattatgacccagcttcatgctggaggtaaatttgatcatgattcgtacaaagtatctggaggactacatggtgttggagtttccgttgtaaatgcactttcagaatcattaaaattaaatattaacagagaaggaaaaaaatattttatagaatttaaaaatggagacgcaaaatcgccattaaaacaaatcggtaaatctaaagaaaatggtacagaaattatttttttaccttcaaaaaatattttttcttcaacaaaatttagtttttcaatattagaaaaaagacttagagaattagcttttttgaacaaaggaataaaaataattcttaatgattattctcagaaaaaaacaaaatctgaagagttcaaatatgatggaggaatattagaatttgtagagtatttagatagtaaaagagaaagtcttaaaaataaaaatgaaaacgaattatttaaaaaacctatataccttgagggatcaaagaataatataaatatacaatgttcactaaaatggaatgctggatacggcgaagatatttacccttttacaaataacatttatcaaaaagatggtggtacacatctttttgggatttaga

SEQ ID NO: 294387 - DNA, 901 bp, Unknown
  Bacterial polypeptide expressing nucleotide sequence isolated from the Sargasso Sea
atgagctcatcttatctttcttatgcaatgagtgttattgtcagtcgagctttgcccgatgtaagagatggattaaaacctgttcatcgtagaattttatacgctatgtataaaggaggatatgactggtctaaacaatttagaaaatctgcaagaattgttggagatgtaattggtaaatatcatcctcatggagatcaatctgtttatgatgctttagtaagaatggtacaagatttttctatgagtttacctctggtccaaggtcaaggtaatttcggatcaattgatggagatccagcagcagcaatgagatatacggaaacaagactctcaaaagtttctcagtttttaattgatgacattgagaaaaacacagtctcatacaaaagtaattacgacgaaactgaaaaagaaccaactgttttaccagctcaatacccaaatcttttggtaaatggtgctggtgggattgccgtaggtatggcaacgagtattccgcctcacaatctaggtgaaataattgatggaacactagctttgattgaaaataaagatattaaaattaaggaattaatgaaacatattccaggtccagattttcctactggagggattataattggaaaaagtataattaaacaaggttataataatggtaggggctcatttaaaattagaggcgaggtgtcttcagaaactcttaaaaatggaagagatagattgataattacatctatcccttatcaagttaataagtccgctttaaatgaaagaattgcacaattagttagggaaaaaaaaattgagggtattaaagatataagagatgagtcgaatagagagggaattagagttgcaatagatttaagaaatggtgttgaacctgaaacaataaaaa

SEQ ID NO: 294388 - DNA, 964 bp, Unknown
  Bacterial polypeptide expressing nucleotide sequence isolated from the Sargasso Sea
gcagtaacaaaagccatcaacgactttgctaaatcaagaaatcttcattctgatatttcattaaccggtgatgatataagagaaggcatcacaggagtagtttctgtaagagtcaaagaacctcagtttgaaggccagactaaaacaaaacttggaaacaccgagatgaaatcaagagttcaggttttagttaatcaagaatttcctaaatggctgtcaaaaaacacaaaagaaggaagggcaatcgtagagaggtgtgctcttgccgccaaagctagaatgagtgcaaaaaaagcaagagagcttactaaaagaaaaagcatactcgaaacttctggactcccaggcaagttggcagactgttcatcaacagacccctctgaaagcgaattgtttattgtagaaggagattcagctgctggaccagcaaaacaggcaagagattcaaaaacccaagcaatacttcctattagaggaaaaataataaacgttcagaaagttacagagaacagagcattacaaaatgaagaaattagctcattaattaaagctataggaacaggaataaatactgaatacaaaggagaagagtcaagatacgacaaaataatacttttaacagacgcagacgtagatggtgcacatattagaacactattgttaaccttctttttcaaatttatgcccggtcttataaaagaaggaaaggtttggatttcagaacccccactttatagggcaaagtcatcaggatcaataaattaccttaaagacgacgaggacctagaagcatttaaaaaagaaaataaaaatcgaaaatttgatataagcagattcaagggtcttggtgaaatgaacgctggagagctatgggacacagcaatgaatccagagtcacgaacactaatcaaagtaagcattgctgatggtaaagcggctgaagcaaaagcagcaaacatgttga

SEQ ID NO: 294389 - DNA, 818 bp, Unknown
  Bacterial polypeptide expressing nucleotide sequence isolated from the Sargasso Sea
aacacatctttcaggatttcgatcaagtttaacaagagtgatgaaaacatttatcagaaaggaagaattaaataagaaatcgcctgttgagttactcggtgaagatgttagagagggattaacagcaatagtttcagtgaaaatacctgatcctaaattctcatcacaaacaaaagaaaaactcgtttcctcagaggttgagagtgttgttagcaatgtttttaataagaattttaatgaataccttttagaaaaccctaaggaagcaatgtcaattttaacaaaaatatctgaagctgctttagctagggaggcagcaagaaaagctagagaaatgactagaaggaaaggggttttagaggtcgcaggtttaccaggaaaattagcagattgccaagaaaaagaccctgcgctgtcagagatatatatcgttgagggtgattctgcaggtggatcagctaaacaaggaagaaatagacaaaatcaagcaatacttcctctaaaagggaaaattttgaatgttgaaaaagctagattagataaagttttatcttcccaagaaataggaacgcttgtaacagctttaggttgtggaattggaacagatgagttcgatgctgataaattaagatatcacagaataattataatgactgatgctgatgttgacggctcccacataagaactttgcttttaacattcttctttaggcaaatgttcgaaatactaaatagaggacatgtttatattgcattaccgcccttatacaaagtttcaaaaggaaaaaatattaaatatgcagcttcagaaaaggaaa

SEQ ID NO: 294390 - DNA, 898 bp, Unknown
  Bacterial polypeptide expressing nucleotide sequence isolated from the Sargasso Sea
aaagaaatttttgcttcaactaattttgaaatagaagaaatttataaaagaattcaggaactttcatttctaaatgctggtgtttcaattaatgttgaggataaaagaaatggaaaaagtaaaaaatttaagaacaatggaggcctgtcaagctacgtaagacacttaaaaggaagaaaacaagtaatttcagaaatttttgaatgctcagcaaaagaaagcgatgtaggtgttgagattgccatgcagtgggttgattcttattctgaaaatgttttatgttataccaataacattccccaaaaggatggaggaactcatttagctggctttagagggagtctaaccagggttcttaaagcgtttattaaaaaagaaaacgcaaagaagaccccaactgatcttttaggagaagatgtaagagagggactaatagcaattatatctgtaaaagtaccagatcctaaattttcatctcaaactaaagaaaaactagtatcttcagaggttgaatcagttgtgagcacggtttttagtaaatattttaatgattttttgctagaaaatccaaaagatgcaatgagtatcgtgtctaaggtgtctgaagcagcccttgcaagagaggctgcaagaaaagctcgagaaatgactagaagaaagggtgttctggaaatagctgggttacctggaaaattagcagattgccaagaaaaagatcccaaagagtctgaaatatatattgttgagggagattctgcggggggatcagcgaaacaaggaagaaatagaaaaaatcaggcaatattacccttaaaaggaaagattattaatgttgaaaaagcaagaattgataaagtgcttggatcacaagaggttggaactcttataaaggcattag

SEQ ID NO: 294391 - DNA, 467 bp, Unknown
  Bacterial polypeptide expressing nucleotide sequence isolated from the Sargasso Sea
aatggcaaaaaacaacacaacttatcaggcagattctataaaagttctcaaaggtttagaagctgtaaggaaaagaccaggaatgtacattggagacaccgacgatggtacaggcttgcaccatatggtatatgaggttgttgataattctatagatgaggctctagctggacattgcaaaaatataaaagttgatattaatagcgatggctcaattacagttgaggatgatggaaggggaatacctgtagatatacataaaggagaaaaaaagtctgcagcagaagttattatgactcaattacatgctggaggaaaatttgatcatgactcttataaagtttctggtggacttcatggagtaggagtttctgtagttaatgcactctctgaaaagttagaattgtttatagaaagagatggaaaaaaacattttatagaatttcgtaatggtgatgctcaaaatc

SEQ ID NO: 294392 - DNA, 937 bp, Unknown
  Bacterial polypeptide expressing nucleotide sequence isolated from the Sargasso Sea
atgagttcatcttatttgtcttacgctatgagcgtaatagtaagtagagctctgccagatgtaagagatggattaaaacctgttcacagaagaattatatatgcaatgtatagaggtggatacgattggtctaaaccatttagaaaatctgcaagaattgttggagatgttattggtaaataccatcctcatggcgatcaatctgtttatgatgctttagttcgactggtacaagatttttctatgagtttacctttaatatctggacaagggaattttggatcaattgatggagatcctcctgcagcaatgcgttatacagaaactaaacttggaaagattgcacaatttttaactgaagacctagaaaaaaatactgtaaattatagaaataattatgatgaaactgaaaaagaacctgaggtccttccttctcaatatccaaatatacttgttaatggagcaggtggaattgcggtagggatggctactagtatacctcctcacaatttaagtgaaattattaacgctacagtggcttatattggaaataaagatattacaataagtcagctaatgaagcatgttcctggaccagatttcccaacaggaggaataattataggaaaagatattttaaaacaaggttataacaaaggaagaggttcatttaagattagaggggagatagatctcgaggaaaaaagaggaggtagagaatgcttaattatcaaatctataccttaccaagttaataaatctgcattgattgaaaaaattgctcaacttgtaagagataaaaaaattgaaggaattagagatataagagatgagtcaaatagagaaggtataagagttgttatcgagctaagaaaagctgttgaacctgaaactattagaagacagttatacaaattaactaatatagaaagctctt

SEQ ID NO: 294393 - DNA, 529 bp, Unknown
  Bacterial polypeptide expressing nucleotide sequence isolated from the Sargasso Sea
catgacagataaaatttctcagattaatttagaagatgaaatgaagaaatcctatctggattatgcaatgagtgtcattattggacgagcattgcctgatgtcagagatggattgaaaccagttcatagaagagtcctctatgctatgaaagtacttggtaatgatcatacgaaagcttataaaaagtctgccagaatcgttggtgatgtaattggtaaatatcaccctcatggagacagtgcagtttatgaaaccattgtaagaatggctcaggacttttcactgcgatatacccttgttgatggtcaaggaaactttggatcaatcgatggtgatagagcggctgctatgcgatacacagaagttaggatggaaaagatcactcaagaacttcttgctgatatcgacaaggatacagttgattttattcccaactatgatgaatctgaagaagaacctgcggtacttccaactcggttacctaatctactgatcaatggatctgctggaatcgccgttggtatggcc

SEQ ID NO: 294394 - DNA, 879 bp, Unknown
  Bacterial polypeptide expressing nucleotide sequence isolated from the Sargasso Sea
tccggcctcgttcccgaatctgttggtgaacggcggcacgggtattgcggtcggcatggccaccaatattccgccgcataaccttggcgaaatcatcgatggcatcacggcgcaaattgacaatccggacatcacgctcaagcagttgatgaagcacatcaagggacctgatttccccaccgggtgcaccatctgcggtttgagcccgattgagcaatattttaccaccggcaaaggctccatcaaggtgcgcggcaagctcgggattgaagatgtgcgcggcggcaaacagcagattgtcgtcacggaaattccctataacgtcaatcgcgccacactagtcagccgcattgccgaactggccaacgaaaagatactttcggaaattaccgcggtacgggatgagtcggatgaaaacacacgcgtagtcattgagctgaagcgcgatgcggtgcccaaagtggtcaccaacaatctctacaaacacacgcagctggaaacgacctttagcgtcaacatgctagccatcgatcacggcaagcccaagacgctttctctcaaggacgcgctcaactgctacatcgagcatcggcgcgaagtcatcgtgcgccgcacccggtacgagttggagaaagccgaacgccgcgccgaaacgctggagggctacctcattgcgctctcaaacctagataaatttataaagatcatccgcgaatccgccaaccgtgatgaagccaaggtaaagctcatggcacatgactttaccagggccgccgttgagaaactcggcatcctcatccgcgacaaggcgcggctggtcaatggccgatatgaattcagcgaagaacaggccaacgcaatccttgagctgcgtttgta

SEQ ID NO: 294395 - DNA, 322 bp, Unknown
  Bacterial polypeptide expressing nucleotide sequence isolated from the Sargasso Sea
atggcgacattaaataaatatcaagcagactcgattaaagttcttaaaggtctagaagctgtaagaaaaagacctggaatgtatattggtgatacagacgatggtacaggtctacatcacatggtttatgaagttgttgacaactcaatagacgaagcattagcaggttattgtaaaaatattgatgttatgatgaatgctgatggcacaattactgttaaagatgatggtagaggtattcctatagatattcacaaaggagaaaaaaaatctgcagcagaagtaataatgacccaacttcatgcaggaagtaaatttgatc

SEQ ID NO: 294396 - DNA, 707 bp, Unknown
  Bacterial polypeptide expressing nucleotide sequence isolated from the Sargasso Sea
aagagtacgagaattccaagcagtcttgccgttaagaggaaagatactaaatacctatgtaaatggaaaaaggaatggtgaagatcgaaatacaaaagcactatcaaaaatgatgtcatccagtgagatagtcacattaataaatgctttgggtactggatctaaagattttaacattgataatttgcgttatgataaaatagttattatgacggatgctgatgttgatggttcccacataagaactttgttgctaacattttttaataatcatccatttaatcaactgattgaaaatgggcatgtatatttagctcaacccccgctatttaagattactaaagcaaacaagagtacatatattaaagatgagaaagctcttgaagactatatattgcaattaggtaaaattaataaaaaaattaaaaaaggatcgcaagagtataaaaattttatgcaagagcaaagggagaagctttcaatacaaagatttaagggtttaggagaaatgaatccggacgaactatgggaaactactcttaatcctgataatagaactatgttgaaagttcaatatacaaaaggaacaaaagataaatcaaaagaagatcagaagatgatcgaagttttgatgggtgacgaagttgctccaagaaaagattttattacaaacaacgccttagaagttacaaatctagacatctaaa

SEQ ID NO: 294397 - DNA, 865 bp, Unknown
  Bacterial polypeptide expressing nucleotide sequence isolated from the Sargasso Sea
aaagatcctgaaaaatgcgaaatatttattgtagagggtgagtcagctggaggttctgcgaagcaaggtagagatagatctacacaagcgattcttcctttgaaaggtaagattataaattgtgaaaaagcaaggttatcaaaagtactttcttccaatgaaattgcaactttaattacagctttaggcggaggtattggcaattcttcaaatgaaattgatcaagacgatgaaagttttaagactgataaactaagatataagaaagtaattataatgactgatgcggatgtagatggtgcccatatcaagacattacttttaactttcttttatagacaaatgagaccattaataactgatggttgtttatatattgctcagccccctttatataaagcaaaaaaaggtaattcggaaacttatttaaaggatgatgacgatttagaaaactatctaatagattcaggtattaacgattcttcttttatattaaatacaggagaggttatagcttcaaatgatttaattgacttggtaacaaaaagtagaaattttaaaaaattaataaattctttacctaaaaaatataaccaaggatttgttgaggcagtttccattagtagtgcttttaaacaacctatcgaaatctctgataaagttttagtcgagatatcaaataggctaacaaaaaaatatagtgatattgatgctgattggaaagctagttacgatgacgagaatggtctcatggtttcaagggaagttaggggagttaatgaaaatatgagtattggcagaggtttatttgattctgtagactcaagaagacttgaaaaaatatctaatgacataaaacaatttc

SEQ ID NO: 294398 - DNA, 663 bp, Unknown
  Bacterial polypeptide expressing nucleotide sequence isolated from the Sargasso Sea
aatggagattgctctaatgtcaaatgattatgattcagatagtataaaggttttaaagggccttgaggctgtaaaaaagcgtccaggtatgtatattggtgatacagatgacggtactggtctgcaccatatggtgttcgaagtattagataattcgattgatgaaggtttggctggtttttgcaatcaaatagatgttgttgttggtaaagatggttcagtttctgttgctgataacggtaggggcataccagtagataagcacgaagagggcgcttcagctgctgaagtcattatgactgtactacatgcggggggaaagtttgatgaaaacagctacaaagtttctggtgggcttcatggtgtaggggtttcggtagttaacgctcttagcagtaaactgatattagagattgaaagacaaggttctaaatatagacaagagtatgctgatggctttccacaaacaaaactagagatagttgaaaaaagtgataaaacaggcactaaagtaacatttattccctcgaaaaagatcttttctcaaataaaatttgatgtagacatattaattaaaagaataagagagctttcttttttaaatcaaggtatcggtataagtgtactggatgaaagaacaggaaaatctcatgattttataat

SEQ ID NO: 294399 - DNA, 653 bp, Unknown
  Bacterial polypeptide expressing nucleotide sequence isolated from the Sargasso Sea
aatgagctcgtcatatttatcttacgctatgagtgtaataattagcagggctctccccgatataagagatggtttaaaaccagtgcatagaagaattatttatgcaatgcacaaaggtggttttgattggtctaagcagtttagaaaatcagcaagaatagttggggatgtcattggtaaatatcacccacatggagatcaagctgtatatgatgctttagtaagaatggttcaagatttttctatgagcttaccactaattgatggacaaggaaattttggatcaatagatggtgatcctcctgcagcaatgagatataccgaaacaaaactttctaaagtatcccaatatttagtagatgatattaataaagatacagttaaatttaaaagtaattatgatgaaacagaaaaagaacctgagatcttgccagcacaatatccaaatcttcttgtgaatggtgctggaggaatcgcagttggtatggcaactagtattccaccacataatttgggagaaatcattaatggcacattagctttaattgaaaatcgagatattaaaatatctgagttaatgaaattaataccgggacctgattttcaacaggaggtttattattggaaagatataattaaacaggctacaaaca

SEQ ID NO: 294400 - DNA, 667 bp, Unknown
  Bacterial polypeptide expressing nucleotide sequence isolated from the Sargasso Sea
cgaatcagaaatttatattgtggagggcgactctgctggaggctctgcgaagcaaggcagagaccgaaggtttcaggctattttgccattaagaggaaaaatattaaatatagaaaaaactgatgatactaagatatataaaaacacagaaattcaatccctaattactgctttaggattaggaataaaaggagaggaatttgatgaaaaatcacttaggtatcatagagtcgttatcatgaccgatgctgatgttgatggagcgcatataagaaccttattgttgacatttttttataggtatcagagagaccttgttgaaaaaggatttatttatatagcatgcccacctctttacaaagttgagagaggaaaaaatcataaatactgttataacgaaaaccaattaaagcaaactatcgaagattttggagataatgccaactacaatattcaaagatttaaaggattgggtgaaatgatgcctaagcagttatgggatactactatgaatcctcagacgaggatgatgaaaagagttgaaattgaagacgctcttgaggctgacagaatatttaatattcttatgggagataaagttgcaccaagaagggaatttattgaaactcatagtggtaatttggatatggcaactttagatatatga

SEQ ID NO: 294401 - DNA, 715 bp, Unknown
  Bacterial polypeptide expressing nucleotide sequence isolated from the Sargasso Sea
tcgactctgccaggtaaattagcagattgtagttctagagatccttctgagactgaaatttatatcgttgagggggattctgctggaggttccgctaaacaaggaagagatagaaagtttcaggctattttacctctaaggggtaaaattcttaatatcgaaaaaactgacgatagtaaaatatataaaaatacagaaattcagtcattaataacagctctaggattaggaataaaaggagaggagttcgacgtgagctctttgagatatcacagggttgtaattatgacggatgctgatgttgacggtgcacatataagaactttattattgacatttttttatagatatcaaagagaactggtcgagaaaggttatatatatattgcatgtcctcctctctataaagttgaaagaggtaagaatcataaatactgttataacgagaatcaattaaaggatacaattacaggttttggagaaaatgcaaattataatattcaaagatttaagggattaggtgagatgatgccaaaacaattgtgggatacaactatgaatcctcaaactaggatgatgaaaaaggttgagattgaagatgcgcttgaagccgacagaatattcaatatactaatgggagataaagttgcaccaagaagagaatttattgaaactcatagtagtaacttagatatggcaactttagatatatgat

SEQ ID NO: 294402 - DNA, 577 bp, Unknown
  Bacterial polypeptide expressing nucleotide sequence isolated from the Sargasso Sea
cttgtcaggaacagacgactcagacatacctgaagaagaatttaataataataatgatgactcttcaaaagatacgcatgtaccagtagcaatatctgatgaaatgcgtaagtcttacttagactatgcaatgagtgttatagttagtagagcattaccagacgtaagagatggtttaaagcctgttcatagaagaattttatatgcaatgaaggaaggcggttaccattggaataggccctatagaaaatctgctagagttataggagatgtaatgggtaagtatcatccacatggcgataatgcgatttatgatgcaatggttagaatggctcaaccattttctatgagtttaaagttattagatggtcaaggtaattttggttctatggatggagatcctccagctgctatgagatatacagaggttagaatggatcaagcggctaatatgttaattgacgatatagataaaaatacaattgattttcaggataactatgataattcaaccagagaaccaagtgtattgccagctaagttccctaatttattagtaaatggggctggtggcatt

SEQ ID NO: 294403 - DNA, 763 bp, Unknown
  Bacterial polypeptide expressing nucleotide sequence isolated from the Sargasso Sea
ttggaagctgtccgaaaaagaccaggaatgtatattggtgatacagacgatggctcaggtctgcaccatatggtattcgaggtagtagacaattctatcgatgaagcaatagtaggtttttgtaaaaatataacagtaataatgcacaagaacaattccattacagtagaagacgatggaaggggaataccagttgatatgcacaaaggagaaaaaaagtcagcagccgaagttataatgacacaattacatgcaggtggaaagtttgatcaaagctcctacaaagtttctggaggcctacatggagttggtgtttcggtagttaatgctttgtctaaaaagctagatttaactgtttttagagacgggaaagaatactttgtatctttcgaggatggaaaaacaaaaaattccttaaagtttataaaaaagacaactaaatcaggtactaaaattaatttttccccttcaaaagaaattttttcatcgattaaatttaacacatcaattttgcaaaaaaaaatgagagaattagcgtttttaaataagggtttaaaaatcttattaattgatgaaacaggcactaaaaataaatcttacgaaaataaatatgatggaggaatacaagaatttgtatcatttatagatcaaaaaaaatcagcattgataaacaaaaatgataaatcaatctttaaaaaaccaatttatattaaaggcgaaaaaaaagaggtaattgttgaatgttcacttcagtggaattcag

SEQ ID NO: 294404 - DNA, 742 bp, Unknown
  Bacterial polypeptide expressing nucleotide sequence isolated from the Sargasso Sea
atgcctgaaaacacaaagaaaaaagataaagataatatagattacggtgctgaatcaattaaagtcctaagaggtttagatgcagtaaggaaaagaccaggcatgtacattggtgatacagatgacggttccggattgcatcacatggtttacgaagtacttgataacgcgatagatgaggctctagctggttattgtgatattattaatgtttatttacaaaaagaaggatcaataaaaatttcagataatggtcgtggtatacctgtggacattcatccagaagaaggaatttcagcagcagaggtaataatgacacaattgcatgctggtggaaaatttgataatgattcatataaagtgtctggtggacttcatggtgtaggagtatcagtagtaaatgcattgtcagaatatttattcctaacaatatatagagatggaaaaaaatattttattgaatttcaagatggggtttcaaaaagcccattaaaaattatagatgaaacaaatcactcaactggaacagaaataatttttaagcctagcatcaatactttttcaagcattaattttgatttttcaactttagaacacagaattagagaacttgcttttttaaacagtggtataaaaatcaatttaacagatgaaaggtctgcggaaatgaaaagtttaactttttgttttgaaggaggtttaaaagaatacgtcaattatttaaatagatcaaaagtaaatg

SEQ ID NO: 294405 - DNA, 889 bp, Unknown
  Bacterial polypeptide expressing nucleotide sequence isolated from the Sargasso Sea
gtagcaagaaaagcaagagaaacggttagaagaaaaggagcacttgaacttacaggtttacctggaaaattagctgactgtcaaaattcaaatcaagatggtacagaactttttatagttgagggagattcagcaggaggctctgcaaaacaaggaagaaatagagaatttcaagcagttttaccattaagaggaaaaattttaaatacatatgtagatacaaacggatcgaaaaaaaatggtaatggtaatgaccaaaaaacaaaggctttatcaaaaatgatttcttcaaatgaaataatgaccttaattaatgcgctgggcttagatccgaaagatgaagaaattgatcttaaagatttaagatatggaaaaataattataatgactgatgctgatgttgatggatcgcatataagagcactattattaactttttttaataataaaccttttaacaaattaattgccaatggacatatttacttagcacagcccccactttttaaaattaataaaggaatgaaaggcatttatattaaagatgagaaagaacttgaaaagtatattatgagtagctcaaaagatttaaaaaaaatcaaaagagggtcaaaagaatttgaaaaacattactctattgcaaaatctaaactaagtattcaaagatttaaaggtcttggagaaatgaatcctgatgaattatggaatactactttaaatcctgatactagaaatttactaaaagtagaatattcaaaagatcttaaaaaagatcaaaatataattcatactttaatgggaaatgatgttgctttaagaaaagactttatatgtatcaaatgcaatcgatgtacaaaatctagatgtataatgaagtttttgaggcttc

SEQ ID NO: 294406 - DNA, 953 bp, Unknown
  Bacterial polypeptide expressing nucleotide sequence isolated from the Sargasso Sea
atggtggagtaaaattgtttttagagatgaaagaaatcaattatcagatggttcttttaaagaagaaatttacttgtatcaaggaggtattaaagaatatgttgaatatatgaatgctgaaaaagattctattcatcctgaaataatttatgttgattcacagaaagaaaatgtatatgtagaggcagctttgcaatggtgttcagatgtatattcagataatattttaggatttgcaaataatatcagaactattgatggaggaactcatattgaaggattaaaaacagttctgacaagaactttcaatactctcgcaaaaaagagaggtaaaagaaaagatattgaaaaaaatttagctggcgaaaatattagagagggtttgactgttgttttatcagtaaaagttccagatcccgaatttgaaggacaaacaaaaacaaaattaggaaatactgaagtacgaggaattgtggattctcttattggggaggctctaacaaaatatatggaattcaatcctggaattttggacttgattcttgaaaaagcaattcaatcatttaatgcagcagaagctgcgagaagggctagagaattagtaagaagaaaaagtgtgctcgaaagttctacattaccaggaaaattggcagattgtagttctagagatccatcagaatcagagatttatatagttgagggagattcagctggtggctctgcaaaacaaggtcgagatagaaattttcaggctattttgcctctcaggggtaaaatccttaatattgaaaaaactgatgatactaaaatatataaaaatacagaaatacagtcattaataacagcgcttggattaggaataaaaggagaggagttcgacgaaagctctttgagatatcatagagttgtaattatgacggatgctgatgttgacggtgctcatataagaactt

SEQ ID NO: 294407 - DNA, 867 bp, Unknown
  Bacterial polypeptide expressing nucleotide sequence isolated from the Sargasso Sea
gaggtaggaaacaggaggtttctgaagtgtttgaatgttcagctacagaaaatgatgttggtgtagaaatagcaatgcagtggacagattcatattctgagaacgtactatgttatacaaacaatattcctcaaaaagatggaggaactcatttggctggatttaggggtagtctaaccagagtactcaaatcttttattaaaaaagaaaatgctaaaaaaacaccaacggaacttcttggcgaagatgtaagagagggtttgatggcgattatttcagtaaaagtgccagatccaaagttttcatcacaaacaaaggagaaattagtctcatcagaggtagaaagtgttgtaagttcggtatttagtaagtattttaatgaatttcttttagaaaacccaaaagatgcaatgaatattatctcaaaagtatctgaagcggcattggcaagagaggctgcaagaaaagcaagggaaatgacaagaagaaagggtgtattagagattgccggattgcccggaaaactcgcagattgccaagaaaaagacccaaaactatctgaaatctatatagttgagggtgattctgcaggaggatcagcaaaacaggggagaaatcgaaagaatcaggcaatattacctcttaaaggaaaaattattaatgtagaaaaagctaggatagataaagtgctaggttctgcagaagttggaactcttattaaggctttaggttgtggtattggagaagaagattttgatatagaaaagctaagataccatagaataataattatgacagacgctgacgtagacggatcccatattagaactatgctattaacattcttttataggcaaaatgtatgaa

SEQ ID NO: 294408 - DNA, 787 bp, Unknown
  Bacterial polypeptide expressing nucleotide sequence isolated from the Sargasso Sea
gtttgagcaaaatccacaagctgttaaaataatattattaaagatacaaaaagctgctgaagcaagagaggcagcaagaaaagcaagagatttgacacgcagaaaaagttctcttgaggttagcaatctgcctggcaaacttgctgattgtcaagaaaaggatccaaagttatctgaaatattcatagtagagggagattctgctggggggtctgcaaagcaaggtcgagatagaaaatttcaagctattctacctttaagaggtaaaatacttaatacttggaaatcaagaatcgataaaatattaggatcaacagaaattggaacactgattactgctttaggagtaggtattggtaaaaatgaatttgatccattaaaactaagatatcataaagttgttataatgactgatgccgatgtagatggatcacatatccgtacgttacttttaactttcttctttaaagaaatgagagagctcattcagaatgggcatttatacattgcaagaccaccattgtataaaattaaaaaaggcaaagaagaattatatttaatggatgatcaagagttaagtcatgctctaataaattatgggagcaaaggctatgaatttcacacttcccaaggaactgtttttaaaggtaaagaacttgagaatgagcttaaaaatatttcaattgcagaaagtattttaaagagaattccagacagatacgataaaaaatatcttgaacaaattgcgattgctggatgtttagatgtttcaaaattaaagataaga

SEQ ID NO: 294409 - DNA, 919 bp, Unknown
  Bacterial polypeptide expressing nucleotide sequence isolated from the Sargasso Sea
agctgtttatgatgcgctagttagaatggttcaagatttttcaatgagtttacctttgatagatggacaaggaaattttggatcaatcgacggtgatcctcctgcagctatgagatatactgaaacaaagttatcaaaaatttctcaatatttaatcgatgatatagaaaaaaatactgtaaattttaaaagtaattacgatgaaactgaaaaggaaccagtagtattacctgcacaatatcctaatttattagtcaatggtgctggaggtatagcggtaggtatggcaacaagcattccaccacataatttaggtgaagtgatagatggcactcttgctttaataaaaaataaagacattaaattaagtgaactaatgaagcatataccaggtcctgatttcccaacaggagggacaattattggaaaaaatattatcaaagaaggttacaaaagtggaaggggatcttttaaaatacgtggagatattaaaattgaacaaagaaaaaatggcaaagaaagaattgtgataacttctgtaccttatcaagttaataaatcatctttaaatgaaagaatagtagaacttatccgagaaaagaaaatagaaggaattagcgatattagagatgagtctaatagagaaggaataagagtatcaattgatttaagacgaaatgttgagccagagacagttaaaagacaattatacaaatatacatccatagaaagttcatttggctttaacacattagctatagttgatcaaaaacctaaaacttgcaacttaaaagagtttttagaaaactttttatcttttagagaagatgttgttgttaaaaaaacgaaatttgatttaaaaaaagccgaagatcgtgcacatatattaataggtttatctgtgtcagtagaaatttag

SEQ ID NO: 294410 - DNA, 920 bp, Unknown
  Bacterial polypeptide expressing nucleotide sequence isolated from the Sargasso Sea
atgccatttacaaacaatatatatcaaaaagatggtggaacacatttattaggttttagaagcgcacttacaagagtagtcaacaaatatgctaatgaaaataatttattaaagaaaaataaattatctatatctggggatgatataaaagaaggtttgacatgtataatatctataaaaattcctgatcctaaattttcttctcaaacaaaagataaacttgtttcctcggaagtaagaaatattgtcgaaaacattcttagtgaaaaaatttctatatggtttgatcaaaatccttcaatagcaaaaactgtattaagtaaaattattcaggctgccctagcaagagatgttgcaagaaaagctagagaaaatgtaagaagaaaaggagcattagaattaacaggacttccaggtaaactagcagattgtcaaatatcaaaacaagaaggtactgaattatttatagttgaaggggactctgcaggtggatcagctaaacaggccagaaatagagaaaatcaagctgttttaccacttaggggaaaaattttaaatacttatgtagaggaggatacaaaaaaaaataattctaatggaaataatcatagaactaaaactctctctaaaatgattgcttcaaacgaaatagttactttgataaatgcaatgggattagatccaaagtctgatgaaatagaaactaaggacataagatacggaaaaatcattattatgaccgatgctgatgttgatggttcacacatacgtgcactattattgacattttttaataatgttccttttaataagcttattaaagagggatatatttatttagcacaacctccattatttaaaattaacaaaggatcaaaaggaatttacattaaagatgaaaaagaattagaaaaatatgt

SEQ ID NO: 294411 - DNA, 464 bp, Unknown
  Bacterial polypeptide expressing nucleotide sequence isolated from the Sargasso Sea
aatgagctcatcatatttatcgtatgcgatgagcgtgattattagtagagcgcttccagatataagagatggattaaaaccagttcatagaagaataatttttgcgatgcataaaggaggttttgactggtcaaaacaattcagaaaatctgcaagaattgttggagatgtaattggtaaatatcatccacatggcgatcaagctgtatatgatgctttagtaagaatggttcaagatttctcaatgagcttacctcttattgatggacaaggaaattttggatctatagatggagatccaccagctgctatgagatatactgaaacaagactatctaaaatttctcaatatttgattgatgatatagaaaaaaatactgttgagtttaaaagtaattacgatgaaacagaaaaagaaccaacagttttaccagctcaatatcccaatttacttgtaaatggtg

SEQ ID NO: 294412 - DNA, 799 bp, Unknown
  Bacterial polypeptide expressing nucleotide sequence isolated from the Sargasso Sea
ttaacaagagttattaataagtatgctagtgaaaacaatttactcaaaaaaaataaattagcaatttcgggagacgatataaaagagggccttacttgtgttctttctataaaaattccagatccaaagttttcatctcaaacaaaagataaactagtttcatcagaggtaagattgattgtagaaacttttataaatgaaaaattatctatatggtttgatcagaatccctcaattgcaaaaataattttagctaaagtaatacaagctgcaatggcaagagatgttgctagaaaagcacgagagagtgttagaagaaaaggtaccctagaattaagtggtctccctggtaaattagcagactgtcaaattggtaaacaagaaggcacagaattatttattgttgagggtgactctgcaggaggttctgcaaagcaaggaagaaatagagctaatcaagcagttctgcctcttcgagggaaaatattaaatacttatgttgaggatttaaaatcaaaaaataatggtaatggtaaaggcactgatcacagaacaaaggcattgtcaaaaatgatttcctcaaatgaaattgttacattaataaatgctttaggactggatccaaaggtagaggaaatagatccaaaagatattaggtatgaaaaaattataattatgaccgatgctgatgttgacggttctcatataagagctcttcttttaactttttttaacaataaaccttttaataaattaattgaggagggttatttgtttttagcgcaacctccattattaa

SEQ ID NO: 294413 - DNA, 936 bp, Unknown
  Bacterial polypeptide expressing nucleotide sequence isolated from the Sargasso Sea
ttacgactcaatggtaagaatggcacaaaatttttctatgagattagagttaattgatgggcaaggaaattttggatctttagatggagaccctcctgctgcaatgagatatactgaagcaagactatctaaaatatctgaaaaaattgttacagatttagaaaaaaatactgtgaattttcaacctaactatgacgacacaactaaagaaccaagtgttctgcctgcacagtatccaaatattttagttaatggggcttctggaattgctgttggtatggctactaatattgcaccacacaatctaggagaagtaatagatgccactttgttttgtattgataatccagatgcttctatagatgatttgaataaattcatacttggtccagattttcctactggttgtcaaataattggtaataaaggaattaaagatgcttttaattctggcaaaggtgcttgtatattgagagcaaaaacttcaattgaaaatttcaaaaaagatagagaagcaataattattaacgaaattccctatcaagttaataaatctaagttaattgaaaaaatagctgaaacagtaaaaaataatattattgaaggaatatctgaccttcgagatgagtctgatcgtaatggtgttagagtagttatagaattaaaaaaagatgtagattctaatgtggttttaaataaactttataagcacacattacttcaaactacttttaattctaacatgcttgctcttaataagggcaaacctgagcaaatgaacttaaaagatatattattatcttttatagattttagagaggaaattgtaactaaaagaacagtatatgatttaaataaagcaagagataaagctcacatcttaattggtttggttgtagctaatgataatatagataatattatagatcttattaa

SEQ ID NO: 294414 - DNA, 265 bp, Unknown
  Bacterial polypeptide expressing nucleotide sequence isolated from the Sargasso Sea
aatgagtgaggacaaaagatctaataaaatctcaaatgattatggggcggaacagattcaggttttagaggggttagaaccagttcgtaaacgtccaggaatgtatataggttcaacagggcctaggggattacaccatttggtatatgaggttgttgataactctgttgatgaagcactcgcaggacattgtgatcatatagaaattgttcttcaagcagatggttctgctttaattttcgataatggacgagggattcctaca

SEQ ID NO: 294415 - DNA, 235 bp, Unknown
  Bacterial polypeptide expressing nucleotide sequence isolated from the Sargasso Sea
atggttgatataaacagagacaacactctcccaagagatattgttgatgaaatgagagagagctatttgaattactctatgtctgtaatcgtatcaagggctctcccagatgttagagatggtttaaaacctgtacatagacgaattttatatggaatgagcgaactgggttcctcttggaatcgtccatacaaaaaatcagcaagaattgtcggtgatgttttaggtaagtatc

SEQ ID NO: 294416 - DNA, 561 bp, Unknown
  Bacterial polypeptide expressing nucleotide sequence isolated from the Sargasso Sea
ccaataatgagatacagtccataataacagcactgggaacaggttttggtggtggtgatgaagaaatgggcgaaagatcagccggggactttaatattgaaaaaataagataccataaaatcattataatgacagacgctgatgttgatgggtcccatataagaactcttttgcttacgtttttttacagaaaaatgaaacaattaatagacggtggttttttgtatttggctttaccaccactatatagagttcatcaaggtaaaaaagcagcatatgcatatgatgataacgaaagggacctgttgattgagagaatgaaaaaagacaacaaaaacacaaaggttggcatacaaagatataagggccttggtgaaatgaaccctgggcagttatgggacacaacaatggacccagagaaaagaaccctcttacaagtaacagttgaaagcgctgaggctgcggcggtgacttttcaaaacctaatggggagcgatgttgaagcgagaagggcttttattgaaaaaaacgcaaaatttgtagcaaacctagacatttaaa

SEQ ID NO: 294417 - DNA, 790 bp, Unknown
  Bacterial polypeptide expressing nucleotide sequence isolated from the Sargasso Sea
gctgccgcccggcgcacccgattcggacattacaccgatcgccatcgaagacgaaatgcgctcttcgtacctcgattacgccatgagcgtgatcgtgtcacgcgcgctgcccgatgtacgagacgggctgaagccggtacatcggcgcatcctctactccatgaaggaaaacggctacgaatttaatcggccgtaccgcaagtcggcgcgcattgtcggtgatgttatgggtaagtatcacccacacggcgatcaggcgatctacgacgccatggtgcgcatggcgcagaatttctcgatgcgtctgccgctcatcgacgggcaaggtaacttcggctccatggatggcgacaaggcggccgctatgcgttacacggaagcccgaatggcgagatcggctcacgctttgatcgaggacttcgacaaggacacggtcgacttccaggccaactatgacgaaagcaccaaggaaccgcaggtcctgccggccgggttcccgaatttgctggtcaacggcgcgggtggcattgcggtcggcatggcgaccaatatcccaccccacaacctgggcgaaatgatcgatgcctgctgtgcgatcatcgacaatcctgaaatcaccatcgacgagatcatcgagcaccacgtcgagggaccggatttcccaacgggcgggcaaattctgggccgcaatggcatcctttctgccttccacacgggacgcgggtcagtggtcatgcggggcaagacatcaatcgaggaaatccgtaaggaccgcttcgccattatcatt

SEQ ID NO: 294418 - DNA, 586 bp, Unknown
  Bacterial polypeptide expressing nucleotide sequence isolated from the Sargasso Sea
tttgcctcttcgaggaaaaatattaaatattgaaaaaactgatgatgcaaagatttacaaaaatacagaaattcaatcattaataactgctttaggtttaggcatcaaaggggaggaatttgatattagttcgttaaggtatcatcgggtcgtaatcatgactgatgctgacgttgatggtgctcatattagaacattgttgttaacctttttttatagatatcaaagggaattagtagagaaggggtatatttacattgcttgccctcctctttataaagttgagagaggtaaaaatcataaatattgttataacgaagggcaattgaaaaaaacaattgaagattttggagataaagctaattttaatattcaaagatttaaaggtttaggtgaaatgatgcctaaacaattatgggatacaacgatgaatccgcaaactagaatgatgaaaagagttgagattgaggatgctcttgaagcagatcgaatattcaatattttaatgggtgataaagttgcacccagaagagaatttattgagacccatagtggtaatttagatatgtcaacattagatatatga

SEQ ID NO: 294419 - DNA, 859 bp, Unknown
  Bacterial polypeptide expressing nucleotide sequence isolated from the Sargasso Sea
gaactatttattgttgaaggagattcagctggtggctcagcaaaacaaggaagagatagaaaaaatcaggcaattttacccttaagaggtaagatattaaatgttgaaagagctaatcctagacaaatattaacaagtaatgagataggtattttgataacagctataggggcaggtgttggcaatccatcaggaaatgaagagcaagataaaagtgaaggaaaatttgatttatccaaattaaggtatcacaaaattattataatgacagatgctgatgttgatggaagtcatataagaactctacttctaacttttttttataggcatatgaaacccttaattgaatcgggacatctttatattgctcaaccaccactttatcgctcaaaaaaaggtagctcaattcaatatataaaagatgaagaagaaatggagcaatacttaatcaatgaaggatctaaaaatctaatatttgaagcacctacaacagaaaataaaataaatcagattaataaacaagaattaattaaattaattaatttatccaaggaggttcaaaaattaattaatcaacttacaagacgtattgataataaattgattatagaacaagctgctgtaatagcagcttttaaaacagaatctttaaaaaatcctaaagtagcaactgaattggcaaagtatttagaattacgattaaacactatagaaggaaaaatatggaaggttgaatataataaggaaaaactaactataattaaaacaaataagggcgtcagtgaaaaatatacaatagatgaagaatttttaattactcctgaagaaaagctattaaatgaaatgcgaaaaactttga

SEQ ID NO: 294420 - DNA, 822 bp, Unknown
  Bacterial polypeptide expressing nucleotide sequence isolated from the Sargasso Sea
tgttagctgcgcgcagtaggtctgccgcaagaaaagcccgggaattaataagaagaaaaagtgcgcttggtggatcctcactaccagggaaattgtccgattgttcaaataaagacccggttttttgtgagctataccttgttgagggagactctgcgggtggatcagccaaacaaggtagagatagaagaacacaagcaatactacctctacgcggtaaggttattaattcagaaaaagcaagagttgataaactactttctaataacgaagtacagtcaatgattactgcgcttggagctggatttgggggatcagaggaagagtcaggtgaaaaatcagctggagattttgattctgaaaaacttcgttatcataaaataataattatgacagatgccgatgttgatggttcacatattagaacactactactaaccttcttttacagaaaaatgaaagaggttatagatgggggttatttatatttagcccttcctcctttatataggatttctcaaggcaaaaaagagtcttatgcttatgatgacaatgaaagagatttattaattgaacgcatgaagaaagataataaaaacaccaaggttggtattcaaagatataagggtcttggtgaaatgaatccagggcagttatgggaaacaaccatggatccagaaaaaaggactttaatgaaagtaaccgttgaaagcgcagctgaagctgctgaaacctttcaaaacttaatgggtagcgatgttgaagcaaggcgaagttttattgagcgcaacgcaaaattcgttgttaacctagatgtataaa

SEQ ID NO: 294421 - DNA, 829 bp, Unknown
  Bacterial polypeptide expressing nucleotide sequence isolated from the Sargasso Sea
gttttaccaacaagaattccaaatttattaatcaacggttcttcaggtatagcggttggtatggctactaatatggcgcctcataatcttaatgagtctatatcagcgtgtttagcttttatagaaaacccagatatttctactgaagagttaattaaacatatcccggggcctgacttcccaacaggcggaattataaatggaagatcgggtattttaagtgcttatgaaacaggtaagggaaaagtaaagataagagctaaagttgacatagtaggagaagatgaaggtaaaacccaaattgtagttacagaaataccttatatggttaataaagctaagttagtagaaaacatagctatcttaatgagagataagaaaattgaaggtatcagagagataagagatgaatctgataaggacaatccagtaaggatagttatggacttaacttctggtgctatagcagatgttgttttaaataatctttataaacaaactcaaatgcagtctgttttcggcataaataatgttgcactagttggaactgaaccaaagttactttcattaaaagaaattcttgagatattttttaatttcagaaaggaggtggtctctaaaagaacaatatttgagctaaataaagcaaaagatagagggcatattttagaaggacttacagttgcgttatccaacattgatcaaatgattgagttaattaaaaaatccaaagatggagctgaagcaaaaactaaactattagcaaagaaatggaaagcaggaaaagttatagatatgctaaaaagggctggaccagaatgcatgtaaa

SEQ ID NO: 294422 - DNA, 868 bp, Unknown
  Bacterial polypeptide expressing nucleotide sequence isolated from the Sargasso Sea
caccacatggtgcaagagcttgtcgacaatgccattgatgaagcacttgcaggacattgcgatacggttttcgtcacgatgcacccggaagaggcgataacggttcgggataacggtcgcggcattcccgtggatttacacccggaagagaaggtcagcgctgcagaggtcatcatgacaactctgcatgccggcggaaaatttgatgacaacagctacaaggtgtccggcggcctccatggcgttggggtctcggtggtcaacgctctatccgatgaactgcgcctgaccgtacgacgggacaataaggtgtatcagcagacctatgagcacggcgttcctgtggcgccattggcagagaccggcgagactcaggagcgcggcacggaatgttactttcggccgtcgcccgcgaccttccacaacattaagtttcaatacgaattactggccaagcgtttgcgcgaactggcttttttgaactccggtgtctcaatcgtgctgacggaagagcgcaccggcaaggaagatacgttctactacgaaggcggcctgcgcgcgtttgttgaattcttaaaccagaacaaacagcagttgaatgaggtctttcactttaacgtagaacgcgaggacggcatcggtgtcgaggtagcgatgcagtggaacgacaccttccaagagcaagtcttttgctacaccaacaacattcctcaaggtgatggcggcacacacctagcgggctttcgaggcgctctaacgcgcacgctcaacacctacatcgaaaatgagaatctactgaaaaaagcccaagtgaatactaccggcgatgacgcaagagagggtattacggcggtagtttcggtcaagg

SEQ ID NO: 294423 - DNA, 886 bp, Unknown
  Bacterial polypeptide expressing nucleotide sequence isolated from the Sargasso Sea
ggctcatattagaacgttattacttacgtttttctatcgtcaaatgccagaattagtcgaggggggatttctgtatattgcgcaacctcctttgtataaagttgcaagaggtaaatcagaagtttaccttaaagatcaatctgcgctggaggattaccttattcagcaagggagtgaaggtagtattctgagattaggggatggatcagaaatttcttcacaggatttaattcgggtcgtagaagaagcgcgtcagcttaagagagttcttgaggcttttccaacgcattatcctagacatattttagaacaagcagccattgctggggcttttgtgcctggagtagttgattctgacttgcagggtacagctgataaagtagctgagcgtttgaacctaatagcgttggagtatgaaaaaggttggaatggtcgcccaacacaagatcacggtatcaagcttactcgaattttgcgaggtgtggaagaaatgcggacacttgatgggccaatgctaagatctggtgaagccagaaaaacaggcagcttcacaaaaagtctgaatgaggtatacggcaagcctgcaagattacttagaaaagatcgaagccagattattcatggaccactagatttattagactctatttttgttgagggtgaaaagggtttaaatttgcagcggtataaaggtttaggggagatgaatccagaccaactttgggaaactacgttagatcctgatgcgcgaacacttttgcaggtaaaaatagatgatgcggccgaggcagatgatctttttactcgtttaatgggtgaggttgttgagccgcggcgggagtttatccaacaaaatgcacttacagtagaaaaccttgatttttaa

SEQ ID NO: 294424 - DNA, 695 bp, Unknown
  Bacterial polypeptide expressing nucleotide sequence isolated from the Sargasso Sea
gaataatatagatgttcaatgctctctaaaatggaatgcaggatataatgaggatgtgtacccttatactaataatatatatcaaaaagatgggggaacccacctattaggttttagaagtgcactaacaagagttgtaaataaatatgcgtcagagcaaaatttattaaaaaaaagcaaagttctactatctggagatgacgtaaaagagggtttaacgtgtgttctttctgtaaaaataccggatcctaaattttcttcgcaaacaaaagataaattagtttcatcagaagtaagaaatattgttgaaggtatagttaatgaaaaattatctatttggtttgatcaaaatccttcagtttcgaaaataattttaacaaaaataattcaggctgctgttgcaagagatgttgctaaaaaagcaagagaaaacgtaagaagaaaaggagccttagagcttactggactacctggtaaattggcagattgccaaaattcaaaacaagagggaacagaattatttatagtagagggtgactcagcaggaggatcagccaaacaagggagaaatagagaatatcaagcagtattgcctttaagaggaaaaatattaaacacttttactgagttaagtgggtctaaaaaaaatgttagccaaagtgaattaagaacaaaatctttatcaaagatgattt

SEQ ID NO: 294425 - DNA, 682 bp, Unknown
  Bacterial polypeptide expressing nucleotide sequence isolated from the Sargasso Sea
ttgaggcgggcaattggggatcgctatttgacttacgctctatcaacaatcatgcaccgagctcttcctgatgctcgcgatggacttaaacccgtacatagaagaattctatacgccatgcgtgagctaaagttagcctcgacaggcgggtttcgcaaatctgcaaagatttcgggcgatgttatgggaaattaccacccgcatggtgatgctgcgatttacgatgctatggccagattagcgcaagacttcaatgtaagatatccactagtcgatggccaaggtaactttggaaatatagatggagataaccccgcagccagtcgatatactgaggcgcgtatgacagttatcgctgaagccctgttagaaggtttagacgaaaatgctgttgattttagagaaaattacgatgggacgctaaatgaaccaatagtacttcctgcatcttttccaaacctacttgcaaacggggcgactggaatagctgttggaatggcaactaatatccctcctcacaatatagcagaactatgcgacgcttgtttgcacctaattaaaaaaccagacgcacgtaacgaaactttacttaactttgtccctggacccgatttcccaacaggcggcgttattgttgaaagcgtacagtctatagcagaatcttataggaccggaagaggtt

SEQ ID NO: 294426 - DNA, 235 bp, Unknown
  Bacterial polypeptide expressing nucleotide sequence isolated from the Sargasso Sea
atgacccagtttgccaaagaaaccctgccgatcagccttgaagaagagatgcggcgcagttacctcgattacgcaatgagcgtgatcgtgggccgtgcactgcccgacgcgcgcgatggcctgaagcccgtgcaccgtcgcgttctgtatgcgatgcatgagctcaacaacgactggaaccgcccctacaaaaagtcggcccgtatcgttggcgacgtgattggtaaataccacc

SEQ ID NO: 294427 - DNA, 913 bp, Unknown
  Bacterial polypeptide expressing nucleotide sequence isolated from the Sargasso Sea
atgaacaccacacatcaaagcccccaagaatctcaaacatatgatgcggaatcaattaaggtgctaaaaggtcttgaggccgtacgcaagcgtccgggcatgtatattggcgatacagatgatggttccggactgcaccatatggtttatgaggtagtcgataatgccattgatgaggccttagccggacactgtgattatattgaagttattcttaatcctaatggttctgtcacggtaattgataatggtcgtggtattcctgtggatatgcataaggaagaaggtatgtcagcggcagaagttattatgacgcagctgcatgctggagggaaatttgatcaaaattcctacaaagtatccgggggattgcatggtgtgggtgtatccgtcgtcaatgctctttcggaatctttgcatcttactatttggcgagatggcaaagagcgtgtggcaactttcaaggatggtattgtacaagaaagtttgcatgtaaggcaaaatgcccccgataaaaaggggacacaaattacctttttgccttcccgggaggtattcacgcatactgagttcagctttgcaacccttgagcatcgcttgcgtgaactggctttcttaaattcgggggtaaagttattacttactgatgcgcggacaaccccccctcatgccataacgcttcattatgaagggggagttaaggcttttgtgacgtatttggatcgcagtaagacacctttacataagccccctctttatattcatgaaagcaaaaatgatattgaagtagaggtggcccttgaatggacagatgcataccatgaaaccactctttgttttaccaataacattcctcaacgcgatggaggaactcacttggctggttttcggggtgcccttacgcgggctatta

SEQ ID NO: 294428 - DNA, 885 bp, Unknown
  Bacterial polypeptide expressing nucleotide sequence isolated from the Sargasso Sea
ccgtagcaagagatgttgccaaaagagcaagagaaaacgttagaagaaaaggtgctttagagctcactggattacctggaaaattggcagattgtcaaaactcaaaacaagaaggtacagaattgtttattgttgagggagattcagccggtgggtcagctaaacagggaagaaatagagagtatcaagcagtactgccattgaggggaaaaattttaaatacatatactgagataaatgggtctaaaaaaaatggaaatcaaagcgacctaagaacaaaatcattatcaaagatgatttcttcaaatgaaattgttacattaataaatgctcttggattagatcctaaaacagaagaaatagatttagaggatttaagatatggaaaaattattatcatgacagatgcagacgttgatggttcacatataagagctttacttttaactttttttaataatatcccttttaataaattaatagaaaaaggtcatgtctatttagcccaaccacctctttttaaaattaacaaaggctccaaaggtatttacataaaagatgaaaaagatcttgaaaattacataattaagaattgtaatgatataaaaaaagtaaagaaaaattctaaagaatttgataaaattattcaattagagaagtctaaacttaacattcaacgatttaaaggacttggagaaatgaatccagaagaattgtggaatactactttaaatccagagactagaaatttacttcaagttcaatattcaaaaaatattgaaaaagatcaaaaccttatacaaacattaatggggaacgatgttgcttcgagaaaagactttattgttgatcacgctataaatgttattaatttagatatttaat

SEQ ID NO: 294429 - DNA, 595 bp, Unknown
  Bacterial polypeptide expressing nucleotide sequence isolated from the Sargasso Sea
atgagtaagctttttaaagaaaaaatagataatattttaagtcaaaaatatttatcttatgcaatttcaacaattatatctagatctcttccagatgtacgtgacggtttaaaacctgttcacagacgaataatatactcaatgtatcaattaaagctttttaataattcgagctataaaaaatcagcaagaattgttggtgatgtaatgggtaagttccacccgcatggagatcaagcaatatatgatagtttagtcagaatggctcaggatttttcaactcgtattaaattaattgatggacaaggtaattttggaaatattgatggtgataatcctgcagcaatgagatacactgaggctagactacaaaaatatgctaattatttttttgatggaattgaacaaaattctgtaaattttaaagaaaattatgatggtcaaaatttagaacctgaagttcttccatctcaacttccgaatatattaattaatggcgcaatgggaatagcggttggcatggctacaaatattccaccacacaatgtagttgaattaattgagtcattaaagttaataattagaaaagataaag

SEQ ID NO: 294430 - DNA, 820 bp, Unknown
  Bacterial polypeptide expressing nucleotide sequence isolated from the Sargasso Sea
atcaaaaacccttcaattgaagatagagaactttttgaactaattaaaggtcctgattttcctactggtgggcaaatcttaggaagagatggcattagagaaactttcaagacgggaagaggttcaataactatgagaggtgttgcaaatattgagcaaatcaaatcagctggtagagcagaaaaagatgcagtaataattactgaactaccatttcaaactaacaaagcgggtttgatagagagaattgcagatatggttaacgaaaaaagattagaaggtatttctgatattagagatgaaagtgatagagatggcatgagaattgttatcgaattaaaaagagatgcctatcctcaagtagttttaaataatttatttaagttaaccccgctacaaaataactttagtgcgaatattttagccttagttaaaggagagccaacaactctttcgcttaggaaaatgttagatgtatttctagaatttagggtagagactataaggagaagaacaggatttttattaaaaaaggcagaagaaagagatcatattgtgaagggtcttttattagccttaggtgctatggatgaaataatcaatctaataagatcagcgaaagattcaatttcagctcgagaaaacttacaaactgatcatgaattatcttccacacaggcagacgcaattttacaaatgcagttaagaagattaacagctcttgaggccgataaaattaaagcagaacatgatgaatttacacaaaaaatctatcacatatcacaaatatttaatagtaaagaaaagatttttgaaatta

SEQ ID NO: 294431 - DNA, 467 bp, Unknown
  Bacterial polypeptide expressing nucleotide sequence isolated from the Sargasso Sea
tatggaaaaaattgaaggcaacaatctaactaaaataaaatcaatatcaatgtatgatgaaatgagttcatcatatttatcttatgctatgagcgtaatcattagtagagcattacctgatgttagggatggtttaaaacctgttcacagaagaatattatttgctatgaacaagggtggatttgattggtctaagcaatatagaaaatctgcaagaattgttggtgatgttataggtaaataccaccctcatggagatcaagctgtatatgatgctttggtaagaatggttcaagaattttctatgagtcttcctttaatagatggccagggaaattttggttctatagatggagatcctccagctgccatgagatatactgaaactaggctttcaaaaatttctcaatttttactcgatgatatagataaaaatactggtttatttaaaaagcactatgatgaaa

SEQ ID NO: 294432 - DNA, 925 bp, Unknown
  Bacterial polypeptide expressing nucleotide sequence isolated from the Sargasso Sea
tattgagtttaaagatggtaatgccaaggcaccattaaagcaaattggaaaatcttcaacaactggtaccaaaattacttttttaccttcaaatgaaatattttcttccactaaattttcaagtcaaataatccaaaaaagaatacgtgaattggcttttttaaacaaaggtataaaattaatcgtcgtcgataaaactcaaaaaaaagaaaaaatatctgaatataaatttgacggaggtttgaatgagtttataaattatttaaatcaaaaaaaagataaacttaagaataaaaatggtaatgatctctttaaaaaacctattagcttggagggagataaaaacggtgtagagatagagtgttctttagagtggaattctgcttattcagaagaagtatatgcttatacaaataacatttatcaaaaagacggtggtacacatttattaggttttagaagtgcattaactagagttgtcaataaatatgttagtgacaataatattttaaaaaaaagcaaattatcaatttctggagatgatattaaagagggattaacggcacttttatcaataaaaatgccagatcctaaattttcttcccaaacaaaagataaattagtttcttcggaaataaggaacattgttgagacttttataaacgaaaaactttcaatatggtttgaccaaaatcctgcagttataaaaattgttcttcttaaaattatacaggcagcacaggctagagatgtagctaggaaagcacgtgagagcgtaagaagaaaaggagctcttgagttgactggattgcctggtaaattggcagattgccaaaacccaaaaagagatggaacagaattatttatcgtagaaggagattcagcagggggctcagcaaaacaaggaagaaatagagaattcaaa

SEQ ID NO: 294433 - DNA, 634 bp, Unknown
  Bacterial polypeptide expressing nucleotide sequence isolated from the Sargasso Sea
gatgagctcatcatatctttcttatgcaatgagtgtcattgtaagtcgtgcacttcctgatgtaagagatggtttaaaacctgttcatagaagaattttatatgcaatgtacaaaggtggatatgattggtctaaacaatttagaaaatctgcaagaattgtcggggatgttattggtaaatatcaccctcatggtgatcagtctgtctatgatgctttggtaagaatggttcaagatttttcaatgagcctaccgttaattcaaggacaaggaaattttggttctatagatggcgatcctgcagcagcaatgagatatacagaaactcgtttatccaaagtttctcaatatttaatagatgatatagaaaaaaatacaatttctttcaaaagcaattatgacgaaacagagaaagagcccagtgttttaccagcacaattcccaaatttattagttaatggagcaggtggtatcgctgttggtatggcaaccagtatacctcctcataacttaggtgaaattatagatggtactttggccttaattgaaaataaagatattaaaattaaagaattaatgaaacatatacctggtccagattttccaactggtggtgtaattataggtaaagac

SEQ ID NO: 294434 - DNA, 955 bp, Unknown
  Bacterial polypeptide expressing nucleotide sequence isolated from the Sargasso Sea
agtctctgaaatatttgaatgttcagcaacagaaaatgatgtgggggttgaaatagcaatgcagtggacagactcatatagtgagaatgttctttgttatacaaataatattccccaaaaagatgggggaactcatttggcaggtttcaggggaagtttaacaagagtactaaaatcatttataaaaaaagaaaatgcaaagaaaactccaactgatttgctaggagaagatgtaagagagggtttaattgcaataatttcagtaaaagtaccagatcctaagttttcatcacaaacaaaggaaaaacttgtctcatcagaggtagaaagtgttgtaagtacactttttagtaagtattttaatgaatttctactagaaaacccgaaagacgcaatgagtattgttggaaaggtatctgaagcagctttagcaagagaagctgcaagaaaagctagagaaatgactaggagaaagggtgtgcttgagattgctggattgcccggaaagcttgcagattgtcaagaaaaagacccaacattatctgaaatatatatagttgagggtgattcagccggaggatcagcaaaacaaggaagaaatagaaaaaatcaagcaattcttcctttaaaaggtaaaattattaacgttgagaaagcaagaattgataaagtcttaggttcagctgaagttggcacacttattaaagcccttggttgcggtattggtaaggaagattttgatattgataacttaagataccatagaataataataatgacagatgcagatgttgatgggtctcatattaggacactactcttaacattcttttacaggcaaatgtatgaaattgttgaaaaagggcatgtttatatcgccttaccacctttatataagattactaaaggtaaggagtttgtttatgcttctgatgaatctgaaaagacgatgcta

SEQ ID NO: 294435 - DNA, 979 bp, Unknown
  Bacterial polypeptide expressing nucleotide sequence isolated from the Sargasso Sea
tgttactgtaaaagatgatgatcgaggaattcctgttgatatacacaaaactgagaataaatcagcggcagaagtaataatgacaacgctccatgcgggaggtaaatttgatgatgactcatacaaagtgtccggtgggttgcatggtgttggtgtatctgttgttaatgcattgtcagagagactatctcttacaatacacaaagatggatacaaatatcagcaagattataaacacagttctcctataaaaccattagaaaaatgtggtagttcagatgagacaggatctgtcattcaattcctgccaagcacgaagtattttaaagatcttcattataaagaggaggttatcaagaagaggctgaaggagttagctttcttaaactcgggcataacaattcattttaataatgacatcactggcaataagtctaagtactactatgaaggtggactgcaggaatatataaaggagatattgcataataagaaggaaatccatgatgatttaatatatataccaccgatgattaaaggcggtaattcaattgagatatctatgaagtggactgcctcatataccgagcagattatgtgttatacaaacaatatctatcagaaggatggcggtactcaccttagtggatttagatcggctttaactcgaacaattaacaattactcattaaaaaataatggaaaactaaagtatgaaatatctggcgatgactgtcgtgaaggtttagttgctattgtctccataaagatgtctgatcctaaattttcatctcagaccaaagacaaacttgtatcatcagaaataaagagtttaactgagacttcgctctcatccaaactctcagaattcttagaggagtctcctaaagatgcaaaattaatcattggtaagatccagcaagcagctatggctcgtgaggaggcaaggaaagctaaagatctcatcaggagaaaagac

SEQ ID NO: 294436 - DNA, 332 bp, Unknown
  Bacterial polypeptide expressing nucleotide sequence isolated from the Sargasso Sea
ttttattgttgagggagactctgccggaggttctgctaagcaaggaagagaccgtaagtttcaagcaatactgcctttaagaggaaaaattcttaacacttggaaatcaagaacagacaaaattttaggttctactgaaattggtacactgataactgcacttggtactggaataggaaatcaagaatttgatctaaataaattaaaatatcataaggttgttattatgacagacgctgatgttgatggatcacatataaggactctattattaacatttttctttaaggagatgaggagtcttatagaaaacggaaatttgtatatagcta

SEQ ID NO: 294437 - DNA, 895 bp, Unknown
  Bacterial polypeptide expressing nucleotide sequence isolated from the Sargasso Sea
gggctggacgcagtaagaaaaagacccggaatgtatataggagatactgacgatggttctggtttgcatcatatggtttttgaagtcatcgacaattcaatcgacgaagctttagcaggacattgtaaaaatataatagtcaaaataaatcctgataatacaatttgcgttgaggatgatggaagaggaattcctgtggatattcataaagatgaaaaaatatctgctgcagaagtaataatgactcagcttcatgcaggaggtaagtttgatcatgactcttacaaggtatcaggaggtttgcatggtgtgggagtttcagttgtaaatgctctttcagaaaagcttgaattgaacatttttagagatggaaaagaatatgtaatcaattttaaggatggtaagtcagttaagccaataaaaaaaattggacaaactaaaaaaagagggactaaggtaacttttttaccgtctaaagagattttttcatcaataaagttcagtccttcaattcttgagaaaagaataagagagcttgcttttctaaacaaaggaatttcaattaaattattagatagttcttcaaagaaaactaaagagttttgccataaatatgatggtggaatagttgaatttgtaaaatatataaataataaaaaacctttattgatcaataaaaatgagaaagaagtttttaaaaaacctgtttatgttactgcatcaaaaaataatgttatcgtagagtgctcttttgaatggaatgccggttattccgaagaagttttgccttttacgaataatatacatcaaaaagatggaggaactcatttacttggtttcagaagtgcattaaccaaagtgataaataaatatgcaaacgatagaaatagcaaaa

SEQ ID NO: 294438 - DNA, 469 bp, Unknown
  Bacterial polypeptide expressing nucleotide sequence isolated from the Sargasso Sea
aatgaaaaataataatacgtaccaagcagactcaataaaagtgttaaaaggtctcgaggctgtaagaaaaagacctggaatgtatataggtgatacagatgatggcactggcttacatcatatggtctatgaagtagtagataattctatagatgaagctttggcaggatattgtaataatatagaaatttatattaattctgatggatctattactgttagagatgatgggagaggaattccagtcgatcttcataaaggcgaaaaaaaatctgcagcagaagttataatgactcaattgcacgcaggaggaaaatttgatcacgattcctataaagtgtcaggaggtttacatggtgttggagtttcagtggttaatgctttatcagaaaaattaaaacttgaaataaacagagaaggaaaaaaatattttattgaatttaaagatggcaaatctattgcgccgctt

SEQ ID NO: 294439 - DNA, 845 bp, Unknown
  Bacterial polypeptide expressing nucleotide sequence isolated from the Sargasso Sea
gatggaaaaaaattctttagaaactaataaatcttttaagcctatatttgttcaagatgagatgagttcatcttatctttcatacgctatgagcgttatcgtaagtagagctcttccagacgttagagacggtctgaaacctgtacacagaagaataatttacgcaatgtataaaggtggttatgactggtcaaagccatttagaaaatctgcaagaattgttggagatgtaattggtaaatatcatccccatggagatcaatccgtctatgatgctttagtcaggttggtgcaagatttttcaatgagtgtgcctctaataaatggtcaaggcaactttggatctatagacggagatcctccagctgctatgagatacacagagactaaattaggaagaatagctcaacatttaactgaagatttagaaaaaaatacagttttgtttagaagtaattatgacgaaactgaaaaagaacctgaagttttgccatcacaatacccaaacatattagttaatggtgcaggaggtatagcagtaggtatggccacaagtattccgccacataatcttggagaggtaattaatgcgacgatagcatacattaagaataaggaaataacgattagtcaactaatgaaatatgtaccagggccagatttcccaacaggaggagtgataattggcaaagatattattaaacaaggttataacaaaggcagaggctcatttaaaataagaggagagatcgaattcgaggaacgaaaaggtggaagagaaatattagtaataaaatcgattccatatcaagtaaacaaatcaatttttattgaaaaaattgccc

SEQ ID NO: 294440 - DNA, 806 bp, Unknown
  Bacterial polypeptide expressing nucleotide sequence isolated from the Sargasso Sea
ttagtatcttcagaagttaggaatacagttgaaacaattataagtgaaaaattatcgatttggtttgatcaaaatccatcaattgcaaaaataattttaacaaaaattattcaagctgctgttgcaagagacgttgcaagaaaggctagagaaaatgtaagaagaaagggtgctttagaactcacagggcttccaggtaagttagcagattgtcaaaattctaaacaggaaggtactgaattgtttatagtagagggagattcagcaggtggttcagcaaaacaaggaagaaatagagaaaatcaggcagttttacctcttagaggcaaaatacttaatacttttactgagataaacggatataaaaaaaatggtaattctaatgatctcagaacaaaaactctatcaaaaatgatctcctctaatgaaattgtaactctaattaatgctctaggcttagatccaaaaaatgaagaaatagatttaaaagatttaagatatggaaaaattataattatgacagatgctgatgttgacggttctcatattagagcactattattaactttttttaataataaaccatttaacaagttgattgaaaatgggcatatttatttggcacaaccacctttatttaaaattaataaaggttccaaaggaatttatataaaaaatgaaaaagagcttgagaattatattataaaaaattcaaaagaatttaaaaaattaaataaagggtcaaaagaatatgataaatttatacaaattgaaaaatcaagattaaatattcaaaggtttaaagg

SEQ ID NO: 294441 - DNA, 916 bp, Unknown
  Bacterial polypeptide expressing nucleotide sequence isolated from the Sargasso Sea
agattttctagatgaaaaaagagaaaagttacaaaataaaaatggaaatgatttatttagaaaaccaatatatattgaaggaaaaaaaaataatattgaattagagtgttcattaaaatggaatgcaggatatacggaagatatattttcatatactaataatatttatcaaaaagatggtggaacccacttgttgggatttagaagtgcactaactagagtagttaacaaatatgccaatgaaaataatttactaaagaaaaataaactagcaatttcaggtgatgatattaaggaaggtctaacttgcgtgctttcaaccaaaattcccgatccaaaattttcatctcagacaaaagataagttagtttcatcagaagtaaggatgattgtagaaacattagtaaatgaaaaattatctatttggtttgatcaaaatccttctgttgcaaaaattattttagctaaagttattcaagctgcaatggccagagatgttgctagaaaagcaagagaaaatgtaagaagaaaaggagcccttgaattgagcggtcttcctggaaaattagctgattgtcaaattggcaaacaagatggaacggaattgtttattgtagagggtgactcagctggtggatcagcaaaacaaggaagaaatagagcaaaccaagcagttttacctttaaggggaaaaatacttaatacatatgtagaagatttaaaaattaaaaaaaatggtaatggcaacggaaatggttctgatcaaagaactaaggctttatcaaaaatgatttcttcaaatgagatagtaactttgattaatgccttaggattagatcctaaagtagaggaaatagatgaaaaagatataagatatggaaaaaatataattatgactgatgctgatgttgatggt

SEQ ID NO: 294442 - DNA, 664 bp, Unknown
  Bacterial polypeptide expressing nucleotide sequence isolated from the Sargasso Sea
attgacctacacttcatcaccgcccacggatccacaaaatcctacgatttccatttctgaggagatgcggaaatcctacctcgattacgccatgagcgtgatcgtgtcgcgggcgctgccagatgtcagggacgggttgaaacccgttcaccggcgcatcctctacgcgatgatggaaggcaattacgactggtcgaagccgccccgcaaatcggcccgcatcgtcggtgacgtgatgggtaactatcacccgcatggcgacagctcgatctatgaggccatggtgcgcatggcgcaggatttctcgatgcgcctgccgcttgtcgacgggcagggcaatttcggatcggtcgacggtgatccgccagcggcgatgcgctacaccgagtcacgactggcgcgcgccgctgaaagcgttcttcgggatatcgacaaggatacggtcgatttcgccgaaaattacgacgagacgcagcttgagccgacggtcctgcccgccgaatatccgaaccttctggtcaacggcgccaacggcatcgcggtcggcatggcgacaaatgtgccgccgcacaacccggcggaggtcatctccgcctgcgaggcctatatccgaaatccggacatcaccgtcgaagagctgatcgagatcgttccgggggcctga

SEQ ID NO: 294443 - DNA, 796 bp, Unknown
  Bacterial polypeptide expressing nucleotide sequence isolated from the Sargasso Sea
gccgcatatgcaagagaagctgcaagaaaagcaaaagaaatgacaagaagaaaaggtcttctggatataggggggctgcctggcaagctagcagattgccaagaaaaagacccagcgctatcagaattatttttggttgagggagactcggctggaggatcggcaaaacagggcagggacagaagttttcaggccatattgcctcttaaaggaaaaattataaacgtacaaaaagcacgcctagacaaagtcttatcttctaatgagattggaacccttataacagctttagggacaggcattggtattgacgagttttcactagaaaaacttagataccatagagtcataataatgacagacgcagacgtagatgggtctcacattagaacactcttacttactttcttttacaatcagatgtttgatctgttagaaaaaggacatatttatttggccttacctcctctttacaaaattaaaaagggcgggaaaacacattacgcaaaagatgaggaagaaaaagacgcaattcttaaagagcttagaaaagaagcaacagaaggctctaggcctcctgagatacagagatataaagggctaggagaaatgaaccctgaacagctgtgggagacaacatttgaccctaaacacagaaggcttgtgcaaattactttagatgaggcaagagaactcgttgatgatatctttgaaacattaatgggcgatcaggtgcagccaagaagagagtttattaaagataatgctcttagagcagagaatatagacttttaaa

SEQ ID NO: 294444 - DNA, 711 bp, Unknown
  Bacterial polypeptide expressing nucleotide sequence isolated from the Sargasso Sea
catggttgattttaatagagacaacacattaccaagagacattgtagatgagatgcgtgaaagctatcttaattattcaatgtctgtcattgtatctcgggcactgccagatgtgagagacggtttaaaaccggttcaccggcgaatattgtatggaatgagcgaacttgggtcgagctggaatcgtccatataaaaagtccgcaagaatagttggtgatgttttaggtaagtatcatccacacggagacagctccgtatatgacgcgctagtaagaatggcccaagacttttctatgcgctatgagcttgttgatggacaaggaaactttgggtcaatcgacggtgataacgctgcagctatgagatataccgagtcaagaatgacaagacttaccagcgagatgctgagagaccttgataaagatacggttaattggacagaaaactttgacgaaacacttaaagagccgtcggtgttaccatcggcggtgccaacgctgttaatcaatggctctgagggtattgctgtaggtatggcaacgaaaataccaccacataaccttgttgaggttataaacggtttggttgcaatgatcgaagatgaaaatattgacttagatgagttaatgacccacataaaaggaccagactttccaacagcgggtttaatccttggacaagacggtctaaggcaggcatatgaaaccgg

SEQ ID NO: 294445 - DNA, 877 bp, Unknown
  Bacterial polypeptide expressing nucleotide sequence isolated from the Sargasso Sea
ataaagataaccgcagatgatatctggaaaaattgcagttcaattgtttctgcaaaactaagagacccacaatttactggacagactaaagaaagattgtcctcgaaggagttcactaatttctcttcagcaataattaaagatgcttttagtttatggttaaaccaacacactagtgaaggagaagaaatagctcttctatctatagaaaatgctcaagccagacaaaaagcaagtaaaaaggtatcacgaaagaaaataactgccggtccagctttgccaggcaagcttagcgattgtacgagtaatgatgtagaggagggggagctttttctagttgagggtgattcagcaggaggttctgcaaagcaagctagaaacaggaactttcaagcagtgctgcctttaggaggaaaaattttaaatacttgggaagttgaaacgagtgagattttatcttcacaaggtataaacgatatagccgtggcattaggtgtagaaccaggcagtaatgacttggagggattgaggtatggaaaggtttgtattttagctgatgcagatcctgatggattacatatagcaacactcttatgtgcattatttttaagacacttcaggcctcttgtagaaaaaggaaggatatatgtagctatgccacctctatttagaattgatcaaggaaaagaagtattttatgcattagatgagaaagaaagagacgctctagttgaaaagctaaaaaagaagaataaaagagctaagatagagattcaaagatttaaagggcttggagaaatgaatgcttcacaacttagagaaacaaccatgctcccagagtctagaaggcttgttcagttaactataaatcgggcga

SEQ ID NO: 294446 - DNA, 943 bp, Unknown
  Bacterial polypeptide expressing nucleotide sequence isolated from the Sargasso Sea
atttatgccagatatagaaatttttaaaactattgattacagctataaaaatattacaactagattaaaagaaatggcttatcttaatccgggattaacaataagatttagaagtgattatcatcaggatttatggcctactaatcaaataacttacatgtttactggcggggttcaaagctttgttagaagcttaaataggtctagaaaccctatacatgcaaacattgcctcaattaatggaaaactttctcctgatgatgcaaagtcaaaagtcgaaactcctgtaattgtcgatattgcttttcaatataatgaaactttccaagagaatgttttatcatttgccaactgtattgttactcctgaaggcggaacacatttaactggttttaggcgctccttaacaagagccattaataattatggaaagaaaaacggcatattaaaagatgatctaaaagatgtttcaggtgaagatgttagagaaggccttatggcagtaattagtgtaaagcttggggagcctcagtttgaaggacaaactaaagctaagcttggtaaccctgaaatagaatccgctgtaacctctttaatgactcaacaacttacagaatatttagaagataatccaaatgatgccaaaactatacttgaaaaagcttctaccgctgcaagggcaagggaagctgctaaaaaagcaagagatttagtaattagaaaaaatgcaatggaaggcggagctttgccaggtaagcttgctgattgctctgaaaaagatcctgcaaaaagtgaattatttttagttgagggtgattcagctggaggctcagccaaacagggaagagatagaaattttcaggctattttaccgcttcgaggaaaaattcttaatgttgaaaaggctcgtcctgacaaaatgttgggtcatgctgaaattgct

SEQ ID NO: 294447 - DNA, 775 bp, Unknown
  Bacterial polypeptide expressing nucleotide sequence isolated from the Sargasso Sea
ttaacttttgttaataatattaatactatcgaagggggaactcatctttcaggctttagatctgcccttactcgatcgatgaacaatcatgccagtaaaaacaacttaattaagtcaaaaaaaaatgaaaaaatctcactaacaggagaagattttagagaagggttgacagctattattagcgttaaggtagcggagccgcagtttgaagggcaaacaaaaactaagcttggcaatggagatatcaaaggcattgtggataaaattgtgtacgaaggaattttagatttcttggaacaaaacccatccattggcagaaaggttgtcgaaaaagcgctgttggcggctaggagcagaagtgctgcaaaaaaagcaagggagcttattagaagaaagagcgcacttgggagttcttctctacctggtaagctagcagattgttcaaaccgagaccctaatttctgtgagttgtatcttgttgaaggagattctgcaggagggtctgctaagcaggggcgagatagaagaactcaagctattttgccgctaagaggaaaggttataaactcagaaaaagcacgaatagacaaacttctttcaaataatgaagtccaatcaattataacagcgctgggaacgggctttggggggtctttagatgaggaaggggaaagatctgctggagacttcaatatagaaaaacttcgataccataaaattataattatgacagatgcagatgttgatggctcgcacatccgcacattgttgctaa

SEQ ID NO: 294448 - DNA, 712 bp, Unknown
  Bacterial polypeptide expressing nucleotide sequence isolated from the Sargasso Sea
ttacatgctggaggtaaatttgatcatgattcatataaagtttctggtggattacatggggtaggagtttctgtagtaaatgctctatcagaaaaattagaacttgaaatatatagagatggaaaaaaatattatgttgaatttaacaatggaaaatctaagtcacctttaaaaattactggaaaatctaaagagagtggaactaaaattacttttgttccttcaagggaaatattttcatcagtaaaatttagttcccaaattattgaaaaaagaatgagagagttagcttttttaaataaaggtttaaaaatttctgtagaagataaaacccaaaaaaaaaataaaaaaattgaatttaaatatgatggtggaattgtagaatttgttgaacatatagataaaaaaagagaaaaacttaacaataaaaatggcaatgatttgtttaaaaaaccaatatacatccaaggaaagaaagaaaatattgagttagaatgttcattaaaatggaacgcaggttatagcgaggatgttttacccttcactaacaatatataccaaaaggatggcggaactcatttactgggttttagaagtgctcttacaagagttgttaacaaatatgcaaatgaaaataatttattaaaaaaaaataaattatctatatcgggtgatgatataaaagaaggactaacgtgcataatatcaatta

SEQ ID NO: 294449 - DNA, 802 bp, Unknown
  Bacterial polypeptide expressing nucleotide sequence isolated from the Sargasso Sea
agaagaatactttatgcaatgtacagaggaggttatgattggtcaaaacaatttagaaaatcagctagaattgttggtgatgttataggtaaataccaccctcatggcgatcagtcagtttatgatgctttagttcgtatggttcaagatttttctatgagccttcctttaatcgacggacaaggaaattttggttctgttgatggcgatccaccagcagcaatgagatatactgaaactaaattatctaaaatttcgcaatttttaatagatgatttagacaaaaaaacagtaaattttaaaagtaattatgatgaaactgaaaaagaaccttctgttttaccagcacaatatccaaatctattagttaatggtgcaggaggtattgctgtaggtatggcaacaagtattccaccacataatttaaatgaaataattaatggaactcttgctttaatagaaaataaagaagttaaattaaatgaactaatgaaacatattccagggcctgactttccaactggtggcatcatcataggaaagaatatcataaaagaagggtataaaacaggaagaggctcctttaagattagaggtgaaataaatattgaacaaacaaaaaataacagagaacgtctagttataacatcaataccttaccaaattaataaatcagcactaaatgaaagaatagctgaactagttagagaaaaaaaaattgaaggtataagagatattagagatgaatcaaatagagaaggaattagagtagctatagatttgagatctaatgtgaacccga

SEQ ID NO: 294450 - DNA, 795 bp, Unknown
  Bacterial polypeptide expressing nucleotide sequence isolated from the Sargasso Sea
gaatagcgcttcatggaatgatgcatactcagaaaacgttctttgttacacaaataacatacctcaaaaagacggcggaacacatctttcaggatttcgatcaagtttaacaagagtgatgaaaacatttatcagaaaggaagaattaaataagaaatcgcctgttgagttactcggagaagatgttagagaggggttaacagcaatagtttcagtgaaaatacctgaccctaaattctcatcacaaacaaaagaaaaactcgtttcctcagaggttgagagtgttgttagcaatgtttttaataagaattttaatgaataccttttagaaaatcctaaggaagcaatgtcaattttaacaaaaatatctgaagcagctttagctagggaggcagcaagaaaagctagagaaatgactagaaggaaaggggttttagaagttgcaggtttgccaggaaaattagcagactgccaagagaaagaccctgcgctgtcagagatatatatcgttgagggtgattctgcaggtggatcagctaaacaaggaagaaacagacaaaatcaagcaattcttcctctaaaaggaaaaattttgaatgttgaaaaagctagattagataaagttttatcttctcaagaaataggaacgcttgtaacagctttaggttgtggaattggaacagatgagtttgacgctgataaattaagataccacagaataattataatgactgatgctgatgttgacggctcccacataagaactttgcttttaacattcttctttaggcaaat

SEQ ID NO: 294451 - DNA, 775 bp, Unknown
  Bacterial polypeptide expressing nucleotide sequence isolated from the Sargasso Sea
tatttttccaaaaaaaaacaaatgaacaaaaatactaatcaaaattatcaagcagactccattaaggttcttaaaggtctagaagcagtaagaaaaagaccgggaatgtatataggtgatacagatgacggtaccggcctgcatcatatgatttatgaagtggtagataactctatcgatgaagctttagcgggattttgtaaaaaaattgaaattagtatgaatagtaatggttcaattacggttacagacgatggtagaggaataccagttgacattcataaaggggaaaagaaatctgctgcagaagtaattatgactcagttacatgcggggggtaaatttgaccatgattcttacaaagtttctggaggccttcatggagttggggtttcagtagttaatgctttgtcagaaaaacttgaacttactatagaaagagatggaaaagaatatttcatagagtttaaaaatggtgaggcaaaagcaccattaaaaagcactggtaagtcaaaaaaaacaggcactcaaattacattctttccctctaaagagattttttcatcaataaaatttaattttaatataatccaaaagagattgagggaattggcatttttaaataagggaatttcaattattttgaatgatctaactcaaaagaaaaataaatcattggaattcaaatatgatggtggaataattgagtttgttaattttttagatgaaaaaagagattacttaaaaaacaagaatggtaataacttattaaaaa

SEQ ID NO: 294452 - DNA, 910 bp, Unknown
  Bacterial polypeptide expressing nucleotide sequence isolated from the Sargasso Sea
gatgtacttacttaacttaggaccaaaatcacaatttaaaaagtctgcaagagttgttggtgatgttatcggaaagtttcatccacatggcgatcaatcagtttatgatgcgcttgttagacttgctcaagattttttaacaaaatacccacttgtttatggccaaggtaactttggaaatatagacggtgataatgctgctgcaatgagatacactgaagctaaacttacttctgttgctgagtctatactcaaagatatcgagtacgatacagtaaattttaaaaaaacctacgacggtgaacttgaggaaccagaaatattgccttcacaattccctaatatattagcaaatggatctagtggtattgctgtaggaatggcaacaaatattccgccacataatattacagaattatgcaacgggattaaaattattaatgataaacctaatacaaaattaaatgatttacttaaaattattaaaggacctgattttcctaccggtggtgttttaaataataacaagaaggaaatacaaagagcttataagacaggcaaaggtttttttgaaataagggccagttacaaaattgaagagttaggaagaggattatatcaaatagttgtaacacaaataccatatcaagttaataaatctaaacttatagaaaaaatagcgagtttaattttagaaaagaagaacaaacttcttgataatattatcgacgagtctgatgaaaaagtaagaataatattaaggccaaaaaatagaaatgttgatccgaatattttaatggaatcactttttaaatcaacagacttaagtaccaaattctttcttaacatgaatatattaaatgataaacagcaaccatgtgtcatgcctttgattgacgttttaaaaatt

SEQ ID NO: 294453 - DNA, 670 bp, Unknown
  Bacterial polypeptide expressing nucleotide sequence isolated from the Sargasso Sea
aatggtaaataagaacacaaataactatcaggctgactctattaaagtcttaaaaggtcttgaagcagtaagaaaaagaccaggtatgtatattggtgatactgatgatggaactggcttacatcacatggtttatgaggttgtagacaattcgattgacgaggcattagcaggctattgtaaaaagatagaagtaaatattaacttagatggatcaattacagttcaagatgatggtagaggaataccagtcgattttcataagcaagaaaaaaaatcagcagctgaggttataatgacccaacttcatgctggtggtaaatttgatcatgatacctataaagtttcaggtggtttgcatggtgttggagtttcggtagtgaatgctctttcacaaaaattggaattatatgttgaaagagatggaaagaaatattttgttgagttcataaatggtgaagcaaaaaccccactaaaagtgactggtaagtcaaaaaacacaggtacgaagattaattttctgccatcaaaagatattttctcctcaacaaactttagttttacaattattcaaaaaagaatgcgtgaattagcttttttaaataaaggagttaaaatcgtactaaatgacttaagccaaaaaaaaaaaaggaccagtgaatttaaattt

SEQ ID NO: 294454 - DNA, 793 bp, Unknown
  Bacterial polypeptide expressing nucleotide sequence isolated from the Sargasso Sea
aaaaaaactggcaagtcgaaaaaattcaaaaacacaggcggcctttcaagttacgttacacatttaaaaggaaggaagcagacagtttccgaaatatttgaatgttcagcaacagaaaatgatgtgggggttgaaatagcaatgcagtggacagactcatatagcgagaacgttctatgttacacaaacaatattccccaaaaagatggggggactcatttggcaggcttcagaggaagcttaacaagagtactaaaatcatttataaaaaaagaaaatgcaaaaaaaacaccaactgatttgttgggagaagatgtaagagagggtttaattgcaataatttctgtaaaagtggcagatcctaagttttcatcacaaacaaaggaaaaacttgtctcatcagaggtagaaggtgttgtaagtacaatttttagtaagtattttaatgaatttctattagaaaacccaaaagacgcaatgagtattgttggaaaggtatctgaagcagctttagcaagagaagctgcaagaaaagcaagagaaatgactaggagaaagggtgtgcttgagattgctggattgccgggaaagcttgcagattgccaagaaaaggacccaacactatctgaaatatatatagttgagggtgattcagccggaggatcagcaaaacaaggaagaaatagaaaaaatcaagcaattcttcctttaaaaggtaaaattattaacgttgaaaaagcaagaattgataaagtcttaggttcagctgaagttggtacacttattaaagcac

SEQ ID NO: 294455 - DNA, 865 bp, Unknown
  Bacterial polypeptide expressing nucleotide sequence isolated from the Sargasso Sea
agtttatgatgctttagttcgaatggtccaagatttttctatgagtttacctttggtagatggtcaaggaaattttggttcaatagatggagatcctgcggcagctatgagatatactgaaacaagattatcaaaggtatctcagtatttaattgatgacatagaaaaaaatactatttcttttaaaagcaattatgacgaaacagaaaaagaacctagtgttttaccagctcaattcccaaatttactagttaatggagcaggaggaatagctgttggtatggcaacaagtatacctcctcataacttaggagaggtcattaatggaaccttagctttgattgaaaataaagatattaaaataaaagatttaatgaaacatatccccggcccagattttccaactggtggagttataattggtaaggatataattaaacaaggctataataaagggagaggctcgtttaagataagaggtgaaatatcaattgaaagtctaaaaaatggaagagagcgattagtaattacatcaataccttatcaagtaaacaaatcagttcttaatgaaagaatagctcagttagtaagagaaaaaaaaatagaaggtataagagacattagagatgagtccaatagggagggtattagagtatcaatcgatcttagaagcggtgttgaacccgaaactgtaaaaagacagttatacaaaaatacacaaatcgaaagttcttttggatttaataccttggcaatagttgatgggaaaccacaaacttgtaatttaaaagaatttttatcgaacttcctaaattttagagaagacgttgtaattaaaaaaactaaatttgatttaaataaagct

SEQ ID NO: 294456 - DNA, 853 bp, Unknown
  Bacterial polypeptide expressing nucleotide sequence isolated from the Sargasso Sea
ggcgcgcgatcgacggcatcaggctatccttccacttcgcggtaagatattgaatgtcgagcgggcacggtttgacaagatgatcggttcagcagaaatcggcactttgatcgcggcactcggcaccggagtcggtcgcgaggacttcaaccccgacaagacacgctaccacaagatcatcattatgacggacgccgatgtagacggcagccacatccgcacccttttacttaccttcttctatcggcagatgccggagctgatagaacgcggctatctctacatcgcccaaccgccgctctaccgcgtccaaaagggaaaatccgaagtttacctcaaggacgacggcgcaatggaagagttcttgatgcgggaagcgctcggaaactgcactttaagcatcggcgagggagaggaagtgggaagcgatgaattgctcgagattatggagctatcacgccaggcgaagcgcgccatggagcctctgaccaggaaagtgggtaattccgatgtagtcgagcaaacggcaattgcaggtgctttaaacgctgaggtcttggccgacacagtacaggcgcaacaggcggcagagtatgttgccaaaagactcgacgccctagctgacccactggaacgcggctggaacagtattccccaggacggcggtggattgatcttctcccgcaccctacgcggcgtcgctcaggcctgtatcatagacggcgccacggtacgaagcgcggaaggccgccgacttgattctatgacgcccacgctgcagcgctatttcgtccgctacccggcccttcgcgcgaaggatgaggaatttcgcatttctggcccaatctcactc

SEQ ID NO: 294457 - DNA, 784 bp, Unknown
  Bacterial polypeptide expressing nucleotide sequence isolated from the Sargasso Sea
atgagataccataaaataattataatgacagatgcagatgtagatggaagtcatataagaacactcttacttacttttttttataggcatatgaaaccgataatagaatcaggtaggttatatattgcacaaccacctctctacagaattaaaaaaggcaactctacagtttataaaaaagacgaaaaagatttagaggattatcttatagaagagggtttaaaaaatacatcactaaaaacaactcaaaatgatcaaattgcaggtaatcaactaaaagaacttatttatctctcaaaaaaaacaaaaaatctaattactccattaatgagaagaattgacaatagtgatattattgagaatgcagcaattgtaagaggcttaaatttaaataatcttagagataaaaaaattggagatgaaatagcaaagtatcttcaacaaagactaaacatcatttctaatatttctgaaaaaaattggaaagtttcatataaaaataatgcaatcatattagaaagaaatataagaggttttaatcaaaaatttgttatcgatgaaaatttcgtaattactcctgaatcaaaagctttaaatgaattaagaaacgaattaatggaaaatttttatagaataaaagaaaatggtacaggaattttaaaaaataaagacatagaatatagtatatttggccctattagtcttatagataggattttagatcttggaaaatcaggtatacaaataaacagatataaaggtttgggagaaatgaattcctgac

SEQ ID NO: 294458 - DNA, 940 bp, Unknown
  Bacterial polypeptide expressing nucleotide sequence isolated from the Sargasso Sea
gataaaaaaacaggcaaatctaaaaagttctcaaatagtggaggcctatctagctatgttaagtttttaaaaggaagaaaacaaaacatatccgaaatatttcactgcgaaggagagcaagatgggcttagtgttgaaatagcgcttcagtggaatgatgcatattcagaaaacgttctttgttacacaaacaacatacctcaaaaagacggcggaacacatctttcaggatttcgatcaagcttaacaagagtgatgaaaacatttatcagaaaggaagaattaaataagaaatcgcctgttgagttactcggtgaagatgttagagaggggctaacagcaatagtttcagtgaaaatacctgatcctaaattctcatcacaaacaaaagaaaaactcgtttcctcagaggttgagagtgttgttagcaatgtttttaataagaattttaatgaataccttttagaaaatcctaaggaagcaatgtcaattttaacaaaaatatctgaagcagctttagctagggaggcagcaagaaaagctagagaaatgactagaaggaaaggggttttagaggttgcaggcttaccaggaaaattagcagattgccaagaaaaagaccctgcgctgtcagagatatatatcgttgagggtgattctgcaggtggatcagctaaacaaggaagaaatagacaaaatcaagcaatacttcctctaaaaggaaaaattttgaatgttgaaaaagctagattagataaagttttatcttcccaagaaataggaacgcttgtaacagctttaggttgtggaattggaacagatgagttcgacgctgataaattaagataccacagaataattataatgactgatgctgatgttgatggctcccaacataagaactttgcttttaacattcttcttcaggcaaatgttgaaa

SEQ ID NO: 294459 - DNA, 889 bp, Unknown
  Bacterial polypeptide expressing nucleotide sequence isolated from the Sargasso Sea
tcttcttttaaaaaatctgcaagaattgttggtgatgtaatgggaaaatttcatcctcatggtgatcaagcaatttatcacagtttagttagattggcccaggatttttcttcccgagtcactttgattgaaggtcaaggtaattttggaaatatagatggagataatgcagcagcaatgagatatactgaggcaagattagaagagataactgaacttttttttgatggcatagaagaggactctacgacctttagtgagaattatgatggtcaaaacttagaacccgatgttttaccatctaaattgccaaatattttattaaatggcgcaactggtatcgcagtaggaatggctactaacattccaccccataatttattagaattaaatgaatgtattattcaacttattaaaaaaccaaattctttagattctgaattattaaaatttattaaagggccagatttacctaccggtggagaaattatacttagttctattgaaaagaaaagcatatacaaaaaaggatttggttcttttttaattaaatcaaaatggcatcaagaaaaaattaaaaatggaatgtatgaaatagtaataacagaaattccttttcaagtgaataaaataaaaattatagaacagctagctaacttaatacatttaaaaaaaataccactagatgatgtaagagatgaatctgacgagaatattagaatagttcttaagccaagaaatagaaatattgataaaagtaaacttgttgatttgtgtttcaaattaactgatttatcaataaaatattcttgcaactttaatgttttggaaaaaggacgcataccaaaacagttaggtttaaaatctatacttactcaatttatagatt

SEQ ID NO: 294460 - DNA, 898 bp, Unknown
  Bacterial polypeptide expressing nucleotide sequence isolated from the Sargasso Sea
atgggttctcaaaaagaaccagatattcttccagcccaacttccatttttattgttgaacggctcatcaggtattgctgttggcatggcaacaaacatacctcctcacaacctaggcgaaattgtagatggtttagttgctctagtaaaaaataaagatataagtgataaaaaactttctaaaattattaaaggacctgattttcctacaggaggagaattaatttatagtcgagcaatagaagaactttatgaaacaggaaaagggtctctaacaataagaggagttataaatactgaagaagtaaatttaggaaaaggaaaacataaaagaaatgcactaatcattacggaacttccttaccagatcaataaagcaggttggattgaaaaacttgcagaactggttaattctggaaaaattgatgggatctctgatattagggatgagagtgatagagatggaatgagaattgtaattgagcttaaaaaagattctaattctgaacttgttatttctaatttatataaaaaaacaactctccaaacaaactatggtgcgatattcttggctttaattaaaggcaagcctatacaactaaacctaaaaaagtatctcaactattttcttgaatttagagaagaaactattagaaaaagaactcattattttctaaaaaatactcttgaaaaattagaaatatcagaaggtttatctaaaacaacaaaaaacataaaaaaagttattgaaattattgaggaatcgcaaaattttgtagaagctaaatcaaaattgattgaaaatttttccttaagtgaaaaacaagcaaattcagttttggaaatgccattaagaaaattgacaaatctagaaaagaagcaaattgttgagaaataaa

SEQ ID NO: 294461 - DNA, 953 bp, Unknown
  Bacterial polypeptide expressing nucleotide sequence isolated from the Sargasso Sea
acagactggcaaaccttttaagaaaggaactactatttgctttaaacccgacaaaacaattttttctggaggaattgaatttgaatatgctcttctttcatccagattaagagaattagcttatcttaatggcggagtaaaaattgtttttagagatgaaagaaatcaattatcagatggttcttataaagaagaaatttacttatatcaaggaggaattaaagaatatgttgaatacatgaatgctgaaaaagagtccattcatcctgaaataatatatgttgactcacagaaagaaaatgtttatgtggaagcagctttgcaatggtgttcagatgtatattcagataacattttaggatttgcaaataatattagaactattgatggaggaactcatatagaaggtctaaaaacagttttgacaagaaccttcaacaatcttgcaaaaaagagaggcaaaagaaaagatattgaaaaaaatttagctggtgaaaatattagagagggcttgaccgttgttttatcggtaaaagttcctgatcccgaatttgaaggtcaaacaaaaactaaattaggaaatactgaagtaagaggaatagtggattctctcattggggatgcccttacaaaatatatggaatttaatcctggaattttggacttaattcttgaaaaagcaattcaatcatttaatgcagcagaagctgcaagaagggcgagagaattagtaagaagaaaaagtgttttagaaagctctactttgccgggtaaattagcagattgtagttcaagagatccctcagaatcagaaatttatattgttgaaggagattcagcgggaggttcggcaaaacaagggcgagatagaaattttcaggctattttgccctctagggggaaaatcctttatattgaaaaaactgacgatactagaatttataaaaatactg

SEQ ID NO: 294462 - DNA, 832 bp, Unknown
  Bacterial polypeptide expressing nucleotide sequence isolated from the Sargasso Sea
tgagaaaaatggagtaccagtagaggtagccatgatttataatacatctttttcagaaaacttacattcttatgtaaataatatcaatacacatgaaggaggaactcatctctctggttttagaagaggcttaaccaccacattaaaaaaatatgctgatagttctggccttttagataaactgaaatttgaaatttctggtgatgactttagagaagggcttacagcgattgtatccgtaaaggttgctgaaccacaatttgaaggacaaactaaaactaaacttggtaatagagatgttacttctgcagtttctcaatctgtatctgaaatgcttgaaaactatttggaagaaaatccaaatgatgcaaagattatagtccaaaaagtgattctcgctgctcaagcaaggcatgctgctcgtaaggctcgtgagatgatacaacgaaaaactgtaatgagtggtggtggtctaccaggaaaactatcagactgttcggagcaagatccttctttatgtgaggtttttttggtagagggagattctgcaggagggacagcaaaacagggaagagatagaaattttcaagcaatattgccattaagaggaaaaattttaaatgttgaaaaagcaatgcaacacaaagtttttgagaatgaagaaatcagaaatatctatactgctttaggtgttagtattggcacagaagatgacactaaagctttaaacctggaaaaattacgttaccataaaattgttattatgtgtgatgcagatgttgatggtagccacatttccaccttgattttaactttcttttttcgatatatg

SEQ ID NO: 294463 - DNA, 886 bp, Unknown
  Bacterial polypeptide expressing nucleotide sequence isolated from the Sargasso Sea
gcagctgttgctagagaatgttgcgagaaaagccagagaaagtgtgagaagaaaaggagcattagagcttacagggctgcctggaaaacttgcggattgtcaaaattcaaaacaagaaggaacggaactttttattgttgagggagattcagctggcggttctgcaaaacaaggaagaaatcgagaatttcaagcagtattaccattaagaggaaaaatcttaaatacattcacagaaactaatggaaagaatggaaaatttacagattataaaacaaaatctttatctaaaatgatgtcatcaaatgaaatagttactcttatcaatgcacttggacttgatccaaaagctgatgaacttgatttaaaagatcttagatatggaaaaattataataatgacagatgcagatgttgatggttcacatataagagctcttctattaactttttttaataataaaccgtttaacaaacttattgaaaatggaaatgtttatcttgctcagcctccattatttaaaataagcaagggttcaaaaggtatttacataaaagatgaagcagatttagaaaaatatctaattaataattctaaagaactaaaaaaaataaataaaaaaagtaaagaatttcaaattaagcttagcgaagaaaaatctaaaattagcattcaaagatttaaaggtttgggtgaaatgaacccaattgaattatggaacactactttaaatcccgatactaggaatttgcttcaagtggaatattctaaaaaaaatccaaaaaaagatcaagatttaatatatactttgatgggaaatgatgtttctttaagaaaggattttattgttgaaaatgcaataaatgttgcaaatttagatatttaa

SEQ ID NO: 294464 - DNA, 886 bp, Unknown
  Bacterial polypeptide expressing nucleotide sequence isolated from the Sargasso Sea
atgaatgaagctggttatgtttctggaaaaccttcaagaaagtcagctagaatagtgggtgatgtaatgggtaaatatcatcctcatggtgattcagcaatttatgatgcaatggttagattggcacaggatttcagtatgagagttcctctgattgacgggcagggtaattttggttctatggatggtgattcagctgctgcaatgagatatacggaagctaaattatcttctatttcatcttttctggttaatgatatcaatcatgaaacagttacctttaaagagaattatgatggtacaactttagaaccagatttacttccggctgaatttccaaatttacttattaatggatcagaaggaatagcagttggaatggcaactaagataccacctcattgtccatctgaggtaattgcagcatgttgtaaatttgtggaaaaccctgatgtatcagatgaagatttacttagtttggttgagggacctgattttccaaccggaggaattatagttgggagagcaggaattagaagtgcatacctaactgggaaaggttcaatattgataagaggaaaaacaaacattgagacaacaaaaaagggaaaagattcaatcgtaatatctgaaattccttttgctgtaaaaaaatcaaatttaatagaaacaatagctaaagtttcaagagacaaaattattgaaggaatatctgagttaagggacgagtctaatagagaaggtgtacgcattgtcattgatttaaagcgtgatgcacagtcagaggtaattctaaaccagctatttaaatttacacctttacaaacttcctttggaattaacatgttagctctaaataaaggtgtccctgaattacttaattaaa

SEQ ID NO: 294465 - DNA, 958 bp, Unknown
  Bacterial polypeptide expressing nucleotide sequence isolated from the Sargasso Sea
agaaggattgacagctattttatccgttaaaatgcctgacccaaaattttcttctcaaacaaaagataaactagtttcttccgagattaggaatattgtagaatcaattgtaacagataaggtaacaatctggtttgatcaaaatccttcagttattaggatagttttagacaaagttttacaagctgcaatagcaagagaccttgcaagaaaggcaagagatagcgttagaagaaaagggtctctcgaactatcaggtcttcctggaaaattggcagactgtcaaatttcatcgatggagggcacagaattatttatagtagagggagattctgccggaggttcagccaaacaaggcagaaagagagaatttcaagcggtccttcctctaaggggaaaaattttaaatacttatgtaaatgaaaacaaaaaaagaaatggagctaatggtagcactgaaaataaaacattgtctaaaatgatgtcttcaaatgaaatagtgaccttaataaatgctttgggtacaggctcaacaaattttaatcttgaagacctaagatatgaaaaaattattataatgactgatgcagacgtagacggttcacacattagaactttattactcactttttttaacaataaacccttcaatgaattaattgagaagggtcacctttatttggctcagccgccactatttaaagtcacaaaaggatcaaaaagcgtttatatcaaaaatgaaaaagatttagaaaagtacatactaaaatcaaaagagaacggtttgaagaaagttaaaaaatctgaatttgaaaaatttattaatgaagaaaaacaaaagttaaatatacagcgttttaaaggattaggcgaaatgaaccccgaagagctttgggatacaactttaaatcccgaaaacagaactttactaagagttgaatattccaagggaacaaaa

SEQ ID NO: 294466 - DNA, 320 bp, Unknown
  Bacterial polypeptide expressing nucleotide sequence isolated from the Sargasso Sea
aatgacaaaaaataacaattctaaataccaggcagactcgattaaggttctaaaaggacttgaggcagtaagaaaaagaccaggaatgtacattggtgatacagatgatggtaccggtttacatcatatggtttacgaagtagtagacaattcaatcgatgaagcactagcaggctattgtaataaaattgaagtctttatgaacaaagatggatccatttcagttaagataatgggtagagggtatactactgatttacataaaacagaaaagaatcagctgctgaagttatatgacacactgcacgcaggtggtaaat

SEQ ID NO: 294467 - DNA, 570 bp, Unknown
  Bacterial polypeptide expressing nucleotide sequence isolated from the Sargasso Sea
aatgacaaaaaataattcaaacaattaccaagctgactccataaaagtcctaaaaggtttagaagctgtaagaaaaagaccaggtatgtatattggtgatactgatgatgggaccgggttacatcatatggtttacgaggtcgtagataactcaattgatgaagctttggcaggttattgtaaaaaaattgaaataagtataaacgatgataactctgttacagtgattgatgatggtagaggaattcctgttgatattcataagggagaaaaaaaatcagctgccgaagttataatgactcaacttcatgctggtggtaaatttgatcataattcctataaagtttctggaggactacacggagtgggagtatcagttgttaatgctctttcagagagattaaaacttacaattaatagagataataaaaaatattacatagaatttaaaaatggagacgctaaaacttctttaaaacaagttggtaaatctaaaactagtgggactgaaattaattttgttccatcgaaagatatatttacatcaattaaatttagtttttctgtatt

SEQ ID NO: 294468 - DNA, 798 bp, Unknown
  Bacterial polypeptide expressing nucleotide sequence isolated from the Sargasso Sea
tttggttaataaaaatcaagcaaacgtatttaaaagaccgatttatatttcgggtgaaaaagataatgttattgtagaatgttcactaaaatggaatgcaggatattcagaagatgttttacctttcgctaataatattcaccaaagtgatggaggaacacatttattaggatttagaagtgctttaacaagagtaataaataaatatgctgcaagcaccaatctgcttaaaaaaaataaaatttcactcgaaggaaatgacattagagagggtcttacaggtgttttatctataaaaatacctgatcctaaattttcttcacaaacaaaagataagctcgtttcttcagaggttagatttatagtagaatctataatcagcgataaattgtccacctggtttgatcaaaacccaggtgttacaaaaatagtattactaaaaatagtacaggcggctatagcaagagatgttgcaagaaaagcaagagaaagtgtaagaagaaaaggatctttagaattatcaggtcttcctgggaagctagcagattgtcaaatggggaaatctgaaggaacagagctttttatcgttgagggagactcagcagggggttcagcaaaacaaggcagagatagaaagtttcaagcagttcttcctctgagaggaaagatattaaatacatttatagatactaattcaataaagacaaaaaatggaaatggtgaggattttcaaaataaagttttttcaaaaatgatgtcatcaaatgaaatagtaacgctaataaatgctttaggaac

SEQ ID NO: 294469 - DNA, 499 bp, Unknown
  Bacterial polypeptide expressing nucleotide sequence isolated from the Sargasso Sea
gcacttggttgtggtattggagaagaagattttgatataaataacttaagatatcatagaattataataatgacagacgcagacgttgatgggtctcatataagaaccttgttattaacatttttctatagacagatgtatgagatagttgataaaggccatatttatatagcccttccccctttatataaaattacaaaaggaaaagagtttttctatgcttctgatgaaaaagagaaagataaggcgataaaatcattatcaaaatcaggaacaaggggtctagaggttcaacgctataagggtttgggagaaatgaaccctgaacaactttggactacaaccatggaccctcagaatagaagaatgatgagagttgatattaaagatgtgcaggatgccaatgaatcatttgaaattcttatgggtgatgacgttgaaccaagaagagagtttattgataaaaatgcattaacagtaaaagaattagatatttagt

SEQ ID NO: 294470 - DNA, 650 bp, Unknown
  Bacterial polypeptide expressing nucleotide sequence isolated from the Sargasso Sea
aatgccaaaaaattcaaaaaaaataaaaaaccaagcatatgcagctgactccattaaggtattaaagggtcttgacgctgttagaaagagaccaggtatgtatatcggagataccgatgacgggtcaggtcttcaccacatggtatttgaagtggtagataattctatagacgaagctttagtaggatactgtaaaaatatttctgtaacaatgaataaggacaatagtattacagtcgaggatgatggaagaggaatacccgttgatatgcataaaggtgaaaagatgtcagcagccgaagttataatgacccaactacacgcgggaggaaaatttgatcacgattcatacaaagtctcaggaggactacatggggtaggagtatcagtagttaatgctctttcagaggacctggaacttaatatttatagggagggaaaagaatattcaattagttttaaagatggtaattcggttaagccactaaaatctattggaaagacaaaaaaaactggaacaaaaataacttttcttccatcaaagaaggtattttcatcaatcaagtttagctcaacaattcttcaaagaagaatgcaagaacttgcttttttaaacaaaggaatatcaataaatttatttgacaagacta

SEQ ID NO: 294471 - DNA, 863 bp, Unknown
  Bacterial polypeptide expressing nucleotide sequence isolated from the Sargasso Sea
tcaatctgtatacgatgccttagttagaatggtccaagacttttcaatgagtttacctttagttgacggtcaaggaaatttcggttcaatcgatggagatccagcagcagcaatgagatatacagaaactagattgtcaaaagtttctcagtatttaactgatgatattgaaaaaaatactatactttttaaaagtaattatgatgaaactgaaagagagccaacggttttacctgcacaatttcctaatttattagtaaatggggcaggaggaatagcagttggtatggcaacaagtataccaccacataatttagcagaagtaattaatggtactttagctttaattgataacaaggatatcaaaattaaagaacttatgaaacacattcctggaccagattttccaacaggtggtgttattattggtaaagatattattaaacaaggctataacaaaggcagaggttcttttaaaattagaggagaaatttcaatcgaaaatttgaaaaatggaagagagagactcgttattacttcaataccttatcaagtaaataaatctgttttaaatgagagaatagctcaattagttagagaaaaaaaaattgaaggtataaaagacattagagatgagtctaacagagagggcataagagtatcaatagacttaagaaatggagttgaacctgaaactgttaaaagacaattatataaaaatactcaaatagaaagttcattcggttttaacactttagctattgttgatggcaaaccacaaacttgtaatcttaaagattttttatataattttttaaattttagagaagatgtagtacttaaaaaaacaaaatttgatttaa

SEQ ID NO: 294472 - DNA, 907 bp, Unknown
  Bacterial polypeptide expressing nucleotide sequence isolated from the Sargasso Sea
tgcccttcctgatgtaagagatgggttaaaacctgttcatagaagaattttatatgcaatgtataaaggtggatacgattggtctaaacaatttagaaaatctgcaagaatagttggagatgttattggtaaatatcaccctcatggtgatcagtctgtctatgatgctttagtaagaatggtacaagatttctctatgagtttacctttgattcaaggacaaggaaattttggctctatagatggtgatcctgctgcagcaatgagatatactgaaactcgcttgtcaaaagtttctcaatatttaattgatgatattgaaaaaaatacaatttccttcaaaagcaattatgatgaaactgaaaaagaacctagtgttttaccagcacagtttccaaatttattagttaatggagccggtggtatagctgttggtatggcaacaagtatacctcctcataatttaggtgaaattattgatggtactttggccttaatagaaaataaagatattaaaattagagagttaatgaaacatatacctggtccagattttccaactggcggtttaattataggtaaagatataattaaacaagggtataacaatggaagagggtcctttaagataagaggtgaaatatcaattgaacaacaaaaaaatggtcgtgaaagactggtaataacttcaataccttatcaagttaataaatctgttttaaatgaaaggattgctcaattagtaagggaaaaaaagatagaaggtataagagatattcgagatgaatcgaacagagaaggtattagggtagcaatagatttaagaaacggtgtagaaccagaaactataaaaagacaattatacaaaaatactcaaatagagagttcgtttggttttatactttag

SEQ ID NO: 294473 - DNA, 743 bp, Unknown
  Bacterial polypeptide expressing nucleotide sequence isolated from the Sargasso Sea
aagaaataaagataaagatggtaatgatgtccatgaagaattttattctaaagatggccttgtagaatttatcaaattcttggatgatactagggagccaataatgaaagatgttatagcttttgaaggagaaaaaaatggtgtaccggtcgaagtagcaatggtttacaacacctcatattcagaaaatcttcactcatatgtaaataatatcaatactcatgaaggtggaacacaccttagtggatttagaagaggacttactcatactctaaaaaaatattctgaaagttcaggaatgttagacaaattaaaatttgatatttctggtgatgattttagagagggtctaacagctataatttctgttaaagttgctgaaccacaattcgaaggccaaaccaaaacaaaacttggaaataaggaggtctctgcttctgtaagtcaagcggtgtctgagatgttaagagattatttggaagaacatccagatgatgcaaaaactattgttcaaaaggtaattttagctgcccaagctagacatgctgcacagaaggctcgtgagatggttcaaagaaagtcagtaatgagtattggaggtcttccaggtaaactctcagattgttctgaacaagatccagctaaatgtgaagttttcttagttgagggtgactccgctggtggaacagctaaacagggaagagacagagctttccaagcaatattacccctaagaggaaaaa

SEQ ID NO: 294474 - DNA, 643 bp, Unknown
  Bacterial polypeptide expressing nucleotide sequence isolated from the Sargasso Sea
tggaggatcggcaaacagggcagggacagaagctttcaggccatattgcctcttaaaggaaaaattataaacgtacaaaaagcacgcctagataaagtcttatcttctaatgagattggaacccttataacagctttagggacaggcattggcactgacgagttttcactagaaaaacttagataccatagagtcataataatgacagacgcagacgtagatgggtctcacattagaacactcttacttactttcttttacaatcagatgtttgctctgttagaaaaaggacatatttatttggccttacctcctctttacaaaattaaaaagggtggaaaaacacactatgcaaaagatgaggaagaaaaagacgcaattcttaaagagcttagaaaagaagcagcagaaggctctagacctcctgagatacagagatataaagggctaggagaaatgaaccctgaacagctgtgggagacaacatttgaccctaaacacagaaggattgtgcagattactgcagaagatacaagagatatcattgatgagatctttgaaacattaatgggcgatcaggtgcagccaagaagaaagtttattgatgataatgctcttagagcagagaatatagacttttaaa

SEQ ID NO: 294475 - DNA, 722 bp, Unknown
  Bacterial polypeptide expressing nucleotide sequence isolated from the Sargasso Sea
aatgactgattttgcgaaacaaatcttaccgataaatattgaagatgagctaaaaacttcatatttaagctatgctatgagtgttattcatggaagagcacttccagatgtaagagatggcctaaaaccagttcatagaaggattttatatgcacagcatgttttaaggaatacatatcgacaaccatacaaaaaatcagcacgagtagttggagatgtgataggtaaatatcatcctcacggtgattcagctgtatacgaagcaatggttaggatggcgcaagacttttctatgagatataccttggtagaaggtcagggtaattttggttcgatagatggagattctccagctgctatgcgttataccgaagtcagaatggcaaaaatcactgacatgattctcaatgatattgagaaagagacagtaagttactctcctaattatgatggaactgagcaaatcccagatgttatgcctacacgaattcctgcattacttgtgaatggctcctcaggtattgcagttgggatggcgacgaatgttcctcctcataatttaacagaggttttgaatggctgcttgcttttattagataagccgaaagcaagcattgatgaaattattcaaattattacgggcccagattttccaacaggtggaaccattgatggaagaattggtatttatgagggctacaaaactggcaggggtattatcc

SEQ ID NO: 294476 - DNA, 864 bp, Unknown
  Bacterial polypeptide expressing nucleotide sequence isolated from the Sargasso Sea
tattaaggtcttaaaaggattagatgcagtccgaaagagacccggtatgtatattggtgatactgatgacggcacaggactacaccacatggtttttgaggtcgtagataactctgttgatgaggccttggcaggtttttgcacacacatagaggtaatcattcatgaggatgactctataactgtaaaagacaacgggcggggcataccagttgataaacataaaacagaaaagacttctgctgctgaggtcatcatgacagtattgcacgccggaggtaagtttgatgatgattcatacaaggtttctggaggcttacacggtgtcggtgtttcagtggtaaatgctttgtcagaaacgttaaacctaagaatacacaaaaacggacatacttatgaacaagactatgtacacggtgttcctcaaaaaccgcttaaaaaagggtctaaaacagacagaagcggatcaacagtaaccttcaagccaagctctaaaacatttactaataccacttatagttttgatattttatctaaaagattaagagagctttcattcttaaactcggggctaagcattaagcttactgatacaaggtctggaaaagaagaagagttttactttgaaggcgggatcagtgcatttgtatctcatctaaacaaagttcaaagtcccgtacatgagtctgtcatcaatttcagcaagacaattgacgatataaccgtagacattgctatgcaatggaatgagtcttacagagaaaacatgtactgttttgcaaacaccataaggcaaaaagatggtggaacgcacttagctggctttaggggcgccctaacaagaacaataaatacatatataga

SEQ ID NO: 294477 - DNA, 924 bp, Unknown
  Bacterial polypeptide expressing nucleotide sequence isolated from the Sargasso Sea
aagaaatccatcagaaataaaaaaggtaatagataaaattattgaagcatcaaacgccagagaggctgcaaggaaagcaagagaattaactagaagaaaaacaggtcttgaaaatacttctctccctgggaaacttgctgattgccaagaaaaaaatccagagttatctgaattatttattgtcgaaggagattcggcagggggatctgctaaacaaggaagagacaggaagaatcaagcaatacttcctttgagaggcaagattttaaatgtagaaagagctaatgataaacaggtcttaacaagtaacgaaattggagcacttattactgcaataggtgcaggtgtcggtaatccaaccgatgataatgcacaaaataaaattgaaggaaaatttgatgtttcaaaaatgagatatcacaaaatagtaattatgactgatgctgatgttgatggcagtcacattagaactttattactaacatttttttatagacacatgaaaccaattattgattcaggaagattatttattgctcaaccacctctctatagacttaagaaaggtaattctactgtttataaaaaagacgataatgatcttgaagactatcttattgaagaaggcttaaaaaatactatttttgaaaatactcagaaatcccaaattgcaggagaagaattaaaacaaattatttatctttcaaaaaaaactaaaaacctagttcttcctttattaaggagagttgataacagcgacataattgaacatgcggcgatagtaagaggattggatttacggaatcttaaagataataagattggtcaagaattagcaaaatatcttcaacaaagattaaatcttatttcaaatattgcacaaaaaaactggatagtaaatcatactaataattctattttatt

SEQ ID NO: 294478 - DNA, 727 bp, Unknown
  Bacterial polypeptide expressing nucleotide sequence isolated from the Sargasso Sea
atgaaccaagaagagttagattccaacaagaaagcagcacaagaaaaagcagctcaatattccgctgaaaatatcaaagtcttagaggggttagacgctgtaagaaaacgtcctggtatgtatataggctcaacagggccagacggcctgcatcatatggtctatgagattgtagataattcaattgatgaggctatggcagggttttgttcagaaatagagataaaaatccatatagatggatctatctcaatcaaagataacggaagaggtatacctgtttcagagcacgctactgaaaaaaaatcagctcttgaagttgttatgactgttttacatgctggcggtaagtttgatgactctgtcttttctttttcaggtggtttacatggggtgggcgcctctgttgtcaatgctctttctgagtggactcaagtagaagtgcggcagaagggtaaagtctatgcgcaagcttacaaacaaggcacaccggatgaagcggtcaaagaggttggagaaacagaagaaacaggaacctatacacactttaaacctgacgcgactattttttctgaaacaaagtttcaatttgatgttttacaaagaaggtttagagagctctcctttttaaataagggcattaagataattcttattgatgggcgcagtgacgacaaagcggagttcttttttgaaggagggctcctatctttcggtgagtattaaa

SEQ ID NO: 294479 - DNA, 358 bp, Unknown
  Bacterial polypeptide expressing nucleotide sequence isolated from the Sargasso Sea
atgataaaaaacacaaaaaataaggattatcaggcagactctataaaagttctaaaaggtcttgatgcagttagaaaaagacccggaatgtacatcggtgataccgatgacggtactggattacatcatatggtttatgaagttgtagacaattccattgatgaggcgctggcaggtcattgtaaaaatatccaagttgatattaattcaaatggtacaattactgtaaaagatgatggtagaggaataccaactgatattcacaaaggagaaaaaaaatctgctgctgaagtaataatgactcaactgcatgcaggtggaaagtttgatcacgattcatacaaagtatctggaggtt

SEQ ID NO: 294480 - DNA, 622 bp, Unknown
  Bacterial polypeptide expressing nucleotide sequence isolated from the Sargasso Sea
aatagttggagatgttatcggtaaatatcatccccatggtgatcagtctgtctatgatgctttggtaagaatggtacaagatttctgtatgagtcttccgttaattcaaggacaaggaaattttggttgtatagatggtgatcctgcagcagcaatgagatatactgaaactcgtttgtcaaaagtttcacaatatttaattgatgatattgaaaaaaatacaatttctttcaaaagcaattatgatgaaagtgagaaagaacatagtgttttaccagcacagtttccaaatttattagtaaatggagccggtggtattgctgttggtatggcaacaagtatacctcctcacaacttaggtgaaattattgatggtactttagccttaatagataataacgatattaaaattagagagttaatgaaacatatacctggtccagattttccaaccggtggtgtaattataggtaaagatataattaaacaagggtataccaatggaagagggtcctttaagataagaggtgaaatcttagttgaacaacaaaaaaatggtcgtgaaagactggtaataacttcaataccgtatcaagtaaacaaatctgttctaaatgaaagg

SEQ ID NO: 294481 - DNA, 898 bp, Unknown
  Bacterial polypeptide expressing nucleotide sequence isolated from the Sargasso Sea
aaaagacagtttaaaaacaaaaatgaaaatgatctttttaaaaaaccaatttacattgaaggtttaaaaaataatattgatgttcaatgctcccttaagtggaatgcagggtatagtgaagatgtattaccttatactaataacatttatcaaaaagacggaggaacacatcttcttggatttcgaagtgcattaacaagagtagtaaataaatatgcaaatgaacaaaacttgttaaaaaaaaataaagtttctttatcaggagatgacgttaaagaaggattaacttcagttctttctatcaaaattcctgaccctaaattttcatctcaaacaaaagataaattagtttcatcagaagttagaaatattgttgaaactatcattaatgagaagctgtcaatttggtttgatcaaaatccatcaatttcaaaaattatcttaactaaaattatccaggccgcagtagcaagagatgttgctagaaaagcaagagaaaatgtaagaagaaaaggagctttagaattaacgggtttgcctggaaaattagccgattgtcaaaattcaaagcaagatggtaccgaactatttattgtagagggtgactcagctggtggttcagccaaacaaggcagaaaccgtgaaaatcaagcagttttgccgcttagaggaaaaatattaaatacttttacagatcttaatgaatctaaaaagaatggaaatgccaatgatttaagaactaaaagcttatcaaagatgatttcatcaaatgaaatagttacattgataaatgcacttggtcttgatccaaaaaatgaggatatagatctcaaagatttaaggtatggaaaaataataataatgacggatgccgatgttgatggctcacatataagag

SEQ ID NO: 294482 - DNA, 520 bp, Unknown
  Bacterial polypeptide expressing nucleotide sequence isolated from the Sargasso Sea
catgagcgacgcttccaaggtccagaacgcctacggcgccgagcagattcaggtgctggaggggcttgagcccgtacgcaagcgcccgggcatgtacatcggctccaccgggccgcggggcttgcaccatctggtgtacgaagttgttgataactcggttgatgaagccctagcgggtcattgtgaccgcattgttgtggtcctcggtgaagacggctccgcctccgtgagtgacaacggccgcggcattcccactgatgtgcacccccgcaccggcaagagcgccctggagacggtgctcaccgtgttgcatgccggcggtaagtttggcgccggtggttacaaggtgtccggcggtcttcacggcgttggcgtctcggtggtgaacgccctgagcgaatgggtgcaggtgacggtgcgccgtcagggccaggtgcatcgccagcgttttgagcgcggcgcggccatcgggggactggcgtcggagtcccaacctgcgtcggagtccggggagaccggc

SEQ ID NO: 294483 - DNA, 949 bp, Unknown
  Bacterial polypeptide expressing nucleotide sequence isolated from the Sargasso Sea
aaaatggcaaaaaaatacaattcttatcaggcagattccatcaaagtcctaaaaggacttgaggcagttagaaaaagaccaggaatgtatataggtgacactgacgatggcacgggtctacatcacatggtttacgaagttgttgataactctattgatgaggccttagcaggacattgtaaaaatatttcagtagatattaatcaagatggatcagtatcagtcagggatgatggaaggggtgtaccggtcgatattcataaaggtgaaaaaaaatcagcagctgaagtaataatgacccaattacatgctggtggaaagtttgatcacgactcatataaagtttcaggtgggctacatggtgttggtgtttctgtagttaatgcattatctgagaggcttgaacttactataaatagagatgggaaaaaacattttattgaatttaaaaatggtgatgcaaaatcacctttaagagttgttggtaaatcaaaaaatacaggtacagaaataaaatttttaccctctaaagaaatattttcattaaataaatttagctttttaacattgcagaaaaggatgagagaattagcttttttaaacaagggaattaaaataatattaactgatttaagtcaaaaaaaacctaaaagtgttgagtttaaatttaatggtggaattgtcgaatttgttgaatttcttgatgaaaaaagagaaaaattaaaaaataaaagcgataatgatttgtttagaaggccaatttatattgaaggtcttaaaaacaaaattgatgttcagtgttctttaaaatggaatgctggatataatgaagatgtatttccttatacaaacaatatttatcaaaaagatggcggaacccatttgttaggatttagaagtgcattaactagagttataaacaaatatgcgtctgaacaaaatctttaaa

SEQ ID NO: 294484 - DNA, 483 bp, Unknown
  Bacterial polypeptide expressing nucleotide sequence isolated from the Sargasso Sea
tatgtcggatagtgagtcttataattcggacagtattaaggttttaaaaggtcttgaggccgtaaaaaaaaggcctggcatgtatattggtgataccgaggatggcactgggcttcaccatatggtccatgagttggtggataactcgatagatgaagcgctagcaggctattgtgacgagataatagtcattattcacaaagaagaggcggtaacggttaaagataatggccgtggaataccagttgatatgcatccagaagagaaggtgagtgctgcggaggtgataatgacgactctgcacgctggggggaagtttgacgataacagctacaaagtatcgggcggcctgcatggcgttgggatttcggtagtaaatgctttatcagaaaaactggtgttgagaatttctagagagggctcgctatacgagcaggagtatagagatggtgctcctatcgctcctattgagaaagtcgccga

SEQ ID NO: 294485 - DNA, 884 bp, Unknown
  Bacterial polypeptide expressing nucleotide sequence isolated from the Sargasso Sea
gatgcgttatcataaagtgattattatgactgatgctgatgtagatggtagccatattagaacattacttttgacttttttttatagacatatgaaacccattatcgacgagggtagactttatatagctcaacctccactttatagagctaaaaaaggtacatcaattcaatatttaaaagatgaattacaacttgaagattttttaattaatgagggaacaaaaaatttagttttagaaatacccaatgctaaaaataaatttaaggcaatatcaggaatagaattattaaatataattaatttagctagaaaggctaaaaaactaataatgcccctaactagaagaatagataatcaaaaagtaattgagcaagcttctataataagagcaattaataaggaaaatttaaatagcgatgaaataggaaatgaaattgctaaatatcttcagctaagactaaacactattgaaactaaatcctgggaagtaaaatatagtcctggtaaattattgataaataaaaatgaaagaggtgtaagtcattcatatgaaattaataatgaatttcttattactcctgaggctaaatctttaaataaattacgtgatgatttaatggaaaattttggaattttaaaaaatggttgcgcaggtattataaaaaactctaataatgaatataaaattaacgggccaattgatttaattgagaaaattttagaaataggaaaatctggtatacaggtcaacagatacaaaggtcttggagaaatgaatcctgatcaattatgggaaactacattagataaaaatttcagatctcttttattggtaaaaattgatgaagttaatgaagcaaattccttatttgaaactttaa

SEQ ID NO: 294486 - DNA, 748 bp, Unknown
  Bacterial polypeptide expressing nucleotide sequence isolated from the Sargasso Sea
atgacaaaaaataacacataccaagcagattctataaaagttttaaaaggcctcgaggctgttagaaaaagaccaggtatgtatattggtgatacagacgatggaactggtttgcaccatatggtttatgaggtaatagataattctattgatgaagctttagctggtcattgtaaaaatataaatgttagaattaatgcagatggaacagttacggttagtgacgatgggaggggaatacctgtagatattcacaaaactgaaaagaaatctgcagcagaagttatcatgacacagcttcatgcaggaggaaagtttgaccatgattcatataaagtatcaggggggttacatggcgttggtgtttcggttgtaaatgcactttctaaaaaattgcaactagagattaatagagatagtaaaaaatattttatagagtttgaggatggtgaggcaaaagcaccgttaaaagcaattggaaaatcaaagcaatccggtaccaaaattacttttttgccttctacagaaattttttcttcaatctcgtttagtgccaatattctaattaaaagaatgagagagttggcatttctaaacaaagggatcaaaattatttttattgatgccagcttaaaaaaagaaaaaatatctgaattcaagttcgatggaggcgtaatagaatttgtcgactttttagatgaaaaaagagaaaagttacaaaataaaaatggaaatgatttattagaaa

SEQ ID NO: 294487 - DNA, 458 bp, Unknown
  Bacterial polypeptide expressing nucleotide sequence isolated from the Sargasso Sea
aatgggtaaaaatcttcaatccaactacggtgcggactcaatcaaggtacttaagggtttagacgcagtcagaaaaagacctggaatgtacattggtgatactgatgatggaagcggcttacatcatatgattttcgaagttgtagacaattcaattgatgaagcattagccggacactgtgataaaattagaatttctctaaattccaatggatcagttacagtagaggataatggaagaggcatccctacagagattcatcctgaagaaaatatttctgccgcagaagttataatgactcaattacatgcagggggaaaatttgatcaagattcctacaaagtttcaggaggattacatggagtcggagtttcagttgtaaatgctttatcagaaaatttaaatcttaaaatttatagagatagcaatgaatatgaaatcaattttaaaaatggaa

SEQ ID NO: 294488 - DNA, 826 bp, Unknown
  Bacterial polypeptide expressing nucleotide sequence isolated from the Sargasso Sea
ttatcatatgcaatgagtgttataataagtagagcactaccagatgttagagatggtttaaaacccgttcatagaagaattatttacgctatgcacaaaggaggttttgattggacaaaacaatttagaaagtcagcaagaatagttggagatgttattggtaaatatcatccgcatggtgatcaagctgtatatgatgctttagtaagaatggtacaagaattttctatgagtttaccattaattgatggacaaggaaattttggatctatagatggagatccaccagcagcaatgcgttatacggaagcaagattagcgaaaatttctcaatatctcattgatgatattgataaagaaacaatcgtttttaaaagcaattatgatgaaacagaaaaagaacctactgttttaccttctcaatttccaaatttattagtaaatggtgccggaggtatagctgttggtatggctacaagcattcctccccataatcttggtgaagttatagatggaactttggcattaattaaaaataaagatattaagataaatgaattaatgaaatttatacctggtcctgatttcccaactggtggaacaattataggaaaggatattattaaacaaggctacaaaactggtagaggatcttttaaaattcgaggtgaaattggtgtagaaaacttaaaaaacggaagggatagaatagtaatttcatctataccatatcaaataaacaaatctattttaaatgaaagaattgctgaattagttagagaaaaaaagattgaaggtataagagatattagagatgagtcaaacc

SEQ ID NO: 294489 - DNA, 754 bp, Unknown
  Bacterial polypeptide expressing nucleotide sequence isolated from the Sargasso Sea
tacgatgaactgaaaagacctgttgttcttccagcacagtatcctaatttgttagttaatggggcaggtggtatagcggtcggaatggctacaagtatacctccacataatctaggagaaattatagatggaactttggcattaattaataacaaagatattaaaataaatgaattgatgaaacatattccaggaccggattttcctacaggcggaataattattggtaaagatataattaaacaaggctataaaacaggaagaggctcttttaagataagaggagaaattaatgtggaaaacctaaaaaatggaagagatcgtatagtaattacatcaataccatatcaagtaaataaatcagtaatgagtgaacgaattgctgaacttgttagagataaaaaaattgaaggtattagagatattagagatgagtctaatcgagaaggcattagactggcaattgatttaagaacaaatgtagagcccgaaacaataaaaagacagttgtacaaatttacttctatcgaaagttcttttggttttaacactttagcaattgttgataacaagccaaaaacttgcaaccttaaagattttctagaaaattttttaaaatttcgtgaagatgttgtaattaaaaaaacaaaatatgattttaaaaaagctgaagaacgagctcatattctaattggggtcttctgttctgtagaaaatctagataaagttattaaaattattagagggatctaga

SEQ ID NO: 294490 - DNA, 839 bp, Unknown
  Bacterial polypeptide expressing nucleotide sequence isolated from the Sargasso Sea
cctaggttttagaagttcattaacaaggataataaataaatatgcttctgaaaaaaatctaactaaaaaaaataaggtgactataggaggagaagatataaaagaagggcttacggcaattctgtcaattaaaatgccagatccaaaattttcatctcaaactaaagataaattagtttcatcagagataagaaatatagtcgagactatagtaagcgataaagtctcggtttggtttgatcaaaatccttcgattgtaagatcggttttagacaaagttttacaagctgcaatagccagagatcttgcaagaaaagccagggatagtgttagaagaaagggaactttagaattatctggtttacccggaaagttggctgattgtcaaatttctacaatggaaggaacagaactttttattgttgagggggattcggcaggaggttccgctaaacaaggaagaaaaagagaatttcaggcagttctcccattaagaggaaaaattttaaatacatatgttaatgaaactaaaaaaactaatggagctaacggtgctcacgaaaccaaaacattgtctaagatgatgtcgtcaaacgaaatagttacattaattaatgcattagggaccggttctaaggattttaatatagagaatttaagatatgagaaaattatcattatgacagatgctgatgtggatggatcacatataagaactttattgcttactttttttaacaatcgaccatttaaccagctaattgaaaaaggtcatttatatttggcgcaacctcctctttttaaggtaaccaagggtacaaagagtgcatatataaaaa

SEQ ID NO: 294491 - DNA, 433 bp, Unknown
  Bacterial polypeptide expressing nucleotide sequence isolated from the Sargasso Sea
aatgacggatgctgatgtagatggctcccacattcgtactcttttattaacctttttctatagaaaaatgaaagaaataattgatggtggctatctatatcttgcgctaccacccctttatcgagtatctcagggaaaaaaagagtattatgcatatgatgacaacgaaagagacctgatgatagagagaatgcaaaaagagaacaagaatacaaaggtttctatacagcgttacaaagggcttggagaaatgaatccaggtcaattgtgggagaccacaatggacccagaaaccagaaccttaatgcaggttacagtagaaagcgcagctgaagcagcggagacctttcaaaacctaatgggaagcgatgtggaagcgcgtcgaacatttatagagaaaaacgcaaagttcgtagtaaaccttgatatttaa

SEQ ID NO: 294492 - DNA, 291 bp, Unknown
  Bacterial polypeptide expressing nucleotide sequence isolated from the Sargasso Sea
attgccaagggatattgttgatgaaatgaaagaaagctatctcaattattcgatgtctgtgatcgtctcaagagcgctgcccgatgttagagatgggcttaagccagttcacagaagaatactttatggaatgagtgagcttgggtctagctggaacaggccttataaaaaatccgcaagaattgttggggatgttctgggaaaatatcacccccacggagacagctcagtatatgatgcgttagttcgaatggcgcaagagttttccatgagatatgagcttgttgatgg

SEQ ID NO: 294493 - DNA, 868 bp, Unknown
  Bacterial polypeptide expressing nucleotide sequence isolated from the Sargasso Sea
cctatttatgtaacagccacaaaaaacaatgttacagttgagtgttcattagagtggaatgcgggatatgctgaagaagttttaccatttacaaataatattcctcaaaaagacggaggcactcacttactaggttttagaactgcactaacaagaataataaataaatatacagcagatagaaataataaaaaaagtaaaattaacttatcaggtgaagatattaaagagggtttaactgctgttttatcaattaagatgcctgatccaaaattttcatctcaaacaaaagataaacttgtatcatctgagataaggaatattgttgaacatgtgattagcgaaaaggtctcaacatggtttgatcaaaatccttctattgcaaaagttattatagagaaaattactcaagcagcaatggcaagagatgttgctagaaaagcaagagatagtgtaaggcgtaaagggaccttcgaattatctggcctaccaggtaaacttgctgattgccaaattcaaaaaagagagggaactgaactatttatagtagagggagattccgcaggtggatctgcaaagcaaggcagagtcagagaatatcaggccgtgcttccattgcgaggaaaaattttaaatacctatgtgaatggaaaatctaacggtgaagatcaatcaactaaagccttatctaaaataatgtcatctaacgagattgtcactttaattaatgcattaggaactggatctaaagattttaatattcaaaatttaaggtatgataagattataataatgacagatgctgatgtggacgattcacatattcgaacacttttgctaactttttttaataactttccatttaatc

SEQ ID NO: 294494 - DNA, 835 bp, Unknown
  Bacterial polypeptide expressing nucleotide sequence isolated from the Sargasso Sea
aaagactcttatttaagttattcacttagcgttataataggtagagcattgccagatgtgagagacggactaaaaccagtccatcgaagactcctgtacggaatgaaagacttaggcctagatttcaataaatcatataaaaaatcagcgagagtagtaggggatgtcatgggtaaattccatcctcatggtgatacagctctttacgaggctttggtaagaatggcacaggacttttccttaagataccctcttgttgaaggtcaaggaaattttggttccatagatggtgaccctgctgccgcaatgagatacacggaggttaaactttcacgactctcttcacagatcctcgaagacttagaaaaggaaacagtagattttgcggaaaattatgatggatcaactaaggaaccaaaagttttaccgtcaaaaatccccacacttttactaaacggtgcatctggtattgctgtaggaatgtctacaaatataccacctcacaatttcaaagagctttcatcagcaataattgaacagattaaaaagccagaaataactatagatcaattgttacaaataatgccaggacctgatttcccaacaggaggaatagtgcatggctctaaagacgtaattcaacaagcttataaaacaggaaaagggataattaaacttagaggtgttgcaaatattgaaccagaatctaacaagattgtaattaccgaaattccttatcaagtaaacaagagcaagttaattgaaaaaatcgctgatttagtaagagaagaaaaattaaaaggtatatcagatataagagacgaatctaacagag

SEQ ID NO: 294495 - DNA, 945 bp, Unknown
  Bacterial polypeptide expressing nucleotide sequence isolated from the Sargasso Sea
gtagagctctgcctgatgtaagagatgttttaaaaccagtacatagaagaattttgtatgcaatgcataagggaggttttgattggtcaaaacaatttagaaaatctgcaagaatagtaggagatgtaattggtaaatatcatccacatggcgatcaagcagtatatgacgctttagttagaatggttcaagatttttcaatgagccttccattaattgatggccaaggaaattttggttctattgacggtgatccaccagccgctatgagatatacagaaactagattagcaaaaatagctcaatttttattagacgatattgaaaaagatacagtttcattcaaaagtaattatgatgaaaccgaacaagaaccagatgtcctccctgcacagtatccaaatttattagttaatggagcaggaggaattgccgttggtatggcaacaagtatacctcctcataatttaggtgaggttgtagatgctactttggctttaatcaaaaataaggacataaaattaagtgaattgatgaaacatgtccctggtccagattttccaactggtggtattattattggtaaagatattattaaacaaggttataaatctggcagaggttcttttaaaatcagaggcgatattaagattgagcaagctaaagggggtagagaaagattagtaataacctccataccttatcaagtaaataaatctattttaaatgagagaatagctgaattagtaagagaaaaaaaaattgaaggaattagagatataagagatgagtctaatagagaaggaattagagttgcaattgatttaagatcaagtgttgaaccagaaacaattaaaagacaattatataaatatacatccattgaaagttcatttggtttcaatactttagctattgtagataacaaaccaaaagacttgtaat

SEQ ID NO: 294496 - DNA, 831 bp, Unknown
  Bacterial polypeptide expressing nucleotide sequence isolated from the Sargasso Sea
tcgaaaatctgctagaattgttggagatgtaattggtaaatatcaccctcacggagatcagtctgtttatgatgcattagtaaggttagtacaagatttttcaatgagcgttcctttaatttctggtcagggaaactttggatcaatagacggagacccacctgctgcaatgagatatactgagactaagctgggtagaattgctcaatttttaaccgaagatttagaaaaaaatactgttgaatttagaagtaattatgatgaaactgaaagagagccagaagttttaccatctcaatacccaaatattttagttaatggagcaggaggaatagctgtgggtatggctactagtattccaccacacaatctaggcgaggtaattaatgctactattgctttaattaataataaggatatcacaatcagtcaattgatgaaacatttgccaggcccagattttcctacaggcggagtaataattggaaaagatattatcaaacaaggatataacaaaggtagaggctcattcaaaatacggggtgaaatagaatttgaagaaaaaaagggaggtagggatttattgattattaaatcaataccttatcaagtaaataaatctattttgattgaaaaaatagctcaattagtcagagataaaaaaattgaggggataagagatttaagagatgaatctaacagagagggcataagagtagttatcgaattaagaaaaggaattgagcctgaaagtgtaagaaggcaattatataagttaacaaatattgagagttctttttggtttaatactttagcgatagttgaaaataa

SEQ ID NO: 294497 - DNA, 868 bp, Unknown
  Bacterial polypeptide expressing nucleotide sequence isolated from the Sargasso Sea
aaagaaaatgtatatgtagaagcagctttgcaatggtgttcagatgtatattcagataatattttaggatttgcaaataatatcagaactattgatggaggaactcatattgaagggctaaaaacagttctgacaagaactttcaataatcttgcaaaaaagagaggcaaaagaaaagatattgaaaaaaatttagctggcgaaaatattagagagggtttgactgttgttttatcagtaaaagttccagatcctgaatttgaggggcaaacaaaaacaaaattaggaaatactgaagtacgaggaattgtggattctctcattggggaggctctcacaaaatatatggaattcaatcctggaattttggacttgattcttgaaaaagcaattcaatcatttaatgcagcagaagctgcgagaagagcgagagaattagtcagaagaaaaagtgttctcgaaagttctactttacctggaaaattagcagattgtagttctagagatccctcagaatcagaaatttatatagttgaaggagattcagctggtggctctgcaaaacaaggtcgagatagaaattttcaggctattttgcctcttaggggtaaaattcttaatattgaaaaaactgacgatactaaaatatataagaacacagaaatacagtcattaataacagctctaggattaggaataaaaggagaggagttcgacgaaagctctttgagatatcatagagttgtaattatgacggatgctgatgttgacggtgctcatataagaactttattgctgacatttttttacagataccaaagagaacttgttgagaaaagttttatatatattgcttgtccccctcttt

SEQ ID NO: 294498 - DNA, 785 bp, Unknown
  Bacterial polypeptide expressing nucleotide sequence isolated from the Sargasso Sea
ggaattccggttgatgttcataagaaggagggagtatcggcagcgcaattaataatgaccacacttcactcaggtggtaaatttgatgacaatagttataaagtttcaggaggtcttcatggcgtcggggtatctgttgtaaatgccctctctaaaaaattgaccttagaagtccatcgtgacggcggtgaatattatcaagaatataatgagggaaaacctaaagccaaattaaaaaagataaaaaaatctagtaagacaggaacaataattactttctttccatcgaaggaaatttttacatctacaaagtttgaaattgaaaaaatttataagaggattcaagagctatcatttttgaatgcaggcgtttcaattaatgttgaagacaaaaaaacaggcaaatctaaaaaatttaaaaataatggagggctttcaagctatgtaacccatttgaaaggaagaaaacaaggtctttcagatattttcgaatgttctgctaccgaaaatgaggttggagttgaaatttctatgcaatggacagattcttattctgagaatgtattatgttataccaataatatacctcagaaagatggtggtactcacttagctggctttaggggtagcttaactagggtattaaagacatttataaaaaaagaaaatgctaaaaaaacacccacagacttattgggagaagacgttagagagggtttaattgcaataatatctgtaaaagttccagacccaaagttttcttcacaaactaaagaaaagcttgt

SEQ ID NO: 294499 - DNA, 871 bp, Unknown
  Bacterial polypeptide expressing nucleotide sequence isolated from the Sargasso Sea
ctccaagaagaaatgcaacgttcttatttggagtatgcaatgagcgtaatagttggacgcgctttacctgatgcaagagacggtcttaagccagtacaaagaagaatcatatttgcgatgtacgaattaggtttaacacctgataaaccatttagaaagtgtgcaagagttgttggagatgtacttggaaagtaccatcctcacggagatcaagcagtatatgatgcattagtaaagctagtacaaaatttctcaactaaatatcccactcttgacggccatggaaactttggatctgtagataatgatccgccggctgcaatgagatatactgagaccagattagctccaatagctcataaaggatttcttgaagaaattggatcagaaacagtaagtttttcaaataactttgacggttctcaaaaagaaccagatgttcttcccgcccaacttccatttttattgttgaacggctcatcaggtattgctgttggtatggcaacaaatattccgcctcacaacctaggcgaaattgtagatggtttagttgcgttggtaaaaaataaagatataagtgataaaaaactttctaacattatcaaaggacccgattttccaacaggcggagaattaatttatagtaggtcaatagaggaactttatgaaaccggcaaaggatctataacgataagaggagttataaattcagaagaggtaaatttaggtaaaaggaaacacaaaaagaatgcactaatcattacagaacttccttaccaaattaataaagcagggtggattgaaaaactcgcagaacttgtcaattcaggcaaaattaatgggatttctgatattagagatgagagcgaca

SEQ ID NO: 294500 - DNA, 839 bp, Unknown
  Bacterial polypeptide expressing nucleotide sequence isolated from the Sargasso Sea
tctgacattaaagtaataattaataagaacggatcagtaacaattgaagataatggtagagggataccagtagatgttcataaaaaagagggcgtatctgcagctcaattaataatgacaactttacactcaggcggcaaatttgatgataactcttataaagtttcaggcggattgcatggtgttggcgtttcagttgttaatgctctttcaaaaaaactaaccctagaggttcacagagatggtggagaatattttcaagagtactcagacggaaagcctaaagcaaaattaaaaaaagtaaaaaaatcagacaggaccggaacaaaaataaccttctttccttctgagaaaatattcacatcgattgattttgaggttgatagaatttacaaaagaattcaagaactgtcatttttgaatgcaggggtttcaattaatgttgaggataaaaaatcaggcaagtcaaaaaagttcaaaaacaatggagggctatcaagttatgtcactcacctaagaggaagaaaacaaacagtctctgatatttttgaatgttcagcaactgataatgatgttggtgttgagatcgctatgcaatggacagattcttatactgaaaatgttttgtgctacacaaataatattcctcaaaaagatggtggaacacatttagctggatttagaggaagccttacaagggtgctgaaatcttttattaaaaaagagaatgcaaaaaaaactcctacagatttgcttggagaagatgtccgtgaaggtttaatagcaataatatctgtaaaagtaccagatcctaagttttcatcacaaaccaaagaaaa

SEQ ID NO: 294501 - DNA, 892 bp, Unknown
  Bacterial polypeptide expressing nucleotide sequence isolated from the Sargasso Sea
aaaagaaataagattactttgtccggtgaagatattaaagaaggattgacagcagtattatcaatcaagatgcaagaccctaagttttcttcgcagactaaagataaattagtatcatctgagatcagattaattgttgaaagtattattaatgataaaatttcaacatggtttgatcagaatccatcaattgctaagacagttcttgaaaagattactcaagcagctatggcaagagatgttgcaagaaaggctagagataacgttagaagaaaaggtacttttgagttatctggattaccaggaaaacttgctgattgccaaatacaaagaaaagaaggaacagaattatttatagtagagggagactctgcgggtggatcagctaaacaaggaagagtgcgtgagttccaagcagttttacctttaagaggaaaaattttgaacacctatgttaatggaaaatctaatggcaatgatcatgcaacaaaagcattatccaaaatgatgtcatctaatgaaatagttaccttgataaatgccctaggaactggttctaaagatttcaatattgataatttaagatatgacaagattgtaataatgactgatgccgatgtagatggatctcacattagaactttattgctcacatttttcaacaatcatccttttaatcaactaattgaaaatggtcatatttatttagcgcaaccaccattattcaaagtaacaaaatccaataagagtgtttacatcaaagatgaaaaagctcttgaagaatatatgttaaaagctgcagggaaaaatgataaaaaaattaaaaaaggatcggctgagtacaataaatttattcaagatcaaagggaaaaactttcaatccaaaagatta

SEQ ID NO: 294502 - DNA, 620 bp, Unknown
  Bacterial polypeptide expressing nucleotide sequence isolated from the Sargasso Sea
tttgtctgacaaaacatctaaaattgataatagcgaaaatttagagaagatttcaagtatttctttgatagaagaaatgaaaaaatcttatcttgattatgctatgtctgtaatagtttcaagagcgcttcccgatgcaagagatggactaaaaccggttcatagaagaattttgtatgcaatgaatgagtctggttacaattataataaatcttataaaaaatctgccagaatagtaggtgaagtaatgggtaaatatcatcctcatggtgattcagctatttatgattctatggttcgtatgtgccaaagtttttcaatgagattagaattagttgatgggcagggtaattttggctctttagacggagatccacctgcagcaatgcgttacacagaagctagattagcaaaaatatccgaaagaatggtaaatgatctggaaaaacaaacaatatcatttcaagagaattatgatgacactactattgaaccttctgttttacctgcacaatttcccaatttattagtaaatggagcatctggtattgcggtaggaatggctacaaatattgctccccataacttaagagaagttattgacgctacattatatacaa

SEQ ID NO: 294503 - DNA, 723 bp, Unknown
  Bacterial polypeptide expressing nucleotide sequence isolated from the Sargasso Sea
gttaagtttttaaaaggaagaaaacaaaacatatccgaaatatttcactgcgaaggagagcaagatgggcttagtgttgaaatagcgcttcagtggaatgatgcatactcagaaaacgttctttgctacacaaacaacatacctcaaaaagacggcggaacacatctttcaggatttcgatcaagtttaacaagagtgatgaaaacatttatcagaaaggaagaattaaataagaaatcgcctgttgagttactcggtgaagatgttagagaggggttaacagcaatagtttcagtgaaaatacctgatcctaaattctcatcacaaacaaaagaaaaactcgtttcctcagaggttgagagtgttgttagcaatgtttttaataagaattttaatgaataccttttagaaaaccctaaggaagcaatgtcaattttaacaaaaatatctgaagctgctttagctagggaggcagcaagaaaagctagagaaatgactagaaggaaaggggttttagaggtcgcaggtttaccaggaaaattagcagattgccaagaaaaagaccctgcgctgtcagagatatatatcgttgagggtgattctgcaggtggatcagctaaacaaggaagaaatagacaaaatcaagcaatacttcctctaaaagggaaaattttgaatgttgaaaaagctagattagataaagttttatcttcccaagaaata

SEQ ID NO: 294504 - DNA, 592 bp, Unknown
  Bacterial polypeptide expressing nucleotide sequence isolated from the Sargasso Sea
aatgacttctaatcaaaaaaatacttcatcacaagaatataaagcagattctattaaagttctaaaaggattagaagcagttcgcaaaagaccaggtatgtacattggtgatacagatgatggatctggccttcaccatatggttttcgaagtagtagataattcaattgatgaagctatagttggattttgtaaaaacatttctgtaactgttcataaaaataattctatcactgtcgttgatgatggaagaggtatacccgttgatttacataaaggtgaaaaaaaatcagccgctgaggttataatgactcaattacacgccggaggtaaatttgaccaaaattcttataaagtatcaggtggattacatggtgttggcgtttcagttgtaaacgccttatcagagaagttagatttgactatttttagggatggtaaagagtattttatttcctttaaaaatggtaaatctttaaactctattaagtttgttaaaaaaacaaagcagtctggaacaaaaattaattttcttccatcaaaagaaatcttttcaaatattaaatttagcttaaatacattacaaaaaaaa

SEQ ID NO: 294505 - DNA, 397 bp, Unknown
  Bacterial polypeptide expressing nucleotide sequence isolated from the Sargasso Sea
atgcctaagcaaaacaattacgattcatctaacatcaaggttttaaaaggcctggaagcagtacaaaaaagacctggtatgtacataggagatacggatgatggcagtggcttgcatcaaatggtatacgaagttatggataactccatagacgaagcacttgccggtcattgttctaatattacagttacagttcatgaggataatgccgttacagtcgaggataatggtaggggaataccggttgacgaacatccaactgaaaaaaagtcagccgcggaagttattatgacggttttacatgccggtggtaaattcgacgataattcatacaaggtatctggaggattacatggtgttggtgtttcggtagtgaatgcatgtcagaaacatagag

SEQ ID NO: 294506 - DNA, 436 bp, Unknown
  Bacterial polypeptide expressing nucleotide sequence isolated from the Sargasso Sea
aatgcctgaatatccacaaattaaacttgacgatgaaatgcgtcattcatacatagaatatgcgatgtcagtcattgtaggtagagctttaccagacgtgagagacgggctaaaaccagtccacagaagagtactttattcaatgcatgagctaaataatggttacaacaaggcatataaaaaatcagctagaattgttggtgatgtaataggtaaatatcaccctcatggtgataccgcagtatacgatacaattgtaagattagctcagccattctcaatgagatatccactggttgatggacaaggtaactttggctctattgatggggattctccagcagcaatgaggtatacggaagtacgaatgtcccgtctatctcatgaacttttatctgacatagataaaaatactgttgatttcaatccaaattat

SEQ ID NO: 294507 - DNA, 769 bp, Unknown
  Bacterial polypeptide expressing nucleotide sequence isolated from the Sargasso Sea
gatggataagaaaaatttcacttctatctctctccaagaagaaatgcaacgctcttatctggaatatgcaatgagtgtaatagttggtcgtgctcttcctgatgcaagagatggacttaagcctgtacagagaagaatactatttgctatgtacgagttaggattgacacctgacagaccctttagaaagtgcgcaagagttgttggagatgttcttggaaaatatcacccacacggagaccaagcagtatatgacgcattagtaagactagttcaaaatttttcgacaaaatatcctactttggatggtcatggcaattttggatccgtagataatgatccaccagcagcaatgagatacactgaaactagattggccccgatagctcacaaaggatttcttgaagaaattggatcagaaacggtaaatttctcaaataactttgacggttcacaaaaagaacctgatgttcttcctgcccaactccctttcttattgttgaacggatcatcaggtattgcagttgggatggcaacaaacattcccccccacaacctaggagaaatagtagatggtttgattgctttagtaaaaaataaagatataagtaataaaaaactttctaatattattaaaggtcctgattttcctacaggcggagaattaattcaaagtaaagctatagaagaactttacgaaactggaaaaggatctataaacattagaggcgtcataaaaacagaagaaattaacataaggaaaaggtaa

SEQ ID NO: 294508 - DNA, 367 bp, Unknown
  Bacterial polypeptide expressing nucleotide sequence isolated from the Sargasso Sea
atggataaatcacaaacagagataaagaataacataaaacctattgaaatgtatgatgagatgagctcatcttatctttcttacgcaatgagcgtaattgtaagtcgagccttaccagatataagagatggtttgaaaccagttcatagaagaataatttacgcaatgcacaaaggtggttttgattggagtaaacaatatagaaaatctgcaagaatagttggtgatgtaattggtaaataccatccccacggagatcaggctgtttatgatgcattagtcagaatggtgcaagatttttcaatgagtttgcctttgatcgatggtcaaggaaattttggttctgttgatggtgatccgcctgctg

SEQ ID NO: 294509 - DNA, 865 bp, Unknown
  Bacterial polypeptide expressing nucleotide sequence isolated from the Sargasso Sea
gttgataattcagttgatgaagcacttgcgggacactgtgatcatatagaaatagttctcaaagcagatggatcagctttaatttctgataatggaagaggaattccaacagatattcatccacgcactgggaaaagtgccttagaaactgtacttacggttcttcacgcaggaggtaaattcggaagtggcggttataaagtttcagggggcttgcatggagttggaatatctgtagttaatgctttaagcgaatgggttgaagtaacagtttttagggatggcagtgagtttaatcaaagatttgaaaaaggtgtatcaaaaggtgaattgcaaactagtaagcagtctggaaaaccttttaaaaaaggaactactatttgttttaaacccgataaaacaattttttcaggaggaatcgaatttgaatattctcttctttcatcaaggttaagagaattagcttatctcaatgggggtgtaaaaattgtttttagagatgagagaaaaaaattatcagatgattctttcaaagaagaaatttatttatatcaaggaggtattaaagaatatgttcaatacatgaatgcagaaaaagaatctattcatcctgagataatctatgttgactcacagaaagaaaacgtttatgtagaagctgctttgcaatggtgttccgatgtttattcggataatattttgggatttgcgaacaatattagaacaattgatggtggaactcatattgaaggtttaaaaacagttttaacaagaactttcaataatcttgcaaaaaagagaggtaaaagaaaagatgttgaaaaaaatttagctggcgaaaatattagagaaggcttgactgtag

SEQ ID NO: 294510 - DNA, 340 bp, Unknown
  Bacterial polypeptide expressing nucleotide sequence isolated from the Sargasso Sea
atgacaaaaaataataaatatcaagcagactccatcaaggttttaaaaggtttagaggcagtcagaaaaaggccaggtatgtatatcggtgatacagacgatggcacaggtttgcaccacatggtttatgaggttgtggataattcaattgatgaggcgttagcaggatattgtagtaatatttttgtaaaaataaataatgacggaaccattactgtaaaagatgatggtcgtggaatacctgttgatgttcataaaacagaaaaaaaatctgcagcagaggtaataatgacacaactacatgctggtggaaagtttgatcacgattcttacaaagttt

SEQ ID NO: 294511 - DNA, 888 bp, Unknown
  Bacterial polypeptide expressing nucleotide sequence isolated from the Sargasso Sea
tggttattctgaagaagtgctaccatttacgaacaatatcccacaaaaagatggcggaacacatttattaggatttagaagcgctttaactagagtaataaataaatattctaatgatagaaataacaaaaaaaataaaatttccttatcaggagaagatatcaaagaaggactaactgcagttttgtcaataaaaatgcccgacccaaaattttcatctcaaacaaaagataagttagtatcttcagaaattcgtaatatcgttgagcatattattggagagaaagtatcaacttggtttgatcaaaatccctcagcagctaaaacagttatagaaaaaattactcaagctgccatggcaagagatctagcaaggaaagctagagatagtgtaagacgaaaaggaacctttgaactatctggacttcctggaaaacttgctgactgccaaattcaaaaaagagagggcacagaattatttatagtcgaaggtgactctgcaggtggttcagccaaacaaggtagagttcgtgaatttcaagccgtattaccattaagaggaaaaattctaaatacttttgttaatggaaaaaaaaatggagaagatcaatccactaaggcattatctaaaatgatgtcctcaagtgaaatagtaactttaattaatgcattaggcacgggatcaaaagattttaacattgaaaatttaagatatgataaaattgttataatgaccgatgcagacgttgacggctctcatatcagaacattgttgcttactttttttaataatcatccttttaatcaattaatagaaaatggacatgtatatttagcacagccacctctttttaaagttacaaaagctaataaaagcatatacataaa

SEQ ID NO: 294512 - DNA, 849 bp, Unknown
  Bacterial polypeptide expressing nucleotide sequence isolated from the Sargasso Sea
aaccttgtttcttcagaggtgagaaatatcgttgaaaattttatgaatgaaaaattatctatttggtttgaccaaaatccaaatataataaaaattgtcttattaaaaataattcaagcagcgcaagctagagatgtagctaggaaggcgagagaaagcgtgcgaagaaaaggagcgcttgagcttacaggtttaccaggtaaattagcagactgtcaaaactcaaagagagatgggactgaattatttatagttgagggagactcagctggtggttcagcgaaacaaggaagaaacagagagtttcaagctgtattacctctgagaggaaaaatattaaatacatatgtagaagaagtaaattcaaagaggaatggaaattcgaacgatagtaaaactaaagcactatcaaaaatgatttcgtcgaatgaaatcgtcacattaataaatgctttaggtctagatccaaaggctgaggaaattgatttggacgatcttagatatggtaaaataattattatgactgacgcggatgttgatggatctcatattagagcgttactattaacattttttaataataaaccatttaacaaacttatagaaaatggaaatatttttttagcacaaccgcctttatttaaaataaataaatcaggcaaaagtatttatattaaagatgaaaaaagtttggaacactttattttaaataattctaaaaattcaaaaaaattaaaaaaaggatcaaaagaatttgaaaaaatgttgtcagaagaaaaatcaaaactaaatattcaaaggtttaagggtcttggtgaaatgaacccagatgaactttggaatactact

SEQ ID NO: 294513 - DNA, 853 bp, Unknown
  Bacterial polypeptide expressing nucleotide sequence isolated from the Sargasso Sea
gcagctctcgctcgtgagctgcagaaaagcacgagagctcacacgtaggaaaacagctttagatgtaaattaccttgcaggaaaactaaaagactgcgcagagaaggatccctcgaaaactgaagtttttctagttgagggagattctgctggaggttcagcccagactggacgcgatcgcagaacacaggccattttacctctcagaggaaaaattttaaatgtagagagagctcgatttgatcgaatgctcaacagccaagagatcggaaacttggttatggcacttggtactgggattggaagagatgaatttgatattagtaaattaagatatcataaaattgttatcatgacggatgcagatgtagatggcgcccatattagaacgctcttattgacatttttttacaggcaaatgccagagttagttgaaggtggctacctatatattgctcagcctccattgtacaaagttagccgaggtaagtctgaagtttaccttaaggatcaatcagctcttgatgattatcttgtgcaacaagggattgagggggcagtgcttaaagttggatcaaacgctgatattgcaggtcaagacctagcaaggatagtggatgaagcacgtcaacttgatagagtattagaagccttcccaacgcaatatccaagacatatattagagcaggcagccatcgccggcgcttttgttccgggggcagtagatgaagatttacaaggtactgccgatagtattgctaaaagattgaaccttattgctttagaatatgaagcggggttggtcaggaaggattacacaggaccaaggtattcgcttagcaagagtggttag

SEQ ID NO: 294514 - DNA, 955 bp, Unknown
  Bacterial polypeptide expressing nucleotide sequence isolated from the Sargasso Sea
aatgcataaggggaggggttttgattggtcaaaacaatttagaaaatctgcaaggatagtcggagatgtaattggtaaatatcatccacatggcgatcaagctgtatatgatgctctagttagaatggttcaagatttttcaatgagccttccattaattgatggtcaaggaaactttggttctattgatggtgatccaccagccgctatgagatatacagaaacaagattagcaaaaatagctcaatttttattagacgatattgaaaaagatacagtttcattcaaaagtaattatgatgaaactgaacaggaaccagatgttcttcctgcacagtatccaaatttattagttaatggagcaggaggaattgctgttggtatggcaacaagtatacctcctcataatttaggtgaagttgtggatgctactttagctataatcaaaaataaggacataaaattaagtgaattgatgaaacatgtccctggtccagattttccaactggtggtattattattggaaaagatataattaaacaaggttataaatctggccgaggttcttttaaaatcagaggtgatattaagattgagcaagctaaaggaggtagagaaagattggtaataacctccataccttatcaagtaaacaaatctgttttaaatgagagaatagctgaattagtaagagaaaaaaaaattgagggaattagagatataagagatgagtctaatagagaaggaattagagttgcaattgatttaagatcaagtgttgaacctgaaacaattaaaagacaattatataaatatacatccattgaaagctcatttggtttcaatactttagctattgtagataacaaaccaaagacttgtaatttaaaagattttttagaaaattttttaaaatttagagaagatgtagtaataaaaaaaaccaaatatgat

SEQ ID NO: 294515 - DNA, 308 bp, Unknown
  Bacterial polypeptide expressing nucleotide sequence isolated from the Sargasso Sea
aatgtctgaatattcacaaataaaattagatgatgagatgcgtcattcatatattgaatatgccatgtctgtcatcgtcggaagagcacttcctgatgttagagacggtcttaaacctgtgcacagacgtgtattatattcgatgcacgagctgaataatggttataacaaagcttataaaaaatcagcaagaatcgttggggatgtgattggtaaatatcatccacatggggacaccgctgtttatgacactattgttcgactggctcaaccgttctccatgagatacccacttgttgatggtcaag

SEQ ID NO: 294516 - DNA, 764 bp, Unknown
  Bacterial polypeptide expressing nucleotide sequence isolated from the Sargasso Sea
catcaaagaccgtggcacgacctccattcatgagttgccatttgtattgtcaaagaagcacgcgacgacagcggcgcgtattgaactggtcctacactggacggaagcgactgacgagcatcttcgcagttacgtcaatggaattccaaccgggtccggtggcacacacgaaaatggaacccgatcaggaatcggaaaagccattcgcaatttcgtcgacacacataacctcagcccaaaaggcgtgacgattacggctgaagatattcgagagggcttaaccggggtattgagtgtgtttgtgcaggacccgcagttccaaggccaaacaaaggatcgcctcaataatcctgaaatcgcatcgatccttgactcaacaattcgaccagcgcttgaacaatggctcaatcacaacattagcgttgccgaaggcatcgtagcgcgtattgttctggccgccagggcacgtgaagccagtcgagttgcccaacaagcggtgtctcggaaaagtgcgacctcaactcgattgaacctaccaggaaaactcagtgactgcactggcaagaacccgaacgaaagcgagatcttcatcgtcgaaggtgattctgccggaggctccgctaagcagggacgcgaccgccatcgccaagcgattctgccactccgtggaaaagtcctcaatgttgagagcgcacccgcatcgaaagttttggcaaataaagaattgtctgatgtcgtgacggcgcttgggtgcggtgtcggca

SEQ ID NO: 294517 - DNA, 658 bp, Unknown
  Bacterial polypeptide expressing nucleotide sequence isolated from the Sargasso Sea
ggtgtttctgtagttaacgctctgtctgaagagttgaaactaaccatcaggcgagaaggtaaagtgtatgaacaatattaccagcatggcgtcccaaaagcgccattgtcagtagttggtgagacaactagcaccggtaccgaatgtttttttaaaccttcagatgagacattttctaatgtcgaatttcactatgatattcttgcaaagaaactcagagagcttgcttttttaaatgctggcgtttctattaaactcatagacgagcgttcaggtaaagaagagctgtataaatatgacggtggccttaaagctttcgttaattatctgaataagaacaagaataccgtcaataagcttttccattttgtgtcgtcgagggaggaagacggtataacagttgaagtagcgctgcaatggaacgactcgtatcaagaagcgatctacccgtatacaaacaatataccacagcgagacggcgggactcacttggctggattcagaggtgctttgactagggttttgaaaagttatattgataaagaattagccaacaaaaagggcaaagaggttaatactactggtgatgacgccagagagggattaacagcgataatttcagttaaggtacccgacccgaagttttcttcacaaacaa

SEQ ID NO: 294518 - DNA, 197 bp, Unknown
  Bacterial polypeptide expressing nucleotide sequence isolated from the Sargasso Sea
aatgacaaaaaattcatattcatcagaatcaattaaagtactaaaaggcttagaagccgttagaaaaagaccaggaatgtatataggtgatacagatgatggttctggtctccatcagatgatctatgaagttgttgataattctatagatgaagcattagctggctactgtgataagattgaagtacatttaaact

SEQ ID NO: 294519 - DNA, 671 bp, Unknown
  Bacterial polypeptide expressing nucleotide sequence isolated from the Sargasso Sea
gatgccggcaaagaaaaaagcagcaaaatcaaaaacaccgaaaaccccaaaaaaagaatcaaaacaagcctcaaaaaaggcagcctctaagcctataaaaaaacaagccaagaagaaacaagaagattcttatgactcttctagcataactgtattaaagggactagaagctgtaaagaaaagaccaggaatgtacataggagacactgatgatggaacaggccttcatcatatggtgtatgaagtggttgataactctatagatgaagcacttgctggtcattgtgacgaaataacagtaaaaatactttctgacgacagtgttacagttatagacaatggcagaggaatccccactgacaagcatgaagaaggcgtgtcagcagcagaagtaattatgaccaagcttcatgcgggaggaaaatttgatgacaattcgtataaagtttctggagggttgcatggagtaggggtatctgtggtcaatgcactctcagaagatttgaagcttacaattcacagaggcggaaagattcatgaacaagcatattctgatggaaagcctaaaaataagattaaagttgttggcaagacagacaagacaggcacggaagttactttcactccttctccaacaaccttttccaatattcttttcgattacgaagttt

SEQ ID NO: 294520 - DNA, 546 bp, Unknown
  Bacterial polypeptide expressing nucleotide sequence isolated from the Sargasso Sea
tatgaaaagtattgataattcaacagagtcaataaaacaaaatatcaaaccaatagctgtttatgatgagatgagctcgtcatacttgtcgtatgctatgagtgtaattgtaagtcgtgcacttccagatataagagatggtttaaaacctgttcatagaagaatactttatgcaatgtataaaggtggttacgactggtctaaacaatttagaaaatctgctagaatagttggtgatgttattggtaaatatcatccacatggagatcaatctgtttatgatgctttggttagaatggtgcaagatttttcaatgagcttacctttagtagaaggccaaggtaattttggatctgtagatggagacccaccagcagcgatgaggtacactgaaacaaaattagctaaagtttctcaatttattattgatgaccttgataaaaaaacaatagattttaaaagtaattatgatgaaacagaaaaagaaccttctgtcttacctgcccaatatccaaatcttttagttaatggagctggcggcatagc

SEQ ID NO: 294521 - DNA, 769 bp, Unknown
  Bacterial polypeptide expressing nucleotide sequence isolated from the Sargasso Sea
ccttactgcagtgctctcaatcaagatgccagatccaaaattttcatctcaaactaaagataaacttgtttcatctgaaattagattaattgttgaaagtataattagcgataaagtttccacatggtttgatcaaaatccttcaattgctaaaactgtattagaaaaaattacacaagcagccatggcaagagacgttgctagaaaagcaagagatagcgttagaagaaaaggagctttcgaactatcagggctgccgggtaaattagctgattgccaaatacaaaagaaagagggaacagaattatttatagttgaaggagattcagctggtggatctgctaaacaaggaagagttcgtgagtatcaagcagtgttacctttaagaggtaaaattttgaacacatatgttaacggaaagtcaaacggagatgatcatgccacaaaagcactatccaaaatgatgtcatcaaatgagatagtaaccttgattaatgctctaggaactggctctaaagactttaatatagaaaatttacgatatgataaaattgttataatgacggatgctgatgttgatggatcacacataagaacattattgcttacttttttcaataattatccttttaatcaattaatagagaatggtcacatttatttagctcagcctcctttattcaaagtaacaaaatcaaacaagagtgtttatatcaaagatgaaaaaacacttgaagaatacatacttaaaacttcagataagaaagat

SEQ ID NO: 294522 - DNA, 838 bp, Unknown
  Bacterial polypeptide expressing nucleotide sequence isolated from the Sargasso Sea
gataagatttttaccttctagggaaattttttctaacacaaaattcaattttaatattattcaaaaaagaatgagagaattagcatttctaaataaaggaataaaaattgttataaatgatttaagtcaaaaaaaaactaaagaaattatatttaaatttgatggtggattattagaatttgttgattttctagatgcaaagagagaaaaattaaaaaacaagagtggtaatgatttgtttagaaaaccaatttttattgaaggaaaaaaagacacagtagagattgaatgtgctttaaaatggaatgctgggtatggagaagatgtgtatccatttaccaacaatatatttcaaaaagatggtggaactcatatcttaggattcagaagcgctttaacaagaatcataaacaaatatgctacagaaaataatttgttaaaaaaaaataagctgacaatttcaggtgacgacattaaagaaggtttaacttgtgtattatctgttaagattccagacccaaaattttcttcacaaacaaaagataaactagtttcctcagaggtaagaccaattgtggaaacagtcattaatgaaaaattatctatatggtttgaccaaaatccatcaatatcaaaaataattatttccaaagtaattcaggcagcgttagcaagagacgttgctagaaaagctagagaaaatgttagaagaaaaggagcgttagagttaactggacttccagggaaacttgctgattgtcaaatatcaaagcaagaaggtacagaattatttattgttgagggagattctgctgggggttctgcaaaacaaggaaga

SEQ ID NO: 294523 - DNA, 844 bp, Unknown
  Bacterial polypeptide expressing nucleotide sequence isolated from the Sargasso Sea
atgagtgaggaccaaagatctaatacagtctctaatgattatggcgcggaacagatacaggttttagaggggttagaaccagttcgtaaacgtccagggatgtatataggttcaacaggacctagaggattacaccatttagtatatgaggtagttgataactcggttgatgaagcacttgcaggacattgtgatcacatagaaatagttcttcgagcagatggttctgctttaatttctgataatggacgaggtattccaacagatattcatccaagaacaggaaaaagtgccttagaaactgtactaactgttcttcatgcaggaggtaaatttggaagtggtggttataaagtttcagggggtttgcatggagtaggaatatctgtagttaatgctctaagcgaatgggttaatgtgactgtttatagggatggaagcgaatttaatcaaagatttgaaaaaggtatatcaaagggtgaattggaaactaaaaagcagactggcaaaccatttaagaaaggaacaactatttgctttaaacccgacaaaacgattttttctggaggcattgaatttgaatatgctcttctttcatcaagattgagggagctagcttatcttaatggcggagtaaaaattgtttttagagatgaaagaaatcaattatcagatggttcttttaaagaagaaatttacttgtatcaaggaggtattaaagaatatgttgaatacatgaatgctgaaaaagattgtattcatcctgaaataatttatgttgattcacagaaaaaaaatgtatatgtagaagcagctttgcaatggtgttcagatgtatattcag

SEQ ID NO: 294524 - DNA, 908 bp, Unknown
  Bacterial polypeptide expressing nucleotide sequence isolated from the Sargasso Sea
taggaatatagttgaacatattattagtgagaaagtttcaacatggtttgatcaaaatccctcaattgctaaaacagttttagaaaaaattacacaagctgccatggctagagacgtagccagaaaagccagagatagcgtcagacgtaaaggtacttttgaattatcaggtttgccaggaaaattagctgattgccaaatacaaaagcgagaaggaacagagttatttattgtagaaggtgactcggcaggtggttcagctaaacagggaagagtccgagagtatcaagcagtgttacctttaagaggaaagattttgaacacctatgtaaatggaaaatcaaatggcgaggaccaatctactaaagcattatcgaagatgatgtcatcaaacgaaatcgttactttaataaatgctttaggtacaggctcaaaagattttaatattgaaaatttaagatatgataaaattgtaataatgacagatgcagacgttgatggctctcatatcagaactctcttgttaactttttttaacaattacccttttaatcaactaatcgaaaatggtcatgtctatttagcacaaccacctttatttaaagtcacaaaagctaacaagagtgtttatataaaagatgaaatagaattagaaaattatattttagatgtaggaaaatttgataaaaaaataaaaaaaggatctgctgaatataaaaaaattatgcaagaacagagagaaaaactttctatacagcgttttaagggtctaggcgaaatgaatcccgaagagctttgggaaacaactttaaaccctgaaaacagaactattttaaaagtacaatactcaaaaggaactaaagataagtctaaagaagatcaaaaaatgatcaaagtattaatgggag

SEQ ID NO: 294525 - DNA, 815 bp, Unknown
  Bacterial polypeptide expressing nucleotide sequence isolated from the Sargasso Sea
gccttcaaaagaaattttttcttctataaaatttagctcttcaatattagataaaagaattagagaactcgcttttttaaacaaaggtatctcgattactttaatagataactcaggaaaaaaaagcaaagaatttgctcataaatatgacggaggaattattgaatttgtaagacacataaataataagaaacctaaattagtaaataaaaatgagaaagaagtattcaaaaaacctgtttttgttacatctacaaagaataatgtaattgtagagtgctctttcgaatggaatgctggttattctgaagaagtgctaccttttacgaacaatatccctcaaaaagatggaggaacacatttattaggattcagaagtgctttaactagagtaataaataaatattcaaatgatagaaataacaaaaaaaataaagtttccttatctggagaagatattaaagaaggactgaccgcagttttatcaataaaaatgcctgatccaaaattttcatctcaaacaaaagataaattagtatcttcagagatacgtaatattgttgagcatattattggagagaaagtatcaacttggtttgatcaaaatccttcagcagctaaaacagttatagaaaaaattactcaagctgccatggcaagagatctagcaaggaaagctagagatagcgttagacgtaaaggaacctttgaactatccggacttcctggtaaacttgctgactgtccaattcagaaaagagagggtacagaattatttatagttgagggtgactctgccggtggttcagccaaac

SEQ ID NO: 294526 - DNA, 822 bp, Unknown
  Bacterial polypeptide expressing nucleotide sequence isolated from the Sargasso Sea
ctggaaaattagctgattgtcaaattggcaaacaagaaggaactgaattgtttattgtagagggagattcagcgggaggttcggcaaaacaaggaagaaatagagcaaatcaagcagttttaccacttagagggaaaatacttaatacttatgtagaagattttaatattaaaaaaaatggtaacggtaatggaaacggttctgatcaaagaacaaaagctttgtccaaaatgatttcctcaaatgagatcgttaccttgattaatgctctgggtttggatccaaaagcacaagagattgatttaaaagatctaagatatggaaaaattattattatgacggatgctgatgtagatggttcacatataagagcccttcttttaactttttttaataataagccatttaataagctaattgaaaatggtcatgtttatttagcacagccgcctttatttaaaattaacaaagggtctaaaggtatttacattaaggatgagaaggagctagaagattatataataaataatagtaaggagttaaaaaaaattaaaaaaggatctaaagattattcaaaaaaaattgatgaagaaaaatcaaaaatgaatatccaaagatttaaaggtcttggagaaatgaatccagaagaattatggagcactacattagatccagaaacaagaaatctacttcaggtacaatactcaaaagatttaaaaaaagatcaaagtttaatccatactttaatgggaaatgatgttgcattaagaaaagattttatagtttctaatgctataaatgttagaaatcttgatatttaaa

SEQ ID NO: 294527 - DNA, 499 bp, Unknown
  Bacterial polypeptide expressing nucleotide sequence isolated from the Sargasso Sea
atgggtaaaaaatcaacttataacgctaaagatattgaggttcttgaaggacttgaaccagttcgaaaaagaccaggtatgtatattggaagtacaaaccaagatggactccatcatttagtcaatgaggttttagataatagtatagatgaagttttagctggccatgcaactgatataaattttcattataaaaaagacggctcaataaaaataaaagataatgggagaggtattcctgttgattttcacccaaaatacaaaaataaaagagctcttgaggttgttttaacaacacttcatgcaggtggaaagtttaatagtgatgcttacaaaacttcaggtggattgcatggtgttgggatttctgttgtaaatgccttaagctctttattacaagtacaggttttcaaagatgggaaagtatatcaacaagattactcaaaaggtaagattaaaacaaaaattaaaatagataaatgcagcaagaaactaaaag

SEQ ID NO: 294528 - DNA, 571 bp, Unknown
  Bacterial polypeptide expressing nucleotide sequence isolated from the Sargasso Sea
tatgaattctaattattcttctgattcaatcaaagttttaaaaggccttgaagctgtaagaaaaagaccaggtatgtatattggtgatactgatgatggatcaggtttacaccaaatgatatatgaggtgcttgataattcaattgatgaagcactggcaggttattgcgataaaatagaggttattttgaatgccgatggcacggcaacagttacagataatggtagaggaataccagttgatctccacaaaactgaaaaaatacctgcagcacagttaattatgactgagttgcatgctggcggtaaatttgatcaaaatagttataaagtatcgggaggtttacatggagttggagtttcagttgttaatgctttatctgaaaatttgattttagaaattaacagagatggtaaaatttacaatattgagtttgaaaatggaatagtaagtaaagaattaaacataattggtaattcaaataaaaatgatgacaattactttactggaactaagattacatttcttccaacaacaaatatttttaaagatatcaactttaactttaaa

SEQ ID NO: 294529 - DNA, 915 bp, Unknown
  Bacterial polypeptide expressing nucleotide sequence isolated from the Sargasso Sea
aagcagtcagaaaaagacccagggatgtatataggagatactgatgatggcacaggtttacatcatatggtttatgaggttgtagataactcgatagatgaggcattagcaggtcattgtaaaaatattaatgtaaaaattaattctgatggaacaattactgtaaatgatgatggaagaggtatccctgttgacatgcataaaggggaaaaaaaatctgcagccgaggtaattatgactcaacttcatgctggtggtaagtttgatcatgactcatataaagtttctggtggactacatggtgttggtatttcagttgtcaatgcattgtcagaaaaactagaattagaaataaatagagatggaaaaaaatatttcatagaatttaataatggtgaagcaaaatcccctcttaaagtagttggaaaatctaaaaatacaggaactcaaataacattcttaccttcgaaagatatattttcatcaattaaatttagtgcaaatatcttaattaaaagaatgagagagttggcattcttaaataaaggtataaaaataatttttactgacgccagtcaaaaaaaagaaaaaatatctgaatttaaatttgaaggtggtgttttagagtttgtagattttttagatgagaaaagagaaaaactacaaaataaaaatggtaatgatttgtttcgaaaaccaatttacattgaaggcaaaaaagataacattgaaattgagtgttcattaaaatggaatgcgggttatgcagaagatatatttccatacacaaataatatttatcaaaaagatggtggaacacatttattaggttttagaagtgctcttacaagagttgtaaataaatacgcaaatgaaaataatttattaaaaaagaataaattagctatttcagga

SEQ ID NO: 294530 - DNA, 898 bp, Unknown
  Bacterial polypeptide expressing nucleotide sequence isolated from the Sargasso Sea
tagaagcgcattaacaagagttgtcaacaaatatgcatcagagcaaaatttattaaaaaaaagtaaagttttactgtctggagacgacgttaaagagggtttgacatgtgttctttctgtaaaaatcccagacccaaaattttcttctcagacaaaagacaaattagtttcctcagaagtaagaaacattgttgagggtatagttaatgaaaaattgtcaatttggtttgaccaaaacccatctgtttctaaaataattttaacgaaaataattcaggctgcagtagcaagagatgttgctaaaagagcaagagaaaacgttagaagaaaaggggctttagagctcactggattacctggaaaattggcagattgtcaaaattcaaaacaagaaggaacagaattatttattgttgagggagactcagctggaggttcagctaagcagggaagaaatagagagtatcaagctgtactacctttgagggggaagattttaaatacgtttactgagataaatggatctaaaaataatggaaatcaaagtgacctaagaacaaaatcattatcaaagatgatttcttcaaatgaaattgttactttaataaatgccctcggattagatcctaaaacagaagaaatagacttagaggatttaagatatggaaaaattataatcatgacagatgcagacgttgatggttcacatattagagcgctacttttgactttttttaacaatatcccttttaataaattaatagaaaaaggtcatgtttatttagcccaaccaccactttttaaaattaataagggctccaaaggtatttatataaaagatgaaaaagatcttgaaaattatataattaagaattctaaggatattaaaaatgttaag

SEQ ID NO: 294531 - DNA, 763 bp, Unknown
  Bacterial polypeptide expressing nucleotide sequence isolated from the Sargasso Sea
attacagttgaagatgacggaagaggtatacctgttgatatgcacaagggggaaaagaaatcagcagccgaagttataatgacccagttgcatgcaggaggaaaatttgaccaaaattcttacaaggtatcaggagggctacatggcgttggtgtttcggttgttaatgctttatcgcaaaagcttgatttgactatttacagaggtggaaaagagcattttatttcttttgaaaatgggaaagcaaaaaattcattaaaaattctaaaaaaaacaactaaatcaggtacaaaaattaattttttcccttcgaaagagattttttcatcaactaaatttagttcaacgattttacaaaaaaaaatgagagaactagcttttttaaacaaaggtttaaaaatcagtctaatcgatgaaacaagttctaaaaataaatattatgagaacaaatatgatggaggtatacaggagttcgtatcctttattgatcagaaaaagtcagccttaatcaataagaatgagaaatcagtttttaagaaacctctctacataaagggtgaaaaaaaagaagtaattgtcgagtgttcgctacaatggaattctggattttcggaagatgttttagcattcacgaacaatattcaccagaaagatggtggaacacacctgcttggttttcgtagtgctttaacaagaattgtaaataaatatgcttctgaaaaaaaccttaacaaaagaaacaaagttactataggaggtgaag

SEQ ID NO: 294532 - DNA, 800 bp, Unknown
  Bacterial polypeptide expressing nucleotide sequence isolated from the Sargasso Sea
aatgagttcatcatacttatcttatgcgatgagtgttattataagtagagctttgccagatatcagagatggactaaaacctgttcacagaagaattatttatgcgatgtataaaggtggatttgattgggcaaaacaatttagaaaatctgcaagaatagttggtgatgttataggtaaatatcatccccatggggatcaagctgtatatgatgccttagtaaggatgatacaagatttttcaatgagcttacccctaatagaaggtcaaggaaattttggatctatagatggagatccaccagcggcaatgcgttacactgaaactagactttctaaggtatctcagcatttagttgatgatattaataaaaatacagttgattttaaaagcaactatgatgaaacggaaaaagaacctgaaatacttcctgcacaatatccaaatttattagtcaacggcgcaggagggatagctgttggaatggctacaagcattcctccacataatttaggtgaaattatagatggaactttggcattaattaataatagagatataaagattcctgaattgatgaaactaattcctggaccagattttccaactggtggattaattattggaaaagacattattaaacaaggatataaaactggtaggggatcgtttaaaattagaggtgaaatttctactgaacaactgaagaatagcaaagaaagattagttatttcatctgtaccatatcaagtaaataaatctattttaaatgaaagaatagctgagttagtaagagaaa

SEQ ID NO: 294533 - DNA, 537 bp, Unknown
  Bacterial polypeptide expressing nucleotide sequence isolated from the Sargasso Sea
tatgatcaaaaaaaatgagcaaaataatccaaaatatagcgcttcgtctataaaagttcttaaaggtttagaagctgttagaaaaagaccagggatgtatattggtgatactgatgatggcacaggtctccatcatatggtttacgaagtagtcgataattcaattgatgaggctttagcaggttattgtaaaaatattaaagttacacttaattttgaccaatcagtttctgtagaggatgatggaagaggaattccaatagacttgcataaaggagaaaaaaagtcagctgcagaagttatcatgacacaactccacgcaggaggtaaatttgaccatgattcatataaagtttctggaggtctccatggtgttggtgtttcagtagtcaatgctttatctgaaaaattaactttaagaatatttagagataaaaaagaatattttgtagaatttaaagatggaaaagcattatctccacttaaagctaaaaacaaaactaataaaactggtacgcttataaaattcttaccatc

SEQ ID NO: 294534 - DNA, 938 bp, Unknown
  Bacterial polypeptide expressing nucleotide sequence isolated from the Sargasso Sea
agaggtgggcaagaatacaatatgagcttcagcaatggtgacaggacatcagagcttgagatcgttgatagtgttggaaaagccaacactggaacagccatacgcttctggccaaatgagtcgtattttgattcagccgatataagacttgatgaaataaaacataaccttcgtgcaaaagcagttctatgtccgggactaaagattaaatttaaagacgaagcgactggcgaaaaatgtcaatgggagtatcaagaaggagccagtgaatatctggtcgaaatgcttgaaaatattgaatgcattccatcaattccgttttctggtaaagcaaattcagatgaacaagagcttgagtggagcatgacatggcccgatagagatcatgaaggtattcaagaatcctatgttaatctgatacccaccaaacatggtggtacgcatgtgtcaggctttagatcaggattatcagagtcagtgaaagagtttgctgattatcggaatcttctaccgagaggtgtaaaactttcacctgaagatgtttggatgggtttgagctacattatttcagtcagaattgaggatccacaattctcaggacaaacgaaagagaaactcagttcgagagctgtttcaggttttgttacaggcctcattaaagatgctttcacgctttggttgaatcaacatcctgaagcgggagaccaaattgtcgcaagggcaattgagaatgctcaaaaaagagccaaaaagaatgtaaaggtaaaacgaaagaaggccacaggtggaccaacattgcctggcaaactcgcagactgtacgagcgacgagcctgatctttgtgaattatttattgttgaaggtgattctgctggcggatctgcaaagcaagccagagatagagtctttcaggcaattcttccacttagaggaaaaat

SEQ ID NO: 294535 - DNA, 406 bp, Unknown
  Bacterial polypeptide expressing nucleotide sequence isolated from the Sargasso Sea
atgagctcatcatatctttcttatgcaatgagtgtaattgtaagtcgtgcacttcctgatgtaagagatgggttaaaacctgttcatagaagaattttatatgcaatgtataaaggtggatacgattggtctaaacaatttagaaaatctgcaagaatagttggagatgttattggtaaataccaccctcatggtgatcagtctgtctatgatgctttggtaagaatggtacaagatttctcgatgagtttacccttgattcaagggcaaggaaattttggttctatagatggtgatcctgctgcagcaatgagatataccgagactcgtttgtcaaaagtttctcaatatttaatagatgatattgaaaaaaatacaatttctttcaaaagcccaattacgatga

SEQ ID NO: 294536 - DNA, 727 bp, Unknown
  Bacterial polypeptide expressing nucleotide sequence isolated from the Sargasso Sea
aatgaaaaatattattaaagataatattgatgaaatattaaagagccgatatctttcgtatgccgtttcaacaattatttcaagatctcttcctgatttaagggatggtttaaagcctgttcatagaagaattatttattcaatgtatttgttgaaattatataataactcaccttttaaaaaatcagcaaggatagtaggtgatgtaatgggaaaatttcatccacatggtgatcaagcaatatatcaaagtttagttagaatggctcaagatttttcttcacgagtcaccttaattgaagggcaaggcaattttggtaatatagatggcgataatgctgcagctatgagatacactgaggctagattagaagaaataactgaacttttttttgatggtattgaagaagactctactacctttaacgataattatgatggtcaaaatttagaacctaatgtcttgccatcaaaattaccaaatattttattaaacggctcaacagggattgcggtaggaatggcaacaaatattccgcctcataatctaatagaattaaacgattgtataattaagttaatcaaaaaaccaaatacgcctgactcagagcttttaaagatacttaaaggtcctgatttgccaactggtggtgagataatattaagcaatgcagaaaagaaaaaaatttataagactggatttggctcatttttaattaattcaaaa

SEQ ID NO: 294537 - DNA, 880 bp, Unknown
  Bacterial polypeptide expressing nucleotide sequence isolated from the Sargasso Sea
ggagtggatcctatacagaatgaaatgaggtatgatggtgggttgattgagtttgttgactatttagaccggtctaagcaagcaattcatgagcaaaagatatatgccaaaggctctaagtcggggataacagtcgaactggcgatgcagtggaatgagagttatcatgagagtacactatgctttacaaataatatcccacagagagatgggggaacacatttagctgggtttcgtggcgctcttacaagaacaattaattcctttgccggccaattggcgggtattaaaaaggataaagtcaatgttacgggagatgacgctagagaagggatgacctgtgttctctcagttaaagtaccagatcctaaattttcctcgcaaacaaaggataagcttgtttcttcagaagttagacctgtcgttgaaagccttgtgggtgaggggctagataaatggtttgaggaacacccaaatgaggctaaacgggtaatttccaaggttattgaagcagccgctgcgcgagaagcagcacgaaaagcgcgagaattaacccgtcgtaaaggagctttagatataagttccctacctgggaagttggcagattgtcaggagcgagacccagtgttatccgaaatttttattgttgagggtgactctgctgggggctcagctaagcaaggtagaaatcgtgtaaatcaagcagtattgcctctcagaggaaaaatactcaatgtagaaaaagctcggcttgataaaatgcttagttcgacagaaattggcactctaattactgctcttgggacaggaatagggcgagaggacttcgatatagaaaagtgtcggtatcataaaattataataatgacggatgcagacg

SEQ ID NO: 294538 - DNA, 460 bp, Unknown
  Bacterial polypeptide expressing nucleotide sequence isolated from the Sargasso Sea
atggaaaaaattgagtcaaatttagaaaaaaaaaattataaaccagttctagtttatgatgaaatgagctcgtcgtatttgtcttatgctatgagcgtgattgtaagtagggcattacctgacgttagagatggtttaaaaccagttcatcgaagaataatttttgcaatgtataaaggtggttttgattggacaaaacaatttagaaaatctgctagagttgttggggatgttataggtaaatatcatcctcatggagatcaagcagtttatgatgctctagttagacttacacaaaatttctctatgagtttacctcttatagatggtcagggtaattttggttcgattgacggtgaccctccagctgcaatgagatatacagaaacaaaactatctaaagtatcccaatatttaattgacgatattgaaaaaaatacagttgaattcagaaaataat

SEQ ID NO: 294539 - DNA, 415 bp, Unknown
  Bacterial polypeptide expressing nucleotide sequence isolated from the Sargasso Sea
aatgaaaaataacaatagttataaagcagattctataaaagttttaaaaggtcttgaggcggtaagaaaaagaccaggtatgtatattggcgatactgatgatggtactggattacatcatatggtttatgaggtagtagacaattctatagatgaagcattagcaggccattgcaataatattgagatttcaattaattcagatggatcaataacagttaaagataatggcagaggaattccagtagatttacataaaggtgaaaaaaaatctgccgccgaagtaataatgacccaattgcacgctggaggaaaatttgatcatgattcttataaagtatcaggaggtttacacggagtaggtgtttcggtggtcaatgcactatcagaaaaattaaaacttgaaataaattag

SEQ ID NO: 294540 - DNA, 810 bp, Unknown
  Bacterial polypeptide expressing nucleotide sequence isolated from the Sargasso Sea
gatcaagagttaccagacataaaaggcgtctcaattgaaggggagatgaagcgctcgtatttggattacgcgatgagcgtaatcgtatcacgggcgcttccagatgttcgcgatggattaaaacctgttcatagacgtattctctttgcgatgaaggaaggtgggtatgattggacccgcccttacagaaaatcagcaagaatcgttggtgatgtaatggggcaattccatccccatggcgatagtcctatttacgattcaatggttaggatggcgcaagacttttctatgcgtctgcctttcatcgatggccagggaaactttggttcaatggatggtgatccgccggccgcacacagatatacggaagctcgcttagccaagtcggcggagggattgctgcgagacatcgacaaggaaactgtagacttcgtagctaactatgatgagacctctgaggaaccttcggtattgccggcggaatttccaaacctgctggtaaatggtgctgggggtatagcagttggaatggcaacgaatattcctcctcataacttgggcgaggttattgatggatgcctagcatttttagaaaacagaaacctcaccatagaagatctaatcaacgtaattccaggaccagattttccaactggaggtatcatcttaggtaagatgggaataagagacgcctatatgacagggcgaggttctataaccatgcgtgcaaaggcagaaattcaggagatcagaaaagataggctcgctatcatagtttctgaaattccttatcaagtaaataaggcgaga

SEQ ID NO: 294541 - DNA, 564 bp, Unknown
  Bacterial polypeptide expressing nucleotide sequence isolated from the Sargasso Sea
tatgagtgataataagtcatatagcgcagaaagtatcaaagtattagaaggtttagaagctgtcagaaaaagacccgctatgtacattggtgatgttggaaaaagaggattacaccatcttgtttatgaggttgttgacaactctattgatgaagctcttgctggtttttgcaacaaggtgatcgttgtctttaataaggacggatcggttagtgtagaagataatggtaggggtattccggtagatatccataaagaagagaagaaacctgctattgaagttgttatgactgttttacatgcgggtggaaaatttgataaaggttcttataaagtatctggtggtttacatggggttggtgtttcggttgtaaacgctttatccgagtggatgtgggttgaggtaaaaagagatggaaagatccataaacaggattataaaataggagagcctcaatcgacattaaaaacaactggcactgcaaaaacaactggcactaaagtttgtttttatcctgataataaaatctttaaaacaatcagtttcgaatatgacataatagc

SEQ ID NO: 294542 - DNA, 882 bp, Unknown
  Bacterial polypeptide expressing nucleotide sequence isolated from the Sargasso Sea
aggctcaaaaattagtagagagctcagtccgggaccattttgataattggttagcatctgatagtaagtctgcaactgctatattagattttcttatcttaagggcagaagaaagactacgaagacgacaagagaaagaaacagccagaaagtcagcaaccaaaaggcttcgattgccaggaaaactcgttgactgctcagaaagcacacgagccggtactgaaatatttattgttgaaggagatagtgccgggggttccgcaaaaatggcaagggatagaaaaactcaagcactattaccattaagaggaaaaattttgaatgtccttggtgccgcaagctcaaaactgggaactaatcaggagattaatgacctaacacaagcattgggtacgagcttgggatcaaaatttaatatcgatgacctcagatatgacaaagtaataataatgacagatgcagatgtggacggcgcacatattgcatctcttttgatgacattctttttcacacaaatgagaccactcatcgatcaaggacacctctacttggcttgccccccactttttcgtcttactcaaggttcacacagagtgtattgcaaagatcaaattgagcgcgacaaatggctgtccgagggcttgggtggcaaaggtaaaatagaagtcagccgcttcaaaggcttgggagaaatggatgccaaggatctcaagcaaacgacaatggatccaaaaagtagaaagctaattcgggtatctattgatgaggaacagccgggtgaaactgtggatctagttgataggttaatgggaaaaaaacctgaattaagataccaatatattcaaagcaatgctcgttttgtcaacgaactggatgtctagt

SEQ ID NO: 294543 - DNA, 757 bp, Unknown
  Bacterial polypeptide expressing nucleotide sequence isolated from the Sargasso Sea
atgcctaaaccaaaaaaaaataccaatacaaaaaattatgattcatcaaatattaaggtcttaaaaggattagacgcagtccgaaaaaggcctggtatgtacattggtgatactgatgatggcacaggactacatcacatggtctttgaggtcgttgacaattcagttgatgaggccttggcaggtttttgcacacacatagaggtaattattcatgaggatgactctataaccgtaaaagataatgggcggggcatacctgttgataaacacaaaacagaaaagacttctgctgctgaggtcatcatgaccgtattgcacgctgggggcaagtttgatgatgattcatacaaggtttctggaggcttacatggtgtcggggtttcagtggtaaatgccctgtcagaatcattaaacctaagaatacataaaaacggacatacatatgaacaagactatgtacacggtgttccgcaaaaacctcttaaaaaaggctctaaaacagacagaagtgggacaacagtaaccttcaagccaagcgctaaaacatttactaataccacctacagttttgatattttatctaaaagattaagagagctttcattcttaaactcggggctaagcattaagctaactgatacaaggtctggaaaagaagaagagttttactttgaaggcgggatcagtgcatttgtatctcatctaaacaaggttcaaagccccgtacatgagtctgtcatcaatttcagcaaga

SEQ ID NO: 294544 - DNA, 922 bp, Unknown
  Bacterial polypeptide expressing nucleotide sequence isolated from the Sargasso Sea
gttacccaggctatacttcctttaagaggtaaaatattaaatgtaattaaagcaaatcctcataaaattttagaaaataatgaaatttctgctcttataacagccatcggtgctggatacggtaatccacctaaggataaagaatacaatccttctgattttttcaatcctgactcaatgcgatatcacaaaattgttatcatgacagacgctgatgttgatggaagtcacataagaaccctactactcacatttttctatcaattcatgagagatattataaccacaggtcgtttatatattgctcagccacccctatataaagtaaaaaaaggaaatgctgagaattatttattagatgatcgagagttaacgaagtttttattgttaaataacaaggatgatctcgatttcaacatttacaataaaaagaaaataattcagttaaaagaggaacagttaaacgaattaatagatttagcttctcgtgcaaattctgcttatcaaaatttagatctcacatacttagatgcacagttttttgatcaaattttaaatacaggtttattttttcaggattttcatccaaataagatagaaaagtcacaatttaaaattttcttatctaatttaaatcaagtttataaatcagaaaatattaaatttacatttcaaagtatggtcagtaatgaattaatttttttacaagaaaaagagggttacaataaaataataaaggtcgctcttgataaattattacatctaagagagtttatttctttagacagcttatctctttataataaaatgggttttgcaaaatccacagatacttattttggcatttctaaactttcttcaaaagaaaactttaattgtaatggacttgttgaattttttactactctttttgaaatgagta

SEQ ID NO: 294545 - DNA, 871 bp, Unknown
  Bacterial polypeptide expressing nucleotide sequence isolated from the Sargasso Sea
atattcgaagttgttgataattcaattgacgaagctcttgcaggatattgtgatcagatctcgatcacattaaatgctgatggatctgtttctgttgaagataatggtcgaggaataccaaccgatatccaccctgaagaaaaaatttctgccgcagaagttataatgacacaattgcatgctggtggtaaatttgaccaagactcttacaaggtgtcgggcggattgcacggagtaggagtttcagttgtgaatgcactatcatcaaaattaagtctcaatatttttaggcaagggtgtgaacattatattgaatttaatcatggagaagcaataaaccctctaagtcagatagataaaaatatagaacgtaatggcacaaaaataacattttttcctgatgaagaaattttttcaaatattgaatttgacagtaaagttcttaaacaaagatttagagaaatggcatttttaaattctgaaatcacaattgtattttcagacaatagatcagccgataaaaaagaaacatcgtttcattttgagggaggcattagtgagtttgttaaatatttagataaatcaaaaaaatcattaatcgaaaaaccaatttttattgaaggtaaaaaaaataaaattgaattcagctgcgctctttggtggaatgatagctattatgagcaaatattaacatttactaataatattcgacagaaagatggaggcacccatttatcaggctttcgttcagctcttactcgagtagtaaatggttattttgaaggaagtaaaaattctaaaaagcagagtgttcatccgaaaaatgatgatattagagaaggtctgacgtcaataatttcagtaaaagttc

SEQ ID NO: 294546 - DNA, 694 bp, Unknown
  Bacterial polypeptide expressing nucleotide sequence isolated from the Sargasso Sea
ggtacagaaatttttatagtagaaggagattcggcgggaggatcagcaaaacagggtcgaaaccgagagacgcaggctattttaccacttaagggaaaaattttaaatgtagcaagtgcctccagtgataaaattcagctaaaccaggaaattaatgacctgaaggaggcattaggttgcggtactggagccaagtatagagatgaagatctccggtatgaaaaagtgataatcatgacagatgctgatgttgatggagcacatatagcctccctattaatgacgtttttctttaaggaaatgccacaactaattgaaaatggacatctttttatagccctacccccgttatatcgtttaagccagggcggtaacaccttgtatgcaatggatgatgttcataaagaccatttgattgaaaaagagttttcaggtaaggggaaaattgaggtaagtagatttaaaggattgggtgaaatgcctccagcccaattaaaagaaacagctatggcagcagagactcgaacacttctacgagtgactgttcctcttcggcatactgacgatgagaagcgagaagcgcgggaaacctcccgactagttgaggaccttatgggtaaaaaaccagaacttagattagcttatattcaaaaccatgcctcaaagattgaagatcgcatgctggacgtatgat

SEQ ID NO: 294547 - DNA, 805 bp, Unknown
  Bacterial polypeptide expressing nucleotide sequence isolated from the Sargasso Sea
agcggattgccagataggaaaacaagaaggtacagaattgtttattgttgagggtgattcagctggaggttcagcaaaacaaggaagaaatagatcaaatcaagcagttttacctcttagaggaaagattttgaatacatatgttgaggatttgacagtaaaaaaaaatggtaacggaaatggatcagataaaagaactaaggcactgtcaaaaatgatatcttcaaatgaaatagtgacattaatcaatgcattgggtttagaccccaaagcagaagagatagatttaaaagatttaagatatggtaaaataataattatgacagatgcagatgttgatggttcacatattagggctttattgttaactttttttaataacgaaccatttaataaattaattgaaaatgggcatatatatttagctcaaccaccgttatttaaaataaataaaggaactaaaggcatttatataaaagatcaaaaagaattagaagattatattttaaataacaacaaagaaattaagaaaataaaaaaaggaacaaaagaatttacaaaagccttggatttagaaaagtcaaaaatgaatatccaaagatttaagggtttaggagaaatgaatcctgaagaattgtggagcactacacttgatccagaaactagaaatttacttcaagtacaatattcaaaagatcttaaaaaagaccaaagtttaatacatacacttatgggtaatgatgttgcattaagaaaggattttattgtttctaatgcaattaatgttcagaatcttgacatataa

SEQ ID NO: 294548 - DNA, 223 bp, Unknown
  Bacterial polypeptide expressing nucleotide sequence isolated from the Sargasso Sea
atgataaaaaataatatatccggttacaaagcagattctataaaagttctgaaaggtcttgaagcagtaagaaaaagaccaggaatgtatattggtgataccgacgacggaactggtttgcatcatatggtttatgaagtagtagataactcgattgatgaagctctagcaggacattgtaaaaatataattgttgatattaatgataatgactcgataaccg

SEQ ID NO: 294549 - DNA, 837 bp, Unknown
  Bacterial polypeptide expressing nucleotide sequence isolated from the Sargasso Sea
aaagctcaaaaaaaactaaagagtacgcccacaaatatgatggaggaataatagaatttgtaaaacacattaataataaaaaaccaattttaattaataaaaacgaaaaagaagtgtttaaaaaaccaatttatgttacagctacaaagaataatgtaatagtagaatgttcattcgaatggaatgcaggatattcagaagaagttcttccattcacaaataatattccgcaaaaagatggtgggacccacctacttggatttagaagtgcccttacaagagttataaataaatattctaatgatagaaatattaataaaaaaaataaaataaacttatcaggtgaggatattaaagaggggttaactgcggttctctcaataaaaatgccagatccaaaattttcatctcaaactaaagataaactagtttcttcggaaataagaaatattgtagaaaacataattggggaaaaagtttctacatggttcgaccaaaatccatcagtttcaaaagttgtgttagagaaaattactcaagctgcaatggccagagatgttgcaaggaaagctagggacagtgtaagacgaaaaggaacttttgaattatcaggattgcctggcaagttagcagattgtcaaatacaaaaaagagaaggaaccgaattatttattgttgagggtgactctgcaggtggatctgcaaaacaaggaagagtgagagaatatcaagctgttcttccgttaagaggaaaaatattaaatacttttgtaaatggaaaaaaaaatggtgaagatcaatcaacaaaaactttatcaaaacatgatgtcctctaag

SEQ ID NO: 294550 - DNA, 859 bp, Unknown
  Bacterial polypeptide expressing nucleotide sequence isolated from the Sargasso Sea
aaaagaattttgtgaatacagaagccttttaccaaaaggattaaagctaaacgcagatgacgttataagcaacgcaatatttgttatttcttcaaaaatgcaaaatcctcagtttgcaggtcaaaccaaagaacgtcttgactctaaagatcatacgacgtttgtttcaagtgcatcaaaagatattttaagtatttggctaaataaacatactgaagaaggtgagaaaattgctgagctggcaattatgtctgctcaaacaagaataaaagcttcaagtgttgttgaaagaaagaaaacttttaagggtcctgctttgccaggaaaactatcggattgtaatagtgaggatttaaatgaaacagaactatttttagttgaaggtgattctgctggtggatctgctaagcaagctcgcgaaagatcttttcaagcaataatgccacttagaggaaaaattcttaatacatgggatttggaaagccaagaaattatcaagtctcaagaaataaaaaacttatctacagcaataggtgtgttgcctggaagttctgatattacctcactaaggtatggaaaaatttgtattcttgccgatgccgactctgatgggctgcatatagcaactcttctttgtgctctgtttttaaggcattttaaatccttggttaatgaaggtagaatttttattgccatgccaccactatttagaattgactgtggtaaggaagtcttatatgcgttagatgaaaaacataaagataatgttgtaaaggaatttaaagctaaaaaaggaaaacctaaaattaatatccaaaggtttaaaggacttggcgagatgaatccatctcaactaaga

SEQ ID NO: 294551 - DNA, 875 bp, Unknown
  Bacterial polypeptide expressing nucleotide sequence isolated from the Sargasso Sea
tgctttggtgaggatggctcaggatttttctatgaggatgcctcttatcgatggccatggaaactttggttctgtagataacgaccctcccgcagcaatgagatatacagaatctcgtttacagtctcttacagatgaaagtttgcttgaggatattgaatctgaaactgtagacttttcagataactttgatggttctcaacaagaaccaacagttttacctgcaagaatccctcaattacttttgaatggatcatcaggaatagcagtaggaatggcaactaatattccaccccataacttaggtgaattaatcaatggtctcaaatcaatcatcgaaaccccttcgattgaagatagagaactttttgaactaattaagggtcctgatttccccactggtggtcaaatcttaggaagagaaggtattagagaaacattcaaaacaggaagaggttcaataactatgagaggtgtagctaatattgagcaaattaaatcagctggtagagcagaaaaagatgctgtaataattacagaactcccttttcaaactaataaagctgccttgatagagagaattgcagatttagttaatgaaaaaaaattagagggcatttctgatattagagatgaaagcgatagagatggcatgagaattgttatcgagttaaaaagagatgcctatccacaagtagttttaaataatttatttaagttaaccccactacaaaataactttagtgcgaatattttagccttagttaaaggagagccgacaactctttcacttagaaaaatgttagatgtatttctagattttagggtagagacaattagacgaagaacaggatttttattaaaaaaggcagaag

SEQ ID NO: 294552 - DNA, 706 bp, Unknown
  Bacterial polypeptide expressing nucleotide sequence isolated from the Sargasso Sea
atgagctcatcttatctctcatatgctatgagtgttattgttagtagagctctcccagatgttagagatggcttaaaacctgtgcacagaagaattttatatgcaatgtataagggtggttatgattggacgaaacaatttagaaaatctgcaagaattgttggggatgtaataggtaaatatcacccacatggtgatcaatcagtttatgatgcccttgttcgtatggttcaggatttttcaatgagtttacctctcgttgatggtcaaggtaattttggatctatagatggtgatccagcagccgctatgagatatacagaaactagattatcaaaagtttcgcaatttttaattgatgatattgaaaaaaacacaattgaatttaaaagcaattatgatgaaacagaaaaagagccatctgtattacctgcgcagtttccaaatttgttagtaaatggagcagggggtatcgctgttggtatggcgacaagtattccaccccataatttaggagagattattaatggtacattagctttaattgaaaacaaagatatcaagattaaagatttaatgaagcacatacctggacctgattttcccacaggtggtgtgattattggtaaagatattattaaacagggttataacaaaggtagaggctcttttaaaattagaggtgaaatatcaaacgaaactctga

SEQ ID NO: 294553 - DNA, 855 bp, Unknown
  Bacterial polypeptide expressing nucleotide sequence isolated from the Sargasso Sea
gttcgagatggattaaagcctgttcacagaagaattctttatgcaatgtacaaaggtgggtttgattggtctaaacaatttagaaagtcagcaagagttgttggtgatgtaattggtaaatatcatccacacggagatcaagctgtatatgacgcactggtaagaatggtccaggaattttcaatgagtctacctttagttgatggacaaggtaattttggttctgttgatggagatccagctgcagctatgagatacacagagactaaactctccaaaatttcacaacatcttatcgatgatattgaaaaagagacagtaaaatttaaaagtaattatgatgagacagaaaaagaacctgttgtgttaccatcccaatttccaaatatgttagtaaatggtgctggaggtatagctgtaggtatggctacaagcattccaccacataatttatctgaagttataaatggcacacttgcaatgattgagaataggaaaagtaacaaaaatactacccttaatgaattaatgaagcacatcaaaggtcctgattttccaactaaaggtatagtcattggaaaacaatctataaaagagggttatgataaaggtaaatcgacaacttcttttaaaataagaggaaatatagatattgagcaaatgaaaggtggaagagaaagattagttatcacttcaataccttatcaaataaataaagccattttgacagaaagaattgcacaattagttagagaaaaaaaaattgagggcattaaagatatacgagacgagtctaacagtgaaggcattagattagcccttgacttaaaaaatggtattgagcctgaaacaatt

SEQ ID NO: 294554 - DNA, 601 bp, Unknown
  Bacterial polypeptide expressing nucleotide sequence isolated from the Sargasso Sea
aatgtctgaatattcacaaattaaacttgacgatgaaatgcgtcattcttatatagaatatgctatgtcggttattgttggtagagcattaccagacgtgagagacgggcttaaaccagttcacagaagagtactttattcgatgcatgaactaaataatggctacaacaaggcatataaaaaatcagctagaattgttggtgatgttataggtaaatatcatcctcatggtgatacggcagtatatgatacgattgtaagattagcccaaccattctcaatgagatatcctctggtcgatggacaaggtaactttggttcaattgatggggattctccagctgcaatgaggtatacggaggtaagaatgtctcgtctatctcatgagcttctatctgatatagataaaaataccgttgattttaatccaaattatgatgggtctgaaaatgaacctacagttttaccaactagaataccaaacttacttatcaacggagcttctggtattgcagttggcatggctacaaatattccccctcataatttgaatgaagtagtggacggagtaatagctatcattaaagacccatcattagct

SEQ ID NO: 294555 - DNA, 890 bp, Unknown
  Bacterial polypeptide expressing nucleotide sequence isolated from the Sargasso Sea
gatgagttcatcatatctttcttatgcaatgagcgtaattgttagtcgtgctcttcctgatgtaagagatggattgaagccagttcatagaagaattttatatgcaatgtacaagggtggatatgattggtctaaacaatttagaaaatctgcaagaatagttggagatgttattggtaaatatcatcctcatggagatcagtctgtttacgatgctttagttagaatggtgcaagatttctctatgagcctaccgttaattcaaggacaaggaaattttggatctatagatggagatcctgctgcagcaatgaggtacactgaaactcgtttatcaaaagtttctcaatatttaattgatgatatagaaaaaaacacaatttcattcaaaagcaattacgatgaaacagagaaagaacccagtgttttaccttctcaatttccaaatttattagtaaatggagctggcggtattgctgttggtatggcaacaagtataccccctcacaatttaggtgaaattatagatggtactttggccttaattgataacaaagatattaaaatcaaagaattgatgaaacatatacctggtccagatttccctactggtggtgtaattataggtaaagatataattaaacaaggatataacaatggaagaggatcatttaagattagaggtgaaatctcaattgaacaacaaaaaaatggacgtgaaagacttgtaataacttctataccttatcaagttaacaaatcagttttaaatgaaaggattgctccattagtaagagaaaaaaagattgaaggaataagagatattagagacgagtctaacagagaaagtatcaggggtagcatagatttaagaaacggtgtagaacctg

SEQ ID NO: 294556 - DNA, 520 bp, Unknown
  Bacterial polypeptide expressing nucleotide sequence isolated from the Sargasso Sea
tatgaaaaaattataattatgacagatgctgatgtagatggatctcatatacgaactctattattgacgttttttaataattatccttttaatgaacttatagaaaaaaatcatatttatttagctcaacctccactttacaaaattactaaaggatcaaagaattattatataaaggatgataaagaacttgagacttttttgattgaatcgtcagaaaaaagaaaaaattcgttaaagaaaaatacaaaggaattttctaaattcatagaaaatgaaaaaagtaaaattaatatacaaagattcaagggtttaggagaaatgaatccagatgaattatggaaaacaaccctgaatcctgaagaacgtactttgttaagagtaaaatatacaaataatacaaaggacaagtcaaaaaaggatcaagatttgatacaaattcttatgggcgatgaggttggacctagaaaagattttatcattaatcgagctttagaagtttcaaatttagatatataat

SEQ ID NO: 294557 - DNA, 438 bp, Unknown
  Bacterial polypeptide expressing nucleotide sequence isolated from the Sargasso Sea
gatgtctgaatttgccaaacaggtttcgcccgtcgcattagaaagtgaaatgcgagagtcttatttggcgtatgcgatgagcgttatagtcggtcgcgcattgccagatgtcagggacggacttaaacccgttcatcgacgggttctctacgcgatgaatgtcctctcgaacgattataataagccttacaaaaagtctgctcgagttgtcggggatgtcattggtaagtatcacccccatggagatacggctgcttacgataccatcgttcggatggctcaagatttttcgttacgctatcctcttgtggatggtcagggtaattttggatctatcgatggggatgcggcagcagcgatgcgctacaccgagatacgcatggctaaaatttcccatgaccttctatcagaccttgataaggaaactgtagatttttt

SEQ ID NO: 294558 - DNA, 574 bp, Unknown
  Bacterial polypeptide expressing nucleotide sequence isolated from the Sargasso Sea
atgagttcatcttatctttcatatgcgatgagcgttatagttagtagagctcttcctgatataagagatggattaaaacccgttcatagaagaatcttatacgctatgtataaaggtggttatgactggtcaaaacaatttcgaaaatctgctagaatagttggagatgttattggtaaatatcatcctcatggagatcaatctgtttatgatgctttagttcgaatggttcaagatttttcaatgagcttaccactggttgatggacaggggaattttggatccatagatggagatcctgcagcagcaatgagatatactgaaacaaggttatcaaaagtttctcaattcttaattgatgatattgaaaaaaatacaataagttttaaaaataattacgatgaaacagaaagagaaccaacagttttaccagcacaatttcctaacttattagtcaacggcgctgggggtatagcagtaggtatggccacaagtattccaccgcataatttaggtgaagttattgatggaacgttagctttaatagaaaataaagacataaagattaaagatc

SEQ ID NO: 294559 - DNA, 890 bp, Unknown
  Bacterial polypeptide expressing nucleotide sequence isolated from the Sargasso Sea
attgcatgcaggtggtaaatttgatcatgattcttataaagtttcaggtggtttacatggagttggtgtttcagtagtaaatgccttatctgaaaaattagaattaacaataaatagagatggtaaaaaatattttatagaatttgaaaatggtgatgcaaaagctgctttaaaattagtaggaaaatcaaaaaatactggcacagaaataaaatttttaccttcaaaaaaaattttttcttctacaaagtttaatttttctataatacaaaaaagaatgcgtgaacttgcttttttgaataaaggaattaaaatttcattaagtgattttacacaaaaaaaacaaaaaagtttagaatttagatttgatggaggtataattcaatttgtagaatttttagatgaaaatagacaaagtttaaagaataaaaatgataatgatctatttagaaaaccaatctatatcgagggtttaaaaaatcaaattaatttagaatgttccttaaaatggaatgcaggttacaatgaggatgtatatccttataccaataatatttttcagaaagatggaggtactcatttattaggttttagaactgcactaacaagagtaataaataaatatgcgtcagaacaaaatttactaaaaaaaaataaagtaagtctctctggagatgatgtcaaagaaggactgacatgtgtattgtctgttaaaattcctgatcctaaattttcatctcagacaaaagataaacttgtttcttccgaagttagaaatattgttgaaaatataattagtgaaaaattatcaatatggtttgatcaaaacccgtcaatatctaaaataattttgacaaaaattattcaagcagctgtagcaagggatgtag

SEQ ID NO: 294560 - DNA, 808 bp, Unknown
  Bacterial polypeptide expressing nucleotide sequence isolated from the Sargasso Sea
aatgagatatcataaaataataataatgactgatgcagatgtagatggaagtcatattcgaactcttttacttactttcttttataggcatatgaagcctataattgactctggtagactatacatagcacaaccacctctttacagattgaaaaaaggtaattctactgtttataaaaaagatgataatgacttagaagattatttgattgaagaaggtttaaaaaatactttttttgaaaacactttacactcacaaatcgctggagaagaattaaagcaaattatttatctatcaaaaaaaactaaagatctattaatgccattattaagaagagttgataatagtaatataattgaacacgcagcaattgtaagagcattagacttaagaaatcttaaagataagaaaataggtgaagaaatagcaaagtaccttcagcaaagattgaatttaatatctaatatttcacaaaaaaactggaaagtaatccatagaaacaattctattttttttgaaagaacaattagaggttttactgaaaagtatactatagacgaaaactttcttgtgtctccagaagcaagagcattaaacgaacttaaagatcaattaatggaaaatttttatcgtttaaaagaaacgggctgtggtattcttaatcataaaaatcaagaatataaaatttttggacctttaaatttaattgatcagatattagaaataggtaaatctgggctccaaataaatcgatataagggattaggtgaaatgaaccctgatcaattgtgggaaacaacattagat

SEQ ID NO: 294561 - DNA, 494 bp, Unknown
  Bacterial polypeptide expressing nucleotide sequence isolated from the Sargasso Sea
aatgagttcttcatatttgtcatacgcgatgagtgtaattgtcagtagggctttgccagatgttagagatggattaaagcctgtacatagaagaattatttttgctatgtacaaaggtggatttgattggtcaaaacaatttagaaaatcagctagagtcgttggagacgttattggtaaatatcatccacatggtgaccaagccgtatatgatgctttggtaagacttacacaaaacttttcgatgagtttaccattaattgatggccaaggtaattttggttccattgatggagatcctccagctgcaatgcgatacacagagacaaagctggcaaaaatttctcaatttctaatagatgatattgaaaaaaatgttattgatttcagaaataattatgacgatacagaaagagaacctacagtattaccatcacaatatccaaacttgctagttaacggggctggaggtattgctgttggaatggctacta

SEQ ID NO: 294562 - DNA, 964 bp, Unknown
  Bacterial polypeptide expressing nucleotide sequence isolated from the Sargasso Sea
cgacaaaactattttttctggaggaattgaatttgaatatgctcttctttcatctagattaagagagctagcttatcttaatggcggagtaaaaattgtttttagagatgaaagaaatcaattatcagatggttcttttaaagaagaaatttatttgtatcaaggaggtattaaagaatatgttgaatacatgaatgccgaaaaagattctattcatcctgaaataatttatgttgactctcagaaagaaaatgtatatgttgaagcggctttgcaatggtgttcagatgtatattcagataatattttaggatttgcaaataatattagaactattgatggaggaactcatattgaaggtctaaaaacagtgctgacaagaactttcaacaatcttgcaaaaaagagaggcaaaagaaaagatattgaaaaaaatttagcaggcgaaaatatcagagagggtttgactgttgttttatcagtaaaagttccggatccagaatttgaaggacaaacaaaaacaaaattaggaaatactgaagtacggggaattgtggattctctcataggggaggctctcacaaaatatatggaattcaatcctggaattttcgacttgattcttgaaaaagcaattcaatcatttaatgcagcagaagctgcgagaagggctagagaattagtaagaagaaaaagtgttctagaaagttctacattaccgggcaaattagcagattgtagttctagagatccctcagaatcagaaatttacatagtagaaggagattcagctggtggttcagcaaaacaaggaagagatagaaattttcaggctattttgcctctaaggggtaaaattcttaatattgaaaaaactgacgatacaaaaatttataaaaacacagaaatacaatctttaataacagctttaggattaggaataaaaggagaggagttgaagaga

SEQ ID NO: 294563 - DNA, 835 bp, Unknown
  Bacterial polypeptide expressing nucleotide sequence isolated from the Sargasso Sea
tttgcaatggtgttcagatgtatattcagataatattttaggttttgcaaataatatcagaactattgatggaggcactcatattgaagggttaaaaacagttttgacaagaaccttcaacaatcttgcaaaaaagcgaggtaaaagaaaagaaattgaaaaaaatttagctggagaaaatatcagagagggcttaactgtagtcttatcggtaaaagtgccagatcctgaatttgagggacaaacaaaaacaaaattagggaatactgaagtcagaggaattgttgattctctcattggagaggcccttacaaaatatatggaattcaacccgggaattttggacttaattcttgataaagcaattcaatcatttaatgcagcagaagctgcaagaagggctagagaattagtcagaagaaaaagtgttcttgaaagttcaactttgccaggtaaactagcagattgtagttcaagagatccttcagaatcggaaatttatattgttgagggagattctgctggaggttctgcgaaacaaggaagagatcgaaattttcaggctatcctacctttaagaggtaaaattcttaatatcgaaaaaactgatgatactaaaatttataaaaacactgaaattcaatcattaataactgctcttggattagggattaaaggagaggagtttgatgcgagctctttgagatatcacagggttgtaattatgacggatgctgacgttgacggagctcatataagaactttattattgacatttttttatagatatcaaagagaacttgtcgaaaaaggttatatatatattgcttgtcct

SEQ ID NO: 294564 - DNA, 450 bp, Unknown
  Bacterial polypeptide expressing nucleotide sequence isolated from the Sargasso Sea
gataccatagaattataataatgactgatgctgatgtagatgggtctcatataagaaccctattacttactttcttttatagacaaatgtatgaaatagtagataaaggacatatttatatagcattacctcctctatataaaattaccaaaggtaaagaatttatttatgcatcagatgaaaaacaaaaagatgatgcaataaagtcattatctaaatcaggaacaaggggtttggaagttcaaagatacaaaggtctgggtgaaatgaaccctgaacaattatggactacaaccatggatccagataatagaagaatgatgagagttgatatcaaagatgttcaagatgctaatgaatcgttcgagatacttatgggagatgatgtagagccaagaagagaatttattgacaaaaacgctttaacagtaaaagagcttgatatctaat

SEQ ID NO: 294565 - DNA, 682 bp, Unknown
  Bacterial polypeptide expressing nucleotide sequence isolated from the Sargasso Sea
atggtaaaaaataacacaacttatcaggcagactctattaaagttctcaaaggtttagaggctgtaaggaaaagaccaggaatgtacattggagacaccgatgacggcactggtttgcatcatatggtatatgaagttgttgataattctatagatgaagctctagctggacattgcaaaaatataaaagttgaaattaatggtgatggttcgattacagttgaggatgatggaagaggaatacctgtagatatacataaaggtgaaaaaaagtctgcagcagaagttattatgacccaattacatgccggaggaaaatttgatcatgaatcttataaagtttctggtggacttcatggtgttggagtttctgtagtaaatgcactatctgaaaagttaaaattatatatagaaagagatggaaaaaaacattttatagaattttataatggcgattctcaaaacccgcttaaagtaataggtaagtctaaaagtactggtacaaaaataaattttttaccttctaaaaatattttttcatcgactaaatttagttttgctattttacaaaaaagaatgagagaattagcatttttgaataaaggaattcaaatttctctaaatgacttaactcaaaaaaaaccaaagaatattaattttaaatttgatggaggtatattag

SEQ ID NO: 294566 - DNA, 904 bp, Unknown
  Bacterial polypeptide expressing nucleotide sequence isolated from the Sargasso Sea
aatgagttcgtcttatttgtcatatgcaatgagtgtgatagttagcagagcccttccagatgttagagatggactaaaacctgttcacagaagaataatctatgcaatgtacaaaggtggttttgattggactaaacagtttagaaaatcagccagagtagtaggggatgttattggtaaatatcatcctcacggggaccaggctgtttacgatgctttagtaaggttaacacaaaatttctcaatgaatattcctttgattgatggtcaaggaaattttggatctattgatggggatccacctgctgccatgaggtatacagaaacaaaattagcaaaagtatctcaatttttaattgatgatatagaaaaagaaacaattgactttagaaataattatgatgataccgaaaaagaacctactgtattgccttctcagtttccaaatcttttagttaacggagccggaggtatagcggttggaatggcaactagcatccctccacataaccttggagaaatcattgatggaacagtggcttatattaataacaaagatattacaatttcacagttaatgaaaaagattcctggtcctgattttccaaccggaggaataattattggtcaagataatttaaaacaaggatataataaaggcagaggatcaattaaactacgaggtgatttagaagtcgaaagtttaaaaaatggaaaagaacgtttagtaattcagtctataccttatcaggttaataaatcagttttaatagaaagaattgctgagctagcaagagataaaaaaattgaaggaataagcgacataagagacgaatcaaattacaaaggagtgagagttgtaattgatttaagaagaaatgttgaaccagaaacagtcaaaaga

SEQ ID NO: 294567 - DNA, 712 bp, Unknown
  Bacterial polypeptide expressing nucleotide sequence isolated from the Sargasso Sea
acaatatttaattgatgatattgaaaaaaacgtaatacattttagaaataattatgatgaaacagaaaaggaacctacggttttaccttcacagttcccaaacttgttagttaatggcgcaggaggtattgcagtaggaatggcaacaagtattccaccacataatttaggtgaaattgttgatggtacgatagaatttattaagaacagagatattactattagtcagttaatgaaaaaaataccaggtcctgatttccctacaggaggaataattattggtaaggaaactttaaaacaaggatataataaaggaagaggatcatttaaaataagaggtcaaatagaggaagaaagtcttaaaaatggaaaagaacgtttagtaataaaatctattccgtatcaaataaacaaatcagttttaaacgagaggatagctgaacttgctagagaaaagaaaattgaaggtatcagcgatatcagagatgaatctaacagagagggagttagagtagtaatagatttaagaagaaatgttgaaccagaaacagttaaaagacaattatataaatatacttctgtagaatcgtcttttggtttcaatacactagctatagttgatggaaaaccaaaaatattaaatttaaaggaatttataacagaatttgttaattttagagaaaaaacattaacaagaaaaattaaatttgat

SEQ ID NO: 294568 - DNA, 915 bp, Unknown
  Bacterial polypeptide expressing nucleotide sequence isolated from the Sargasso Sea
tattgttgtatttaataaagacggttccgttaccgtagaagataatggaagaggtattcctgttgacattcacaaagaggaaaaaaaacctgcggtagaagttgtaatgacagtgttacacgccggtggaaagtttgacaaaggctcttataaggtttcggggggattacacggtgttggtgtttctgttgtcaacgcgctttcagagtggttgtgggttgaggtttccagagacaaaaaggttcacaggcaggattataaaataggagaacctcagggcgacttaaaagagatagcaaaaacaaaaaaaacaggcacgaaggtgtgtttttttcctgataacactgttttcaaaacaattaagtttgaatataaaataatatcagaaagactcagggaacttgcctacctaaataaaggcttagaaataattttaaaggacgaacgagaagaagaaggacaaacagatacgtttaaatttgatggtggtttaagcgattttgttaaatatttagacgaaaacaacaaccctctccacaataaaattataacggttaataaagaggatggagaaacacctgttgaggtcgcactaagatatggaaatacatacaacgaaaacattctcacttttgtaaataatattaacacaattgaaggaggaacccacctatctggttttaggacagccctaacaagagcaatgaataaccacgcaacaaaaaacaatctaataaaaacgaaaaaaaatgaaaagatttcactttcaggagaagattttagagaagggctaacagcaattattagtgttaaagttgcagaaccacaatttgagggtcaaacaaaaactaaactaggcaatggagacattaagggaactgttgataaaattgtttatgaaggaatcctagattt

SEQ ID NO: 294569 - DNA, 523 bp, Unknown
  Bacterial polypeptide expressing nucleotide sequence isolated from the Sargasso Sea
catggaaaaaactattatagagaataaaaaatcctttaaacctatttttgttcaagatgaaatgagttcatcttatttatcttacgccatgagcgttattataagtagggcacttccagatgttagagatggtttaaaaccagttcatagaagaattatatatgcaatgtataagggaggttatgattggtcaaagccatttagaaaatctgcaagaatagtaggtgatgtaataggtaaatatcatcctcacggtgatcaatcagtttatgatgctttagttagattggttcaagatttttctatgagcctccctttaatttcaggtcaaggtaattttggatctatagatggagaccctccagcagctatgagatacacagagactaaacttggaaaaattgctcaatatttaactgaagatttagaaaaaaatactgtgaattatagaaataattatgatgaaacggaaaaagagccagaagttcttccttctcaatatcctaatatattagttaaccgg

SEQ ID NO: 294570 - DNA, 999 bp, Unknown
  Bacterial polypeptide expressing nucleotide sequence isolated from the Sargasso Sea
gccatacaaaaagtcagcccgtgtcgttggagacgttataggtaaatatcatcctcatggtgatagtgctgcctatgatgcaatggtaagaatggcacaagaattttcaatgagatacatgctagtggaaggtcagggcaatttcggatcaattgatggtgatccgcctgcagctatgagatatacagaagtcagaatggctaaaataactgatcaagttttatcggatatcgaaaaagatactgttaacttttcaccaaattatgatggttctgaaatgatacctgatattttgccaactagagttccattacttttggcaaatggctcatctgggattgcagttggcatggcaacaaatataccacctcacaacctaaatgaaattataaatgggtgcctagccttaattgaaaatccaaaaagtacaattgataatcttttagaaattatttctggacctgattttccaacgggtggaatcattgatggaaaaatgggaatttatgaggcttataagactggcaaagggataatttatgtaagggcaaaaactactatcgaagaggataaatctggaaacaggtctctgataattaatgaaattccttacatggttaataaggcaaagatgcttgagaaaattgctgaactggtaaaagataaaaagattgatggcataaaagaaattagagatgaatccgataaagatggcttaagggttgttattgatatcaaaaaaggtgaatcttcagatgttctagaaaataatcttttttcacaatcgcaattagaacaatcctttggaataaattttactgttttagtagatggccaaccaaaagttcttaatataaaagaattactgaatgaatttattaagcatcgaaaagaagttgttactaaaaggtcaaaatttgagctagcaaaggctaaggagagaggtcatgtagtagaggggcttatagttttcatatcaaatattgatgaaatcataaa

SEQ ID NO: 294571 - DNA, 823 bp, Unknown
  Bacterial polypeptide expressing nucleotide sequence isolated from the Sargasso Sea
attcttgaggcattagcggtcgcactcgccaatatcgatccgattattgcgctgatcaaagcctcaccaaccccagctgatgcgaaagtcaaactggttgagcagggctgggcacttggccatgtacagggcatgcttgaaaaagcgggtgacgatgcggcgcgtcctgaatggttagagccagaattcggtatccgtgatggcttatattacctgactgaacaacaggctcaggcgatccttgagctgcgcttacaccgtttaactggtcttgagcacgataagatcatcgccgaatacgaagagctgctcgagtttattgcaggtctgctgtttattctgcgcagccctgagcgtttgatggaagtgattaaagaagagctggaagaaattctggctgaatacggtgatgctcgccgcactgtcatcaacgccaatgaaattgatatgagtcttgaagacttaatcaacgaagaagacgtggttgtgactctgtcacacttaggttacgccaagtaccaaccgctgagcgattaccaagcccagcgccgtggtggtaagggtaaagccgcaactaaagtgaaagacgaagatttcgttgaaaaactgctggttgcgaacacccacgataccattctgtgcttctcagacttcggtaagatgtactggctcaaggtctatcaattaccgctggcgagccgcacatcgcgcggtcgtccgattgtcaacttactgccgctgtccgatggagagcgcattacggcgattctaccggtgcgtgaatacgcagaagataagtacatcatcatggcgacctctaacg

SEQ ID NO: 294572 - DNA, 871 bp, Unknown
  Bacterial polypeptide expressing nucleotide sequence isolated from the Sargasso Sea
tatgggcaaatatcatcctcatggtgatgcagctatttatgagtcaatggtcagattagcacaagatttttcaatgagagtgccattgatagatggccaaggcaattttggatcgattgacggtgatcctgcagcggcaatgaggtatacagaggctcgattagataaagtttctgaatttttgttgagagatatcgactttgaaactgttgattatacaccaaattatgatgaaagccaactagagccacaggtgttgcctgctgaatatcctaacttattagtaaatggagctggtggcatagctgttggcatggcaacaaacattccaccgcataatccagctgaggttattgacgcgtgtatttcatatgtagataaccctgaaattagtattgaagatttaatgaaaattctgcctggtccagattttcccactggagcattgataatgggtcaagctggcattcggtctgcttatgaaactggaaaaggcagcattgtaatgaggtcaaaagctgaaataatagaaaataacaataggtcccaaataattatttcagaaattccttatcaagtaaataaatcacagttattggagagagttggagaattagttagagaaaaaacaattgaaggtattcaagatttacgagatgaatctgatagagatggtctaagaatagtagttgaaataaaacgtgatagtgatgctaatgtgatattaaaccaactttttaggcatacgcgatttcaaacagcattttctgtaaatcttcttgcattaaatgcaggaaagccagagcagatggggctcaaagaagttctttctgcttttgtatcatttagagaagaggttatatacaagaga

SEQ ID NO: 294573 - DNA, 448 bp, Unknown
  Bacterial polypeptide expressing nucleotide sequence isolated from the Sargasso Sea
atgcatgaaaaaataaaaaatcataataaaaaaaacattgattatgatgctgagtcaataaaagttttaaaaggtctggatgctgtaagaaaaagaccgggtatgtatataggagatactgacgatggctcaggtcttcatcatatggtttatgaagttttggataattctatagatgaggcattagcaggctattgtgacacaatagatgttacattgctcaatgatggttcaattaaaatagctgataatggaagagggataccagtagatttgcatcctgaggaaggtatttctgctgcagaagttatcatgactcaacttcatgcaggaggaaaatttgataataactcttacaaggtctcagggggtcttcatggagtagggatttcagtagttaatgccttatctgattatttgttactccactatttgcagggatcaaaaa

SEQ ID NO: 294574 - DNA, 937 bp, Unknown
  Bacterial polypeptide expressing nucleotide sequence isolated from the Sargasso Sea
gcataggcgcatattatatgcaatgattgaaggggggtacgactggtctaagccatataggaaatctgctagagttgttggtgatgtaatgggtaattatcatcctcatggagatacagcaatatatgattctatggtaagaatggcccaagaattttcaatgaggcttatgcttgtggatggtcaaggtaattttggatccattgatggtgatccacctgcagcaatgaggtatacagaatccagactcgcaagatcgtctgaaagtttgttgagggacatagataaagatacaattgattttattccaaattatgatgagtcccaactagaaccttctgttttaccagcagaattcccaaatatgcttgtaaatggcgctggtggtattgcagttggtatggctacaaatattccaccgcataatccaggtgaagttatacgtgcatgtaaagcactcatagaaaatccaaatacaagtttagaagaattaatggagatcattcctggtcctgactttcctacagcaggcttgattatgggaagagctggtattagagaagcctttaggacaggtagaggtagtgtgattatgcgatcaaaagcagaaatcatacagttaggtaaaaatcttgatcgagagactataattatatctgaaattccatttcaagtaaacaaagctcttgtattagaaaaaataggtgatttgattagggataaaaccattgaaggaatttctgatttaagagatgagtctgatagaaatggaatgagaattgttattgaaattaaaaaagatgttcaagcagatgttgttttaaaccaattgtggcgtcatacaagattacaaacaagttttcctgtaaatatgttagctttggataatggacaaccaaagcaaatgggtttattgaaattttcaaagctttcatag

SEQ ID NO: 294575 - DNA, 715 bp, Unknown
  Bacterial polypeptide expressing nucleotide sequence isolated from the Sargasso Sea
gctagggaagcagcaagaaaagccagagaaatgactagaaaaaaaggagctcttgatattgcgggattgccaggaaagcttgctgactgccaggagaaagacccttcactcagcgagctttttattgttgagggagattctgcaggaggctctgccaaacaaggaagagacagaaaaacacaagcaatattgccacttaagggaaaaatcttaaatgtagaaaaagcacaaagagcaaaaatgtattcttctgttgagattggaacacttattacagctttaggatgcggcattcacgatgaattcgatatggataaccttagataccacaaaatcattatcatgactgacgccgatgttgatggttctcatatcaggacactattactaactttcttttacagagagcttcaagatcttatcagcggtggctacttgtatattgcacaaccccctttatataaactaaaaaaaggcaagaaagaggagtatgttttaactgacgaggaacttaatagtttaatactaagcaatgctgttaagggcaccgaggtcagggctaaaaacaagaaaaaaggaattgagggagatgggctcttaaacaccattcttgattattctaattcattatctgtgattgaaagaatcgagaaacaggcaggaactatcgcggcaaaagcaatatcgcttcataaaccaattactaaaacagaag

SEQ ID NO: 294576 - DNA, 442 bp, Unknown
  Bacterial polypeptide expressing nucleotide sequence isolated from the Sargasso Sea
agagttgtaatcatgacggatgctgatgttgactgtgctcatataagaactttattgctgacatttttttacagataccaaagagaacttgttgagaaaggttttatatacattgcttgtccccctttatataaagttgaaagaggtaagaatcataattactgttataacgagaatcaattaaaggatacaattaaaggttttggagaaaatgcaaattataatatccaaagatttaagggattgggcgaaatgatgccaaaacaattatgggatacaactatgaatcctcaaacgaggatgatgaaaagggttgaaatagaagatgcacttgaagcagacagaatattcaatatattaatgggagataaagttgcaccaagaagagaatttattgaaactcatagtagccatttagatatggcaactttagacatatgat

SEQ ID NO: 294577 - DNA, 157 bp, Unknown
  Bacterial polypeptide expressing nucleotide sequence isolated from the Sargasso Sea
gggggatcagccaaacaaggaagaaatagacaaaatcaagcaatacttcctctaaaaggtaaaattttgaatgttgaaaaagctagattagataaagtcttatcttcccaagaaataggaacgcttgtaacagctttaggttgtggaattggaacag

SEQ ID NO: 294578 - DNA, 981 bp, Unknown
  Bacterial polypeptide expressing nucleotide sequence isolated from the Sargasso Sea
taatgctctttctcagaccttaagtttacgaatccataaaaatggaaacatatatgaacaagattatgctcatggagtgccaaaaaaagcacttaagaaaggcgctaagactgagagaacgggaactaccatatcgtttcagcctagtaaaaagactttttcaaacacatcattcagttatgaaacgctctctaaaagactgagagaaatgtcttttctaaatccaggactaaccattaatctcaatgacgaaagaacaaacaagacagactcttattgttatgagggaggcttaaaagactttgttcgccaccttaataaacctcaaaagccaacgcatcaaagcattgcatatatcaacaagaaatccaaaaaagacggagatattgaggtagaggttgccatacaatggaatgaatcatacagagaaaatacattttgttttgcaaacacaattcgacagaaagacggagggacccatcttgctggatttaggggcgcattaacaaggacaatcaacacctatatcgataaggaaattccaaaaaatgatacatccgtaacgggagatgattgtcgagaagggatgacggcaatcatctctgttaaacacccggacccgaagttttcatctcaaaccaaagataagctggtttcttccgaggttaagggtgtcgttgaatctgcagttaataaacacctcaaggaattcttagaggaaaaccccgtagaggcaaaaataatagttggaaaaatattagacgcggctcgcgctagggaagcagcaagaaaagccagagaaatgactagaaaaaaaggagctctcgatattgcgggattgccagggaaacttgctgactgccaagagaaagacccttcactgagcgagctttttattgttgagggagattctgcaggaggctctgcaaaacaaggaagagacaggaaaacacaagcaattttgccattaaagggaaaaat

SEQ ID NO: 294579 - DNA, 781 bp, Unknown
  Bacterial polypeptide expressing nucleotide sequence isolated from the Sargasso Sea
gccatacttccacttagaggtaaaattttaaatgtaattaaagccaatcctcataaaatcttagaaaataacgaaatttctgctcttatcactgcaatcggtgctggatatggaaatccgcccaaggataaagaatataatccatctgattattttaaccctgactcaatgcgttatcacaagattgttattatgacagacgctgatgttgacggtagtcatatcagaacgttattactcacatttttttatcaatttatgagagatatcataaccactggacgcttgtatatagctcaaccccctctttataaggttaaaaaaggaaacgcagaaaattatttattagacgataaggaacttacaaagtttttacttttaaacaataaagaagatcttgattttaacatttataataaaaagaaaaaaatccaattaaaagaggagcagttaaacgagttaatcgatttagcttctcgagcaaactctgcttatctaaatttagatcttacatatttagacacacagttttttgatcaaatcattaataccggattatttttcatggactttcctccaaataaaattgaaaagtctcaatttaaagtattcctctccaatttaaatcaggtttataaatcacaaaatattaaatttacatttcaaagtatgattagtaatgaacttgtttttttacaagagaaagagggttataataaaataataaaagttcctttagataaattactacatttaagagagttcatttctatagaaaatt

SEQ ID NO: 294580 - DNA, 842 bp, Unknown
  Bacterial polypeptide expressing nucleotide sequence isolated from the Sargasso Sea
tatgccaaaaacgaaaaaaagtaccagcaaaaaaaattacgactcctctaacataaaagtcttaaaaggtcttgacgccgttcgaaaaagaccagggatgtatattggagatacagatgacggtacaggactccaccacatggtgtatgaagtcgtagacaactctgttgacgaagcactagccggttactgttctgaaatatctgtaataatccatcaagacgactctattacagtcaaggataatggtaggggcgttccagtagataagcacaaaggagaaaataagtctgccgcagaagtcatcatgacagttcttcatgcaggaggtaagtttgatgacgactcttacaaagtatctggcggacttcatggcgttggcgtttctgtcgtaaacgcattgtcccagacactaagcttacgtatacataaaaatgggaatatctatgagcaaaactacacacacggggtacccgtaagggcgctaaaaaaaggggctaagaccaaaagatcaggaaccacgatatcatttcaacccagcaagaaaacattctcaaacacaacattcagttatgaaaccctatcaaaaagacttagagagatgtcttttctaaaccctggtcttacaatcacacttaacgatgaaagaacaaataaagcagactcatattgctacgagggcggacttaaagactttgttcgtcaccttaacaagccacaaacaccaacacaccagagcatcgcatacattaataaaaaatcaaaaaaagatggagacattgaggtagaggtagccattcagtggaacgaatcatacagagagaacacattttgttttgcaa

SEQ ID NO: 294581 - DNA, 748 bp, Unknown
  Bacterial polypeptide expressing nucleotide sequence isolated from the Sargasso Sea
aggagaaaaaaaatcggctgctgaagtaataatgactcaattacatgcaggaggtaaatttgaccataaatcctataaagtttccggtggtttgcatggtgttggtgtatcggttgtaaatgctctctctaaaaaacttgaattagagataaatagagacaataaaaaatactatattgaatttaaagatggcgatgcaaaagcgcctttaaaacaaattgggaaatcaacaacaactggtacaaaaattacttttctaccgtcaactgagattttttcttcaacaaaattctcaagttctattattcaaaaaagaatgcgagaactggcctttctaaataaaggcataaaattagtagttatagataaaactcaaaaaaaagataaagtttttgaatataagtttgatggtggattaaatgaatttattaattatttaaaccaaaaaaaagaaaaactaaaaaataaaaatggtaatgatctatttaaaaaacctataagtttagagggaaataaaaatggaatagaaattgaatgttctttggagtggaattcatcttattcagaagatgtctatgcttatacaaataatatctatcaaaaagatgggggtacgcatttattaggttttagaagcgctttaactagagttgttaataaatacgtaagtgataacaacgttttaaaaaaaaataaattatctatttcaggcgatgatattaaggaaggattaacggctcttttatca

SEQ ID NO: 294582 - DNA, 453 bp, Unknown
  Bacterial polypeptide expressing nucleotide sequence isolated from the Sargasso Sea
tatgaccgcgtcaaagacaaaaactgttccaaaaaaatcgaccacatccaaagcaaaaacatcaaaaactaagaaaaataacctcaacggttacgacgctgacgatatacaaactttagaaggcctcgaagctgtcagaaaaagacccgggatgtacataggaggaaccggaagccaaggactcatgcatctggtctgggaattggtagataacgctgtagatgaagctgctgccggtttcgcaactcgtttagacgtcattctcaaccgcgatggatctgttgaaatatcagacaacggtcgaggaatacctgtagatattcattcaggtaaaaaagtttcggccctagaagtagttttaactgagctgcatgcaggcggaaaatttggaggaggggcatatggggcatctggaggattgcatggcgtaggtgcttctgtagtaaatgcttt

SEQ ID NO: 294583 - DNA, 840 bp, Unknown
  Bacterial polypeptide expressing nucleotide sequence isolated from the Sargasso Sea
gtgccattgaattaagtggtcttccaggcaaattagcagactgtcaaataggaaaacaagaaggaacagaattatttattgtagagggggactcagctggtggctcagctaaacaaggcagagatagatctaatcaagcagtcttacctttaagaggcaaaatacttaatacttacgttgaagatttaaatgtaaaaaaaaatggtaatggaaatggttcagatcaaagaacaaaagcattgtctaaaatgatatcttcaaatgaaatagttactttaataaacgcacttggattagatccaaaggctcatgaaattgatttaaaagatttaaggtatggaaaaataattataatgacagatgctgatgttgatggatctcatattagagcattattattaactttctttaataataaaccttttaacaaattgatagaacatggacatgtttaccttgctcaaccaccactatttaaaatcaataaaggctccaaaggaatatatattaaagatgaggaagaattagaaaattatattataactaatagcaaggaaattaaaaaatctaagagaggttctaaagagttttcaaaattaatagaaatggaaaaatccaaaatgagtatacaaaggtttaaaggtttaggtgagatgaacccagaggagctttggagcacaactcttaatccagaaacaagaaatttacttcaggttcagtattcaaaaaactcaaaaaaagatcaggaattgatacatactttaatgggtaatgacgtaacattaagaaaagattttatcatttctaacgcgataaatgttcaaaatttagatatttaga

SEQ ID NO: 294584 - DNA, 784 bp, Unknown
  Bacterial polypeptide expressing nucleotide sequence isolated from the Sargasso Sea
aatgacaaataaaaacacatatcaagctgactcaattaaagttctaaagggtcttgaagcagttagaaaaagaccaggaatgtatataggagataccgatgatggcactgggttgcatcatatggtttatgaggtggttgataattcaatagatgaagctttagcaggttattgtaaaaatattaatgtaaagattaattctgatggtactgtcactgtgagtgacgatggtagaggtatacctgtagatattcataaaggagagaaaaaatcggcagcagaagtaattatgacacaattacatgcaggtggtaaatttgatcatgactcttacaaagtttcaggtggtttacatggagttggagtttccgttgtaaatgctttatcagaaaaactacaattagaaattcatagagatggtaagaagtattttatagaatttattaacggaaaagcaaaatctcctttaaaagctttagggaaatctaaagactcaggaacaaaaattacctttttaccatccaaggagatattttcctcaacaaaatttagtggaaatattcttattaaaagaatgagagagcttgcctttttaaacagaggtatcaaaataatatttattgatggtagtcaaaaaaaagaaaaaattaatgaatttaagtttgaaggtggtgttttagaatttgttgaatatttagatgaaaaaagagaaaaacttcaaaacaaaaatggaaataatttatttaaaaagccaatttatattgagggaaaaaaacagaacatt

SEQ ID NO: 294585 - DNA, 718 bp, Unknown
  Bacterial polypeptide expressing nucleotide sequence isolated from the Sargasso Sea
atgattaagaaaaaccaactagataatttaaaatatagtgctgaatcaataaaagtgctcaaaggacttgaagcggttcgaaaaagacctggaatgtatattggtgacactgatgatggaacaggacttcatcacatggtttatgaagtagtagacaattctatagacgaagctctagctggacattgtaagaatattaaaatttcaataaattctgatcaatctgtttctgttgaagacgacgggagaggaataccagtggatttacacaaaggagaaaaaaagtcagcagcagaagtaattatgacacaacttcatgcaggaggaaaatttgaccatgattcatataaagtttctggcgggcttcatggtgtaggtgtttcggtggttaatgcactttcagaaaaactaacattaaaaatatttagagacaaaaaagagtattttgttgaatttaaagatggaaaagcactctcaccattaaaagctacaggaaaaacaaataaaacgggtacttttataaaatttttaccttcaaaaaaagtattttccgatactaagtttaactctacaactttacagaaaagaatgagagagctagcttttttaaacaagggcctgactattattttgctagacaaaaccagcaaaaaagaaaaagaatacaaaaataaatatgatggtggaatcccaagagtttgtggaatttctggataaa

SEQ ID NO: 294586 - DNA, 455 bp, Unknown
  Bacterial polypeptide expressing nucleotide sequence isolated from the Sargasso Sea
tttggctgaagactcggcgccgtcaccaccgctagaacctgatatcgaacacgtttccatcgcagatgaaatgcggaaatcgtatctcgattacgcgatgagcgtgatcgtcagccgggcgcttccggatgttcgtgacggcctgaagccggttcatcggcgcatcctgcatgtgatgaacgaaaacagctatgactggaaccggccgtaccgcaagtctgcgcgtgtggtcggggatgtcatgggtcagtatcacccccacggtgaccaggcgatttacgacgccatggtgcgtatggcgcaggatttttccatgcgtctgcccctgatcgacgggcagggaaattttggttccatggatggcgatccgccggcggcgatgcgctataccgaggcccggctggaacgggtggcccgcgaactgctcgacgatatcgacaaggatactgtcgatt

SEQ ID NO: 294587 - DNA, 928 bp, Unknown
  Bacterial polypeptide expressing nucleotide sequence isolated from the Sargasso Sea
cccaggcgcaggcatactcgacctgcgactgcaccggctgacaggtttggaacaagacaagatccgcaacgaatatctggaggtgctggaccggatccgggagtatctgcaaattctgggtgatccagatcggctgatgcaggtcatcagagacgaactgacctcggtccgggatcagtacggggatgatcgccggaccgaaatacatgagcgccatgaagatcttgaaaacgaagacctcattaccccggaggatcgggtagtgacgttgtctcatgagggctatgcgaagtctcagccggtcgcggattatcaggcccaacgacgcggaggaaagggtcgcgtcgccacccggactaaggaagaggacttcgtgaaaaccgtgtttgtggcaaacacacacgacacggtaatgtgcttcaccaatctaggcaaggtttactggttgaaagtttaccaactgccgttagcaggtcgacaggcgcgcggcaagccattggtaaacctgcttccgctgagcggcggcgagcgagtgacggcggtgctcccccttgcgcacgacacgccaggccagtatgtctgcatggtgacgcggcatggggtgatcaagaaatcccttctcgagaactttgcgcgcccgcgatcagtgggcctgattgcggttaatcttcttgagggagatgaacttgtcgaggtcagcttgaccgatggggagtctgatatcctaatcttcagttctgcggggaaggcgatccgattctcggagaagcaggttcgccctatgggccgcagcgctcgtggcgtacgtgccctcaatatgaagcctgatcaatctgttattgccatgttgatccgtagatccgatggcctggacagtaaggtattggtcgctactgaaaacggctatggcaagcaaaccgccttttct

SEQ ID NO: 294588 - DNA, 631 bp, Unknown
  Bacterial polypeptide expressing nucleotide sequence isolated from the Sargasso Sea
tatggaaaaacaaaatatcaaacacaacaataattcaaaacctattttagtaagaaatgaaatgagttcatcttatctttcttacgcgatgagtgtaattgtaagtcgagcgttacctgatgtaagagatggcttaaaacctgtgcatagaagaatcatttttgcgatgtataaaggtgggtatgattggtcaaaaaattttagaaaatcagcaagaatcgttggtgatgtaataggtaaataccatccacatggagatcaagctgtttatgatgccttggtaaggctagtacaagatttttctatgagcttacctctgcttcaaggtcaaggaaattttggttcaattgatggcgatcctccagcagcaatgagatatacagagactaaattaggaaaaatatctcaatatttaacagaagacttagagaaagatacagtctcttttagaaataactacgatgaaaccgaaaaagagcctactgttttaccatctcagtaccctaatcttttagttaatggagctggtggaattgctgtagggatggcaactagtattccaccacataatttgggagaggtaattaatgcaacgaatgcttttatagaaaatcaaaatattacgattggg

SEQ ID NO: 294589 - DNA, 521 bp, Unknown
  Bacterial polypeptide expressing nucleotide sequence isolated from the Sargasso Sea
aatgagctcgtcttatttatcatatgcaatgagtgtaattgtaagtagagcattgcctgatgttagagatggattaaagcctgttcatagaagaattatctatgcaatgtataaaggtggttttgattggtcaaaacagtttagaaaatccgcaagagtagtaggagatgtgattggtaaataccatcctcatggcgatcaagctgtgtatgatgcattagtaagacttacacaaaatttttcaatgagcttaccattaattgatggtcagggtaattttggttctattgacggagatccacctgccgcaatgagatataccgaaactaaattatcaaaggtttctcaatttttagttaatgatattgaaaaaaatgtaattaattttagaagtaattatgacgagagtgaaaaagaacctgaagttcttccatcgcaatatccaaatttattggttaatggggctggcggtattgctgtaggaatggcaactagcattcctccgcacaaccttggagaaa

SEQ ID NO: 294590 - DNA, 394 bp, Unknown
  Bacterial polypeptide expressing nucleotide sequence isolated from the Sargasso Sea
aatgtctaaaataataaaaaataaaatagataaaattttaagtgataaatatttatcgtatgcagtttcaactattgtttcaagatctttgccggatgtaagagatggtttaaagcctgtacatagaagaattatttattctatgtatcagttaaaactattccatgactcaccctttaaaaaatctgcaagaattgttggggatgttatgggaaaatttcatcctcatggagatcaagctatttacgatagtttagtaagattagctcaaaacttttcaacgagacatacattaattgaaggccaaggcaattttggaaatatcgatggagataatccagctgcaatgaggtataccgaagcaagacttgacaaaatttctcaatattttttt

SEQ ID NO: 294591 - DNA, 856 bp, Unknown
  Bacterial polypeptide expressing nucleotide sequence isolated from the Sargasso Sea
atgagttcttcatatttatcttacgctatgagtgtgattgtaagtcgggcattaccggacgtaagagatggtcttaagccggttcatagaaggattatttatgcaatgtataaaggtggttacgattggtcaaaatcttttagaaagtctgcaagaattgttggtgatgttattggtaaatatcaccctcacggtgatcaggcagtctatgatgctttagttagattagtacaagatttttccatgagccttcccttaattgaaggacaaggtaatttcggttccattgatggtgatccaccagctgctatgaggtacactgaaactaaattgggaaaaatttcacaacatttaactgaggatttagaaaaaaatactgttgagtacagaaacaactatgatgaaactgaaaaagagccaacagtacttccatctcagtttccaaaccttttagttaatggggcaggaggtatagcagtaggtatggctactagtattccaccgcataacttaggcgaggttatagacgcaactattgcaatgattgaaaacaaagacattactatatcacaaattatgaaatttttacctgggccagacttcccaactggtggcgttataattggaaaagatattattaaacaaggttacaataagggtagaggatcatttaaaatacgtggagaaattgattttgaggaaaaaaaaaatggaagatccattttgttgataaaatcgattccttaccaaattaataaatcaacactaatagaaaaaattgctcaattggctaaagataaaaagattgaaggtataagcgacataagagacgagtctaatagagagggtatacgtg

SEQ ID NO: 294592 - DNA, 900 bp, Unknown
  Bacterial polypeptide expressing nucleotide sequence isolated from the Sargasso Sea
tatccgacactagacggccatggaaattttggatctgtggataatgatccaccagctgcaatgaggtacactgaaacccggttagctccaatagcttacactggatttctagaagaaattggttcagacacagtaaacttctcgaataattttgacggttcacaaaaagaaccagatgttcttccagctcaacttccttttttattgctgaacggatcatctggaattgctgttggaatggcaacaaacattccccctcacaacctcggagaaatagtggatggtttaattgcgttaatagaaaataaagatataagtaacaaaaaactatctaaaattattaaaggacctgatttccctactggcggagaattaatttataaccaagctatagaagaactttacgaaacgggaaaaggatcaataataattagagggatattaaataaagaggaaataaatttaggcaaaggtaaacataaaagaaatgcattaataattacagaacttccttatcaaattagtaaagcaggttggattgaaaaactggctgaacttgttaattcaaacaaaattaatgggatcgctgatattagagatgaaagcgatagagatggtatgagaattgtaatagagttaaaaaaagattctaatactgaacttgtaatttcgaatttatataaaaaaacaacactccaaaccaactttggggcaatatttttaacgttaattaaaggtaaacctgttcaactaaacttaaaacaatatcttgactattttcttaaattccgggaagagactattagaaaaagaactagttattttctaaaaaatactcttgagaaactagaaatattagaaggtttgtctaaagcaacaaaagatataaaagagttatga

SEQ ID NO: 294593 - DNA, 397 bp, Unknown
  Bacterial polypeptide expressing nucleotide sequence isolated from the Sargasso Sea
aatgataaaaaataataaaaatacctatcaagcagactcaatcaaagttttaaaaggtcttgaggcagtaagaaaaagacctggtatgtatattggcgatacagatgatggaactggtttgcatcatatggtatatgaagtcgtagataattctattgatgaggcattagctggtcattgtaaaaaaattgaagtaagcattaactctgacgggtctattacagtcgaagatgacggtagaggaataccagttgattttcataaagaagaaaaaaaatcggcagcggaagttataatgacccagttacatgctggtggaaaatttgatcacgattccgataaagtttctggaggcttgcacggtgtaggagtttcagtagtaaatgtcttcacaaag

SEQ ID NO: 294594 - DNA, 926 bp, Unknown
  Bacterial polypeptide expressing nucleotide sequence isolated from the Sargasso Sea
ggcattaccagatattagagatggattaaagcctgttcatagaagaattatttatgccatgcacaaaggtggttttgattggtcaaaacaatttagaaaatctgcaagaattgttggagatgttattggtaaatatcatccacatggagatcaagctgtttatgacgctttagttagaatggttcaagaattttcgatgagtttacctctggtagatggacaaggtaattttggttctattgatggagatccaccagcagcaatgagatatacagaaactaaacttgcaaaagtatctcagtttttaattgatgatatagaaaaaaataccgtatcttttaaaagtaattacgatgaaacagagcatgaacccattgtattaccagctcaatatccaaatcttttagttaatggtgcaggtggaattgctgttggtatggcgacaagtataccgccccataatttgggtgaggttgtagatggcactttagccttaattaaaaacaaagatattaaaattaatgagctaatgaaatatatcccaggtccagactttccaacaggaggattaataattggtaaagaaataatcaaacaaggctataaaactggaaggggttcttttaaaattcgtggagaaatttcagtagaaaatttaaaaaatggcaaagatagactcgtagtttcatccataccttaccaaattaataagtcaaacctgaatgaaagaattgcagaactagtaagggataaaaaaattgagggtataagtgatatcagagatgaatcaaacagtgagggaataagagtttcaatagatttaagaagaaatgttgagcctgaaactgtcaaaagacaattatacaaatatacatcaatagaaacatcattcgggtttaattctttagcaattgttgatcaaaaac

SEQ ID NO: 294595 - DNA, 745 bp, Unknown
  Bacterial polypeptide expressing nucleotide sequence isolated from the Sargasso Sea
atgaccaggaggaagggcgtgcttgagattgctggattgcctggaaagcttgcagattgtcaagaaaaagacccaacactatctgaaatatatatagttgagggtgattcagctggaggatcagcaaaacaaggaagaaatagaaaaaatcaagcaattcttcctctaaaaggtaaaattattaacgttgagaaagcaagaattgataaagtcttaggttcagctgaagttggcacacttattaaagcccttggttgcggtattggtaaggaagattttgatatagataacttaagataccatagaataataataatgactgatgcagacgttgatggatctcatattaggacactgctcttaacatttttttacagacaaatgtatgaaattgtagaaaaagggcatgtttacatcgccttaccacctttatataaaattactaaaggtaaggagtttgtttatgcttctgatgaatctgaaaaagatgatgctattaaaaaactctcaaaaaatggcactagaggtctagaagttcaaagatataaaggtttgggtgagatgaatccagagcaactttggacaacaaccatggaccctattaatagaagaatgatgagggtcgacatcaaggatgtacaggatgctaacgaatcatttgaaatacttatgggtgatgatgttgagccaagaagagagtttatagacgctaatgctttatctgtaaaagagttagatatttaat

SEQ ID NO: 294596 - DNA, 565 bp, Unknown
  Bacterial polypeptide expressing nucleotide sequence isolated from the Sargasso Sea
atgtctgaatttgccaaagaaattcttcctataaatatagaagatgaattaaagcaatcttatttgagttatgccatgagtgttattcatggaagagctctgcccgatgttagagatggtcttaagcctgtccatcgtcgtattttgtttgctatgcatgatcttcgaaattactataacaaaccatataaaaaatctgcaagagttgtgggtgatgttattggtaaatatcatccccatggagactctgctgtttatgatgccattgttaggatggcacaagatttttcaatgcgatataccctgattgagggccagggaaattttggttctattgatggtgatcctcctgctgcaatgagatatacagaggttcgtatgcagaaaattgctgatgaaatattatcagatttagaaaaagagacggtttcattttccgaaaactatgatggaagtgaaatgatccctgatgttatgccaaccaaaataccaaatttattggtaaatggttcttcacggtattgctgttggtatggcaacaaaatataccaccgcataacttgac

SEQ ID NO: 294597 - DNA, 613 bp, Unknown
  Bacterial polypeptide expressing nucleotide sequence isolated from the Sargasso Sea
attgccaggtaaactcgcagactgccagtcttctgataatgagatcacggaattatttattgtagaaggtgactctgctggcggttcagcaaaacaggcaagagacagaaaatatcaagcagtattacctctaagaggtaaaatattgaatacttttgttgaaagtaaaaacggaaaatcgaatgataaaaaaacattctctaaaatgctatcttcaaatgaaataataacattgataaacgcactaggaaccggctttgaggattttaatattgataaattaagatacggaaaggttgtcataatgactgatgccgatgtagatggatctcatataagaacattgcttttaacattttttaacaataaaccatttaacgaattaattgaaaaaggaaagatctacattgcacagcctcctctttataaagtaaaaattggtaaaaatattaaatatcttaaatcagataatgaattattaaaattatcaataacaaattctaaaagtaaatttgaatttcagagctcctctaaaagttttcaggtagaactgaacacaattttagacgcgtgccttttactaaaagatatactaagtaatataagagtgtga

SEQ ID NO: 294598 - DNA, 922 bp, Unknown
  Bacterial polypeptide expressing nucleotide sequence isolated from the Sargasso Sea
cgtgctgtcggagaagtgatgggaaaatatcatcctcatggagacagcgccatatatgactctttggtaagaatggcacaagatttttccatgtctgtacccttactagacggacaaggaaattttgggtcgatggatggcgactccgctgcggcgatgcgatacacggaagtgaagatggaaaaagttgccaattctttgctcgctgatattgaaaagaacacggtaaactttcaagataattatgatggaaaagatagggagccaactgtgctgccgtcacgatttccaaatatgctggttaacggtgctggtggaattgccgtcggtatggcaacgaatatacctccccacaatttaggtgaaataatcgatgcaacaattgctctaattgaacgtccagaaatgtcaatcgatgacctaatggagctagtgccggcacccgactttccaacaggtggattaattttgggaaactcaggtgcaaaaaaggcttacacagagggaagaggatcagtaattataaggtccagaacaaaaattgaagaaatacgaaaagaccgatgggcaatagtaatttctcaaataccttaccaagtaaataagtcaaatttaattgaaaaaattgctgaagtcggaaaagatcgtagaattgaagggatagctcatgttcaagatgaatctgatcggcttggcgtgcgaattgttattgagttaaaacgcgatgcaacacctgaagtcgttttaaatcaactctacaaatttactcaattacaaaccagttttggctgcaatatgttagctttaaacggcggtagaccagagcagttaaatttaaaagattttttatcttcgtttgtatcatttcgtgaagaagtagtagcacgtagaactgcttatgatcttaaaaaagcacgcgaga

SEQ ID NO: 294599 - DNA, 862 bp, Unknown
  Bacterial polypeptide expressing nucleotide sequence isolated from the Sargasso Sea
taaatcaaaaaaaaataccaatacaaaaaattacgattcatccaacattaaggtcttaaaaggattagacgctgtccgaaaaagacccggtatgtacattggtgatactgatgacggcacaggacttcaccacatggtttttgaggtcgttgacaactctgttgatgaggctttggcaggtttttgcacacacatagaagtaatcattcatgaggatgactccataactgtaaaagataacggacggggcatacctgttgataaacataaaacagaaaagacttctgcagctgaggtcataatgaccgtattgcatgctggaggtaagtttgatgatgattcatacaaggtttctggaggcttacatggtgtcggggtttcagtggtaaatgccctgtcagaatcattaaacctaagaatacataaaaacggacatacatatgaacaagactatgtacacggtgttccgcaaaaacctcttaaaaaaggctctaaaacagacagaagtgggacaacagtaaccttcaagccaagcgctaaaacatttactaataccacctacagttttgatattttatctaaaagattaagagagctttcattcttaaactcggggctaagcattaagctaactgatacaaggtctggaaaagaagaagagttttactttgaaggcgggatcagtgcatttgtatctcatctaaacaaggttcaaagtcccgtacatgagtctgtcatcaatttcagcaagacaattgatgatataaccgtagacatcgctctgcagtggaatgagtcttacagagaaaacatgtactgttttgcaaacaccataaggcaaaaagatggtggaacacactta

SEQ ID NO: 294600 - DNA, 874 bp, Unknown
  Bacterial polypeptide expressing nucleotide sequence isolated from the Sargasso Sea
atttatgaagtacttgataattctattgatgaatccctggcaggttattgtgataaaatcgaagttcatttaaattcagacggctctataacagtttctgataatggtagaggaatcccagttgatatacataaaactgaaggtgttcctgcagcacaattaattatgaccgagctacatgcaggaggtaagtttgatcaaaacagttataaagtttcaggtggcttacatggagttggtgtttcagtagttaatgctctttcggaaattttggaattaattattaacagagatggaaagatatataaaatcaattttgaaaatggtgtagttaaaaataaattagaaatcattggggactcaaaaaaaattgataattcatactttacaggcacatctattaattttctcccctcaagcaaaacattcaaaaatactgattttaattttggaataattgaaaaaagattaagagaattagcttttttaaacacaggcgtaaacataacactaaaagataaaagatcatcgaaaataaaggaattaaattttaaatatgaaggcggcattaatgaatatgttcagtttattaataaaggaaaaaatactattattaataatcctatattttttaaagcaaataaaaataatgtaagtgttgaatgttcattacaatggacagacagttatcatgaaaacactttgtgttttacaaataatataattcaaagggatggaggaactcacttagcaggttttagaggtgcgctaacaagaagtgtagtaaattatataaataaaaattcaaaatttaatgcaaatgttacgggagatgatgcaagagaaggattaacttgtataatctcaataaaat

SEQ ID NO: 294601 - DNA, 730 bp, Unknown
  Bacterial polypeptide expressing nucleotide sequence isolated from the Sargasso Sea
atttcatcctcatggtgatgctgcaatttatgaatcaatggtaaggatggcccaagagtttgctttgagatatccattagtagatggtcagggtaattttggtaatattgacggagataatgccgcagctatgaggtatacagaggctagaatgactaaagccgcagagttacttcttcttgatatcgataaagatactgttgattttagagtgacatatgatgatgagggcaaagagcccgttgtgttaccttcagcatttcctaatctcttagcaaatggatctcaaggtattgctgttggaatggctacttctattccaccccataacattagtgagttggtagatgctcttcttcatttgatcaagtttcctaacgcgtctgacactacaatttctaattatgtaaaaggacctgatttccctacaggtggtattttggtagagcctaaatcatccattgaagaatcatataggattggaaaaggtggatttaaattaagggcaaggtggattgttgaaaaattaaaaagtggtcaatggcaaataatagtaactgaaataccttatcaagtccaaaaaagtagattactagagaaaattgctgagttgatggaaaataaaatactgccaatgttatctgacattagagatgaaagcactgagaatattaggttggttgttgaacctaaaagcagaaacttatcacctgaaatgattatggagaca

SEQ ID NO: 294602 - DNA, 908 bp, Unknown
  Bacterial polypeptide expressing nucleotide sequence isolated from the Sargasso Sea
atgtatattggtgatactgatgatggtactggattacatcatatggtgtatgaggtagtcgataactcaattgatgaagctttagcaggttattgtaaaaatatttatgtaaagattaattcggatggaacagtcacggtcagtgatgatggtagaggtatacccgttgatattcataaaggtgaaaaaaaatcagctgcagaggtaataatgacacaattacatgcaggtggaaaatttgaccatgattcatataaagtatctggtggtttacatggagtaggtgtttcagtggttaacgctttatcagaaaatttaaaactagaaataaaccgggaaggaaaaaaatattttattgaatttaaaaatggtaaagctaaagcttctttaaaaacaattggtaaatcaaaagacactggaactaaaataacttttttaccctctaaagaaattttttcatcaattaaatttagcggcaatattcttataaagaggcttagagagcttgcatttttaaataaaggtataaaaataaaatttgtagatgctagccaaaaaaaagaaaaaatagaggaatttcaatataatggtggaatactagaatttgtagaatttttagatgaaaagagagaaaagctacaaaataaaaatggaaatgaattattcaagaaaccgatttatattgatggaaaaaaggagaacattgagattgaatgttcattaaaatggaatgctacatattcagaggatatttatccatttacaaataatatccatcaaaaggatggaggaacacatttattgggtttcagaagtgctttaacaagggttgtaaataaatatgcgaatgaacacaacttgttaaaaaaaaataaattaactatttcaggtgatgatatcaaagaagg

SEQ ID NO: 294603 - DNA, 694 bp, Unknown
  Bacterial polypeptide expressing nucleotide sequence isolated from the Sargasso Sea
acttgcagattgtagtagctcttcaacagaaaatactgaacttttcttagttgaaggcgactctgctggtggttcggcaaaacaagctagagatagaataacccaagctgttttaccattaaaaggtaaaattttaaatatagccagtgctggtatatctaaatcttatgaaaatcaggaggtattaaatatattacaagcacttggttgtggagttaaagataagtatcgtgaagataaattaagatatgaaaaaataattattatgactgatgctgatgttgatggagatcatatatctgctttattaatgacgtgcttctttagtttgatgcctaaattaattgaaaataaccatctatttattgcatgccctccattatacagaatagttatgggtgataaaatattttatgcaatggatgaaaatcaaaaaaataaaattattagtaaatttaaatcaaatagaaagtatgaaataaatagatttaaaggtttaggtgaaatgatgccaaaacaactaaaagatacaactatggacccttcaacaagaaaattaaaaaaaattattattccaaataaaaaatatatacaaaccgaaaacttcgtagaacaaattatgggaaaaaaacctgagaaaagacttgaatttattaaaaagaactcagaaaatgttaataaccttaatttataa

SEQ ID NO: 294604 - DNA, 633 bp, Unknown
  Bacterial polypeptide expressing nucleotide sequence isolated from the Sargasso Sea
tctgtctcgcctcttagaagacgaaatgagagagtcgttcattgattattcgatgagcgtgatcgtgcagcgagcccttcccgatgtgcgtgatgggctgaagcccgtgcaccgccggattttgtatgcgatgagccaggcgggcatgaatccaggtcgagcctacaagaagagcgctaccgtggtgggtgaggtgttagggaaataccacccacatggcgattctgctgtctacgactcgatggtgcgcatggtgcaggatttctcccttcgctatccgcttgtcgacggacagggcaacttcggttctgttgatggcgattccgccgcggcataccgatacaccgaagcacgtctcaaacagctagcgaccgaactgcttgcggatattgagaaggagacagtcgactacgccgataacttcgacgggagtcaccaggagcctacggtccttccagctcgggtcccgaaccttctcatcaatggttcgtcaggaattgcagtggggatggctactaacatccctccccataacctgcgtgaaatcgtcgcggctacgacagcgttgattgatgatcctgatcttggccaagaagagctagagagtatagtcactggaccagatttcccaac

SEQ ID NO: 294605 - DNA, 514 bp, Unknown
  Bacterial polypeptide expressing nucleotide sequence isolated from the Sargasso Sea
atggtaaataaattacaaaattcaagttataaagcagattcaatcaaagtacttaaaggattggaagcggtaagaaagcgtccaggcatgtacattggtgatacagatgatggaactggtttacatcatatgatttatgaagttgtagataattcaatagatgaagcactagcgggatattgtaaaaatatcaaaatagagttgaataaagatggaacggccaccataacagatgatggtagaggaattcctgtagatttacacaaaggtgaaaagaagtcggctgccgaagttatcatgactcagttacactctgggggtaaatttgatcatgattcttacaaagtatctggaggattgcatggtgttggagtttcagtagttaatgctttatcggaaaaattaaagttaacaattaacagggataataaaacttattatatggagtttcaggaagataaagccatttcttctttaaaatctatggaaaaagtaaagagtcaggaactaaaat

SEQ ID NO: 294606 - DNA, 803 bp, Unknown
  Bacterial polypeptide expressing nucleotide sequence isolated from the Sargasso Sea
tatgacacaattgcatgcaggaggaaaatttgatcatgactcatataaggtttcaggaggtttgcatggagttggtgtttcagttgttaatgctctttctgaaaaattggagcttacaatcgaaagagatggaaaaaaacattttgctgaatttaaaaatggtgatgtaactaaatctttaaaagttattggaaaatcaaatcttacaggaacacaaattaattttttaccttcaaaagatatattttctgacacaaactttagttttagtataattcaaaaaagaatgagagaattagctttcttaaacaagggtactaaaattagaattaatgatctatcacaaaaaaaaagtaaaaatgtagaatttaattttgaaggtggaatattagagtttgttcaatttttagatgaaaaaagagaaaaattaaaaaatagaaatgataatgatttgtttagaaagccaatatttattgaaggaaaaaaaaataatttagatatggaatgttctttaaagtggaacgcgggatataatgaagacatttattcttatacaaataatatttttcaaaaggatggaggtacccatcttttaggttttagaagtgcgcttactcgcgtcataaataaatatgcaaacgaacaaaatttattaaaaaaaaataagctatcaatttcaggtgatgatattaaagaaggtttaacctgtgtattatcaataaaaatccctgatccaaaattttcctctcagacaaaagataagctagtttcctctgaagtaagaaatatagttgagacaatta

SEQ ID NO: 294607 - DNA, 556 bp, Unknown
  Bacterial polypeptide expressing nucleotide sequence isolated from the Sargasso Sea
aatgacaaaaaatataaatacttatcaagcagattctattaaagttttaaaaggtcttgaagctgtaagaaaaagaccgggtatgtatattggtgatacagatgatggaaccggcctccatcacatggtgtatgaagttgtagataattctattgatgaggctcttgctggacattgtaaaaaaattgaagttagtattaattctgatggatcaattacggttcaagatgatggtagaggaatacctgtggatttccacaaagaggaaaaaaaatcagctgcagaagtaataatgacccaacttcatgctggtggtaaatttgatcatgattcctacaaagtttcaggaggtttgcatggtgtaggagtttcagtagttaatgcactttcacaaaagttagaattatttgttgaaagagatggaaaaaaatattttgttgagtttataaatggggaaactaaaacacctctaaaagtagcgggtaaatcaaatactacaggtacaagaattaattttttaccttctaaagatattttttctacaactaagttttag

SEQ ID NO: 294608 - DNA, 959 bp, Unknown
  Bacterial polypeptide expressing nucleotide sequence isolated from the Sargasso Sea
actgcctgctcaaaaagcaaaagcacttttgcgtgaaagaaaaggtgcactctcaggtggtggtcttccaggaaaacttcgtgactgcacaagcaaagatgttgataaatgtgaactctatctcgtcgagggtgattcagccggcggctcggccgaaggtggccgtctacgtgaatatcaagccattctccctcttcgtggaaaaattattaatgcgtacaaaagtcgtgaggacaaggttcttgcgaacgaagaagtgcgaagtgttatttcagcaattggagcaggcattgggcctgaggcggatctaacaaaacgccgatacgacaaagtcgtcattatgacggatgctgatgttgatggttcccacattcgcacgctcttgctcacctttttctacaggcagatgtatcaactggttgtatctggccatgtctatgttgcgcaaccaccactgtttcgcgtacggaacaagaagcatgtgtactatgtgcaaacagaagaggaaatgaaacaacaactgcttgaccaaggccttggagaaggtgtttttctacctggtgatgggcgggaattggctggggaagagatgcagaggctctgtcggacgctggcaggattagaggatgccttggtagcccttgagcgtcgaggaattagtttgcgcgaccacgcagctcgtcgagattcggagacaaaaaagctgccaatgtatcacgtattttttggtgctgaagagcactggttcacgagtcgggaccagcttgagtcatttgttgagtcaaaagagaaaatcacaggaggtgaattagaggctggcaaagctgatgaaaataagccaggaggaggtggtgcagccgatccggaatctgctgaacatcaacttatcgttatagatcttcatgaggtccgcagcatcaatgcggggctcacggagcttgattctatgggatttggaa

SEQ ID NO: 294609 - DNA, 883 bp, Unknown
  Bacterial polypeptide expressing nucleotide sequence isolated from the Sargasso Sea
gaaattatttatgttgactcgcaaaaagataatgtatatttagaggcagcattgcaatggtgttctgatgtttactcagataatattttgggatttgcaaacaatatcagaacaatagatggaggtacacacatagaaggtttaaagacagtacttactagaacttttaatgctattgctaaaaaaaggggaaaaagaaaggaggctgataaaaatttgtcaggagaaaatatcagagaaggtttgacagttgtgttatctgtaaaagttccagaaccagaatttgaaggacaaacaaagacaaaattaggaaatacagaagtaagaggtattgttgattcgcttataggagaagcactaacaaaatatatggaatttaatcctaatgtatttgatttaattctagaaaaagcaattcaatcttttaatgcagcagaagcagctaagcgtgcaagggatttagtcaggagaaaaagcgttcttgaaagttctactttgcctggaaaattggcagactgtagttctagagatccttccggttcagagatttatatagtggagggtgattctgcgggaggttcagccaaacaaggaagagatagaaagtttcaggcaattttgcctttaagaggaaaaatattaaatattgaaaaaactgatgatacgaaaatatataaaaatacagaaatccaatctcttataactgcattggggctgggtataaagggtgaagaatttgatgtaaattctctcagatatcatcgggttgtcattatgactgatgcagatgtagatggtgctcatattagaacattactattaacgtttttttatagatatcaaagagagcttgttgaaagaggttttatatacattgcatgtc

SEQ ID NO: 294610 - DNA, 848 bp, Unknown
  Bacterial polypeptide expressing nucleotide sequence isolated from the Sargasso Sea
aagaatattgtattctatgagtgagtcaggttacaattttaatttaccatataaaaaatctgcaagaatagttggtgatgttatgggtaaatatcatcctcacggagactcagcaatctataactctatggtaagaatggcacaagatttctctatgcgcttagaattaatcgacggtcaagggaattttggatctttagatggcgatcctcctgctgcaatgagatacacagaagctcgtcttgccaaagtatctgagaggttagttgaagatattgataaaaatacaattacctttcaacctaattatgatgatacaacaaaagaaccttcagttctgccatcacaatttccaaatcttttagttaatggcgcatcaggaatagcagttggaatggcaaccaatattgctccacacaatttaggagaagtaatagatgcatcgttatttcttattaaaaatccagattgcaatataaatgatcttcaaaaatatatttttggccctgattttcctactggtggtcaaataattggaaaaaaaggcataaccgaagcatttgaaacaggaaaaggtagttgtgttgtaagatcaaagactagcattgaaaattttaaaaaagatcgagaagcaataattcttcatgagattccttatcaggtgaataaatctaaattactagaaagaattgctgaaattgtaaaaaatggaattgtagaaggtatatcagatttaagagatgagtcagacagaaatggcgttagagtagttattgaattaaaaaaagatgtagattcaaatattattctcaatcaattgtataaacatacactaatccaaacaacat

SEQ ID NO: 294611 - DNA, 763 bp, Unknown
  Bacterial polypeptide expressing nucleotide sequence isolated from the Sargasso Sea
tgcaaaaaagcaagagaactaacaaaaaggaaaagcattttagagacctctgggttgcccggaaaacttgcagactgttcatcaacagatccaaccgaaagtgaactctttattgttgagggagattcagctgccggcccagcaaaacaagctagagactctagggttcaggccatacttccaattagaggaaaaattattaatgtccaaaaagttactgagaacagagcgcttcaaaacgaagaaattagtactctaataaaagcaattggtactggaataaagacacaatttaatgaagaagagtcaagatatgacaagattatatttttaacagacgccgatgtcgacggagcccacattagaacacttttactaacctttttctttaaatttatgccaggcctcattacaagtggaaaggtgtggatttcagaaccaccactttataggttaaaagcagcttctggaattacctacttaaaagacgatgaagcactaaatgcatttaaaaaagaaaacaagaacaaaaaatttgacatcagcagattcaaaggcctgggtgaaatgaatgctggagagttgtgggatacagcaatgaacccagaaacaagaacgcttattaaagtaactcttgctgacgcaaagggtgccatggcaaaagcttcagacatgtttgaggttcttatgggaaatgatgtttcaaagagaaaactatttatagaaaagaatgcaaaagatgtaaggttcttggacgtataat

SEQ ID NO: 294612 - DNA, 854 bp, Unknown
  Bacterial polypeptide expressing nucleotide sequence isolated from the Sargasso Sea
taattcacaggcagattcacaggtctatggtgccgactccataaaggttttaaagggccttgaagcggtaagaaagcgtcccggaatgtatatcggtgatacagatgatgggtcaggtcttcatcatatggtatacgaagtcgtcgataatggaatcgatgaggctttagctgggcattgtgacaaggttacggtaaccttacataatgataattccgtctctgtctcagataatggcagaggaattccaactgaaaaacatcaagaagaaggtatttcggcagcagaagtaattatgacacagcttcacgctggaggtaaatttgaccaaaactcatataaagtgtcaggcggtcttcacggtgttggtgtttcagtagttaatgctctttcttcaaagcttgagctgagaatatggagagataacaaagaacactatgttgaatttaagaatggtgaaactactagccctttagcagaaatgggttctgcagacggcaaaaaaggtacggaagtaagattctgggcatcagaagaaacattttcaaacataaagtatgaatttgaaactcttgagcaaagattgcgtgagctagcatttttaaactctggcgttgcaattgatctgatagatttgagggaaggtgtggaaaaaacggtcagcctttcatatcaaggaggcgtcagagaatttgtaaaatatttagatagatctaaagcacccttaatttcggagccaatatttatatctggaacaaaagagggaatttctttggaaatagctctttggtggaacaatgcttacaatgaagtggttttgccttttacaaataatatacctcaaagtgatggag

SEQ ID NO: 294613 - DNA, 686 bp, Unknown
  Bacterial polypeptide expressing nucleotide sequence isolated from the Sargasso Sea
aatgccaaagcaaaacaattacgattcatctaacatcaaggtcttaaaaggcctggaagcagtacaaaaaagacccggtatgtacataggtgatacggatgatggcagcggcttgcatcaaatggtctacgaagtcatggataactccatcgatgaagcacttgccggtcattgctccaacattacagtcacagttcatgaagataatgctgttacagtcgaggataacggcaggggaatacctgttgacgaacacccaactgaaaagaaatcagctgcggaggttattatgactgttttacatgccggtggtaaatttgatgataactcatacaaggtatctggtggattgcatggtgttggtgtctcggtagtaaatgcattatcagaaacgctagagcttaccatctataaaaatggcaaagaatactatcaagaatacaaggacagcaagccattatcagagatcaacgaattaggaaatacgaaattgagtggaaccaaaataacatttagacctagtaagaagtatttctcactcacaagttttaattcagatattttgaagaagagatttaaagagctagcttttttgaactctggcattgaaattaattttgtacatgaaaataagtcaatatcacaaacatttaagtacgagggtggcattattgaatatgttaaag

SEQ ID NO: 294614 - DNA, 810 bp, Unknown
  Bacterial polypeptide expressing nucleotide sequence isolated from the Sargasso Sea
gctttagtaagaatggtgcaagatttttctatgagtctaccattaattgatggccaaggtaattttggatcaattgatggagatccaccggccgctatgagatatacagaaacaaaattagctaaagtttctcaattcttgttagatgatatagataaaaacactgtttcatttaagagtaattatgatgaaactgaagatgaaccagttgtacttccagcgcaatacccaaatttacttgtaaatggtgctggtggaattgcagttggtatggctaccagtattcctccacataatttaggagaaattatagatggcacattggctttaattaaaaataaagacataaaaattaatgagctaatgaaacatatacctggacctgattttccgactggcggattaataataggtaaggacataattaaacaaggttataaaacaggaagaggctcatttaaaattcgtggtgagattaaagttgaaaatttaaaaaatggcaaagatagattggtaataagctcaataccttatcaaattaataaatctaatttaaacgagagaattgcagaattagtaagagaaaaaaaaatagaaggcattagtgatataagagatgagtctaatagtgaaggtattagagtatcaattgatttaaggagaaatatagaaccagagactgtgaaaagacaattatataaatatacttctatagaaagttcttttggatttaattctttagctattgtagataacaagcctaaaacttgtagcttaaaagattttttggaaaattttttaaaatttaga

SEQ ID NO: 294615 - DNA, 943 bp, Unknown
  Bacterial polypeptide expressing nucleotide sequence isolated from the Sargasso Sea
tacgaaaaaaggcgtagctctagagctagcaatgcagtggaacgaaacataccaagaaagcatttattgttttaccaacaacataccccaaaaagacgggggcacacatctttccggctttcgaggcgctctaacgagaagcttgaaccagtacatggaaaaacaaaataccacagcgaaaaacaaaataaatatcaccggtgaagacgcaagagaagggctaaccgccgtattgtctctcaaggtcgcggatccaaaattttcatctcaaaccaaagataaactggtttccagcgaagtaaagcctgttgtcgaatcttctgttatggagaaactacaagagtttttgttggaaaagccagcagaagccaaattaatttgcagtaaaattgttgaagcggccagcgcgagagaagcggctcgaaaagcccgcgaactcactcgcaggaaaactgcgctagatattgctgggcttcccggaaaactggcagattgccaagaaaaagacccttcaatatcagagctttttttggttgagggagattctgctggggggtcggctaaacaagggcgagatcgccgcacacaagcaattcttccattgaagggcaaaattttgaatgttgaaaaggcgcgagtagacaaaatactttcttctgcagaaataggcactttaattaaagccctgggttgtggttttggcaaggacgaattcaatattgaaaaactaagatatcatcgcattattatcatgactgatgcagacgtcgacggcgcacatattcgtacgctgctgctcacttttttctatcgcaaaatgcccgaactagttacgcgcggacatatttttatagcagagccgcccttataccaagttaagaagggaaaacaagagcgatacctgagggatgactcagcaaaagaggcttacgtgcaacagctc

SEQ ID NO: 294616 - DNA, 922 bp, Unknown
  Bacterial polypeptide expressing nucleotide sequence isolated from the Sargasso Sea
ggtttaaccgcgattatcagtgttaaggttgcagagccacaatttgaggggcaaacaaaaacgaagcttggaaatggtgatgtaaaaggaattgttgataaagcggtttacgagggtattttagattttttagaacaaaacccctctatcggcagaaggataattgaaaaggcgctgttagccgcgcgaagtaggtctgctgcaagaaaagcgcgcgaattaattcgaagaaaaagcgcattaggtggatcttctttacctggaaagctatccgattgctcgaatcgcgaccctgttttttgtgaactatacctcgttgagggtgattcagctgggggttccgcaaagcaaggaagggaccgcagaacacaagctattctacctttaaggggaaaggttattaattcagaaaaagcgcgcgttgataaactattatcaaacaatgaagttcagtctatgataaccgccttgggtgctggttttggtggatctgacgatgagtctggtgaaaaatcaccaggtgactttgatctcgaaaaacttcgttatcataaaataattataatgacagacgcagatgttgatggttcacatattcgcacccttcttttaacgtttttttataggaaaatgaaagaggtgattgatggtgggtatttatacctagcccttcccccattatatcgcgtgtcacaaggcaaaaaagaatcatatgcttatgatgacaatgagagagatttgttaattgagaggatgaaaaaagacaataaaaacacaaaggttggtatacaaagatataagggtcttggtgagatgaacccaggtcaactttgggaaaccaccatggatccagaaaaaagaaccctaatgaaggttactgttgagagcgcagctgaggccgcagaaacattcaaaaccttat

SEQ ID NO: 294617 - DNA, 547 bp, Unknown
  Bacterial polypeptide expressing nucleotide sequence isolated from the Sargasso Sea
caaagattttaatatagaaaacttaagatatgaaaaaatcgtcataatgaccgatgctgatgttgatggatctcatataagaacattattgttaactttctttaacaactatccattcaatgagttaattgaaaaaaatcatctttatctagctcagccacctttatataaaataacaaaaaataataaaaattattatatcaaaaatgaacaggagttagaaaattttcttattaatatttctgataaatcaaaaaaaggaattaaaaaaaatcagagtgaatttaaaaaatttttagaaaatgaaaaaagtaaagttaatattcaaagatttaaaggtttgggagaaatgaatcctggcgagttatgggaaacaacactaaacccattaaagagaactttattacaagtaaaatattcgaacagcacaaaactaaagtctaaaaaagatcaagaactaatccaaattttaatgggtgatgaagtttcgcctagaaaagattttataatcaatagagctttagaagtttcgaatttagatatataa

SEQ ID NO: 294618 - DNA, 872 bp, Unknown
  Bacterial polypeptide expressing nucleotide sequence isolated from the Sargasso Sea
atgagctttagcaatggtgacaggatatcagagcttgagatcgttgatagtgttggaaaagccaacactggaacagccatacgcttctggccaaatgagtcgtattttgattcagccgatataagacttgatgaaataaaacataaccttcgtgcaaaagcagttctatgtccaggattaaaaatcaaatttaaagacgaagcgactggcgaaaaatgtgaatgggagtatcaagaaggagccagtgaatatctggtcgaaatgcttgaaaatattgaatgcattccatcaattccgttttctggtaaagcaaattcagatgaacaagagcttgagtggagcatgacatggcctgatagagatcatgaaggtattcaagaatcctatgtcaacctgatacccaccaaacatggggggactcatgtgtcaggctttagatcaggattatcagagtcagttaaagagtttgctgattaccggaatcttctaccgagaggtgtaaaactttcacctgaagatgtttggatgggtctgagctacattatttcagtcagaattgaggatccacaattctcaggacaaacgaaagagaaactcagttcgagagctgtttcaggttttgttacaggcctcattaaagatgctttcacgctatggttgaatcaacatcctgaagcgggagaccaaattgtcgcaagggcaattgagaatgctcaaaaaagagcaaaaaagaatgtaaaggtaaaacgaaagaaggccacaggtggaccaacattgcctggcaaactcgcagactgtacgagcgacgagcctgatctttgtgaattatttattgttgaaggtgattctgctggtggatctgcaaagcaagc

SEQ ID NO: 294619 - DNA, 832 bp, Unknown
  Bacterial polypeptide expressing nucleotide sequence isolated from the Sargasso Sea
gatggtttaaaacctgttcacagaagaataatattttctatgtatcaattaaaactttttaataactctagttataagaaatcagcaagaatcgttggtgatgtaatgggaaaatttcaccctcatggtgatcaggcaatatatgacagtttagttagaatggctcaggatttttctactagaattaaattaattgatggacaaggaaattttggaaacattgacggtgataacccagctgctatgcgttataccgaggcaaaattacaaaaatatactaattatttttttgatggtttagaagaaaattctgtagattataaggaaaattatgatggtcaaaacttagaaccagtagttcttccatcacaacttccaaatatattaataaatggcgcaatgggtattgctgttggtatggcaacaaatataccacctcataatgtaaaagaactaatagattgtttaaagatcttaatagaaaatcccaaaactaatcattctaagttattaaaatttcttaatggcccagattttcctactggtggtcaaattattttagatcaggaaaacaaaaaagatatttacactaagggtaagggatcttttattattaattccaattggattaaagaagaattaaaaaatggcttgtatcaaattataattaatgaaattccatatcaagttaataaaataaaaataattgagcaattagcaaatttaattaatacaaaaaagattccattagatgatgtaattgatgagtctgatgaaaatataagaatagtattaagaccaaaatctaggaatatcgactctcaaaattaat

SEQ ID NO: 294620 - DNA, 679 bp, Unknown
  Bacterial polypeptide expressing nucleotide sequence isolated from the Sargasso Sea
aatggcaaataaaaacacatatcaagcagattctatcaaagtacttaaaggcttagaggcagtaagaaaaagaccaggtatgtatattggtgataccgatgacggaactggtttacatcacatggtatatgaagtcgttgataactcaattgatgaagctctagcagggtattgtaaaaatattaatgtaagattaaattctgatggaaccgtaactgttaatgatgatggtcgtgggattcccacagatatacataaaggagaaaaaaaatctgcggcagaggtaattatgacccaactacatgctggtggaaagtttgaccatgactcttataaagtttcaggaggactacatggtgtaggagtttctgttgttaatgctctttcagaaaaactctttttagaaataaatagagatggaaaaagatattttattgaatttcgtaatggagaagcaaaagcacctttaaaaatttcaggcaaatcaaaacaaacaggtactcaaataacttttttaccttcgaaagaagttttctcatcaacaaaatttagtgcaaatatcctgattaagagaatgagagaattagcttttttgaacaaaggtattaaaataacctttattgatgacagtcaaaaaaaagaaaaagtcctagaatttaaatatgatggaggtctaact

SEQ ID NO: 294621 - DNA, 816 bp, Unknown
  Bacterial polypeptide expressing nucleotide sequence isolated from the Sargasso Sea
gatgttcttccagcccaacttccatttttgttgttgaacggttcatcaggtattgctgttgggatggcaacaaatataccccctcacaacctaggggaaattgtagatagtttagttgctttagtaaaaaataaagatataagcgataaaaaactttccaacattattaaaggaccagattttcctacaggtggagagttaatttatagtccagcaatagatgaactttatgaaacaggcaaaggatctttaacaataagaggagttataaatttggaagaagtaaatttaggcaaaggtaaacataaaaagaatgctctaatcattacggaacttccataccaaattaataaagcaggttggattgaaaaacttgctgaacttgttaatgcagggaaaattgatgggatctccgatattagggatgagagcgatagagatggaatgagaattgtaatagagttaaaaaaagattccaattctgaacttgttatttctaatttatataaaaaaacaactctccaaacaaactttggcgcaatattcttagctttaattaaaggcaagcctgtacaattaaacctaaaaaaatatctcaactattttcttgaatttagagaagaaacaattagaaaaagaacttattactttctaaaaaacactcttgaaaagcttgaaatttcagaaggtttatctaaagccacaaagaacataaaaaagattatagaaattattgaggaatcggaaaattctgtagaagctaaatcaaaattaattgaaaatttttttctaagtgaaaaacaagcaaattcagtt

SEQ ID NO: 294622 - DNA, 797 bp, Unknown
  Bacterial polypeptide expressing nucleotide sequence isolated from the Sargasso Sea
tctgcatcaaatgatttacgaagtgcttgataattccattgatgaagctttagctggattttgtgataacgtcgaagttgttttaaatgtagatggtacagttacagttagtgataatggtcgaggaattcctgtagatttacataaaacagaaaaaatatctgcggcacaattaataatgactgaactacatgcaggaggtaagtttgatcaaaatagttataaagtatcagggggtttacatggagtaggtgtttctgttgtaaatgccttatcagaatttctaattctagaaattaatagagatggaaaaatttataatttagaatttagcaatggtattgttacaaaacaattaaatgtagttggagattcaataaaaaaagaaaaaaaattctttactggaactaaaataacttttttaccaactaaagatatttttaataatattgaatttaattttaaaacaatcgaaaaaagattgagagaactggcttttcttaatacaggagttagtattgatttaatagataaaagacaatctaatgaaataaaaataaattttaaatatgatggaggaatccaagaatatgtaaaatatattaatgatggtaaaaatgtaataaatattaaacctatttcttttaatggagaaaaaaataatatcacaatagaatgtgcattacagtggacagagagttatcatgaaaatacgatatgttttactaataacataattcaaagagatgggggaactcatcttgccggctttagaggagctttaacaagatcaattg

SEQ ID NO: 294623 - DNA, 763 bp, Unknown
  Bacterial polypeptide expressing nucleotide sequence isolated from the Sargasso Sea
atgataaaaaaaaatcaaaaagaaaaccaaagctatagcgctgaatctataaaagttcttaaaggtttagaggcagttcgaaaaagaccaggaatgtatattggtgatattgatgatggaacaggattgcatcatatggtttatgaagtggttgataattctattgatgaagctttagcgggttattgcaaaaatattaaagttactatcaactcagatcaatcagtttcagtagaagatgatggaagaggaataccggttgatttacacaaaggtgagaaaaaatatgcggcagaagtaatcatgacccagcttcatgctggaggtaaatttgatcatgattcatataaagtttcaggaggtttgcatggagttggggtatctgtagttaatgcattatcagaaagattaactcttaaaatatttagagataaaaaggaatatttcgttgaatttaaagatggacaagcaaaattccctctaaaagtaaaaggaaaaacaaataagacgggaacgtttataaattttttaccatcaagagaagtcttttgtgacacaaaatttagttccacaactttacaaaaaagaatgagagagctggcttttttaaacaaaggtttaagtattattttattagacaaaacaggaaaaaaagaaaaagagtataaaaataaatatgaaggagggattcaagaatttgtagaatttttagataaaaataagacaattttagttaataaaaatgaccaaagtttatttaaaa

SEQ ID NO: 294624 - DNA, 489 bp, Unknown
  Bacterial polypeptide expressing nucleotide sequence isolated from the Sargasso Sea
aatgaaaatcaaaaacattaacttcactgacgcgttagaagaaaagtatctagcatacgcactttcaacaattactcatcgagcgctaccagatattcgtgatgggctaaagccggttcatagaagactattgtttgcaatgtttcaattaaggttaaactcaagttccggttttaagaaatcagcaagaatagtcggcgatgtaattggtaaatttcatccacacggagatcaatctgtttatgaagcactggtgagattagctcagaatttttcaacaaggtatccgttagttgatggtcaaggaaattttggcaacattgatggagataatgcagctgcaatgagatatacagaggcaagattgactgcgttagcagagctaatgctcaaagatatatcagaggatacaattgattatattaatacatatgatggcatcgatcacgagccagtcgttcttccatcagcgtttccaaatttgctagc

SEQ ID NO: 294625 - DNA, 625 bp, Unknown
  Bacterial polypeptide expressing nucleotide sequence isolated from the Sargasso Sea
atggccaaaaaatcacaagaagccaaatatgactcaagcaacatccaagttttaaaaggtttagaagcggtaaaaaaaagaccgggaatgtacattggtgacactgatgacgggtccggattacatcatatggtttttgaagttttggataactgcatcgacgaggcaatggcaggatattgttctgacattaaagtaataattaataagaacggatcagtaacaattgaagataatggtagagggataccagtagatgttcataaaaaagagggtgtatctgcagctcaattgataatgacaactttacactcaggcggtaaatttgacgataactcttataaagtttcaggtggattgcatggtgttggcgtttcagttgttaatgctctttcaaaaaaactaaccctagaggttcatagagacggtggagaatattttcaagagtactcagatggaaagcctaaagcaaaattaaaaaaagtaaaaaaatcagacaagactggaacaaaaataaccttctttccttctgagaaaatattcacatcgattgattttgaggttgatagaatttacaaaagaattcgagaactgtcatttttgaatgcccggagtttcaattaat

SEQ ID NO: 294626 - DNA, 891 bp, Unknown
  Bacterial polypeptide expressing nucleotide sequence isolated from the Sargasso Sea
tcagcagcaatggctagagatgttgcaagaaaagcaagagaaaatgttagaagaaaaggagcattagaattaagtggtcttcctggaaaattagctgattgccaaattggtaaacaagagggaacagagttatttattgttgaaggtgattcggcgggtggttctgccaaacaaggaagaaatagagcaaaccaagcagttttaccacttagaggtaaaatacttaatacttatgttgaagatttaaattttaagaaaaatggaaatggtaaagaaaatggttctgatcaaagaacaaaggccttgtctaaaatgatatcctcaaatgagatagttactttaattaatgcgctcggattagatccaaaggcacaagaaatcgatttaaaagatttgagatatggaaaaataattattatgacagacgcagatgtggatggatcacatattagagctttacttttgacgttttttaataacaaaccatttaataaattaattgaaaatggtcatgtctatttagcacaaccgcccttatttaaaattaataaaggttctaagggaatttatattaaagatgaaaaggaattagaagattatataataaataataataaagaattaaagaaaataaaaaaaggttcaaaagattaccctaaagcacttgatttagaaagatcgaaaatgaatattcaaaggttcaaaggtcttggggaaatgaatccagaagagttatggagtacaacattagacccagaaacaagaaacttgcttcaagttcagtattcaaaagatttaaaaaaagatcaaaatttaattcatactcttatgggtaatgatgtgtcattaagaaaagattttatagtttctaatgctataaatgttcagaat

SEQ ID NO: 294627 - DNA, 916 bp, Unknown
  Bacterial polypeptide expressing nucleotide sequence isolated from the Sargasso Sea
ggcgatgatatcaaggagggtttatgtgccgttttatctattaagatgcctgatcctaaattttcttcacaaacaaaagataagttggtttcatcagaagtaagaaatattgttgaaaattttatgaatgagaaattatctatttggtttgatcaaaacccaagcataataaagattgttttgctaaagataattcaagcagcacaagcaagagatgtagctagaaaagcgcgagaaagtgttagaaggaaaggagccttagagctcactggactccctggaaaacttgctgactgtcaaaattccaaaagagagggaactgagttatttatagtggagggagactctgccggtggttctgctaaacaaggtagaaacagagaatttcaagcagtattaccattgcgggggaaaatattaaacacatatgtagaggatagtaattctaaaagaaatggaagctctaatgaaaccaaaacaaaggcgttatctaaaatgatttcatctaacgaaatcgtcacattaataaatgccctaggtctagatccaaaagctgaagaaatagatttagatgaccttagatatggtaaaataattattatgactgatgcagatgtcgatggatctcatataagagcactattattaactttctttaataataaaccttttaataaacttatagaaaatggaaatatttttttagcacaacctccattatttaaaataaataaatcgggaaaaagtatttacataaaagatgaaaaaagcttagaaaattttatttcgagtagttctaaaagtttgaaaaaactaaaaaaaggaaataaggaatttgaaaaaatattactagaggaaaaatcaaaattaaatattcaaagattcaagggtcttggtgaaatgaatcccagatgaa

SEQ ID NO: 294628 - DNA, 828 bp, Unknown
  Bacterial polypeptide expressing nucleotide sequence isolated from the Sargasso Sea
ggaacgcatgaaaatggttttaaaacaggcattttcaaagcatttaaagaattttcaaaattaaaatacgagaaaaaatcatctcaaataaatcaggaagacctgtttggatcttcagcttctattttatcagtttttcttgagaacccagaatttcaagggcaaacaaaggaaaaactatcgagtattgaaccgggaagaaagatagagaacaaagttaaaatattatttgagcaatggctgacttcaaaaactaaatctgctgaggaattatttttatatgctttcaacagatctcaaatgcgacttcaaaacagatcaaatcaaataattgataaaaatataaaaagaaaaaaaacaacattaccggggaaactggcagattgttcaatagatggaaataaaggcacagaaatatttttggtagaaggagactcagctggaggatcagcgaaacaagcaagagatcgtaaaactcaagcgattttacctttgagaggaaaaatattgaatgtagtgagtgcagggagagaaaaaattaacgccaatcaagaaattattgacttagtgcaagccattggttgcaagagaggtgaaaaatttaattcaaaagatatcaggtatgagaaaataattatcatgacagatgctgatgttgatggagcacatatatcaacactgctaatggcattcttttataaggaatttccaaaacttatagatgaaggacatttatatttatcagtacctcctctttatagaattacgaagggatcaaaaattttatatgcagtaaatgataaacacaaagacgagataattaaaaaa

SEQ ID NO: 294629 - DNA, 946 bp, Unknown
  Bacterial polypeptide expressing nucleotide sequence isolated from the Sargasso Sea
tggagtctaagatatatgttagtagatggtcaaggaaattttggttcaattgacggtgatagtccagcggcaatgagatatactgaagcaagactaaaaaaaatatcggaagaaatggtcgaggaccttgataaagatactgttgactttcaattaaactatgatgattcaattaaagagccaactgtattaccgactaaaattcctagccttttagtaaatggagcatctggaatagctgttggtatggccacaaatatgcctcctcataacttatcagaagttatagatggaactgttgcatatatccaaaataatgatattaaagttgatgaactgattaatcatgttaaagctcctgattttccaacaggtggtgtaatatatggatatgatggagtgaagcaagcattcgaaacaggaagaggaagagtagtaatgagaggaaaagcatcatttgaagaagttaatggtcgtgaatgtatagttgtaactgaaattccttatcaggtaaataaagctgacatgattcaaagaactgctgaattggttaatgataaaaaaattgaaggcatttcaaatattagagatgaatctgatagaaaaggtatgaggatagtttatattcttaaaagagatgcaattccaaacattgtattgaatactttgtataagtacacagcacttcagtcatcttttagtgtgaataatatagcattagtaaatggtagacccaaattgctgaaccttaaagaaatgataagttattttgttgagcacagacatgatgttgttgtaagaagaacaaagtttgatttaaagaaagctgaggaaagagcacatattttagaaggtttaattattgcgtcagataatattgataaggtcatagaaataataaaaaaatcttccaatgctgatgatgcaagaaaaaatttaataaaag

SEQ ID NO: 294630 - DNA, 814 bp, Unknown
  Bacterial polypeptide expressing nucleotide sequence isolated from the Sargasso Sea
tatgagcaagcttttcaaaaaaaatattgatgatattttaagtcaaaagtatctttcttatgctatttcaacaattgtctctaggtctttaccagatgtaagagatggtttgaaaccagtccacagaagaataatttattcaatgtatcaattaaaactttttgatagttcaagttataaaaaatctgcaagaattgttggcgatgtcatgggtaaatttcatcctcatggtgatcaagctatatatgatagtttagtgagaatggcgcaagatttctccacaagaataaaactaatcgatggccaaggtaattttggaaatatcgatggagataatcccgctgctatgagatacactgaggctagattagaacattatacaaattatttttttgatggattggaagaaaatgctgtagattttaaagaaaattatgatggtcaaaacttagaaccagaagttttaccatctaaattacccaacattctaattaatggctcaatgggaatagcagtcggtatggctacaaatatacctcctcataatatcagtgaacttatagattgtttgattttattaattaaaaatcctaaaactaattttacgcaaattaataaattacttaatgggccagattttccaacaggtggagaagtaattttaaccaataatgagaaaaaagaaatctattctaaagggaaaggttcattcatttataattctaaatggaaaaaagaagatctaaaaaatggaatgtacaaaattattatttatgaaataccttatcagggtaataaaataaaaataatttga

SEQ ID NO: 294631 - DNA, 937 bp, Unknown
  Bacterial polypeptide expressing nucleotide sequence isolated from the Sargasso Sea
ggtcttcatcatatgatttacgaggtggtagataactcaatagatgaaactttagctggatattgtaaaaatataatagtcagcattaattcagatggatcagtcactgttaaagatgatggaagaggtattccagttgatatgcataaaggagaaaaaaaatctgcagcagaagtaattatgactcaattgcatgctggaggtaaatttgatcatgactcttataaagtatcaggtggtttacatggagtaggcgtatcggtagtaaatgcactttcaaaaactttaaaattaaatattagtagaggtggtaaaaactattttattgaatttgaaaatggtaaagccaaagcacccctcaaacaacttggaaaagcaaaagttaatagcggaacagaaataaactttattccttcagaggatgtattttcttctattaaatttagtttttcaatattagaaaaaagacttagagaattagcatttcttaacaaaggagttcaaataattcttcaagatttttcacaaaaaaaaacaaagatattagaatttaaatatgatggtggaatattagaatttgtagaattcttagataaaaaacgagattttttaaaaaataaaaatggaaatgaattatttaaaaaaccaatatatttggaagaaaataaaaataatcttaatattcaatgttctctaaaatggaatgctggttatggtgaagatgtatatccatttactaataatatttaccaaaaagatggtggtactcatttattgggttttagaagtgcactgacaagagtaattaataagtatgcaagtgatttaaatttattaaagaaaaataagttatctatttctggagatgatgtaaaagagggtttaacttgcgttctatcaattaaagttcctgatccaaaattttcattcaaacaaa

SEQ ID NO: 294632 - DNA, 804 bp, Unknown
  Bacterial polypeptide expressing nucleotide sequence isolated from the Sargasso Sea
tatggtaaataaaaatacatatcaagcagactcgattaaggttctgaaaggccttgaggcagtcagaaaaagaccgggtatgtacattggagataccgatgatggtacaggcttgcaccatatggtttacgaagtagtagacaactctatcgatgaagctttgggaggtttttgtaaaaatatcaatgtcaaaattaatgcagatgggacaattacagttagagatgatggtcgaggtataccaatagatacccataagggagaaaaaaaatctgctgcagaggttataatgacccaattgcatgctggtggaaaatttgatcatgactcatacaaagtttcaggtggtttacatggcgttggtgtttcagtagtaaatgctttatcagaaaaattagaacttgaaattgatagagatggtaaaaaatattttatagagtttaggaatggtgaagcaagatcccctttaaaattgatagggaaatcaagaagcacaggaacacaaattacatttttaccctcaaaagatatattttcatctataaaatttacgcccaatattcttataaaaagaatgagagaattagcttttttaaataagggtattaagattatcttcatagatggaagtcaaaataaagaaaagatttatgaatttcaatatgaaggcggtgtgcttgaatttgtagattaccttgatgaaaaaagagaaaaattgaaaataagaatggtaatgatttgtttaaaaaaccaatttatattgagggtaaaaagaaaacatagagatagaatgttccttaaatg

SEQ ID NO: 294633 - DNA, 698 bp, Unknown
  Bacterial polypeptide expressing nucleotide sequence isolated from the Sargasso Sea
agtagattgctcaagtagatcaagaaataatacagaaatttttattgtagaaggagacagcgcaggagggtcagctaagcaagcaagaaacagggaattgcaggctatacttccacttagaggaaagattttaaatgtttataacgtgggattgtcaaaaatagcagataataatgaaatacaaaatctaattcaagcattgggatgtggtataggaaaaaattttgatattaaaaaacttagatacgataaaataattttaatgactgatgctgatgttgatggatcacacattgctactttgctaattactttcttttataaatatatgaaaaatttaattgatgaaaataaattatatatagctatgccaccactctttaaaatatatgacaaaaataaacatttttatgcttttgatgaaaaagaaaaaaaccatattgttaaaaaagaatttaaatcagataattataatattactagatttaaaggacttggtgaaatgccagcagaacaacttaaagatacaacaatggatcaagataaaagaaaattaatttccattaacacagaaaaagcaaaaaaggatataaaaagtactgaaagattatttgaaactttaatggggaaacaagctgatttacgttttcaattcattcaaaaaaatgcaaattttattaaaaatttagatatttaat

SEQ ID NO: 294634 - DNA, 814 bp, Unknown
  Bacterial polypeptide expressing nucleotide sequence isolated from the Sargasso Sea
tatatggaattcaatcctggaattttggatttgattcttgaaaaagcaattcaatcatttaatgcagcagaagctgcgagaagggctagagaattagtaagaagaaaaagtgttctagaaagttctacattacctggcaaattagcagattgtagttctagagatccctcagaatcagaaatttatatagttgaaggagattcagctggtggctccgcaaaacaaggacgagatagaaattttcaggctattttgcctcttaggggtaaaattctcaatattgaaaaaactgacgatactaaaatatataaaaacacagaaatacagtcattaataacagctctaggattaggaataaaaggagaggaattcgacgtgagctctttgagatatcatagagttgtaattatgacagatgctgatgttgacggtgctcatataagaacgttattactgacatttttttacagataccaaagagaacttgttgagaaaggttttatatacattgcttgtccccctctttataaagttgaaagaggtaagaagcataattactgttataacgagaatcaattaaaggatacaattcaaggttttggagaaaatgcaaattataatatccaaagatttaagggattaggggagatgatgccaaaacaattatgggatacaactatgaatcctcaaacgaggatgatgaaaagggttgaaatcgaagatgcacttgaagctgacagaatattcaatatattaatgggagataaggttgcaccaagaagagaatttattgaaactcatagtagcaacttag

SEQ ID NO: 294635 - DNA, 550 bp, Unknown
  Bacterial polypeptide expressing nucleotide sequence isolated from the Sargasso Sea
aatgaaaaataacaactatcaagctgactcaattaaagttttaaaaggtctagaagctgtcagaaaaagacctggtatgtatattggtgatacagatgatggtacaggcttacaccacatggtttatgaggttgttgataactcaattgatgaggctttagctggccattgtaaaaatatagatgtaacaataaacaacgatggcaccgtaagtgttgaagatgatggaagaggtatacctgttgatattcacaaaggcgaaaagaaatcagctgccgaagttataatgactcaattacatgcaggtggtaaatttgaccatgactcttataaggtttcaggaggactacacggtgttggagtttctgtagtaaatgctttatcagaaaaattagaattagagattaatagagatggaaaaaaatattttattgaatttaaaaatggtaaagctaaatccccattaaaatcagtaggtaagtcaaaagaaacaggaacaagaataacattcttaccttcaaaagaagttttttcatcaataaaagtttaa

SEQ ID NO: 294636 - DNA, 625 bp, Unknown
  Bacterial polypeptide expressing nucleotide sequence isolated from the Sargasso Sea
aatgtcagattttgctaaagaaattcttcctgttaacattgaggatgaactaaaacaatcctacctaagttatgcaatgagcgtaattcatggcagggcgcttccagatgttcgtgatggcttaaaacctgttcatagaagaatactttatgctatgcatgatcttaaaaataattacaacaaaccatacaaaaaatctgcgagggttgttggagatgtaattggtaaatatcacccccatggagattccgctgcatatgatgccattgttagaatggcccaagatttttcaatgagatacatgctagtagagggtcaaggaaacttcggttcaatagatggagatccacctgctgccatgagatatacagaagtaaggatgcaaaaaatttctgatgaaattcttgctgatttggaaaaagaaactgtccccttttcagaaaattatgatggctctgaacaaatgcctgacgttatgccaactaaaattccaaatcttttaattaatggatcatcgggaatagcagtgggtatggcaacaaatgttcctccacacaaccttaccgaagttataaatggatccttaaaactccttgagaatcaaaaatatctattgaccagataa

SEQ ID NO: 294637 - DNA, 220 bp, Unknown
  Bacterial polypeptide expressing nucleotide sequence isolated from the Sargasso Sea
atgatcaaaaaaagccaaacaaacaataaaaagtatagtgccgaatctataaaagtccttaaaggtcttgaagcagtcagaaaaagacctggaatgtatattggagatacagatgatggcacaggccttcatcatatggtttatgaagtggttgacaattctatagatgaagctttagcaggttattgtaaaaatattaaagttataattaattctgacc

SEQ ID NO: 294638 - DNA, 301 bp, Unknown
  Bacterial polypeptide expressing nucleotide sequence isolated from the Sargasso Sea
atgcaaaaaactgaaactaatttagaaaaaaacaattataaaccaatttttgtttatgacgaaatgagttcatcttatttgtcttatgcaatgagtgtaattgttagcagagctttacctgatgttagagatggtcttaaacctgtacatagaagaataatttacgcaatgtataaaggaggttttgactggtcaaagcaatttagaaaatctgcaagaattgttggtgacgtgattggtaaatatcatccacatggagatcaagccgtatatgatgctttggttagacttacacaaaatt

SEQ ID NO: 294639 - DNA, 468 bp, Unknown
  Bacterial polypeptide expressing nucleotide sequence isolated from the Sargasso Sea
aatgacaaaaaataatactaatacttatcaagccgactccattaaagttttaaaaggtctagaagcagtaagaaaaagacctggtatgtatatcggtgatacagatgatggaactggtttgcatcatatggtctatgaagtagtagataattccattgatgaggcattagcaggtcattgtaaaaaaattgaggtaagtataaactcggatgggtcaattacagttgaagatgatggtagaggaataccagttgactttcacaaagaagaaaaaaaatcagcagcagaagttataatgacacaattgcatgctggtggtaaatttgaccatgattcctataaagtttcaggaggtctacatggcgttggagtttcagtggtcaatgctctttcacaaaaattagaattgtatgttgaaagagatgggaaaaaatattttgtcgagtttataaatggcgaaactaagat

SEQ ID NO: 294640 - DNA, 794 bp, Unknown
  Bacterial polypeptide expressing nucleotide sequence isolated from the Sargasso Sea
aattggtaaacaagaaggaacagaactatttattgtagagggcgattcagcaggtggttcagcaaaacaaggaagaaatagagctaatcaagcagttttaccacttagaggaaaaatacttaatacttatgtagaggatcttaatattaaaaaaaatggtaatggaaatggttctgaccaaagaactaaggctttgtctaaaatgatttcttcaaatgaaatagttactttgattaatgcattaggtttagatccaaaggcacaagatattgacacaaaagatttgagatatggaaaaataattattatgacagatgctgatgtagatggttctcacatcagagcacttcttctaacattttttaataataagccttttaatagattaattgaaaatggtcatgtttatttagcacaaccaccattatttaaaatcaataagggctctaaaggaatttatattaaggatgagaaagaattagaggattatataataaataataacaaagaattaaaaaaaataaaaaaaggttcaaaagaatattctaaagcactcgatttagaaaaatcaaaaatgaatatccaaagatttaaaggtttaggggaaatgaatcctgaagagttatggagcactacgttagatccagcgacaagaaatttgctacaagttcaatactctaaagatataaaaaaagatcaaagtttaattcatactttgatgggcaatgatgtagcattgagaaaagattttatagtttcgaatgccataaatgttcggaatctagacatttaaa

SEQ ID NO: 294641 - DNA, 889 bp, Unknown
  Bacterial polypeptide expressing nucleotide sequence isolated from the Sargasso Sea
cagtatctttttcacaaattacgacggtagtgagcatattccagatgttttaccaacaaaaataccaaatctacttgttaatggttcttctggaatcgcagttggaatggccactaatataccaccacacaatttaacagaggttattaatggctgcgttaatttaatcaataatcctaaaatatctattgatgaacttatcaagcacatatctggccctgattttcctactggtggaacaattgatggaaaagctggcatatatgaggcatataagacaggaagaggaataattcatattaggtcaaatacttctattgaagaggacaaatctggaaagcagtcgttaattatcaatgaaataccttatatggtaaacaaagcaaaaatgcttgaaaaaattgctgaactggtcaaagagaaaaaaattgaaggaataacagaaattagagacgaatctgataaagatggccttagagttgtaattgaaatcagaaaaggagattctgctgatgttcttgaaaacaatctatttgctcagacacaactagagcaatcttttggaattaattttacagttttatcagagggacaacccaaagaagtaaatctcaaagagatgcttcaagcatttgtgaaacatcgtaaggacattataaccaaaaggactaagtatgatttaaaaagggcaaaagatagaggtcatgttgtagagggcttaatggtagctatcgctaacatcgatgaaattattgccatcattaaaaaatcaaaagatccaaaaattgccgctgtagcactcactaaaaaaatatggaaatcaggacctgttgaggctctgcttaaaaaagttggtagtgatgcgtgcaaaccaaaaagtttaagtaaa

SEQ ID NO: 294642 - DNA, 652 bp, Unknown
  Bacterial polypeptide expressing nucleotide sequence isolated from the Sargasso Sea
aatggcaaacaaaaatacatatcaagcagattcaatcaaagtgcttaaaggtttagaggcagtaagaaaaagaccaggtatgtatattggtgataccgatgatggaactggtttgcatcacatggtttatgaagttgtagataattcaattgatgaagccttggcaggatattgtaaaaatattaatgtaaaattaaattctgatggaactgtaactattaatgatgatggtcgtggaattcctacagatatgcataaaggtgaaaaaaaatctgctgccgaagtaatcatgactcaacttcatgccggtggaaaatttgaccatgattcttacaaagtttctggaggtttacatggtgtgggagtatctgttgttaatgctctttcagaaaaactctttttagagataaatagagacggaaaaaaacactctatcgaatttcgtaatggtgaagcaaaagcacctctaaagattgctggtaaatcaaaacagacaggtactcaaataactttcttgccttcaaaagaggttttctcatcaatcaaatttagtgcaaatattctaatcaagagaatgagagaattagcattcttaaacaaaggtataaaaataactttcactgacaatagtcaaaaaaaagaaaaaatccta

SEQ ID NO: 294643 - DNA, 463 bp, Unknown
  Bacterial polypeptide expressing nucleotide sequence isolated from the Sargasso Sea
atgaataaaaataatactaattactatcaagcagattcaattaaagtcttaaaaggtcttgaagcagtaagaaaaagacctggaatgtatattggagatacagatgatggaactggtttacatcacatggtatatgaagttgtagataattccattgatgaggcattagcaggttattgtaaaaaaattgaggtatcaatgaattctgatggatcaattacagttgaagatgatggaagagggataccagttgactttcataaggaagaaaaaaaatctgctgcagaggtaataatgacccaacttcatgcaggaggtaagtttgaccatgattcctataaagtttcagggggtttacacggtgtgggagtttcagtggttaatgctctttcacaaaaattagaactatatgtcgaaagagatggaaaaaaacattttgttgagtttgcaaatggtgaaacaa

SEQ ID NO: 294644 - DNA, 790 bp, Unknown
  Bacterial polypeptide expressing nucleotide sequence isolated from the Sargasso Sea
ccatttattgggttttagaagtgcattaacaagagtaataaacaaatattcaaacgaacataataagaaaaacaaattatcccttacaggtgaagatattaaagagggattgaccgtagtactctcgattaaaatgcctgaccctaaattttcgtctcaaactaaagataaattagtttcatcagaaattcgtttaattgttgagaatataataaatgataaaatttctatgtggttcgatcaaaatccttcaattattagaaatgttctagagaaaattgtccaagctgctgtagcaagagatgttgcgagaaaagcgagagacaatgttagaagaaagggaagttttgaaattacagggttaccaggtaaacttgcagattgtcaaatctctaaaaaagagggaacagagctttatattgttgagggtgactctgcaggaggttcagcaaaacaaggaagaaatagagagtttcaagctgttttgcctttaagaggtaaaatacttaacacttatgtaaatactaacggtagaaacgctggaaaaaattccgaaaatgaaactaaggcgctttcaaaaatgatgtcatcgagcgaaatagtaacattaatcaatgctttaggaacgggctcaaaagattttgatattaataatttaagatatgataaaattataatcatgactgatgctgatgttgatggttcccatattagaactttacttttaacttttttcaataatcatccatttaatcaattaatagaaaatggacatttatatttagcccaa

SEQ ID NO: 294645 - DNA, 907 bp, Unknown
  Bacterial polypeptide expressing nucleotide sequence isolated from the Sargasso Sea
tttggatctatagatggagatccaccagcagcaatgagatatactgaaacaagactttcaaaagtttcgcaacatttagttgatgatattaataaagatactgtcgaatttaaaagcaattatgatgaaactgaaaaggaacctgaaattttacctgctcaatacccaaatcttcttgttaatggggcaggaggtattgctgtaggaatggccacaagtattccaccgcataaccttggagagataattaatggaacactggcattaatagaaaacagagaaattaaaataccagagttaatgaaattaattccaggtccagattttccaacaggaggattaattattgggaaggatataattaaacaaggatacaaaactggaagaggttcatttaaaattagaggtgaaatttctacagagcaaattaaaaatggaaaagaaagattaattatatcatcagtgccttaccaggttaataaatctatattaaatgaaagaatagctgaacttgttagaggaaaaaaaattgaaggtattagtgatattagagatgaatctaacagagagggtattagagttgtaatagatttaagacgtggcgttgaaccagaaacaattaaaagacaactttacaagcatacgtctatagaaagctcatttggttttaatactttagccatagttgataaaaaaccaaaaacatgcaatctcaaagattttttagaaagttttttattatttagagaaaaagtaattgtcaaaaggacaaagtatgatttaaaaaaagcagaagatagagcacatattctaataggactatcagttagtatagataatctcgataaaataataaaagttataagaaattccaaaactccagaagaagcaaaaaataagttataaa

SEQ ID NO: 294646 - DNA, 194 bp, Unknown
  Bacterial polypeptide expressing nucleotide sequence isolated from the Sargasso Sea
aatgaataaaaactcaaattatcaagcagactcaataaaagtattaaaaggtctcgaagcagtaagaaagagaccaggcatgtatataggtgatactgatgatggaacaggtttgcatcacatggtttatgaagttgttgataattcaattgatgaagccttagcaggatattgcaaaaatattagaatagaaa

SEQ ID NO: 294647 - DNA, 798 bp, Unknown
  Bacterial polypeptide expressing nucleotide sequence isolated from the Sargasso Sea
cacaaccgatttgactaatccaacaatttcgatttctgacgagatgcgtaaatcttatttagattatgctatgagcgtgattgtttcgagagcactcccagatgtgcgcgatggattaaaaccagttcaccgccgtattctctatgcgatgatggagggaagttacgattggtcaaagccacaccgcaaatcagcccgtatagttggtgatgtgatgggtaattaccatcctcatggcgactcttcgatttatgaagccatggttcgaatggcacaagatttttctatgcggctgccgctagttgatggccaaggaaattttggatcggttgatggtgatccagcagctgctatgcgttatacggaatcacggttggctcgagcggctgaaagtctgctacgtgatattgataaagataccgttgaattcaccgccaattatgatgaaacgcagcttgaaccaacagttttaccagccgaataccctaatttattggttaatggtgcaaacggaattgctgttggaatggctactaatattccaccgcataacccaggcgaggtgatcgcagcttgtgaagctttcattaaggatccagaaataagcaccgaggcactaacaggaatcattcctgggccagactttccaacaggtggccttattatgggacgacagggcattcgcgaagcttacgctacgggccgcggatcaatcatcatgcgagctaaagcagaggtccaaacgaacgcgaaagatcgtgaggcgataatcattcatgaaattccttatccagtaaa

SEQ ID NO: 294648 - DNA, 877 bp, Unknown
  Bacterial polypeptide expressing nucleotide sequence isolated from the Sargasso Sea
atggaggaaccatatagaaggtttaaaaacagtacttacaagaacttttaatgccattgcaaagaaaagaggtaaaagaaaggaagttgagaaaaatttgtcaggagaaaatattagagaaggtttgactgttgtgttatctgtcaaagttccagagccagaattcgaaggacaaactaagacaaaattgggaaatactgaagtcagaggaatagttgattcgctcataggagaatcactaacaaaatatatggaatttaatcctagtgtctttgatttaattctagaaaaagcaattcaatcttttaatgcagcagaagcagctaaaagagcaagagatttagtaaggagaaaaagtgtacttgaaagctctactttgcctgggaaattagcagattgtagttcaagagacccttctggggcagagatttatatagttgagggtgattctgctggaggttcagctaaacaaggaagagatagaaactttcaggcaattttgcctttgagaggaaaaatattaaatattgaaaaaactgatgatactaaaatatataaaaatacagaaattcaatctttaataactgctttaggactaggcattaagggtgaagagtttgatgtcaattctcttaggtatcatcgtgttgtcattatgactgatgctgatgtcgatggtgctcatattagaacactacttttaacgtttttttatagatatcaaagagagcttgttgaaagaggtttcatatacattgcatgcccccctttatacaaagtggaaagaggtaaaatcataaatattgttataacgaagttttcattgagaaaccatagaagattttggagaaaaagctactacacatttcaagattaa

SEQ ID NO: 294649 - DNA, 848 bp, Unknown
  Bacterial polypeptide expressing nucleotide sequence isolated from the Sargasso Sea
tgtaataaaaatagtcctagagaaggttttacaagccgcaatagcaagagatctagctagaaaagcaagagacagcgtgagaagaaaaggctctttagagctgtcgggcttaccaggaaaattagcagattgccaaatttcaaatatggagggaaccgagttatttattgtcgaaggagactcagccggaggttccgcaaagcaaggaagaaaaagggagtttcaggcagttttacccttaagaggtaaaattttaaatacctatgtaaacgaaaataaaaaaaagaacggatcaaacaatggacacgaaaccaaagccttatctaaaatgatgtcgtcaaatgaaatagtcacacttataaacgctcttggaacaggttctactacttttaatattgaagatctcaggtatgaaaaaattattataatgacagatgctgatgtggatggctcacatattagaactctattattaactttttttaataacaaaccttttaatgagctcatcgagaaaggccatttgtatttagctcaacctcctttatttaaagtcacaaaaggttctaaaagcacctacataaaaaacgaaaaggaactagaggaatacattattaaaacaaaagatggtgctaaaaaaaaattaaaaaaatctgaattagaaaaatttataaacagtgagagacaaaaactaaatattcaaagatttaaagggttaggagaaatgaatccagaagagctatggcaaacaactttgaatcctgaaaatagaactttattaagagtagagtactctaaaggcaccaaagaaaagtctaaggaggaccaaaatataattaaaatactaa

SEQ ID NO: 294650 - DNA, 954 bp, Unknown
  Bacterial polypeptide expressing nucleotide sequence isolated from the Sargasso Sea
aaaataatgacaaaaatgacaaaatcaaaataccaagcagactctataaaagtttaaaaggcttagaggcagtaagaaaaagacccggaatgtatataggtgatactgacgacgggacaggcttacatcatatggtctatgaagttgttgataattccatagacgaagccctagccggatattgcaaaaatatcgatatatttattaactcaaatggaacagtgacagttaaagatgatggaagaggtattcctgtagatttacacaaaggagaaaagaaatctgctgctgaggtaataatgacacaacttcactctggaggtaaatttgatcatgattcttataaggtatcaggaggtttgcatggtgttggtgtgtcagtagtaaacgcattatcagaaagtttgaaacttgaaatttctagggatggaaaaaaatatattatagaatttaaaaatggtgacgtaaaatcaaatttaaaagctgttggtaactcaaaagaaacaggaacacagattacatttttaccatctaaagaaattttttcatcaattaagtttaatccaagtataattcaaaaaaggatgcgtgaacttgcatttttaaataaaggaattaaaatttctattcacgatctaacttcaaaaaaaagtaaaattaatgttttcaaatttgaaggtggaattttagagtttgtaagtttccttgatgaaaagagagaaaaactaaacaataaaaatggaaatcttttatttaaaaaaccaattttaattgaaggaaaaaaagatgatatagaaatagagtgtgcgctacaatggaatgcgatgtatggtgaagatgtttatccttataccaataatgtttatcaaaaggatggaggaactcaccttttgggtttcagaagtgccttaactagagtagtaaataagtatgcaagtgaattaaatttataaa

SEQ ID NO: 294651 - DNA, 817 bp, Unknown
  Bacterial polypeptide expressing nucleotide sequence isolated from the Sargasso Sea
atgacaaataaaaacacatatcaggcagactctatcaaagttttaaaaggactagaagctgtaagaaaaagacctggaatgtatattggagatacagatgatggaacaggcctacatcatatggtttatgaggtagtcgataactccattgatgaagctttaggaggttattgtaaaaatattaatgtaaaaattaattccgatggaacaattactgtaagtgatgatggcagaggtatacctgttgatattcataaaactgaaaaaaaatctgctgcagaggtaataatgacacagcttcatgctgggggtaaatttgatcatgattcctataaagtatctggaggattgcatggggttggagtatctgttgttaacgctttatcagaaaaattaaagttagaaataaatagagatgaaaaaaaatattttatagaatttcaagacggagaagcaaaagcacctttaaaagtaataggaaaatcaaaacaaacaggaactgaaataacttttttaccctctaaacaaattttctcttcaataaaatttagcgcagatacattaataaaaagaatgagagagttagcctttttaaataaaggtattaaaataatatttactgatgcaagtcaaaagaaagaaaaagtttctcaatttaagtatgatggtggtgtaattgaattcgtagattttttagatgaaaaaagagaaaaattacaaaataaaaatggaaatgatttatttaaaaaacctatttatatagaaggtaaaaaagataatattgaaatagaatgctctttaaagtggaatgctgggt

SEQ ID NO: 294652 - DNA, 832 bp, Unknown
  Bacterial polypeptide expressing nucleotide sequence isolated from the Sargasso Sea
gtatctgtagttaatgctctttcagaaaaacttgaattacaaataaatatagatggtaaaatttattttatggattttgctcatggatcagttaaaacttctttaaaagagttaagcaaatctgaattaagtgatcaaggagattttaatacaggtacaaaaataacttttttaccttcttctaaaacttttactaatatcgattttaattttaatacaattgaaaatagattacgtgaacttgcttttttaaatactggtgtaaaaataaatttgattgacaaaagatcatcaaaagaaaaaaaaatcgaatttaaatatgaaggaggaatcaatgaatacgtaaagtttttaaatcaaagcaaaactgcaattcatactcagcctatttatttttcatctcaaaaaaataatgttacagttgaatgttctttacagtggacagatagttatcacgaaaataccttgtgttttaccaataatattacccaaagggatggtggtacacatttagccggttttagaggtgcattaacaagaagtattgtaagttatattaattccaaggcaaaaaataatgttaatataaccggagatgatgcaagggaaggtctgacttgtataatttctgttaaactgccagatccaaagttttctagtcaaactaaagacaaactagtgtcatctgaagtaagaccagttgtggagtctgttagcttatcaaaattagaacaatggatggaagaaaatccttcagaaataaaaaaaataattgataaaattatcgaagcttcaaacgcacgagaagctgcaaggaaggctagagaactca

SEQ ID NO: 294653 - DNA, 799 bp, Unknown
  Bacterial polypeptide expressing nucleotide sequence isolated from the Sargasso Sea
agacaagcttgtttcatctgaggttaaaggggttgttgagtctatcgttaacaaacaccttaaagagtttttaatggaaaaccctgttgaggcaaagattattatccaaaaaatcttagactctgcgagagcgagagaggcagcaagaaaagcaagagagatgacaagaaaaggcgctctctcgatgacaggtttgccgggcaagcttgccgactgtcaagaaaaagacgctaaactttgcgaaatatttttggttgagggagattcagctggaggctcagcaaaacagggcagagacagaaaaacccaggccatacttcccctaaaaggtaaaatattaaatgttcaaaaggcacaaaaagataaaatattctcttcaaccgaaattgcaacactaataactgctttaggctgcggcattggagaagacgagtttgatatagataaactgagatatcacaaaattataataatgacagacgcagatgtagacggatctcacataagaacattgttgctaaccttcttctttaatgagctccttgagcttgtgcaacaaggccatgtctacattgcacaaccaccactctataaggttaaaagaggaaaaaaggaagagtatgtaaacagcgatgaggagctaaacaacttaatcataaataatgctatcactgggcttaggctaacacagcctggcaaaaagaaaggacttgaaggcgacggccttttcaatattttgatgcaacaaattcaaacatcaactttgatagataagctagctatacaaattggtgacagc

SEQ ID NO: 294654 - DNA, 846 bp, Unknown
  Bacterial polypeptide expressing nucleotide sequence isolated from the Sargasso Sea
caatttcgatacaaaagagctaaaaacctcttatttggactacgcaatgagcgttatcgtaagtagggcgataccagatttaagggacggcttaaagcctgtacatcgtcgaattttgtatgcaatgcacgaaacaggcaatacccatgaaaagtcatatcggaaatctgcacgacctgtaggcgacgtaatgggtaaatatcacccacacggcgacagtgcaatttatgatgctttagtcagaatggctcagccgttttctatgtctttacccttgctagacggccagggaaattttgggtctatggacggggataatcctgcggccatgaggtatacagaagttcgaatggataaacccgcagccttcttattaagtgacatagataaggacaccgttgactttcaggataattacgatggaaaggatcgagaaccttcagtcctgccggctcgctttccaaatatgctggttaatggagcgggaggaattgcagttgggatggcaacaaatattcctccgcataatcttggtgaagttgttgatgcgacactagcactaatacaaacttctgatatgagctcggaagatttaatacagtatgtgcctgggccagattttccaactggcggaatgatgttgggtcgatcaggcgctcgcaaagcctatcttgagggccgaggtagcgttataattcgcgctaaaactaaaattgaagagcttaggaaagatcgatatgccatcataattgaagaaatcccatatcaagtaaacaaagcttctatgatagaaaaaattgctgagcaggtgcgcgataaaaaagtagaaggaatttcgcatgtaca

SEQ ID NO: 294655 - DNA, 942 bp, Unknown
  Bacterial polypeptide expressing nucleotide sequence isolated from the Sargasso Sea
aaacccagaagagtcaggtgtagctccaattgatatcaacgacgaaatgaaaaaatcataccttgagtatgctatgtctgttattgttggccgggctctgcccgatgttcgggatgggttaaaacctgttcatcgacgcattttatactctatgcatgactctggctttacagccgggcgagcctataaaaaatgtgctcgtattgtgggagatgttttaggacgctaccatcctcatggggatacggctgtatacgattcattggtacgaatggctcaagacttctctttacgctaccctctaattgatggtcaaggcaactatggttctgttgatggagacaatgctgccgccatgcgatataccgaagccagaatgtctaaaatcagcatgacgctgctagaagacatcgataaagacactgtagatttctctcccaactttgacgaatccttagaagagccttctgtccttccagcaagaattcctggtttattactcaatggcacatctggaatagctgttggaatggccaccaatatcccccctcataacttgtctgaacttgtagatggtatctgtgcgttagtagataacccggatatcgatattgatgatttaatgatgcatatcaaaggccccgatttcccaacagcagggattatttgtggtgatgaaggaatccgaaaagcatatgctacaggtaaaggcagtgttgttatacgtgccaaagtaagctttgaagaaacaaaaaaaggtcgtgaagcgattatagtagaagaacttccgtatcaagtaaataaagctaacttaattgttaaaattgctgagttagttggtgacaaaaaaattcctggtatcagtgatcttcgggatgaatccgacagaaaagggatgcgcatttatatcgagctcaagcgagatgcttcccgagatatcgt

SEQ ID NO: 294656 - DNA, 760 bp, Unknown
  Bacterial polypeptide expressing nucleotide sequence isolated from the Sargasso Sea
tttctaaatgcaggactgaagattacaatagttgatcaaagaggttctgaagcccatacatcagaacatctgtacgaaggtggtctttctgagtatgttagtcaattaaatgagaggagggaagttctacatgaggaagtcatcaagatcaaaggagagaaagaaattgagaagggtgatgtcgaagtcgaagtagcattgcagtggtcggatgcattcagtgagtcgattcgttgctataccaacatcattagaaataaggatggaggggcacacatgtcaggtctaagaacggccctgaccagctctgttaacctgtatgcaaagaagaaaaacctcctcaaaggagacgctttatcgggtgatgatgttagggaaggattggcagcagtagtgagtgtgaagcatcctgatccttctttctcctcccagactaaagataaattggtgagcagtgaagtcacgggaatagttcagactattgtttatgacaaattaggcgagttctttgaagaaaacccttcagttgcgaggcagatcgtggagaaggcactactagcatccaaggcaagggaggcagccagaaaggccagggagctaaccaggagaaagggagttctggaaggaggtggccttccgggtaagcttgcagactgtcaatctcgtgatcccagcgaatgcgaggtttatttggtggaaggggattctgccggtggttcagcaaaaacgggcagagataggcggattcaagctatcttgc

SEQ ID NO: 294657 - DNA, 839 bp, Unknown
  Bacterial polypeptide expressing nucleotide sequence isolated from the Sargasso Sea
gatgtgcaatgttctttaaaatggaatgctggatataatgaagatgtatatctttacactaacaatatttatcaaaaagatggtggtacgcatttgctgggttttagaagtgctctaacgagagtaataaataaatacgcttctgagcaaaatttattaaaaaaaaataaatttactctatctggagatgatgtaaaagagggattaacctgcgtcttatctgtaaaaattcctgatccaaaattttcatcacaaacaaaagataagcttgtatcttccgaggtaagaaatatagttgaaactatagtaagtgaaaaactttctatatggtttgatcaaaatccttctatttcaaaagtaatattaacaaaaataatccaagcagctgttgcaagagatgttgctcgtaaagccagagaaaatgttagaagaaagggtgctttagaactaactggtttgccaggaaaattagcagattgtcaaaattcaaaacaggaaggaacagaactatttattgttgagggagattctgctggaggttcagcaaaacagggaagaaatagagaaaatcaagcagtactgcctttaagaggaaaaatattgaatacatttacagagattaatggttctaagaataatggaaaatcaaatgatttaagaactaaaacgctatctaaaatgatttcttcaaacgagattgttactttaataaatgctttgggattagatcctaaagatgaagaaatagatattaaagacttaaggtatggaaaaattattataatgaccgatgctgatgttgatggttctcatataagagcacttctgctcactttttt

SEQ ID NO: 294658 - DNA, 484 bp, Unknown
  Bacterial polypeptide expressing nucleotide sequence isolated from the Sargasso Sea
aatgtcaaaacaacttcaatcaaatcagaaaaatgactacagcgcatcgtcaattaaagttttaaaaggtttagacgctgttagaaaaagaccaggtatgtatatcggtgacaccgatgacgggacaggtttgcaccacatggtctttgaggtattagacaactcaatagatgaagctttgggtggttattgtaaaaatattttagttactatgaatccaaacaatactatcacagtcgaagatgatggtagaggaatacctgttgatctacataaaggtgaaaggatgtctgcagcagaggtaattatgacccaattacatgctggcggtaaatttgatcacaattcatataaagtttcaggtggattacacggtgttggagtatcagtagttaacgcattatctgaaaaacttgaattaaaaatattcagagatggagtagaatattttatagagtttaaaaacggaaaatctttaaagccg

SEQ ID NO: 294659 - DNA, 403 bp, Unknown
  Bacterial polypeptide expressing nucleotide sequence isolated from the Sargasso Sea
aatgagtaataattacggtgcagataaaatatctgtcttaaaaggattagaagcagttagaaaaagacctgctatgtatattggtgatgttggtaaaagaggatatcatcatctggttagtgaggttgttgataatagtattgatgaggcactggctggtttttgtagttctataattgtaacaataaaaaatgatggttttatttctattgaagataatgggagaggtattcctgtagaaattcataaaacagaaggaaagccagcactagaagtagtaatgacagtcttgcacgctggcggtaagtttgataaaaacacttataaggtttctggtggattacacggtgttggtgtatcagtagtaaatgctctttcagaaagcttaattgctgaagttcat

SEQ ID NO: 294660 - DNA, 226 bp, Unknown
  Bacterial polypeptide expressing nucleotide sequence isolated from the Sargasso Sea
atgagttcatcatatctttcttatgcgatgagtgtaattgttagtcgagctcttcctgacgtaagagatggtttaaagccagtccatcgaagaattttatacgcaatgtataaaggtggatatgactggtcaaaacaatttagaaaatctgcaagaatagttggagatgtaattggtaaatatcatccacatggagatcaatctgtttatgatgctctagttagaa

SEQ ID NO: 294661 - DNA, 763 bp, Unknown
  Bacterial polypeptide expressing nucleotide sequence isolated from the Sargasso Sea
gaagggcaaacaaaaacaaaattaggaaatactgaagtacgcgggatcgtggattctctcattggggaggctctcactaaatatatggaattcaatcctggaattttggacttgattcttgaaaaagcaattcaatcatttaatgcagcagaagctgcaagaagggctagagaattagtaagaagaaaaagtgttcttgaaagttctaccttgccgggcaaattagcagattgtagttctagagatccctcagaatcagaaatttatatagttgaaggagattcagctggtggctccgcaaaacaaggacgagatagaaattttcaggctattttgcctctaaggggtaagattcttaatattgaaaaaactgatgatactaagatatataaaaacacagaaatacagtcgttaataacagctctaggattaggaataaaaggagaggagttcgacgaaagctctttgagatatcatagagttgtaattatgacggatgctgatgttgacggtgctcatataagaactttattgctgacatttttttacaggtaccaaagagaacttgtggagaaaggttttatatatattgcttgtccccctctttataaagttgaaagaggtaagaatcataattactgttataacgagaatcaattaaaggatacaattcaaggttttggagaaaatgcaaattataatatccaaagatttaagggattaggtgagatgatgccaaaacaattatgggatacaactatga

SEQ ID NO: 294662 - DNA, 910 bp, Unknown
  Bacterial polypeptide expressing nucleotide sequence isolated from the Sargasso Sea
aatgaaaaaattatcaatttggtttgatcaaaatccatcaatttcaaaaattatattagcaaagattattcaggcagctgttgctagagatgtggcaagaaaggctagagaaagtgttagaagaaaaggatcattagaattatctggtctacccggaaaacttgctgactgtcaaaattctaaacaagaaggaacagagttgttcattgttgagggggactcagcaggaggatcagcgaaacagggaagaaatagggagtttcaagcagttcttccattaaggggtaaaatattaaatacttttactgaattaaatggaaagaatggaaaattatctgattataaaacaaagtctctatcaaagatgatgtcatcaaatgagattgtgactcttataaatgccttaggacttgatccaaaaacagaagaaattgatattaaagatcttagatatggaaaaattataattatgacagatgccgatgtagacggatcgcatatacgagcactacttttgactttttttaataataaaccttttaataaacttattgaaaatggaaatatttatcttgctcaaccaccattatttaaaattaataagggatcaaaaggtatttatatcaaagatgaagtagatcttgaaaaatatatcctcagtaactcaaaagaactaaaaagacaaaataaaaaaagtaaaggttatcaaaacattttgagtgaagaaaaatctaaacttagtattcaaagattcaaaggtttaggtgaaatgaatccaatagagttatggaataccactttaaatccagaaactagaaatttacttcaagttcaatactcaaaaaatcaaaagaaagatcaagatttgatttatactttgatgggtaatgatgtttcattaagaaaggat

SEQ ID NO: 294663 - DNA, 729 bp, Unknown
  Bacterial polypeptide expressing nucleotide sequence isolated from the Sargasso Sea
tacctggaaaacttgcagactgttcagctcgagataccaatgaaacggaaatttttattgtggagggtgactcagccggtggttccgcaaaatcagcacgaaatcgatctactcaagctatacttccaatgcgaggaaaaatcctaaatgttgcaagtgcttcatcagacaagctttctcagaatcaggaattaagtgacctacttcaagcactaggtgtaaaagcaaaaaatcaatttgatttagctgaccttcgatacggtaaagtgataattatgactgatgcagatgttgatggcgctcatatagccgctctcctcatgactttcttttatcaggaaatgccgcagttaatagaggcaggaagactatttatagcacaacccccactttacagaatgatgcaaggaagtaagacattttacgcacaagatgacaagcatcgagagcaccttttattgaccgaatttaatcagggtgcaaaagttgaaataagcaggtttaaaggacttggtgaaatgccaccatcacagttaaaagagactactatgaacccaagcacccgcagattattaagggttaaccttccaaagagagacctagatggtgcagataagagacgagaggctgataggctagttacaacgctaatgggtaaaaaaccagaacttaggtttggctacataagagaacactcagaggatgttttatcacagttagatatctaaa

SEQ ID NO: 294664 - DNA, 550 bp, Unknown
  Bacterial polypeptide expressing nucleotide sequence isolated from the Sargasso Sea
catgacagataaaatttctgaaattaatttagaagatgaaatgaagaaatcctatctggattatgcaatgagcgtcattattggacgagctttgcctgatgtcagagacggattaaagccagtacatagaagggtactatatgctatgaaagtacttggaaatgatcatacaaaaccatataaaaaatctgccagaattgttggtgatgtgatcggtaaatatcaccctcatggcgacagcgccgtctatgaaaccatagtaagaatggctcaagatttttcactcaggtacacacttgttgatggtcaaggaaactttggatcaatcgatggagatcgagcagcagccatgcgatatacagaagtcaggatggagaaaatcacacaagaacttcttgctgatatcgataaagatacagttgactttattcctaactatgatgaatccgaagaagaacctgcggttcttccaactcgattacctaatctattgatcaatggctctgctggaattgcagttggtatggcaaccaacattcctccgcataac

SEQ ID NO: 294665 - DNA, 802 bp, Unknown
  Bacterial polypeptide expressing nucleotide sequence isolated from the Sargasso Sea
tatgatttacgaagttttggataactcaattgatgaagctttagcaggtttttgtgatgatatttctgtttttttaaatcctgatggaactatttcagtagaagataatggaagaggtataccaaccgatatacacaagtctgaaggagtaccagctgcccaactgattatgacagaattgcatgctggtggaaaatttgatcaaaatagttacaaagtttccggaggtttacatggagtaggtgtttcagttgtaaatgctctttctgaaaaattagaactcgaaattaatagagatggatttgtttattatatggagttttcaaacggatcagtaacaaaaaatttaaaacaaattggaaagtcaaaattagatgataagggaaagccatttacaggaacaaaaattacttttttaccagcttctacaacatttactaatatagaatttaatttcagtactattgaaaaaagattgagagaacttgcttttcttaatacaggaataaaaattaatttaattgataaaagatcttctaaagaaaaaattatagaatttaaatatgatggcggaattaatgagtatgtgaaatatttaaatcaaagtaaatctcccattcacaataatccaatttactttacatctcaaaagaatgatgtaactgtcgaatgttctttgcaatggactgatgcttatcatgaaaatactttgtgttttaccaataacataacccaaagagatggaggtactcatcttgcaggatttagaggtgcgttaacccggagtattgtaaactatatt

SEQ ID NO: 294666 - DNA, 737 bp, Unknown
  Bacterial polypeptide expressing nucleotide sequence isolated from the Sargasso Sea
aatgacaaacaataaaactaaaaattcggaacaaaattataaagcagactcgataaaagttttaaagggactggatgcagttcgaaaaagacctgggatgtatattggcgatacagacgatggctcaggtttacatcatatggtctttgaagtagtagacaattcaatcgacgaagcactcgttggtttttgtaagaacattagcgttataatgcattctgataattcaattaccgtagaggatgatgggagaggtataccggttgatatacacaaaggggaaaaaaagtctgcagcagaagttatcatgacacaattacatgcaggtggtaaatttgatcaaaattcttacaaagtgtccggaggccttcatggtgttggtgtctccgtagttaatgccctttcagagcgtctaaagttaacaatatttagagatcaaaaagaatattttatttccttttcaaacggtaaagcagacaaaccaattaaatttgtaaaaaagactaagaagtcaggtaccaaaataaattttatcccatcaaaagatattttttcttcaattaaatttagtgcagcaaccttgcagaaaaagatgagagaacttgcttttcttaacagaggtttacaaataaatttactagatgaaacaaagtctaagagtaaaatttatgagaataaatacgatggcggcataagtgaatttgttacttatattgataataataaatctattttaa

SEQ ID NO: 294667 - DNA, 836 bp, Unknown
  Bacterial polypeptide expressing nucleotide sequence isolated from the Sargasso Sea
aatgaaaaattattcaatttggtttgatcaaaatccatctatttcaaaaattattttagccaaagtaattcaggctgcaatggcaagagatgttgcaagaaaggcaagggaaaatgtaagaagaaaaggtgcccttgagttaagtggacttcctggaaaattagcagattgtcaaattggcaagcaagatggcacagaattatttattgtagagggagattctgcggggggttcagctaaacaaggaagaaatagatcaaatcaagctgttttgccattacgaggaaaaatattaaatacatatgttgaggatttaaaagttaaaaaaaatagtaatggtaatggatctgactatagaacaaaagcattatcaaaaatgatttcttctaatgagatagttaccttgatcaatgcattaggattagatcctaaagctcaagaaattgatttaaaagatttaagatatgggaaaataataataatgactgatgctgatgttgacggatctcatataagagctcttcttttaactttttttaacaataaaccatttaataaattaattgagaatggtcatatttatttggctcaaccccctttgtttaaaataaataaaggtactaaaggaatttatattaaagatgagcaagagttagaggaatatattgttaacaataataaagaattaaaaaaaataaaaaagaaatcaaaagaatatctaatagctattgattcagagaaatccaagttgaatattcaaagatttaagggtttaggcgaaatgaatccagaagagttatggaatactacactcgatccagaaacaagaaatttat

SEQ ID NO: 294668 - DNA, 448 bp, Unknown
  Bacterial polypeptide expressing nucleotide sequence isolated from the Sargasso Sea
atgagctcatcgtatctttcatatgcaatgagtgtcattgtaagccgtgctctaccagatattagagatggacttaaacctgttcatcgtagaattttatatgctatgtataagggtggttatgattggtcaaaacaatttagaaaatctgcaagaatagttggagatgttattggtaaatatcatcctcatggagatcaatctgtttatgatgctttagttagaatggtacaagatttttcaatgagcttacctttggttcaaggtcaaggaaactttggttcaatcgatggtgatcctgctgctgctatgagatatactgaaacacgtttatcaaaagtttctcaatttttaattgatgacattgagaaaaatacaatttcttttaaaagcaattatgatgaaacagaaaaagaaccaagtgttcttcctgcacaatttccaaatt

SEQ ID NO: 294669 - DNA, 330 bp, Unknown
  Bacterial polypeptide expressing nucleotide sequence isolated from the Sargasso Sea
gatggccgaagaacatatttacgactcgtcgagtatcaaagtattaaaaggcctggatgccgtacgtaaaagacccggtatgtatatcggtgatacggacgacggttcaggcttacaccacatggtattcgaagttgtcgacaactccatcgatgaagccttagctggccactgtactgatgtatgggtaactatccataccgataactcagtatcagtgcgcgacaacggtcgtggtattcctacagatatgcacgaagagggtgtatctgcagctgaagtgatcatgacggtattacacgccggtggtaaatttgatgataactctta

SEQ ID NO: 294670 - DNA, 523 bp, Unknown
  Bacterial polypeptide expressing nucleotide sequence isolated from the Sargasso Sea
ttgaacacttttgttaacggtaaatctaatggaaatgatcatgccacaaaagcactatctaaaatgatgtcatctaatgagatagtaactttaattaatgcattaggaactggttcaaaagattttaatattgaaaatttaagatatgataaaatcgttattatgaccgatgctgatgttgatggatcccatatcagaacattgttactaacattttttaacaattatccttttaatcaactaattgaaaatggtcatatttatttagctcaaccacctttatttaaagtaacaaaatcaaataagagtgtttatatcaaagatgagaaaacacttgaagaatacatacttaaatcttcagataaagctgataaaaaaataaaaaaagggtcttcggaatacaataaatttatgaaagaacaaagagaaaaactctcaattcagagatttaaaggattaggagaaatgaacccagaagaactgtgggaaactaccttaaacccagaaaatcgtaccatgttga

SEQ ID NO: 294671 - DNA, 493 bp, Unknown
  Bacterial polypeptide expressing nucleotide sequence isolated from the Sargasso Sea
tttgacgaatccaacaatttcgatttcggacgagatgcgtaaatcttatttggattatgcgatgagcgtgattgtttcacgggcacttccagatgtgcgcgatgggttaaaaccagttcaccgccgtattctctatgccatgatggaaggtaattacgattggtcaaagccaccccgaaaatcggcccgagtagtcggtgatgtgatgggtaattaccacccccatggcgactcttcgatttatgaagccatggttcgaatggcacaagatttttctatgcggctgccgctagttgatggccaaggaaatttcggatcggttgatggtgatccagcagctgcgatgcgttataccgaatcacggttggctcgaacggctgaaagtctgctacgtgatattgataaagataccgttgaattcaccgctaattatgatgaaacgcaacttgaaccaacagttttaccagccgaataccctaatttattgggttaa

SEQ ID NO: 294672 - DNA, 949 bp, Unknown
  Bacterial polypeptide expressing nucleotide sequence isolated from the Sargasso Sea
atgacaaaaaaaaacacatatcaggcagattccatcaaagttttaaagggtctggaagctgttagaaaaagacctggcatgtatattggtgatactgatgatggaacaggtttacatcacatggtctatgaagttgttgataactcaattgatgaggcattagcaggatattgtaaaaatatttatgtaaaaattaattctgatggaacaattacagtaaatgacgatggaagaggtattcctgtagatatccataaagtagaaaaaaaatccgcagcagaagtaattatgactcaacttcatgcgggcggtaagtttgatcatgactcgtataaagtttcaggtggactacatggtgtgggtgtttcagttgtcaatgcgctttcacaaaaattacagttagagatatttagagatggaaaaaaacactacatagaatttcaaaatggtgaagctaaagctcctctaaaggtagtaggaaaagtaaagcaaactggtacacaaattacttttttaccctcaaaagaaattttttcttcaacaaaatttagtgcaaatatattaataaaaagaatgcgagaattagcatttttaaataaaggaattaaaataatatttactgatgcaagtcaaaaaaaagagaaaatatctgagtttaaatttgatggtggtgttatagaatttgtagattttttagatgaaaaaagagaaaaacttcaaaataaaaatggaaatgatttgtttagaaaaccaatctacattgaaggtaaaaaaaataatattgagcttgaatgctctcttaaatggaacgctggatattcagaagatatatttccatatacgaataatatttatcaaaaagatggtgggacccatttgttgggatttagaagtgcgttaaccagggtagttaataaatatgccaatgaaaataatttactaaagaaaa

SEQ ID NO: 294673 - DNA, 232 bp, Unknown
  Bacterial polypeptide expressing nucleotide sequence isolated from the Sargasso Sea
tatgcctaaatcaaaaaaaaataccaatacaaaaaattacgattcatccaacattaaggtcttaaaaggattagacgctgtccgaaaaagacctggtatgtacattggtgatactgatgacggcacagggcttcaccacatggtttttgaggtcgttgacaactctgttgatgaggctttggcaggtttttgtacacacatagaggtaatcattcatgaggatgactctata

SEQ ID NO: 294674 - DNA, 804 bp, Unknown
  Bacterial polypeptide expressing nucleotide sequence isolated from the Sargasso Sea
ttatgaggtagttgataattctatcgatgaggctttagctggtcattgcaaaaatattaaagttactattaatacagatgggtccgttactgttgaagatgacggaaggggaatacctgttgacttacataaaggtgaaaagaaatcagctgctgaagtaataatgacacaacttcatgctggaggaaagtttgatcatgattcatataaagtttctggaggacttcatggagtaggtgtttcggttgttaatgctttatctgaaagtttaacattaaaaatatatagagataaaaaagaatattttattgagtttgaagacggtaaagctttagctcctttaaaagttaaaggcaaaacaaataaaacaggaacgcttattaattttttaccatcaagggtcgtattttcagatactaaatttagttcgtcaactttacaaaaaagaatgagagaacttgcttttttaaacaaaggtttatcaattaatttattagataaatctggaaaaaaagataaagaatataaaaataaatatgagggaggaattcaagagtttgttgattttttagataaaaataaacaaacattggttaataaaaacgatttaagcttatttaaaaagccaatttatatttcaggatcaaaagataatgttgaggttgagtgcgcattaaaatggaatgctgcttattctgaagaaatgcttccttttgcaaacaatattcatcaaaaagacggaggaacacatttattagggtttagaagtgctcttacaagagtagttaataagtatgcatctga

SEQ ID NO: 294675 - DNA, 720 bp, Unknown
  Bacterial polypeptide expressing nucleotide sequence isolated from the Sargasso Sea
tttagaaaatctgcaagaatagttggagatgtaattggtaaataccatcctcatggagatcaatcagtttatgatgcattagtccgtatggtacaagatttttctatgagtttacctttagtggatggtcaaggaaattttggatctattgatggtgatccaccagcggcaatgagatatactgaaacaagattatctaaagtttctcaatttttaattgatgatatagaaaaaaatacaattgaatttaaaagcaattatgatgaaactgaaaaagaaccttctgttttacctgctcaatatccaaatcttttagtgaatggtgctggaggaattgcagttggaatggcaacaagtattcctcctcataatttaggtgaagtaattgatggaactttagctttaattgaaaataaagatattacagtatcacaattaatgaaatttataccaggtccagattttccaactggtggagttattattggaaaagatatgataaaacaaggttacaaaaatggaagaggatcatttaaagttagaggtcaaatatcagttgaacaaggtaaaaatggaagagaaagattagtaatcacatctataccttatcaagttaacaaatctgtattaaatgaaagaatagctcaattagtaagagaaaaaaaaattgaaggtataagagatataagagacgagtctaatagggaaggcataagagtt

SEQ ID NO: 294676 - DNA, 841 bp, Unknown
  Bacterial polypeptide expressing nucleotide sequence isolated from the Sargasso Sea
gctctgacccgatcgctaaatgcgcacgctacgaaatacaacctgatgaagagcgagaagttcacgctctcgggtgaggatacacgtgaaggtctgacggctgttatcagcacgaaagttccggagccccagtttgagggtcagaccaagcagaaactcgggaatagtgaggtgcgcggcgtagtggaatcgctggtgtcggagaagctgaacgagtttttcgaagagaacccggccgtggtgaagaagatcctgacaaaggcgatcgaggcggcccgggctcgggaagctgcgcgcaaagcgcgtgagctcgttcgaaggaagggtctgctagagggtggtggccttcctggcaaactgctggactgctcgtcgaacgagaaggatgagactgaagtctttctcgtcgagggcgactcggccggaggctctgctgcacaaggccggaatcgcgagttccaggcgatcttaccgctctggggaaagatgctgaacgtcgagaaggcgaggatcgatcgagtgctcacgaacgataagctacagccgatgatcttggccctcggtgcgggagttggcgaggattttgatatcgagaagcttcgttacggcaagatcatcgtgatggcggatgccgatgtcgacggttcgcacatccggtgccttctgctgacgttcttcttcagatacatgcgccacatgatcgatgatggtcgagtctacatcgcccagccgccgctgttccttgtgaagaagggcaaggacgagaactacgcgtttaacgaagatgagcgagatgaattcctgacgaactacggcgaggaagcgaaaggtgtgatggtcc

SEQ ID NO: 294677 - DNA, 808 bp, Unknown
  Bacterial polypeptide expressing nucleotide sequence isolated from the Sargasso Sea
ttgacatctgaagaaaatacaaatgaggatttatccataaaaaatgagaatatactaaatcatactttgaacaaagaaatgaagacatcatacatcaattatgcaatgtcagtcattattggcagagctctgcccgatgtcagagacggtttgaagccggtgcaccgacgtgtgctctatgggatgtatgagggaggccacacttctgataggaaatacagtaaatctgcgcgttcagtaggtgaagtgatgggtaaatatcatcctcatggagatctatcgatctatgatacgatggttaggatggcacaagaattctcattgcgatacccacttgttgatggacagggaaattttggttcgattgatggtgatccccctgccgcgatgcgttatacagaaagtagattggataagatttcaaaacacatgctggaggatattgagaaaaagactgttgattttcagccgaactttgatgattcggaaatggagccgaccgttctacctgcaagattgccaaatctactgctgaatggaagtgacggtattgcagttggaatggcaacaagaatgcctcctcacaaccttatggaggtggcaggagcggttaggatgcacgtcgaccacatcctccaggaaggagctgaaagtaaggaaatacccaatatccccatcgaggaatacatgagtcacatcaaggggcctgatttcccaaccggtgcgaccatccatgggatagatggtatcctcgatatgtactcgacggggaagggaagattccatgttcggtcaaagtgcgatgtac

SEQ ID NO: 294678 - DNA, 601 bp, Unknown
  Bacterial polypeptide expressing nucleotide sequence isolated from the Sargasso Sea
aatgatgtcatcaaatgaaatagttactctgataaatgcattaggcacgggatcaaaagattttagtttggaaaatttaaggtacgacaagattataattatgacggacgctgatgtggatggttcacatataagaactttactattaactttctttaacaattcgccttttaatagtttgatagagaatggacatctatatttagcccaaccacctttatttaaagtaacgaaggggagtaaaagtgcttatataaaagatgaaaaatctttggaagaatacatcataaaaaacagtgataataattttaaaagaaataaaaaaaataaaaaagagcttcaaagcttgatagatgagtataagcaaaattttactattcaaagattcaaaggtttgggagaaatgaatcctgaagaactttgggatacaacacttaatccagataaccgaacacttttgaaagtgcaatattcaaaaggaacaaaagaaaaatcaaaagaggatcaaaaaataattcaaattttaatgggtgatgaggtcgcacctagaaaagattttattacaagtaaagctttagatgttacaaatttagacatttag

SEQ ID NO: 294679 - DNA, 340 bp, Unknown
  Bacterial polypeptide expressing nucleotide sequence isolated from the Sargasso Sea
aatgaaaaatagtcaaaataccatcaccaataaaaattatcgtgcagattcgataaaagttcttaaaggattagatgcagtccgaaaaagaccaggtatgtatattggagatacagacgatggatcaggtttacatcatatggtttttgaagtgttagataactctatcgatgaggcaatagttggtttctgtaaaaacataaccgttactatgcataagaataactctgttacggtagaggatgatggaagaggcataccagtagatacacataaaggagaaaaaaaatctgcagcagaagttataatgacccagttgcatgccggtggtaaatttgat

SEQ ID NO: 294680 - DNA, 700 bp, Unknown
  Bacterial polypeptide expressing nucleotide sequence isolated from the Sargasso Sea
gatgagctcgtcttatctttcttatgcaatgagtgtaattgtgagtagagctctgccagatgtaagagatggactaaaacctgttcatagaagaattttatacgctatgtataaaggaggttatgattggtcaaaacaatttcgaaaatcagcaagaattgttggagatgtaataggtaaatatcatccacatggagaccaatctgtttatgatgctttagtaagaatggtgcaagatttttcaatgagtctaccattagtggatggccaaggaaattttggttcgatcgatggagatcctgctgcggctatgagatatactgaaactagactttcaaaagtatctcagtttttaattgatgatatcgaaaaaaatacaattcaatttaaaaataattatgacgaaacagaaaaagaacctacggtcttgccagctcaatttccaaatctattggttaatggggctggtggaatagctgttggtatggctacaagtatacctcctcacaatttaggtgaaataattaatggcacattagctttaatagaaaataaagatataaaaataaaagaattaatgaaacatataccaggtccagattttccaactggtggtgtaattataggcaaagatattattaaacagggttataacaaaggaagaggatcatttaaaattagaggtgaaatatctatagaa

SEQ ID NO: 294681 - DNA, 673 bp, Unknown
  Bacterial polypeptide expressing nucleotide sequence isolated from the Sargasso Sea
gaaaattttaaacacttatgttaatgaaaataaaaaaaataatggagctaatggaagccacgaaaacaaaaccctttcaaaaatgatgtcctcaaatgaaattgtaactttgattaatgctctggggactggatccactaatttcaacattgaggatcttaggtacgaaaaaataattattatgaccgatgcagatgttgacggttcacatataagaacactacttttaactttttttaataataagccatttaacgaattaatagaaaagggacatttgtatcttgcccaacctcctttattcaagataacaaaaggtggaaaaacttcttatataaaaaatgagaaagacttagaaaaatatattcttaaatcacttgataatgtaaaaaaactaagcaaaaaagaattagaaaaaattattgatgaggaaagacaaaaattgaacattcaaagatttaaaggtttaggagaaatgaatccagaggaactttggcaaactactttaaatccagataatagagttttgttaaaggttgaatactcaaaaggaacaaaagaaaagtcaaaagaagaccaaaatatcataaaaatattaatgggagatgaagtggctccgcgaaaagattttattactgaaaaagccctagaggttgaaaacttagatatctaa

SEQ ID NO: 294682 - DNA, 588 bp, Unknown
  Bacterial polypeptide expressing nucleotide sequence isolated from the Sargasso Sea
aatgtatattggagacacggatgatggctcagggctacatcatatggtttttgaagtaatagataatgccatagacgaagctctagctggttattgcaagaatatttacgttgttatgaataaggataattctgtaactgttgaggatgatggcagaggtataccagtcgatattcacaaatcagaaaaagtttctgctgcagaagtaattatgactcaattacatgcaggtggaaagtttgatcatgactcatataaagtttcaggtggattacacggagttggagtatctgttgtaaatgctttatctgaaaaattagatttaaatatttatcgagatggaaaagaatattctattacttttaacaatgggaatgctattaaaaaactaaaagaaattggaaaaacaaaaaaaagaggtagtagaattaattttttaccttcaaaacagattttttcttcgactaagtttagcgcgtcaattttagaaaaaagaataagagaattagctttcttaaataaaggtatttgcattactcttagtgacaaaacatcaaaaaaagacagtgaatttgtccataaatatga

SEQ ID NO: 294683 - DNA, 732 bp, Unknown
  Bacterial polypeptide expressing nucleotide sequence isolated from the Sargasso Sea
aatgacaaaaattaattcaaacaattaccaagctgattccataaaagtcctaaaaggtttagaagctgtaagaaaaagaccaggtatgtatataggtgacactgatgatgggaccggattacatcatatggtttacgaggttgtagataattcaattgacgaagctctggcgggttattgtaaaaaaattgaaataagtataaacgatgataactctgtaacagtgattgatgatggtagaggaattcctgttgatattcataagggagaaaaaaaatcagctgccgaggttataatgactcaacttcatgctggtggtaaatttgatcataattcctacaaagtttctggaggactacacggagtgggagtatcagttgttaatgctctttcagagagattaaaacttacaattaatagagacaataaaaaatattatatagaatttaaaaatggagacgctaaaacttccttaaaacaagttggtaaatcaaaaagtagtggaaccgaaattaattttgttccgtcgaaagatatattttcatccattaaatttagtttttctatattagaaaaaagaatgagagaattagcctttttaaataaaggcataaaaatagttttaagtgatttaaggcaaaaaaaaccaaaaacattagagtttaaatttgatggaggtattactgaatttgtacaattcattgatgaaaaaaaagacagtttaaaaaacaa

SEQ ID NO: 294684 - DNA, 736 bp, Unknown
  Bacterial polypeptide expressing nucleotide sequence isolated from the Sargasso Sea
attgaagaaaatccttcagaaataaaaaaagtaattgataagattattgaagcctctaatgctagagaagctgcaagaaaagcaagagagttaactagaagaaaaactggtttagaaaatacatctctccctggtaaacttgcagattgtcaggaaaaaaatccagaattatcagaattatttattgttgaaggggactcagctggaggatcagcaaaacagggaagagatagaaagaatcaagccattcttccgttaagaggtaaaattcttaatgtagaaagggcgaatgacaaacaagttttaactagcaacgaaataggagctttaattacagctataggtgcaggagtgggaaatccaactgatgatatagatcaaaataaattggatggtaaatttgatgtttctaaaatgagatatcataaaattattattatgactgatgctgatgttgatggcagtcatattagaactctcttgctaaccttcttttataggcacatgaaacctattattgatgaaagtagattatacattgcacagccacctctatatagacttaaaaaaggaaactcgacagtctataaaaaagatgacactgatttagaagactatttaatagaagaaggtttaaaaaatacaatttttgaaaatacacaaaattcacaaattgctggagaagaactaaaacaaataatatatctttctaaaaaaacaaaaaatttaatttatc

SEQ ID NO: 294685 - DNA, 724 bp, Unknown
  Bacterial polypeptide expressing nucleotide sequence isolated from the Sargasso Sea
attgggagatacagatgatgggtcaggtctccaccagatgatatatgaagtattagataattctatagacgaagcattagctggtttttgcgataaaatagaagtaattctaaatgcagatggaacagccactgtaacagataacggcaggggaatcccagtagatttacataaaactgaaaaaataccagcagcccaacttattatgaccgaattacatgctggaggtaaatttgaccaaaatagctataaagtatccggaggattacatggtgttggtgtatctgttgtaaacgcattgtctgaaaatttgattttagaaattaacagagaaggaaaattatacaatattgaattttcaaatggaatagtcactaaggaattaaatgtaattggtaattcagaaaaaaataataacaaatttttaactggaacaaagattacatttcttcctaccactaaaatttttaaaaatattaattttaattttaaaactatagaaaaaaggctcagagaattagcatttttaaacacaggtataagtatttttttaacagataaaaggcaagcagaagacaaaaaaatccactttagatatgaaggaggcataaaagaatatgtaaaatatttaaatgaaggtaaaaatcttattaattctaatcctatattttttcatggtgaaaaaaataatatttcaatcgaatgtgcattacaatggactgat

SEQ ID NO: 294686 - DNA, 391 bp, Unknown
  Bacterial polypeptide expressing nucleotide sequence isolated from the Sargasso Sea
atggaaaaagaaaaattaatccctataaaaatagaagatgaaatgaagtccgcatacatcgattattcgatgtctgtaattgtttcaagagcattgcctgatgttagagatggactaaaacctgtacatagaagagtcctgtttggaatgaatgagatgggtgtaagatcttcatcatcgtataaaaaatctgctaggattgtaggagatgtaatgggtaaatatcaccctcatggtgatagttctgtatatgatacaatggttagaatggctcaagaatggagtttaagatataacctagttgatggtcagggtaactttggatcagttgatggggacagtccagcagctatgaggtatacagaagcaagaagcaaaagatatcagaaga

SEQ ID NO: 294687 - DNA, 757 bp, Unknown
  Bacterial polypeptide expressing nucleotide sequence isolated from the Sargasso Sea
cacaaaggggaaaaaaaatctgctgcagaggtaattatgactcagttacatgcaggaggaaagtttgatcacgactcttacaaagtatcaggaggtttacatggagttggagtatcagttgttaatgcactatctgagaagcttgatttaacaattgatagagatggaaaaaaatattttatagaatttaaagatggaaatgctgttaagccactaaaattaattggtaaatcaaaaaaaaatggaacaaaaattaaattcttaccatcaaaagaagtattttcttctacaaaatttaattttaatacaattcaaaaaagaatgagagaacttgcctttcttaacaaaggaataaaaattacaattgttgattcgtcagtaaaaaaaataaaaacggttgaatttaaatttgatggaggattattagaatttattgaatatttagatcaggatagagaaaaattaaaaaataagaatggaaatgatttatttaaaaaatcaatatttatagaaggaaagaaagataatgtagaaattgaatgttcactaaagtggaatgctggatattctgaagatgtttacccatacacaaataatatttttcaaaaggatggtggaacgcatatattaggttttagaagtgctttaactagagttattaataaatatgcaaatgaacaaaatttattaaaaaaaaataaaattactatatctggtgatgatgtaaaagaaaggtctaacatgtgtattgtcaata

SEQ ID NO: 294688 - DNA, 905 bp, Unknown
  Bacterial polypeptide expressing nucleotide sequence isolated from the Sargasso Sea
aggagatgttataggtaagtaccatccacatggagatcaatctgtttacgatgcattagttagaatggttcaagatttttctatgagcctaccattggttgatggacaaggtaactttggttctatagacggagatcccgctgcagctatgagatatacagaaacaagactttcaaaagtatctcaatttttaattgatgacattgataaagaaacaatagaatttaagagcaactacgatgaaacagaaaaagaaccttcggttttaccagctcaatatccaaaccttttagttaatggtgctggaggtattgcagtaggtatggctactagtataccacctcataacttaggagaggtgattgatgggacgttagcacttataggaaacaaagatataaaattaaatgaattaatgaaacacataccaggacctgattttccaactgggggcattataattggaaaaaatataattaaggagggttataaaactggcagaggttcatttaaaatcagaggtgaaattaaaattgaacaattaaaaaatggcagagaaagacttgtaatttcttcagtaccttatcaagtaaataaatcatcacttaatgaaagaattgctgaacttgttagggaaaaaaaaattgaagggattagagatatacgtgatgagtctaatagagaaggtattagggtagcaattgatttaagatctaacactgaacctgaaaccgttaaaagacaattgttcaaatttacttccattgaaagttcttttggttttaatactttagcaattgtagataacaaacctaaaacatgtaatttaaaagaatttttagaaaattttttaaaatttagagaagatgttgtaattaaaaaaactaaatatgacttaaaaaaag

SEQ ID NO: 294689 - DNA, 264 bp, Unknown
  Bacterial polypeptide expressing nucleotide sequence isolated from the Sargasso Sea
aaagcaagagaattaactagacgaaaaactgctttagaaattactaatcttccaggtaagcttgcggattgtcaggaaaaagacccatccctctcagaaatttttattgttgagggagattctgcaggaggttctgctaagcagggacgagaccgtaagtttcaagcaatacttcctttaagaggcaaaattcttaatacttggaaatcaaggacggacaagattttacgttctaccgaaattggaacactgataactgcgctt

SEQ ID NO: 294690 - DNA, 822 bp, Unknown
  Bacterial polypeptide expressing nucleotide sequence isolated from the Sargasso Sea
aggaggtaaatttgatcataattcatatgaagtttcaggaggacttcatggagttggtgtttcagtagttaacgcattatcagaaaaattgagtttaagaatattcagagacaaaaaagaatattttgtagagtttaaagatggcaaagcgttgtcccccttaaaagttaaaggaaaaataaataaaaccggtacttttataaatttcttaccatcaagagaagtattttctgatactaaatttaactcatcagttttacaaaaaagaatgagagaacttgcatttttaaacaaaggtttatgtattattttaatagataaaactggaaaaaaggacaaggaatataaaaataaatatgaaggtggtattcaagaatttgttgagtttttagataaaaacaaaacatccttggttaataaaaatgatcttagtttattcaaaaagccaatttatatttcaggatcaaaagataacgttgaggtggaatgctcattaaagtggaatgcagattattcggaagagatgttgccatttgcaaataatattcatcaaaaggatggcggaacacatttgttaggcttcagaagtgcgctcacaagagtaattaataagtatgctatagatagcaatctattaaaaaaaaataaaattacacttacaggtgatgatactagggaaggtctaactggtgttttatcaattaaaatacctgatccaaaattttcatcacaaacaaaggataaacttgtttcatctgaggttagattcatcgttgaatctatagtaaatgataaattatcaacttggtttgatcaaaatcc

SEQ ID NO: 294691 - DNA, 776 bp, Unknown
  Bacterial polypeptide expressing nucleotide sequence isolated from the Sargasso Sea
ccaaaatccatcaattgttaaatctgttttagataaagtcttacaagcggctttagctagagatctagcaagaaaggcaagggatagtgtaagaagaaaaggaacattagaattatctggcttaccgggtaaattagcagattgccaaatttcatctatggaaggcactgaattgtttattgtagagggtgactcagcaggaggatccgcaaaacaaggcagaaaaagggaattccaagcagttttgccgttaagaggaaaaattttaaatacatatgtaaatgaaaataaaagagttaatggagcaaatggaacaaatgaaatgaaagcattatccaagatgatgtcttcaaatgaaattgttacacttataaatgctttaggaactggttcaaaagactttgatattgaaaatttaaggtatgaaaaaattattattatgacagacgcggatgttgatggttcacatataagaactttattattaactttttttaataataagccgttcaacgaattaatagaaaaaggtcatttatacttagctcagccacctttgtttaaagtgacaaaaggaacaaaaagcacatacataaaaaatgaaaaagatttagaaaaatatattttaaagtcttcagaaaatggggcaaaaaaattgaaaaaatctgacttagagaaatttttaaacgatgaaaaacaaaaattaaacattcaaagatttaaaggtttgggggagatgaacccagaagaactttggcaaacaactttaaatcctg

SEQ ID NO: 294692 - DNA, 806 bp, Unknown
  Bacterial polypeptide expressing nucleotide sequence isolated from the Sargasso Sea
aatgtacgatatagcaaaggaaattatcccaataaatatttcagaggaaatgaaagcctcttacatggattatgccatgagcgtcattgtgggaagagctcttccggatgcaagagacgggcttaaaccagtccacagaagaactctttttgctatggatattctgaataatgactggaatagatctcataaaaagtcagctcgaatagttggagacgttataggtaagtatcacccacatggcgattcagctgtttatgaaactattgtcagaatggcgcaagattttgctctgagatatccattaatcgatggtcaaggcaacttcggttcaatggacggagatggtgcggcagcaatgcgttacacagaaataaggatgtcaaaaatttccagagagttaatggccgatctaaataaagaaacagtgaactttgtcgaaaattatgacggaacggaattcatacctgaagtgttaccaaccaaaattcctaatttactaatcaatggatcttctggaatagcagtcggaatggcaactaatatgttgccacataatctaacagagtcaataaatgctgccattgcaattttagaatcaccggaaataagtacagaggatattttgaaaattattcctgcaccagactttcctaccggaggaattataaatggcacacaaggagtcgaagaagcagcaaaaacgggtcgaggaaaagtaattttaagagctaagaccgacatagaaactgatagtaaggaaaggtcaaaaattatagttactgaaattccttatcaaatcaata

SEQ ID NO: 294693 - DNA, 835 bp, Unknown
  Bacterial polypeptide expressing nucleotide sequence isolated from the Sargasso Sea
atgagttcctcgtacttgtcttatgcaatgagtgtaattgtaagtcgtgcattgccagatgtaagggatggtcttaagccagttcatagaagaataatttatgctatgtataaaggtggttacgattggtcaaaatcttttagaaagtctgcaagaattgttggagatgttattggtaaatatcaccctcacggcgaccaagcagtgtatgatgctttagttagattagtacaagatttttctatgagcctacccttaatcgaaggacagggtaatttcggatctattgatggtgatccaccagctgcaatgaggtacactgaaacaaaattgggaagaatttcacaacatttaactgaggatttagaaaaaaatactgtggagtacagaaataattatgatgagactgaaaaagaaccaacagtgctaccatctcagtttccaaaccttttagtaaacggggcaggaggtatagcagtaggtatggctactagtataccaccgcacaacttaggcgaggttatagatgcaacaatagcaatgattgaaaacaaagacattaccatatcacaaattatgaaatttttacctgggccggacttcccaactggtggcgttataattggaaaagatattattaagcaaggctataataagggtagaggttcatttaaaatacgtggagaaattgattttgaggaaaaaaaaaatggaagatccattttattaataaaatcgattccttatcaaattaataaatcaacattgatagaaaaaattgctcaattggctaaagataaaaagattgaaggtataagcgacataagagatgagt

SEQ ID NO: 294694 - DNA, 880 bp, Unknown
  Bacterial polypeptide expressing nucleotide sequence isolated from the Sargasso Sea
agagatagaaaaaatcaagcaatattgccattaagaggaaaaatacttaatgttgaaagagctaatgataagcaagttttaaccagtaatgaaattggtaccttgattacagctataggtgcaggcgtaggaaatcctacagatgatataaatcaaaataaagtagaaggtaaatttgatttaacaaaaatgagatatcataagataataattatgacagatgcggatgttgatggcagtcatatacgaacattactattaacttttttttatagacacatgaaacccattattgatgcaggtagattatacatagcacaacctccactttatagaatcaaaaagggtaattctacggtttataaaaaggatgaaaatgatctagaagaatatttaatcgaagaaggattaaaaaatacaactttaagaaacacacaaaatgatcaaattggagggaaacaacttaaagaaattatatatctatcaaaaaaaacaaaaaaccttgttattcccttgatgagaagaattgataatagtgacataattgaacatgctgcaatagtaagagcacttgatttaagaaatttacaagacaaaaaaattgcattagaaatagctaaatatttacaacagagattgaatttaatttctaatatttctgaaaagaattggatagtttcacattcaaacaattcaataaatcttcaaagaacaataagaggatttacggagaaatttgttatagatgaaaactttatagttactcctgaagctaaggcattaaatgaaataagagatgatttaatggaaaatttttatagattgaaagaacaaggctcaggtattatgaaaataaaaatgaagaatatagtatatatgt

SEQ ID NO: 294695 - DNA, 511 bp, Unknown
  Bacterial polypeptide expressing nucleotide sequence isolated from the Sargasso Sea
atggctgaggagcgcgtcgaatcaattgctctgcatcaggaaatgcagcgctcctacctggaatacgccatgagcgtgatcgtgggacgggccttgcccgatgcccgcgacggcttgaaaccggtgcaacgccggattctctacgcgatgcaggaactggggctcaccccagaccggccgtaccgcaaatgcgcccgcgtcgtcggggatgtcctcggtaaataccatccccacggcgatcaagcggtttacgacgccttggtccggcttgttcagaccttcgccagtcgccacccactgctggatggtcacggaaacttcggatccgtcgacgatgatccgccggcagcgatgcgatacaccgaaacgcgcctggcaccgattgctcaccaggcattgctggaggaaatcggcgacgacaccgttgatttcgcaccgaacttcgatgggtcccagcaggaacccacggtgctgccggcgcaactgccctttctcttgctgaacggctgtt

SEQ ID NO: 294696 - DNA, 559 bp, Unknown
  Bacterial polypeptide expressing nucleotide sequence isolated from the Sargasso Sea
aatgacaaaaaataattcaaacaattaccaagctgactcaataaaagttctaaaaggtttagaagcagtaagaaaaagaccaggtatgtatatcggtgacaccgatgatgggaccggcttacatcatatggtttacgaagttgtagataattctattgatgaagctctagctggtttttgtaaaaaaattgaaataagtataaacgatgataactctgtaacagtaattgatgacggtagaggaattcccgttgatattcacaagggtgaaaaaaaatcagctgcagaagttataatgacccaacttcatgctggtggtaaatttgatcataattcttataaagtttctggaggactacacggagtaggtgtctcagttgttaatgctctttctgagagattaaaacttacaattaatagagataataaaaaattttatatagaatttaaagatggagacgttaaaacttctttaaaacaagtcggaaaatcaaaaactagtggaaccgaaattaattttgttccatccaaagaatattttcatccattaaatttagtt

SEQ ID NO: 294697 - DNA, 736 bp, Unknown
  Bacterial polypeptide expressing nucleotide sequence isolated from the Sargasso Sea
gaaaaaaaatttacataaaaatatgatatatattttaagtgaaaaatatttatcatatgccatttctactattatctccagatcattacctgatgtaagagatgggttaaaacctgttcatcgaagaattatttactctatgtatcaattaaaactatttaattcttcatcctataaaaaatcagctagaattgttggcgacgttatgggaaaatttcatccacatggagatcaagcaatatatgatagcttagtaagaatggcccaagatttttcaactagaattaaactcatcgacggtcaaggtaattttggtaatatagatggtgataatcctgctgcaatgagatacacagaagcaagattagattcatacacagattatttttttgatggaattcaagaaaattctgtaaattttaaagaaaattatgatggacaaaacttagaaccagaagttttaccatcccaacttccaaatattttaattaatggtgcaatgggaatagcagttggtatggcaacaaatattccaccgcataacataaaagaacttgtagattgcttaattttgttaattaaagatcctaaaacaaatataactaagctactaaaaattctaaaaggaccagattttccaactggtggagaagtaattttaaatcaaaaagaaaaaaaagatatttactcaagcggcaaagggacatttattataaactcaaaatggctaaaagaa

SEQ ID NO: 294698 - DNA, 883 bp, Unknown
  Bacterial polypeptide expressing nucleotide sequence isolated from the Sargasso Sea
taactttgatatagataaaataaataagagagttcaggagttatctttccttaatgcaggtgtaaatattcttgttgaagataaaaaaaccggcaaatctaaaaagttttcgaacagtggcggactatcaagctacgttaagtttttaaaaggaagaaaacaaaatatatccgaaatatttcaatgtgaaggagaacaagacggcctcagtgttgaaatagcacttcagtggaatgatgcatactcagaaaacgttctctgttatacaaacaatattcctcaaaaagatggagggacacatctttcaggatttcgatcaagtttaacaagggtcatgaaaacatttattagaaaggaagagttaaataaaaaatcacccattgagttacttggtgaagatgttagagaaggcttaacagcaattgtttcagtgaagataccagaccctaagttttcatcacaaacaaaagaaaaacttgtttcctcggaggttgagagtgttgttagcaacgtttttaacaagaattttaatgaatatcttttagaaaatccaaaggaagctatgtctattttaacaaagatatctgaagcagctttagctagagaagcagcaagaaaagctagagagatgacaagaaggaaaggggttttagaggttgcaggtttaccaggaaaactagcagattgccaagaaaaagatcctgcgctgtcagaaatatatatcgttgagggtgattcagcgggtggatcagctaaacaaggaagaaatagacaaaaccaagcaatacttcctctgaaaggaaaaattttgaatgttgaaaaagctagattagataaagttttatcttcaccaagaaataggaacgcttgtaacagctttagg

SEQ ID NO: 294699 - DNA, 364 bp, Unknown
  Bacterial polypeptide expressing nucleotide sequence isolated from the Sargasso Sea
tttgagaggtaaaattttaaatacatggaaatcaagaacagataaaattttgagttcaaacgagattgggactctcattagtgcattgggaactggtataggcaatcaagagtttgatataaataaattgagatatcataaggtagtaataatgacagatgcagatgtagatggttctcatatcaggacactcttgcttactttctttttcaaagaaatgagagaattaattataaatgataatttgtatatagcgcgcccacctctatataaagtaaaaagaggcaaagaagaattatatttaatggatgatgatgaactttaccgtgcactagttaactacggttctaaagatataactttt

SEQ ID NO: 294700 - DNA, 404 bp, Unknown
  Bacterial polypeptide expressing nucleotide sequence isolated from the Sargasso Sea
tatgagcccagatcaacaacaaaaaagatatagcgcagaaagcataaaggtactagagggtttagaagctgttagaaaacgacccgcgatgtacattggtgacgttggtaaacgaggacttcaccaccttgtgtatgaagtagtagacaactcaattgatgaggccttagctgggttttgtacaagggttatagtaacatttaatccagacggttctgttacggtggaggacaatggtcgcggtataccggtagacatgcacaaggaagaaaaaaaaccagccctcgaggttgtgatgaccgttcttcacgcgggcggcaaatttgacaaaggttcgtataaagtttctggaggacttcatggggttggcgtctctgtcgtaaatgcattgtcggaatggttgt

SEQ ID NO: 294701 - DNA, 592 bp, Unknown
  Bacterial polypeptide expressing nucleotide sequence isolated from the Sargasso Sea
tttgacatcagatatagaaaaaaacaagaaagaggataatcaaatacctcctaataaaactggaattacaagtgtttctctagaaaatgaaatgcgtaaaagctatctagactatgctatgagtgtaattgtagccaggtcagttccagatataagagatggattaaaaccagttcatagaagaattttatattcaatgaatgagtcaaattacgtttttaataaaccttatagaaaatctgccagaattgtaggtgatgttatgggaaaataccatcctcatggtgatgcagcaatttatgatgctatggttagaatggcacaagatttttcaatgagattagaacttattgacggccaaggtaattttggttcaatggatggcgatcctccagctgcaatgagatatactgaggcaagacttgcgaaaatagctaattatttagtagatgatttagataaagaaaccgttgatttcaatgcaaattatgatgaaactgcatttgaacctgttgtcttacccgctaaatatccaaatatattaattaatggagcagtaggaatcgctgtaggcatggcaacaagtattccc

SEQ ID NO: 294702 - DNA, 773 bp, Unknown
  Bacterial polypeptide expressing nucleotide sequence isolated from the Sargasso Sea
tccagttgatgttcacaaaaaagaaggagtatctgcagctcaattaattatgaccacccttcactcaggaggaaaatttgatgacaatagttataaagtttctggcgggcttcatggtgtaggagtctcggttgtaaatgccctttcaaaaaaattaaccttagaagttcatcgtgatggtggagaatattttcaggagtacagtgaaggcaagccaaaagcaaaattaaaaaaattaaaaaagtcagataagacaggaactataataaccttccatccatcaaataaaatttttacttcaacagaatttgatatagaaaaaatttataaaagaattcaagagttatcatttttaaatgctggtgtgtcaattaatgttgaggacaagagaacaggtaaatctcgtaagtttaaaaataatggaggactctctagttatgtaactcacctaagaggaagaaaacaaattgtttctgatatctttgagtgctcggctgaagaaaatgaagttggcgttgagatcgcaatgcaatggacagattcatactcagaaaatgtattatgttacaccaataatatacctcaaaaagatggtggcacccatttagctggttttaggggtagcctaacaagggttttaaagtcatttattaagaaagaaaatgctaaaaagacacccacagaccttcttggagaggatgtaagggagggactaatagcaataatatctgtaaaagtaccagatcctaaattttcatcacaaacaaaagaaa

SEQ ID NO: 294703 - DNA, 604 bp, Unknown
  Bacterial polypeptide expressing nucleotide sequence isolated from the Sargasso Sea
atgagcgaagattcaagtcaaaaaggaaattattcagcagataacattcaggttttagaaggacttgaggcagttcgtaaaagacctgcaatgtatattggtgacgttggtgttaaaggcctgcatcatttggtttatgaagtagtagataattccattgatgaggctttagctggccattgtgacaaaataacagtaataataaatgaagataattctatctctgttagtgataatggaagagggattcctacagcgattcatagcaaagagaataagtcagctttagaggttgttatgaccgtacttcacgctggtggtaaatttgataaagatacttacaaagtatctggaggtttgcatggggtaggtgtttcctgtgtaaatgcattgtcttctcatttaaaagcgacagttaaaagagagggaaaagtttttgaacaagagtatgaaattggtaaacctcaatatgacgttagggttgttggtgaatcaactgacaatggaaccgaggttacttttttgcctgatgcatcaatttttgaagttaaggtttataattttgatactcttgcagcaaggatgagagaattggcatttctta

SEQ ID NO: 294704 - DNA, 892 bp, Unknown
  Bacterial polypeptide expressing nucleotide sequence isolated from the Sargasso Sea
acttttctcccatctgaagaaatattttcaacgactaaattttcaagctcggtcattcaaaaaagaatgcgtgaactagctttcctgaataaggggataaaactattagttctagataaaactcaaaaaaaagataaagtttatgaatacaagtttgatggaggattaagtgaattcatcaatcatttaaatcaaaaaaaagagaagctcaaaaataaaaatggtaacgatctttttagaaagccaatatatttagaggggaataaaaatggaattgaaatagaatgttctttagagtggaattcaacttactcagaagatgttaatgcatatacaaataatatacatcaaaaagatggtggtactcatttattaggatttaggagcgcattaacaagagtagttaataagtacgtaagcgataataatgttttaaaaaagaataagttatctatatctggtgatgatattaaagagggactaacagcgattttatcaataaaaatgcctgatccaaaattttcatctcagactaaagataaattagtttcatcagaaattagaaatattgtagaaacttttgtgaacgagaaactttctatgtggttcgatcaaaatcctgctgttattaaaattgtattattaaaaataattcaagctgcacaagcacgggatgttgccagaaaagcacgtgagagtgtaagaagaaaaggggctctcgagctgacaggacttccgggtaaattagcagattgtcaaaatccaaagagagatggcactgaattattcattgtagagggagattctgccgggggctcggctaagcagggaagaaatagggagtttcaagctgttttaccactaagaggaaaaattttaaacacttatgtag

SEQ ID NO: 294705 - DNA, 799 bp, Unknown
  Bacterial polypeptide expressing nucleotide sequence isolated from the Sargasso Sea
tatgaattcaaattactcatctgactcaataaaggttctgaagggcttggaagcagtccggaaaagaccaggtatgtatataggtgatactgatgatggctctggactacatcaaatgatttatgaagttttagataactcaattgatgaagccttagctggttattgtactgatatagaagtaattttaaatgcagacggtacagttacaataactgataatggtagaggcattcccgtagatttgcataaaactgagaaagttccagcagctcaattaattatgacagaattgcatgcaggaggaaaatttgatcaaaatagttataaggtatccggaggtttacatggagttggtgtgtcagttgtaaatgctttatcagaaaatttaatactagaaattaatagagatgggaaaatatataatttagaatttagtaatggtattgtaacaaaagaattaaatattataggtacttctaaaaaagttaaggataaatattttactggaacaaaaataacatttttgccaacaacagatatttttaaggatataaattttaattttaaaatcattgaaaaaagattgagagagcttgcttttctaaacacaggaataaatattgatttcattgatagaagatactcagaggaaaccaaaatcaatttcaattatgagggaggtattcaggaatatgtcaaatatttaaataatgaaaaaaacgtaattaacagtaagccaatttcttttttaggtaataaaaataatatatcagttgagtgtgcatttcaatggact

SEQ ID NO: 294706 - DNA, 743 bp, Unknown
  Bacterial polypeptide expressing nucleotide sequence isolated from the Sargasso Sea
atattagcccacaggttgagagaactggcttttttaaacaggggaatcacgatttcaatcagggataaccgcagtgagcgatttcaggaatttaaatatgacggcggaatttcttctttcatcaagcatatcaatgaaaacaaaaatgtgcttcatgaagaaccagtttatttttccggaaaatcagaagatgtggaaattgaagtagctttccagtataacgacagctacactgagagaatttactcttttgttaatactatcaatacaatagatggaggaacacaccttacgggcttcaagggggctcttacacgaaccctcaataattatatgacctcaaataatattgccaacgattcgaaagaaaatttttcaggcgaagatgttcgggaagggatggctgctgttataagcactcgtgtgcctgaaccacagtttgaatctcagaaaaaaattaaattaacaaatgttgaaattaaaggaaaagttgaaacactagtttcggaatacttgggagcatatcttgaagaaaatccttctgtttcaaaaaagattgttgcaaaggccattgatgcgcaaagggcgagacttgctgcgaaaaaagcaagggaacttacacgaagaaaaaatgtacttgaattcagcacgcttccaggaaagcttgcagattgtcaggaatctgatccttctcttagtgagctgtttctagttgagggtgattctgctggaggatctgctaa

SEQ ID NO: 294707 - DNA, 855 bp, Unknown
  Bacterial polypeptide expressing nucleotide sequence isolated from the Sargasso Sea
cagactttaagtttacgaatccataaaaatggaaacatatacgaacaagattatgctcatggggccccaaaaaagccacttaagaagggggctaagaccaagagaacaggaacaaccatttcgtttcaacctagtaaaaaaactttttcaaacacctcttttagctatgaaacactctctaaaaggctgagagaaatgtcttttttaaaccccggtctcaccatcaatctcaatgacgaaagaactaacaaggcagactcttattgttatgagggaggcttaaaagattttgttcgtcaccttaataaacctcaaaaaccaacccatcaaagcattgcatatatcaacaaaaaatctaagaaagatggagatattgaggtagaggttgccatacaatggaatgaatcttatcgagaaaacacattttgttttgctaacacaattcgacagagagacggggggacccacctagctggatttaggggtgcattaacaagaacaatcaacacttatattgataaggaaattccaaaaaatgatacgtctgtaactggagatgattgtcgagaaggaatgacagcaatcatctctgttaaacatcctgaccctaagttttcctctcaaaccaaagacaagttggtttcttccgaggttaagggagtagttgaatctgcagtcaacaaacacctcaaggagttcttagaagaaaacccagtagaagcaaaaattatagtcggaaaaatattagacgcagcccgtgctagggaggcagcaagaaaagcaagagaaatgactagaaaaaaaggagccctcgatattgcgggattgccaggaaagcttgctgactgccaagag

SEQ ID NO: 294708 - DNA, 429 bp, Unknown
  Bacterial polypeptide expressing nucleotide sequence isolated from the Sargasso Sea
gatgccgacaaagaaaaaaacttcagcatctaaatcatcaaaatatccttcaaagcaatccaaaaaagtagtaaaaaaagataatactgaatcctacgactcttccaacataactgtcctcaaaggtcttgaggcggtaaaaaagagacctggtatgtacattggggatactgacgatggaacggggttgcatcatatggtttatgaaattgtagataactccattgatgaagcacttgcaggtcactgcgatgaaattacagtaagaattatttctgatgatcgtgtctcagttgccgataatggaagaggcataccgaccgatatgcatgaggagggaatgtcagctgcagaggtgataatgacaaaacttcatgcgggcggaaaatttgatgataattcatataaggtatccggcggtttacatgg

SEQ ID NO: 294709 - DNA, 921 bp, Unknown
  Bacterial polypeptide expressing nucleotide sequence isolated from the Sargasso Sea
taaaaagaaggcaggaccaagcaaaaagggaagggccaataatggtttagacaagtacgactcttcaaatataaagatacttaaaggcctagaggctgttaagaaaaggcccggcatgtatataggagatactgatgatggtacaggattacatcatatggtttatgaggttgttgataactctattgatgaagctcttgcgggccattgtgacaaaatagaggtaaccatcctttctgatgataccgttcttgtaaaggacaacggaaggggtatccctgtagatattcataaagaagaaggtgtgtcagcagcagaagtaataatgaccaaattacacgcaggtggaaagtttgatgaaaactcatataaggtatctgggggtttgcatggagttggggtctcagttgtgaatgccctttctaaagacttgcatctcgtaatccacagggaaggcaaaaaatatgaacaaaggtattctaatggaaacccaaaggcaaaattaaaacaaacaggaaaaactgaaacaaccggaactgaagtgcaaattactccttcagaagaaacgttcagtaatattgtttttcaatatgaaacacttgctgcaaaattaagagacctttcttttttgaatgcaggactagagattgtcttagaagataaaagaactggaaagaaaaaaactttcttacacaaagggggtttggcagagtttgtagaacacttaaattcaaaaagaaataccataaattcaatttttcatttctctgtagaatcaaaagacggcatagctgtagaggttgccctacagtggaatgatggatatcaggaaaatgtaaattgttatacaaacaacataatacaaagagacggcggaactcacttggtgggatttagaacagcccttactcgttctttaaa

SEQ ID NO: 294710 - DNA, 415 bp, Unknown
  Bacterial polypeptide expressing nucleotide sequence isolated from the Sargasso Sea
atggaaaaaaacgaaattccaaagataaatagaaatattaaaccaatctcaatgtatgatgagatgagttcatcatatttatcttacgctatgagtgttatcgtaagtagagcgctaccggatataagagatggattaaaacctgttcacagaagaattatatatgcaatgcacaaaggtggcttcgattggtcaaaacaatttagaaaatctgcaagaattgttggagatgtaattggtaaatatcaccctcatggtgatcaagctgtctatgatgctttagttagaatggttcaagaattttcaatgagtttacctttaatcgacggacagggtaattttggttctatagacggagatcctcctgcagctatgagatacactgaaaccaaacttgcaaaagtttcacagtttt

SEQ ID NO: 294711 - DNA, 664 bp, Unknown
  Bacterial polypeptide expressing nucleotide sequence isolated from the Sargasso Sea
gatggagattctccagctgctatgcgttataccgaagtgaggatggcaaaaattacagacatgattctcaatgatattgagaaagagacagttagctattctccgaattatgatggaactgagcaaatcccagatgttatgcctacaaggattccagcattgcttgttaatggttcatcaggcattgcagttgggatggcaacaaatgtaccaccgcacaatctgacagaagtattaaatggttgcttgctcctcttagataatcctaaagctagcattgatgagattattcaaattataactggtcctgattttccaacaggtggaactatagatggaagaattggtatatatgagggctacaagaccggcagaggaattattcatgtgcgcgctaaaacttctgtagaggaggataaatctggaaagagctccttaataattaatgaaataccttacatggtaaataaagctaagatgcttgaaagaattgctgagatggttaaagacaagaagatagatggaataagtgaaattagagatgaatctgacaaagacggccttagagttgttattgaggtcaagcgaggtgagtctgttgaagtcctagaaaataatttatttgctcagtcgcagttagagcaatctttcggtattaatttca

SEQ ID NO: 294712 - DNA, 903 bp, Unknown
  Bacterial polypeptide expressing nucleotide sequence isolated from the Sargasso Sea
catgagtttaccactggttgaaggtcaaggtaattttggatctatagatggtgatcctgctgctgcaatgagatatacagaaactagactttcaaaggtttctcaatttttaattgatgatattgaaaagaatacaatagaatttaagagtaattatgatgaaacggaaaaagagccaactgttttaccagcgcaatttccaaatttacttgtaaatggagcagggggtattgctgttggaatggcaacaagtattccaccacacaatttgggtgaaatcataaatggaacattagccttaattgataacaaagatattaagataaaagagttaatgaaacatatcccaggtcctgacttcccgaccggagggatagtaattggtaaggacataataaaacaaggatataataaaggtaggggttcttttaaaattcggggagaaatactaaatgaaactcaaaaaagtggtcgagatagactggtgattaactcaattccctatcaagttaacaaatcagtacttaatgaaagaattgcacaacttgttagagaaaaaaaaatagagggaataagagatatacgtgatgaatctaatagagaaggcattagagtttcgattgatttaaggacgggtgtggaacctgaaactgttaaaagacaactatacaaaaacacacaaattgaaagttcttttggttttaacaccttagctatagtcgatggaaaaccaaaaacttgtaatttaaaagattttttagaaaattttttagctttcagggaagatgtagtcctaaagaaaacaaaatttgatttaaaaaaagcagaggaaagagctcatatactaattggtttatctgtttctgttgaaaatttggataaagttataaagattatccgagg

SEQ ID NO: 294713 - DNA, 283 bp, Unknown
  Bacterial polypeptide expressing nucleotide sequence isolated from the Sargasso Sea
atggcaaaaaacaacacaacttatcaggcagactctataaaagttcttaaaggtttagaggcagtaagaaaaagaccaggaatgtacatcggagatactgatgatggtacaggcttgcaccatatggtatatgaggttgttgataattctattgatgaagctctagctggtcattgcaaaaatataaatgttcaaattaatggtgatggttcgattacagttgaggatgatggaagaggaatacctgtagatattcataaagatgaaaaaaaatctgcagcag

SEQ ID NO: 294714 - DNA, 829 bp, Unknown
  Bacterial polypeptide expressing nucleotide sequence isolated from the Sargasso Sea
gatggtggttctcatgaaaatgctctaaaaaattcagtgataagatctataaaaatttttggacaaaaaaatcaattatcaaaaattaacaatataaatattaacgatatttttgatttctcagattcaataatatctgtatttataaataatccaagttttgaaggtcaaacaaaaaaaagaattttaatgccttctatgcaaaaaaagattgaagaagaattacaaaataattttttattatggctaaatgctaacaaaaaaggctcaattaagattttaaatattttgatagaaagatctttattgagaactgatttaacaaaaataaaagaattagagagaaaatcagtaaaagaaaaaaatagacttcctggaaaattagtagattgctcaagtaaacagattgaaggaactgaattattcattgttgaaggtgatagtgccggaggttctgctaagcaggcaagatctagagaaactcaagctattttgcctctaagaggaaaaatattgaatgtttatagcgtttcgctctctaaagttgcagataattcagaaatacaaaatttaattcaagctttaggatgcggaattgcaaaaaattttcaactttcaaaattaagatatgaaaaaataatcattatgacggatgcggatgttgatggatctcacataacaactttattaattacttttttttataaatatatgagaaaaattattttaaatggaagtctctatttagctatgccccctctttttaaaatagtttctaaaaattcggtattttttgcatatgatgagaaagaaaaagataatatttgaa

SEQ ID NO: 294715 - DNA, 973 bp, Unknown
  Bacterial polypeptide expressing nucleotide sequence isolated from the Sargasso Sea
tgagggcggaacacacttatctggttttagatcagcacttactagagcattaaacagttatgcaaataaaaacgatttaataaaaacaaaaaagaatgaaaaattttcgttgtctggagatgattttagagaaggtttaactgttgttatttctgttaaggttcaagaaccccaatttgaaggacaaacaaagacaaaactgggtaacggcgaggtaaagggcttagtagacaatgttgtatatgacggcatacaaacctttttagaacaaaatccaaaagtaggaaaaagaattattgaaaaggcggcagaagctgcaagagcaagaatagccgcaaaaaaagcgagggagttagtaagaaaaaaatcaggactaggatcaacaacccttccaggaaaattagcagattgttcaaacaaagatcccatgcagtgtgaattatttctagttgagggagattctgctggaggaacagctaaacaaggaagagatagaagaactcaagccattttacctttgcgcggaaaagtaattaattctgaaaaagcaagagaggacaaacttctggctaataatgaaattcagtccatgataacggcgcttgggtgtggttttggtgaagatgaagatgatcctaacagctttaaccctgaaaaattaagataccataaaatagtaattatgacagacgctgatgtggacggcagccacataagaactttattattaacgtttttttggagaaaaatgaagagccttgttcagggcggttatttatatatggcaatgccacctctatataaattaaaacagggtaaaaaagaaagatatgcatatactgatgaagaaagagataatattttaagaaggctagagtcagaaaataaaacaaaaattgatattcaaaggtataaaggggttaggagagatgaacgcagaaacactttgggaaaccacatgaacgcagaaaca

SEQ ID NO: 294716 - DNA, 736 bp, Unknown
  Bacterial polypeptide expressing nucleotide sequence isolated from the Sargasso Sea
aatgtctaaaagctcaaatttaaaaaatacaccatcctatggtgcagattcaattaaagtcctcaaagggcttgatgcagtaagaaaaagaccgggcatgtatatcggagacacagatgatggatccggcttgcatcatatggtttttgaggtaatagataactctatagacgaggctcttgctggtcactgtaaaaatatcaatgtttcaattaacccagataatactgttacagttgatgatgatggaagaggtataccagttgatatgcacaaaggtgaaaagatgtcagctgcagaggtgataatgacacaactacacgcaggaggaaaatttgaccatgattcttacaaagtttcaggagggctgcatggagttggagtttcagttgtgaatgctttgtcagaggaattaagattaaacatttttcgtgatggcaatgaatatgaaattaaatttaaagatggaaatacaattaaacctctaaaaaaagtgggaaaaacaaaaaaaaagggtaccagaatatgttttttaccatcaaaaaaaattttttcatctattcaatttagcactaccacactcgaaaaaagaattagggagttagcctttttaaacaaaggaatagcgattaaattaattgataacacatcaaaaaaaccaaaagaattcttacataaatacgacggtggaatactagaatttgttaagcatattaataataaaaagccaatctta

SEQ ID NO: 294717 - DNA, 803 bp, Unknown
  Bacterial polypeptide expressing nucleotide sequence isolated from the Sargasso Sea
attagaatttgttgatcatttagacgaaaaaagagaaaaacttaaaaataaaagtggaaatgacttgtttaaaaaaccaatttatattgaaggtaaaaaacaaaatattgaaattgaatgttctctaaaatggaatgcttcatactctgatgatgtttacccttatacaaataatatttttcaaaaggatggaggaactcacatcttgggttttaggagcgctcttactagagtgataaacaagtatgctacagaaaataatttaataaaaaaaaataaagttagtatttctggtgatgatataaaagaaggtttgacagttgttttgtcattgaaaataccagatccaaaattttcatcccaaactaaagataaactagtatcttcagaagtaagactgatagttgaaaatataattaatgaaaaattatctatatggtttgatcaaaatccatccattgctaaaattatcttagctaaaatcatacaagcagcggtcgcaagagatgtagctagaaaggcaagagaaaatgtcagaagaaaaggcgccttagaacttacaggcttaccagggaagcttgcagattgtcaaatttcaaagcaagaaggtacagaattatttatagtagagggtgactctgcgggaggctcagcaaaacaaggaagaaatagagagaatcaggcagttctacctttaagaggaaaaatattgaatacatatgtagatgaaaatggcactaagaggaatggaaataaaaatgagtatagaactaaaacattatcaaagatgatatcatccaatg

SEQ ID NO: 294718 - DNA, 808 bp, Unknown
  Bacterial polypeptide expressing nucleotide sequence isolated from the Sargasso Sea
gggactcatttaagtggttttagaacagcgttgactagagttgtgaatagttttgctaagaagtatgacttagtaaaggacaaaaagtctaatttttcaggtgcagatcttaaagaagggttaactgcgattatttcagtgaagttgcgagatccgcagtttgaaggtcagacaaagacaaagctgggtaattctgaagtaaaaggtattgtagattcgttggtagataaggggcttgcggattttattgagacgaatcctaaaatagggaagttgattgtaaataaggctcttatggcacagcgtgttcgtgaagctgctcgaaaagcacaagatttggtgcggcgaaagtcgagtttagaaagtacgacattgccagggaaacttgcggattgttcagataggaacccggaaaactgtgaagtatatatagttgagggggattcagcgggaggttctgcgaagcagggacgagatcggaattttcaagctattttacctttaagaggtaaggtgttgaatgttgagaaagctaggttagataagattctggcaaatgaagagatacgaacgttaattacggcaataggccctaatgcggtaagtggtttatctgaggaatctagagttgaagttaagaatggtgacgaagatgatttgggggatgaagatccacgaaagattttagagaaattacgttatcataaaatagttattatgacggatgcggatgtggatggagctcatatacgaactttgttactcacattcttttttcgttatgcacgagatattattagtgtagggg

SEQ ID NO: 294719 - DNA, 874 bp, Unknown
  Bacterial polypeptide expressing nucleotide sequence isolated from the Sargasso Sea
ttagatggtcaaggtaattttggatcaatggacggtgatagggctgctgcaatgagatacacggaagttagaatggcaaaaattgcaagtttccttcttgaagatattgaaaaagaaacggtcgactttagacctaattatgatgaaactgaaagtgagccatctgttcttcctgcaaaatatccaaacctacttgtcaacggtgcaggtggtatagccgttggtatggcgactaacattttacctcataatttaggagaggtcattgatgctagtattgcttaccttaaaaatactgatgtaacttttgaggaaataaatcaaattataaaaggcccagactttcctacgggtggaaaaattattggcataaaaggcataaaagactctcagtcatcaggaagaggctcaatcattgttcaggcaaaatcaaacatagaggaatttaaaacagatcgagaagcaatcgtatttaccgaagtaccttaccaagttaacaaatcatctttgcttgagaaaatagctgaacttgtcagagataaaaaaattgatggtataagtgatttaagagatgagtctgaccgccaaggagtgagggttgttgttgaattaaaaaaaggagtaatatcacaagttgtattaaataaattatataaatttactgcactacaaagttcttacggtgttaattcattggcgttggtaaacggaaaaccaaaattaatgaatataaaagaattcattcaccattttatagaattcagaaaagaaattatcagaaacaggactcgtcatgatctcggcaaagcaagagatagggcccatgtattgattggcctagcagttgctgttgctaatgttgatcaaataatag

SEQ ID NO: 294720 - DNA, 850 bp, Unknown
  Bacterial polypeptide expressing nucleotide sequence isolated from the Sargasso Sea
attgacagattattttgcagagaatccctcagatagtcaattaataatttctaaatgtcttcaagctttccaagcaagagaagcagctaaaaaagcacgagatttaactaggcgtaaaggcattcttgaaggtggaggtcttccaggtaaattagcagattgtcaaagtaaagaccctgccatatcggaaatttttattgtggagggagattctgcaggaggtacagctaaacaagggcgagatagagcaactcaagcaattttaccacttagaggtaagattctgaatgttgaaaaatcccgaattgataaaattttggcaaatactgaagtcatggctttgattacagcaatgggatgtagtattacgggtgtcgagggagaagatgaagaatttgaaattgaaaaagctagatatcataaattaataataatgactgatgcagatgttgatggtgcgcacattagaactcttcttttgactttcttttacagacatatgcaaggtctaattgatgcaggatatgtttacgttgctcaacctccgttgtataaagttactaaaggaaaaaaactcgaatatgcatatgacgacgtacaactagaaagattaatgtctgaatttggttcaggttattccatatcaagatacaaaggtcttggcgaaatgaatgctcaacaactttgggacactacgatggatccgaatcaaagaacattactgcaagtgaccatagaagatgcagaagctgcagataaagcgtttgtagagttaatgggtgatgacgttcaaaagcgtcgtgagtttattgaagctaatgctactttagtagctaatttggatatttag

SEQ ID NO: 294721 - DNA, 710 bp, Unknown
  Bacterial polypeptide expressing nucleotide sequence isolated from the Sargasso Sea
aggaaaattagttgactgctctagtaaaaaaattcaagggactgaattatttatagttgagggcgacagtgcaggaggatctgcaaaacaagctcgtaatagagaattacaagcaatacttcctttaagaggtaaaatattaaatgtttttagtgtaagtttatccaaaattgcagataataatgaaattcaaaaccttattcactcacttggatgtggagttggaaaaaattttgaattatcaaaattgcgatatgaaaaaattatattaatgactgatgcagatgtagatggatcacatattgcaactttactaataactttcatatacaaatatatgagacctataattgataataataggttatttttggcaatgcctcctcttttcaaaatacaatataaagataaaaatttttatgcatacgatgaagaagaaaaggataaaattattaaaaaagaatttggaaaaaatataagtcccgccttaagtcgttataaaggacttggagaaatgcctgccaatcagctaaaatcaacaacaatggatccagaaaatagaaaattattaaatattaatataaatttaggaaaaaaagaattgaaagaaacagaaaatttatttgaatctctaatggggaaaaaagctgaatatagatttaaattcattcaagaaaatgcaaattttactgaacaaattgatatataat

SEQ ID NO: 294722 - DNA, 948 bp, Unknown
  Bacterial polypeptide expressing nucleotide sequence isolated from the Sargasso Sea
ctctgattccgaaccttttggtcatggttcttcaggtattgcagttggtatggcaaccaacattcctccccataatctaaatgaggtaattaatgcggcaattgctttattggataatccggatgccgaaatcgacgatttgatggaatatatccaaggcccagattttccgacaggagctattattaatggccgcgcagggattatcaaagcttataaagagggtcgaggaaaaatctacgtcagagctaaagctcaagtgctatctgacaaagcttctggtagggaaacgatcattgtctctgagataccttaccagctaaataaatcgaagctgatagaaaaaatcgcggagttagttaaagacaaaaaaatagagggaatttccgaattacgagacgaatccgataaagatggtttgaggattgtcatagagcttcgaaaaggagagctgggtgaggttgttctaaacaacttatacgcgcaaactcaaatgcaatcagttttcggtataaacattgtagctcttgttgatggtgagccgcgcttactaaaccttaaagaagtgcttgatgcttttgttcgtcaccgaagggaagttgtatctcgacgaacaaaatatttgctcagaaaagccagagaaaaaggtcacatacttgagggactagcagttgccctggctaacatagatgaagtaattgaactgatcaaaaaatcccctacttcggctgaagcaaaagaaggcttacttaacaggtcttgggaatcagatagcgtcttaaaaatgcttggtgaatcagggtccgatgcttgcaggccagatggtttaggtgacaactatggattaaaaggcaatcaatattttttaactccagagcaggcacaagcgattctcgatttaagacttcatcggctcaccggcatggagcaggagaagttattcatgat

SEQ ID NO: 294723 - DNA, 815 bp, Unknown
  Bacterial polypeptide expressing nucleotide sequence isolated from the Sargasso Sea
agatgagtcattagcaggtcattgcgatcttattcaagtaaaattattaaaggatggttccgttactataagtgataatggaagaggtataccagtagatattcaccctgaagaaggtgtttcagcagcagaggtcattatgacacaattacatgcaggtggaaaatttgataacaattcttataaagtatcgggtggattacatggagttggtatttcagttgtaaatgcattatcggaaacattggttttaaccatctacagaaacgaaaaaatatatgagattaatttcaaaaatggggttgctacagatcgtttgaggattgttggtgaagaaaatcaaaaaacgggtacagaaatcaattttaaaccaagtaaagtgacttttactaaatgtaattttgattatcaaactctagagcatcgaattagagagttggcatttttaaatagtggagtccatatagatttaattgatcaaagagaaacagatgaaaaaaaagtttcatttttttatgaaggaggtttgaaggcgtatatagagtatctaaatagatctagaaatgctattcacgaagttatagctaccactcacgaaaaagaaggaattactgtagatatttctatggaatggacagacggataccatgaaaccactctttgttttactaataatattccacaaagagatggaggcacccatttagctggttttagagcggcccttactagagtaatcaactcctattctattaattctggtattgcaaaaaaagaaaagcttcaattatcaggagaagattgtagagaaggct

SEQ ID NO: 294724 - DNA, 724 bp, Unknown
  Bacterial polypeptide expressing nucleotide sequence isolated from the Sargasso Sea
atgaattccgaatattcttctgactcgataaaagttttaaaaggactagaagctgttagaaaacgaccaggaatgtatatcggagacacagatgatggatcaggtcttcaccaaatgatatatgaagtacttgataactcaatagacgaagcattagcaggcttttgtgataaaattgaagtaattttaaatactgatggaacagcaacaattactgacaatggaagaggaattccagttgaccttcacaaaatagaaaaaattcctgcagctcaacttattatgacagaattacatgctggaggtaaatttgatcaaaacagctacaaggtatcaggaggtttgcacggagttggtgtttctgttgtaaatgctttatctgaaagtttaattttagagataaatagagatgggaaggtatacaatattgagtttgagaatggaatagtcactaaagaattaaatataattggagattcaaataaaattaacaataaatattttactggtacaaagattacttttcttccaacatctaaaatttttaaagatataaattttaattttaaagtaatagaaaaaagacttagggaattggcattcttaaatactggaataagcatttttttatctgataagagacaatctgaagaaaagaatattaattttaaatatgacggaggtattaaagaatatgtaaagtatttaaatgaaggtaaaaatg

SEQ ID NO: 294725 - DNA, 322 bp, Unknown
  Bacterial polypeptide expressing nucleotide sequence isolated from the Sargasso Sea
atggataagtcacaaacagagataaaaaataacataaaacctatcaaaatgtatgatgagatgagctcatcttatctttcttacgctatgagcgtaattgtaagtagagccttaccagacataagagatggtttaaaaccagttcatcgaagaattatttatgcaatgcataaaggtggttttgattggagtaaacaatacagaaaatctgcaagaatagttggtgatgtaattggtaaatatcatcctcacggtgatcaggctgtttatgatgcattagttagaatggttcaagatttttcaatgagtttacctttgatcg

SEQ ID NO: 294726 - DNA, 500 bp, Unknown
  Bacterial polypeptide expressing nucleotide sequence isolated from the Sargasso Sea
aatggatttaggtagagacaatatattagataagcagttagtaaaagagcttgaagaaagttatttaaattattcaatgtctgttattatgtcgagagcacttcccgacgcaagagacggattaaaaccagtacatagaagaattttatttagtatgagtgaaatgtctgctatgtggaataggccttataaaaaatctgctagggtggtgggagaagttttaggtaaatatcaccctcacggagacagctctatatatgatgctcttgtaaggatggcacaagagttttctatgagacacgaattagtacaaggccaaggaaactttggttctgttgacggtgacagagcagccgcaatgagatacacagagtcaagaatgtctagaattgggagtgagctattaagggatattgaaaaagaaacaataccttggacaacaaattttgacgaaaccctaaaagaaacagccgttttaccggcagtttatccaacctttt

SEQ ID NO: 294727 - DNA, 457 bp, Unknown
  Bacterial polypeptide expressing nucleotide sequence isolated from the Sargasso Sea
agatatcataaaatagtaattatgacagacgctgatgtggacggcagccacataagaactttattattaacgttcttttggagaaaaatgaagagccttgttcagggtggttatttatatatggcaatgccacctctatataaattaaaacagggaaaaaaagaaagatatgcatacaccgatgaagaaagagacaatattttaagaaggctagagtcagaaaataaaacaaaaattgatattcaaaggtataaggggttaggagaaatgaatgcagaacagctttgggagacaacaatgaatgcagaaaccagaaccttaatccaggtaacagttgaccacattatggaagaggaaacgaacgtaaggtttagagaattaatggggtcagaagtagaacacagaagaaaatttataacagagagagcaaaattcgcaaccaacatagatatataaa

SEQ ID NO: 294728 - DNA, 621 bp, Unknown
  Bacterial polypeptide expressing nucleotide sequence isolated from the Sargasso Sea
aatcaacgaaagcattatcaaaaatgatgtcctcaagtgaaatcgtaactttaataaatgctttgggaacaggttcaaaagattttaatattgaaaatttaagatatgataaaattgtaattatgactgatgcagatgtggatggttcacatataagaactcttttattaactttttttaataattatccattcaatcaattgatagaaaatggacatctatatttagctcaacctcctttgtttaaggtaactaaagctaacaaaagcacgtatattaaagacgataatgccttggaggactatattttgaatttaagtgaaaataaaaataaattaaaaaaaggcacagctgaatttaagaagtttatagtagatcaaaaggaaaaattatcaattcagagatttaaaggtctgggtgaaatgaatccagaggaattatggaatacaacattaaatcctgagaatagaacaatgctaagagttcaatattctaaaggaactaaagataaatcaaaagatgatcaaaaaatgatagaagttttgatgggagatgaagtcgccccgcggaaagattttataacaaacaacgctttagaagttgtaaatttagatatctaaa

SEQ ID NO: 294729 - DNA, 781 bp, Unknown
  Bacterial polypeptide expressing nucleotide sequence isolated from the Sargasso Sea
gaaggaacagaattatttattgtcgagggagattcagctggaggttcagcaaaacaaggtagaaatagattaaatcaagctgttttacctcttagaggaaagattttgaatacttatgttgaggatttaacaattaaaaaaaatggcaatggaaatggatcagataaaaggactaaggctttgtcaaaaatgatatcttcaaacgagatagttacattaattaatgcattgggcttagatcccaaagcagaagaaatagatttaaaagatttaagatatggtaaaataattattatgacggatgctgatgttgatggttcgcatatcagagctttattattaactttttttaataatgaaccattcaataaattaattgaaaatgggcatatatatttagctcaaccaccattatttaaaataaataaaggaaacaaaggtatttatattaaagatgaaaaagagttggaagattatattttaaatagcaacaaagaaattaagaaaataaaaaaaggaacaaaagaattctcaaaagctttagatctcgaaaagtccaaaatgaatattcaaagatttaaaggtttaggagaaatgaatcctgaagaattatggagtaccacacttgatccagaaactagaaatttactacaagtacaatattcaaaagatcttaaaaaagatcaaagtttaattcatacacttatgggaaatgatgttgcattaagaaaggattttattgtttccaatgcaattaatgttcagaatcttgatatataaa

SEQ ID NO: 294730 - DNA, 823 bp, Unknown
  Bacterial polypeptide expressing nucleotide sequence isolated from the Sargasso Sea
tttacaaacaatattcctcaaagagatggtggaacacatttagcaggcttcagagcagccttaacaagagtaattaataattattcaataaattctggtatagcaaagaaagaaaaaatccagctatctggagaagattgtagagaaggtttaacaactattttgtctttaaagataccggacccaaagttttcaagtcaaacaaaagataaattagtatcaagtgaggttcgtcctgtcgtggagcaactcgtctctgaatcattaaatcagtggtttgatgaacaccccacagaagcaaagaaaatagttgctaaagcatatgaggcagcaagtgcaagagaggcagcaaaaagagcgcgtgaacttaccagaagaaaaggggttatggatattgcaagtttacctggaaaattagcggactgtcaggaaaaagatccagaaaaatctgaaatttttttagtagagggtgactctgcaggaggttctgcaaagcaaggtagagacagatctaatcaggcaattttgcctttaagaggaaaaattttaaatgttgaacgggctagaatagataagatgctatcatcagctgaaattggtactttaattacagctattggagcaggggttggcaactctgagattgatgttgaaaaagcaaggtatcataaaataataattatgactgatgccgatgtagatggaagtcatatacgtacacttctgttgacatttttcttcagacatatgaggccacttgtagatgctggatttttatatattgcccaaccacctctatttagagctaaacaaggtaaatctg

SEQ ID NO: 294731 - DNA, 886 bp, Unknown
  Bacterial polypeptide expressing nucleotide sequence isolated from the Sargasso Sea
cacatgctgcagtgttttgtgttgcaccgccgcgaagtggtgacacgcagaacagtttatgacttacgtaaagcccgtgaccgagctcatatcttagaaggcttggctatcgctcttgccaacattgatgaaatcattgatttaatcaaaaactcatcaagcccggccgatgccaaacaaggtttaatcgctcgtggctggcagttaggtgatgtcagcgccatgttagaacgtgccggtgaaaacgcagcccgtcctgaatggctggaagcgcattttggtatccgtgatggcgagtatttcctgactgaacaacaggctcaggcaatcctggatttacgtttacacaaattgactggtctggaacatgaaaagattctagacgagtacaaagagttattgctgctgattgctgagttattacacattctgggtagcccggagcgtttaatggaagtgatctgtgaagagttagaagctgcaaaagctcaatatggtgatgcccgtcgtactgaaatccaggacaacgcgatggatatcaacatggaagacttgatcactgaagaagacgtggtcgtgactttatcgcatttaggctacgccaagtatcaggctctgtctgactatgaagctcagcgtcgtggtggtcgtggtaaagcggcaactacagtaaaagatgaagactttgtcgatcagctgctgatcgccagcacccacgatacgattttgtgtttctctaaccgtggtcgtctgtactggatgaaggtgtatcaattacctctggcctcccgtcaggcgcgtggtaagccaatagttaacttactgccactggaagaaaacgaacgtatcaccgctattctgccggttcgtgaatacgaagaaggca

SEQ ID NO: 294732 - DNA, 410 bp, Unknown
  Bacterial polypeptide expressing nucleotide sequence isolated from the Sargasso Sea
catggaaaaaaatacggtaacgaacaaaacattcaaacctatattcgttcaagatgagatgagttcttcttatctatcttacgctatgagcgtaattgtcagtagagcattaccagacgttagagacggtttaaaaccggttcaccgtagaataatttatgcaatgtataaaggagggtacgactggtctaaaccctttaggaaatcagctcgtatagtgggagatgttattggtaagtaccatccacacggagatcaatctgtctatgatgctttagtaagattagtccaagatttttcaatgagtgttccattgatatctggccaaggtaactttggttctattgatggtgatccaccagcagcaatgaggtatacagagactaaacttggaaaaattgctcaatttt

SEQ ID NO: 294733 - DNA, 313 bp, Unknown
  Bacterial polypeptide expressing nucleotide sequence isolated from the Sargasso Sea
aatgtcaaaaaaatctgaattaaatactagccaatcttatggtgctgactcaattaaagttctaaagggattagacgccgttagaaaaagacctggaatgtatatcggtgatactgacgatggttcaggtcttcatcatatggtctttgaggtcatcgataattcgatcgacgaagctctcgctggtttttgtaaaagtattattgtttcaattaattctgacaatacagttactattgaagatgatggacgagggatacctgttgatactcataaaggtgaaaaaatttctgcagctgaggttattatgaca

SEQ ID NO: 294734 - DNA, 783 bp, Unknown
  Bacterial polypeptide expressing nucleotide sequence isolated from the Sargasso Sea
gcaaaaattattcaagcagcattagctagagacgttgctagaaaagcgagggaaaatgttagaagaaaaggtgccttagaattaagtggtctaccaggaaaattagctgactgtcaaataggaaaacaggaaggtacggagttgtttattgttgaaggggactcagcaggaggatctgccaaacaaggaagagatagatctaaccaagcagttcttcctcttagaggtaaaattttgaatacatatgttgaagacatacaaatgaaaaaaaatggtaacaaggatggtactgaacaaagaacaaaagctttgtcaaaaatgatctcatcaaacgaaattgttactttgataaatgccttgggattagatccaaaagctcaagagatagacttaaaagatttaaggtatggaaaaattattataatgaccgatgctgatgtagacggctcacatataagggctttacttcttacattttttaataataagccatttaataaattaattgagcacggccatgtttatttggcccaacctccattatttaaaattaacaaaggttcaaaaggaatttatattaaagatgaaaaggaattagaaaattatatattaaaaaatagtaaaagtttaaaaaaaataaaaaggggaactaaagaatttataaaagaactaaatattgaaaaatccaaaatgagtatccaaagatttaaaggtttaggggaaatgaatcctgaagagctatggagtacaacacttgacccagaatcaagaaatttattacaa

SEQ ID NO: 294735 - DNA, 764 bp, Unknown
  Bacterial polypeptide expressing nucleotide sequence isolated from the Sargasso Sea
atgttctttaaaatggaatgctggttatgcagaagacatatttccatacaccaataatatttatcaaaaagatggtggaacgcatttattgggttttagaagcgctcttacaagagttataaataaatatgctaatgaaaataatttattaaaaaaaaataaattagcaatttcaggggacgatattaaagaagggttaacctgcgtgctttcaactaaaatccctgatcccaaattttcttcacaaactaaagacaaattagtctcctcagaagttagaatgattgttgagacattagttaatgaaaaactatcaatttggtttgaccaaaatccatcgattgcaaaaatagtcttggctaaagtaattcaagcagctatggcaagagatgttgctagaaaagctagagaaaatgtaagaagaaagggagctttagaattaagtgggctaccaggaaaattagctgattgtcagataggaaaacaagagggtacagaattgtttatagttgagggagactctgcaggtggatcagcaaagcaaggaagaaatagagctaatcaagctgttttgcccctaagaggtaagattttaaacacttatgtagaggatataaatttaaaaaagaatggtaacggaaatggtaacggttcagatctaagaacaaaggctcttgcaaaaatgatatcttcaaatgagattgtaacattaattaatgcattgggtcttgatccaaaatctcaagaaatagatttaaaagatt

SEQ ID NO: 294736 - DNA, 814 bp, Unknown
  Bacterial polypeptide expressing nucleotide sequence isolated from the Sargasso Sea
atttatattgaaggtaaaaaaaataatatcgaattagagtgttctttaaaatggaatgcaggatatacagaagatatatttccatatacaaacaatatttaccaaaaagatggcggaacccacttattaggatttagaagtgcattaactagggtagttaataaatatgccaatgaaaataatttattaaagaaaaataaattggctatttcaggtgatgatatcaaggaaggtctcacctgtgtactttcaacaaaaattcctgatccaaaattttcatctcagacaaaagataagcttgtttcatcagaggtaagaatgatcgtagagacactagtaaatgaaaaattatctatatggtttgatcagaatccatctatcgcaaaaattattttagccaaagttatccaagctgcaatggctagagatgttgctagaaaagcaagagaaaatgtaagaagaaaaggagcccttgaattaagtggtcttcctggaaaattagcagattgtcaaattggtaaacaagaaggaactgaattatttattgtagagggagattcagcaggtggatctgcaaaacaaggaagaaatagagcaaatcaagcagttttaccacttagaggaaaaatacttaatacttatgtagaagatttcaatttgaagaaaaatggtaaagctaatggaaatggctctgatcaaagaacaaaggctttatccaaaatgatttcttcaaatgagatagtaactttaattaatgcactcgggttagatccaaagtctcaagagattgatttaaaagatttgagatatggaa

SEQ ID NO: 294737 - DNA, 811 bp, Unknown
  Bacterial polypeptide expressing nucleotide sequence isolated from the Sargasso Sea
gaaataagtataaacgatgattactctgtaactgtgattgatgatggtagaggaattcctgttgatattcataagggagaaaaaaagtcagctgccgaagttataatgactcaacttcatgctggtggtaaatttgatcataattcttataaagtttctggaggattacacggagtaggcgtatcagttgtcaatgctctttctgaaagattaaaacttacaattaatagagataataaaaaatattatattgaattcaaaaatggagatgccaaaacttctttaaaacaaattggtaaatcaaaaactagcggaaccgaaattaattttgttccatccaaagatatattttcatcaattaaatttagtttttctatattagaaaaaagaatgagagaattagcctttttaaataagggcataaaaatagttttaagcgatttaagacaaaaaaagccaaaaacattagaattcaaatttgatggaggtattactgaatttgtgcaattcattgatgaaaaaaaagaaagtttaaaaaacaaaaatgaaaatgacctttttaaaaaacctatatacatagagggtttaaaaaataatattgatgttcaatgttccctaaaatggaatgcagggtatagtgaagatgtattaccttatactaataatatttatcaaaaagatggaggaacacatcttcttggatttagaagtgcattaacaagagtagtaaataaatacgcaaatgaacaaaacttattaaaaaaaaataaagtttctttatcaggagatgatgttaaagaaggattaactt

SEQ ID NO: 294738 - DNA, 820 bp, Unknown
  Bacterial polypeptide expressing nucleotide sequence isolated from the Sargasso Sea
tttgctaataacatacacacacttgagggaggcacccacgaagaaggcttaagaacagcgataacaaaagcgattaatgactttgcaaaatcaagaaatcttcactccgacatttcattaactggcgatgacatcagagaaggaatcaccggagtgatttccgttagggtaaaagagccccaatttgaaggccagacaaaaacaaagcttggaaatacagaaatgaagtcaaaagttcaggttttagtcaataaagagctgccgaaatggttgtccaagaacacaaaagaaggaagagcaattgtggaaaggtgcgccgttgcagcaaaagcaagaatgagcgctaaaaaagcaagagaacttacaaaaagaaagagtatcttagaaacagctgggcttccaggcaagcttgcagactgttcgtctacagatccaattgaaagtgaattatttatagttgaaggagactctgctgcgggaccagcaaaacaggcaagggagtcaaaaacacaggcaatattaccaataaggggaaaaattattaatgtacaaaaagtcacagaaaatagagcacttcagaatgaagaaataagctcgcttataaaagcaataggtacaggaataaaagacgaatataaaggagaggaatcaaggtacggcaagataatatttttaacagacgctgatgttgacggagcccacataagaacacttttattaacgtttttctttaaattcatgccaggactaataaaagaaggcaaggtatggattgctgaacccccactttatagagcaaaatcctctggttcaataaact

SEQ ID NO: 294739 - DNA, 831 bp, Unknown
  Bacterial polypeptide expressing nucleotide sequence isolated from the Sargasso Sea
acttaaaaaaaataaagtttctatttcgggagatgatataaaagagggattaacatgcgtgttatcgataaaaatacctgatccaaaattttcatctcaaacaaaagataaattggtttcttctgaagtaagaaatattgtagaaacactaataaatgaaaaattatctgtttggtttgatcaaaatccttcagttgcaaaaattattttagcaaaagttgtacaagcagctctagccagagatgttgctagaaaggcaagagaaagtgttagaagaaaaggggcattagaactaactggtttgccaggaaaattagcagactgtcaaaattctaagcaagaaggtaccgaattatttattgtagagggagattctgctggaggatctgctaaacagggaagaaatagagaatatcaagctgttttaccactaagaggaaaaattttaaatacatacataagcacaaatggctcaaaaaaaaatagtaatggaaatgaaataagaacaaaaactctatctaaattaatttcttctaatgaaatagttactttaattaatgcacttggattggacccaaaagatgaagaaatagatttaaaagatttaagatatggtaaaataattatcatgactgatgcagatgtagatggttctcacataagagcgctacttttaacttttttcaataataagccgtttaaccaattaatagataatggtcatgtctatcttgcccagccaccattgtttaaaatcaataaaggttcaaaaggaatttatatcaaagatgaaaaagagttagaaaaatatattttaaataattcaaaaga

SEQ ID NO: 294740 - DNA, 913 bp, Unknown
  Bacterial polypeptide expressing nucleotide sequence isolated from the Sargasso Sea
ttatatcaaggaggtattaaagaatatgttcaatacatgaatgcagaaaaggactctattcatcctgagataatttatgttgactcagagaaagaaaacgtttacgtagaagcagctttgcagtggtgttcggatgtatattcagataatattttaggtttcgccaataatataagaacgattgatggaggtactcacatagaaggattaaaaacagttttgacaagaactttcaataatcttgcaaaaaagagaggtaaaagaaaagatattgaaaaaaacttagctggcgaaaatattagagaagggttgactgtagttatatcagttaaagtgccagatccagaatttgaggggcaaacaaaaacaaaattaggtaatacagaagtaagaggaatcgttgattcccttattggggaagcactttcaaaatatatggaattcaatcccggaattttggacttgattcttgaaaaagcaattcaatcatttaatgcagcagaagcagcaagaagggctagagaattagtcagaagaaaaagcgttctggaaagttctactctgcctgggaaattagcagattgtagttctagagatccctctgaatcagaaatttatattgttgagggagattctgctggtggttccgcaaaacaaggaagagatagaaattttcaagctattttgcctcttagaggtaaaatccttaatatcgaaaaaacggatgacacaaaaatatataaaaatacagaaattcagtcgttaattacagctcttggattaggaataaaaggtgaagaatttgatgtgagttctttgagatatcacagagttgtaattatgacggatgctgatgttgatggagctcatataagaactttgttattgacatttttttatagataccaaaaga

SEQ ID NO: 294741 - DNA, 910 bp, Unknown
  Bacterial polypeptide expressing nucleotide sequence isolated from the Sargasso Sea
cctgtacatagaagaataatttacgcaatgtataaaggtggtttcgattggtcaaaacagttcagaaaatcagcaagaatagttggtgatgttattggtaaatatcatccacatggagaccaagccgtatacgatgctcttgttagattaactcaagatttttcaatgagtttaccgttaattgatggtcagggaaattttggatcaatagatggtgatccgcctgctgctatgagatacacagaaactaaattagctaaaatttcgcaatttttaattgatgatatagaaaaaaatacagtagaatttagaagcaattacgatgaaacagaaaaagaaccaaatgttttaccttcgcaatatccaaatctattagtaaatggtgctggtggtatagccgtcggaatggctacaagcattccaccacataacttgggtgaaattattgatgcaacaatagcatttataaataatagagaaataacaatatcacagttaatgaaaaaagttcctggtcctgattttcctacgggcggggtcattatagggaaagacaatttaaaacaaggctataacaaaggaagaggatcaattaagatcagaggagaaattgatgaagaaaaattaaaaaatggaaaagatcgccttgtcattaaatcaataccgtatcaaataaataaatcagttttaaatgaaagaattgctgaattagctagagataaaaaaatagaaggtattagtgatatcagagatgagtctaacagcaaaggaataagagtagtgatagatttaagaagaaatgttgaacccgaaacagtaaaaagacagctttacaagcttacatcaatagaaaattcatttggttttaatacattagccatagtatcaggtaaaccaaaaaattcttaac

SEQ ID NO: 294742 - DNA, 753 bp, Unknown
  Bacterial polypeptide expressing nucleotide sequence isolated from the Sargasso Sea
aatgggcggagtaaaaattgtttttagagatgaaagaaatcaattattagatggttcttttaaggaagaagtttacttgtatcaaggaggtattaaagaatatgttgaatatatgaatgctgaaaaagatcctattcatcctgaaataatttatgttgattcacagaaagaaaatgtatatgtagaagcagctttgcaatggtgttcagatgtatattcagataatattttaggatttgcaaataatattagaactattgatggagggactcatattgaagggttaaaaacagttctgacaagaaccttcaataatcttgcaaaaaagagaggcaaaagaaaagatattgaaaaaaatttagctggcgaaaatattagagagggtttgactgttgttttatcagtaaaagttccagaccccgaatttgaagggcaaacaaaaacaaaattaggaaatactgaagtacggggaattgtggattctctgattggcgaggctctcacaaaatatatggaattcaatcctggaattttggacttgattcttgaaaaagcaattcaatcatttaatgcagcagaagctgcgagaagggctagagaattagtaagaagaaaaagtgttctagaaagttctactttacctggtaaattagcagattgtagttctagagatccctcagaatcagaaatttatatagttgaaggagattcagctggtggctccgcaaaacaaggacgagatagaaattttca

SEQ ID NO: 294743 - DNA, 839 bp, Unknown
  Bacterial polypeptide expressing nucleotide sequence isolated from the Sargasso Sea
taaagatattttgagcatctggttaaatactcataccgaagaaggtgaaaaaattgctgaacttgcaatttcagctgcacaaagtagggcgaaagcatccagcactgtacaaagaaaaaaaactttcaaaggtccagcactgcctggaaagttatctgattgtaatagcgaagacttaaatgagacagaattatttctagttgagggtgattctgcaggtggatctgctaaacaggctagagaaagatcctttcaagcaattatgcctttaaggggaaagattctgaatacttgggatttagaaagccaagaaattattaaatcacaagaaataaaaaatttgtcaacagcaattggcgtattgccaggaaattctgatatttccggacttagatatggaaaaatatgcatattagctgatgctgactcagatggtcttcatattgcgactttattatgcgcgctgtttctaagacattataaaagtcttgtccaagatggaaggatctatatcgcaatgcctcctttatatagagtagattgtggtaaagaagttctttatgctttagatgaaatacaaaaagataaagttgtagatgactttaagaagaaaaaaggaaaaccaaaaattaatattcaaaggtttaaaggtctaggagaaatgaatccttcacaacttagagaaactgtcatggatcccaactcaagacaacttgttaggttatctatttctgcaactgataatgctaatgcaatgatggacttacttttatctaaaaaaaatgctcctgctagaaaagagtggttagaaaaaaagggttcattggtgaggttataag

SEQ ID NO: 294744 - DNA, 871 bp, Unknown
  Bacterial polypeptide expressing nucleotide sequence isolated from the Sargasso Sea
tataaaagtcctaaagggtttagaggcagtcaaaaaacgtcctggaatgtatataggagatacagacgacgggtctggtctccatcatatggtttatgaagtagttgacaattgtgtagatgaagcattagcgggatattgtactgagataagcgtatcattatttgatggatctatagtaacagtgaaagataatggtcgaggtatacccactgatattcatcctgaagaaggtatttctgcagctgaagtcataatgacacaattacatgctggaggtaaatttgatcaaaactcctataaggtttcaggaggccttcatggtgtaggtgtttctgtagttaatgctctatcagaatacttaaaattaactatttggagagatggtaaaaagcactgtgcaacctttagtaatggaaatactactaaaaaactagatatagttggtacaacggaaacagaaacaggaacggaagttacttttcaaccttctacagatatttttacaaacattaatttcatttttaaaacactagagtcaagattacgtgaactggcatttttaaatgctggattaaagataaaacttattgataatagaaataatcagcaaaaaaaagtagacatgctttatgaaggtggtgttagtgaatttgtaaaatttatagataaatctagaacacccttaataagcaaacctatttttatttcaggtcaaagggataacattcagatagatacagcactttggtggaatgatggatataatgagaatgtttttccatttacaaataatattcctcaaagagatggtggtactcatctagcagggctaagaggtgcattaacacgaacaattaactcctatttc

SEQ ID NO: 294745 - DNA, 667 bp, Unknown
  Bacterial polypeptide expressing nucleotide sequence isolated from the Sargasso Sea
gattgccctgcatcaggagatgcagcgttcctacctcgaatacgccatgagtgtgatcgtgggcagggccttgcccgatgcccgcgacggcttgaaaccggtgcaacgccggattctctatgcgatgcaggaactggggctcaccccagaccggccgtaccgcaagtgcgcccgcgtcgtcggcgacgtcttgggcaaataccacccccacggcgatcaagcggtttatgacgccttggtccggcttgttcagaccttcgccagtcgacacccactactggatggtcacggaaacttcggttctgtcgacgatgatccgccggcagccatgcgttacaccgaaacacgcctggcaccgattgctcaccaggcattgctggaggaaatcggcgacgacaccgttgatttcgcaccgaatttcgatgggtcccagcaggaacccaccgtgctgccggcgcaactgccctttctcctgctgaacggctgttcgggcattgccgtgggcatggccaccagcatccctccccacaacctcggcgaagtggtggatggcctagtggccttgattcgtcaaccggaactcagcgacagcaaactgctggaactcattccaggacctgatttcccaacgggtggggaggtactgctgagcagtggcctccgcgac

SEQ ID NO: 294746 - DNA, 211 bp, Unknown
  Bacterial polypeptide expressing nucleotide sequence isolated from the Sargasso Sea
atggttaaaaatactcaatctgactacagcgcagattcaattaaagtactaaaaggtttagatgcagttagaaaaaggccaggtatgtacattggtgataccgatgatggaagtggtttgcatcatatggtttttgaagttgtagataactctattgatgaggctctagatggacattgtgataagattggaatcgctttaaatgcaaatg

SEQ ID NO: 294747 - DNA, 934 bp, Unknown
  Bacterial polypeptide expressing nucleotide sequence isolated from the Sargasso Sea
tcaactaaagataagcttgtctcatcagaggtaagatttattgtggaatctatagtaaatgataaattatcaacctggtttgatcaaaatcctggaattgtaaaaatagttttattaaagatagtccaggcagcaatagcaagagatgtagcccgtaaagcacgagaaaatgttagaaggaaagggtctttagaattatcggggctacctggtaagcttgctgactgtcaaataggtaaagcagaaggtacagaactattcattgtcgagggagattctgcaggagggtcagcaaaacaaggaagaaacagagagtttcaagctgtgcttcctttaagaggaaaaatacttaacacttatattgataccaatggttcaaaaacgagaaatggcaatgggcaagatttgcaaacaaaagctttttcaaaaatgatgtcttctaatgaaatagtaactttgattaatgctctgggtacaggttctaaagattttaatattgaagatttaagatatgaaaaaattattattatgactgatgccgatgtagatggctcccatattagaactcttttattgacattttttaataattatccttttaacgaactgatagaaaaaaatcatatttatttagctcaacctcctctttataaaataactaaaggatccaaaagttattatattaaaaatgataaagaattagaaaatcatttaatcaaatcctctaataaaacaaaaaattcatttaagaaaaatactaaagaatttgacaaatttatcgaaagtgaaaagaccaaaataaacatacaaagatttaaaggtttaggcgaaatgaacccagaagaattatggcaaacaactttagatcccgaaaatcggatattactacaggttaaatactcgaataatacaaaagttaaaatcaaaaaagatc

SEQ ID NO: 294748 - DNA, 814 bp, Unknown
  Bacterial polypeptide expressing nucleotide sequence isolated from the Sargasso Sea
tcttgcaaaggtattagaagccgcttatgcgcgtgaggctgcaaggaaggcaaaagagatgactagaagaaaaggcttgcttgatattgggggtttgccaggtaagttagctgattgccaagagaaagacccaaccatgtcagagctatttttagttgagggagattctgcaggtggatctgctaaacaaggtagagacagaagcttccaggcgatcctaccactaaaaggtaagataattaatgttcaaaaagcaagacttgataaggttttatcatccaacgaaattggaacactgattacagctcttggaacagggattggggttgatgaattttcattagagaaattaagatatcacagaatcataataatgactgacgcagatgtcgacggatcccacattcgaactctgttactaacatttttttacaaccaaatgtatgacctgctagaaaatggacacatttatcttgctttaccacctttatataaaattaaaaaaggcggtaagacacattatgctaaagatgatgaagaaaaagatgaaattttaaaagccattagagaagatggttctgaaagctcaagagccccagaaatacagagatacaagggtcttggtgaaatgaacccagaacaattatgggaaacaacatttgatcctaagcacagaaggctcgttcaaattacactagatgatgcaagagaaatggttgatgagatttttgaaacattaatgggtgaccaagttgctccaagaagagaatttattgatgacaatgctctgagagcaaagaatgttgatatttaa

SEQ ID NO: 294749 - DNA, 475 bp, Unknown
  Bacterial polypeptide expressing nucleotide sequence isolated from the Sargasso Sea
atgagtgaggacaaaagatctaataaaatctcaaatgattatggcgcggaacagattcaggttttagaagggttagaaccagttcgtaaacgccctggtatgtatataggttctacagggccaagaggattacaccatctagtatatgaggttgttgataactccgttgatgaagcacttgctggacattgtgatctcatagaaatagttcttagagcagatggttctgctttaatttctgacaatggacgaggtattccaacagatattcatccaagaacagggaaaagtgccttagaaactgtactaactgttcttcatgcaggaggtaaatttggcagtggtggttataaagtttcaggtggtttgcatggagtaggaatatctgtagttaatgctttaagcgaatgggttaatgtgactgtttttagggatagtagcgaatttaatcaaagattgaaaaaggtatatcaaa

SEQ ID NO: 294750 - DNA, 955 bp, Unknown
  Bacterial polypeptide expressing nucleotide sequence isolated from the Sargasso Sea
atgcagattatgttctgtgaaaattcatgctgatagcagtgtttctgttcgagataatggacgagggataccagtcgacattcatgaagaagagggggtttctgcagctgaggttattatgacccaactccacgcaggtgggaaatttgatagcaattcttataaagtatccggaggtttgcatggtgttggagtatcagttgttaatgcgctatcggtttggctcgaactacgaatttggcgcgatggaaacgaatattttgctaaatttgcaaatggagaaacaactgagcacttaaaaaaaataaacgatgttgccgaggagcgtggtactgaggttaggtttttagcttctactgagactttttctaacctggactattcttttgaagttcttgaaaagcgtcttcgagaattagccttccttaactctggtgtaaaaattattcttgaggacgaaagacccactgaagtcttacgttcagaattggtctacgagggtggtgtaaaggaatttgtaaagtatctagatcgatcaaaaacctctttgatccctgaacccatatttattacgggtgaaaaggatgaaattggtatcgaagtagcaatgtggtggaatgacagttaccatgaaaatgttctgccttttacgaataatattcctcaaagagatggaggagcccatactgcaggtttccgtggagcactgactagaacaatcaatagttatgcacaagcaagcggtatcgcaaaaaaagaaaaggtaaattttactggtgacgacgcgcgcgagggtttaacatgcgtattgtctgtaaaagttccagacccaaagttttcaagccaaactaaagataagttagtaagctctgaggtaagaccagcggtagaaagcttgatgaatgaaaaattgggagagtggtttgaaagaaaaccccacgaagcaaaactatag

SEQ ID NO: 294751 - DNA, 763 bp, Unknown
  Bacterial polypeptide expressing nucleotide sequence isolated from the Sargasso Sea
accggtacaaaggagaattatctatgccatgtctgaattagggctaagttcagcagctaaatataaaaagagtgccaggacggtaggagatgtaataggtaaatttcatcctcatggtgatacagccgcttacgaagcaatggtccttctatctcaatctttctcaaccagatatcctcttattgatggtcaaggcaattggggctccatagatgatccaaaatcttttgctgcaatgagatataccgagtgccgtctctcgccatatgcaaaaagtcttttagaagagcttgggcaaggtactgtagattgggatagtaacttcgatggaacacttctagaacccactgtattgccagcgaggttaccaaatctattattgaatggtgctacgggcatagctgtcggaatggcaactgacatacctcctcacaacctaaatgaagttgtaaacgcatgtattaaaatcctagatgaacctaaagttactgttgaagaactatataaaattattccaggacctgatttcccgactcaagccgagataatttcatctgaagaagatctcaaggaaatttatcaatcaggtagaggatccgtaagaatgagatctacttatagtattgaaaatagtgaaattgtcatcactgccttacctcatcaaacatcaagttccaagatattggaacaaatagcacttcaaatggacgcaaagaagcttcccatgatagtagatttaagagatgagagcgatgaagagaac

SEQ ID NO: 294752 - DNA, 919 bp, Unknown
  Bacterial polypeptide expressing nucleotide sequence isolated from the Sargasso Sea
atgactaaggagaaattcacttccatatcgctgcaagaagaaatgcaacgttcctatttagagtacgcgatgagcgtaatagttggacgtgctttgcctgatgcaagagatggtctgaaaccagtccaaagaagaattcttttcgcaatgcatgaattaggtcttactccagatagaccatttagaaaatgtgcaagagttgttggagatgtactgggtaaatatcatcctcatggggatcaagcagtatacgaggctttagttagattagttcaaaatttttctacaaaatatccaactcttgatggacacggaaattttggatctgttgataacgatccaccagctgcaatgagatataccgaaacgcgtctagctccaatagcgcatgaatgttttcttgaggaaattggatctgatacggtaagttactctaataattttgacggttctcaacaagaaccagacattttacctgcacagttaccttttttgttattaaatggttcttcaggaattgccgtcggaatggctacaaatatccctccacataatttaggagaaatagttgatggcttaattgctttaataaaagataaagaaataagtgactcaaaattatctaggattatattaggtcctgattttcctactggaggcgaattaatttataatgaagcaattaaggaagtttatgaaagcggaagaggatctataacaataagaggtgtaattaaaaatgaagaaatcaatttgggaaaagggaaacataaaagaaatgcactagttatatcggaacttccttaccaaataagtaaggccggctggattgaaaaacttgcagaattagtcaatctgggaaaaattaatggcatatctgatattcgagatgaaagcgatagagatggtatgagaatcg

SEQ ID NO: 294753 - DNA, 436 bp, Unknown
  Bacterial polypeptide expressing nucleotide sequence isolated from the Sargasso Sea
atgaaagctgcttatctcgattatgccatgagtgtaatcgtcagcagagcaatacctgatttgcgcgatggattaaagccagttcatagacgaatactttatgcaatgcatgagtccggtaattcaaaagacaagccctaccgaaagtctgcgcgtcctgttggagacgttatgggtaaatatcacccacatggtgacagcgccatttatgactcattggttagaatggctcaagatttttccatgtcgcttcctcttttggacggtcaaggcaattttggatcgatggatggagactcacctgccgcaatgcgttacaccgaagttcgcatggagacagtggctaattttctattagcagatattgaaaaagataccgttgacttccaagataactatgatggtaaagataaagagcccgtggtcttccagcaag

SEQ ID NO: 294754 - DNA, 855 bp, Unknown
  Bacterial polypeptide expressing nucleotide sequence isolated from the Sargasso Sea
tttgcctgatgttagagatggattaaagccagtacatagaagaattatttatgcaatgtataaaggtgggtttgattggtctaagcaatacagaaaatctgcaaggatagttggggatgttattggtaaatatcatccgcatggggaccaagccgtatacgatgctttggtaagacttacacaaaatttttcaatgagcttaccattaattgatggacaaggtaattttggttctattgatggtgaccctccggctgcaatgagatatacagaaactaaattagcaaaagtttctcaatatttaattgatgatatagaaaaagacacagttgacttcagaaataattatgatgaaacagaaaaagaaccaaccgtcttaccgtctcaatttccaaaccttttagtaaatggagcaggtggtattgctgtaggaatggccacaagcatccctccacataacttaggagaaattattgatggtgcagttgcatttataaaaaatagagacattactatttctcagttaatgaaaaaaattcctggtccagattttccaactggaggaattattattaatcaagataatttaaaacagggatataataaaggtagaggatcaatcaaaattagaggtgaaatcgaagaagaaagtttaaagaacggaaaagaacgattggtaattaaatcgataccatatcaagttaataaatcggttttaaatgaaaggatagcagaattagctagagataaaaaaattgaagggataagtgatattagagatgagtcaaatcaccaaggagtcagagtagtattagatttaagaagaaatgttgaaccagagactgttaaaagaca

SEQ ID NO: 294755 - DNA, 724 bp, Unknown
  Bacterial polypeptide expressing nucleotide sequence isolated from the Sargasso Sea
taatattgcccaaagggatgggggaacgcatcttgctggttttagaggagctttaactcgttctatagtaaattatataaatcaaaaaattaaaaatagtacaaacatttcaggtgatgacgcacgagaagggcttacttgtgtaatttcagtgaagttacctgatccaaagttttcaagtcaaactaaagataaattagtttcttctgaggtcagacctgtagttgaatcagtgagcttagaaaaaatagaacagtggatagaagaaaatcctaatgaaattaaaaaagtagtcgagaaagttgtagaagcttctgatgctagagaggcagctagaaaagcaagagaacttactaggagaaaatctgggctagaaaattcatctttacctggaaagcttgcagattgtcaggaaaaaaatccagaattatcagaactatttattgtagagggtgactcagctggaggatctgctaaacaaggtagggataggaaaaatcaagcaattcttccacttagaggtaaaatattaaatgtcgaaagagcaagtcctaaacaaattcttacaagtaatgaaataggtgttcttattactgcaattggagctggagttggtaacccaactggcaatgatgagcaagataaatcagaaggtaagtttgatatagataaaatgaggtatcataaagtaataataatgactgatgcagatgtagacggaagt

SEQ ID NO: 294756 - DNA, 928 bp, Unknown
  Bacterial polypeptide expressing nucleotide sequence isolated from the Sargasso Sea
agaatgtttcaagaattttcaatgagtttaccactagttgatggacaaggtaattttggttctatcgatggagatccccctgctgcaatgagatatactgagactaaactagctaaagtttcacagtttttaattgatgatatagaaaaaaatacagtatcttttaaaagtaattatgatgaaacagagcaagaacctgttgtattacctgctcaatatccaaatcttttagtaaatggtgcaggcggtattgctgttggaatggctacaagtataccacctcataatttaggtgaggttgtagacggaactttagctcttattaaaaacaaagatattaaaataaacgaattgatgaaacatattcctggaccagattttccaactggaggattgataattggtaaagatataattaaacaaggctatagaactggaagaggatctttcaaaataagaggtgaaatttcagttgaaaatctaaaaaatggaaaggatagactagtagtttcatctataccttatcaaatcaacaaatctaatttaaatgagagaatagcagaattagtgagagataaaaaaatcgaaggcataagcgatataagagatgagtctaatagcgaaggtataagagtgtctatagacctgagaagaaatgttgaaccagaaactgttaaaagacaattgtataagtatacttcaatagagtcatcatttggttttaattctttagcaattgttgatcaaaaaccaaagacttgtaatcttaaagattttttagaaaattttttaaaatttagagaagatgtagttataaaaagaactaaatttgatctaaaaaaagcagaggaaagagttcacattttactaggtttatctgtaagtgttgaaaatattgataaagttataaaaataattagatcgtcaa

SEQ ID NO: 294757 - DNA, 802 bp, Unknown
  Bacterial polypeptide expressing nucleotide sequence isolated from the Sargasso Sea
aatggttgattttaatagagacaacacactcccaagagatattgtagatgaaatgagagagagctatctaaactattctatgtctgtaatagtttctagagctctaccagatgttagagacgggttaaagccagtgcatagaagaatattatacggcatgagcgaacttggttctagttggaatagaccatataaaaaatctgcgagaattgttggcgatgtgcttggaaaataccacccacatggagacagctcagtttacgacgcgctcgttagaatggcccaagacttttcaatgagatatgaacttgttgatgggcaaggaaactttggttctattgatggtgacaacgcggctgctatgagatatacagagtcccgaatgacaaaactatccagcgagatgttaaaagacttagacaaagacaccgttaattgggagccaaactttgatgaaaccttaaaagaaccctcagttcttccatcttctgttcctgccttattgataaatggatctgagggaatagctgttggaatggctacaaaaatcccaccacacaacttaatggaaatagttaatggaattgttgcgcttatagaaaacaccgacatatctactgaaaagcttatggaacacattaaaggtccagactttccaacagctggattaattatgggaatggatgggttgaaaagtgcttataaaaccggccgaggcaaaatcaagatgcgagccagagcacacattgagtcaaataaaaatgaaaaaagcagtattgttattacagagggtccatatcag

SEQ ID NO: 294758 - DNA, 883 bp, Unknown
  Bacterial polypeptide expressing nucleotide sequence isolated from the Sargasso Sea
taaaacctgggttcacaggagaataatttacgcaatgcacaaaggtggttttgattggtcaaagcaatttagaaaatctgcaagaatagtaggagatgttattggtaagtatcatccacatggtgaccaagctgtttatgatgctttggtaagaatggttcaggacttttcaatgagcttacctcttatagatggacaagggaactttggttctattgatggagatcctccagcagcaatgaggtatactgaaactagactttcaaagatttctcaatttttaattgatgatattgaaaaaaatactgttgaatttaaaaataactacgatgaaactgaaagagaacctacagttcttcctgcacaatatccaaatttacttgtaaatggagcaggtggaatagctgtaggtatggcaacaagtattccaccacacaacttaggtgaaataatagatggaacacttgcattaattaataataaagaaataaaaattaatgaattaatgaagcatatacctggaccagactttcctactggtggaattatcattggaaaaaaaattattaaagaaggctacaaaactggcagaggatcttttaaaataaggggtgaaatttcagtcgaaaatttaaaaaataaaagagatagattggtaattacctcaataccgtatcaagtaaataaatctgtgttaaatgaaagaattgccgatttagttagagaaaaaaaaattgaaggtattagagatataagagatgagtcaaacagagaaggaattagagttgctatagatttaagatcaggtgtggagccagaaacaattaaaagacaactttttaaatatacatctgtagagagttcttttggatttatactctag

SEQ ID NO: 294759 - DNA, 439 bp, Unknown
  Bacterial polypeptide expressing nucleotide sequence isolated from the Sargasso Sea
attataataatgacagatgctgatgtcgatggttctcatataaggactcttcttttaacttttttctatagacaaatgtatgaaatagtagataaaggccatatttatattgccttgccacccctttataaactttcaaaaggaaaggaatttttttatgcctctaatgaagaggaaaaagataaagctgtaaaagaactttcaaaaaatggtaccaggggcctagaagttcaaagatataagggcttaggggaaatgaatccggaacagttatggacaactacaatggatcctaataatagaagaatgatgagagttgatatcaaagatgttgttgacgcaaatgaatcatttgaaattttgatgggagacgatgttgagccaagaagagagtttatagatgcaaatgcattgtctgtaactgacttagatatttaaa

SEQ ID NO: 294760 - DNA, 820 bp, Unknown
  Bacterial polypeptide expressing nucleotide sequence isolated from the Sargasso Sea
ggcgcgatggagcgaatattttgctaaatttgcacatggagaaacaactgagcacttaaaaaaaataaaagatgctgtcgaggagcgtggtaccgaggttaggtttttagcctctactgagactttttctaacctggactattcttttgaagttcttgaaaagcgtcttcgtgaattagccttccttaactctggtgtaaaaattattcttgaggacgaaaggcctactgaagtcctacgttcagaattggtctacgcgggtggcgtaaaagaatttgttaagtatctagatcgatcgaaaacctctatgattccagagcctatatttattacgggtgaaaaggatgaaattggtatcgaagtagcaatgtggtggaatgatagttaccacgaaaatgtcctaccttttacaaataatattcctcaaagagatgggggagcccatactgcgggtttccgcggagcgctgactagaacaatcaatagttatgcacaagcaagcggtattgcaaaaaaagaaaaggtaaactttactggtgacgacgcgcgagaaggtttaacatgcgtgctgtctataaaagttccagatccaaagttttcaagccaaactaaggataagttggtaagctctgaggtaagaccagcagtagaaagcttgatgaatgaaaaattaggtgagtggtttgaagaaaacccaaacgaagcaaaacttataattggtaaaattattgaggcagctcttgctcgcgaagctgcaaggaaagcacgagagctaacacgaagaaaaacagctttagatgtaaattatcttgcaggaaag

SEQ ID NO: 294761 - DNA, 832 bp, Unknown
  Bacterial polypeptide expressing nucleotide sequence isolated from the Sargasso Sea
aaaaatgaaaaatattataaaagatgatattaataaagttattaaaagcaggtatttatcctacgcagtatcaacaattatttcaagatctcttcctgacttaagagatggtctaaagcctgtacatagaaggattatttattctatgtatttacttaaactttttaataattcttcttttaaaaaatcagcaagaatagttggagatgtaatgggaaaattccacccgcatggtgatcaagctatttatcaaagtttagttaggatggctcaagatttctcttctcgagttactttaatagaagggcaaggcaattttggaaatatagacggcgataatgctgcggctatgagatatactgaggctagattagaagaaatcactgaacttttttttgatggtatagaagaagactctactacatttagcgataattatgatggtcaaaatttagaaccagatgtcttgccatcaaaattgccaaatattttattaaatggctcaacagggattgcggtaggaatggcaacaaatattccacctcataatttaatagaattaaacgattgtataattaggttaattaaaaaaccaaatactcctgattcagagcttttaaagatacttaaagggccagatttgccaactggtggtgagataatattaagcaatgaagaaaagaaaaaaatttataagaaaggatttggctcatttttaattaattcaaaatggcatgatgaaaaaattaaaaatggtatgtatgaaatagttatttctgaaataccttttcaagtaaataaagttaaaattatcgaacaattagctaattgt

SEQ ID NO: 294762 - DNA, 570 bp, Unknown
  Bacterial polypeptide expressing nucleotide sequence isolated from the Sargasso Sea
aatgaatcaaacttattcttcagaatcaataaaagtattaaagggcttagaggcagtaagaaaaagacctggaatgtacattggagatactgatgatggctctggcttgcatcaaatgatttatgaagttgttgataactctattgatgaatcactagctggctattgtgataaaattgaagttatattgaattcagatggcactgttacaattttagacaatggcagaggagtaccagttgataatcataaagaggaagggattccagcagctcaattaattatgacagagctccatgctggtggaaaatttgaccaaaatagctacaaagtttctggtggtttgcacggtgtaggagtttctgtagttaatgctctttctgagaaattattattagaaattaatcgcgatgacaagattcataaaatggcatttgctcatggagctgttacagattcactaaaagctgttggggactctgaagtaattaatggaaacaaatatacaggaacgaaaataacttttttaccatcaaacaaaatttttaaaaatattgagttttatttttc

SEQ ID NO: 294763 - DNA, 887 bp, Unknown
  Bacterial polypeptide expressing nucleotide sequence isolated from the Sargasso Sea
tacacatttattaggttttagagctgcgcttactcgagttataaacaaatacgcttcagagcaaaatttactaaaaaagagtaaagtttctctttctggtgatgatgttaaagaaggtttaacatgtgtattatcagtaaaaattcctgacccaaaattttcatctcaaactaaagataaattagtttcgtctgaggtaagaaatattgttgaaactataataagcgaaaagttatcaatatggtttgatcaaaatccttctgtatcaaaaataattttaacaaaaattattcaagcagctgttgcaagagatgttgcaagaaaagcgagagaaaatgtgagaagaaaaggtgctcttgaacttacagggctgcctggtaaattggcagattgtcaaaattctaagcaagaaggaaccgaattatttattgtagagggagactcagctggtggttcagccaaacaaggaagaaatagagaaaaccaagcagttttgccacttagaggtaaaattcttaatacatttactgaattaaatggatccaagaaaaatggaagttcaaacgatcttagaaccaaagctctttcaaagatgatttcatcaaatgaaattatcacattaattaatgctctaggactagacccaaagaatgaagaaatagacttaaaagatttaagatatggaaagattataattatgaccgatgccgatgttgatggatcacatattagggcattattattaactttttttaacaataaaccatttaataaattaatcgagcaaggtcatgtttacttggcacaaccacctttatttaaaattaatagaggatcaaaaggaatctatataaaaaatgaaaaggaacttgagaattatatttaaa

SEQ ID NO: 294764 - DNA, 938 bp, Unknown
  Bacterial polypeptide expressing nucleotide sequence isolated from the Sargasso Sea
ggatccttccaaagctgaattattccttgttgagggagactcagctggaggttcggctaaacaaggcagagatagaggaaatcaagcaattttaccactaagaggtaaaattttaaatgttgaaagagcaagaatagataaaatgttgtcttctgcagagattggaactttgatcactgcaataggcgctggagtaggtaattcagaactagatattgttaaggctagatatcacaaaataattattatgaccgacgcagatgttgatggaagtcacataagaacattattgttaactttcttttttagacatatgagacctttagttgatgctggatttttgtatatagcacagccaccactttataaggtaaaaattggcaagtcagaggtatatttaaaagaccaatcttatttagatgagtttttgataaataacggtattaaaaattgttccttaaagatttctgaaacagaaagtattattgataaagatcttaaattattattggatcagtcagtcttagctaaaaagtatatatactcattatctaaaaaaattggaaatgaagaaatactttctcatcttacagtacttgggttttttaatagcaagttttttgaaaatgaagaagaagttaaaaaaacagaagaatatttcaatgagagactttcatctaactcagaaaaatggaaaatagatttagataggtctgaaaaagtaattaaatttactagagagtttagaggaataattgaaaagtttttaatgaaacaagactatcttaattatagtgagtgtcatgagcttagtagaatgcatcaagaattaaaatttttttctgaatataatgtaaaaatttttatagaagatgtagagagtaatgtaaattgcccactagacttagttgatataatcattgaaaaaggtaaaagag

SEQ ID NO: 294765 - DNA, 456 bp, Unknown
  Bacterial polypeptide expressing nucleotide sequence isolated from the Sargasso Sea
tatggcaaaaaataacacaacttaccaggcagattccataaaagttcttaaaggtttggaagctgtaagaaaaagaccaggaatgtatattggtgataccgacgatggaactggtttacatcacatggtatatgaggttgtagataactcaattgatgaagccctagcaggatattgtagaaatataatagtagatattaataatgatggttcaataaccgttaaagatgatggaagaggaatacctgtagatattcatagaggagaaaaaaaatctgcagcagaagttataatgactcaattgcatgcgggaggaaaatttgatcatgaatcttataaagtttctggtggacttcatggagtaggagtttcagtagttaatgctctttcagagaaactaaatttatttatcgaaagagatggaaataaacaccacatagaatttaaaaatggaga

SEQ ID NO: 294766 - DNA, 856 bp, Unknown
  Bacterial polypeptide expressing nucleotide sequence isolated from the Sargasso Sea
aaaattaagagaaaaaaataatgctaaactgaatggatcaataagttgggtatgtaattggagtttaaattatacccaattttttaaatcttattgtaacttgatacctacaactgatgggggaacccacgaaaatggattctggagtgcaatattaaaaggaataaaatcatatggtgaattaattggaaacaaaaaggtttctcaaataacacgagacgatataagtgcaaatttatgtggaataatttctatctttataaataatccaactttttcaggtcaaacaaaagataaattaaccactcaggaagttttaaaatcagttgaaattactttaaaaagcttatttgagaattggttaaccaatgatcctaaaaatgcaaatcagttaatagagaattttatagctaaatcagaagaaagaattcgtaaaaaaaacgaaaaggatactttaagaaaatctgcagtaaaaaaactaaggcttcccggaaaattatctgattgcttacaaaatagcaaacaaggatctgaactatttattgtagagggtgatagtgctggaggtagcgcaaaacaagctagagatagaaattttcaagctattttaccattaaaaggcaaaatcttaaatgttatgagctcaacaactgaaaaaatgttacaaaatcaagaaataaatgatttgtgtaaatgtttaggcgttaatgtcggtgataaatttaattatgaaaatttgcgatatgaaaaaattataataatgaccgatgcagacgttgatggtgcccacatttcatctcttttattaacattcttttttacacaaatgccagagttaatgttaaaaggaaattta

SEQ ID NO: 294767 - DNA, 544 bp, Unknown
  Bacterial polypeptide expressing nucleotide sequence isolated from the Sargasso Sea
attgataaagttttgtcctctgcagaaatcggaacattggttaaagctatgggttgtggcatggggaccgaagacttgacatttgataaacttagatatcacagaataattatcatgaccgatgctgatgttgatggctcacatataagaactcttttactaactttcttttatcaacagtactatgatattttagaaaaaggtcatgtatatatcgccatgccccccctttataaaattaccaaaggtaagtcctttgtttatgcgtctgatgaggatgaaaaagataaggctataaaagatttttcaaaatcgggttcaaagggtattgatgtccaaagatataaaggacttggagaaatgaaccctgatcaattatgggaaacaacaatggatcctgaaaacagaagaatgatgagggtaaacattaaagatgccaaagatgcatcagatatgtttgaaaccctaatgggagacgatgtagagcctagaagggaatttattgaaacaaatgctctatctgtttcaaacttagatatttagt

SEQ ID NO: 294768 - DNA, 897 bp, Unknown
  Bacterial polypeptide expressing nucleotide sequence isolated from the Sargasso Sea
gatgttatttggtaaatatcatcctcacggtgatcaagctgtttacgatgcattagttagaatggttcaagatttttcaatgagcttgcctttgattgatggtcaaggaaattttggctctgtagatggtgatcctcctgctgcaatgagatacactgaaactagattagcaaaaatttcacaaaatttaatagatgatatagataaagacactgttgaatttaaaagtaattatgacgaaactgagaaagaacctgaagttttgcccgcccagtatccaaacttactggtaaatggtgctggaggtatagctgttggaatggcaactagcattccacctcataatttatcagaagttattaatgctactttggctcttatagagaataaagatattaaaataaatgaattaatgaaacatataccaggacctgactttccaacaggtggaacaataattggtaaagatattattaaaactggatataaaaccggcagaggatcttttaaagtaagagggaatgtttctatagagcaacttaaaaatggtaaagagagactagtcatcaactcaattccatatcaaatcaacaaatctgtcttaaacgaaaaaattgttgaattaattagaaataaaaagatagagggaataagcgacataagagatgagtcaaatagagagggaataagagtagcaattgatttaaaaaagaatgtagagcccgaaacagttaagagacaactctataaatatacttctttagagtcttcatttagttttaatacattagccatagtagatagaaaaccaaaaaactgtaatcttaaagatttcctagagtcttttcttaaatttagagaaaatgtggttgttaaaaagacaaaatttgatctaaa

SEQ ID NO: 294769 - DNA, 854 bp, Unknown
  Bacterial polypeptide expressing nucleotide sequence isolated from the Sargasso Sea
gtttttgaagttgttgacaattcaattgacgaggcccttgcaggccattgcaagaatatagcagttacaataaattctgataatactgtgacagtagaggatgatggtagaggaattccagttgacatgcacaaaggagaaaaaatgtcagcagctgaagttataatgacacaattacacgccgggggtaaatttgaccatgactcttacaaggtgtccggagggttacacggggttggagtttcagttgttaatgctttatctgagaaattatcacttaatatttatcgtgatggtaatgaatatgaaattaattttaaagatggaacttcaattaaaccgttaaaaaaaattggtaaaacaaaaaaaaaaggaactaaaataaattttttgccatctaaaaatattttttcttctataaaattcagttcatctattttagaaaaaagaattagagaacttgcatttttaaataaaggcatctcaatatctttaattgatgattctcaaaagaaaaaaaaggaatttgttcatagatacgatggaggaataatcgaatttgtaaggcatattaataagaaaaagcctattttaattaataaaaatgagaaagaaatctttaaaaaacctgtttatgtcacttcaactaaaaataacgtaatagtcgagtgctcattcgaatggaatgctggatacgcagaagaagtattaccgtttacaaacaatattccccaaaaagacggcggaacgcatttgttaggttttagaagcgcccttacaagagtaattaataaatactcatctgatagaagtaaaaaaagtaaagtctcactatctggtgaagacatcaaaga

SEQ ID NO: 294770 - DNA, 870 bp, Unknown
  Bacterial polypeptide expressing nucleotide sequence isolated from the Sargasso Sea
ctaagtttgcgaatccataaaaatggaaacatttacgaacaagattatgctcatggatctccaaaaaaaccattaaagaaaggcgccaaaactaagagaacaggaactaccattacttttcagccaagcaaaaaaactttttcaaacacttcatttagctatgaaaccctatctaaaagactcagagaaatgtcctttttaaatcctggtctaactattaatctcaatgacgaaagaaccaataaggccgactcttattgttatgaaggcggcttaaaagattttgttcgtcaccttaataaaccccaaaagccaacgcatcaaagcattgcatatataaacaagaaatctaggaaagatggagatatcgaggtagaggttgccatacaatggaatgaatcttatcgggaaaatacgttttgttttgcaaacacaattcgacagagagacggtgggacccaccttgctggttttagaggggcattaacaaggacaatcaacacttatatcgataaggaaattgcaaaaaacgaaacgtctgtaacgggagatgattgtcgagaagggatgacagcaatcatctctgttaagcacccggatccgaagttttcttctcaaaccaaagataagttggtttcttctgaggttaaaggcgtcgttgaatctgcagttaataaacaccttaaggagttcttagaggaaaaccccgtagaagcaaaaattatagttggaaaaatattagacgcagctcgtgctagagaagccgcaagaaaagcaagagagatgactagaaaaaaaggcgctctcgatattgcgggattgccaggaaagcttgctgattgccaagaaaaagacccctcactgagcgag

SEQ ID NO: 294771 - DNA, 850 bp, Unknown
  Bacterial polypeptide expressing nucleotide sequence isolated from the Sargasso Sea
aaatttttctatgagattagagttaattgatgggcaaggaaattttggatctttagatggagatcctcctgctgcaatgagatatactgaggcaagactgtctaagatatctgaaaaaattgttacagatttagaaaaaaatactgtaaattttcaacctaactatgatgatacaaccaaagaaccgagcgttctacctgcgcaatatcctaatattttagttaatggagcttctggaattgctgtagggatggctacaaatattgctccacacaacctaggagaagtaatagatgctactttattttgcattgataatccagattcttccatagatgatttgaataaatttattcttggcccagattttcctactgggtgtcaaataattgggaataaaggaattaaagatgcttttaattctggaaaaggagcatgcatattaagagcaaaaacttcaattgaaaatttcaaaaaagatagagaagcaataatcataaatgaaattccctatcaagttaataaatctaaattaattgaaaaaatagctgaaacagtgaaaaataatattattgaaggaatatctgaccttcgagatgagtctgatcgtaatggagttagagtagtgatagaattaaaaaaagatgtagatactaatgtagtattaaataaactttataaacatacattacttcaaactacttttaattctaacatgctagcccttaataaaggcaaacctgagcaaatgaatttaaaagatatattgctttcgtttatagattttagagaggaaattgtaaccaaaagaacagtatatgatttaaataaagcaagagataaagctcac

SEQ ID NO: 294772 - DNA, 857 bp, Unknown
  Bacterial polypeptide expressing nucleotide sequence isolated from the Sargasso Sea
caatttgagggacaaaccaaaaccaagcttggaaatggtgatgtaaaaggaattgttgataaagctgtttatgagggtattttagatttcttagagcaaaacccatctattggtagaaggataatagaaaaagcgctgttagctgcacgcagcaggtcggccgcaaggaaagcgcgtgaattgattagaagaaaaagcgcgctaggcggatcctctttacctggaaaactatccgattgttcgaaccgcgaccctgttttttgtgaactatatcttgttgagggtgattcagctggggggtctgcaaaacaaggaagagaccggagaacacaggctatcttacccttaaggggaaaagttattaactctgaaaaagcacgaattgataaattactatcaaacaacgaggtccagtccatgataaccgctcttggtgctggttttggtggctctgatgatgagtctggtgaaaaatcaccaggcgattttgatttggagaaactacgctatcacaaaataatcataatgacagatgcagatgttgatggttcacatattcgcacccttcttttaacattcttttataggaaaatgaaggaggtaatagatggggggtatttatatcttgccctccccccactatatcgcgtctcacaaggaaaaaaagaatcttatgcctacgatgataacgagcgagacctgttaatcgaaagaatgaaaaaagacaataaaaacacaaaagtgggtatccaaagatataaaggtttaggtgaaatgaatcccggccaactatgggaaaccaccatggatccagaaaaaagaactttaatgaaagttacggttgagagcgcagcaga

SEQ ID NO: 294773 - DNA, 880 bp, Unknown
  Bacterial polypeptide expressing nucleotide sequence isolated from the Sargasso Sea
tatgggtgaaataactgcaaaagagattgttccaatagatatagaaaaggagctgaagcaatcctatttagattatgcaatgagcgtaatagtaggcagagccttacctgatgctagggacggtctaaaacccgttcataggcgtgctttatacgctatgcatgtcttgaataatgattatggtaggccacacaaaaagtctgcaagaatcgttggggacattattggtaagtatcatcctcatggagatggtgctgcttatgaaaccattgtaagaatggctcagtggtggtcattaagataccctttggtagacggacaaggaaattttggttcgatggatggagatggaccagctgctcagagatacacggaagtcagaatggcaaagatctcccaagaactattagctgatcttgataaagagactgtaaattttgttgagaattatgatggcacagaaacaatgcctgaagtactgccaacaaaaatacctaatatgcttgttaatggttctgctggaatagcagttggaatggctacaaatatggcacctcataatctaagtgaaactctctcggcctgcttagcttttattgaaaatcctgagatttctacttcagaattaatggaatttattcccggtccagatttcccaactggcgggataataaatgggagagctgggatagttagtgcttacgaaagtggaaaaggaagagtgaagattagggctaagactcattttgaagatgaagataaggataaagccaagattgtaattactgagatgccttatcaagttaataaatctaagttaattgaaaagatagctgagttctctagagataagaagatagaaggagttagagatataagg

SEQ ID NO: 294774 - DNA, 868 bp, Unknown
  Bacterial polypeptide expressing nucleotide sequence isolated from the Sargasso Sea
aatgacaaaaaataacataaatacttatcaagcagactccattaaagttttaaaaggtcttgaagcagtaagaaaaagacctggcatgtatattggtgatacagatgatggaactggtttacatcacatggtctatgaagttgtagataattcaattgatgaagcattagcaggtcattgtaaaaaaattgaggtaagtataaattcggatgggtcggttacagttgaagatgatggaagaggaataccagtcgactttcataaagaagaaaaaaaatcagcagctgaagttataatgacacaactgcatgctggtggaaaatttgatcacgattcctataaagtttcaggaggtctgcatggtgttggagtttcagtagtcaatgctctttcacaaaaattagagttatatgttgaaagagatggaaaaaaacattttgtagagttttttaatggcgaaaccaaaataccactaaaagtaataggcaagtcaaagaatactggcacaaaaatcaattttttaccttctaaagatattttctcatctacaaaatttagtttttcaattattcaaaaaagaatgcgagaattagcttttttaaataaaggaattaaaatcatacttaatgacttaactcaaaaaaaaattaaaactcatgaatttaagtttgagggtggtataaatgagtttgttgaatttttagatgaaaaaagagaaaaattaaaaaataaaaatgataatgatttatttagaaagccaatttatatagagggaataaaaagtaatattgatgttcaatgttcattaaaatggaatgcaggatataatgaggatgtctatccttatactaataatatttatcaaaaa

SEQ ID NO: 294775 - DNA, 283 bp, Unknown
  Bacterial polypeptide expressing nucleotide sequence isolated from the Sargasso Sea
atgcctaaagacaacgcttacgactcatcgaaaatcaaggtactaaaggggctagaggccgtcagaaaacgcccgggaatgtacataggagacaccgaagacggaacgggtctgcatcatatggtgttcgaagtcgttgacaatagcatagacgaggctttggcagggtattgtgatttaataaaggtagtcattcacgctaacgagtcaatatccgtctctgataacggcagaggaattccagttggtattcacgaggaagaaggaaggtcggcagcagaag

SEQ ID NO: 294776 - DNA, 837 bp, Unknown
  Bacterial polypeptide expressing nucleotide sequence isolated from the Sargasso Sea
tatgtctgatattatagactccgataactcaggattaagcgaagataacgatcgaattattcatactgacttaagaaatgaaatgtctcgctcttatttagagtatgcaatgagcgttatcgttggtcgtgctcttccagatgctagggatggattaaaacctgttcatagaagaattctttatgcaatgtatgaacttggtttgactagcggtagaccatacagaaaatgtgcaagagttgttggagaagtacttggtaaataccacccgcatggagatacagctgtttatgatgctctggtcaggatggctcaggatttctctatgaggatgccactaatagatggtcatggaaactttggttctgtagataacgaccccccagcagcgatgagatatacagaatctcgtttacagtctcttacagatgaaagtttactagaagatattgaatctgaaactgttgatttcgctgataattttgacggttcgcaacaggagccaacagttttaccggccagaatccctcaactacttctaaatggatcatctggaatagcagtaggaatggcaactaatattccacctcataacttaggagaattaattaatggtcttaaaacaataattaaaaatccttcaattgaagatagagaactttttgaaataataaagggtcctgattttcccactggtggccaaatcttaggcagagatggtattagagaaactttcaagacaggaagaggttcaataactatgagaggtgtagcaaatattgagcaaattaaatccactggtagggcagagaaagatgcagtaataattacagagct

SEQ ID NO: 294777 - DNA, 439 bp, Unknown
  Bacterial polypeptide expressing nucleotide sequence isolated from the Sargasso Sea
atggcaaaaaataatacaaattatcaagcagattcaataaaggttcttaaaggactagaggccgtaagaaaaagaccaggaatgtatattggtgataccgacgacggtactggtttacatcacatggtatatgaagttgtagataattctatagatgaagctttagcaggctattgtaaaaatataattgttgatatcaataacgatggttcaatcacagtacaggatgatggtagaggaatacctgtagatattcataagggagaaaaaaaatctgcagcagaagttataatgacacaattgcatgcaggaggaaaatttgatcacgactcctacaaagtttctggtggacttcatggagtaggtgtttcagtagtgaatgcattgtcagagaaattagatttatttatagaaagagatggaaaaaaacattttatag

SEQ ID NO: 294778 - DNA, 823 bp, Unknown
  Bacterial polypeptide expressing nucleotide sequence isolated from the Sargasso Sea
gggtttacctggaaaattagcagattgccaaataggaaagcaagaaggaacagaattgtttattgttgagggagattctgcaggaggttctgcaaaacaaggaagaaataggtcaaatcaagcggttctacctctaagaggaaagattttgaatacttatgttgaggatttcaaagttaaacaaaatggcaatggaaatggatcagataaaaggactaaggctttgtcaaaaatgatatcttcaaacgagatagtgacactaatcaatgcattaggcttagatccaaaagtacaagaaatagatttaaaagatttaagatacggtaaaataataattatgacagatgcagatgttgacggttcgcatatcagagctttattattaaccttttttaataatgagccatttaataaattaattgaaaatggacacatatatttagctcaaccaccgttatttaaaatcaataaaggcactaaaagtatttatattaaagatgaaaaggaattagaagattatattttaaaaaacaacaacgaaattaagaaaataaaaaaaggaacaaaagagttcacagaagctttagacttagaaagatctaaaatgaatatccaaagatttaaaggtttaggtgaaatgaatccagaggaattgtggagcactacacttgatccagaaactagaaatttacttcaagtaaggtattctaaagatcttaaaaaagaccaaagtttaatacatacacttatgggtaacgatgttgcacgaagaaaggattttattgtttcaaatgcaattaatgttcagaatcttgacatataa

SEQ ID NO: 294779 - DNA, 919 bp, Unknown
  Bacterial polypeptide expressing nucleotide sequence isolated from the Sargasso Sea
atttgttattatcttgataataagaaatcaatcttaatcaataaaaatgaaaaacaaacttttaaaaaaccaatatatttaagtggtgaaaaaaacaatgtagttgttgaatgttctttgcaatggaatgccggattttcagaagaagttttagcttttacaaataatattaatcaaaaagatggtggtacacacttgcttggttttaggagcgctttaactagaattataaataagcatgtttctgagaaaaatcttaataaaaagaataagctgaatatcagtggggaggatataaaagagggattgacagcagttttatcgatcaaaatgccagatccgaaattttcttcacaaactaaagacaaattagtttcttctgaaattagaatgattgttgagacaattgttagtgacaagcttacaatgtggtttgatcaaaatccctcagtaatcagggtggttttagacaagattttacaggccgccatggctagagatgtagctagaaaggctcgagatagtgttagaagaaaaggttctttagaattatcaggtcttccaggcaaactagccgattgtcaaatatcatcaatggaaggcactgaattatttatagtagagggagactcagcgggaggatctgcaaaacaaggaagaaaaagagagtttcaagcagttcttcctttaagaggtaaaattctaaatacatttattgatgaaagtaaaaaaagaaataatggaggaaatggggttattgaaaataaaacgttatctaaaatgatgtcatctaatgaaatcgtaactttaataaatgctttaggaacgggatcaaaagattttaatatcgaagacctaaggtatgaaaaaatcattatcatgactgacgcggatgtagacggatcacatataagaactt

SEQ ID NO: 294780 - DNA, 184 bp, Unknown
  Bacterial polypeptide expressing nucleotide sequence isolated from the Sargasso Sea
atgacaaaaaataattcaaacaattaccaagctgactccattaaagtcctaaaaggtttagaagctgtaagaaaaagaccaggtatgtatattggtgatactgatgatgggaccgggttacatcatatggtttacgaggttgtagataattcaattgatgaagctctagcgggtttttgtaaaa

SEQ ID NO: 294781 - DNA, 577 bp, Unknown
  Bacterial polypeptide expressing nucleotide sequence isolated from the Sargasso Sea
aatgaataaaaaaaataataatacatatcaagcagactctattaaagttttaaaaggtcttgaagcagttagaaaaaggcctggaatgtatattggtgatacagacgatggaactggcttacatcacatggtgtacgaggttgtagataactctattgacgaagcattagcaggtcattgtaaaaaaatcgaggtaaacataaattctgatggatcaattacagttgaagatgatggtagaggaataccagttgattttcacaaagaagaaaaaaaatcagcagcagaagttataatgacccagctccatgctggtggtaaatttgatcatgattcatataaagtttcaggggggttgcatggtgttggtgtttctgtggtaaatgctctttctcaaaaattagaattatatgttgaaagagatggaaaaaaatattttgttgaatttataaatggtgaaactaaaacacctctaaaagtaataggcaattcaaagaatactggtacaagaataaattttttaccttccaaagatattttttcatcaacaaagtttagtttttcaattattcaaaaa

SEQ ID NO: 294782 - DNA, 826 bp, Unknown
  Bacterial polypeptide expressing nucleotide sequence isolated from the Sargasso Sea
atgccaaataacaacacatatcaagctgactcgattaaggttttgaagggtcttgaggctgtaagaaaaagacctgggatgtatattggagacacagacgacggtaccggtttgcatcatatggtttatgaagttgttgataactcaattgatgaagctttagcgggacattgtaaaaatatttatgtaaaaataaattcaaatggcacaattactgtaaaagatgacggaagaggtattccagttgatatacataaaggagaaaaaaaatctgcagcagaagtaattatgacacaactgcatgcaggtggaaagtttgatcatgactcttacaaagtttcaggaggtttacacggcgtaggtgtttcggttgtcaacgctttatctgaaaaattagaattagaaattaatagagataacaaaaaattctttatagaatttaaagatggtaaagcgaaaaaacctcttaaagaaataggaaaatccaaagaaactggtacccaaataacatttcttccttcaaaagaagttttttcctcaataaaatttagtggaaatattttgataaaaagaatgcgagaacttgcgtttttaaataaaggaataaagattacttttgtagacagttcccaaaaaaaagaaaaaattcaagattttagatttgaaggaggagttttagaatttgtagaatttttagatgagaaaagagaaaaattgcaaaataaaaatggtaatgatttatttaaaaaaccaatctatattgaaggaaagagagataaaatcgaaattgaatgttcattaaaatggaattcaggatattctgaag

SEQ ID NO: 294783 - DNA, 829 bp, Unknown
  Bacterial polypeptide expressing nucleotide sequence isolated from the Sargasso Sea
tttgatcaaaactcatataaggtgtctgggggattgcatggggtaggtgtttcggttgtaaacgcgctttccgaatggttagagctaaaaataaaaagagataaaagtgagtattatattaaatttaaagacggaatacctgttgaaccgttaaaaaaagttggatctgccgattcaagtggaacctcaataacatttatgccatcaaaaaatacgtttactaaaacaaactttgatttttctaaactagaatcgaggttaagagaacttgcttatctaaactctggggtaaacataaaacttgaagatatgagaaatagtgatccagtagagtctcacttatcatcaaggggtgggctcaaaggttacgtaaaatatcttgataaatcaaaagaatcaattattagcgaagtaatttctgtaaagggagatgcgaatgagatccatgtagagatggcattacaatggaataaaagttatcacgaaaattgccttgtttttacaaataatattccacaaagagacggcggaacccatttggcggggtttagatctgccttgacaagaacaattaatatggcttcaaacaatttaggtttacaaaaaaaagataaaataaatttaactggagatgacgcaagagagggcttaacctgcattctctcagtcaaagttcctgatcctaaattctcatctcaaacaaaagacaaattagtttcatccgaagtcagacctattgtggaatcaatcgtatctgagagactatcaagttggtttgaagaaaatcctaaagactcaaaacttgtaatcacaaaaatttcgaagcagc

SEQ ID NO: 294784 - DNA, 832 bp, Unknown
  Bacterial polypeptide expressing nucleotide sequence isolated from the Sargasso Sea
tgatgaaagtgaacatgaaccaactgttcttccagctatgttccctaatttattagttaacggtgctgggggtattgcggttggaatggctacgaatattttacctcataatttaggcgaggtaatcgatgcgtgtacagcatttattgatgatcgggagatctcttttgaaaaaatctatgaactgattaaaggaccagattttcctacaggtggaacaattattggcacacaaggaataaaaaattctcaagcatctggaagaggatcaattatagtacaggctaaatcttcaattgaagagtttaaggtagatcgagaagcaattatttttactgaaatcccatatcaggttaataaatcgttattacttgaaaaaattgcagaattagtgagagataaaagaatagaaggaataagtgaccttagggatgaatctgatagacagggcgttagggttgtaattgagctcaaaaaaggagttatctcacaagttattttaaataaattatataagtttactcctttgcaaagttcgtatggggtcaattctttggctttaacagatggaaagccacaattgatgaacattagagatttcataagtcttttcataaagtttagagaggaaatcataacaaatagaactcgatatgatttaacaaaatcaagagatagagcacatattttaattggccttgcagttgcagtatcaaatgttgataagatcatagaaattataaaaaaatctaaagatccaaatgaagcaaaaagagaacttcttaaaagcaaatggaaaagttctgaaattaaagacttactggatttgatt

SEQ ID NO: 294785 - DNA, 796 bp, Unknown
  Bacterial polypeptide expressing nucleotide sequence isolated from the Sargasso Sea
ttgcaatggtgttcggatgtttattcagataatattttaggctttgccaataatattagaacaattgatgggggtactcatattgaaggattaaaaacagttttaacaagaacattcaataatctcgcaaaaaaaagaggtaaaagaaaagacattgaaaaaaatttggctggcgaaaatatcagagagggattgactgtagttttatcagttaaagttccagatcctgaatttgaaggacaaacgaaaacaaaattagggaatactgaagtgagaggaattgttgattctcttattggagaagctcttacaaagtatatggaatttaatcctggaattttagatttgattcttgaaaaagcaattcaatcatttaatgcagcagaagctgcaagaagggctagggaattagtcaggagaaaaagtgttcttgaaagttcaactttgccaggtaaattagcagattgtagctcgagagatccttcagaatcagaaatttatattgttgagggagattctgctggaggttctgccaaacaaggaagagatagaaattttcaggctattttgcctctcagaggtaaaattcttaatatcgaaaaaactgatgatactaaaatatataaaaatacagaaattcagtcattaataactgctcttggattgggaattaaaggagaagaatttgatgttaattccttaagatatcacagagttgtaattatgactgatgctgatgttgacggagctcatataagaactttattattgacatttttttatagatatcaaagag

SEQ ID NO: 294786 - DNA, 628 bp, Unknown
  Bacterial polypeptide expressing nucleotide sequence isolated from the Sargasso Sea
aggaattcctatcgatatgcataaaggtgaaaagatgtctgccgccgaagtaattatgacacaattacatgcggggggaaaatttgaccatgactcatataaagtttcaggtggattacacggagttggtgtttcagtagtaaatgctttatctgaaaatcttcagttaaaaatttacagaggtggtgtagaatattttatagaatttgagaatggaaaatctcttaaaccattaaaaaaaatcggcaaatcttcaaaaagaggaacagccataacctttttaccttctaaagatattttttcttcaattaaatttagctcaacagtgttacaaaaaagaatgagagagttagcgttcttaaataaaggaattaatttaacacttattgacaaaacatcttccaaaattaaaaaatacgaaaataaatttgatggagggatattggagtttgttcaatttatcaatcaaaaaaaacccattttatcaaacaaaaatgagaaacccgtgtttaaaaaaccaatatacatatcttcaagtaaaaatgatgttaatgtagaatgttctttagaatggaatgctggttactcagaagaagtattagcatttacaaataatatcatcaaaaag

SEQ ID NO: 294787 - DNA, 985 bp, Unknown
  Bacterial polypeptide expressing nucleotide sequence isolated from the Sargasso Sea
gcgcgtgccccgtgaagctgcacgtcgcgcgcgtgaaatgacccgtcgtaaaggcgcgctggacttagcgggtctgccgggcaaactggcggactgtcaggaacgcgacccggctcactctgaactgtacctggtggaaggggactcagcgggcggctctgcgaagcagggacgtaaccgtaagaaccaggcgattctgccgctgaagggtaaaattcttaacgttgagaaggcgcgtttcgacaagatgctctcttctcaggaagtggcgacgctgatcaccgcgctgggctgcggcatcggtcgcgacgagtacaacccggacaaactgcgttatcacagcatcatcatcatgaccgatgcggacgtcgacggctcgcacatccgtacgctgctgttgaccttcttctatcgtcagatgccggaaatcgttgagcgcggccacgtttacattgcacagccgccgctgtacaaagtgaagaaaggcaagcaggaacagtacatcaaagacgatgaagcgatggatcagtaccagatctctatcgcccttgatggcgccacgctgcacaccaacgccagcgcaccagccctggcgggtgaagcgttagaaaaactggtttctgaatacaacgcgacgcagaaaatgattggccgtatggaacgtcgtttcccgaaagcgctgctgaaagaactggtttatcagccgacgctgccggaagctgatttggcaaacgaacagaacgttacccgctgggttaatgcgctgattaccgagctgaacgaaaaagaacagcacggtagcctgtggaagtttgatatccaccacaacgcagagcagaacctgtttgaaccgattgtgcgcgtccgtactcacggtgtggataccgactacgttctggaccacgagtttgtgactggtggcgaataccgtcgtatttgtacgctggcgagaagctgcgtgactgatcgaagacgatgcgttatc

SEQ ID NO: 294788 - DNA, 103 bp, Unknown
  Bacterial polypeptide expressing nucleotide sequence isolated from the Sargasso Sea
gcgggtggctctgcccagcagggtcgccatcgaaaatttcaggccatcttgccgctaaaaggcaaaattttgaatgtggagaaggcgcgcttcgacaaaatgc

SEQ ID NO: 294789 - DNA, 707 bp, Unknown
  Bacterial polypeptide expressing nucleotide sequence isolated from the Sargasso Sea
aaatccaagtgatgccaaaattattgttgacaaagtaattctcgccgctcaagctagacatgcagcacgaaaggcccgtgaaatgattcaaagaaaaactgtaatgagtggaggtggtttaccgggtaaattgtctgactgttctgaacaagacccatcattatgtgaaatttttcttgtagaaggagattctgctggcggaactgctaaacaaggaagagaccgaaactttcaagccatattacctttaaggggtaaaattttgaatgttgaaaaagcaatgcaacataaagtttttgaaaatgaagaaataagaaacatttatactgcacttggtgtaacaattggaacagaagaggatagtaaagctttaaatatagaaaaacttcggtatcataaaattgtaattatgtgtgatgcagatgttgatggaagtcatatttcaactttaattctaactttcttttttcgctacatgaaagaacttattgaattgggatatatttatattgcaacaccaccattatatttagtcaaaaaggggcaaaaaaatgattacgcttggaacgacgatcaaagagataaactaattcaagaatttggttctggtacatcagtccaaagatataaagggctgggagaaatgaatgcagaacaactatggaatacgactatggaccctgatcgccggactctgcgtagggtta

SEQ ID NO: 294790 - DNA, 896 bp, Unknown
  Bacterial polypeptide expressing nucleotide sequence isolated from the Sargasso Sea
  misc_feature (20)..(20): n is a, c, g, or t
ttcattttactgataagagnacaatctgaagataaaaatatacattttaaatatgatggaggtattaaggagtatgtaaagtatttaaataatggcaaaaaccttattaattctgagccaatttttttcaatgctcaaaaaaataatatttcagttgaatgttcattacaatggactgatagttatcatgaaaatacaatatgttttactaataatatcatacaaagagatggaggaactcatttagctggatttagaggagcacttactaggtcaattgtaaattatataaataaaaatacaaaaaattctaataacatttctggcgaagatgctagagagggattaacatgtataatatcagttaaactaccagatcctaaattttcaagccaaacaaaagataagctggtgtcttccgaggttcgaccagttattgaatcaacaagtttgaataaattagagcaatggattgaagaaaacccttcagaaattaaaaaagttattgataaaataattgaagcttctaatgctagagaagctgctagaaaagcaagagagcttacaagaagaaaaacaggcttagaaaatacttctcttcctggaaagctcgcagattgccaagagaaaaatcctgaattatcagaattgtttatagttgagggagattcagcgggcgggtccgctaaacagggaagggatcgaaaaaatcaagctattcttcctttaagaggaaaaatattaaatgtagaaagagctaacgataaacaagttttaactagcaatgaaataggagctctaattacagctattggagctggcgttggcaatccaacagacgataatgatcaaaataaaatagaaagtaaatttgattattctaaaatgcgatatca

SEQ ID NO: 294791 - DNA, 583 bp, Unknown
  Bacterial polypeptide expressing nucleotide sequence isolated from the Sargasso Sea
aatgccgaaaaaacaaaataaaaagggatcctacgactcatcaaacattcaagtcctaaaaggcctagaggctgttaaaaaaagaccagggatgtatataggagatacagatgatggctcaggccttcatcatatggtttttgaggttgtggataattgtattgatgaagcaatggcaggtcactgctcggaaataattgtttcaattaataaaaatggatcaataacagttaaggataatggtagaggaatacctgtagacactcataaaaaggaaaaagtacctgcagcagaacttattatgacaaccctccattctggtggaaagtttgatgacaacagctataaagtttctggtggtcttcatggtgtgggtgtttccgttgttaatgcactttctgaacaattaacactaaaaatttgcagagatggtgggcaatatgaacaaaaatatgcaaatggtaaggcacaaacaaaacttaaaaaaacaaaagcttcaaaagaaacggggacagaaattacattcaaaccatcaaaagagatattttcgtttgttaactttgatatagataaaataaaataa

SEQ ID NO: 294792 - DNA, 761 bp, Unknown
  Bacterial polypeptide expressing nucleotide sequence isolated from the Sargasso Sea
aatgtcaaaagataaatatgactcatcaagcattaaagttttaaaaggtttggaagccgttaagaaaaggcctggaatgtatattggtgatactgacgatggttctggcttacatcatatggtttttgaggtcctagacaatgccatagatgaaggcttggccgggttttgtgattatattgaagttaaattgatgaaagatggttttgtgtctgtgtctgataatgggagaggtattccagttgacatgcatgaagagggggtaccagcagcacaggtgataatgacttctctgcattcaggtggaaaatttgatgagaatagctacaaagtttccggtggtttgcacggggtaggggtatcagtagtaaatgctttaagcagcaagttgatattagaaatagaaagagatgggaagaaatattgtcaggaatatgcagaggggactcccaaaacagatttaaaagaaaacggaaaaagcgataaaactggtactaaagtgagctttctaccatctaaagcaacatttgcttttacagaattcaacgttgagatacttaaaagaagaatcagagaactttcttttttaaattctggtatcgcaataacaataattgatgaaagaactgatcagaaatttgattttaagtctgaggggggcttagttgaatttgttaattatttaacagggaagaaagagccagttggtagtccctttactgctcaggcaaatatgaaaggaataggagtagaaattgcta

SEQ ID NO: 294793 - DNA, 301 bp, Unknown
  Bacterial polypeptide expressing nucleotide sequence isolated from the Sargasso Sea
aatgtccgaattcgagcaatctccagaagactacagcgctgaatctattaaagttctaaaaggtttagaagcagttcgaaaacgcccaggcatgtacattggtgataccgacgatggtagcgggcttcaccacatggtttatgaagttgttgacaacggtatagatgaagcattagctaagcacgcagattttgttcatgtaaaaattcattccgacagcagtgtctctgtacgggataatggtcgaggtattcctgtagatatccatgaagaagagggtgtttcagcagccgaagtataa

SEQ ID NO: 294794 - DNA, 630 bp, Unknown
  Bacterial polypeptide expressing nucleotide sequence isolated from the Sargasso Sea
aatgacaaaaaataattcaaataattatcaagccgactccatcaaagttctaaaaggtttagaggctgtaagaaaaagaccaggtatgtatatcggtgatactgatgatgggactgggttgcatcatatggtttacgaggttgtagataattcaattgatgaagctctagcgggtttttgcaaaaaaattgaaataagtattaacgatgataactctgtaacagtgattgatgatggtagaggaattcctgttgatattcataagggagaaaaaaaatctgctgccgaagttataatgacccaacttcatgctggtggtaaatttgatcataattcctataaagtttctggaggactacatggagtaggagtatcagttgtcaatgctctttcagagagattaaaacttacaattaatagagataataaaaaatattatatagaatttaaaaatggagatgctaaaacttccttaaaacaagtcggcaaatcaaaaacaagtggtaccgaaattaattttgttccatcgaaagatatattttcatctattaaatttagtttttctatattagaaaaaagaatgagagaattggcctttttaaataagggcataaaaatagttttaagtga

SEQ ID NO: 294795 - DNA, 907 bp, Unknown
  Bacterial polypeptide expressing nucleotide sequence isolated from the Sargasso Sea
cagggtaattttggctcattagatggtgacccacctgctgcaatgcgatacacagaagcgcgtttatctaaagtatcagagagattagttgaagatatcgataaagatacaatttcatttcagccaaactacgatgatacaacaaaagagccttcagtccttccatctcaatttcctaatcttttagttaatggagcatcgggtatagctgtaggaatggccactaatattgctccacataatttaggagaggttattgatgcgaccttgtatttaatttctaatccaaattgtaatactgaagatttaaaaaaatatattttaggaccagattttccaactggtggtcagattattggcaaaaaaggtatatctgaaacttttgaaactggaaaaggcagttgcgtagtaagatcaaaaacaagtattgaaaattttaaaaaagatagagaagctattattcttcacgaaataccataccaagtaaataaatcaaaattattagaaagaattgctgaaatagttaaaggtggaatagtagagggtatttctgacttaagagatgagtcagatcgtaatggcgttagagttgtaattgaactaaaaagagattttgactcaaatataatattaaatcaattatataaacatacattaatacaaacaacttttaattctaatatgcttgctttgaataaaggtaagccagagcaaatgaacttaaaagaaatactaagctcttttttagactttagagaggaagttattaccaaaagaactttatttgatttaaatagagcaagggataaggctcatgtgttagttggtttggttattgctaatacttatattgatcaaattatagaattaataaaaagctctaaagacacaaaagaagcaaaagaaa

SEQ ID NO: 294796 - DNA, 820 bp, Unknown
  Bacterial polypeptide expressing nucleotide sequence isolated from the Sargasso Sea
aaaattctaaatgttgagcgtgcaggtgagagtaaagttattggatctaatgaaattggaactttaattacagcactaggctctggctttaaagatgactttgacttgtcaaagattagatatcataaaattgtaattatgactgatgctgatgtagatggctcacatattagaacgctattattaacgtttttttacagaaaaatgcctgaaataattgaagctgggtacctatatattgctcaacctccactctacaaaatatcacatggtaaatctatttcttatattaaagatgaaaatgaaatgaatgaatatctgattaatgaaggaatacgtgattgtgtccttactctttactcaggtgaacaaattgctggggaagatttaaaagtactcgttaatgatgctaaagaatgtaacaatataattgatagaatttctgataaatatgacaaaaatattgttgagcaaacagctatagctggagctttaaatccaaatgttttaaatgactcggagaaagctctagaagtagcaaaatatgttgcaaaccgcttggatcaattatctcaagaagttgaaaatggatgggaaggcactcctctagaagatggtgggttaaagttttcaaggaatttaaggggcgttttagagtcttattccattgatagcccgttaattcaatctcttgatgcgagacgtcttgatgaacatgcatcaaatctacaaaaaacatacttaaaaagagcagtgttaaagaaaaaagatgtagattatgaaattagatctccatctcaaataacaaatacaatatttt

SEQ ID NO: 294797 - DNA, 790 bp, Unknown
  Bacterial polypeptide expressing nucleotide sequence isolated from the Sargasso Sea
tctgaagcagctttggctagagaggcagcaagaaaagctagagaaatgacaagaaggaaaggagttttagaagttgcaggtttgccaggtaaattggcagattgccaagaaaaagatcctgcgctgtcagaaatatatatcgttgagggtgattcagcaggtggatcagctaaacagggaagaaatagacaaaatcaagcaatacttcctctgaagggaaaaattttgaatgttgaaaaagctagattagataaagttttatcttcacaagaaattggaacgcttgtaacagctttaggttgcggtattgggacggatgagtttgatgctgataaattaaggtatcacagaataattataatgacagacgctgatgttgacggctcacatataagaaccttgcttttaacattcttctttaggcaaatgtttgaaattttaaatagaggacatgtttatattgcattaccgcccttatacaaagtttcaaagggaaaaaatattaaatatgcagcttctgaaaaagaaaaagatattgctttaaaagagttatctaaaactggcaatagaggaattgaaatacaaagatataaaggtttaggtgaaatgaatcctgatcaactttggacaacaacaatggatcctcaaaacagaagaatgatgagagttcgtattgatgatgccaatgaagccaacaactcttttgaagttctaatgggtgatcaagttgagcccagaagagagtttattgatgaaaacgctctctctgttgcaaatttagatatatagt

SEQ ID NO: 294798 - DNA, 674 bp, Unknown
  Bacterial polypeptide expressing nucleotide sequence isolated from the Sargasso Sea
agaaaaaacagagttgtttattgttgaaggtgatagtgcaggtggttcagctaaacaagcaagaaacagagaattccaggccatactgcctttaagaggaaaaatattaaatgttttcaatgtgagtttatcaaaaattgcagataacaacgaaattcaaaacttaatacaatctcttggttgcggtatagggaaaaattttcaattatctaaattacgatatgaaaaaattattttaatgacagatgctgatgtagatggatcgcatattgccactcttttgattactttcttttacaaatatatgaagacaataatagataaaaacagactatatttagcaatgccgcctttgtttaaaatttataataaagataaatcattttatgcatatgatgaaaaggagaaagataaaattattaaaaaagaatttaaatcaaatattccccttacaacacgctttaaagggttgggagaaatgccagccaatcaacttagagacactacaatggatccaaaaaggaggaaattaattaatataaaaacttataatgaaaaaaaagaaatgaagattacagataatttatttgagactttgatgggtaaaaaagctgaatatagatttaaatttataaaagataacgctaattttttgaaacaaattgatacttaaa

SEQ ID NO: 294799 - DNA, 850 bp, Unknown
  Bacterial polypeptide expressing nucleotide sequence isolated from the Sargasso Sea
cgcggagggtggaagtcacctgacgggattcaaaggcgccctgacccgaactttgaataattatatggtcaccaataaaatctcgaacgataacgatgaaaacctcaccggcgaagatgttcgggaaggtatggctgcggtaatcagtgtcagggtcattgatccccaattcgaatcgcagaaaaaaattaaactgaccaatgttgaggtgaaaggcaaagtggaaagcctagtgaatgaacacctcaataattttctggaagaaaaccctgcggttgccaaaaaaattgttgcaaaatcacttgatgcccagagagcacgcattgcggcgaggaaagcaagagagttaacccgacgtaaaaacgttctggagataagttctcttcctggaaaactggctgattgtcaggaatctgatcctgctttgagtgaattattcctggtggagggtgactctgcgggaggctcagccaaacaggggcgtgaccgaaaaaatcaggcaattcttccgctaaaggggaagatcctgaatgtggaaaaagctcggtttgacaaaatgctttccaatgacgaaatcagaaccctgatcactgcactgggaacaggaatcggcagggaagattttgacatcaccaaaactcgatatcacaagatcattgttatgactgatgccgatgtagacggaagtcatattctgacgttgatccttaccttcttttatcggcagatgcctgaaatcatcgaaaacggatatctctacattgcacagcctccactttataaaataaagaaaggacgagaagagcattatctccgggacgataaggaaatgtctgaaaccttgatccgg

SEQ ID NO: 294800 - DNA, 934 bp, Unknown
  Bacterial polypeptide expressing nucleotide sequence isolated from the Sargasso Sea
aatgtcaaaaaattctgctttaaactctaaaccgtcttatggtgcggactcaataaaagttcttaaaggcttagatgctgttagaaaaagacctggcatgtacattggagatacggatgatgggtctggtttacatcatatggtctttgaagtcatggataatgccatagatgaagcgttagccggccactgcaaaaatattactgtaacaataaacaataataacacagttactgtagaagatgacggtagaggaataccagtagatatgcataaaggtgaaaagatttctgctgctgaagtaataatgactcagcttcatgcaggaggaaaatttgatcatgattcatacaaagtatctggcggcctacatggcgtaggagtatcagtagtaaacgctctatctgaaaaattagaacttaatatctatagggatggaaaagaatattcagtaatttttaataacggaaatactctaaaacccttaaaacaggttggtaaaacaaaaaaaagaggcactagaataaattttttaccttcaaaagaggttttttcttcaattaaatttagctcagcaatcttagaaaagcgaattagagaattagcttttttaaataaaggaatatgtatcaaactccttgatcaaacacacaaaaaagaaaaagaatttgttcataaatacgatggtggaatagtagaatttgtaaaacatattaataataaaaaaccaattttagttaataaaaatgaaaaagaagtatttaaaaaacctgtttatgtaacagcaacaaaaaataatgttgtagtagagtgttcttttgaatggaacgctggatattcagaagatgttcttcctttcacaaacaatatacctcaaaaagacggaggaactcacctgcttggatttagaagcgcacttactagagtaattaat

SEQ ID NO: 294801 - DNA, 361 bp, Unknown
  Bacterial polypeptide expressing nucleotide sequence isolated from the Sargasso Sea
tatgatcaaaaaaaatcaacaagacaatacaaaatatagcgctgagtcaataaaagtacttaaaggtttagaagcagttagaaaaagacccggaatgtacattggtgatactgatgatggaaccggtcttcatcatatggtctacgaggtagttgataattctattgatgaagctttagcaggacactgtaaaaatattaaagtaacaattaattctgatcaatctgtttctgttgaggatgatggcaggggaataccgatagatatgcataaaggtgaaaagaagtcggctgcggaagttattatgacacaactgcatgcaggaggaaagtttgatcatgactcttataaagtttctgga

SEQ ID NO: 294802 - DNA, 820 bp, Unknown
  Bacterial polypeptide expressing nucleotide sequence isolated from the Sargasso Sea
tatatgacaaatgaaaaagaagaaaataacgccattactgaaaatgaagaaccttcagagcctggaactgagaatactgactatgatgctcagtcaattaaagtgctgcggggactagatgctgtgcgtaaacgtcctggtatgtatattggtgatacagatgatggctctggtcttcaccatatgatttatgaagttgtagataatggcattgatgaagcgctagctggccattgtgatattgttgaggttgtattgaatggtgatggttcggtaagtgtattcgataatggtcgaggaataccaattgatgttcacaaggaagagggcgttcctgcggcagaggtgatcatgacgcagttacatgctggggggaagtttgaccagaattcttataaggtttcgggggggcttcacggtgttggtgtctctgttgtcaatgcgctctcgacgcggttagagctgagaatatggcgggatggtaaagagtatttattagtttttaaaaacggtgatattgataaaaagatggaggttgttggtgatgctggtgaaaagaccggcacgaaagttactttctttgcatcaaaggatacctttagtaatgtggattatgattttgctactattgagcatcgattgcgggaactagcatttttgaattcaggagtcagaataaagttaacagatgatcgtcatgttgagcaaaaaattgctgaattatattatgaaggtggcctagaagcatttgttaattatttagatcgttccaaaacagcattaatcccaacaatctcaataagcggcgagaaggagggca

SEQ ID NO: 294803 - DNA, 871 bp, Unknown
  Bacterial polypeptide expressing nucleotide sequence isolated from the Sargasso Sea
gttggtaagttaattattgccaaggcattgcaagcacagcgtgttcgtgaggcggctcgtaaggcgcaggatttggttcgtcgaaagtctagcttggaaagcacaacgctaccgggtaagttggctgattgtactgaaaaggatccgtcaaaatgtgaggtcttccttgttgagggtgattcagcgggtggatcggcgaagcaagggcgtgatcgatattatcaagcgattttaccgttgcgaggtaaagtattaaacgtagaaaaatctcgattggataaaattttagccaatgaagaaatccgatcattaattacagcgattggcccagaagcgttaaaaaacttatcggccagtaaagtaaatactgaagaagatgatgctgatgatcagctgacaacggaagatgtattggccaagttgcgctaccataaaattgtgattatgacagatgcggatgtggatggggctcatattcgaaccttattgttaacatttttctttcgttatgcacgtgaagttgttgaagcgggtgcgctttatattgcacagccaccgttgtatcaaattaaaactggtaaaaacggaatttatgcatataacgataaacaacttgaagaagaaattagtaagttaggtaaagataaagacaaactaaccattcagcgatacaaagggttgggtgaaatgaatcctgatcaactttgggatacaacgcttgatccggaacagcgatcaatgttgcaagtgaatattcatgatgctgaaatggcagacgaaattttttcattattaatgggtaataaagtagaacctcgtaaagagtttattgaaaaatatgcagatacggttcgctggattgacgtataaa

SEQ ID NO: 294804 - DNA, 780 bp, Unknown
  Bacterial polypeptide expressing nucleotide sequence isolated from the Sargasso Sea
gagacttatacttgttgatggtcaaggaaattttggatctatagatggtgatccgcctgctgcaatgaggtatacagaatctaggcttgcaaggtcgtctgaaagtttattaagagatattgataaagatacaattgattttattccaaattatgatgagtcccaattagaaccttctgttttaccagcagaattcccaaatatgcttgtaaatggtgctggtggtattgcagttggtatggctactaatattccacctcataatccaggtgaagttatacgtgcttgcaaatctcttatagagaatcctaatataagtttagaagaattgatggagattatccctggccctgactttcccactgcaggcttgattatgggtagggctggtattaaagaggcctttaggacaggcagaggtagtgtaattatgcgatcaaaagcagaaattattcagacgggcaaaaatcttgatcgagaaactataattatctctgaaattccatttctagtaaacaaagctttagtattagaaaaaataggggatctaattagagacaaaactatcgagggtatttctgacttaagagatgaatctgatagaaatgggatgagaattgttattgaaattaaaaaagatgttcaaggtgatgttgttttgaatcagttgtggcgtcacacaagattgcaaacgagtttccctgtaaatatgttagctttggataatggacaaccgaagcaaatgggtctaattgaaattctcaaagctttcatagattt

SEQ ID NO: 294805 - DNA, 820 bp, Unknown
  Bacterial polypeptide expressing nucleotide sequence isolated from the Sargasso Sea
gatgagctcatcatatctttcttatgcaatgagcgtaattgtaagtcgtgctcttcctgatgtaagagatggattaaaaccagttcatagaagaattttatatgcaatgtacaaaggaggatatgattggtctaaacaatttagaaaatctgcaagaatagtcggagacgttattggtaaatatcaccctcatggtgatcaatctgtctatgatgctttggtgagaatggtgcaagatttctctatgagtttaccgttaattcaaggccaaggaaattttggttctatagatggcgatcctgctgcagcaatgagatataccgaaactcgcttgtcaaaagtttctcaatatttaattgatgatattgaaaaaaatacaatttctttcaaaagtaattacgatgaaacagagaaagaacctagtgttttgccagcacaatttccaaatttactagttaatggagctggtggtatcgctgttggtatggcaacaagcatacccccacataatttaggtgaaattatagacggtacattggccttaatagacaataaagatattaaaattaaagagttaatgaaacatatacctggtccagattttccaactggtggtgtgattataggtaaagatataattaaacaaggatataaaaatggtagagggtcctttaagataagaggtgaaatttcaattgagcaacaaaaaaatggtcgtgaaagactggtaataacttctataccgtatcaagttaacaaatctgttataaatgaaaggatagctcaattagtaagagaaaaaaagattgagggaattaga

SEQ ID NO: 294806 - DNA, 784 bp, Unknown
  Bacterial polypeptide expressing nucleotide sequence isolated from the Sargasso Sea
tcatttaacgcagcagaagctgcgagaagagctagagaattagtaagaagaaaaagtgttctcgaaagttctacattacctggaaaattggcagattgtagttctagggatccatcagaatcagaaatttatatagttgaaggagattcagctggtggctctgcaaaacaaggtagagatagaaattttcaggctattttgcctctcaggggtaaaattcttaatattgaaaaaactgatgatactaaaatatataaaaacacggaaatacagtcgttaataacagctctaggattgggaataaaaggagaggagttcgacgaaagctctttgagatatcatagagtcgtaattatgacggatgctgatgttgacggtgctcatattagaactttattgctgacatttttttacagataccaaagagaacttgttgagaaaggttttatatacattgcttgtccccctctttataaagttgaaagaggaaagaatcataattactgttataacgagaatcaattaaaggatacaattcaagcttttggagaaaatgcaaattataatatccaaagatttaagggattaggtgagatgatgccaaaacaattatgggatacaactatgaatcctcaaacgaggatgatgaaaagggttgaaatcgaagatgcacttgaagctgacagaatattcaatatattaatgggagataaagttgcaccaagaagagaatttattgaaactcatagtagtaacttagatatggcaactttggacatatgat

SEQ ID NO: 294807 - DNA, 457 bp, Unknown
  Bacterial polypeptide expressing nucleotide sequence isolated from the Sargasso Sea
cttgacatctgaagaagagggtgaagcggaaacacaaggaaataatgggaacatactaaatcattccttgaatgaggaaatgaagacatcttacatcaactatgcaatgtcggtaattattgggagggcccttcctgacgctagagatggtctgaagcctgtccatcgacgtgtcctatatggaatgcatgaaggtgggcacacctctgaaaagaagtatagcaagtccgcacgttcggttggagaggtgatgggcaagtaccaccctcatggggatcagtcgatctatgacacaatggtcaggatggctcaagatttctctctaaggtatccgctcgtcgatggtcaggggaactttggttcgattgatggagaccctccagcagctatgagatacaccgaaagtaggttagataaaatttcgaagcatatgcttgaggacatgaaaagaaaatag

SEQ ID NO: 294808 - DNA, 871 bp, Unknown
  Bacterial polypeptide expressing nucleotide sequence isolated from the Sargasso Sea
aaagcctcaccaaccccagcagacgctaaagttaaactggttgagcagggctgggcacttggccatgtacagggcatgcttgaaaaagcaggtgacgatgcagcgcgtcctgaatggttagagccagaattcggtatccgtgatggcttatattacctgactgaacagcaggctcaggcgatccttgagctgcgtttacaccgtttaactggtcttgagcatgacaagatcatcgccgaatacgaagagctgctcgagtttatcgcgggtctgctgtttattctgcgaagcccagagcgtttgatggaagtcatcaaagaagagctggaagaaattctggctgaatacggtgatgctcgtcgcacagtcatcaacgccaatgaaattgatatgagtcttgaagacttaatcaacgaagaagacgtggttgtgaccctgtcacacttaggttacgccaagtaccaaccgctgagcgattaccaagcccagcgccgtggtggtaaggggaaagccgcaactaaagtgaaagacgaagatttcgttgaaaaactgctggttgcgaatactcacgataccattctgtgcttctcagacttcggtaagatgtactggctcaaggtctatcaattaccgctggcgagccgcacatcgcgcggtcgtccgattgttaacctgctaccgctgtccgatggtgagcgcattacggcgattctaccggtgcgtgaatacgcagaagataagtacatcatcatggcgacctctaacggtaccgtgaagaagactgcgctgacggcttacagcaacccacgtgctaacggcattatcgccgtgaacctgaaagacggtgaccaactgatcggtgtcgatatca

SEQ ID NO: 294809 - DNA, 877 bp, Unknown
  Bacterial polypeptide expressing nucleotide sequence isolated from the Sargasso Sea
aaaatgaaaaataacaactatcaagctgattcaatcaaagttttaaaaggtttagaagccgtcaggaagagacctggaatgtatattggagataccgatgatggtactggtctgcatcatatggtttatgaagttgtagataactctattgatgaagctctggcaggtttttgtaaaaatattgatgtaagaattaataatgatggaactattacagtaaaagatgatggtcgaggtatacctacagacactcataaaggagaaaaaaaatctgccgcagaagtaataatgactcaattacatgctggaggtaaattcgatcatgattcttataaagtctcaggaggcttacatggagttggagtatcagttgttaacgctttgtctgagaaattacaattagaaattaatagagatggaaaaaaattttttattgaatttaataatggagatgcaaaatcaccacttaaagtaataggaaaatcaaaagaaactgggactaagataacttttctcccatctaaagatgttttctcatctattaaatttagtggaaatataattattaaaagaatgagggaattagcctttttaaataaaggaattaaaattacttttacagatggcagctctaagaaggagaaagttgaagaattcaaatttgatggaggcgtagtgcaatttgttgaatttttagataataaacgagaaaaacttagaaataaaaatgataatgatctgtttaaaaaaccaattcaaattgaaggtaaaaataatggcatagatatagaatgtgctttaaaatggaatgctagttatgctgaagatgttcttctcttatacaaaccaaatatttatcaaaaaggatggaggaact

SEQ ID NO: 294810 - DNA, 784 bp, Unknown
  Bacterial polypeptide expressing nucleotide sequence isolated from the Sargasso Sea
atgacaaataaaaatacatatcaagcagactccattaaagttttaaagggcttggaggcagttagaaaaagaccaggtatgtatattggagatacagatgatggaaccggtctacatcatatggtttacgaagttgtagataattctattgatgaagctttagcaggtcattgtaaaaatataaatgtaagaattaatgcagatggaacagttacggttagtgacgatggtaggggtatacctgtagatattcacaaaactgaaaaaaaatctgcagcagaagttattatgactcagcttcacgcggggggaaagtttgatcatgactcatacaaagtatctggtgggttacatggggtcggtgtttcagtagtaaacgcactatcaaaaaaattgcaactagagattaacagagatagtaaaaaatattttatagaatttgaaaatggtgaatcaaaagcaccattaaaaataattggaaaatcaaaggaatcaggtactaaaattactttcttgccgtctacagagattttttcttcaattaaatttagtgccaatattttaattaaaagaatgagagagttggcttttttaaataaaggaattaaaattatttttattgatgccagtttaaaaaaagaaaaaatatctgaatttaagtttgatggaggtgtaatagagtttgttgactttttagatgaaaaaagagaaaagttacaaaataaaaatggaaatgatttatttagaaaacctatttatatagaaggaaaaaagaataatatcg

SEQ ID NO: 294811 - DNA, 922 bp, Unknown
  Bacterial polypeptide expressing nucleotide sequence isolated from the Sargasso Sea
tggtgttggtgtatcagtagttaacgctttatctgaatatctaattttagaaattaatagagatggaaaaacttacaatattgagtttgaaaatggaatagtaagtaaagaattacaaataattggtaactcagaaaaaataaataacgaatattttaccggtactaagattacgttccttcctacaacaaatatctttaaagatattaattttaattttaaagtaatagaaaaaagacttagggaattggcattcttaaacacaggtattagcatttttttaacagataagagacaagctgaagataaatttattaattttaaatatgatggtggtattaaagaatacgtaaaatatttaaataaaggaaaaaatcttatcaattctaatcctatattttttcaaggtgaaaaaaataatatctcaattgaatgctctttacaatggactgatagctatcatgaaaatactatttgtttcacgaacaatattattcaaagagatggcggcacccatcttgcaggtttcagaggtgcactcactagatcaatagtaaattatattaataataacacaaaaagtggaaataatattacaggtgaagacgcaagagaaggtttgacatgtattatatcagtaaaattacctgatcctaaattctcaagtcaaactaaagataaattagtatcctcagaagtaaggccagttatagaatcaacaagtttaaataaattagaacaatggattgaggaaaatccatcagaaataagaaaagtagttgataaaataattgaagcatctaatgcgagggaagctgcaagaaaggcaagagagcttacaagaagaaagactggcttagaaaatacttctcttccaggtaagcttgctgattgccaagaaaaaaatccagaattatcagaa

SEQ ID NO: 294812 - DNA, 827 bp, Unknown
  Bacterial polypeptide expressing nucleotide sequence isolated from the Sargasso Sea
tatggtttttgaggtaattgataattccatagatgaggctctagcaggttactgtaaaaaaattgttgttacaataaatccagaaaatacagtcacaattgaggacgatggaagaggaattcctgttgatattcataaaggtgagaaagtttctgctgctgaagtaataatgacacaattacatgcaggcggaaaatttgaccacgactcttataaggtttctggtggattacatggtgtaggagtatctgtcgtaaatgctttatctgaaaaattagatttaaaaatttttagagatggaaaagagtatgaaataaaatttaaagatgggaattcaatcaaaccgcttaaacagatcggtaaaactaagaaaaaaggtacaaaaataacattcttaccatcaaaagagattttttcttcaataaaattcagttcctctattctcgaaaaaagaataagagaactagcttttttaaataaaggtatatcaatatctctagttgataatttttcaaaaaaaacaaaggagtccgtgcataaatatgatggaggaatagttgaatttgtaaagtttattaataacaaaaaaccaattttaattaacaaaaacgaaaaagaggtttttaaaaaaccaatatatattacttcgactaaaaataatgtaattgtagagtgctcttttgaatggaatgcagggtattcagaagaagttttaccgttcactaataatattcctcaaaaggacggaggcactcatctgttaggttttaggagtgctttaacaagagtcatcaataaatatgctggagatagaaataataaaaaaa

SEQ ID NO: 294813 - DNA, 568 bp, Unknown
  Bacterial polypeptide expressing nucleotide sequence isolated from the Sargasso Sea
ttgagcgactcagaagataaatcaggagaaggtggatcaagcgtggttgagcgcaaaccatacgacggtccatcaatttcgataacaaaagagctaaaaacctcctacttggactacgcaatgagcgttatcgtaagtagggcgataccagatttaagggacggtttaaagcccgtgcatcgccgaattttgtatgcaatgcacgaaacaggaaacacccatgaaaagtcatatcggaaatctgcacgacctgtaggcgacgtaatgggtaaatatcacccgcatggcgacagtgcaatttatgatgctttagtcaggatggctcagccgttttccatgtctttgcccttgctggatggtcagggaaattttggatctatggacggggataatccagcagccatgaggtatacagaagtgcgaatggataagccagcagcctttctattaagtgacatagataaagataccgtcgactttcaggataattacgatggaaaggatcgagaaccttcagtcctgccggctcgctttccgaatatgctggttaatggagcgggaggaattg

SEQ ID NO: 294814 - DNA, 320 bp, Unknown
  Bacterial polypeptide expressing nucleotide sequence isolated from the Sargasso Sea
  misc_feature (297)..(297): n is a, c, g, or t
gatgagcgaccttgcgagagaaattacaccggtcaacattgaggaagagcttaagagctcgtatctggattatgcgatgtcggtcattgttggccgtgcgctgccggatgtccgagatggcctgaaaccggtacaccgtcgcgtactttacgccatgaacgtattgggcaatgactggaacaaagcctataaaaaatccgcccgtgtcgttggtgacgtaatcggtaaataccaccctcatggtgataccgccgtttatgacaccattgtacgtatggcacagccattctccttgcngtatatgctggtcgatggccagg

SEQ ID NO: 294815 - DNA, 634 bp, Unknown
  Bacterial polypeptide expressing nucleotide sequence isolated from the Sargasso Sea
atggaaaaaagtgatttaaattttaaaaatatccaaaaaccaattttagtccaagatgagatgagctcatcttacctatcctacgctatgagcgtaatagtaagtcgagctttacctgacgtaagagatggtcttaaaccagttcatagaagaataatatatgccatgtataaaggaggttatgattggacaaaaaatttcagaaaatctgctagaatagtaggtgatgttataggtaaataccatcctcacggcgaccaagcagtttatgatgcattagtaagattagtacaagatttttctatgagtttaccgcttattgaaggacagggtaattttggttcaatagatggtgatccaccagcagcaatgagatacactgagactaaacttgctaaaatttcaaaatttttaactgaagatttagaaaaaaatacagttgattacagaaataattatgacgaaacggaacgagaaccaacagttttgccgtcacaatatccaaatttattagttaacggtgcaggaggtattgcggttggtatggcaacaagcattcctccacataatttaggcgagattattgacgcaacaaattcctttattgcaaataaagatataaccatatctcaac

SEQ ID NO: 294816 - DNA, 640 bp, Unknown
  Bacterial polypeptide expressing nucleotide sequence isolated from the Sargasso Sea
tatggttgaaggtgaaaagttaattcctattaacattgaagaagaaatgaaatctgcttatattgactattcaatgtctgtcattgtgtcacgtgcactacctgatgttcgtgatggtttaaagcctgttcatagaagagttctttacggaatgcatgacatgggaattagatctaatacctcttatagaaaatctgcaagaatagtcggagatgttttaggtaaatatcaccctcacggtgattcatcagtctatgacacaatggttagaatggctcaagaatggagtttgagatacttattagtagatggtcaaggaaactttggatcaattgatggggatagtcctgctgcaatgaggtatactgaagctagaatgcaaaagatttcagaagatatacttgccgacattgaaaaagagactgtagaccttcaattaaattttgatgatactctatttgaacctaaagtacttccaactagagttcctaatcttttggttaatggtgcttctggaatagctgttggtatggcgactaatatgccacctcataatttatctgaggtaattgacggaattattaaatatattgaggataacaatatcactattgatgatttaatgacagtaatcaaggct

SEQ ID NO: 294817 - DNA, 577 bp, Unknown
  Bacterial polypeptide expressing nucleotide sequence isolated from the Sargasso Sea
aaccttaattaatgctttaggtacaggctctattgattttaatattgaaaatttaagatatgataagatagtgataatgactgatgcagacgttgatggatcacatataagaactttattattaactttttttaataattatccttttaatcaattaattgaaaatggacatatttatttagctcaaccacctttatttaaagttactaaatccaataaaagtgtttatataaaagatgaaaaatcacttgaagaatacatatttaaagtttcaggcaaagcagataaaaaaattaagagaggttctctcgaatacaatcaatttatgcaagatcaaagagaaaaactctcaatacagagatttaagggattgggcgagatgaatccggaagaattatgggaaaccacattaaaccctgaaaatagaactatgttacgagttcaatatactaagggaactaaagaaaaatctaaagaagatcagaaaatgatagaaattttgatgggcgatgaagttgctcctagaaaagattttataactagcaatgctttagaagttgtaaatttagatatttaa

SEQ ID NO: 294818 - DNA, 873 bp, Unknown
  Bacterial polypeptide expressing nucleotide sequence isolated from the Sargasso Sea
ttaaggtccttaaaggattagatgcagtaagaaaaagacccggcatgtatattggagatactgacgatgggtcagggttgcatcacatggtttttgaggtaattgataactctattgacgaggctttagctggctattgcaaaaacataattgtgacaattaatcaagacaacacggtttccattgaggacgacggcagaggaattccagtagatattcataagggtgagaaaatttcagctgcagaggtaataatgacccagctacatgctggaggaaaatttgatcatgactcttataaagtatcagggggactacatggagtaggagtctcagttgtcaacgctttatctgaagaacttgaacttaatatttttagagatggcaaagaatatctaataaaatttaaggatggaggctccctcaaaccactaaaacaggtgggaaaaacaaaaaaaaagggaacaaaaattacctttttaccctcaaaagaaatattttcttcaattaaatttagtgcgtcaattcttgaaaaaagaattagagagttagcttttttaaataaaggtatttcaatatcgctaatagatagctcatctaaaaaaaaaaaagagtttgttcataaatatgacgggggtatagttgagtttgtaaaatatattaatagtaaaaaaccaatactaacaaataaaaatgaaaaagtagcttttaaaaagccagtttatgttacagccacaaaaaacaacgtaattgttgaatgttcattcgaatggaatgctggttattccgaagaagtattgccttttacaaataatataccacaaaaagatggcggaacacatttattaggtttcagaaagtgctttaactagg

SEQ ID NO: 294819 - DNA, 787 bp, Unknown
  Bacterial polypeptide expressing nucleotide sequence isolated from the Sargasso Sea
aaatttaaaggaggattaagtgattttgttaagtacctggacgaacataacaaccctctacataacaaggtaattactgtaaaaaatgatactggcgatgttccagtcgacgttgctctaaggtatagtaactcttataatgataatatacttacctttgtgaataatataaatacaatagaggggggtactcacctatcagggtttcgctctgctttaacaagagcaatgaacaaccacgcgtcaaagaacaatcttattaaagcgaaaaagaatgaaaaaatatctttaaccggggaagactttcgtgaggggctgacagcaatcataagcgttaaggttgccgagccccagtttgaaggccaaacaaaaacaaaactgggaaatggagatatcaagggaatcgtagacaagattgtttatgagggtattttagactttcttgagcaaaacccatcaattggaaggcgcgttatagaaaaagcccttcttgccgcaagaagtagaagcgcagctcgaaaagcgagagagcttattagaagaaaaagcgcattagggggttcttctcttccaggcaaattggcggactgctcaaatagagaccctaacttttgcgaactttatcttgtagagggagactctgctggaggttcggcaaagcaaggtcgagacagaaaaacacaagcaattcttcccctaaggggtaaagttattaactctgaaaaggctaggatagacaagcttctttcaaataatgaagtacaatcaataattacagcccttggta

SEQ ID NO: 294820 - DNA, 853 bp, Unknown
  Bacterial polypeptide expressing nucleotide sequence isolated from the Sargasso Sea
ccaagcagactctataaaggttttaaaaggcctagaggcagtaagaaaaagacctggaatgtatattggtgatactgatgatggaacgggcttacatcatatggtttatgaagttgttgataattcaatagatgaagctttagccggatattgcaaaaatattgatatttttattaactcaaatggaacagtgacagttaaagatgatggaagaggtattcctgtggatttgcataaaggagaaaagaaatctgctgccgaggtaataatgacacaacttcattctggaggtaaatttgatcatgactcttataaagtatcaggtgggttacatggtgttggtgtatcagtagtaaatgcattatccgaaagtttaaaacttgaaatttctagagatggaaaaaaatatattatagaatttaaaaatggtgatgcaaaatcaaatttaaaagctgttggtaattcaaaagaaacaggaacacaaattacatttttaccatctaaagaaattttttcgtcaattaagtttaatccaagtataattcaaaaaaggatgcgcgaacttgcatttttaaataaaggaattaaaatttctattcacgatctaacttcgaaaaaaagtaaaattaatgttttcaaatttgaaggtggaattttagagtttgtaagctttcttgatgaaaagagagaaaaactaaacaataaaaatggaaatcttttatttaaaaaaccaattttaattgaaggaaaaaaagatgatgtagaaatagaatgtgcattacaatggaatgcgatgtatagcgaagatgtttatccttataccaataatgtttatcaaaaggatgaggaacgc

SEQ ID NO: 294821 - DNA, 714 bp, Unknown
  Bacterial polypeptide expressing nucleotide sequence isolated from the Sargasso Sea
accaataatattgttcaaagagatggtgggactcttttagctgggtttagaggagctttaactagatcgatagtaaactacataaataagaatactaaaaactctaataatattacaggagatgatgctagagaaggacttacatgtattatttcgacaaaattgccagatccaaaattttcgagtcaaacaaaggacaagcttgtttcttcagaggtaagaccagtaatggagtcaataagtttagataaaatagaacaatggattgaagaaaatccaagtgagattaaaaaagttgttgataaaataattgaagcatcaaatgctagagaagctgcaagaaaagctagggaacttacaagaagaaaaactggattagaaaatacatcacttcctggtaaacttgctgactgccaagaaaaaaatcctgaactatctgaattatttatagttgaaggtgactccgctggtggatctgcaaaacaaggaagagacagaaagaatcaagcaatacttccattaagaggtaaaatactaaatgtagaaagagccaatgataagcaagttcttacaagtaatgaaattggaacattaataacagccattggtgcgggagtaggtaatccgactgatgatgaaaatcaaaacaaagtagatggaaaatttgatgtaaacaaaatgagatatcataaaattatcataatgacagatgca

SEQ ID NO: 294822 - DNA, 645 bp, Unknown
  Bacterial polypeptide expressing nucleotide sequence isolated from the Sargasso Sea
aatgcttgaaaatattgaatgcataccatcaattccgttttctggtaaagcaaattcagatgaacaagagcttgagtggagcatgacatggcctgatagagatcatgaaggtattcaagaatcctatgtcaatctgatacctaccaaacatggtgggacgcatgtgtcaggctttagatcaggattatcagagtcagtaaaagagtttgctgattaccggaatcttctaccgagaggtgtaaaactttcacctgaagatgtttggatgggtctgagctacattatttcagtcagaattgaggatccacaattctcaggacaaacgaaagagaaactcagttcgagagctgtttcaggttttgttacaggcctcattaaagatgctttcacgctttggttgaatcaacatcctgaagcgggagaccaaattgtcgcaagggcaattgagaatgctcaaaaaagagccaaaaagaatgtaaaggtgaaacgaaagaaggccacaggtggaccaacattgcctggcaaactcgcagactgtacgagcgacgagcctgatctttgtgaattatttattgttgaaggtgattctgctggtggatctgcaaagcaagccagagatagagtctttcaggcaattcttccact

SEQ ID NO: 294823 - DNA, 912 bp, Unknown
  Bacterial polypeptide expressing nucleotide sequence isolated from the Sargasso Sea
gatttctcaatgagatataccctaatacagggtcagggtaactttggctctatagatggtgatcctccagcagctatgaggtatacagaagttagaatgcaaaaaatctctgatgagattctggcagatttagaaaaagaaacggtttcattctcagaaaattatgatggctctgaacaaatgcctgatgtaatgccaaccaaaataccaaatcttttaattaatggatcctcaggaatagccgtggggatggctacaaatgttcctccgcataatcttactgaaattataaatggttccctaaagctacttgagaacccaaaactatctattgatcagatcattaactcaattagcggccctgatttcccaactgggggtattattgatgggaaaatgggtatctatgaggcatataaaactggaagaggaataatttatgtcagatctaaatcaaaagtagaggaaagcaaaactggaaagaaatctcttgttatctatgaaataccttatatggtgaataaagctagaacacttgaaaaaattgcagaacttgtcaaagagaaaaagattgatggaattagtgaaattagagatgaaagcgataaagatgggctaagaatagttatcgatgtaaagaagggagagtctgttgaggttttagaaaataatctttttgcacaaactcagcttgaacaatcatttggaataaactttaccgtcttagttgatggccaaccaagagtactgaacctaaaagaaattcttcaagaattcctaaaacatagaaaagacgttgttttaaaaagaacaaaattcgagctcaagaaggctaaagaaagaggtcatattgtagaaggtttgatggttgccattgctaacattgatgaaatcataaagattataaaaaat

SEQ ID NO: 294824 - DNA, 577 bp, Unknown
  Bacterial polypeptide expressing nucleotide sequence isolated from the Sargasso Sea
atgagcaaagattatggcgcagatcatattaaagttttagaaggcttagaagccgtaagaaaacgcccaggcatgtacattgggacaactggcatcaacggtttaaatcaccttatttacgaagttgtcgacaactctgttgacgaagcaatggcagggtattgctctgtaattgatgttagaattgataaagataacatcattaccattcaagataatggtcgtggaattcccattgatacacataaagaaaaaaacctgcctgcagttgaagttgtattaacaacgttacatgctggcggtaaatttgaaggtgaaggctataaagtatctggtggtttacacggagttggtgtatccgtagttaacgcattagcagaatggcttgaaataactgtttttagagacaaccaacaatacacacaaacatatgtaagggggattccaaaaaaactgatcggcgactttagtgacgccactgatcacccaactggaactgttattaaatttaaacccgacgccacaatttttgatactgttgaatttggtgtagaaaccattgttcatcgtttaaaag

SEQ ID NO: 294825 - DNA, 835 bp, Unknown
  Bacterial polypeptide expressing nucleotide sequence isolated from the Sargasso Sea
ttgtcgaaaagccctgcttgccgctagaagtagaagcgcagcgaggaaagcaagagaattaattagaagaaaaagcgctttaggtggttcttctctacctggaaagctttcagattgttcaaatcgcgatcctgtattttgcgaactttatcttgttgagggagattctgctggtggctcagctaaacaaggaagagacagaagaacccaagctatattaccactaagaggtaaggtgattaattcagaaaaagcaagaattgataaactgctttcaaacaatgaggttcaatctatgatcacagctctaggtgctggttttggtggttccgatgaagatggcggagaaaggtcaccaggtgattttgatgtagaaaaattgcgctatcataaaataataatcatgacagatgcagacgtagatggctcacacataagaactctcttattaacattcttctatagaaaaatgaaacaagtaattgatggtggttatttgtacttagccttaccacccctctacagggtggcacagggaaaaaaagagtcttatgcgtatgatgacaacgaaagggacctaaccatagagagaatgcaaaaagataacaaaaataccaaagtttctattcagagatacaaaggtcttggagaaatgaaccctggtcaactttgggaaaccacaatggatccagaaacgagaacattaatgcaagtaacagtagaaagcgcagctgaagctgcagaaacttttcaaaatttaatgggtagtgacgttgaagcaagaagaacatttattgagaaaaatgcaaaatttgttgctaacctagacacataa

SEQ ID NO: 294826 - DNA, 889 bp, Unknown
  Bacterial polypeptide expressing nucleotide sequence isolated from the Sargasso Sea
cgacgggtctgcaacgatcacagatgacggtcgcggtattccggtggaaatccatgaagaagaaggcgtttccgccgccgaagtcatcatgacccagctgcatgccggcggaaaattcgaccagaattcttacaaggtttccggcgggctacatggcgtcggcgtttcggtggtgaacgcgctgtcggaatggctagagctccgtatttggcgagagggctcggaacacgtcatgcgcttcaaggacggcgaagcccaaggcccgctggaagtcgtaggcgctgccggcggcaaaaaggggactgcggtaacattcagcccctcttctggaaccttcactatgaccgaattcaatttccagacactggaacaccggttgcgcgaactggcgtttctgaattccggcgttcgccttctactgaccgatgcgcgcggcgtggagcccaataccgtggtactggaatacgagggcggcatcgaagccttcgtcaagcatctggatcgcggcaagacgccgctgatcgaaaaccccatcgtcattgccggtgaacagcacggtgtcagagtcgacatgtcgatggaatggtcggagagctatcacgaaacaacattgtgcttcaccaacaccattccccagtccgatggcggtacccatcttgctggattccgtgctgccctgacccggactgtcaacggctacgcgaatgacagcggcctggcaaaaaaggccaaggtgtcgctgtcgggggatgacgcccgcgaagggctgacctgcgtaatttcggtgaaggtgccggatcccaagttctcgtcccagaccaaggacaagctggtctcgtccgaggtgcggcctattgttgaaagcattgctaacgaaaaatttggccag

SEQ ID NO: 294827 - DNA, 466 bp, Unknown
  Bacterial polypeptide expressing nucleotide sequence isolated from the Sargasso Sea
atgcctgaatctgatttcgcgaaagcactatcaccggtcaatatagaagacgaaatgcggcagtcctatatggaatatgccatgagcgttattgtcggtcgagcattaccagatgttcgtgatggattaaaacccgtacatcgaagagttttatttgccatgaaagaaatgggaaatgattggaataaagcttataaaaagtctgcaagagttgttggtgatgttataggtaagtaccatccgcatggagacactgctgtttacgataccattgttcgaatggcccaatcattttctctaagatatatgcttgtagatggacagggaaattttggttctgtcgatggcgatgcaccagctgcaatgaggtataccgaagttcggatgtcacgagttgcccatgagattttggaagatctcgataaggaaactgtcgaattttcaccaaaattacgatggctctgaa

SEQ ID NO: 294828 - DNA, 169 bp, Unknown
  Bacterial polypeptide expressing nucleotide sequence isolated from the Sargasso Sea
atgtctcaattagaaaacaattatcaagcagattctataaaagttttgaaaggtcttgaggcggtcagaaaaagaccaggaatgtatattggtgatacagatgatggaactggccttcatcatatggtttatgaagtagtagataactctattgatgaagcgttggcag

SEQ ID NO: 294829 - DNA, 919 bp, Unknown
  Bacterial polypeptide expressing nucleotide sequence isolated from the Sargasso Sea
tcaagcttatattcttattgcaatacgattgagacaccagatgggggttctcatgagattggaataaggaatggactattaaaggctacaaaactttatggacaaaaacaccaaatatctaaaattaataatatttcatataatgatatttttgattactctaatgttataatttcgatatttataaatgatcctagttttgaaggacaaactaaaaaaagaataattatgcctactttacaaaaagaaattgaaaataagactcaagaagaattcttactatggcttaattctaataaaaaaaattcaaaaattttattggaaaatttagttgaaagagcattacaaagaacagatctgtcaaaaatacaagatttagatagaaaaagtttcaaagaaagaaatagattgccgggtaaattagtagattgctcaagtagatctcaagaaaatacagaaatatttattgttgaaggagatagtgcgggaggatctgcaaaacaagcaagaaatagagagttgcaagccatactcccacttagaggtaaaattttaaatgtttataatgtaggattatcaaaaattgcagacaataatgaaattcaaaatcttatacaatctcttggatgcggtattggtaaaaattttgatattaaaaaacttagatatgagaaaataattttaatgacagatgctgatgttgatggttcacacatagcaacattactaattacttttttttataaatatatgaaaaatttaattgatgaaaatagattatatttagctatgcctccacttttcaaaatttatgataaaaataaatatttttatgcttttgatgaaaaagagagggatgtaattatcaaaaaacaatttaaaaatgataattttaatataactagattaaagggtggag

SEQ ID NO: 294830 - DNA, 946 bp, Unknown
  Bacterial polypeptide expressing nucleotide sequence isolated from the Sargasso Sea
atttacgcaatgaatgaagcaggttatgtttcaggaaaaccttctagaaaatctgccagaattgttggggatgttatgggtaaataccatccgcatggagattcagcaatttatgatgcaatggttaggttagcacaagagtttagcatgagagttccacttgtcgatggacaaggaaattttggttctatggatggagactcagctgctgcaatgcgatatacagaagcaaaactctctcctatatcatcttatcttgtaaatgacatcaatcatgaaactgttgcttataaagaaaattatgatggaacaactttagaaccagaattattacctgcagaatttcctaatttattaattaatggatctgagggtattgcagttggaatggcaacaaaaatacctccacattgtcccgttgaaataataaatgcttgttgtaagtttgtagaaaacccagaaatatcggacgatgatttgttgaactatgttaatggtccagattttccaactggaggaataatagttgggcgatctggaatacgtagtgcatatttaactggaaaaggttcaattcttattagagggaaaacaaatattgaaactacaaaaaaaggaagaagctcaataattattaatgagattccattcgctgttaaaaaatcaaatttaattgaaacaatagctaaagtttcaagagataaaataattgaaggaatttctgaactaagggatgaatcaaatagagagggtgttagggtagttattgatctgaaaagagatgcccaagcagaggtaatccttaatcaattattcaaatttactcctcttcagacttcttttggaataaatatgcttgctcttaataaaggagttccagagcttttaaatttaaagaaatcaattaaactttttgttgaattcagaaaagatgtaattttttaaa

SEQ ID NO: 294831 - DNA, 316 bp, Unknown
  Bacterial polypeptide expressing nucleotide sequence isolated from the Sargasso Sea
atgataaataaaaacacatatcaagcaaattcgataaaagttttaaagggtttagaagctgttagaaaaagacccggtatgtacataggtgatacagatgatggtacaggcttacatcatatggtttatgaagttgttgataattcaattgatgaagctttagcaggttattgtaaaaatattaatttaaaaattaataatgatggaactatcacagttcatgatgatggaagaggtatccctgttgatatccataaagaagaaaaaaaatctgcagcagaagtaattatgacacaacttcatgctggcggaaaat

SEQ ID NO: 294832 - DNA, 526 bp, Unknown
  Bacterial polypeptide expressing nucleotide sequence isolated from the Sargasso Sea
atgaataagaaaaattatacttctatctctctacaagaagaaatgcagcgttcttatttggaatatgcaatgagcgtaatagttggacgtgctcttccagacgcaagagacgggcttaaaccagttcaaagaagaatactatttgcgatgtacgaattaggtttaacccctgaaagaccgtttagaaaatgtgcgagagttgttggagatgtacttgggaaatatcatccacacggagatcaagcagtatatgatgcgctagtaagattagtacaaaatttttcaactaaatatccaacgctagacggtcatggaaattttggatctgtagataatgatccgccagcagcaatgagatacacagagaccagattagcgccgattgcacataaagcttttttagaagaaattggatcacaaacagtaaattattcaaataactttgatggttcacaaaaagaaccagatgttcttccagcccaactaccatttttattattaaacggatcatcagggattgctgttg

SEQ ID NO: 294833 - DNA, 862 bp, Unknown
  Bacterial polypeptide expressing nucleotide sequence isolated from the Sargasso Sea
tgtagagatggattaaaaccagttcatcgaagaattttatattcaatgagtgaatccggatacaattataataaaccatataaaaaatccgcaagaattgttggagatgttatgggtaaatatcatcctcatggagactctgctatttacaattcaatggttagaatggctcaagatttttcaatgcggctagagctgatcgatggtcaaggcaattttggctcacttgatggagacccacctgctgctatgcgttatacagaggcaaggttatctaaagtatctgatagattagttcaagatatagaaaaaaatacaatttcatttcaagcaaactatgatgacactacatctgaaccatcggtccttccttctcagtttccaaatcttttagttaatggagcatcaggaatagctgttggtatggcaacaaatatcgccccacataatttaggagaggtaatagatgctacacttcatttaatttcaaatcctgaatgtaatacttctgatcttcaaaaatatatccttggacctgattttcctacaggtggtcaaattataggaaaaaaaggtatttcagaaactttcgaaacaggtagaggcgcatgtgttgttaggtcgaaaacaagtatagaaaattttaaaaaagatagagaagctataatcctgcatgaaattccatatcaagtaaacaaatcaaaattattagagagaattgctgaaatagtaaaaaacggtataattgatggtatttctgatttgagagatgagtctgatagaaatggtgtacgggttgtaattgaactaaaaaaagatgttgatgcaaatataatcttaaatcaactttataaacatactt

SEQ ID NO: 294834 - DNA, 888 bp, Unknown
  Bacterial polypeptide expressing nucleotide sequence isolated from the Sargasso Sea
tgaggcagcaaaaaaagcgcgtgaacttactagaagaaaaggggttatggatattgcgagtttacctggaaaattagctgactgccaggaaaaagatccagcaaaatctgaaatatttttagtagaaggcgactctgctggaggttctgcaaagcaaggtagagatagatctaaccaagcaattttgcccttaagaggaaaaattttaaatgtagaacgggctagattagataaaatgctatcatcagctgaaattggtacattaattactgcaatcggagcaggagttggcaactctgagattgacgttgaaaaagcaagatatcataaaataattattatgaccgatgcagatgtagatggaagtcatataagaacattacttttgacatttttctttagacatatgaggccacttgtagatgctggatatttatatatagcacaaccacctctatttagagctaagcaaggtaaatctgaagtttatttgaaagatcaacttgctttagatgattatcttattgaatcaggtattaaagatgtctctttatcaataggagataatgaaacaatatatggcgaggatttgaagatttcagttgagaaatgcataaacataaaaaggatcatagaaaatcttgcaaaaaaattaggttttcctcaaattttatctcagctagctattttaggtgttttaaatcaaaaaatgtttgagaatgaaaataatttaacaaaaattactcaaagattaaatcaagttttagctaattcgaataatgaatggtcttcaaaatatacttataaaaataataattatgaaaaaaaatttattgaaatttctaggatcaatagaggtgttaaagatgtttttgttatgggtgaaga

SEQ ID NO: 294835 - DNA, 931 bp, Unknown
  Bacterial polypeptide expressing nucleotide sequence isolated from the Sargasso Sea
ggtgcggactcgataaaagttctaaaaggcttagacgcagtaagaaaaagaccaggaatgtatataggagataccgatgatggatcgggcctacatcatatggtcttcgaagttatagataatgctattgacgaagctctagcgggtcattgtaaaaatattactgttacaatgaataaagataatactattaccgtagaagatgatggtagaggtataccagtagatactcacaaaagtgaaaaaatctctgcagccgaagttatcatgactcaacttcatgctggtggaaaatttgaccatgattcgtacaaagtatcaggaggtcttcatggcgtaggtgtttctgttgtaaatgccttatcggaaaaactagagctaaatatctatagagatggaaaagaatatttggtagtttttaaaaatggtaatactttaaaaccattaaagcaaattggtaaaacaaaaaaaagaggaacacgaataaattttttaccatcaaaagaagttttttcttcaacaaaatttagcgcttcaacaatagaaaaacgaattagagaattagcttttttaaataaaggaatatgcgtaaaactccttgatcaaacatctaaaaaagaaaaagaatttgtacataaatatgatggtggaattgtagaatttgtaaaacatattaataataaaaaaccaattttggtaaataaaaatgaaaaagaagtctttaaaaaacctgtttatgttacctccacaaaaaataatgtagtggtggaatgctccttcgagtggaatgctggatattctgaagatgttcttccttttacgaataatatacctcaaagagatggtggaactcaccttcttggtttcagaagtgccttgactagggtaataaacaaatattctaacgatagaaatagcaataaaagaaata

SEQ ID NO: 294836 - DNA, 274 bp, Unknown
  Bacterial polypeptide expressing nucleotide sequence isolated from the Sargasso Sea
atgagcgacgcttccaaggtccagaacgcctacggcgccgaacagatccaggtgctcgagggcctggagcccgtccgaaaacggccggggatgtacatcggctccacggggccgcggggtctgcaccatctggtgtacgaggtggtcgacaacgctgtcgatgaagcgcttgccggccattgcgacaaaattttggtggtcctcgccgaagacggctccgctgcgatcagcgacaacggcagaggcattcccacggatgtccatccccgcacgg

SEQ ID NO: 294837 - DNA, 706 bp, Unknown
  Bacterial polypeptide expressing nucleotide sequence isolated from the Sargasso Sea
atatcaagctgactccattaaggttttaataggtcttgaagcggtcagaaaaagaccagggatgtatataggagataccgatgatggtacgggtttacatcatatggtctatgaggttgtagataactctatagatgaagcattagcaggtcattgtaaaaatattaacgtaaaaattaattctgacggaacaattactgtaaatgatgatggaagaggtatccctgttgatatgcataaaggggaaaaaaaatcagcagctgaggtaattatgactcaacttcatgctggtggtaagtttgatcatgattcttataaagtttctggtggactacatggagttggtgtttcagttgttaatgcattatcagaaaaactagaattagaaataaatcgagacggaaaaaaacattttatagaatttaaaaatggtgaagcaaaatcacctctaaaagtagttggaaaatctaaaaatacaggtactcaaataacattcttaccttctaaggatatattttcgtcaattaaatttagtgcaaatattttaattaaaaggatgagagagttagcttttctaaataaaggtatcaaaataatttttactgatgctagtcaaaaaaaagaaaaaatatctgaatttaaatatgatggaggtgttttagagtttgtagattttttagatgaaaaaagagagaaattacaaaat

SEQ ID NO: 294838 - DNA, 876 bp, Unknown
  Bacterial polypeptide expressing nucleotide sequence isolated from the Sargasso Sea
aagaattttatatgcaatgcatgagtcaggttatgagtggaataagcaacatagaaagagtgctcgagttgtcggtgatgtaattggtaaataccatccgcatggagatcaagctgtttatgatgcgttggtcagacttgcccaagacttctcaatgagcgtgcctctattagatggtcaaggtaattttggatcaatggacggtgatagggctgctgcgatgagatatacggaagttagaatggcaaaaattgctagttttcttcttgaagatatagaaaaagaaacggtcgactttagacctaattatgatgaaactgaaagtgagccatctgttcttcctgcaaaatatccaaacctacttgtcaatggtgcaggtggaatagccgttggtatggcgactaacattttacctcataatttaggagaggtcattgacgctagtattgcttaccttaaaaatgccgacgtaacttttgaggaaataaatcaaactataaaaggtccagactttcctacgggtggaacaattattggcataaaaggcataaaagactctcaatcatcaggaagaggctcaatcattgttcaggcaaaatcaaatatagaggaatttaaaacagatcgagaggcaatcgtttttaccgaagtaccttaccaagttaacaaatcatctttgcttgaaaaaatagctgaacttgttagagataaaaaaattgatggcataagtgatttaagagatgagtctgaccgccatggagtgagggttgttgttgaattaaaaaaaggggtaatatcacaagttgtattaaataaattatataaatttacagcactacaaagttcttacggagttaattcattggcattggtaaa

SEQ ID NO: 294839 - DNA, 863 bp, Unknown
  Bacterial polypeptide expressing nucleotide sequence isolated from the Sargasso Sea
cctgtagatattcataaaagtgaaaaaaaatctgcagctgaagttattatgacacaacttcatgcaggaggaaaatttgaccatgattcatataaagtatcagggggactacatggcgttggtgtttcggttgtaaatgcactttctaaaaaattgcatctagagattaatagagatagtaaaaaatattttatagagtttgaaaatggtgaagcaaaagcaccgttaaaagcaattggaaaatcaaagcaatctggtaccaaaattacttttttaccttctacagaaattttttctacagttaaatttagtgccaatattttaataaaaagaatgagagagttggcattcttaaacaaagggatcaaaattatttttattgatgccagcttaaaaaaggaaaaaatatctgaatttaagtttgatggaggtgtaatagagtttgtcgactttttagatgaaaaaagagaaaagttgcaaaataaaaatggaaatgatttatttagaaaacctatttatatagaaggaaaaaagaataatatagaaatagaatgttccatgaaatggaatgctggttatggtgaagaaatttttccatatacaaataatatttatcaaaaagatggtggtacacatttattaggatttagaagtgcattaactcgagttgtaaacaaatatgctaatgagcataatttgctaaagaagaacaaattagctatttctggagatgatataaaagagggtttaacatgtgttttatcaactaaaattcctgatcctaaattttcttctcaaactaaagataaattagtctcctctgaagtgagaatgattgtggagacagtggtaaatgaaaaatt

SEQ ID NO: 294840 - DNA, 732 bp, Unknown
  Bacterial polypeptide expressing nucleotide sequence isolated from the Sargasso Sea
gtttcttaacaaaggtataagtttaaatctttacgataaaactggcttaaaaataaaagaatatttaaacaaatatgaaggtggtgtaatggagtttgttagatatattaataaaaaaaaacctattttaattaataaaaatgaaaaggaagtttttaaaaaaccaatattaataacaggatctaaaaataatgtttctgtagattgtgcattcgagtggaatgctggatattcagaagaggtgcttgcttttacaaataatatacatcagaaagatggtggaacacacctattagggttcaggagtgctcttacaagagttataaataaatattcagcagataataaaaaaaataagataaatttatcaggtgaagatattaaagagggtttaacattagttctgtcagtaaaaatgccggatccaaaattttcatctcaaactaaagataaactagtctcttccgaggtaagattaatagtagaaaatattattagcgataaagtttcaacatggttagaccaaaatcctagtgttacaaaaatagtaatagagaagatcatgcaagctgcaatagccagagatgttgcaaggaaagctagagatagcgtcagaagaaagggctcatttgagctttcaggtctcccaggtaagcttgcagattgtcaaattacaaagaaagagggaacagaattatatattgtagagggtgactcagcaggcggttcagc

SEQ ID NO: 294841 - DNA, 586 bp, Unknown
  Bacterial polypeptide expressing nucleotide sequence isolated from the Sargasso Sea
atgtctaaaacaaccaacaattatcaggctgactccattaaagttttaaaaggtcttgaagcggtaagaaaaagaccaggtatgtatattggagatacagatgatggaactggtttacatcatatggtctatgaggttgttgataactctattgatgaggcattagcaggatattgtaaaaacattaatgtcaaaattaactctgatggaacaattactgtaaatgatgatggtagaggaattccagtagatatacataaaggtgaaaaaaaatcagccgcagaagtaatcatgactcaacttcatgccggtggtaaattcgatcatgattcttataaagtttcaggtggattacatggagttggtgtttcggttgttaatgcgctatcagaaaaattaaaactagaaatatatagagatggaaaaaaacattatattgaatttcaaaatggtgaggcaacagcgcctttaaaggttgtgggaaaggcaaaaaacacaggcacacaaataacttttttaccttctaaagaaatcttttcttcaacaaaatttattgcaaatgttctaattaaaagaatgagagagt

SEQ ID NO: 294842 - DNA, 529 bp, Unknown
  Bacterial polypeptide expressing nucleotide sequence isolated from the Sargasso Sea
ttggctgaaaattcggcaccgccgccacctctagatcctgatatcgaacacgtttccatcgcggatgagatgcggaaatcgtatctcgattacgcaatgagcgtaatcgtcagccgagcgctgccggatgttcgtgacggtctcaagccggttcatcgccgcatcctgcatgtcatgaacgaaaacagctatgactggaaccggccgtaccgcaaatctgcgcgtgtggtcggggatgtcatgggtcagtatcacccccacggtgaccaggcgatttacgacgctatggtgcgcatggcccaggatttttccatgcgtctgccgctgatcgacgggcagggcaatttcggctcgatggatggcgatccgccagcggcgatgcgttataccgaggcacgacttgaacgggtggcccgcgagcttcttgacgatatcgacaaggataccgtcgacttccagcccaactacgacgaaacgactaaggaacccaccgttcttccggctaagttcccgaacctgctggtcaatg

SEQ ID NO: 294843 - DNA, 526 bp, Unknown
  Bacterial polypeptide expressing nucleotide sequence isolated from the Sargasso Sea
tatgattcatcattatgatgctgagaatattaaggttttagagggcctagaagcggttcgtaaacggcctggtatgtacattggatctactggtataagtgggttaaaccatcttgtttatgaggtggttgataatagtatagatgaagcaatggctggattctgctctgatgtatatatttcgattgagccggataatattgtcacagttaaagataatggtcgtggaattccaattaatgagcataaagaaaagaagcttcctgcagtagaggttgttatgactacactacatgctggtggtaaatttgaaggtgaaggatataaagtttctggcggtttacatggggttggtgtttctgttgtaaatgctcttggtgaatggctagaggtgattgttactcgtgatgataagagatatactcagaaatactttagaggcaagcctaagaaattggttggtgagtatgaagatgttcctggtgttgaaactggaacaaccatccgatttaagcctgacgcaaaa

SEQ ID NO: 294844 - DNA, 612 bp, Unknown
  Bacterial polypeptide expressing nucleotide sequence isolated from the Sargasso Sea
tatgacaaataaaaatacatatcaagctgactctataaaagttttgaaaggtcttgaggctgtaagaaaaagacctggaatgtacataggagacaccgatgatggaactggtttacatcatatggtttatgaagtggttgataattctattgatgaagctttggcaggttattgtaaaaatattagtgtaaaaattaatgtagatggaacaataactgtaaatgatgatggaagaggtattccagtagatattcacaaaggtgaaaaaaaatctgcagcagaagtaattatgacccaacttcatgcaggaggaaaattcgatcatgactcttacaaagtttctggcggattacatggtgttggtgtatctgttgtaaatgcactttcagaaaaattacaattagaaattaatagaaatggaaaaaaatattttattgagtttcaaaatggagaagctaaggcacctttaagggtagtcggaaagtcaaaacaaacaggaacgcaaataacttttttaccatctaaagaaattttttcttcgattaaatttagtgcaagtattttaattaaaagaatgagagaattagcttttttaaataaaggtattaaaaa

SEQ ID NO: 294845 - DNA, 870 bp, Unknown
  Bacterial polypeptide expressing nucleotide sequence isolated from the Sargasso Sea
aatgaaaaattatcaattttggtttgatcaaaatccatcaatagcaaaaataatattagctaagatcattcaagcagcaatggcgagagatgttgcaagaaaagcaagagaaaatgtaagaaggaaaggtgctcttgagttgagcggtctacctggaaaattagcagattgtcagattggaaagcaagacggaacagaattgtttatagtagagggagattcagctggtggctctgcaaaacaaggcagaaatagatctaatcaagcagttttaccattaagaggaaaaatactaaacacttatgtagaggattttaatgtgaagaaaaatcagaatggtaatggaaatggatctgaccagagaacaaaagcgttatccaaaatggtttcttcaaatgagatagtcactttaataaatgctttaggtttagatccaaaagcacaagaaattgatttaaaagatttgagatatggaaaaataattattatgactgacgccgatgtagatggatcacatataagagctcttcttttaacttttttcaataacaaaccatttagtaaactaattgaaaacggtcatatttatttagctcaacctccattatttaaaattaataaaggttcaaagggtatttatattaaagatgaggaggaattagagaattatataattaataatagtaaagacttaaaaaaaagtaaaaagggttcaaaagaatttatagattttttagaaattgaaaaatcaaagatgagtatacagagattcaaaggtttaggagaaatgaatcccgaagagttatggtctactactttaaatccggaaacaagaaatttattacaagttcagtattcgaaaaatttaaa

SEQ ID NO: 294846 - DNA, 538 bp, Unknown
  Bacterial polypeptide expressing nucleotide sequence isolated from the Sargasso Sea
aatattgaaaacttaagatatgaaaaaattattattatgacagatgcagatgtagacggatctcatattaggacccttttactgaccctatttaataattatccatttaatgaattaatagaaaaaaatcatttgtatcttgctcaacctccactctataaggttagtaaaggttctaagatttcttacattaaaaatgataaagaattggaagaatttttaattaaatcttctggaaagtcaaaaaatgatattaaaaaaaatgcaaaagaatttagcaaatttcttgaaaaagaaaaaagtaaactcaatattcagagatttaagggtttgggtgaaatgaaccctgaagagttatgggaaacaactttaaatccagaaaaacgtattcttttgcaagttaagtattcaaatagcactaaggctaagtcaaaaaaagaccaagatttaattcaaatacttatgggtgacgaggttgctccaagaaaagattttatagttaatggagctttggaagtttcaaatttagatatataat

SEQ ID NO: 294847 - DNA, 652 bp, Unknown
  Bacterial polypeptide expressing nucleotide sequence isolated from the Sargasso Sea
tcacggagatcaagcggtatatgatgcattagtaaagttagtacaaaatttttcaactaaatatcccactcttgacggtcatggaaattttggatctgtagataatgatccgccggcagcaatgagatataccgagaccagattagctccaatagctcataaaggatttcttgaagaaattggatcagaaacagtgaacttttcaaataactttgacggttctcaaaaagaaccagatgttcttccagcccagcttccatttttattattaaacggctcatctggcattgctgttggcatggcaacaaatattccgcctcacaacctgggcgaaattgtggatggtttagttgccttagttaaaaataaagatattagtgataaaaaactttctaacattatcaaaggacctgattttcctacaggcggagaattaatttatagtcatgcaatagaagaactttatcaaactggaaaaggatctataacaataagaggagttgttaatactgaagaagtaaatttaggcaaagggaaacataaaaagaatgcaatagtcattacggaacttccttaccaaattaataaagcaggttggattgaaaaactcgcagaacttgttaatttcaggcaagattattgggatttctga

SEQ ID NO: 294848 - DNA, 994 bp, Unknown
  Bacterial polypeptide expressing nucleotide sequence isolated from the Sargasso Sea
ttcatacgtaaacaacatcaacactcacgaggggggaacacacctttcgggattccgcgcaggattgacgcgtactttgaaaaaatacgcagatgcttccggaatgctcgataaactgaaatttgaaattgccggcgatgatttccgtgaggggttgacggccattatttcggtgaaagtgcaggaacctcaatttgagggccagaccaagacaaaactgggtaaccgtgaagttacggcagcagtaagccaagcggtttctgaaatgcttgaaaattatttggaagagcatcccaacgatgcaaaaaccatcgtccaaaaagtaatattggcggcacaggcccgtcacgcggcacgaaaagcccgcgaaatggtacagcgcaaaaccgtgatgagcggcggcggcctgcccgggaaactttcagattgctctgagcaggaccccgaaaaatgtgaagtattcctcgtggagggagattctgcgggtggtactgcaaaacagggccgtgaccgtaattttcaggctatccttccgctgcgcgggaaaattctgaacgtagaaaaagcaatgcatcacaaggtttttgaaaacgaggaaatccgaaatatttataccgcgctgggtgtaaccattggtactgaagaggatagcaaagccctgaacctcgaaaaactgcgctatcaaaaagtagtgattatgtgtgatgccgatgtggatggtagccacattgcaaccttgattttgactttcttcttccgttatatgcgcgaactggtggaagctggctgcgtttacatcgccactccgccgttatatttgctcaagaaaggcgcaaagaaggcgtatgcttggagcgataaagagcgcgacagattgaacgaggagtttggaggtagtgcttccatccaacgatacaaaggtcttggagagatgaatgcggagcagctttgggataccacaatgaatcctgagttcgcaccctgcgtcaggtaa

SEQ ID NO: 294849 - DNA, 872 bp, Unknown
  Bacterial polypeptide expressing nucleotide sequence isolated from the Sargasso Sea
atagctgtaggtatggcaactaatattcctccccataatttatacgaagtaattgacgctgtaatagcactaagtaaaaagccaggtcttaaaataaaagatttaatgaaatatattcctggcccagattttccaacagcaggaattatcacaactgataaggctgacaatggaatagagtctgcatatgagacaggaaaaggtaaagttataatgcaagcattaactcatattgagaccgataaaaagaaatctcgagaaaaaataattatttcagaacttccatatcaagttaacaaagctaggttaattgaaaaaattgccgaattggtaagagacaaaaagttagaaggtatttctgaattaagagatgagtcagataaagacggaatgagggttgtaatagaattaaaaaaatcagagatatcagaagtccttttaaataatttattccagcagactcaaatgagaacatcttttagtatcaatatggttgcattaatcaatggtaaacctagagcggtaaatctaaaagaaatattgtcagcttttattgaacatagaaaagaaatagttaccaaaagaactatatttgaattgaaaaaagctagggagaaagctcatatcttggaaggcttagctgtagcattatctaatatagatgaaataataaaattaattaaagaatctaaaaattctcaagaagcaaaagaaaaattgctctctaaaaaatggaaggctggtattattcttaagatgttagattcgtcaaaaggatctattacaaaacctgaggatttaaatgaaaatcttggtttagtaaaaaatcaatatttattatcagaaaatcaagcgcaggctatcttggaaat

SEQ ID NO: 294850 - DNA, 459 bp, Unknown
  Bacterial polypeptide expressing nucleotide sequence isolated from the Sargasso Sea
ataaactaaggtatcacagaataattataatgactgatgctgacgttgacggctcacatataagaaccttgcttttaacattcttctttaggcaaatgttcgaaatcttaaatagaggacatgtttatattgcattaccacccttatacaaggtttcaaaaggcaaaactattaaatatgcatcttcagaaaaggaaaaggatattgctctaaaagagttatctaaaacgggcaatagaggaattgaaatacaaagatataaaggtttaggtgaaatgaatccagatcaactttggactacaacaatggatcctcaaaacagaagaatgatgagggttcgcattgatgatgccaacgaagctaacaactcttttgaggttctaatgggtgatcaggttgaaccaaggagagagtttattgatgaaaacgccctttccgttgctaatttagatatttagg

SEQ ID NO: 294851 - DNA, 684 bp, Unknown
  Bacterial polypeptide expressing nucleotide sequence isolated from the Sargasso Sea
gatgagctcatcttatctttcatatgcgatgagtgtaataataagtagagcacttcctgatattagagatggattaaaacctgttcatagaagaattttatacgcaatgcataagggtggttttgattggtcaaaacaatttagaaaatctgcaagaattgttggagatgtaattggtaaatatcatccacatggagaccaggctgtttacgatgctttagttagaatggtacaagatttttcaatgagtttgccattgatagatggtcaaggaaactttggctctattgatggagatccacctgctgcaatgaggtataccgaaacaagattagctaaagtttcacagtatttgatagatgatatagacaaagaaacagtatcatttaaaagtaattatgatgaaacagaatttgaaccaaatgttcttccggctcaatatccaaatttattagttaatggagcaggaggcattgcggtaggtatggctacaagtattccaccacataatcttggtgaagtaattgatggaactttggcgctaattaaaaataaagatataaaaattaaagatctaatgaaatttatacctggtcctgattttccaactggaggaataataattggtaaagatattattaaacaaggttataaaattggaagaggttcttttaaaataagagg

SEQ ID NO: 294852 - DNA, 856 bp, Unknown
  Bacterial polypeptide expressing nucleotide sequence isolated from the Sargasso Sea
gatttttcaatgcgatatgagcttgtagatggacagggaaattttggatctattgatggtgacaatgccgcagcaatgaggtacactgaatctagaatgactaagttgtcaagtgaaatgcttaaagacttagataaagacacggttgactggggtccaaactttgatgaaactttaaaagagcccgcagttttaccgtccgccataccaactctacttgtaaacggatcagaaggcattgcggttggaatggcaactaaaatacctccacacaacctaaaggaaattataaacgggttaattgccttgatcgacgattcaaacatatcaatcgatggtttaatggaacatgtaaaaggtccagatttccctacagctggtttgatcatgggaatggatggattaaaacaagcctatgaaacaggtaggggtaaaataaaaatgcgagctagggctcacattgaaacaaataaaaatggaaaagatagtattgttattacagaagttccatttcaaactaacaaagccaatcttgtagaaaaaattgctgacttggttggacagaaaaaaatcgaaggaattcgtgaccttagagatgaatctgataaagatgggattagagttgtcgtagaaacaaaaaaagatgttgtgcctgaggttatcttaaaccaactatatcaatttacccaacttcaagacacatttggcattatactacttgctttggtagaaggtgttccaaaagtcatgtcattaaaaacaacccttcagcattttgttgattttagacatgatgtggttgtaagaaggaccgagtttgaattaaaagaagcagaggcaagagctcatattttag

SEQ ID NO: 294853 - DNA, 824 bp, Unknown
  Bacterial polypeptide expressing nucleotide sequence isolated from the Sargasso Sea
aggggaattaattaatggtcttaaatcaataattaaagacccttcaattgaagatagagaactttttgaaataattaagggtcctgattttcccacaggtggtcaaatcttaggcagagagggtatcaaagaaactttccaaacaggaagggggtcaataactatgagaggtgtagcaaatattgagcaaattaaatccactggtagagcagaaaaagacgcagtaataattacagagcttccatttcaaactaataaagcggcattgatagaaagaattgctgacttggttaatgaaaaaaaattagaaggtatttctgatattagagatgaaagtgatcgagatggaatgaggattgttattgaactaaaaagggatgcctatccacaagtagttttgaataatttatttaagttaacacctctacaaaataactttagtgcaaatattcttgctttagtaaaaggagagcccacaactctttcactcaggaaaatgttagatgtatttctagacttcagagtggatacaataaagcgaagaacaggatttttattaaaaaaggctgaagagagggatcatatcgtaaaaggtcttttattagcattgggtgctatggatgagattattaatctaataagatcagctaaagatacagtttcagccagagaaaaattacaaactgatcatgagttatctgccacacaggcagaagctattttacaaatgcaattaagaagattaacagcgctagaagcagacaaaatcaaaggggaacatgatgagttaaccagaaaaataaacttatatcaacaaatatgaa

SEQ ID NO: 294854 - DNA, 872 bp, Unknown
  Bacterial polypeptide expressing nucleotide sequence isolated from the Sargasso Sea
attgttggtgatgttataggtaaatatcaccctcatggtgatcaatcagtttatgatgcattagtaagaatggttcaagatttttcaatgagtcttcccttggttcaggggcagggtaattttggatctatagatggtgaccctgcagctgcaatgagatatacagagacaagattatctaaagtctctcaatatttaattgatgatatagagaaaaatactatttcatttaaaagtaattatgatgagacagaaaaagaacctacagttttacccgctcaatatccaaatcttttagtaaatggtgccggtggtatagcggttggaatggcaacaagtattcctcctcataatttaggtgagattatcaacggaactctagctttaatagacaataaggatataaagattagagaattaatgaaacatgttccaggtcctgactttccgactggcggagttatcattggtaaagacattataaaacaggggtataataatggtagaggatcatttaaaattagaggtgaagtttctattgaaagtttaaaaaatggaagagaaagattggtaattacttcaataccttatcaggtcaataaatcagttttaaatgaaagaattgctcaattagtcagagaaaaaaaaattgaagggattaaagatattagagatgagtctaatagagaaggtataagagttgcaatagacttaagaaatggtgttgagccagagaccataaaaagacaactttataagaatacacaaattgaaagttcttttggctttaatactttggcaatcgttgagggtaaacctaaaacatgtacattaaaagatttctttatcaactttttatcatttagagaaga

SEQ ID NO: 294855 - DNA, 904 bp, Unknown
  Bacterial polypeptide expressing nucleotide sequence isolated from the Sargasso Sea
aaagataaatatgactcatcgagcattaaggttttaaaaggcttagaagctgttaagaaaaggcctggaatgtacattggtgatactgatgatggttctggcttacatcatatggtttttgaggtcctagataatgccatagatgagggtttagcagggttttgtgactatattgaagttaaattaatgaaagacggttttgtgtctgtgtctgataatggtagaggaattcctgtagacatgcacgaggagggtgtacctgcagcacaggtaataatgacctctctacattcaggtggaaaattcgatgagaatagctataaggtttcaggtgggttacatggggtaggagtatcagtagtaaatgctctaagtagcaagttgattttggaaattgaaagagatgggaagaaatactatcaggaatatgctgagggcacacccaaaacagatttaaaagaaaacggaaaaagtgataaaacaggtactaaagtaagctttctaccatctaaaaatacatttgcctttacagaatttaatgttgagatacttaaaagaagaatcagagagctttcttttttaaattctggtattgcaataacaataattgatgaaagaacagatcagaaatttgattttaagtcagaggggggtttagttgaatttgttaattatttaacaggcaaaaaagagccagttggcaccccttttaccgctcaggctagcatgaagggaataggggtagaaattgccattcaatggacaaatacttattcagaaaatgttcaatgtttcacaaataatattcctcagatagatggtgggacgcatatggcagggtttcgaggcggacttactagagcgataaaaacatttattaaaaaagaagacatgagaagaaaaa

SEQ ID NO: 294856 - DNA, 222 bp, Unknown
  Bacterial polypeptide expressing nucleotide sequence isolated from the Sargasso Sea
catggcaaaaaaaccctctaaagccaaacaaaaagccgcatctcaaaaaacttatgattcctcaaatataaaggtcttaaaaggtttagaagcagtaaaaaaaaggcctggaatgtacattggagatactgacgatggcacaggattgcatcatatggtctttgaagtcgttgataattctatagatgaagcgcttgctggttattgtgacaaaattgaagt

SEQ ID NO: 294857 - DNA, 614 bp, Unknown
  Bacterial polypeptide expressing nucleotide sequence isolated from the Sargasso Sea
aggacgagatagaaatttccaggctattttgcctcttaggggtaaaattctcaatattgaaaaaactgacgatactaaaatatataaaaatacagaaatacagtcattaataacagctctaggattaggaataaaaggagaggagttcgaagagagctctttgagatatcatagagtagtaattatgacggatgctgatgttgacggtgctcatataagaactttattgctgacatttttttacagataccaaagagaacttgttgagaaaggttttatatacattgcttgtccccctctttataaagttgaaagaggtaagaatcataattattgttataacgagaatcaattaaaggatacaattcaaggttttggagaaaatgcaaattataatatccaaagatttaagggattaggggagatgatgccaaaacaattatgggatacaactatgaatcctcaaacgaggatgatgaaaagggttgaaattgaagatgcacttgaagctgacagaatattcaatatattaatgggagataaagttgcaccaagaagagaatttattgaaactcatagtagcaacttagatatggcaactttagacatatgat

SEQ ID NO: 294858 - DNA, 817 bp, Unknown
  Bacterial polypeptide expressing nucleotide sequence isolated from the Sargasso Sea
gaggccgtcaaaaaaaggccaggaatgtatattggagatactgatgatggaacgggtctacatcatatggtttatgagatagtagataattcaattgatgaggcacttgctggacattgtgatgaaataaccgtaaaaatattgtcagatgattgcgtctctgtctcggacaatggaaggggcattccaactgatatgcatgaggaaggaatgtctgcagcagaggtaatcatgacaaagctgcatgctggcggaaagtttgatgataactcctataaggtctcaggaggtttacatggggttggtgtctcggttgtaaatgctttgtctgaagatttaaagctaacaatttatagaggtggcaaaatacatgaacaagaatatgcggatggtgctccaaaaggaaaattaaaggtaacaggaaaaactgataaaacaggaactcaagttactttcgttccatcgcctactactttttcagatattaattttcaatacgatgttttagaaacaaaacttcgagaactctcctatcttaatgcaggtcttaaaattaacttaattgatgagagaaattctaagaaaaaagaattttttcacaaaggaggactagcagaatttgtatcatttttgaatacaaaaagaacaactgtcaattctgtatttcattttgtaaaggaagcagcagacggtattactattgaggtttcacttcagtggaatgatggttatcaagaaaacattcagtgctatacaaataacattaagcaaagagacagtgggacacatttggttggattcaggacagccttaacaa

SEQ ID NO: 294859 - DNA, 786 bp, Unknown
  Bacterial polypeptide expressing nucleotide sequence isolated from the Sargasso Sea
gctggatattgtaaaaatataagtgttgatattaatgatgatggaactgtaacagttcatgatgatggaagaggaattcctgtagatattcacaaaacagaaaaaaagtctgcagcagaagtaattatgactcaattacatgctggtggaaaatttgaccacgattcttacaaagtttctggaggattgcatggagtaggagtttcagttgtgaatgcattatcagaaaatttaaagcttactatagatagggatggaaaaaaatattttattgagtttaaaaatggtgatgccattaaacctttaaagattattggaaaatcaaaatcaaatggcactgaaataacttttcttccttcaaaagaaattttttcttctactaagtttagttttagtattcttcaaaaaagattaagagaattagcgtttttgaataaggggatcaaaatttcaataatagatcattgtcaaaaaaaaattaaaaaatcagaatttaaatttgagggtggaattatagaatttgtagaacatttatcttcaaataaagatcaacttaaaaataaaaatgataaagacttatttaaaaaacctatttttattgaaggaaataaagacaagcttgaaatagaatgttctttaaaatggagcgcaaattattctgaggatgtgtatccatatactaataatattttccaaaaagatggcggaacacatttattaggattcagaagtgctttaactcgtgtaataaataaatatgcaaatgaacaaaatttattaaaaaaa

SEQ ID NO: 294860 - DNA, 889 bp, Unknown
  Bacterial polypeptide expressing nucleotide sequence isolated from the Sargasso Sea
cttcaattctcaggacaaacgaaagagaaactcagttcgagagctgtttcaggttttgttacaggcctcattaaagatgctttcacgctttggttgaatcaacatcctgaagcgggagaccaaattgttgcaagggcaattgagaatgctcaaaaaagagccaaaaagaatataaaggtaaaacgaaagaaggccacaggtggaccaacattgcctggcaaactcgcagactgtacgagcgacgagcctgatctttgtgaattatttatagttgaaggtgattctgctggtggatctgcaaagcaagccagagatagagtctttcaagcaattcttccacttcgaggaaaaattcttaatagttgggaagtcgatgagagcaatctactttcttctcaagaaatcagcaatatctctcaggcactaggtgttgagcctggggccgatgagcttggtaatcttagataccataaaatttgtatacttgcagatgctgattcggatggactccatatcgcaacattgatttgcgccctgtttttgaaacattttagaaaattggtcgaaaatggtcatgtctatgtatcaatgccacctttgtatcgaatcgatgttggaaaagaggtgcattatgcgcttgatgagactgagaaggattcgattttaaaggcattagaaaaaaagaagccaaatacgaaaacaactgttactcgctttaaaggtctgggtgaaatgagtccagttcaattgagagaaacaaccatgcttcaagattctaggaggcttgtgaagctgaccattgataatgcatcatatacagaagagcttatggataaattgatggcaaaaaaacgctatacagatcgaaaagaatggcttgaagaaaagg

SEQ ID NO: 294861 - DNA, 747 bp, Unknown
  Bacterial polypeptide expressing nucleotide sequence isolated from the Sargasso Sea
gataatgggagaggagttcctgttgataatcacaaggaagagggaatttcagcagctcaattaattatgacagagcttcatgcagggggcaagtttgatcaaaatagttataaagtttctggtggcttacatggtgtaggtgtttcagttgtcaatgctctttcagagaaattattattagaaattaaccgtgataaaaatatttatagaatggattttaatcatggagctgtagaaaatgcattaaaagttgtgggtgagtctgaagaaattaatggaaaaatatatacaggcacaaaaataacctttttaccttcaaaaaatatttttaaaaatattgaatttaatttttctactattgaaaaaagattaagagaattagcttttttaaatactggagtaaatattattcttctagataaaagagcttcacaaaaaaaagaaataaattttaaatatgatggtggcataattgagtatgtaaattatcttaacaaaggaaaaaactgtataaatagttcaccaatatattttttgggaacaaaaaataatgttaatgtagaatgcgcactacaatggacagatgcttatcatgaaaacactctttgctttactaataatattgctcaaagggatggaggaacacatcttgctggctttagaggagctttaacacgtagcatagtaaatttcataaatcaaaaaataaaaaatagttctaatatttctggtgatgatgctcgagaa

SEQ ID NO: 294862 - DNA, 987 bp, Unknown
  Bacterial polypeptide expressing nucleotide sequence isolated from the Sargasso Sea
gaggcagctagaaaagctagagaggtttctagaaaaaactcagcctttgaaataagttcattacctggcaagcttgcagactgtcaggataaattggctgagaattgcgaattattcattgtagaaggtgactcagctggaggctctgctaaacaagctcgagatagaaaaaatcaagcagttctccctttaaaaggtaaaattttaaataccgaaaaagctagaccagataaagcggttagttcagcagaaatagcaaccttaattcaggcacttggtaccggatttaaaccagattttaacattgaggatttaagatatcataaaataattataatgactgatgctgatgttgacggatctcatataagaacattattacttacttttttttataggcatatgcctgatctaattaaagaaggctatgtttatatagctcagccaccactgtatagaataaaaaaaggtaagactgaattatatctcaaagacgataaagaattagacaactttcttataaatgacgcggttgagcaagcagttttacttcaaaaaaatgggataagtgttaaaggagttgatttagcaaatcttttcaatttattaattagttttgataaactattggttcaattatcagcaggtaatgacagtttgtattttcttttagagcaagcaacaatttcaaatttttttaaatctagtaattttgataatcaagaaaaaacaaataaaacaattgactatcttcttaagagattaaattttgatcttctaatatggtcagctgaaataaaatctggagaatgtatagttttttataagacagaaaataaagtcaaagaaaaatttgaaattctttttaaagattttgacgaatttaactatatgaatttaaaaagatttagtgatcgcttacaagaatattttcttaatagctcaactcttgagattaacgatgaaaaatttgatattttcagccca

SEQ ID NO: 294863 - DNA, 898 bp, Unknown
  Bacterial polypeptide expressing nucleotide sequence isolated from the Sargasso Sea
agatgtactaggtaaatatcatccccatggagatcaagccgtctatgacgcattagtaaggttagtacaagatttttcaacaaaatatccaactcttgatggtcatggaaattttggatctgttgataatgatccaccagcagcaatgagatatacagaaactcgtcttgctcctatagctcatcaaggttttctagaagaaattggatcagaaacagtaagctattctgataactttgacggatcacaacaagaaccagatatattgcctgcacagttaccatttcttttattaaatggctcctcaggaattgcagttggaatggctacaaatattccaccccataatttaggagaagtagtagatggtctaatagctttaattaaaaataaagaaataagtgactcgaagttattgcgaattattttaggtcctgattttcctacaggaggagaattaatatatagtgactccataaaggatctttatgaatcaggcagaggatcagtaactattaggggtgttgttgataccgaagaaataaatcttggtaaaggtaagcacaagaaaaatgcattaattatatctgaacttccttatcaaataagtaaatccggctggatagagaagctagctgatttagtaaatatgggaaaaattgatggcatatctgatatcagagatgaaagtgatcgagatggtatgcggattctaattgaattaaaaaaagattcaaatcctgaaattgtgatatccaacttgtataaaaaaaccgcactacaatcaaattttggtggcatttttttagccttaattaatggaaaacctgttcaacttacattacgaaagtatttaaattattttctagaatttagagaggaaactataaaaaaaaga

SEQ ID NO: 294864 - DNA, 691 bp, Unknown
  Bacterial polypeptide expressing nucleotide sequence isolated from the Sargasso Sea
atggaaaatatcgagataaaaaataatacaaaaccaaaatcaattcttgtccaccaggaaatgagttcatcttatttatcttacgctatgagcgtaattgtaagtcgggctcttccagatgtaagagacggtttaaaacctgtgcacagaagaattatatacgcaatgtacaaaggaggttatgattggggaaaaccttttagaaaatctgcgagaattgttggagatgttattggtaaatatcaccctcatggtgaccaagctgtttatgatgctttagtaagattagttcaagaattttctatgagtttacctttaatagaaggccagggaaattttggttctattgatggagatcccccagcagcaatgagatatactgaaacaaaactatctaaagtttctgaatatttaacaaatgggattgaaaaaaacacaattgacttcagaaataattatgatgatacagagcaggaaccagtagtattaccctcccaatacccaaacatacttgtaaatggagctggaggtatagcggtaggcatggcaacaagtataccaccacataatcttggagaagtcataaatggcacaattaattttattaaaaatagagacataactatttcacaattgatgaaggatattcctggtcctgattttccgaccaggtggaattattattggtaag

SEQ ID NO: 294865 - DNA, 904 bp, Unknown
  Bacterial polypeptide expressing nucleotide sequence isolated from the Sargasso Sea
ataccctaatcttttagtaaatggcgctggtggaattgcagttggaatggcaacaagtatacctcctcataatttaggagaagtaattgatgcaactttagcattgattaaaaacaaagatattaaaattaatgaattaatgaaacatataccagggccagattttccaactggaggattaattattggtaaagatattattaaacaaggatataagacgggtaggggttcatttaaaataagaggagaaatatcagtagaaaatttgaaaaatggtaaagatagacttgttatatcatctataccttatcaaataaataaagcaaacctcaatgaaagaattgctgaattagtaagagacaaaaaaattgaaggaattagtgatattagggatgagtcgaatagtgaaggaataagagtttcaatagacttaagaagaaatattgaaccagagacagttaaaagacaattatataaatatacatctatagaatcttcttttggttttaactctcttgcaatagttgatcaaaagccaaagacttgtagccttaaagattttttagaaaattttttaaaattcagagaagatgttgttattaaaagaactaaatttgatctaagaaaggccgaggaaagagtccacatattgctgggattatctgttagtgttgaaaatatagataaagtaataaaaataataagatcttccaaaaaccctgaagaagcaaaaaattctcttttagaaactaagtggaaaattaataaagcgacaagtcttattaaattagtagatagtaaaaattataaaggaaaatatactctttcaagcgatcaagtaacatcaatacttgaattaagacttcaaaaattgactggcattggaataaatgagattgaagtt

SEQ ID NO: 294866 - DNA, 949 bp, Unknown
  Bacterial polypeptide expressing nucleotide sequence isolated from the Sargasso Sea
tgttaccgagaacttttcggaatggttcgaagaaaacccagcagatgcaaaaatagttggttcaaaggtcatagaagctgcggtagcccgggaggcagcaagaaaggcgagagaattaacaaggaagaaaaactctttagatgtagcaaacctgccaggtaaattagctgattgtcaggagaaagatccctcaaaagcggaaatttttttggtagaaggagatagtgcagggggtagtgcgaaacagggaagatcgagaaaaaaccaagcagttttacctcttcggggaaaaatattaaatgtagaaagagccaggcctgataaaatgttatctagtcaagaaataggcacgcttatcacggctttgggaactggtatcggcagcgatgattttgatattgagaaattgaggtatcacaagataatcataatgacagatgcagatgttgacggttcacatattagaactctcctattaacttttttctttcgaaaaatgcctgcactagtagaaaagggttatatttttattgctcaacctccgttgtacaaagttagcaaaggaaaatcagaggtttaccttaaggatgataaaggtcttgaaaactatttgctagaggctggagttgaagaggctcttcttaaagtttcggataatgtagtatcttcaggaaacgagttgcgagaaattgttgataacgcaaaaagttttataaatataataaatagcattagtgatgaggatgcaaagtttataattgagcaagcagctttaatagcccctattgaaaagttgaaggacgaaaaaaataatgaaaagttatttgaaaacttgtgtaaacgtcttgacggaatttctctggaatatgaaagaggttggagatatagagtaactgataagagaaaaatagtgttttataggttactccgaggggagaggaaagacgag

SEQ ID NO: 294867 - DNA, 465 bp, Unknown
  Bacterial polypeptide expressing nucleotide sequence isolated from the Sargasso Sea
tttgtcagaagaaaatgataaacctttaggtcattccttaatttcaatcactgatgaaatgaaaaaatcctacttagattacgctatgagtgtaattgtttcacgggcgttgccagacgtaagagatggtttgaagcctgttcatagaagaattctgtatgctatgatcgaaggtggctatgactggtcaaaaccttacagaaaatcagcaagagttgttggtgatgtgatgggtaactatcatcctcatggtgatactgctatctatgattcgatggttaggatggcccaggatttttcaatgagattaatgcttgttgacgggcaaggtaattttggttccgtagatggcgatccacctgcggcaatgagatatacagaatctaggctcgccaggtcatcagaaagtttattaagagatatagataaagatactattgattacattcaaaatatgatgaatct

SEQ ID NO: 294868 - DNA, 614 bp, Unknown
  Bacterial polypeptide expressing nucleotide sequence isolated from the Sargasso Sea
aatgaaaaataatacatatcaagccgattcaattaaagttcttaaagggcttgaagcggttcgtaaaagacctggcatgtatattggtgatacagacgacggaactggtctacatcacatggtttatgaggtagttgataattcaattgatgaagctcttgcgggatattgtaaaaatattgaaataagtcttaacgcaaatggaacagtgacagtatcagataatggaaggggaatacccgtggatattcataaagatgaaaaaaaatcagctgcagaggtgataatgacccaacttcacgctggtggaaagtttgatcatgattcttataaggtatctggtggtttgcatggtgttggagtttcagttgtaaatgctttatcagaaaaacttaaattagaagttgatagaaatggaaaaaaatatttaattgaatttgaaaatggtgaagccaagtcttctcttaaagagataagtaaatcaaaattaacaggaactagtattacatttttaccgtcgaaaaaaatcttttcatcaataaaatttagttcgagcattttgattaagagaatgcgtgaattagcttttttaaataagggtataaaaattattt

SEQ ID NO: 294869 - DNA, 219 bp, Unknown
  Bacterial polypeptide expressing nucleotide sequence isolated from the Sargasso Sea
aatgtcagataatttaaaaaaaaaagataatttggactataaagcagactcaattaaggttttaaaaggcctggatgcagttcgcaaaaggccgggaatgtatatcggtgatactgacgatggatcaggacttcaccacatggtttttgaagtagtagataatgcaatagatgaggctttagctggtcattgtaaaaatatttcaattagcatgaacaa

SEQ ID NO: 294870 - DNA, 806 bp, Unknown
  Bacterial polypeptide expressing nucleotide sequence isolated from the Sargasso Sea
catagaagaattttatatgcaatgtacaaaggtggctttgactggtctaaacaatttagaaaatctgctagagtagttggtgatgttataggtaaatatcatccacatggcgatcaagctgtttatgatgctttagtaagaatggttcaagatttttctatgagcttaccattaattgatggtcagggtaattttggctcaatagatggagatccaccagcagcaatgagatacactgaaactagattatcaaaaatttctcagtttatgattgatgatattgaaaaacaaactgtccaatttaaaagtaattatgatgaaactgaaaaagagcctgaagttttaccttcacaatatcctaatttattagttaatggagcaggtggaatagccgttggaatggctacaagtattcctcctcataacttaggtgaagtaataaatggaactttagctttaattgaaaataaagatataaaaataaatgaattaatgaaacatattccgggtcctgattttccaacaggtggaataattattggaaaagatataattaaacaaggatacaaaacaggcagaggatcttttaaggttcgaggagaaattaaaatagaaaatttaaaaaatggaaaagatagattggtgattacctcaataccttaccaagtaaataaatctaaccttaatgaaagaatagctgagttggtaagagaaaaaaaaatcgaaggaattagcgatataagagatgagtcaaacagagaaggtatcagagttgctattgatttaagagaaatgttgaacctgaa

SEQ ID NO: 294871 - DNA, 822 bp, Unknown
  Bacterial polypeptide expressing nucleotide sequence isolated from the Sargasso Sea
actcagtctttggagtttgctctgaattggtcggtgaacgaagcggcgcaaatcactgaatcctacgtcaacctgataccgacaccgcaaggcggcactcatgtaagtggattaagatcaggcgttctggaggcgctgcgagagttttgtgagttcagagatttattacctcgaggtgttaagcttacaggtgaggatacttttgatcattgcaattttgtgttgaatgcaaaaatgcgcgagccgcaattcgctggtcagactaaagaaaggctttcttctcgagacgccactgcgtttatttcaagcgcgacaaaagattcgttcagtatttggttgaatcaaaatacttcagaagcagaactgattgcgaatttggcaatagcaagggcgaccactagacttcaaaaagctaagaaagtcacccgcaagagggtaactgcgggcccggcgcttcctgggaaattggcagactgctccagccccgatgccgacagagcagagctatttctcgtggaaggtgattcagccggtggctccgctaaacaggctcgagatagagattatcaggcgatccttcccttgcgaggaaaaatacttaatacatgggaagttgattcctctcaggttttagcctctgagacagttcatgatattgcacaggctatagcggtcgacccaggttccgacgatctcagcaacctaaggtacaataaaatttgcatcttggctgatgcggactcagatggtcttcatatagcaactttaatatgcgctttattcatgcggcactttcgatcccttgttacggaaggtcacgta

SEQ ID NO: 294872 - DNA, 915 bp, Unknown
  Bacterial polypeptide expressing nucleotide sequence isolated from the Sargasso Sea
caataatatcagaactattgatggaggaacacatattgaaggattaaaaaccgttctgacaagaactttcaataatcttgcaaaaaagagaggcaaaagaaaagatattgaaaaaaatttagctggcgaaaatattagagagggtttgactgttgttttatcagtaaaagttccagatcctgaatttgaaggacaaacaaaaacaaaattaggaaatactgaagtacgaggaattgtggattctctcattggtgaggctcttacgaaatacatggaattcaatcctggaattttggacttgattcttgaaaaagcaattcaatcatttaacgcagcagaagctgcgagaagagctagagaattagtaagaagaaaaagtgttctagagagttctacattacctggaaaattagcagattgtagttctagagatccatcagaatcagaaatttatatagttgaaggagattcagctggtggctctgcaaaacaaggtcgagatagaaattttcaggctattttgcctctcaggggtaaaattcttaatattgaaaaaactgatgatacaaaaatatataaaaacacagaaatacagtcattaataacagctctaggattaggaataaaaggagaggagttcgacgaaagctctttgagatatcatagagttgtaattatgacggatgctgatgtcgacggtgctcatattagaactttattgctgacatttttttacagataccaaagggaacttgttgagaaaggttttatatacatcgcttgtccccctctatataaagttgaaaggggaaagaaccataattactgttataacgagaatcaattaaagaatacaattcagggttttggggaaaatgcaaattataatatccaaagatttaagggattaggtga

SEQ ID NO: 294873 - DNA, 825 bp, Unknown
  Bacterial polypeptide expressing nucleotide sequence isolated from the Sargasso Sea
aaaaactctccagaaaaaattaagagagttggcttttttaaattctaagatttctattttacttcaagactttagggaagataagccatgggaaaaaatgatgagttatgaaggaggtttaaaagaatttgtcaaatatcttgaccagtcaaaaaaagcaatgattgatgaacctataagtttattagcaaataaggatgggattgaggtaaacttagccttatggtggaatgatagctactatgaaacagtaaattgttttaccaataatattcctcaaaaagacggtggaactcatttggcaggtttgagaggtgctttaacaagagttgttaattcttatgctcaagagtctgggatgtcaaaaaaagaaaatgttcaattagttggcgatgatataagagagggtctaacttgtgttctatccataaaagtcgcagatcctaaattttcaagccaaacaaaagataaattagtttcctccgaggttagaccggtagttgagagtctagtaaatgatgcactatcagaatggtttgaggaacatcccagtgaagctaaaaatattattagtaaagttattgaggcagctgctgcaagagatgcagcaagaaaagctagagagctcacaagaagaaaaggtgctttagatgtttcatccttaccaggtaagctggcagattgtcaggaaaaagaccctgagaaatgtgaaatatttatcgttgagggtgactccgctggaggatctgcaaagcaaggtcgggatagatcaacgcaagcaatattaccattaagaggtaagattattaattgtgaaaaagcaag

SEQ ID NO: 294874 - DNA, 831 bp, Unknown
  Bacterial polypeptide expressing nucleotide sequence isolated from the Sargasso Sea
gctcaatatcctaatcttttagtaaatggagctggaggtatcgctgttggtatggcaactagtattccaccacataatcttggtgaaattattgatggaactttagcgcttataaaaaataaagacattaaagttaaagagttaatgaaacatatacctggccctgattttccaacgggaggagtgatcattggtaaagacattattcgagaaggatacaaaacaggcagaggttcttttaaaattaggggtgaaataaatgttgaaaatcttaaaaatggtaaagatagattggtaattacctcaataccttatcaagtaaataaatctaatttaaacgaaaaaattgcagaattagttagagacaaaaaaattgagggtataagtgatataagggatgaatctaatagagaaggtataagagttgccatagacttaagaagaagtgttgaaccagagacaatcaaaagacaactttataaatacacatcaattgaaacttcatttggatttaattcattagccattgttgataacaaacctaaaacatgttcattaaaagattttctagagaactttttaaaatttagggaagatgttgttattaaaaaaacaaaatatgatttaaaaaaagcagaggatcgtgttcatgtattacttggcttatctgtaagtgtagaaaatattgacaaagtaataaaaattataagatcttctaaaaatccagaagaagcaaaaaatactcttataaaaaccaaatggaaaataacaaaatctgcaaaattaattaaattagttgatagtaaaaattataaaggatcatacaactta

SEQ ID NO: 294875 - DNA, 826 bp, Unknown
  Bacterial polypeptide expressing nucleotide sequence isolated from the Sargasso Sea
aatccttctgaaataaaaaagattatagacaaagtaattgaagcatctagtgcaagagaagcagcaagaaaagctagagaattaacaagaagaaaaacggctttagatatttcatctcttcctggaaagcttgcagattgccaagaaaaaagaccagaagatgctgagttatttattgttgaaggagattctgctggcggatcagcaaaacaagggagagatagaaaataccaggcagtacttccattaaaagggaaaattctaaatgtagaaagagctagaagaaacaaaatcttatcaaacaatgaaataggaactcttattacagcaattggagcaggcgttggtaatccaaccggcaattctgaagaagataaaaatgatggaaaatttaatatagaaaaaatgagatatcacaaaataattattatgacagatgcagatgttgatggaagtcacattcgaactctacttcttacatttttctataggcacatgaaaccagccattgaatcaggtaggttatttattgcacaacctcctttgtataaagctaagaaaggttcatcaattcgttatttaaaaaatgaaaatgaaatggaaaattttttaattaccggaggtttaaaagatttattaatggaaaaactatcggaaaatatgaaggtaatgcaaatatcagggaatgaacttaggtctgttgttaacttagcaaaaacagctcaaaaactaatattatccttaactagaagattaaataataaaaaagtgattgaacaggctgcagttattgcatcatttaaaccacaagtctctggagagtgag

SEQ ID NO: 294876 - DNA, 770 bp, Unknown
  Bacterial polypeptide expressing nucleotide sequence isolated from the Sargasso Sea
gaacagtgatggatcagttactgtggaagataatggtagagggatacccacagaaattcatcccgaagaaaaaatctcagcagcagaagtgataatgactcaacttcatgcaggtggaaagtttgatcaagactcatataaggtgtcaggaggcttacatggagtaggcgtttcagtagtaaacgcattgtcttctaaacttcacttaaatatatacagagatcaaaaagaacattttattgaatttaataatggagaagccttaagtcctctcagtatcacaaataaaaatataaaaaaaaatggaactaaactaacattttacccagataaaaatattttttcagacactgaatttgattcaaaaattttaaaacaaagatttagagagatggctttcttaaattctaagataactataattttttatgacagtcggaatgcagataaaaaagagagtaaatttcattacgagggaggtattggtgagttcgttaaatatcttgataaatcaaaaaaatcactgatcgaaaaaccaataagtatagaggggtacaagaataatattgagtttagttgctctctttggtggaatgatagttattatgaacaaattcttacttttactaataatatcagacaaaaggatggcggcactcatttatcaggtttcagagcagcacttacgagagttgttaataattatttagatggtagtaaagtttctaagaaacaatccattagcccaaatagcgatgatattagagagg

SEQ ID NO: 294877 - DNA, 877 bp, Unknown
  Bacterial polypeptide expressing nucleotide sequence isolated from the Sargasso Sea
tctgcaagagtagtgggagacgttattggtaaataccatccacacggtgatactgctgtttatgatgcaattgtaagaatgacccaaaacttttctttaagatacccattaattcaaggccaaggaaattttggaagtattgatggcgattctgcagccgcaatgagatacacagaaattagaatgcagaaaattacagatcaaatcctagccgatattgaaaaagaaacagttagttattcaccaaattatgacggtacagaggatattccagatgtgcttccaacacgcattccaaatctgttgattaatggctcctcaggcattgctgtaggaatggcaacaaatattcctcctcataatttaacagagattctagatgcgtgtttatatattttagaaaaccctgactgcttgattgacgacctcttaaaaattgtaaaaggaccagattttcctttgggaggaattattactggtattgatggaattcagcaggcctatagaactggccagggaaaagtctacgttagaggaaaaacatcaatagaagacatgaagtcaggaaaggaagcaataattatttcagaaattccttttatggtaaataaagcaagaatgctagaaagaattgctgaattagttaaagagaaaaaacttgaaggaattggagagataagggatgagtctgataaagacggcatgagagttgttatcgaacttaaaaaaggcgaagtacccgaggttgtattaaacaacctgataaaaaattcgcagttagagcaagtctttggaataaacaatgtggttcttgtagatggcaagccacagctttgtaatcttcaacaacttctaaatatatttctgatcacagaaa

SEQ ID NO: 294878 - DNA, 701 bp, Unknown
  Bacterial polypeptide expressing nucleotide sequence isolated from the Sargasso Sea
tatgagcgatataaatcttgaacaacaaaaagactacgatgcaggatcgataaaagtcctcaaagggttggatgctgtcagaaaaagaccaggcatgtacattggtgatactgacgatgggtctggtcttcatcacatggtttatgaggtagtcgataactcaattgatgaagcgttggccggtcactgtgataaagtagatgttattttaaaccctgatggttccgtgacagtaaaagataacggtagaggaatccctactgatatacatgaaggagaaggaatatcggctgcagaggttataatgactcaactgcatgcaggcggaaaatttgatcaaaactcttacaaagtttcaggaggattacatggcgtaggtgtctcagttgttaatgccttgtcttccaaactagatcttaaaatatacagaagcaagaccattcacgaaatgtcttttttggacggtgtaccaaaagatggacttaaggaggttggttcttgtgaagagcaagtatcgggaacagaaattacattccatccttcagacaatatttttacaaatattaagttcaattttcagacgttagaacatagattaagagaattagcattcttgaattcaggggtggagataaatttatctgataatagaggtgtggataacaagtctgttagtatgaattatacaggggggctggaag

SEQ ID NO: 294879 - DNA, 673 bp, Unknown
  Bacterial polypeptide expressing nucleotide sequence isolated from the Sargasso Sea
attggctaaaaagaaaaaaactaaatcaaaacagttagacgtattagacgataaagtttatccaaatattgatatcacagatgaattagaaaaaagttatttggactatgcgatgagcgtcattgtatccagagcgctccctgatatcagagatggtttaaaacctgttcatcgaagaattttatattcaatgtatgagtcttcatatcatcataacaagccctataaaaaatctgcaagaatagttggtgatgttatgggtaaataccaccctcatggcgactcagcaatttacgagtctatggtacgtatggctcaagattttacaatgcgattacctttaatagatgggcaaggtaactatggctccatggacggcgatcctgcagccgcgatgcgttacacagaagcacgtcttgataaagtttcttctttcatgctcgaagaattagaatatgacaccgttcaactaagacctaattatgatgaaacattaactgagccaaaagttttaccttcgcgttttcctaatatatttgtcaatggagcaagtggtattgctgttggtatggctacaaacattcctccccataatttaggtgaaattatagacgcaacattacttcttgttgatgaacctgatagtacatcaaaacaattgcataaaattgtt

SEQ ID NO: 294880 - DNA, 805 bp, Unknown
  Bacterial polypeptide expressing nucleotide sequence isolated from the Sargasso Sea
aacaaaggtataaatatcactttagttgatagcaccacttctaaaacaaaagaattcacatataattatgaaggcggaatactagaatttgttaagtttattaatcaaaaaaaaccaattttagtaaacaagaatgaaaaagaagtttttaaaaaacctatatttgttaactctcaaaagaacagtattatagtggaatgttcgttagagtggaatgcaggctacgcagaagaagtgttggcttttactaataatattcatcaaaaagatggtggaactcatttattaggttttagaagcgcattaaccagagttataaatagatacgcttccgaaaaaaacgttaataaaaaaaacaaaataactctatcaggagatgatattaaagaaggtttgacagcggtattatctgttaaaatgccagatccaaagttttcatctcaaacaaaagataaacttgtatcatcggaagttagattaattgtagaaaatataattggcgataaaatatctacatggtttgatcaaaatccaacagttacaagaaacgtactagaaaaaattactcaagcggcaatagcaagagatgtagcaagaaaagcaagagacagtgtaagaaggaaaggggccttggagttatctggcttgcctggaaaattggcagattgtcaaatttccaaaagagaaggtacagagctttttatagttgagggagattctgcaggtggttcagccaagcaaggaagaatgcgagaatatcaagctgttcttcctttaagaggtaaaattttgaatacttatgtag

SEQ ID NO: 294881 - DNA, 908 bp, Unknown
  Bacterial polypeptide expressing nucleotide sequence isolated from the Sargasso Sea
ttcgtttagaaataactatgatgaaactgaaaaagaaccaacagttcttccttctcaatacccaaaccttttagttaatggagcaggaggtatagcagtaggtatggccactagcattcctcctcataaccttggagaggtcattaatgccacaaacgctctcatagataatcaaaatattactatttctcaactaatgaaacacatccccggtcctgattttcctactgggggtttaataattggaaaagattttattaaacaaggttataataaaggtaggggatcatttaaaataagaggtgaaatagaattcgaagaaaaaaaaaatggaagatcaattttagttataaaatcaattccttaccaaataaataaatctgttttaaatgaaaaaatagcattattagcaagagataaaaagattgaaggcataagtgacattagggatgagtctaatagggaaggcataagaattgtaatcgaacttcgtagaggagttgaaccggagactataagaagacaactttataaattaacaaatattgaaagttcttttggtttcaatagcttagcattggttgataacaaacccaaaatattaaacttaaaagaatttatatcagaatttcttaaatttagagagtcaacagttttaaaaagagtaaaatttgatttaaaaaaagcagaggagagagctcacatattaataggtttagcaacagcagttgaaaatatagacgcaataataaaaattataaaaaattccaaaaataatgaagaagctaaaaaaaatttattaggaaaaaaatggaaaattaaaaaaagcagtaaattaatatcattaatcgaaaagaagaaaaatgttttatcttattctttatctgataaacaagttttggctatat

SEQ ID NO: 294882 - DNA, 926 bp, Unknown
  Bacterial polypeptide expressing nucleotide sequence isolated from the Sargasso Sea
ctttttgaacaaaggtttacaaattaatttaactgatgaaactaaagctaaaactaaagtttaccaaaataaatatgatggtggaattattgagtttgttaatgaccttgataacagtaaatcatttcttattaacaaaaacgaaaaaagagtttttaaaaaaccaatatacgtttccggtgaaaaaaattctgtaatagtagaatgttcattacaatggaatgcagcgttttcagaagaagttttggcttttaccaataatattcaccaaaaagatggtggtacacacctacttggttttagaagtgcactaacaagaattgtaaataaacatgcatcagaaaaaaacctaaacaaaaaaaataaagtaaacataggtggagaggatatcaaagaaggtttgacagcagttttatcaatcaaaatgccagatcctaaattttcttctcaaactaaagataaattggtttcttcagagataagaaatgtagttgaaacaattgtaagtgaaaaattatctatatggttcgaccaaaatccatctgttgtaaaagtagttttggataaaatcttacaggcggcaatcgctagagatgtagcaaggaaagcaagagacagtgtaagaagaaaaggatctttagaactttctggtttgcccggaaaacttgcagattgccaaatttcatcaatggaaggaactgagcttttcatagttgagggggattcagcaggaggttctgctaaacaaggtagaaaaagggagaaccaagcagttttacctttgagaggaaaaattttaaacacttttattgacgaaaataaacgtaaagtaaacggaggcaatggtgtactcgaaaataaaacattagctaaaatgatgtcgtcaaatgagatagttacactaataaatgctcttggcacaggat

SEQ ID NO: 294883 - DNA, 818 bp, Unknown
  Bacterial polypeptide expressing nucleotide sequence isolated from the Sargasso Sea
attggtagaaaaaaataaatcttttaaacctatatttgtacaagatgaaatgagttcatcttatctatcttacgcaatgagtgttatcgtaagcagagctctaccggatgtaagagatggattaaaacctgtgcatagaagaattatttatgccatgtataaaggtggatatgattggtcaaaaccttttagaaaatctgcaagaattgttggggacgtgataggtaagtaccatcctcatggagatcaatcagtttatgatgcattagtaagattagttcaagatttttctatgagcttacctttgatttccggtcaaggcaatttcggttctattgacggagatccgccagcagccatgaggtatacagaaactaaattaggtaggatagcccaatttttaacagaggacttagaaaaaaacactgttaattttagaagtaattacgatgagactgagaaagaaccagaagttttaccatcacaatatccaaatattcttgtaaatggtgctggaggtattgcagtaggtatggcaactagtattccaccacataaccttggagaaataattaatgcaacaatagccttcataaacaacaaagaaattacaatttctcaattaatgaagcacgtcccaggtcccgattttccaacaggtggagtaattattggtaaagatattatcaaacaaggttataacaaaggcagaggttcatttaaaataagaggagaaattgacttagaagaaaaaaaaggaggaagagaaactttaattataaaatccattccttatcaagtaaataaatctcttttga

SEQ ID NO: 294884 - DNA, 853 bp, Unknown
  Bacterial polypeptide expressing nucleotide sequence isolated from the Sargasso Sea
tatgaaaaagactgagagaactggaaccactgttcaattttggccatccaaaaaaattttttctaacacaactctagtacttaaaactttagaaaatagagttcgtcaattagcttttcttaattctaacgtccgtgtaacattggcagatttgcgcactcctaaggcagaaccaatagaattttattatcaaggaggtttgacagcatatgttcaatttcttaattctagaaaatcaactttaaataaaataattccatttaacggtgagtctaatggaattaaagttgaaggagctttgcaatggaatgatggatacaatgaaaatatgctatgtttcacaaataacataccccaaggagatggaggaacacacctacaaggttttcgatcagcacttactcgttcactagttggatattcaaacactgttgctgtctcaaagaaaggtaatattactatatcaggagatgatgctagagagggtatgacatgtgtattatctgttaaggttcctgaccctaaattttcatcgcaaacaaaagataaattagtttcatcagaagtcagacctgttgttgaaaaaattatctcagaacaattaagcgcttggctcgaacaaacaccaggagaagcaaaaaagttagtatcaaaaattattgaggccgcaagtgctcgagaagcagcaagaaaggccagggagctaacaagaagaaaaaatgtattagagacatcatcacttccaggtaaattagctgactgccaagaaaaagaccctattaactcagagcttttcatagtcgagggtgactctgctggcggctctgctaagcaaggtcgagatagagtaact

SEQ ID NO: 294885 - DNA, 403 bp, Unknown
  Bacterial polypeptide expressing nucleotide sequence isolated from the Sargasso Sea
tatgagtgaaaatggcgtttacgactcggaaagcatcaaggttttaaaagggctggatgcagtcaaaaaaaggcctgggatgtacattggcgatacggaagacggaaccggtttacatcatatggttcaagagttagtcgataattctatagatgaagctcttgcgggccattgcgatacggtttttgtcacgattcatccagagcaagcggtgactgttcgggataatggccggggtatccccgttgacattcacgcggaagagaaagtaagcgcggcagagctaattatgaccactctgcatgcgggcggcaagttcgatgataatgcatataaagtatccggtggattgcatggtgtaggtgtctcggtagtaatgcattatcgactgtctttaagttga

SEQ ID NO: 294886 - DNA, 739 bp, Unknown
  Bacterial polypeptide expressing nucleotide sequence isolated from the Sargasso Sea
atgacggattctgtggggcctgtcggcggcggtcctggcggttccgacgatcggattattcagacggacctacgcaacgagatgtcgcgctcctatttggagtatgcgatgagtgtgatcgtgggtcgggcgctgcccgatgcccgcgatggtctcaagcccgtgcatcgccggatcctttacgcgatgtatgagctgggcctcaccagcgacaggccctatcgcaaatgcgcccgtgtggtgggcgaagtgctcggcaaatatcacccccacggcgacaccgctgtgtacgacgccctggtgcgcatggcacaggacttctccatgtcgatgcccctcatcgatgggcatggcaatttcggctccgtggacaacgatccaccggcagccatgcggtacaccgaatcgcggttgcgggcactgaccaccgacagcctgctggaggacatcgaggctgagacggttgatttcgccgacaacttcgatggttcccagcaggagcccacggtgcttcccgcccggatccctcagctgctgctgaatggttcggcaggaatcgcggtggggatggccaccaacattccgccccataacctcaatgaactgattgacgggttgctggcgttgatcgccgatcccgagatcagcgatcaagaactgattcggttgattcctggccccgatttccccaccggcggtcaaatcctgggtcgcgatggcatccgcgacacctacctcg

SEQ ID NO: 294887 - DNA, 348 bp, Unknown
  Bacterial polypeptide expressing nucleotide sequence isolated from the Sargasso Sea
aatgataaaaaataatacaaatacttatcaagcagactctatcaaagttttaaagggattagaggcagttcggaaaagacctggcatgtatattggtgatactgatgatggtacaggattgcatcatatggtgtatgaagttgttgataattctattgatgaagctttagcaggttattgtaaaaaaatagaagtaagtattaataatgatggatcaattaccgttcaggatgatggaagaggtattccggtagatattcataaaggagaaaaaaagtcagcagcagaagttataatgacccaattacacgctggaggaaaatttgatcatgactcttataaagtttc

SEQ ID NO: 294888 - DNA, 322 bp, Unknown
  Bacterial polypeptide expressing nucleotide sequence isolated from the Sargasso Sea
tatgtcggatagtgagtcttataattcggacagtattaaggttttaaaaggtcttgaggccgtaaaaaaaaggcctggcatgtatattggtgataccgaggatggcactgggcttcaccatatggtccatgagttggtggataactcgatagatgaagcgctagcaggctattgtgacgagataatagtcattattcacaaagaagaggcggtaacggttaaagataatggccgtggaataccagttgatatgcatccagaagagaaggtgagtgctgcggaagtgataatgacgactctgcacgctgggggggaagtttga

SEQ ID NO: 294889 - DNA, 989 bp, Unknown
  Bacterial polypeptide expressing nucleotide sequence isolated from the Sargasso Sea
ccgcctcacaaggtgctcgagaacaaggaaatccgcaccatgatcactgcagtcggcaccggcatcggtgacggcgaaggcgagggcgcttttgatctggagaagctgcgttaccacaaagtcattatcatgacagacgcggatgtcgacggcagccacattcggacgttactgctcacgttcttttaccgccagatgcgcgacctagtgaagcatggttacgtgtacatcgcccagccgccgctctaccaaatctcccgtaagaagcgcgtggagtatgtggccgacgacaatgagctgaacaagatcctcatcgatctgggtgcggaagatgtcagtttgaaactgtccgctaagaaaaagctcaacaacaaacaggttagcgagattctggagctgctcacgtcactcgacaaatatgcccgctccatccatcggcacggcgggaattttgccgagtacatcgagcaacgtaaaaaatccggcgaactccctacgcacttggtgaagattcgcgatggcaacgaagagtcggttcactatttccacagcgacacggacttggcgaagttcggcaagaaaaaccccgacctgaatttgttcggcgataacgaacccgaggaaacgcccaaggccgcggccaaaaacggcaatacccgtcgcgcattacacgtggaacttcacgagagcaagccattgcaggaactgctcggcaaactcagtcgcaagggtctgccggtggagcattacgaggcgcaggacaagccgctctttgaattgattgaaggcgacgatgaacgcgtgcatcccctcttctcgttgtcggatatcctcggcacggtgattgagatcggccgacgcggcctgcagataaaacgctttaagggcttgggtgaaatgaatcccaaggaactatttgaaaccacgatgaaccccgagacacgcaaacttttgcgtgtggagctgaccgacgccgtggaggccgaaag

SEQ ID NO: 294890 - DNA, 963 bp, Unknown
  Bacterial polypeptide expressing nucleotide sequence isolated from the Sargasso Sea
attttaagctcacaggagataggcactttgatcacggctcttggaacaggaataggtactaatgaatttgacgctaacaaattgcgatatcataaagtcataattatgactgacgctgatgttgatggatcacacattagaacacttttattaactttcttttttaaggaaatgagaggacttattgaaaatggtaatttatatattgcaagaccgcctttatttaaaattaaacgaggcaaagaggaactatatataagcgatgaggataatcttcaaaaatctcttattaaatatggagcagacgatgcagtctttcagactgcattaggtaatcaattaaaaaatgataagctagttagtactttaataaaaattttagaagtcattgatatatacagtaaggtcccagatagatatgataaaaaagtcttagagcaaattgctatttcaggatgtctggatgttaataagtttttaggctcaaaagaaaaaacaaaagaggctatagattacattacaaaaaggattaatataagtaggccggattatgatagaggttgggaaggtcaatatttaaacgataaaggatttatatttacacgtgaattaagaggtctccaggataacattgttatagacaataatctgcttgagtctcaacttataaaaaatcttaatacaaattactcagagctttttcaaatgtttgagatgccaggagaactgattataaaaaatgaaacattcaaggtttattctccatctcaactcttaagtacaattcaagatttaggcaaaaaaggcttaactatgcagagatataagggattgggtgaaatgaatcctgatcaactgtgggaaacaactttagatccaaaaaatagatcattaatacaagtgaaaattgatgacgaagaatctacaaaaggtgtatttgaagatctaaggggtgagaatgta

SEQ ID NO: 294891 - DNA, 784 bp, Unknown
  Bacterial polypeptide expressing nucleotide sequence isolated from the Sargasso Sea
tattaatgtaacaattaattcaaataattcagtttcagtagaagatgacgggagaggtattccagttgatcttcacaagggagaaaaaaaatctgcggccgaagtaataatgacacagttacacgcgggtggtaaatttgatcatgattcttataaagtatccggcgggcttcatggagttggagtttcagttgttaatgcattgtcagaaaaattaacattaacaatttatagagataaaaaagaatattttattgagtttgaagatgggaaagcgttatcccctctaaaagcaaaaggtaaaacaaataaaacaggaacacttataaattttttaccatcaaaaaaagtattttcaaatactgaatttagctcgacaactttacaaaaaagaatgagagaattagcttttttgaataagggattatcaattaatttagttgataaaactggaaagaaaataaaagaatatataaataaatatgagggaggtattcaagaatttgtaaattttttagataaaaataaagaaactttggttaataaaaatgatcttaatttatttaaaaaaccaatttatatttctggttctaaagataatgttgaaatagaatgttctttaaaatggaatgctgggtattcagaagagatgctgccgttcgctaataatattcatcaaaaagatggaggaacacacctattaggttttagaagtgcgcttacaagagtaattaataaatatgctaatgactcacatcttttaaaaaagaataaaatttcactt

SEQ ID NO: 294892 - DNA, 445 bp, Unknown
  Bacterial polypeptide expressing nucleotide sequence isolated from the Sargasso Sea
atgacaacagataaaaatcaaaattattctgcagatagtatccaggccttagaaggtatggaacatgttagaaaaagaccatcaatgtatataggtgatgtaggtgtaaggggattacatcatttagtttacgaagttgtagataactcaatcgatgaggctatggctggtcattgtaataaaattggagttataattaacgaggatgactcaatatcagttgaagatgatggtagaggaatacctgttgggattcaccaaaaagaaggtgtttccgcattagaagtagtaatgaccaaaattggtgctggtggtaaatttgataaggattcttataaagtttctggtggattacatggtgtaggtgtttcagtagtaaatgccttatctgatcatctaacagcagtagtgtatagagatggtaagatatggcagcaagaataga

SEQ ID NO: 294893 - DNA, 634 bp, Unknown
  Bacterial polypeptide expressing nucleotide sequence isolated from the Sargasso Sea
atgtcaggtgatacgtacgattcaggcagtattaaggtattaaaaggtttagaagcggttaaaaagaggccaggaatgtatatcggggataccgatgatggcactggacttcatcatatggtttttgaagtgcttgataactcaatagacgagggaatggctggcttctgtaagcagatagatgtagtaataggcaaagatgggtctgtatcagtttctgatgatggaagagggatacccgttgatatgcatgaagaaggtgtatcagcagctgaagttattatgacaacactacactcaggaggtaaatttgatgaaaacagctataaagtctctggagggctacatggagttggtgtttcagttgtaaatgctcttagcagtaagttaattttagagattgaaagggatggagcaaaatataaacaagaatactcagatggtgagcctaaaacaaagcttgaaaaagtaggaaaaagtgaaaaatcaggaacaaaagttacttttacaccctcaaagaaaatatttacacaaactaaatttgatgtagaggtactaaaaaagcggattagagaactttctttccttaacaagggaattgccattcatgttcttgatgaagcctcaggaagca

SEQ ID NO: 294894 - DNA, 883 bp, Unknown
  Bacterial polypeptide expressing nucleotide sequence isolated from the Sargasso Sea
tgaagttattatgacaacactacactcaggaggtaaatttgatgaaaacagctataaagtctctggagggctacatggagttggtgtttcagttgtaaatgctcttagcagtaagttaattttagagattgaaagggatggagcaaaatataaacaagaatactcagatggtgagcctaaaacaaagcttgaaaaagtaggaaaaagtgaaaaatcaggaacaaaagttacttttacaccctcaaagaaaatatttacacaaactaaatttgatgtagaggtactaaaaaagcggattagagaactttctttccttaacaagggaattgccattcatgttcttgatgaagcctcaggaagcaagcttgaatttaagtcagacggagggctactagagtttgtaaaacatctcacaggcaaaaaagaagtaattggcacacctttttatgcgcaagcaaacatgaaaggaataggtgttgagattgctgcacaatggacaggaacatatagagaaaatgtacagtgcttcacaaacaacataccacaagttgatgggggcacccatcttgctggctttaggggagggcttacaagagcaattaaaaactttattaaaaaagaagatttaatgcgcaaaaaagaagttgaaataacaggagaagacgttagagagggcatgatagcagtcatttcgctaaaaatgcctgaccctaaattttcttcccaaacaaaggataagctggtttcatcagaagcaagaccagcagtcgaaacgcttattaatgactactttatggactttttgcttgcaaataaaccacaagctaaagaaattcttggtaaggttcttgaagccgcatatgcaagagaagctgcaagaaaa

SEQ ID NO: 294895 - DNA, 546 bp, Unknown
  Bacterial polypeptide expressing nucleotide sequence isolated from the Sargasso Sea
tatggttgattttaacagagataatactctcccaagagatatagttgatgaaatgaaagagagttatttaaactattcaatgtcagttattgtttctagggctcttcccgatgtgagagatgggctaaaaccagttcatcgtcgcattttatacgggatgagtgaactgggatccaattggaacaggccctataaaaaatcagcaagaatcgttggagatgttttaggaaaataccacccccatggagatggatccatttatgatgctttggttaggatggcacaagatttttctatgagatatgagcttgttgatggtcaaggaaactttggttctatcgatggcgataatgccgctgcaatgcgatatacggaatccagaatgacaaaactatcgagcgaaatgctgaaagatcttgaaaaaaacactgtcgagtgggaaccaaattttgatgaaacacttaaggaaccgtctgttttaccatcttctattccaacgttgttgatcaatggttctgaaggtatagcggtgggaatggcaacaaa

SEQ ID NO: 294896 - DNA, 469 bp, Unknown
  Bacterial polypeptide expressing nucleotide sequence isolated from the Sargasso Sea
atgtcagaaaaatcatcaaaaaaaaataactactcagctggaaatattcaagttctggaaggacttgaagcagtaagaaaaagacctgctatgtacatcggagatgtaggtaataaaggtcttcatcatctaatttgggaagttgttgataattcaatagatgaagctttagctgggcattgcgatgagattacagtgactataaataaagataactcaataactgtaaatgataatggaaggggcattcctactggcatgcatcctaaagaaaaaaaatctgctttagaagtagtaatgactgtacttcatgccggtggtaaatttgataaggatacttataaagtttcaggtggactccacggagttggtgtttcatgtgtaaatgctctttcagaaaacttgaaagctaccgtgtacagagaaggaaaaatttttgagcaggagtacaaaagaggaattccagctt

SEQ ID NO: 294897 - DNA, 820 bp, Unknown
  Bacterial polypeptide expressing nucleotide sequence isolated from the Sargasso Sea
agctaccaagcagactcaattaaggttttaaaaggtcttgaagctgtaagaaaaagaccaggcatgtatattggagatacagacgacggaaccggtctacatcatatggtttatgaagttgttgataattccatcgatgaagctttggcaggacattgtaaaaatattaacgttaaaataaattctgatggaacaattacagtaaatgatgatggtagaggtatcccagttgatatccataaaggagaaaaaaaatcagctgcggaagtaattatgactcaattacacgccggtggtaaatttgatcatgactcatacaaggtttcaggaggtctgcacggtgtaggagtatctgttgtaaatgcattatcagaaaaattacaattagaaataaatagagatggaaaaaaacactatattgagtttcaaaatggtgaagcaaaagcaccattaaaagttttaggcaaagcgaaaaatacaggtacgcaaataacttttttaccttctagagaaattttttcctcaataaaatttagtgcaaatattcttattaaaagaatgagagaattagcatttttaaataaaggaattaaaataatatttacagactcaagccaaaagaaagaaaaaatttcagaatttaaatttgatggaggtgttattgaatttgtagattttttagatgaaaaaagagaaaaattgcaaaataaaaatggaaacgatttatttagaaaaccaatatatatagagggcaaaaaaaataatatcgaattagaatgttcattaaaatggaatgctggatatactgaagatatttttc

SEQ ID NO: 294898 - DNA, 682 bp, Unknown
  Bacterial polypeptide expressing nucleotide sequence isolated from the Sargasso Sea
gccttatcagagttatttttagtagagggagattcagctggcggatcggcaaaacagggcagggacaggagctttcaggccatattgccgcttaaaggaaaaattataaatgtacagaaagctcgcttagacaaagttttatcttctaatgagattggaactcttataacagctttaggtacaggcatcggtattgacgagttttcactagaaaaacttagataccatagagttataataatgacagacgcggacgtggatgggtctcacataagaacactcttacttactttcttttacaatcagatgtttgatctgttggaaaaaggacacatttatttggctttacctcctctctacaaaattaaaaagggtggaaaaacacattacgcaaaagatgaggaagaaaaagacgcaattctcaaagagcttagaaaagaagcaacagaaggctctagacctcctgagatacagagatataaagggctgggagaaatgaatcctgaacagttgtgggagacaacatttgatcctaaacacagaaggcttgtgcaaattactttagacgaggcaagagaactcgttgatgatatctttgaaacattaatgggcgatcaagtgcagccaagaagagagtttattgatgataatgctcttagagcagagaatatagacttttaaa

SEQ ID NO: 294899 - DNA, 859 bp, Unknown
  Bacterial polypeptide expressing nucleotide sequence isolated from the Sargasso Sea
atgacaaataaaagcacatatcaagcagactcaataaaagttttaaagggattagaagcagtaagaaaaagacctggcatgtatatcggggatacagatgacggtacaggtttacatcatatggtttatgaggttgtggataattctattgatgaagctttagctggcttttgtaaaaacatttatattaagattaattctgatggtacagtaactgttagagatgatggaagaggtataccagttgatattcataaaggtgaaaaaaaatctgcagcagaagtaataatgacacaattgcatgcaggtggaaaatttgatcacgactcctataaagtatctggaggtttgcatggtgtgggtgtttcagtagtaaatgcactatctgaaaaattaaaattagaaataaatagagatggaaaaagatattttgtagagtttaaaaatggagaagctaaagctcctttaaaaattgttggaaagactaaaaatactggtacagaaataaattttttaccatccaaagaaattttttcatcaataaaatttagtggaaatattctaattaaaaggatgagagaactagcttttttaaataaaggtatcaaaattatatttagtgatgatactaataaaaaagaaaaaatagaagaattcagatatgaaggtggtgtcatagaatttgtggaatttttagataataaaagagataaacttcaaaacaaaaatggaaatgatttatttaaaaaaccaatatatatagagggaaaaaaaggtgatattgaaattgaatgtgctttaaaatggaatggaacttattcagaggacgtgtatccctatacaaataatatcatcaaaa

SEQ ID NO: 294900 - DNA, 917 bp, Unknown
  Bacterial polypeptide expressing nucleotide sequence isolated from the Sargasso Sea
cggcacagagtgctactttcgaccctctccagagacattccacaacatcaagtttcagtacgagctgctcgcgaaacgccttagagagctggcgttcctaaactcaggtgtctcgatcgtgctaacggaagagcgttcaggtaaagaagatactttttactacgaaggtggccttcgggcatttgtggagtttctgaatcagaacaagcagccattgaacgaggtctttcactttaataccgagcgcgaagatggcattggtgtggaagtagcgatgcagtggaacgacacgttccaggaacaagttttttgctacacaaacaacatcccccaaggagatggtggtacacacctagcgggatttcgcggcgcgctgacgcgcaccctaaacacctatatcgagcatgagaacatgctgaaaaaggctcaggtaagcaccacgggtgatgatgcgcgagagggtattaccgcggtggtttcagtaaaagtaccggacccaaaattctcttctcaaacgaaggataagttggtgtccagtgaggtaaaaaccgcagtagagcaggaacttagcaaatttttcgccgagtacttagccgaacatccgcaagacgccaaggcggtcgtgggtaagatgatagatgcagctcgggcacgggaggcggctcgtaaggcacgcgatatgacgaggcgcaagggcgccttggacattgcagggctccccggcaaactcgcagattgtcaggaaaaagaccccgctctgtctgagatctttctggtagagggtgattctgccggtgggtctgcaaaacagggtcgtgatcggcgcacccaggccatattgccgctaaagggcaagattctgaacgtggaaaaagcgcggtttgataaaatgctctcctcccaagagattggaacct

SEQ ID NO: 294901 - DNA, 550 bp, Unknown
  Bacterial polypeptide expressing nucleotide sequence isolated from the Sargasso Sea
ggatctaaagatttcaacattgaaaatctacggtacgacaagatagttatcatgaccgatgctgatgttgacggatcccatattagaaccttacttctaacttttttcaataattatccttttaatgaacttatagaaaaaggacatatttatctcgctcaaccacctctgtttaaagttacaaaagcaaataaaagtatttatataaaagatgaaaaagcacttgaggagtatattttaaaaatggctaaaacagacaaaaagattaaaaaacattctacagagtataaaaacttcttacaagaacataaagaaaaactatcaattcaacgtttcaagggattgggagaaatgaatccagaggaactatgggaaactactttaaatccagataataggacaatgcttagagttcagtattcaaagggtactaaagacaagtcaaaagatgatcaaaagatgattgaaattttaatgggtgatgaagtggcaccaagaaaagattttattactaataatgctttggatgtcacaaatttagacatttagc

SEQ ID NO: 294902 - DNA, 837 bp, Unknown
  Bacterial polypeptide expressing nucleotide sequence isolated from the Sargasso Sea
atggttcaagatttctcaatgagtgtgcctcttatagatggccaaggaaattttggatcagtagacggagatcctccggcagcaatgagatatacggaaacaagactttcaaaaatttctcaatttttaattgacgatatagagaaaaatactgtcgattttaaaagtaattatgatgaaaccgaaaaagaaccagttgtattgccagctcaatatccgaacctactagttaatggcgcgggaggtatagctgtaggaatggcaactagtatacccccacacaatttaagtgaggtaataaacgcaacattagctttaataaataacaaagatataaaaattaacgaattaatgaaacatatacctggaccagattttccaactggcgggactataattggaaaagatattataaaaacaggttataaaacaggaagaggttcttttaaaatcagaggagatataaatattgaacaattaaagaatggtaaagaaagactagtgataaccaatattccctatcaaattaataaatcctcattaaatgaaagaattgtagaattaattagagataaaaaaattgaaggtattagtgatataagagatgaatcaaatagggaaggtatcagggtagctattgatttaaaaagaaatacagagcctgaaactgttaaaaggcaactttataagtatacatcattagagtcttcattcagttttaatactttggcaattgtagataaaaaacccaaaaactgtaatttaaaagattttttagaatcttttttaaaatttagagaagacgttgttaccaagaaaacaaaattcgatttaaaa

SEQ ID NO: 294903 - DNA, 951 bp, Unknown
  Bacterial polypeptide expressing nucleotide sequence isolated from the Sargasso Sea
acctgatattagagatggattaaaacctgttcacagaaggattatatatgcaatgcacaaaggtggttttgattggtcaaaacaatttagaaagtctgcaagaattgttggagatgtaattggtaaatatcatccacacggagatcaagcagtttatgacgctttagtaagaatggttcaagaattttcaatgagccttcccttagttgatggacaaggtaattttggctctatagatggagacccgccagcagcaatgagatatactgaaactaaacttgcaaaggtttcacagtttttaattgatgacattgaaaaaaatactgtctcttttaaaagtaattacgatgaaacagagcaagaacctgttgtattacctgctcaatatccaaatcttttagttaatggtgctggcggaatagcggtcgggatggcaacaagtattccacctcataatttaggtgaggtcgtagatggaactttagcattgattaaaaacaaagatattaaaattaatgaattaatgaaacatattcctggaccagattttccaactggcggactaataattggaaaagatataattaagcaaggctataaaactggaaggggctcttttaaaatacgtggagaaatttcagttgagaatttaaaaaatggtaaagatagactggtagtttcatccataccttaccaaattaataagtctaacttgaatgaaagaattgcagaactagtaagggataaaaaaattgagggtataagtgatataagagatgagtcaaatagtgagggcttaagagtatccattgatctaagacgaaatgttgaacctgaaactgtcaaaagacaattatataaatatacctcaatagagtcatcttttggttttaactctttggcaattgttgatcaaaaaccaaaaacttgtaatttaaaagattttttaga

SEQ ID NO: 294904 - DNA, 868 bp, Unknown
  Bacterial polypeptide expressing nucleotide sequence isolated from the Sargasso Sea
tgagggaggtatcactgaatttgtaaagcatatcaacaataaaaaaccaaaattagtcaacaaaaatgaaaaggaggttttcaaaaaacctgtttatgtcacagcttctaaaaacaatgtaaatgtagaatgctcatttgaatggaatgctggatacactgaagatgtattgccttttacaaacaacataccacagaaagatggaggaacccacctcctaggttttagaagtgctttgacaagagttattaataaatattctgcagacagaaataataagaaaaataaaattacactttcaggagaggatataaaagaaggtctgactgctgtactctctataaaaatgtcagatccaaaattttcatcccaaacaaaagataaactagtttcttcagaaataagaaatattgtagaacacataatcggtgaaaaagtatcaacatggtttgatcaaaatccatcagtatccaaatcaatcttagaaaaaattactcaagcagcaatggctagagatgttgcaaggaaagcaagagatagtgttagaagaaaaggaacttttgaattatctggcttacctggaaagcttgcagattgtcaaatccaaaaaagagaaggaactgaactttttattgttgagggagactcagcagggggctctgcgaaacaaggtagggtaagagagtttcaagcagtattgcctttacgaggaaaaattttgaatacttttgtaaatgggaaaaaaaatggagaagatcaaaatacgaaagcactttcaaaaatgatgtcatcaagtgaaattgttaccttgatcaatgctttgggaacaggatcaaaagattttaatattgaaaaatttaaggtatga

SEQ ID NO: 294905 - DNA, 388 bp, Unknown
  Bacterial polypeptide expressing nucleotide sequence isolated from the Sargasso Sea
atgaaccaaagttattcttcagagtcaataaaggtacttaaaggtcttgaagcagtaagaaaaagacctggtatgtatattggtgacacagatgatggttcaggccttcatcaaatgatatatgaagttgttgataactctatagatgagtctttggctggttattgtgataaaattgatgttattttaaattcagatggcacagttacaatctcagataatggtagaggcgtgcctgttgataatcacaaggaagaaggtattccagcagctcaacttataatgactgaactgcatgcaggtggaaaatttgatcaaaatagttacaaagtttcaggaggtctgcatggggtaggagtttcagttgttaatgctttatctgaaaatt

SEQ ID NO: 294906 - DNA, 652 bp, Unknown
  Bacterial polypeptide expressing nucleotide sequence isolated from the Sargasso Sea
tttgttaacggaaaaactaatgggggaagatcaatcaactaaagctttatctaagatgatgtcatctaatgagatcgtaaccttaattaatgctttaggaactggatcaaaagattttaatatagaaaatttaagatacgataaaattgtaataatgacagacgccgatgtagatggttctcacataagaacacttttattaacttttttcaataattatccatttaatcaattaatagaaaatgggcacatatatcttgcgcaaccaccattatttaaagttaccaaagcgaacaaaagcgtttatataaaagatgaaaaagctttggaagaatatataattaaagtaggaaaatttgataaaaaaataaaaaaaggatcgtccgaatataaaaagtttttacaagatcaaagagataaattatctattcaacgttttaaaggattgggagagatgaatcccgaggagctttgggaaacaacattgaacccagataacagaactgtgttaagagtacaatattccaaaggaactaaggataaatcaaaagatgatcaaaaaatgattaaagttcttatgggtgacgaagttgcaccaagaaaagattttattacaaataatgctttagacgtaactaacctggatatttag

SEQ ID NO: 294907 - DNA, 865 bp, Unknown
  Bacterial polypeptide expressing nucleotide sequence isolated from the Sargasso Sea
aatggtagatataaacagagacaacattgtagacaaagagttattaaaagagttagaagaaagctatttaaactattctatgtcagttattatgtcgagagctcttccagatgcaagagacggactaaaacctgtacacagaagaattttatatggaatgcatgaacttggatgtctttggaatagaccatataaaaaatctgcaagagttgttggagatgttttaggtaaatatcacccacacggagactcctctatttatgatgcaatggttagaatggcacaagatttttcaatgagacatgagcttgttcagggacaagggaattttggttctgttgatggcgatagtgctgcagcaatgagatatacagagtcaagaatgtcaaaaattggtggagaacttttaagagaccttgaaaaagaaacggttaactggacaacaaactttgatgaaaccttaaaggaaccagaggttttacctgccgtttatccaaaccttttggtaaatggatcagaaggaattgctgttggaatggcaacaaaaattcctccacacaacttgtcagaaacggtagatgctctcgtcgagcttattaaaaatccgggcgcagaaattgatgatcttatgaaatacataaagggaccagacttccctacaggaggaaaggttctgggcttacaaggaattaaagatgcatattctacgggaagaggtaaggtaaaaatgcaaggaacagcatataccgaaacaccagataagggaagaagtaagcttattataacagaaattccatatcaagttaataaagcaaaccttgtggaaaaaattgcagacctatcaagagacaaaaaacttgaggga

SEQ ID NO: 294908 - DNA, 481 bp, Unknown
  Bacterial polypeptide expressing nucleotide sequence isolated from the Sargasso Sea
tatgcccaaagcaaagaaaagcaaaaattcaaaaaattacgactcctcaaatattaaagtcttaaaaggccttgatgctgttcgcaaaagaccaggaatgtatatcggcgatacagacgacggaacagggttgcaccacatggtttacgaagtggttgataattcagttgacgaagcgctagcaggatactgttcagaaatatctgtaataatccaccaagatgattccataacagtcaaagacaacggcagaggcgtgcctgttgataaacataaaggagaaaataaatctgctgcagaagttattatgaccgttcttcatgccggcggaaagtttgatgatgattcatacaaggtgtctggtggacttcacggtgttggtgtctcggtagttaacgctctttctcagacactcagtttacgaatctataaaaacggtaacatttacgaacaagattacgctcacgggacaccaataaag

SEQ ID NO: 294909 - DNA, 828 bp, Unknown
  Bacterial polypeptide expressing nucleotide sequence isolated from the Sargasso Sea
tagttaacaaaaatgatcttagtttatttaaaaaaccaatttatattttaggaaaaaaaaataatgttgaagtagagtgttcttttaaatggaatgcaggatactcagaagagatgttgccatttgctaataatattcaccaaaaagacggcggaactcaccttttaggttttagaagtgctttaacaagagtcattaataaatacgctgttgatggaaatttattaaaaaagaataaaatcacacttacaggcgatgatacaagagaaggtttaactggtgttttgtcaataaaaatacctgatccaaaattttcttcccaaactaaggacaaactagtttcgtcagaagttagatttattgttgagtccatagtaaatgataaattatctacctggtttgatcaaaatcctggagtgaaaaaaatagtattattaaagatagtacaagctgctattgcaagagatgttgcaagaaaagctcgggaaggtgtaagaagaaaaggatctttagagctatcgggccttcctggtaaattagctgattgccaaataggtaaagcagaaggaaccgaattatttatagttgagggagattcagccggaggatctgcaaagcaaggaaggaatagagaatatcaggcggtacttcctttaagaggaaagatacttaatacttacacagatactaatggcaaaaatttaaaaaatggtaacgggcaggatttacaaaataaagctttttcaaaaatgatgtcatccaatgaaatagttactttaattaatgcattagggacaggatcaaaagattttaaaatgaagatttaag

SEQ ID NO: 294910 - DNA, 901 bp, Unknown
  Bacterial polypeptide expressing nucleotide sequence isolated from the Sargasso Sea
tcctcaatttgctggacaaacaaaagaacgcttagattcaaaagatcatatgtcatttgtaagcagttctactaaagatgttcttagcatttggtttaataaacataccgaagagggagaaagaattgcagagcttgcaattatttctgcacaagctcgagcaaaagcatcatcatctgttgaaagaaagaagacttttaaaggaccggctcttccaggcaaactatccgactgcaacagcgaagatttaaacaaaacagaattatttttagttgaaggagattcagctggcggatctgcaaaacaggctagagaaagatcttttcaagcaattatgcctcttagaggaaaaatacttaatacatgggatttagagagtgaggaaataataaaatctcaagaaataaaaaatctttcaacagcaattggtgttttacctggtaacgttgatatttcctctctaagatatggaaagatatgtattttggcagacgcagattcagatggattgcatatcgcaactttgttatgtgctttatttttaaggcactttaaaccccttgttaatgaaggaagaatttttatagcaatgcctcccttgtataggattgattgtggtaaagacgttttgtatgctttggacgaaaagcaaaaagataaagccgtgaaagaatttaagagtaaaaaaggtaagccaaaaataaatatccagcgatttaaaggacttggggaaatgaatccttctcagctaagagagactgtcatggatccagacacaaggcagcttgttagattatcgatttcagctactgataatgcaaacgctatgatggacctcttgttatcaaaaaagaatgctcctgcaagaaaagaatggctgaaaagaaaggttcattggtga

SEQ ID NO: 294911 - DNA, 936 bp, Unknown
  Bacterial polypeptide expressing nucleotide sequence isolated from the Sargasso Sea
aaataaatcagcattagttaataaaaatgatctaagtttatttaaaaaaccaatttatattttcggaaaaaaagataatgttgaagttgaatgttccctaaaatggaatgcaggatattctgaagatatgttgccttttacaaataatattcatcaaaaagatggaggaactcacttattaggttttagaagcgctataacaagagtgattaacaaatatgctactgacggaaatttattaaaaaagaataaagttacaattgaaggttatgatactagagaaggtttaaccggagttttatcagtaaaaattcctgatccaaaattttcttcacaaacaaaagataagcttgtttcttcagaggtcagatttattgtagaatctatagttagtgaaaaattgtcaacttggtttgatcaaaatccaggaattagaaaaatagtattattaaaaatagtccaagctgctattgcaagagatgttgctcgaaaggcaagggaaggagttagaagaaaagggtcattagaattatcgggactacctggaaagcttgctgactgccaaataggaaaagccgaaggtacagaactatttattgttgagggagattcagcaggaggctctgcaaagcagggaagaaatcgtgaatttcaggcagtccttccattgagaggtaaaatattaaatacttatattgatacaaatggatcaagaagcagaaatggtaatggtcaagatgcacaaacaaaagctttttcaaaaatgatgtcctcaaatgaaatagttactttaatcaatgctctaggcacgggttcaaaagattttaatattcaaaatttaagatatgaaaaaattattattatgactgatgctgatgttgatggctctcacattagaactcttttattaaccctatttaataattatccatttaa

SEQ ID NO: 294912 - DNA, 910 bp, Unknown
  Bacterial polypeptide expressing nucleotide sequence isolated from the Sargasso Sea
aaagatcttaaaggcttagacgctgtaagaaaaagaccagggatgtatattggcgataccgatgatggctcaggtttacatcatatggtttttgaagttatagataatgctatcgacgaggcattagtcggtcactgcaaaaatattactgttattatcaataatgataatactattacagtagaagatgatggcagaggcataccagtagatatgcataaaagtgaaaagatttctgccgctgaagttataatgacccagctacatgcaggaggaaaatttgatcacaactcttataaagtatcaggtggccttcatggtgttggtgtatcagttgttaatgccttatcagaaaaactagagctaaatatctacagagatggaaaagaatattcagtaacttttaaaaatggtaaaacaataaagcccttaaaacaaattggtaaaacaaaaaaaaggggtactagaataaattttttaccttcaaaagaggttttttcttcagttaaatttagctctacaattttagaaaaaagaattagggaattagcttttttgaacaagggaatatgcgtaaagttacttgaccaaacatctaaaaaagaaaaggaatttgtacataaatatgatggtggaattgtagaatttgtaaaacatattaataataaaaagccaattttggttaataagaatgaaaaagaagtgtttaaaaaacctgtttacgtaacctcaaccaaaaataatgttgtagtagagtgttcttttgagtggaatgctgggtactctgaagaagtacttccttttacaaataatattccacagaaagatggcggtactcacttactaggttttagaagcgccttaacaagagtgattaataaatattctaatgatagaaataataagagaa

SEQ ID NO: 294913 - DNA, 781 bp, Unknown
  Bacterial polypeptide expressing nucleotide sequence isolated from the Sargasso Sea
gatccaaaattttcatctcaaactaaagacaaattggtttcatcagaaataagaaatatagttgagtctatagtaggcgataaaatttcagtttggtttgaccaaaatccttcggtcatacgttcagttttagataaagttttacaagctgcaattgctagagatcttgcaagaaaagctagagacagtgtaagaagaaaaggtacattagaattatcgggtttacccggaaagctagctgactgtcaaatttcctcaatggaaggaacagaactttttattgtcgagggagattctgcagggggttctgccaaacaaggaagaaaaagagagtttcaagcagttcttccgttgcggggaaaaattttaaatacatatgtcaatgagaccaaaaaaatcaatggagctaatggtgctcatgaaaccaaaacattatctaaaatgatgtcatcaaatgaaatagttacattaatcaatgcattaggaactggctctaaggattttgatatagagaacttaaggtatgagaaaattattattatgacagatgctgatgttgatggatcacatataagaactttattgcttactttttttaataataaaccattcaatcagttgatcgagaaagggcacttatatttagcacagccgcctctttttaaagtgaccaaaggttcaaaaagtacttatataaaaaacgaaaaagatttagacaagtatattttgaaatcatctacaaatggagttaaaaaaataaaaaaaggtgatttagaaaaat

SEQ ID NO: 294914 - DNA, 391 bp, Unknown
  Bacterial polypeptide expressing nucleotide sequence isolated from the Sargasso Sea
atgtcaaaaaattcagcattaaaatccaatccaaattatggtgcggactctattaaggttcttaaaggcttagatgcagtaagaaaaagacctggtatgtacatcggagatactgacgatggctcaggtttgcaccatatggtttttgaagttatcgataatgctatcgatgaagctttagctggccactgtaaaaatatttccgttacaattaacaaggataatactgttaccgtagaagatgatggcagaggtatcccggtagacatgcataaaactgagaagatttctgctgcagaagttataatgacccaactgcacgctgggggaaaatttgaccatgactcttataaagtatcaggtggtcttcatggtgtggagttcagtcgta

SEQ ID NO: 294915 - DNA, 960 bp, Unknown
  Bacterial polypeptide expressing nucleotide sequence isolated from the Sargasso Sea
ttatttatcttatgctatgagtgttattattagtagagctcttcctgacataagagatggtttaaaaccagtacacagaagaattttatttgcaatgcataaaggagggtttgactggtctaaacaatttagaaaatctgcaagaattgtcggagatgtaattggtaaatatcatcctcatggtgaccagcctgtatatgatgcattagtcagaatggctcaagatttttcaatgagtttaccattagttgatggtcaaggaaattttggttcgatcgatggagatcctcctgcagcaatgagatatactgaagcaaggttatctaaaatttcgcaatacttaattgaagatattgaaaaagaaactgtgtcttttaaaagcaattatgatgaaactgaatatgagcccaatgttttacctgcacaatatcctaatctcctagttaatggtgctggtggtatcgcggttggaatggctactagcataccgcctcataatcttggtgaagtgatagatggaactttagcactaattaaaaataaagatattaaagttagtgaattaattaaatatattccaggtccagattttccaaccggaggagtaattattggtaaagatattataaaacaaggttataaaaatgggagaggatcttttaaaataagaggtgaaataaatgtagaaaatttaaaaaatggtaaagatagattggtaataacatctattccttatcaaattaacaaatcaaatttaaatgaaagaatagcagagcttgtacgagagaaaaaaattgatggtataagtgatataagagatgaatctaatagacagggagtaagagtcgccattgatcttagaagaaatattgaacccgagactgttaaaaggcaattatataagtacacatctatagagagttcatttggttttaatactctagcaattgtagattacaa

SEQ ID NO: 294916 - DNA, 544 bp, Unknown
  Bacterial polypeptide expressing nucleotide sequence isolated from the Sargasso Sea
atggataaaaatactatagagattaacaaatcatttaagcctatatttgtacaagatgagatgagttcatcatatttgtcttatgcgatgagcgtaattgtaagtagggcgttacccgatgttagagatggtttaaaaccagttcacagaaggattatttatgcaatgtataaaggagggtacgattggtcaaaaccttttagaaaatcagcaagaattgttggagatgttattggtaaataccatcctcatggagatcaatcagtctacgatgctttagttagactagttcaagatttttcgatgagcgttccattaattacaggacaaggtaatttcggctctatagacggagacccacctgcagcgatgaggtacacagagaccaaacttggtagaatatctcaattcttaaccgaagatttagaaaaaaatacagtcaattttagaagtaattatgatgaaacagaaaaagaaccagaggtgcttccatctcagtatccaaatattttagtcaatggggcaggcggcattgctgtgggta

SEQ ID NO: 294917 - DNA, 820 bp, Unknown
  Bacterial polypeptide expressing nucleotide sequence isolated from the Sargasso Sea
aaggtatcaggtggattacatggcgttggtgtttcagttgtaaatgctctatcagaaaaacttgatctcaccatttttagagatcaaaaagagtattttatttcattcaaaaatggaaaagcagtaaattctataaaatttctaaaaaaaacaaaacaatcaggaacaaaaataaattttcttccatctaaagatattttttcaaatataaagtttagtttggctattttacaaaaaaaaatgagagaattggcttttttaaataagggcttaaaaataaatttaatagatgaaacacatgctaaagctaaggtttatgagcacaaatacgatggcggagtaggggaatttgtagtttatctagatcaaaaaaaatcaattttaattaataaaaatgaaaagcaagcttttaagaaacctatatatttaaaagctgaaaagaatggtgtaactattgaatgttcttttcaatggaatgcggggttttcagaagaagtaatgcctttcacaaataatatacaccagagagatggagggacacaccttcttggttttagaagtgcactaacaagaataattaacaaatatgcttcagaaaaaaatctaaataagaaaaataaagttactatagggggagaagatatcaaagaaggactgacagcaattctatcagtaaaaatgcctgatccaaaattctcttctcaaacaaaagataagctagtttcttctgagataagaaatgtcgttgagtccatagtgacagagaaagttacaatgtggtttgaccagaatccttctgttgtaaagatagttttggaaa

SEQ ID NO: 294918 - DNA, 913 bp, Unknown
  Bacterial polypeptide expressing nucleotide sequence isolated from the Sargasso Sea
aggttgatagttgaaagcattataaatgataaagtctcaacctggtttgatcaaaatccatcagttgcaaaaactgttttagaaaaaattacgcaagcagcaatggctagagatgtagccagaaaggcaagagacagcgttagaagaaaaggcacttttgagctttcaggattacctggaaaattggctgattgtcagattcaaaaaaaggaaggaactgaactatttatagttgaaggagattctgctggaggttcagctaagcaaggaagggtaagagaataccaagccgttctacccttgagaggtaaaattttaaacacatttgtaaatggcaaaagtaaaggaaacggggacgacaaagctactcgagctttatctaaaatgatgtcctcaaatgaaattgtaacactaataaatgctctaggtaccggatctaaagattttaatattgaaaatcttagatatgaaaaaattgtaataatgaccgatgctgatgttgatggatctcacattagaactctacttcttacattttttaacaattctccttttaatcaattaattgaaaaaggccatatttatttagctcagcctcctttatttaaaattactaaatcaaataaaagtatttacataaaagatgaaaaagatttagaagaatttattattaaaaattcagacaaagatataaaaaagatgaaaaaaggctctaatgaatttaaaaattatattcaggcacaaaaggaaaaattatcaattcaaagatttaaaggtttaggcgagatgaacccagaagaactttgggaaactacacttaacccggaaaatcgaacaatgctaagggttcagtacactaaaggaactaaagataaatcaaaagaagaccaaaaaatgattgaggtactgatgg

SEQ ID NO: 294919 - DNA, 794 bp, Unknown
  Bacterial polypeptide expressing nucleotide sequence isolated from the Sargasso Sea
aatgacagatgcagatgtagatggaagtcatattagaactttattactgacatttttttatagacatatgaaaccaattatagactcaggcagattatatatagctcaaccaccactttacagactaaaaaaaggaaattctactgtttataaaaaagatgacaacgatttggagaattatttaatagatgagggtttaaaaaatacaatatttgaaaatacgcaatcagcacagatagctggagaagaattaaaacaaataatttatctttcaaaaaatactaagaatttagttatgcctttactaagaagagtagataatagtgatataattgaacattcagctattgtaagggctttagatttgcggaatcttaaagataaagaaattggagaagaaatttcaaaatatttacaacaaagattaaatttaatttctaatattggacaaaaaaattggaaagtaatacataaaaaaaattcaattttatttgaacgtaccattagaggatttactgaaaagtatataattgatgaaaactttatagtatctccagaggcaaaggctcttaacgaacttaaagatcaattaatggaaaatttttatagattaaaagaaactggttgtggaacattaaaaaataaaaacgaggaacataatatctatggccccctagaattaatagataagattttagcaattggaaaaacaggattacagataaataggtataagggtttgggtgagatgaatccagatcaattatgggaaacaactctagataaaaatgaaa

SEQ ID NO: 294920 - DNA, 508 bp, Unknown
  Bacterial polypeptide expressing nucleotide sequence isolated from the Sargasso Sea
tatggcggtttcagtggggcccggaggcggcggtcccggcgattccgacgatcgaatcatccagacggatctgcgcaacgagatgtcgcgttcctatctggaatacgcgatgagcgtgatcgtgggtcgggcgctgcccgatgcccgcgatgggttgaagcctgtgcatcgacgcatcctctatgcgatgtacgagctggggctgacgagcgatcggccctaccgcaagtgcgcccgtgtggtgggtgaggtgctgggtaagtaccacccccatggcgacacggcggtctacgacgctctggtccgcatggcccaggacttctcgatgtcgatgcctctgatcgacgggcatggcaatttcggttcggtggacaacgatccccccgctgcaatgcggtacacggaatcgcgcctgcagtcgctcaccacggacagcctgctggaggacatcgaggccgagaccgttgacttcgcggacaacttcgatggctctcagccaggagcccga

SEQ ID NO: 294921 - DNA, 710 bp, Unknown
  Bacterial polypeptide expressing nucleotide sequence isolated from the Sargasso Sea
tctggagagttcaaccctgccgggcaagttggctgactgcagttccagggatcccagcgaatccgagatctacatcgtggagggtgattcggctggtggatccgccaaacagggccgtgatcgccgcttccaggccatccttccattgcgcggcaaaattctcaacattgagaaaactgatgacgccaagatttataagaatactgagatccaggcattaattacggctctaggcttgggcatcaagggtgaagattttgacgtaaaaaatatgcgctatcaccgcgttgtaatcatgaccgatgccgatgtagatggcgcccacatccgcaccttgttgctcacattcttctaccgctatcagaaggccttggtagaaggtggttacatctacattgcctgtcctccgctttataaagttgagcgaggaaagaatcacacctactgctacaacgaaggggatttgcaagaaaccttgcagagtttcggtgagaaggccaattacacaatccagcgtttcaagggccttggtgaaatgatgccgaagcagttgtgggaaaccacaatggatcccaccacccgaacgatgaagcgggtggagattgaagatgcgttagaggcggatcgcatcttcacgatcctgatgggcgacaaggttgcaccacggcgggaattcattgaaaccacacagtgccagagttggatatgac

SEQ ID NO: 294922 - DNA, 895 bp, Unknown
  Bacterial polypeptide expressing nucleotide sequence isolated from the Sargasso Sea
atacatatctgcaaataaagatgatgtgaacgtagaatgtcttttagaatggaatgcagggtattctgaagaggtaatggcttttacaaataatattcatcaaaaagatggtggaactcatttattaggttttagaagtgcattaacaagagtaattaataaatattcaaatgaacataataagaaaaataaattatcgttaactggtgaagatataaaagagggattaacagtagttctttcagtaaaaatgcctgaccctaagttttcttctcagactaaagataaattagtttcatcagaaattcgtcttattgttgagagtataataaatgataaaatttcaatgtggttcgatcaaaacccatcaattattagaaatgttctagagaaaattgttcaagctgctgtagcaagagatgtagctagaaaagctagagacaatgttagaagaaaaggaagttttgaaataacagggttgccaggcaaacttgctgattgtcaaatttctaaaaaagagggaacagagctctacattgttgagggtgactctgcaggaggttcagcaaaacaaggaagaaatagagagtttcaagctgttttgcctttaagaggaaaaatacttaatacttatgtaaatactaatggtagaaatgctggaaaaactgctgagaatgaaaccaaggcgctttctaaaatgatgtcatcaagtgaaatagtaacattaattaatgctttagggacaggctcaaaagattttgatattaataatttaagatatgacaaaattataattatgaccgacgccgatgtagatggttcccacattagaactttacttttaactttttttaataattacccatttaatcaattaatagaaaatggacattta

SEQ ID NO: 294923 - DNA, 744 bp, Unknown
  Bacterial polypeptide expressing nucleotide sequence isolated from the Sargasso Sea
tcttcacaaaactgaaaaagttcctgctgctcagcttataatgactgaattacacgctggaggtaaatttgatcaaaatagttataaggtatcaggaggattacacggagttggtgtctcagtagttaatgctttatcagaaaatttaattttagaaattaatagagatggaaaaattcataatatcgaatttgaaaatggagtagtaactaaagaattaaatattatcggtgactcaaataaaatagataatgaatattttactggaactaagattacatttcttccaacaactaagattttcaaagatataaattttaatttcaaaacaatagaaaagagacttagagagctagcatttctaaataccggtgtgagtatttatcttacagataaaagacaatctgaagaaaaaacaacaaattttaaatatgatggtggtatcaaagaatatgtaatgtatctcaacgaaggaaaaaatcttattaatcctatcccagttttttttcagggtgaaaaaaataatatctctattgaatgctcattacaatggactgatagttatcatgaaaatacaatttgttttacaaacaatattatacaaagagatggtggaacacaccttgcgggttttagaggtgcacttacaagatcaattgtaaattatgtaaacaaaaatactaaaaattctaataatgttactggtgaagatgcgagggaaggcttaacttgtataatatcagt

SEQ ID NO: 294924 - DNA, 433 bp, Unknown
  Bacterial polypeptide expressing nucleotide sequence isolated from the Sargasso Sea
aatgaataaaaatgcaaatgtagcctacggtgctgaatccatcaaagttttaaagggtcttgatgcagttagaaaaagacctggaatgtatattggagatactgatgatggtacagggttgcatcacatggtatttgaagttgttgataattcaattgatgaagcgttagcagggcattgtgacgaaatcaatatatggctaaacgcagatggttcagtaacagtcgaagataatggaagaggtataccaacagagattcatccagaagagaaaatttctgctgctgaagttattatgactcagttacatgcaggaggtaaatttgaccaagactcctataaagtttcaggtggattacatggagtcggtgtttcagtggtaaatgctctttcctcgtctttaaatcttaaaatttttagagaccggtcataa

SEQ ID NO: 294925 - DNA, 808 bp, Unknown
  Bacterial polypeptide expressing nucleotide sequence isolated from the Sargasso Sea
ttgactgattccaaggatcaaaatgaagatctaaaaacaggtaaagagcaatctgtaatccccatattaatcgatacagaaatgcaaaattcttacctcgattacgctatgagcgtaatcgttagcagggcattacccgatgttagagatggacttaaaccagttcatagaaggattttatatgcaatgcatgagtcaggctatgagtggaataaacaacatagaaagagtgctcgagttgtcggtgatgttattggtaaataccatccgcatggagatcaagctgtttatgatgcgttggtcagacttgcccaagacttctcaatgagcgtgccactattagatggtcaaggcaattttggatcaatggacggtgatagggctgctgcaatgagatacacggaagttagaatggcaaaaattgctagtttccttcttgaagatatagaaaaagaaacggtcgactttagacctaattatgatgaaactgaaagtgagccatctgttcttcctgcaaaatatccaaacctacttgtaaacggtgcaggtggaatagccgttggtatggcgactaacattttacctcataatttaggagaggtcattgatgctagtattgcttaccttaaaaataccgatgtaacttttgaggaaataaatcaaattataaaaggcccagactttcctacgggtggaacaattattggcataaaaggcataaaagactctcagtcatcaggaagaggctcaatcattgttcaggcaaaatcaaatatagaggaatataaaacagatcgagaagcaatcg

SEQ ID NO: 294926 - DNA, 919 bp, Unknown
  Bacterial polypeptide expressing nucleotide sequence isolated from the Sargasso Sea
ataaaagtacttaagggtttagaggcagtaagaaaaagaccaggaatgtatattggtgatactgatgacggaacaggcttacaccatatggtctatgaagtagttgataattctattgacgaagctttagcaggtcattgtaaaaatattaaggttataattaattcagatcaatctgtttcggttgaagatgatggccgaggaataccggtagatatgcataaaggagaaaaaaaatcagctgctgaagttattatgacacaactccatgctggaggtaagtttgatcatgattcatataaagtttctggcggacttcatggtgttggtgtttcggtggttaatgcattatctgaaaagttaacattaaaaatatttagagataaaaaagaatatttagttgagtttaaaaatggaaaagctttgtctgcgttaaaagctaaaggaaaaacaaataaaacaggaacttttataaattttatgccatcaagagaagttttttctgataccaaatttagttcactaactttgcaaaaaaggatgagagaacttgcttttctaaacaaaggcttatgtattattttaattgataaaactggaaaaaaagaaaaagaatataaaaataaatatgaaggtggcattcaagaatttgtagaatttttagataaaaataaaacaaccttggttaataagaatgatctaagtttatttaaaaaaccaatatatatttcaggatcgaaaaataatatcgaagtagaatgttcattaaagtggaacgcaggatattcagaagaaatgttaccatttgcaaataatattcatcaaaaagatgggggaacacacctgttaggttttagaagtgcgcttacaagagtaataaataagtatgctttagacggcaatctgttaaaaaaaaata

SEQ ID NO: 294927 - DNA, 826 bp, Unknown
  Bacterial polypeptide expressing nucleotide sequence isolated from the Sargasso Sea
ccaacggatgataatgatcaaaataaactagaaggaaaatttgatatttcaaaaatgcgataccataaagtaataattatgacagatgctgatgttgatggaagtcacattagaactcttcttttaacttttttttacagacatatgaaaccaatcatagatacgggaagactatatatcgcccagccaccactttatagattaaaaaaaggtaactctactgtctataagaaagacgatgatgatcttgaaaattatctaattgaagaaggcttaaaaaactcaatttttgaaaatacacagaagtctcaaattgctggagaagaattgaaaaatattttatatttatcaaaaagaactaaaaatttggttatgcctttactaaggagggttgataatcaagacattattgaacatgtggcaattgtaagaggactagatttaagaaatcttcaagataaaaatattggtaaggaaatagctaaatatttgcaacaaagattaaatctaatttcaaatatatcacaaaaaaattggatagtaactcataaaaataactctcttatttttgaaagaacaattagaggcttcacggaaaaatacactatagacgaaaattttttaatcactcctgaagctaaagcattaaacgaaataaaagatgaattaatggaaaatttttatcgccttaaagaatctggatgtggaacattaaataacaaaaatgaaaagtataaaatttttggacccttgaatttaattgataaagtattagacattggaaaaactggtttacaaataaatagatataaaggtcttggtgaaa

SEQ ID NO: 294928 - DNA, 823 bp, Unknown
  Bacterial polypeptide expressing nucleotide sequence isolated from the Sargasso Sea
accccaatttgaaggacaaacaaaaacaaaacttggtaatggagatgttaaaggtattgttgacaaaatagtttatgagggtattttagattttttagaacaaaacccctctattggaagaagggtaattgaaaaagccctgttggctgcacgcagtaggtctgctgcaagaaaagcccgcgagttaataagaagaaaaagcgcactaggtgggtcttcattaccaggcaagctctctgattgttcaaacaaagacccggtgttttgtgaactataccttgtcgagggagactctgcgggtggatcagctaaacaaggtagagatagaagaacacaagcaatactaccccttcgtggtaaagttattaattcagaaaaagcaagggttgataaactactttctaataacgaagtacagtcaatgattactgcacttggcgctggatttgggggatcagaggaagaatccggtgaaaagtcagctggtgattttgactctgaaaaactccgttatcacaaaataataattatgacagatgcagatgttgatggttcacacattagaacactactgttaaccttcttttatagaaaaatgaaagaagttattgatgggggttatttatatctagcccttcccccactatatagggtttcacaaggcaaaaaagaatcttatgcatatgatgataatgaaagagatttattaattgagcgtatgcaaaaagacaataaaaacaccaaggttggtattcaaagatataaaggtcttggtgaaatgaacccaggccaattatgggaaacaaccatggatccagaaaaa

SEQ ID NO: 294929 - DNA, 781 bp, Unknown
  Bacterial polypeptide expressing nucleotide sequence isolated from the Sargasso Sea
gatggtggaatattagagtttgtagaatttttggataaagatagagaaaaactaaaaaataaaaatgataatgatttatttaaaaagccaatttttattgatggaaaaaaagatagtttagaaattgaatgtgctttaaaatggaattctggatatactgaagatgtttatccatatacaaacaatatattccaaaaagatggtggaactcatttattaggttttagaagttcactaacaagagtaataaataaatatgcaaatgaacataacatattaaagaaaaacaaagtttctatatcaggagacgatattaaagaaggtttaacatgtgttctttctataaaaattccagacccaaaattttcgtcacaaacaaaagataaattagtttcttctgaagttagaaatattgttgaaagcttaataaatgaaaaactatcagtatggtttgaccaaaatccttcaatagcaaaaatagttttggctaaagtggtacaagctgcactagctagagatgttgcaagaaaggcaagagaaaatgtaagaagaaaaggagctttagaattaaccggattacctggaaaattagctgattgtcaaaattctaaacaagatggcactgaactattcatcgttgagggagattcagcaggaggttcagcaaaacaaggtagaaatagagaataccaagcagttttacctttaagaggaaagatttttaaatacatacaccaatttaaacggaacaaagaaaaatggaaatggaaacgaacttagg

SEQ ID NO: 294930 - DNA, 560 bp, Unknown
  Bacterial polypeptide expressing nucleotide sequence isolated from the Sargasso Sea
tatgagcgaatcaatactggaatctgatattgttcacgaaatgcgtgattcctacatggaatacgcaatgagcgtaattgtaggtagagctcttcctgatgtgagggacggtttgaaacctgttcacagacgtgttcttttctcaatgaacgaacaggggaatgattacaataagccctaccgaaaatccgcaaatgtggttggtgatgttatgggcaaatatcatccgcacggagacgctgcgatttacgacacagttgtgcgtctttcacaggatttttcaatgcgctatcagctaattgacggacagggaaattttggctctgtagatggtgattctcctgcggcaatgcgctatacggaagttcggatgcgaaggattgcacatgaaatgctggcagacctcgacaaagaaacagttgactttatgcctaattatgatgattcgctcaaagaaccagaagttttgccttcaagaattccaaacttactgactaacggctctactggtattgcagtaggaatggcaagcaatatccctccacacaatctcaaggagg

SEQ ID NO: 294931 - DNA, 508 bp, Unknown
  Bacterial polypeptide expressing nucleotide sequence isolated from the Sargasso Sea
atgactgatctcgccaatgaaattctgccagtcaatattgaagatgaattaaaaaactcctaccttgattacgcgatgagtgtaatcgtaggacgtgcattgccagacgtacgtgacggcttaaagccagttcaccgccgcgttctatttgcaatgaacgaactcaataatgattggaataaaccttacaagaaatcagcacgtgttgttggtgatgtaatcggtaagtaccacccacatggcgacagcgcggtatatgacaccatcgttcgtatggcgcagcctttctcattacgctacatgcttgttgacggccaaggtaactttggttctgttgacggtgactctgcggcagcaatgcgttatacggaagtccgtatggcgaaaatgtcacatgaattattagctgatttagaaaaagaaacggttgattacgtaccgaactacgacggtactgagcaaattcctgacgtattacctactaaagtacctaacttattagtaaatg

SEQ ID NO: 294932 - DNA, 960 bp, Unknown
  Bacterial polypeptide expressing nucleotide sequence isolated from the Sargasso Sea
caaagtttcgggcggtcttcatggtgttggggtatctgtggtaaacgctttgtcagaaaaattagagcttaatatttatagagatggaaaagaatatgcagttatctttaaaaatggaaatgcaataaaatcgttaagacaagttggcaaaacaaaaaaaagaggtactagaataaattttttaccttctaaagaagttttttcttcaatcaaatttagccctacaattttagaaaaaagaattagagaattagcttttctcaacaaagggatatgcataaaacttctcgatcagacatctaaaaaagaaaaggaatttgtgcacaaatatgatggtggaatagtagaatttgtaaaacatataaataataaaaaaccaattttgataaataagaacgaaaaagaagtttttaaaaaacctgtttatttaactgcaacaaaaaataatgttgtagtagagtgttcttttgaatggaatgctggatattctgaagatgtccttccttttacaaataatattcctcaaaaagatggaggaactcacttgttaggtttcagaagcgctttaactagagtgattaataaatattcaaacgataaaaataacaaaagaaataaaattactttatccggagaggatatcaaagagggattaacagcagtgttatcaattaagatgccagatcctaaattttcatcacaaactaaagataaattagtatcatcagagattagattgatagttgaaagtataattaatgataaagtttctacgtggttcgatcagaatccatcgatagctaagactgtactagaaaaaataactcaagcagcaatggcaagggatgttgcaagaaaagctagagatagtgttagaagaaaaggtatattcgagctatctggattgcccggaaaacttgctgactgtcaaatacaaaggagagagggaacagaattatt

SEQ ID NO: 294933 - DNA, 556 bp, Unknown
  Bacterial polypeptide expressing nucleotide sequence isolated from the Sargasso Sea
aatgagttcatcatatttgtcttacgcaatgagtgttattgtaagtagagcgcttccagatgtacgtgatgggctcaaacctgtccacagaagaatcttatacgctatgtacaaaggagggtttgattggacaaaacagtttagaaaatctgctcgtatagttggtgacgttattggtaagtatcatcctcatggagatcaagccgtatacgatgctcttgttagaatggttcaagaattttcaatgagtcttccattaatagatggccagggtaattttggttcaatcgacggagatcctccagcagcaatgaggtataccgaaactaaattatcaaagatatctcaatatttaattgatgatatagaaaaaaataccgtaggctttaagagtaattacgatgaaacagagagtgaacctgtagttttacccgcgcaatatcctaatttattggtaaatggggctggaggtatagcagttggaatggcaacaagtataccgccacacaatttgggcgaagttataaatggaactttagctttaatcgaaaataaa

SEQ ID NO: 294934 - DNA, 511 bp, Unknown
  Bacterial polypeptide expressing nucleotide sequence isolated from the Sargasso Sea
atggaaaaaattgaaggcaataatctaaataaaataaaatcgatatcaatgtatgatgagatgagctcatcttatttatcttatgctatgagcgtaatcatcagtagagctctacctgatattagagatggtttaaaacctgttcacagaagaatattgtttgctatgaacaagggtggatttgattggtctaagcaatttagaaaatctgcaagaattgttggcgatgttataggtaaataccatccacacggagatcaagctgtgtatgatgctttagtaagaatggttcaagaattttctatgagtcttcctttaatagatggccagggaaattttggttctatagatggagatcctccagctgcaatgagatatactgaaactaggctttcaaaaatttcccaatttttacttgatgatatcgataaaaatactgtcttatttaaaagcaactatgatgaaacagaaaaagaacctgttgttttaccagcccaatatcctaattgct

SEQ ID NO: 294935 - DNA, 813 bp, Unknown
  Bacterial polypeptide expressing nucleotide sequence isolated from the Sargasso Sea
aatgagcgacattaatagagaccacacattaaaccgcgatatagtagatgaaatgcgagaaagctatttaaactactcgatgtcggttattgtatccagagctttgccagatgtgcgcgacggcttaaaacctgtccatagaagaatcttatatggaatgagcgagcttggatcatcctggaacaggccctataaaaaatgtgcaaggattgttggagaggtcatgggaaaatatcacccacacggagactcatcgatttatgacgccttagtaagaatggcacaagatttttccatgagataccaactggttgacggccaaggaaattttggatctatagatggagataatgcagcagcaatgagatatacggagtcgcgcatgacaaaactgtctgccgagttattaaaagatcttgaaaaagaaaccgttgaatgggggccaaattttgatgaaaccttaaaagaaccaactgttcttccaacaacaataccaacgcttttggtaaatggatctgagggaatagctgttggaatggcaactaaaataccgccacacaaccttgttgaagttgttgatggtcttattgctctaattgataacaaacagattacagtcgaagaactaatggagcacataaaaggacctgattttccaacagcaggtatgattttaggtgtagacggtttaaaggcagcgtatgaaaccggacgcggaaaaattaaaatgcgtgcccgagcacacatagaaacagcaaaaaacggtaaagacagcattgttatcactgaagttccctaccaaacaaacaaagc

SEQ ID NO: 294936 - DNA, 731 bp, Unknown
  Bacterial polypeptide expressing nucleotide sequence isolated from the Sargasso Sea
gatgaaaacatttatcagaaaggaagaattaaataagaaatcgcctgttgagttactcggtgaagatgttagagaggggttaacagcaatagtttcagtgaaaatacctgatcctaaattctcatcacaaacaaaagaaaaactcgtttcctcagaggttgagagtgttgttagcaatgtttttaataagaattttaatgaataccttttagaaaaccctaaggaagcaatgtcaattttaacaaaaatatctgaagctgctttagctagggaggcagcaagaaaagctagagaaatgactagaaggaaaggggttttagaggtcgcaggtttaccaggaaaattagcagattgccaagaaaaagaccctgcgctgtcagagatatatatcgttgagggtgattctgcaggtggatcagctaaacaaggaagaaatagacaaaatcaagcaatacttcctctaaaagggaaaattttgaatgttgaaaaagctagattagataaagttttatcttcccaagaaataggaacgcttgtaacagctttaggttgtggaattggaacagatgagttcgatgctgataaattaagatatcacagaataattataatgactgatgctgatgttgacggctcccacataagaactttgcttttaacattcttctttaggcaaatgttcgaaatactaaatagaggacatgtttatattgcattaccgcccttataca

SEQ ID NO: 294937 - DNA, 603 bp, Unknown
  Bacterial polypeptide expressing nucleotide sequence isolated from the Sargasso Sea
tctcaaaaatgatgtcgtctaatgaaatagttactttaataaatgctttaggaacaggatataaagactttagcgtagacaatttaagatatgaaaaaattattataatgacagacgctgatgtggatggttcacatataagaactttgctattaactttttttaataactcaccgtttaatgagttgatagaaaaaggtcatttgtatttagcgcagcctcctctattcaaaataactaaatctggaaaaagcacttatataaaaaatgaaaaagatctcgaaagatacattttaaacttgtctggtaacgggtcaaaaaaattaaaaaaaatagactttgaaaggtatattaacgaacaaaagaaaaaattaagtatacaaaggtttaagggtcttggggaaatgaacccagacgaattatggaaaacaacacttgacccagataatagaacgttgcttcgagttgagtactcaaaggggacaagggaaaaatctaaagaagatcaaaatattataaaaatacttatgggtgatgaagttgctcctagaaaagatttcattacagaaaaagccctagaagttgaaaatctagatatctaaa

SEQ ID NO: 294938 - DNA, 672 bp, Unknown
  Bacterial polypeptide expressing nucleotide sequence isolated from the Sargasso Sea
aatgactaaaaatagaacttaccaggcagattcaattaaagttttaaaaggtctcgaagcagtgagaaagagaccgggaatgtacattggtgatacagatgatggtaccggtttacatcatatggtttatgaggttgtagataattctatagacgaagctctagcgggatactgcaaaaatatacaaattgatattaattcaaatggaacaattacagtaaaagatgatgggagaggtataccagttgatattcataaaggagaaaagaaatctgcagctgaagtgattatgacgcaattacatgctggaggaaaatttgatcatgactcatataaagtttcaggaggtttacatggagttggagtatctgtagtaaatgctctttcagaaaaactagagcttataattgaaagagaaggaaaaaaacatttggttgaatttgataatgggaatgtaatcaaacctttaaaagttattggtaagtcaaataatactggcacacaaataaattttttaccttcaaagaatattttttcttcaacaaaatttagttttaatataattcaaaaaagaatgagagagcttgctttcttaaataaaggaataaaaattaaaattaatgacttaagtcaaaaaaaaaataaatcttcagaatttaaatttgaaggtgg

SEQ ID NO: 294939 - DNA, 768 bp, Unknown
  Bacterial polypeptide expressing nucleotide sequence isolated from the Sargasso Sea
agggacttttgaattatcgggtttacccggtaagttagcagattgtcaaattcaaaagagagagggaacagaactatttattgttgagggagactcagctggaggctccgcaaaacaaggtagagtgagagaatatcaagcagttttacccttaagaggaaaaattttaaatacattcgtcaatggtaaaaaaaatggagaagatcaatcaacaaaagctttatcaaagatgatgtcatctagtgaaattgttaccttaataaatgctttaggtactggttcaaaagatttcagtatagataatttaagatatgataagattgtaattatgacagacgccgacgttgatggttcgcacataagaacattgttattaactttttttaataattcgcctttcaatcaattgattgagaagggacatgtttatcttgctcaaccacctctatttaaaattactaaatcaaataaaagtacatacattaaagacgagaaggctttggaagattatattttacaattagctaaaattgataagaagattaaaaaaggatcctcagaatacaaaaaatttatacaagaacacaaagaaaaattgtctattcaaagatttaaaggattgggtgaaatgaacccagaagaattgtgggagacaactttaaacccagataataggacaatgctaagggttcaatacactaaaggaactaaagaaaaatcaaaagacgatcagaaaatgattgaagttttaatgggagatgaggttgc

SEQ ID NO: 294940 - DNA, 766 bp, Unknown
  Bacterial polypeptide expressing nucleotide sequence isolated from the Sargasso Sea
atgagttcatcttatctttcttatgctatgagtgtaataattagcagagctcttccagatataagagacggtttaaaacctgttcatagacgaattctttacgcaatgtataaaggtggatttgattggtcaaaacaatttagaaaatctgcaagaatagtcggagatgttattggtaagtatcatccacatggagatcaagccgtttatgatgcgctagtaagaatggtacaaaatttttcaatgagcttacctctaattgatggacaaggaaatttcggatcaattgatggtgatccacctgctgctatgagatatacagaaacaagactagctaaagtttcacaatatttaattgatgatatagaaaaagaaactgtatcgtttaaaagtaattatgatgaaacagagttagaaccaatcgttctacctgcgcaatatccaaatttattagttaatggagcgggtggtattgctgtaggaatggctacaagtataccaccacataatcttggtgaagtaattgatggaactttagaattgataaaaaataaggatataaaaattaaagacttaatgaaatttatacctgggccagattttcctacaggcggtgtaattattggtaaaaatattattaaagaaggttataaaactgggaggggttcatttaagattagaggagaaattattgttgaaaatcttaaaaatggaaaggacagattagtaattacatcaataccttatcaagttaataaatccaatc

SEQ ID NO: 294941 - DNA, 909 bp, Unknown
  Bacterial polypeptide expressing nucleotide sequence isolated from the Sargasso Sea
gatggagatcctgcagctgcaatgagatataccgaaacaagactatcaaaagtaagtcaatttttaattgatgatatagaaaaaaatacaatttcctttaaaagcaattatgatgaaacagaaaaagagccaacagttttaccagctcaattccccaatttattagttaatggtgctggaggtattgcagttggcatggcaacgagtatccctcctcataaccttggcgaagttataaatggtgctttagctttaatagaaaataaagatattaagattaaagatttgatgaagcatatacctggccctgattttccgacaggtggtgttataatcggaaaagatgtaattaaacaaggttataataaagggagaggttcatttaaaataaggggtgaaatttcaattgaaagtttaaaaaatggaagagaaagacttgtgattacatcaataccatatcaagttaataaatcagtgcttaatgaaagaatagcccaattggttagagagaaaaaaattgaaggaataaaagacataagagacgagtctaatagagaaggaattagagtatcgatcgatttaagaaatggtgttgaaccagaaacagtgaaaagacaattatacaaaaatacacaaatagaaagctcatttggttttaataccttagcaatagttgatggaaaacctgaaacatgtagtttaaaagattttttaacaaattttttaacatttagagaagatgtagtaataaaaaaaacaaaatttgaattacaaaaagcagaagaaagagcccatatattaattggactttcagtatcagtggaaaatcttgacaaagttataaagattataagaaatgcaaagaatcctgataacgcaaaaaaatctattttaaaaattaaatggaaa

SEQ ID NO: 294942 - DNA, 810 bp, Unknown
  Bacterial polypeptide expressing nucleotide sequence isolated from the Sargasso Sea
aagactaatgattttaaatttgaaggggggataaatgagtttgttgaatttttagatgaaaagagagaaaaattaaaaaataagaatgacaatgatttatttagaaaaccaatttttatcgaaggaacaaaaagtgatgttgatgtgcaatgttcattaaaatggaacgcgggatataacgaggatgtatatccttatactaataacatttatcaaaaagatggtggaacccatcttttaggttttagaagtgctcttacaagagttgtaaataaatatgcatctgatcaaaatttattgaaaaaaagcaaagttcttttatccggagatgatataaaagaaggtttaacctgtgttttatctataaaaatcccagatcctaagttttcttctcaaacgaaagataaattagtttcatcagaggtaagaaatattgttgaaggtatcctaaacgaaaaattatcaatttggtttgaccaaaatccatcagtttcaaaaataattttgacaaagataattcaagcagctgtagcaagagatgttgctaaaagagctagagaaaatgtaagaagaaaaggggctttagagcttactggactgcctggaaaactcgcagactgtcaaaattcaaaacaagagggaacagagttatttatagtagagggagactcagcaggtggatcagctaaacaaggtagaaacagggagtaccaagctgtgttacctttgagaggaaaaatattaaatacttttaccgagattaatgggaataaaaaaaatggtaataatagtgacctaagaacaaaatca

SEQ ID NO: 294943 - DNA, 892 bp, Unknown
  Bacterial polypeptide expressing nucleotide sequence isolated from the Sargasso Sea
gcttttgaagcagcagctgccagagaagctgcgagaaaagcaagagaactgacaagaagaaagggagctttagatatagctagcttgcctggaaaacttgctgactgtcaagaaagagatcctgcaaaatcagaaatttttattgttgagggagactctgcgggaggcagtgctaaacaaggtagaaatagaaaaaatcaagctatacttccattaaaaggtaaaatacttaatgtagaaagagcaagactcgataaaatgctttcatcaaatgaaatagggactctaattactgcaattggagcaggagttggaaataatcaggaaagtgaagatagcttaaaaattgataaggtcagatatcataaaattattataatgacagatgcagatgttgatggaagtcatatcagaactttacttttgacattcttctttaggcatatgaaaccaataattgaagcaggatatttatatatagctcaaccaccattatatagagcaaagagaggatcaagcgaagtatacttgaaggacgattcccaacttgatgaatatcttataaattctgcactaaaagatgcacgtcttgtaacgggtaagggtgaaatcatctcaggccttgagttagaagagttcactagactttctcttgaaatgtcaaataacattgatgttctctctaatttattaggcattggaaaattaattgaacaagctgctattgctggagttctcaacgaacagcaaatttttaatctagaggctgcagaatatattgctaaaagaatggattttttatctggtttttatgaaaaaggttggaaggcaattataggtgatgatggaatgaaaatatttagaaaagtgagaagggtgtttacgaagaagg

SEQ ID NO: 294944 - DNA, 748 bp, Unknown
  Bacterial polypeptide expressing nucleotide sequence isolated from the Sargasso Sea
tcctttccaaaaaaaataaaaatggcaaaaaataatagcacttatcaggcagactccatcaaagttctaaaaggacttgaggcagttagaaaaagaccaggtatgtatataggtgacactgatgatggcacaggtttgcatcacatggtctacgaagttgtcgacaattctattgatgaggctttagcaggacactgtaaaaatatttcagtagatattaatcaagatggatccgtaacagttagggatgatggaagaggtgttccagttgatattcataagggtgaaaaaaaatcagcagctgaagttataatgacacaattacatgctggcggaaagtttgaccacgaatcgtataaagtttcaggtggattacatggtgttggtgtttctgtagtaaatgcattatctgaaaagcttgaactcactatagatagagatggaaaaaaacactttattgaatttaaaaatggtgatgcaaaatcacccttaaaagttattggtaattcaaaaaatacagggaccgaaataaaatttttaccatctaaagaaatattttctttaaataaatttagtttttcaacattacaaaaaaggatgagggaattagcttttttaaataaaggaattaaaataaaattaactgacttaactcaaaaaaaactcaaaagtattgaatttaaatttgatggtggaattgttgaatttgttgaatttcttgacgaaaaaagagaaaagttaaaaaata

SEQ ID NO: 294945 - DNA, 391 bp, Unknown
  Bacterial polypeptide expressing nucleotide sequence isolated from the Sargasso Sea
atggcaaataataaatacgattcatcaaacataaaggttttaaaaggattggaagcagttcaaaaaagaccagggatgtatataggtgatactgacgatggaagcggattgcaccaaatgatttttgaggttttagacaactcaatagatgaggcactagcaggacattgtgacacaatagaagtaacagtacacgaggaccagtctgtgactgttatagataatgggagggggatacctgttgatgaacatcctgatgagaaaaaatcagctgctgaagttattctgaccgtcttacatgcgggcgggaaatttgatgacaattcatacaaagtctctggtggtcttcatggagttggtgtctcggtcgtaaatgctttatctgaatcat

SEQ ID NO: 294946 - DNA, 790 bp, Unknown
  Bacterial polypeptide expressing nucleotide sequence isolated from the Sargasso Sea
agatgatgtaaacattaagagctttgctaacaacatacacacacttgagggaggcacccacgaagaaggcttaagaacggcgataacaaaagcgattaatgactttgcaaaatcaagaaatcttcactccgacatttcattaactggtgatgacatcagagaaggaatcaccggagtgatttccgttagggtaaaagagccccaatttgaaggccagacaaaaacaaagcttggaaatacagaaatgaagtcaaaagtacaggttttagtcaataaagagctgccgaaatggttgtccaagaacacaaaagaaggaagagcaattgtggaaaggtgcgccgttgcagcaaaagcaagaatgagcgctaaaaaagcaagagaacttacaaaaagaaagagcatcttagaaacagctgggcttccaggcaagcttgcagactgttcgtctgcagatccaattgaaagtgaattatttatagttgaaggagactctgctgcgggaccagcaaaacaggcaagggagtcaaaaacacaggcaatattaccaataaggggaaaaattattaatgtacaaaaagtcacagaaaacagagcacttcagaatgaagaaataagctcgcttataaaagcaataggtacaggaataaaagacgaatataaaggagaggaatcaaggtacggcaagataatatttttaacagacgctgatgttgacggagcccacataagaacacttttattaacgtttttctttaaattcatgccaggactaataaaagaaggcaaggtc

SEQ ID NO: 294947 - DNA, 385 bp, Unknown
  Bacterial polypeptide expressing nucleotide sequence isolated from the Sargasso Sea
tatgaaaaatactgaggagttaaaagataaaaatataaaattaatctcaatgcatgatgagatgagctcatcatatctttcttatgcgatgagcgtaattgttagtcgagctcttcctgatgtaagagatggtttaaaaccagttcatagaagaattttatacgcaatgtataaaggggggtatgactggtcaaaacaatttagaaaatctgcaagaatagttggagacgtaattggtaaatatcatcctcatggtgaccagtctgtatatgatgctttagttagaatggtgcaagatttttctatgagcttaccgttagttcaaggacaaggaaattttggatctatagatggcgatcctgctgctgcaatgagatatacagaa

SEQ ID NO: 294948 - DNA, 883 bp, Unknown
  Bacterial polypeptide expressing nucleotide sequence isolated from the Sargasso Sea
gagaaaattctagaagagtataagcaacttctagagatcatcgcagaacttcttcacatcctaaatagcccagagcgtttgatggaagtgattcaagaagaacttgaaaaagtacgtgatgaatttggtgatgaacgtcgtactgaaattacggcagcaagtcacgatattgatattgaagatcttatagagcaagaagatgttgtagtaacgctttctcgcgaaggttatgtgaaatatcaaaaacttacagactacgaagcacagcgtcgtggtggccgtggtaagtcagcaaccaagatgaaagatgaagatttcatcgaaagattattggtagctaatacccacgatcacatactttgcttctcaacccgtggtcgcttgtactggttgaaagtgtatcaattgccgtttgctagccgtaatgcgcgcggacgcccaattgttaacattctaccgcttgaagaaaacgaacgtattactgctattcttcctattaaagaatttgaagaaggcaagtttgtactgatggcaacggcaaacggtacagttaaaaagactgacctaagcctatactctcgccctcgttcaagcggtattatcgctgttaacctgaacgaaggtgatgagctgattggtgttgatatcactcacggtgatgacgacataatgttgttctctgacgcgggtaaagtagttcgctttaacgagaagcttcgcgacagcgaaaccggtgaagttaagcgtgacccagagacgggtgaagagcttctggcacttcgtccaatgggaagaacggcaacaggtgttcgcggtattcgtctgcaagatggacaaaaaagggtatcactcattttccaaaaggcgatggtccaatcctgac

SEQ ID NO: 294949 - DNA, 845 bp, Unknown
  Bacterial polypeptide expressing nucleotide sequence isolated from the Sargasso Sea
ctcgcaggacactgtacaaaaataacagtttttttcaacaaagacggatctattaccgttgaggacaatggtcgcggaatcccagttggaatgcataaagaagaaaaaaaaccagctgtagaggttgttatgaccgttttacacgctggtggaaagtttgacaaagacacttataaagtttcgggggggcttcacggcgttggtgtttctgtggttaatgcactgtcagagtggctctgggttgaggtgcagagagatggaaaaacatataagcaggattataagattggggtgacccaaaacaaactaaaagaaataggcaaaacgaaaaaaagcggaacaacggtttgttttatgccagacagagatgtttttaacactacaactttcgaatatgacataatatcagaaagactaagggaattggcctacttaaacaaggggcttgaaataaaccttcgagaccaaagagaaaaagatggacaaagtgattcttttaagtttagaggagggttaagtgattttgtaaaatatcttgatgtgaacaacaaccccctccataacaaagttataacagttacaaaagaaggaggtgagatacccgttgatgttgcgcttagatatggaaacacttacaacgacaacatactaacatttgtaaacaatataaacacaatagaaggagggacccacctgtcgggctttcgctctgcgctaactagggcaatgaacaatcacgcttcgaaaaacaatctaattaaaacaaagaaaactgaaaagctatctctcactggagaagactttagagagggcttgacggcaataataagcgttaaggttccaga

SEQ ID NO: 294950 - DNA, 571 bp, Unknown
  Bacterial polypeptide expressing nucleotide sequence isolated from the Sargasso Sea
aatgacaaaaaattctaattatcaagcagactcaataaaagtacttaaaggcctggaggctgttcgtaaaagaccaggaatgtacattggggacactgatgatggaactggtttgcatcacatggtctatgaagttgtagataactccatagatgaagcgttggcaggctactgtaaaaatataaatgtaagtattaactcagatggaagtattactgttaaggatgatggaagaggcattcctattgatcttcataaaggagaaaaaaaatcagcagcagaagtaattatgacacaattacatgctggaggaaagtttgatcatgattcatataaagtttcaggcggtttacacggtgttggtgtatcagtagtaaacgcactttcagaaaaattggaactaactatagaaagagatggaaataaatattttattgaatttaaaaatggagaagcaattaaacctttaaagttaataggtaaatctaaaaataacggaactgaaattaaatttttgccatctaaaaaagttttttccaccgtaaaatttagtttcaatataattcaaaaa

SEQ ID NO: 294951 - DNA, 244 bp, Unknown
  Bacterial polypeptide expressing nucleotide sequence isolated from the Sargasso Sea
atgagtgaggacaaaagatctaatataatctcaaacgattatggcgcggagcagattcaggttttagaaggtttagaaccagttcgtaaacgccctggtatgtacattggttctacaggacctaggggattacatcatctagtatatgaggtagttgataactccgttgatgaagcactcgcaggacattgtgatctcatagaaatagttcttcgagcagatggttttgctttaatttctgata

SEQ ID NO: 294952 - DNA, 896 bp, Unknown
  Bacterial polypeptide expressing nucleotide sequence isolated from the Sargasso Sea
cttgaagcagttagaaaaagaccaggaatgtatattaggtgatacagatgatggcactggtttgcatcatatggtttatgaagttgtagataactctattgatgaagctttagcagggcattgtaaaaatattgagattgatattaattcagatggaaccattacagttagagatgatggaagaggaatacctgttgatattcataaaggtgaaaaaaaatctgcagccgaagtgattatgactcaactccatgctgggggcaagtttgatcatgattcatacaaagtgtctggtggtttacatggagttggtgtttcagtagtaaatgctttatcagaaaaattaaaattagaaatagatagagatggaaaaaaatattttattgagtttgtaaatggaaatgcaaaggcaccattaaaatctataggcaaatcaaaaggttcaggaactaaaataaattttttaccatcaacagaaatattttcttcaactaaattcagtttaaatataattcaaaaaagaatgagggagcttgcttttttaaataaaggaataaaaatctctattaacgattttgttaataaaaaatctaaaaaaattgaatttaaatttgatggtggaattaatgagtttgtagattttttagacaataaaagagaaaaattacaaaataaaaatggaaacgatttatttagaaaacctatttatatagaaggtaaaaaaaataacatagaagtagaatgttcattaaaatggaatgctggatatagtgaagatgtctattcttatacaaataatatatttcaaaaggatggaggaacccatttacttggttttcgaagtgctttaacgagagtcattaatagatatgcggcagaaaataatttattaaaaa

SEQ ID NO: 294953 - DNA, 980 bp, Unknown
  Bacterial polypeptide expressing nucleotide sequence isolated from the Sargasso Sea
tgcactaccggatgttcgtgatggactaaaacctgttcataggagggtattatatggaatgcatgagttaggaataagatcaaataccgcttacaaaaagtctgctaggattgtcggagaagtattaggcaaatatcacccacacggagatagctctgtttatgatacgatggttcgaatggcacaaacatggagtctacgatatttgttggttgatggtcaagggaattttggttcaattgatggtgatagtccagctgcaatgagatatacagaggcacgaatgcggaaaatgtcggaagatttactagctgacatagaaaaagaaactgtagatcttcagctcaattttgatgatactctctctgagccaactgtacttccaacaagagtccctaaccttctcattaatggtgcctcaggaattgcggtaggaatggcaaccaatatgcctccccacaacctaactgaagttgtggatggtacaatccaatacattgataacaatgaaatcactattgatgaacttattcaaacgataaaggctcctgatttcccaacgggaggaactatatatggttatgagggtgtaaaggaagcttttttgaccgggagaggcagaattgtaatgcgcgctaacgcgaatattgagttagttcgcgatagagagtgtatagtagtaacagaaataccttaccaagtaaataaagcggaaatgatcaggaaaactgctgaattggtaaatgataaaaaaatcgagggaattagtaacataagagatgaatcagatagaaatggcatgcgcatcgtttatgtgcttaagcgtgatgcaattcctaacatcgttttaaacaaactttataaatttacttcccttcaatcctcttttagtgttaacaatattgctttagttgatggacgaccccagctgctgaatttaaaacaactaattcatttttttgttgaacaccgaccatgat

SEQ ID NO: 294954 - DNA, 916 bp, Unknown
  Bacterial polypeptide expressing nucleotide sequence isolated from the Sargasso Sea
tggttcattgatggcgacccacctgcagctatgcgatatacagaagtaagaatggcaaaaatcacagaccaaatgcttgctgatatcgaaaaggaaactataagttactcgcctaattatgacggaagtgaggatatacctgatgtattgccaacaaaaattccaaacttattggttaatgggtcatcaggtattgctgttggtatggccacgaatatacctccgcataatttaaatgaggtattaaatgggtgcataaatttaattaaaaatccaaaaatatcaattgatgaattaattaaagatatttctggccctgattttcccacaggtggaactattgacggtaaagctggcatatatgaggcatacaaaaccggtagaggaattattcatattagatctaatacttctattgaagaggataaatctggtaagcaatctttaattattaatgaaataccatttatggttaataaagcaaaaatgcttgaaaagatagctgaattagtaaaagaaaaaaaaatcgagggaataacagaaattcgcgatgagtctgataaagacggtctaagagttgttattgaggtaagaaaaggagactcaattgatgttttagaaaataatctttttgcacaaacccaacttgaacaatctttcggtattaattttactgttctttctgaagggcagcccaaagaagttaatctcaaagaaatgcttcaagcattcataaagcatagaaaagatatcattactaaaagaactaagtttgatctaaagaaggcaaaagaaagaggtcatgttgtagaaggacttatggtcgcgattgctaatattgacgagattatttctattattaagaaatcaaaggatccaaaaatagctgcttctgctttatgtaagaaggtatgga

SEQ ID NO: 294955 - DNA, 969 bp, Unknown
  Bacterial polypeptide expressing nucleotide sequence isolated from the Sargasso Sea
tctgcaagagttgttggtgacgttatttggtaaatatcatcctcatggtgattctgctgtttatgatgccatggtaagaatggcacaagatttctcaatgagatatccaattgttgagggtcaaggtaactttggttcaattgatggagacccacctgctgcaatgagatatacagaagtaaggatgtccaaaataactgaccaaatgctgggtgatatcgagaaagaaacagtctcattctcaccaaattatgatggaagtgaagatataccagatgtattgcccactaaaataccaaacttacttgtaaatggctcttcaggaattgctgtaggaatggctacaaatattcctccacataatcttaatgaagttttgaatgggtgtatcaatttaattaagaatccgaaaatatctattgatgatttaattaaagatatatcaggtccagactttccaacagggggaactattgatggcaaggctggtatttatgaggcatataagactggaagaggaattattcatacaagatcaaacacatcagttgaagaagacaaatctggaaaacaaagcttaattatcaatgaaattccttttatggttaataaagcaaaaatgcttgagaaaattgctgaactagtaaaagagaaaaaaatagaaggcataactgaaataagggatgaatcagataaagatggtttaagagttgtaatcgaggttagaaaaggtgattcagttgaagttttagagaacaatctttttgcgcaaactcaacttgaacaatcatttggcataaatttcactgttctatctgaagggcaacccaaagaagtaaatctcaaagaaatgttgcaagcatttgttaaacacagaaaagatatcatcacgaaaagaacaaaatatgacttaaggagagctaagaacagggggcatgtcgttgagggcctaatggttgcgattgcaaa

SEQ ID NO: 294956 - DNA, 756 bp, Unknown
  Bacterial polypeptide expressing nucleotide sequence isolated from the Sargasso Sea
tgatgcgttggtcagacttgcccaagacttctctttgagcgtgccactattagatggtcaaggtaattttggatcaatggacggtgatagggctgctgcaatgagatatacggaagttagaatggcaaaaattgctagtttccttcttgaagatatagaaaaagaaacagtcgactttagacctaattatgatgaaactgaaagtgagccatctgttcttcctgcaaaatatccaaacctacttgtcaacggtgcaggtggtatagccgttggtatggcgactaacattttacctcataatttaggagaggtcattgacgctagtattgcttaccttaaaaatactgacgtaacttttgaggaaataaatcaaattataaaaggtccagactttcccacgggtggaacaattattggcataaaaggcataaaagactctcagtcatcaggaagaggctcaatcattgttcaggcaaaatcaaatatagaggaatttaaaacagatcgagaggcaatcgtttttaccgaagtaccttaccaagttaacaaatcatctttgcttgagaaaatagctgaacttgtcagagataaaaaaattgatggcataagtgatttaagagatgagtctgaccgccaaggagtgagggttgttgttgaattaaaaaaaggggtaatatcacaagttgtattaaataaattatataaatttacttcactacaaagttcttacggggtcaattcattggcgttggtaaa

SEQ ID NO: 294957 - DNA, 661 bp, Unknown
  Bacterial polypeptide expressing nucleotide sequence isolated from the Sargasso Sea
tttgactaacgaagacgataatcaatcagaaaaaaatccaactattggctcagaggaatttaatacatcagtaatttcaattagtgatgaaatgaagaagtcatatttggattatgctatgagcgttatagtatcaagagctattccagatgtaagggatggtcttaaacctgttcatcgtaggattttatatgcaatgatggaaggcggttatgactggtccaagccttacaggaaatcagcaagagtagttggagatgtaatgggtaactatcatccacacggtgattctgcaatatatgattctatggttagaatggcacaagatttttcaatgagaataaagttgattgatggacaaggtaactttggttctattgatggcgacccagcagcagcaatgagatatactgaatcgcgtttgagtaaagcatcagagcttttgttaagggatattgataaagagacagtcgaatttatttctaattatgatgattctcaatttgaaccttctgttttacctgcagaatttcctaatattttagtaaatggagcagggggaatagcagttggcatggcaactaatattccgccacataatccagttgaagttgtaaacgcttgtaaagcgctattagacaataaagaaatgcaattagat

SEQ ID NO: 294958 - DNA, 862 bp, Unknown
  Bacterial polypeptide expressing nucleotide sequence isolated from the Sargasso Sea
catggaaacttcggtttctgttgataacgaccctccagcagcaatgagatatacagaatctcgtttacagtctcttactgatgaaagtttattagaggatattgaatctgaaactgtagatttcgccgataattttgacggttctcagcaagagccaacagttctacccgctaggatccctcaactacttctaaatggatcatctggaatagccgtgggaatggcaactaatattccacctcataacttaggggaattaattaatggtcttaaatcaataatcaaaaacccctcaattaaagatagtgaactttttgaaataattaagggtcctgattttcccacaggtggtcaaatcttaggcagagacggtattagagaaacattcaaaacaggaagggggtcaataacaatgagaggggtagcaaatattgagcaaattaaatccattggtagagcagagaaagatgctgtaataattacagagcttccatttcaaaccaataaagcggccttgatagaaagaattgctgatttggttaatgataaaaaattagaaggtatttctgatattagagatgaaagtgatcgagatgggatgaggattgttattgaactaaaaagagatgcctacccacaagtagttttaaataatttatttaagttaacacctttacaaaataactttagtgcaaatatccttgcattagtaaaaggagagcccacaacactttcacttaggaaaatgttagacgtttttctagattttagggttgagacaataaggcgaagaacaacatttttattaaaaaaggcagaagaaagagatcatattgtaaaaggtcttttattggccttagat

SEQ ID NO: 294959 - DNA, 750 bp, Unknown
  Bacterial polypeptide expressing nucleotide sequence isolated from the Sargasso Sea
atttagaaaatcagccagaattgttggtgacgttattggtaaataccatcctcacggagatcaggcggtttacgatgctttggtaagattagtgcaagatttttccatgagtttgccgttaattcaaggacaaggaaactttggttctatagacggtgatcctcctgcggcgatgagatatacagaaacaaaattatcaaaagtatcacaatttttaacagaaggattagaaaaaaatactattgattatagaaataattatgacgaaacagaaagagaaccaactgttttaccttctcaatttccaaatcttcttgtaaatggagctggaggaattgccgttggtatggcaacaagcatacctccgcataatttgggagaaataatcgatggaactattggtttcatcaaaaataatgacattacaatatcacagctaatgaaatttatacctggtcccgattttccaaccggaggaataattattggaaaagacatacttaaacaaggttataacaaaggaagaggatcatttaaaattagaggagaaattggagaagaaagtttgaaaaacggaaaatctagactagttattaaatctattccatatcaagtaaataaatctattttaaacgagaagatagcagatctatctagacaaaaaaaaattgaaggtgttagtgatataagagacgaatccaatagagacggaataagagttgtaattgatttaagacgtggggttgaacc

SEQ ID NO: 294960 - DNA, 772 bp, Unknown
  Bacterial polypeptide expressing nucleotide sequence isolated from the Sargasso Sea
tgcgcgcccggggcgattatcgaagacatcgacaaggtcggtggccgccagcagatcatcgtcagcgagctgccgtatcagctgaacaaggcgcgcctgatcgagaaaatcgccgagctggttaaagagaagaagctcgaaggcattactgagctgcgtgatgagtctgacaaggacggcatgcgcatcgtcatcgagctgcgtcgtggcgaagtaccggaagtggtgcttaacaacctctacgcccagacccagatgcagtgcgtgttcggtatcaacgtggtggcgctgatcgacggccagccgaaggtccttaacctcaaggacatgctcgaagcctttattctgcaccgccgtgaagtggtcacccgtcgcaccgtatttgagctacgtaaggcccgtgagcgtggccatatccttgaaggccaggcggttgccctgtccaacatcgacccggtcatcgctctgatcaaggcctcgccgaccccggccgaagccaagctggcgctgatcgccacaccgtgggaatccagtgcggtggaaaccatggtcgagcgcgccggtgccgacgcctgccgtccggacgatcttgatccgcagtacggtctgcgtgacggcaagtattttctctcgccggaacaagcccaggccattctcgagctgcgtctgcaccgtttgaccggtcttgagcatgaaaaactgctggccgaataccaggaaatcctcacccagatcggcgagctgatccgcatcctcaccagcgccacgcgtc

SEQ ID NO: 294961 - DNA, 865 bp, Unknown
  Bacterial polypeptide expressing nucleotide sequence isolated from the Sargasso Sea
ggcaagagagcttacaagaagaaagggagtgtttgaggggggaggcttgccgggcaagttatcagactgccaagagaaagatcctgcaaagagtgaaatctatcttgttgagggagagtctgctggcgggtctgcaaaacaagggcgagatagacattttcaagccatactcccactaaaaggcaagattctaaatgtcgagaaagccagattagataaggtgctttcttcagaagaaattataattttaatctccgccctgggttgtgggatcaagggagaagattggcaggaagaaaagcttaggtatcacagaattataatcatgacggatgctgatgttgatgggtcacacatcagaacattgttattgactttattttaccgtcagatgcctgaactaatcgagaagggttacatatatatcgcccagcccccactatataaattaaagaagggcaaacaagaaacatatgtcaaagatgattctgagctaagagaacttctggtagccgaaatattagatgatgcaaaattagttcttaacaaaaaaggagaatccataaccggtcaggccttaggaaaatttatttcccaacacgagaaagttcaaaatattttgaagggcttgacccatatatatcccgttgagcttttggaggggatcaaacacactcatcttcttaaagaccttgaagacgataaagaggtaaaaaaatggacctcttctttggaaaaatatcttaatgagaaagccgagcaaggttcgtcttggaaggtcggcacgacaaagaaagagggttcggatctgttagagcctaacattgctttattgagacacggaaccgagtctcaatggaacctg

SEQ ID NO: 294962 - DNA, 850 bp, Unknown
  Bacterial polypeptide expressing nucleotide sequence isolated from the Sargasso Sea
tatttacaaaaaagaatgagagaattagcatttttgaacaaaggaattcaaatttctttaaatgacttaactcagaaaaaaccaaaaaatattaattttaaatttgaaggaggtatattagaatttgtcgaatacttagatcaaaatagagaaaaattaaaaaataaaaatgataacgatttattcaaaaaaccaatttatatagaaggactaaaaaataatatagatatacaatgttcattaaaatggaatgcaggatataatgaagatgtatatccttataccaataatatttatcagaaagatggtggaacccatttattaggttttagagctgcacttacaagagtaataaacaaatatgcttcagaacaaaatttacttaaaaaaagtaaagtttctctttctggtgatgatgtaaaagaaggcttaacatgtgttttatcagtaaaaatccctgacccaaaattttcatctcaaactaaagataaattagtttcctcagaggttagaaatattgttgaaactattataagtgaaaagttatcaatatggtttgatcaaaacccttctatatcaaaaataattttaacaaaaattattcaagcagctgttgcaagagatgttgctagaaaagctagagaaaacgtaagaagaaaaggtgcgctagaacttacagggctgcctggtaaattggcagattgtcaaaattctaagcaagatggaactgaattatttattgttgagggagactcagctggtggttcagccaaacaagggagaaatagagaaaaccaagcagttttgccacttagaggtaaaatacttaacacatttacagaaataaatg

SEQ ID NO: 294963 - DNA, 711 bp, Unknown
  Bacterial polypeptide expressing nucleotide sequence isolated from the Sargasso Sea
tacaaaggtggtcttgtttcatatgttgagcatcttaattcgggaaaaaaaacaattagtaaaccaatttggatcaaaggtcaaaaagatgacactattgtagaaatatcagttcaatataatgaaggatattccgaaaatattttttcttatgttaacaacataaatacaattgaaggtggaacacatctaagtggttttagaagcgccttaaccagatcaataaataaatacgcgaaagatcaaaatctattaaaaaatcaaaatatacagataactggtgacgatacaagagaggggttaacatccgtggttagtataaaagtccctgagcctaaattcgagggacaaaccaaaactaaattaggaaattctgagactgctgggatagttgaatcactgttaaatgactctttaggcgaatattttgaaaagaatccttcgcatgcgaaaaaaattgttaataaatctattgatgcggcaaaggcccgtgaggcggctaaaaaagcaagggatttaaccagacgaaaaagtgcgcttgacttaggttcattgcctggaaagctagctgactgtcaggaaaaagatccagagaaatgtgagctgtttattgttgaaggagaatcggcaggtggctctgctaagcagggtagggatagaaagactcaagcggttcttcctctaaaaggaaaagttataaatgttcaaaga

SEQ ID NO: 294964 - DNA, 818 bp, Unknown
  Bacterial polypeptide expressing nucleotide sequence isolated from the Sargasso Sea
atttaaaaatatgacaaacaaaaacacatatcaagcggactccataaaggttttaaaaggtcttgaggcagtgagaaaaagaccaggaatgtacataggagatacagacgacggtacaggcttacatcatatggtatatgaggttgtagataattctatagatgaggcattagcaggtcattgtaaaaatattaatgttaagatcaattctgatgggacaataactattaacgatgacggtagaggtattcctgttgacatgcataaaggagagaaaaaatctgcagctgaggtaattatgactcaacttcatgctggtggtaagtttgatcatgattcatataaagtttctggaggacttcatggagttggtgtttcagtagttaacgcattatcagagaaacttgaattagaaattaatagagatggaaaaaaacattttatagaatttaaaaatggtgaagcaaaatctcccctaaaagcagttggaaaatcaaaaaatacaggtactcaaataacatttttaccctctaaagatattttctcttcaataaaatttagtgcaaatattttgataaaaaggatgagagaattggcattcttaaataaaggtataaaaataatttttaccgacgccagtcaaaaaaaagaaaaaatatctgaatttaaatttgatggtggtgtccaagagttcgtagattttttagatgagaaaagagaaaaattacaaaataaaaatggcaatgatctatttagaaaaccaatttattttgaaggcaaaaaaaataatattgaaatagagtgttctttaaaatgaa

SEQ ID NO: 294965 - DNA, 901 bp, Unknown
  Bacterial polypeptide expressing nucleotide sequence isolated from the Sargasso Sea
tccaaagttttcatctcagacaaaggataaacttgtttcatcagaagtaaggatgatagtagagacactagtaaatgaaaaattatctatttggtttgatcaaaatccttcgattgcaaagattattttagccaaagttattcaagcagcaatggcaagagatgttgctagaaaagcaagagaaaatgttaggagaaaaggagctcttgaattaagcggtcttcctggaaaattagctgattgtcaaattggtaaacaagaaggaacagaattgtttattgttgagggtgattcagcaggtggttctgctaaacaaggaagaaatagagcaaatcaggcagttttacccttaagaggtaaaatactaaatacctacgtcgaagattttaatttcaagaaaaatggtaatggcaatggtactgatcaaagaactaaggctttgtctaaaatgatttcttcaaatgagatagttactttgattaatgctctaggtttagatccaaaagcacaagaaattgatctaaaagatttgaggtatggaaaaattattattatgacagatgctgatgtagatggttcccatattagagctcttcttttaactttttttaataataagccatttaacaaattaatagaaaatggtcatgtttatttagcacaacctccattatttaaaattaataaaggttcaaaaggaatttatattaaagatgagatggagctagaaaattatatattaaacaataataaagaattaaaaaaaataaaaaaaggttctaaagaatatttaaaagcacttgaattagaaaaaaaaaaaatgaatattcaaagatttaaaggattgggtgaaaaaaagcctgaagagctatggagcactacaatagatccagagacaaga

SEQ ID NO: 294966 - DNA, 664 bp, Unknown
  Bacterial polypeptide expressing nucleotide sequence isolated from the Sargasso Sea
tcaatggactgacagctatcatgaaaatacaatttgctttactaataatattattcaaagagatggagggacgcatctagctggttttagaggagctcttacccgatctatcgtaaattatattaataaaaatacaaaaaattcaaataatattactggtgaagatgctagggaaggattaacatgtataatatcagtaaaattaccagaccctaaattttcaagtcaaacaaaagataaacttgtatcttctgaagttaggccagtaattgaatctacaagcttaagtaaattagagcaatggattgaagaaaacccctctgaaattaagagagtgattgaaaagataattgaagcttcaaatgcaagagaggctgcaagaaaagcaagagaattaacaagaagaaaaactggtttagaaaatacatctttgccaggcaaacttgctgattgccaagaaaaaaatcctgaattatcagaattatttatagttgaaggtgattcagcaggtggttcagcaaagcaaggtcgtgatagaaaaaaccaagctatactccctttaagaggcaagatattaaatgtcgaaagagcaaacgataaacaaattttaactagtaacgaaataggtgctctaatttactgcaataggtgcaggagttggtaa

SEQ ID NO: 294967 - DNA, 832 bp, Unknown
  Bacterial polypeptide expressing nucleotide sequence isolated from the Sargasso Sea
caagcagattcaattaaagtattaaagggcctagaggcagtgagaaaaaggcctggaatgtatattggtgacacagatgatggaactggtctacatcatatggtttatgaggttgtagataattctattgatgaagctttagcaggccattgtaaaaatataaatgttataattaaccaagatggaacagttactattagcgatgatggtagggggatacctgtagatattcacaaaaccgaaaaaaaatctgcggcagaggttattatgactcagcttcatgctggaggaaaatttgatcatgattcctataaagtatcaggaggattacacggagttggtgtctcagttgtaaacgctctgtcagaaaagttactattagagattagtagagatagcaaaaaatatcttatagagtttaaaaatggtgaagcaaagtcaccattgaaagctgtcggcaaatcaaaacaatctggtaccaaaataacttttttgccatcttcagaaatcttttcttcaattaaatttagttccaatattttaattaaaagaatgagagaattggccttcctaaataaaggaattaaaattatttttattgatgccaccttaaaaaaggaaaaaatatcagaatttaagtttgatggtggtgtaatagaatttgtcaattttttagacgaaaaaagagaaaagttacaaaataaaaatggaaatgatttatttaagaagcctatatatatagaaggaaaaaaaaataatattgaaatagagtgttctttgaaatggaacgctggttatggagaagaaatttttccgtatacaaataatattt

SEQ ID NO: 294968 - DNA, 666 bp, Unknown
  Bacterial polypeptide expressing nucleotide sequence isolated from the Sargasso Sea
tgtcagagatatatattgttgagggtgattctgcaggcggatcagctaaacaaggaagaaatagacaaaatcaagcaatacttcctctaaaaggaaaaattttgaatgttgaaaaggccagattagataaagttttatcttcccaagaaataggaacacttgtaacagctttaggttgtggaattggaacagacgagttcgatgctgataagttaaggtaccacagaataattataatgactgatgctgatgttgacggctcccacataagaactttgcttttaacattcttctttaggcaaatgttcgaaatactaaatagaggacatgtttatatcgcattacctcccttatacaaagtttcaaaaggaaagaatattaaatatgcagcttcagaaaaggaaaaggatgctgctttaaaagaattatctaaaacaggtaataggggaattgaaatacaaagatataaaggtttaggtgaaatgaatccagatcaactctggactacaacaatggatcctcaaaatagaagaatgatgagggttcgaattgacgatgctaatgaggctaataactcttttgaggtcctaatgggtgaccaggttgagcccagaagagagtttattgatgaaaacgccctttctgtcgcaaatttagatatttagt

SEQ ID NO: 294969 - DNA, 241 bp, Unknown
  Bacterial polypeptide expressing nucleotide sequence isolated from the Sargasso Sea
atgtctaagaattccgaattaaataaaaaaccatcctatggagctgatgctattaaggttcttaaaggactagatgcagtcagaaaacgaccaggtatgtacattggagataccgatgatggatctgggttacatcatatggttttcgaagttgttgataattcgattgacgaagctttagctggatattgtaaaaacataaaagtttcaattaattcagataacacagtcacagtgaaga

SEQ ID NO: 294970 - DNA, 859 bp, Unknown
  Bacterial polypeptide expressing nucleotide sequence isolated from the Sargasso Sea
ggtgattcagctatatatgattcaatggttagaatggcacagaatttttcaatgagtgttgaattgatagatggtcaaggaaattttggttccatggatggtgaccctccagctgctatgagatatactgaggcaagattatctaaaatttctgaaaagcttgtatcagatttagaaaaagaaacagttggttttgtagctaattatgatgattcatcaaaagaacctatagttttaccagcacaatacccaaatttactagtaaatggcacttcaggaatagctgttggcatggccactaatatacctccacataatttaggggaggtgattgatgcaactttattccaaattgataatcctcaatgctctattcaagatcttaacaaatatatattaggacctgattttcctacaggaggtaaaattattggaataaaagggataaatgaggcctattctacaggaagaggggctgttgttttacgatccaaaactaaaatcgaagaatttaaaaaggaaagagaagctataataataaatgaaatcccttatcaagttaataaggctagactaattgaaaaaatagctgaaacagtaaaaaataatataattgagggcatctctgatttaagagatgaatctgatagaaatggagtcagggttgtaatagaactcaagagagatgttgattctaaaataatattaaatcaattatataaacatacattattacaaacaacttttaatagtaatatgcttgctttaaacaaaggtaagcctgagcaacttaatttaaaagagataattacttatttcattgaatttagagaagaaatagtaacgaaacgaactgtat

SEQ ID NO: 294971 - DNA, 920 bp, Unknown
  Bacterial polypeptide expressing nucleotide sequence isolated from the Sargasso Sea
ttgcctgatgtcagagatggattgaaaccagttcatagaagagtcctctatgctatgaaagtacttggtaatgatcatacgaaagcttacaaaaagtctgccagaatcgtaggtgatgtaattggtaaatatcaccctcatggagacagtgcagtttatgaaaccattgtaagaatggctcaggacttttcactgcgatatacccttgttgatggtcaaggaaactttggatcaatcgatggtgatagagcggctgctatgcgatacacagaagttaggatggaaaagatcactcaagaacttcttgctgatatcgacaaggatactgttgattttattcccaactatgatgaatctgaagaagagcctgcggtacttccaactcggttacccaatctactgatcaatggatctgctggaatcgcggttggtatggccaccaatattccacctcataacttaaaagaaatcatcgatggatgcctatttatattagataacgatcaggcaagcattgatgatctaattaaactcattcctgcgccagattttcctactgctgctacaatccatggtatcgatggcattaaacaggcctatgaaactggaagagggcgtgttcatgttagagcaaaaacctcgattgaagaaaatggagaccgtgaatctatagttgtttctgagcttccatatcaggttaataaagccagattaattgaaaagattgctgaactggtcagagataagaaaatagaaggcatctcagaaattcgagatgaatctgataaagatggactaagggttgtaattgatctcaagagaggaacagtttctgatgtgcttttaaataatttgtataagcaaacgctcttagaaagcacattctctatcaatatggtcgctctgtctaatggacagcc

SEQ ID NO: 294972 - DNA, 796 bp, Unknown
  Bacterial polypeptide expressing nucleotide sequence isolated from the Sargasso Sea
aaaaacaatgtaatagtcgagtgttcttttgaatggaatgcaggttactctgaagaggttttaccatttacaaacaatattcctcaaaaagacggtggaacgcatttattaggttttagaagtgcacttacacgagtgataaataaatatttttcagataagagcaataaaaaaagtaaaattactttatcaggagaggatataaaagaagggttgacagctattatctcaataaaaatgcctgatccaaagttttcatcgcaaacaaaagataaactagtttcatccgaaattagaaatattgttgagcatattatcaatgaaaaagtttcaacatggtttgatcaaaatccctcagtcgcaaaaacagtaattgaaaaaatttctcaagcggctatggcaagagaagttgcaagaaaagcaagagatagtgttaggaggaaaggtgcattcgaactcacgggactacctggtaaacttgctgactgtcaaattcaaaaaagagaaggcacagaattatttatcgttgagggagactcagcaggagggtcagcgaaacaaggacgtgtaagagaatttcaagcagttcttccattacgtggtaaaattttaaacacttttgttaatggaaagaaaaatggggaagatcaatctactaaagcactttcaaaaatgatgtcatctagtgaaatcgtaactcttattaatgcgttaggcactggttcaaaagattttaagattgataatctaagatatgacaaaataattataatgactgatgctgacgtggatggat

SEQ ID NO: 294973 - DNA, 628 bp, Unknown
  Bacterial polypeptide expressing nucleotide sequence isolated from the Sargasso Sea
atgaatgaatcatcagttacagaaataatacctgttaatcttgaagaagaattaaaacaatcctatttagattatgccatgagtgtaattgtaggaagggctcttccagatgcaagagacggactgaaacctgtccacagaagatgtctatatgcaatgcatggattgaataatgattggaatagaccacatagaaaatcggcaagaatagtaggtgaagtgattgggaggtatcaccctcatggagatggagctgcttacgacactatagtaagaatggcccaatggtttagcatgagatatccattagtagaccctcaaggaaactttggttcaatggatggagaccctcctgctgctcaacgttatacagaaattaggatgtctaagatagcccatgagcttttaacagacctagaaaaagatactgtaaattttgtaaataattttgatgatacagaaactatgcctgaagtttttccttcaaaaatacccaacctcttagttaatggttcttctgggatagctgtaggtatggcaactaacatgccaccccataacttaaatgaaacaatatcagcatgcctagagtttattggaaatcctgatgtgtcccttagagagactt

SEQ ID NO: 294974 - DNA, 934 bp, Unknown
  Bacterial polypeptide expressing nucleotide sequence isolated from the Sargasso Sea
gtattatattcgatgcatgagctgaataatggatataacaaagcatataaaaaatcagcaagaatcgttggggacgtgattggtaaatatcatccgcatggggacactgctgtttatgacaccattgttcgcctagctcaaccattctccatgagatatcctctggttgatggtcaaggcaacttcggttctattgatggcgactccccagcagcaatgagatacacagaggtgagaatgtcacggctatctcatgaattattatcagacatagacaaaaatacagttgatttcaatccaaattatgatggttcagaacgagaacctactgtacttccaactaggctccctaatcttttaatcaatggtgcatcaggaattgctgtagggatggcaacaaatataccccctcataatctaaatgaggtaatagatggtgtaattaccctgataaaagagccatcactttctgatgaggctaatttagatcaattcatcgcaaaatctgggttcaatggtccagattttcctacgggagctgagatcaaagataatggcggaattcatcaactaataaaaacaggacgaggatcttttaaaatcagagctacccatagtattgaagaacataaagataaaaactcaataatcattaatgaacttccatatcaagttaataaggctaaattaattgaatcgatagcaattttagtaagagataagaaaattacaggcataagtcaccttagagatgagtctgatagggatggattgagagtcgtcatagaattaaagaaaggggagcagcctgacgtgattctaagtagcttgtataagcagacaaatcttcaaacatccttttctgcgaacatggtttgtctagtagatggagagcccatgtaccataaaagtgtacccccaagcttttattaga

SEQ ID NO: 294975 - DNA, 808 bp, Unknown
  Bacterial polypeptide expressing nucleotide sequence isolated from the Sargasso Sea
tcaattactgttgaagatgacggtaggggaataccagttgattttcataaggaagaaaaaaaatctgccgcagaagtaataatgacccaactccatgctggaggaaagtttgatcatgattcttataaagtttcgggagggttgcatggtgttggtgtttcagtagtaaatgccctctcacaaaaattagaattgtatgttgaaagagatggaaaaaaacattttgttgagtttaaaaatggtgaaactaaaacacctttaaaaataataggtaactcaaaaaacacaggtacaaaaattaattttttaccatctaaaaatattttttcatcaacaaagtttagctattctgtcattcaaaaaagaatgcgtgagttagcttttttaaataaaggagtaaaaattattctccacgatttaacacaaaaaaaaattaaaacttcaaatttcaagtttgatggtgggataaatgaatttgttgaatttttagatgataaaagagaaagcttgaaaaataaaaatgataatcacttatttaaaaaacctatatatattgaaggtataaagaataatatagatattcaatgttcacttaaatggaatgcaggatataatgaagatgtatacccttatacaaataatatttatcaaaaagatgggggtactcatcttttaggtttcagaagtgccttgacaagagttgtaaacaaatatgcttcagagcaaaatttattaaaaaaaagtaaagttcttttatctggagatgatgtaaaagagggtttaacatgtgtattatcggtaaagattc

SEQ ID NO: 294976 - DNA, 930 bp, Unknown
  Bacterial polypeptide expressing nucleotide sequence isolated from the Sargasso Sea
tttagagatggtaaagagtattttatttcttttgagaatggtaaaccgaaaaatccccttaaatttctaaaaaaaacaacaaagtctggcactagaattactttttttccttcaaaagaaattttttcgactacaaaatttagttcattaattctacaaaaaaaaatgagggaactagcatttttaaataaaggtttgagaataagcttgcatgatgaaacactagctaaaataaaatcctttgaaaataaatacgatgggggaatacaagagtttgtaatttttaatgacttaaaaaaaactccattaattaataataaagagaagtctgtttttaaaaaaccactttacataaaaggtgaaaaaaaagatgtagttgttgaatgttctcttcaatggaatgcaggcttttccgaggatgttcttgcatttacaaataatattcatcaaaaagatggaggtacacaccttttagggttcagaagcgctttaaccagaataataaataaatatgcatctgaaaaaaatctcaataaaagaaacaaagtaacaataggtggtgatgatattagagaaggtttgaccggcgttttatcaattaaaatgccagatccgaaattttcatcccagacaaaagataaacttgtatcctccgaaattagaaatgttgtagaaacaatagttagcgaaaaagttacgacctggtttgaccaaaatccatcaattgtaaaaacagtattagaaaaagtcttacaggcggcaatagcaagggatttggcaaggaaagcaagagatagtgttagaagaaaaggtactttagagctatccggccttccagggaagcttgctgactgtcaaatctcaaagatggaaggcacagagttattcatcgtcgagggggattctgccggcggttctgcaaaacaagga

SEQ ID NO: 294977 - DNA, 787 bp, Unknown
  Bacterial polypeptide expressing nucleotide sequence isolated from the Sargasso Sea
gataaagcagttagttcagcagaaatagcaaccttaatccaggcacttggtactggatttaaaccagattttaatattgacgatttaagataccataaaataattataatgactgatgctgatgttgatggatctcatattagaacactattacttacattcttttacaggcatatgcctgatctaattaaggaagggtatgtttatatagctcagccacctctttatagaattaaaaaaggtaagactgaattatatctcaaagacgataaagaattagacaactttcttgtaaatgacttgattgagcaagcagttttaatacaaaaaaatggtatgagtgttaaaggagttgatttgtcaaatctttttaatttattaattagttttgataaactattgacccaattagcttcaggtaatgacagtttgtattttcttttagaacaagcatcaatctcaaatttatttgaatctagtaattttggtaatcaagaaaaatcaaataaaacaattgattatcttcttaagagattaaattttgatcttaaaatgtggtcagctgaagttaaatctggagaatgtgtgattttttataagacagaaaataaagttgtagaaaaatttgaaatattttttaaagattttgacgagtttaactatatgaatttaaaaagatttagcaatcgtttacaggaatattttttaaataactcaacccttcagattaatgatgacaaatttgatattttccgtccaagagatttgcttactaaaggtctcaatc

SEQ ID NO: 294978 - DNA, 942 bp, Unknown
  Bacterial polypeptide expressing nucleotide sequence isolated from the Sargasso Sea
tcgatgaagcgttggcaggattttgtaaaaatataacaattgatattaatccagatggaacaattaaagttaaggatgatggcagaggtataccagtagatattcataaaggagaaaaaaagtctgcagcagaagttattatgacccagttacatgctggtggaaaatttgatcatgattcctataaagtttcgggaggtttgcatggagttggtgtttcggttgtaaatgcattatctgaaaaattagaattaattatagaaagagatggaagcaaatatttaatagaatttaaaaatgggaatgcgattaagcctcttaaattaataggaaaatcaaaaaatacaggaactgaaattaagtttttaccatccaaagaaattttttcttcaacaaaatttagctttcaaattattcaaaagagaatgagagaacttgcatttttaaataaaggaataaaaatatcgattaatgattttacacaaaaaaaattaaaaaaagtggactttaaatttgatggtggaatattagaatttgttgaatttttagataaagatagaagtaaattaaaaaacaaaaacgataatgatttgtttaagaagccaatatttgttgatggaaaaaaaaataatctagaaatcgaatgttctttgaaatggaacgcttcttattctgaagatatttatccttacacaaataatatatatcaaaaggatggtggaactcatttattaggatttagaagtgctctaacaagagttataaacaaatatgcaacagaacaaaacttattaaaaaaaaataaagtttctatctcaggtgatgatattaaagaaggcttaacatgtgtattatcaataaaagtcccagatccaaaattttcttctcaaacaaaagataaattagtttcgtcggaggtaagaaacattgtgaaactataat

SEQ ID NO: 294979 - DNA, 941 bp, Unknown
  Bacterial polypeptide expressing nucleotide sequence isolated from the Sargasso Sea
attaaagtagctgaacctcaatttgaaggacaaactaaaacaaagcttggtaattctgaagcaatgggagcagttgacgtttgcgttggtgagatgctaggtgattttttagaagagaatccgaaagaagcaaaacaaattatttctaaagttattttggctgctcaggcaagacatgctgcgagaaaagcaagagaaatggttcaacgaaaaaatgttcttacaggaacaggtttgcctggaaagctagcagattgctcagaaaaagatccatctctttgtgaattgtatgttgttgagggtgattcggcaggaggttctgcaaagcaaggaagagatagaacatttcaagctattttgcctttaaaaggtaaaatattaaatgttgaaaaggcacaagaacataaaatttatgataatgacgagataaaaaatatcataactgccttaggtgttaaatttggaactgaagaagatgaaaaagaattaaatcttgaaaaactaagataccataaagtaataattatgactgatgctgatattgatggaagtcatataagaacattggtacttactttcttttttagatatatgcgacctttgatagataaaggatatttgtatattgctcttccacctttatatcaattatctaaaggtaaaagggctgaatatgtttggtctgaagacgaaaaggataggatggtaaaggaattatctaaagatggaaaagagtcatcagtcaatattcagaggtataagggtttaggtgaaatgaatcctgaacaattatggtcaacaaccatggatccttcagaaagattattaaacaaggtaactatagaatcagcagctgaagcagatgttttattttctaaattgatgggagatgaggttgcgcctcgtagagagttcattgaaaagaatgcaaaatatgctaa

SEQ ID NO: 294980 - DNA, 319 bp, Unknown
  Bacterial polypeptide expressing nucleotide sequence isolated from the Sargasso Sea
tatgtctgagtttgccaaacaggtttcgcctgtcgcattagagagcgagatgcgagagtcgtatttagcatatgcgatgagtgttatcgtaggccgagctttgcccgatgtaagggatggccttaagccagttcatagacgagtgttatacgcaatggaagttctgtctaatgactttaataagccatacaaaaagtcggctcgcgtcgtgggtgacgttataggtaaatatcatccccacggtgatacggcagcatacgatactatagttcggatggctcaagatttttcattgcgctatccattagtggacggtcaa

SEQ ID NO: 294981 - DNA, 489 bp, Unknown
  Bacterial polypeptide expressing nucleotide sequence isolated from the Sargasso Sea
catgacaaaacaaaaacaacaaaataagcaaaaatatagcgcagaatctataaaagtacttaaaggtttagaagcagtcagaaaaagaccaggtatgtatattggagataccgatgatgggactggtctacatcatatggtttatgaagtagtggataattctattgatgaggctttagcaggttattgcaaaaatattaaagttacaattaactcagatcaatctgtgtcagtcgaggacgacggaagaggaattccagtagatatgcatagaggtgaaaggaaatcagcagcagaagtaataatgacacaactccacgcaggaggtaaatttgatcacgattcatataaagtttccgggggacttcatggtgttggtgtttctgtagttaatgctctttctgaaaaattaacactaaaaatatttagagaaaaaaaagaatattttgttgaatttaaagatgggaaagcactagcccctttaagagt

SEQ ID NO: 294982 - DNA, 556 bp, Unknown
  Bacterial polypeptide expressing nucleotide sequence isolated from the Sargasso Sea
tatgagtcaaaaacaatatacagcaagtagtattcaggcattggaaggaatggagcacgttcgtatgcgtccttccatgtacattggtgatgtaggtttcagaggtcttcaccatttggtttatgaagtagtagataactcaattgatgaggctttagcaggatactgtgatacaatttccgtaaaaatcaaagaaggaaatgccattgaggtgatggacaacggtcgtggtattcctgtagattttcacgaaaaagagcaaaaatctgcacttgaagtagtaatgaccaagattggtgcgggtggtaaatttgataaagattcttataaagtttccggaggtctgcatggagttggggtatcttgtgtgaatgctctttccaatgagatggtgactacagtttacagagacggaaatgtttatcagcagatttactctaaaggtaaagcacaaactgaagtagaggaaatagggaacagtgacatcagaggaacgaagcagtttttcaaacctgatgatactatttttactgaattagtttataattatgataca

SEQ ID NO: 294983 - DNA, 834 bp, Unknown
  Bacterial polypeptide expressing nucleotide sequence isolated from the Sargasso Sea
gatgggcttaaaacatatgctgcaatgttttgtgttgcaccgccgtgaagtggtgacacgcagaacagtctatgatttacgtaaagcccgtgaccgcgctcatatcttagaaggtttggccatcgctcttgccaacattgatgaaattattgatttaatcaaaaactcatcaagcccggccgatgcaaaacaaggtttagtcgcgcgtggctggcagttaggtgatgttagcgccatgttagagcgtgccggtgaaaacgccgcccgtcctgagtggctggaagaacattttggtatccgtaatggcgagtatttcctgactgaacaacaagctcaggccatccttgatttacgtttacacaaactgacgggtctggaacatgaaaagattctggacgagtacaaagagttattagtgctgattgctgaactgttacacattctggggagcccggagcgtttaatggaagtgatctgtgaagagttagaagctgccaaagcccaatatggtgatgcccgtcgtaccgaaattcaggataacgcgatggatatcaacatggaagacttgatcaccgaagaagacgtcgtcgtgactttatcgcatttaggctacgccaagtaccaggctctgtctgactatgaagctcagcgtcgtggtggtcgtggtaaagcggcaactacagtcaaagatgaagactttgttgaccagttgctgatcgcaagcacccacgatacgattctgtgtttctctaaccgtggtcgtctgtactggatgaaggtgtatcaattaccgctggcctcccgtcaagcgcgtggtaagccgatagtgaactt

SEQ ID NO: 294984 - DNA, 861 bp, Unknown
  Bacterial polypeptide expressing nucleotide sequence isolated from the Sargasso Sea
ttgatgaggcacttgctggccattgtaaaaatataaatatatcaattaattcagataatacagtttccgttgaggacgatggtcgaggaattccagttgatatgcacaaaggcgaaaaaatgtctgcagcagaagtaattatgacacaattacacgcaggtggaaaatttgatcacgattcttataaagtttcaggaggattacatggagtaggtgtttcagttgttaatgcattatcggaaaaattagatcttaaaatatatagagatggacatgaatatgaaatcgaatttaaagatggaaattcagtaaagtcgcttaaaaagttaggtaaaacaaaaaaaaacggcactaagatcacattcttaccttcaaaagaaattttttcttctgttaaatttagtgcatcaattattgataaaagaattagagagttggcttttcttaataaaggaatagcaattaaattaatcgataatacttcaaaaaaacccaaggaatattcgcataaatatgatggcggaattcttgaatttgtgaagcacattaacaataaaaagcccattttagtaaataaaaatgagagagaagtatttaaaaaacctgtttatgtaactgctacaaaaaataacgttgtagttgaatgttcgtttgaatggaatgcaggatattctgaagaagtcttgccatttactaataatattccacaaaaggacggaggaacacacttacttggttttagaagcgcgcttacaagagttattaataaatatacttcagataaaaataacaaaaaaaataaaattacattatctggagaggatatcaaaaagggtttgacagcccgtattatcgattaaa

SEQ ID NO: 294985 - DNA, 959 bp, Unknown
  Bacterial polypeptide expressing nucleotide sequence isolated from the Sargasso Sea
tatgacaaatttggccaaagaaattgttcccattaatatcgaagaagaattaaagaattcttatctcgattatgcaatgagcgttattgtgggacgtgccttaccggacgtaagggacggtttaaagccagttcaccgtcgcgttttgtttgcgatgaaagagttaggcaacgactggaataaagcctacaaaaaatctgcccgtgtcgtcggtgacgtcataggtaaataccatccacacggtgacagcgctgtatacgacactatagttcgtatggctcagcctttctcattacgttatatgctggttgacggtcagggtaacttcggttccgtggacggtgactctgcagcagcgatgcgttataccgaagtgcgtatgtcgcgtatcgccggggaattattagccgatctggacaaagaaactgtcgactatgtgcctaactacgacggcacagagatgatcccggctgtattacctactaaaatcccaaacctgctggtgaacggctcgtctggtattgcagtaggtatggcgaccaatattccgccacacaatttaaatgaagtgattgatgcctgtctggcgttaattgccaatccggatatcagcattcctgaactgatggaactgatgccaggaccagatttcccgactgcagctattatcaatggccgtcgaggcattgaagaagcttaccgtaccggtcgtggtaaagtgtatatccgcgccagaactcatatcgaaaccgacgaaaaaacaggtcgcgagactattgttgtcgatgaaattccttatcaggtcaacaaagcccgtttgattgaaaaaatcgccgagctggtcaaagaaaaacgcatcgaaggcatttcagcattacgcgacgagtctgataaagacggtatgcgtattgtcattgaagtgaaacgtggcgaatcatcagacgtattgatcaaccact

SEQ ID NO: 294986 - DNA, 499 bp, Unknown
  Bacterial polypeptide expressing nucleotide sequence isolated from the Sargasso Sea
atgtctgaaatagaaaattctcaatctaatgatggaaatgaatacgacgccgactcgattcaagtacttcgtgggttagatgcagttcgcaaacgtccggggatgtatattggggataccgacgatgggtctggacttcatcatatgatatatgaagttgttgataacgctattgatgagtccttagccggtcattgtgacttagtggaagtcattctgaatggagatgggtctgcgacgatccgtgacaacggaagagggatacctgttgatacccatcaagaggagggcgtttctgctgctcaggtgataatgacacagttgcatgctgggggaaaattcaatcaaaattcttataaaatatcgggtggtcttcatggtgttggggtttcagtcgttaatgcactctctgaaacattggacttgcgcgtatggcgggatgataaagagcatgcaatgcgatttttcgatggtgagccggaagccgatttaaaagtaa

SEQ ID NO: 294987 - DNA, 508 bp, Unknown
  Bacterial polypeptide expressing nucleotide sequence isolated from the Sargasso Sea
aatggcaaataataaatacgattcatcaaacatcaaggttttaaaaggattggaggcagttcagaaaagaccggggatgtatataggtgatactgacgatggaagcggattgcaccaaatgatatttgaggttttagacaattcaattgatgaggcgttagcagggcattgtgacacaatagaagtaacagtacacgaggatcagtctgtaactgttatagataatgggagggggatacctgttgatgaacaccctgatgagaaaaaatcagctgctgaagttattctgaccgtcttgcatgcgggcggaaaatttgatgataattcttacaaagtctctggtggtcttcatggggttggagtctcggtcgtaaatgctttatcggaatcattggagttaaccatttataagaacggcaagattcatgtacaagagtataaggacagcaaacctttggcgccactcaagatagacggaaagacaaagttaaatggcactaaaatatct

SEQ ID NO: 294988 - DNA, 541 bp, Unknown
  Bacterial polypeptide expressing nucleotide sequence isolated from the Sargasso Sea
gcaaagaagacaccaactgatttattgggtgaagatgtaagagagggtttaattgcaataatttctgtaaaagtgccagatcctaagttttcatcacaaacaaaggaaaaacttgtctcatcagaggtagaaggtgtcgtaagtacaatttttagtaagtattttaatgaatttctactagaaaacccgaaagacgcaatgagtattgttggaaaggtatctgaagctgctttagcaagagaagctgcaagaaaagccagagaaatgactagaagaaagggtgtgcttgagattgctggattgcctggaaagcttgcggattgtcaagaaaaagatccaacactatctgaaatatatatagttgagggtgattcagctggaggatcagcaaaacaaggaagaaatagaaaaaatcaagcaattcttcctttaaaaggtaaaatcattaacgttgaaaaagcaagaattgataaagtcttaggttcagctgaagttggcacgcttataaaagctcttggttgcggtattggtaaggaagatt

SEQ ID NO: 294989 - DNA, 902 bp, Unknown
  Bacterial polypeptide expressing nucleotide sequence isolated from the Sargasso Sea
taattttaaagtaatagagaaaagacttagagaattagcatttcttaatacaggtataagtatttttttaacagataggagacaggccaaagaaaaaaatataaattttaaatttgacggaggaattaaggaatatgtaaagtatttaaatgagggaaaaaatctcattaatcctaatccaatatttttccaaggtgaaaaaaacaatatttctattgaatgttcattacaatggactgatagttatcatgaaaatacaatttgcttcacaaataatattattcaaagagatggtggaacacaccttgcaggttttagaggtgcactcactagatcaattgttaactatgtaaataaaaatacaaaaaattctaacaatattactggagaggacgcaagggagggattaacttgcatcatatcggtaaagttaccggacccaaagttttctagtcaaactaaagataaattagtttcctctgaagttaggccagttatagaatctactagtttgagtaaattagaacaatggattgaagaaaatccaacagaaattaaaaaagttattgataaaattattgaggcatcaaatgctagagaagctgcaagaaaagcaagagaattaacaagaagaaagactggtctagaaaatacgtctcttccaggtaagctagctgattgccaggagaaaaatccagaattatcagaattgtttatagttgaaggtgactcagcaggtggatcagctaaacaagggagagatagaaagaaccaagcaattcttccacttagaggtaaaattttaaatgttgaaagagctaatgataaacaagttttaacaagtaatgaaataggggcactaattacagcaataggagcaggtgtgggaaatccccactgat

SEQ ID NO: 294990 - DNA, 451 bp, Unknown
  Bacterial polypeptide expressing nucleotide sequence isolated from the Sargasso Sea
ttgactgattcagataaccaaactccaaaagagaatacagataaaaaacaatcaatcgttccaattttaatcgatacggaaatgcaaaattcttatctcgattacgccatgagtgtgattgtaagcagagcattaccagatgttagagatgggttaaagcctgttcatagaagaattttatatgctatgcatgaagcaggttatcaatggaataaacagcatagaaaaagcgccagagtggtcggagatgtaattggtaagtaccaccctcatggagaccaagctgtatatgatgcgcttgtaaggttagctcaggatttttcaatgcgcatccctcttcttgacggtcaaggtaactttggatctatggatggtgatagagcggctgcaatgagatacacagaagttcgtatggataaaatttctgaatatcttttaaccgaatattgaa

SEQ ID NO: 294991 - DNA, 877 bp, Unknown
  Bacterial polypeptide expressing nucleotide sequence isolated from the Sargasso Sea
aattttggttctatagatggagacccgcctgcagctatgagatatacagaaactaaattagcaaaaatttcacaatttctaattgatgatatcgaaaaaaatacaatacaatttagaagcaattacgatgaaacagaaaaagaacctactgttttaccttcacaatttcctaatttattagttaatggagccggaggtattgcagttggaatggccacaagcattcccccgcacaatctaggagaaattatcgatgcaacaattgcttttataaataacaataatattaccatttcacaattgatgaaaaaagttccaggcccagattttcctactggtggaataataatggggaaggaaaatttaaaaaatggttacaataagggtagagggtcaattaaaattagaggagaggtagaagaggaaagcataaaaaatggaaaggaaagattagtaattaaatctattccttaccaagttaataaatctgtattaaacgaaagaatagccgaattagcacgagataaaaaaattgaaggcattagtgatattagggatgagtcaaatcaccaaggtgtcagagttgtagtggatctccgcagaaatgtagagccagaaactgtaaaaagacaattatataaattaacctctttagagtcttcatttggttttaacacattagctattgttgacggcaaacctaaaatattaaatttaaaagaatttatatctgaatttgttaaatttagagaaaatacattaactaaaagaattaaatttgacttaaaaaaagcacaagaaaaagctcatatattaattggaatttctgtttccgtcgaaaatattgatgaagtgataaaaattataaaagatccaa

SEQ ID NO: 294992 - DNA, 874 bp, Unknown
  Bacterial polypeptide expressing nucleotide sequence isolated from the Sargasso Sea
tgatcctaaattttcttctcaaactaaagataaacttgtttcatcagaagtaaggaacattgttgaaagcattcttagtgaaaaaatttctatatggtttgatcaaaatccttcaatagcaaaaatagtattaagtaaaattattcaggcagctttagcaagagatgtggcaagaaaagctagagaaaatgtaaggagaaaaggagcattggagttaacaggtctcccaggtaaattggcagattgtcaaatatcaaaacaggaaggtaccgaattatttatagttgaaggagactcagcaggtggatctgctaaacaagctagaaatagagaaaatcaagctgttttaccgcttaggggaaaaattttaaatacttatgtagaagaggatagtaaaaaaaataattctaatggaaacaatcatagaactaagactctttccaagatgatatcttcaaacgaaatagttactttgataaatgctatgggattagatccgaagtctgacgatatagaaacaaaagatgttagatatgggaaaataattattatgaccgatgctgacgtagatggttctcatatacgtgcgttgttattaacattttttaataatgttccttttaataaacttattaaagagggttatatttatttagctcaacctccattattcaaaataaacaaaggatcaaaaggaatttatataaaagatgaaaaagaattagaaaaatatatacaaaaaaattccaaaatattatcaaatttaaaaaagggaacaaaagaatacgagagattatttgatgaagaaaaatctaaatttaatatacaaagattcaaaggtttaggagaaatgaacccagaagaactatggagc

SEQ ID NO: 294993 - DNA, 883 bp, Unknown
  Bacterial polypeptide expressing nucleotide sequence isolated from the Sargasso Sea
tctgatgggtcaattacagttgaagatgatggtagaggaataccagttgactttcataaagaagaaaaaaagtcagcagcagaagttataatgacacaactacatgccggtggtaaatttgatcacgactcttataaagtatcaggtggtctgcatggtgttggagtttcagtagtgaatgctctttcacaaaaattagaattatatgttgagagagatggaaaaaagcattttgttgagttcataaatggtgaaaccaagacagcacttaaggtgattggtaaatcaaagagtacgagtacgaaaattaatttcttaccttctaaagatattttctctagtacaaaatttagtttttcaattattcaaaaaagaatgcgtgaattagcttttttaaataaaggagttaaaataatacttaatgatctaactcaaaaaaaaattaagaccaatgaatttaaatttgagggtggtataaatgagtttgttgaatttttagatgaaaagagagaaaaacttaagaataaaaatgataatgacttatttagaaaaccaatttatattgaaggtattaagagtaatattgatgttcagtgttcactaaaatggaacgcagggtataacgaagatgtttacccatatactaataatatttatcaaaaagatggaggaacccatctattaggatttagaagcgcattaactagagttgtaaataaatatgcatcagagcaaaatttattaaaaaaaagtaaagttttactttccggagacgatgtgaaagaaggtttgacatgtgttctttctgtaaaaatcccagatcctaaattttcctctcagacaaaagataaattagtttcttcagaagtggagaaacaatagt

SEQ ID NO: 294994 - DNA, 658 bp, Unknown
  Bacterial polypeptide expressing nucleotide sequence isolated from the Sargasso Sea
gctggaggatctgctaaacaaggaagagataggaaaaatcaagcaattctgccattaaaaggtaaaattttgaatgttgaaaaagcacgttttgataaaatgctaagtaatgaagaaatcaaaactatggttacggcaatgggcacaggaataggtagagaagaatttaatcttgaaaaaatccgttatcacaaaattattataatgactgatgccgatgttgatggtagtcatattcttactttgatacttacattcttttatagacaaatgccagaaattatagaaaatggatatttatatattgcacaacctcctttgtacagagggaaaaaaggtaaatctagtttctatgttagagatgaaaatgaactgactgagagattgattcgttcttcttgcgaatcactttcactgaacttaaataatggaagaaaaataaatggtgaagatctattgctaaaaaacaagatagaattaaatttgggaggttcagaatatattctaaaatgtatagactctctaaaaacaatttatccagattacaaacttttattagattctgaacatgaaggcaataatgttataatagaagtaaataaacaaaaaatagaactttcattaaatttgttagaaaatttaagtattcttgattatt

SEQ ID NO: 294995 - DNA, 676 bp, Unknown
  Bacterial polypeptide expressing nucleotide sequence isolated from the Sargasso Sea
ctgaaaaaaaatcctgaatattgtgaaatttatttggttgagggagactctgctggcggtactgcaaaaatgggtagagacagaaaaactcaggctatattacctctttggggaaaaattcttaatgttcaaaaatctcgagatgacaaaatagttcaacatgatgctattcgtgccatgattactgcattaggtgcaggattaggagaggattttgatatagaaaagctcagataccatagagtcattatcatggctgatgctgatgtagatggatcacatatacgaacgcttttactaactttctttttcaatcatatgactgaattggtcactaatggtcatttatatattgctcaacctccgttgtacaaaatcggatcaggaaaacaagaacaatatgtttattcagacgagcaaagagaagaaatactagaacaattagatggtaaaagaaacgttaatatccaaagatacaaaggtcttggagaaatgaatgctgaacagctttgggaaactactatgaatcccgaaactagaactctacttagagtcgaagtagctgataaaaataatgcagccaatgatttcgaaatgttaatgggtgatgaggtcccacctagaagagaattcatagaaactcatgctttggaagtgacaaatctagacgtttaaa

SEQ ID NO: 294996 - DNA, 801 bp, Unknown
  Bacterial polypeptide expressing nucleotide sequence isolated from the Sargasso Sea
aatgcaaaaatcctacctggattatgcaatgtcagtaattgttagtagagcacttccagactgtagagatggcctaaagccagttcacagaaggatattgtactctatgagtgagtcagggtacaattttaataaaccctacaaaaaatctgcaagaatagtgggtgatgtaatgggtaaataccatcctcacggtgactctgctatttacaattctatggttagaatggcacaagatttttctatgcgattagaattagttgatggacaagggaattttggatctttagatggagaccctcctgcagcaatgagatacactgaagcgagacttgctaaagtatccgagaagcttgttgaagatatcgataaaaacactgtttcgtttcaacctaattatgatgacacaactaaagagccctcagttttgccatctcaatttccaaatcttttagttaatggtgcatcgggaattgcagttggaatggcgactaatattgctccacataacttaggagaagtgatagatgcatctttatatcttataaaaaatccaagttgtaatatctcagatcttcaaaaatatatttttggtcctgattttccgacaggcggtcaaataattggtaaaaaaggcataactgaagcttttgaaactggaaagggagggtgtgtagttagatcgaaaactagtattgaaaattttaaaaaagatcgagaggccattattctccatgaaataccttaccaggttaataaatcaaaattattagaaaggattgcagaaattgtaaaaaatgg

SEQ ID NO: 294997 - DNA, 796 bp, Unknown
  Bacterial polypeptide expressing nucleotide sequence isolated from the Sargasso Sea
aaaagagactctattaaattaattgaattgtttgttgaacgttcattattaagatctgatttaacaaaatttaaggaattagaaagaaaaacaattaaagagaaaaatagactgcctggtaaattagtcgattgcacaagtaaaaaagttgaaggaacagaattatttattgttgaaggtgatagcgcaggtggatctgcaaaacaagcaagatatagggaaactcaagctattttgcctctaagaggtaaaattttaaatgtttataatgtaaccctatctaaaattgctgataataatgaaattcaaaatttaatattagcattaggttgtggtattggaaaaaattttcaattaggaaatttaagatatgaaaaagttattcttatgactgatgcggatgttgatggatctcatatagctactttattaataacttttttttataaatatatgcgtaaaattattgaaaatggtaaattatatttagctatgccaccactttataaaataaagtccaataataaaaattattttgcttataatgaaagggaaaaagataaaattttaaaaaatttaaataaatcctattctcatcttactcgttacaaaggtttaggagaaatgccagcagatcaattgaaagaaactactatggatcctagtaaaagattattgattcaattaaacttagaatatggggcaaaacaagcaaaaaaaactgaaaaactttttgattctttaatgggtaaaaaagctgaaaatagatatattttcattcaagaaaatgccaatt

SEQ ID NO: 294998 - DNA, 619 bp, Unknown
  Bacterial polypeptide expressing nucleotide sequence isolated from the Sargasso Sea
aaacaaggaagaaacagacaaaatcaagcaatacttcctctaaaaggaaaaatattgaatgttgaaaaagctagattagataaagttttatcttctcaagaaataggaacacttgtaacagccttaggatgcggtattggaacagatgagtttgatgctgataaattaagatatcacagaataattattatgactgatgctgatgttgatggttcgcatataagaactctgcttttaacatttttctttaggcaaatgtttgaaatcctaaatagaggtcatgtttatattgctttaccacccctatacaaagtttcaaaaggaaaaaatattaaatatgcggcttcagaaaaagaaaaggatattgctttaaaagaattatctaaaacaggtaatagaggtattgagattcaaagatacaaaggtttgggcgaaatgaatccagaccaactttggactacaacaatggaccctcaaaacagaagaatgatgagggtgcgcatagatgatgcaaatgaagcaaataactcctttgagatcttaatgggtgaccaagttgaaccaagaagagagtttattgatgaaaacgctctttctgtcgcgaatttggatatttagt

SEQ ID NO: 294999 - DNA, 745 bp, Unknown
  Bacterial polypeptide expressing nucleotide sequence isolated from the Sargasso Sea
gctcagtgagcgtcttgtgttgaccgttagaagagatgggtgtgtctgggagcaggaatatcggtacggggagccgcaggcggctttggggccggtgggcacaacgcccgaaacgggaacaaccgttcggttcaaaccctcggttgaaacgtttgcaaacacggaatttagttacgatgtgctagcgaagcggctgcgtgagctgtcttttttgaattcaggagttaggattcagttgaccgaagaggcaagcggtcagtccgaggtctttgaatacgagggcggtctatcggccttcgtcagctatctcgggaagaacaaaaccgcaatttgtgacgtgttccatttcttggcacctgaacgggatgatggtatcggcgttgaggtagcgcttcagtggtacgacacgtatcaggaaaacattttttgttttaccaacaatatcccacaaaaagatggtggcacgcatcttgaggggtttagggcatcgttaactcgttcgctaaatcaatacattgaagaagagcagctgttaaaaaaaacgaaagtggccacgtcaggagatgacgctagagaaggcttgactgcgattatttcagtgaaagtgcctgaccccaaattttcgtcacagacaaaagataaacttgtttcacaagaagtgaagactgcggttcaacaagagatgcgagaggcttttcagacattcctcgttgagcgtccctcggaggccaaacagattgttgca

SEQ ID NO: 295000 - DNA, 299 bp, Unknown
  Bacterial polypeptide expressing nucleotide sequence isolated from the Sargasso Sea
aatgagtgaggacaaaagatctaataaaatctccaatgactacggtgctgaacagattcaggtattagaaggtttagagccagttcgtaaacgccctggaatgtacataggttctacaggtccaagaggtttgcatcatttagtttatgaggtcgtagataattcagttgatgaggctctcgctggacattgtgatcatatagaaatagttcttcgagcagatggttcagctttgatttctgataatggacgaggtatcccaacagatattcatccaaggacaggaaaaagtgccttag

SEQ ID NO: 295001 - DNA, 850 bp, Unknown
  Bacterial polypeptide expressing nucleotide sequence isolated from the Sargasso Sea
aatgttaattgatgacatagacaagaatactatagattttcaagagaattatgataattctacacaagagcctagtgttcttcctgccaaatatccaaatctcttagttaatggtgcgggtggtattgcagttggaatggcaacaaatattccaccgcataatttaggagaggttatagatggatgtttagctgtaattgaaaactctgaaatttcatctgatgagctacatgaaattattccaggcccggattttcctacaggagcccaaataattggtaagactggtattaggtctgcatttgaaacaggtagaggttcagttgtaatgagaggaaaaacttcaattgaaaatataagaaaagatagagaagcaattattatttcagaagtgccttatcaagtaaataaagctagaatgatcgagcaaatcgctgaagcagttaaaaataaaaatatagaaggaatatctgatttacgtgatgaatctgatagagtaggggtaagggttgtagttgagttaaaaagagatgctactgctgaggtcgttcttaatcaaatatttaaacactctcctcttcaaacatattttggagtaaatatgttagccttaaatggaggtagaccagagcaactaagtaccaggcaaattttagattcttttttaacttttagagaagaggtaataactagaagaacaatatttgacttagaaaaagcaagagatcgagcaaatattttagttggtttagctttagctgtatctaatatagatgaagttattaagttaattaaatcttctaaagattcagacgaagcaaaaaaattgttattagataaagattggaaa

SEQ ID NO: 295002 - DNA, 541 bp, Unknown
  Bacterial polypeptide expressing nucleotide sequence isolated from the Sargasso Sea
tgataaagtcttaggttcagctgaagttggcacacttattaaagcccttggttgcggtattggtaaagaagattttgatattgataacttaagataccatagaataatcataatgactgatgcagatgttgatgggtctcatattaggacactactcttaacatttttttacaggcaaatgtacgaaattgtagaaaaagggcatgtttacatcgccttaccacctttatataaaattgctaaaggtaaggagtttgcttatgcttctgatgaatctgaaaaagatgatgctattaaaaaattttcaaaaaatggtactagaggcctagaagttcaaagatataaaggtttgggtgaaatgaatccagagcaactttggacaacaaccatggacccaattaatagaagaatgatgagggttgacatcaaggatgtacaagatgctaatgaatcatttgaaatacttatgggtgatgatgttgaaccaagaagagagtttatagacgctaatgctttatctgtaaaagagttagatatttaa

SEQ ID NO: 295003 - DNA, 778 bp, Unknown
  Bacterial polypeptide expressing nucleotide sequence isolated from the Sargasso Sea
aaaaaaatttgagaataaatttgacggaggaattcttgagtttgtccaatttataaatcaaaaaaaacctattttatcaaataaaaatgacaagccagttttcaaaaagcctatttatatttcatcaaataaaaacgatgttaacgtcgaatgctctttagaatggaatgccggatattctgaggaagttctagcttttactaataacatacatcaaaaagatggtggaacacatttattaggatttagaagtgctttaacgagagtaattaacagatattcaaacgaatataacaaaaaaaacaaactttcattaaccggagaagatattaaagagggacttacagtagtcctttcaattaaaatgccagatccaaaattttcatcacagaccaaagataagcttgtttcttcagaaataagactaatagtagaaaatattataaacgaaaaaatttccatgtggtttgatcaaaatccatctacgattaaaaatgtcttagaaaaaattacccaagcggcaattgccagagatgttgcaagaaaagcaagagataatataagaagaaagggaagtttcgaaattactggtctaccaggaaaattagcagattgtcagatatcgaaatctgaaggaacagagctttacattgtagagggagactctgctggaggatcagctaaacaaggccgaaacagagaattccaagctgttttaccgctcagaggtaaaattctaaatacttatgttaatactaacgggaaaaaaacgagctct

SEQ ID NO: 295004 - DNA, 433 bp, Unknown
  Bacterial polypeptide expressing nucleotide sequence isolated from the Sargasso Sea
aatgagttcatcttatttatcgtatgctatgagcgttattataagtagagcgcttcctgatattagagatggattaaaaccagttcatagacgaattatatatgcaatgtacaaaggtggattcgactggacaaaacaatttagaaaatctgcaagaatagttggagatgttattggtaaataccatcctcacggagatcaagctgtatatgatgctttagtcagaatggttcaagatttttcaatgagcttacctttaatagaaggtcaaggtaattttggatctatagatggcgatccacctgctgctatgcgttatacagaagctcgtttatcaaaaatttctcagtatcttattgatgatatagaaaaagaaacagttagttttaaaagtaactatgatgaaacagaaaaagaaccatctgtattacca

SEQ ID NO: 295005 - DNA, 814 bp, Unknown
  Bacterial polypeptide expressing nucleotide sequence isolated from the Sargasso Sea
ggcacccacctgtcggccttccgcgccagcctgacccgcgtcatgggcggctatatcgagagctcgggcgccggcaagaaggagaaggtttccgtcaccggcgaggacgcccgcgagggcctgacctgcgtcctgtcggtcaaggtgccggatcccaagttcagctcccagaccaaggacaagctggtctcctccgaagtacgtccggccgtcgaaagcctgtgctcggaaggcctgtcgacctggttcgaggaacacccggtcgaggccaagcagatcgtggccaagatcatcgaggcggcgtcggcccgtgaggccgcccgcaaggcccgcgacctgacgcggcgcaagtccgcgctggaaatctcgagcctgccgggcaagctggccgactgccaggaacgcgatcccgccaagtccgagctgttcatcgtcgagggcgattccgccggcggctcggccaaacaggcgcgcaaccgcgagaaccaggccgtcctgcccctgcgcggcaagattctgaacgtcgaacgcgcgcgctttgaccggatgctgtcgtcggatctgatcggcacgctgatcctggcgctcggcaccggcatcggccgcgacgacttcaacgccgacaagctgcgctatcacaagatcatcctgatggccgacgccgacgtcgacggcgcccacatccgcaccctgctgctgaccttcttctatcgccagatgcccgagttgatcacgcgcggccacgtctatatcgcccagccgcccctctataaggtctccaagggcaagcagtcgcgctacctgaaggatcagg

SEQ ID NO: 295006 - DNA, 865 bp, Unknown
  Bacterial polypeptide expressing nucleotide sequence isolated from the Sargasso Sea
gcagaggtaattatgacacagctgcatgctggaggaaaatttgatcacgagtcttataaagtttctggtggtttacatggcgtgggtgtgtcagttgtgaatgctttatcagagaaattagaacttacaattgaaagagatggaaaggtatactttattgcatttaaaaatggtgaagcaatttcacctttgaaagcaaaaagcaaatctaaaaattctggaactgaaatcactttttttccatctaaagaaatcttttcatctattaagtttagctattctattgttcaaaaaagattaagagaactagcttttttaaataaaggaattaaaattaacttagtagataaaattaacaaaaaagttagatcagaggaatttaaatatgatggtggaatatctgagtttgtcgattttttggatgaaaaaagacaaaagctaaaaaataaaaatggaaatgatctattcaaaaaaccaataactgtaaatagtaataagaattcactagaacttgagtgttcacttaaatggaattcatcttatagcgaagatgtttacgcttacacaaataatatttatcaaaaagatggtggaacccacttgcttggatttagaagtgcactaacaagagtaataaataaatatgcgaatgaacataatttactaaaaaaaaataaagtttctatatccggagatgacattaaagaaggtcttacttgcgttctatctataaaaatacctgacccaaaattttcttctcaaacaaaagataaactagtttcatcagaagtaagaaatatagtagaaactttaatcaatgaaaaattatcaatatggtttgatcaaaatccttctgctgcaaaaa

SEQ ID NO: 295007 - DNA, 775 bp, Unknown
  Bacterial polypeptide expressing nucleotide sequence isolated from the Sargasso Sea
cccgcacggtgaccagtcggcctacgacgcactggtccgcatggcgcaggactttgcccagcgctacccgctcatcgacggccagggcaacttcggcagccgcgacggcgatggcgctgccgccatgcgctacaccgaggcgcgcctgtcgcgcatcaccagcctgctgctggatgagatcgacgaaggcaccgtggatttcatgcccaactacgatggcagcacggaggagccgcgccagctgcccgcccgcctgccgttcgcgctgctcaatggcgccagcggcattgctgtgggtctggccaccgagatccccagccacaacctgcgcgagattgccgatgcgtgtgtggcgctcatcaagaccccatcgctgagccaagacgagctgctggccatcgtgcccggcccggactaccccggtggcggccagatcatcagcagccccggcgacattgccgacgcttaccgcacgggccgaggcagcctgaaggtgcgcgcgcgctggaagatcgaggacatggcgcgtggccagtggcagctggtggtcaacgaactgccgcccggtgtgagtacccagcgcgtgctagaagagattgaagaaatcaccaaccccaaggtcaaggctggcaagaaggcgctgacgcaggagcagacgcagctgaaggccagcatgctggccgtgctggacgtggtgcgcgacgagtcgagcaaagacgcgcccgtgcgcctggtgtttgagcccagacaggcaagaccccgcaacaagagctga

SEQ ID NO: 295008 - DNA, 815 bp, Unknown
  Bacterial polypeptide expressing nucleotide sequence isolated from the Sargasso Sea
gctcagaatttttcaacaaggtatccgttagttgatggccaaggaaattttggcaacattgatggagataatgcggctgcaatgagatatacagaggcaagattgactgcgttagcagagctaatgctaaaagatatatcagaggataccattgattatattaatacatatgatggcatcgatcatgagccaatagttcttccatcagcgtttccaaatttgctagctaatggaagttcaggaattgctgttggaatggcgactaatattcctccccataacataaatgaattgtttaaggctttatcaaaattattaaaaaatccaaattatactaactcacaattactaaagcttattccaggaccagattttccaacaggaggagaaattattgatagtgatgatgccttgaaagatgcctatgtcaaaggaaagggaacaataaggctccgggcaagatggaaaaaagaagacctaggaagaggtcaatatcaaattatcgtgtatgaaattccctatcaagtaaataaagccagaattatagaaaaaatatctgatcttatcgataataagaaagcaaattacctagagacaattcaagatgagtctgcagaagacatcagaatagttctcattccaaaaaatagaagttttaaagctgaagtaatttttgaggacttatgtaagaattcagatttagaaattagatacgccatcaattttaatgcaattaatcacaaactcgagccaaaattattttcacttaaagagagctttaaatcatttattgaccatcggtttaatgttctaaa

SEQ ID NO: 295009 - DNA, 802 bp, Unknown
  Bacterial polypeptide expressing nucleotide sequence isolated from the Sargasso Sea
tatgtatatcggagataccgatgatggtactggtcttcatcagatgatttatgaagttgttgacaattctatagatgaagcattagctggattttgctctgaaattaaagtaattttaaatgctgatggcactataactgttaaagataatggaagaggtgtacctgtcgatattcataaatctgaaggtgtttcagctgcgcagttaataatgacagaattacatgcaggaggaaaatttgatcaaaatagttataaagtttcaggcggattacatggcgtaggtgtttctgtagttaatgctctttcaaaaaaattggaacttgaaatcaatagagatggtaaagtttataatatgactttcgagaatggtgctgtacaaaataaattaaaagttattggagagtcacatcaagaaaataattcatattatactggtacaaaaattactttccttccatctagcgaaacttttaacaatatagaatttaattataaaataattgaaaaaagacttagagaattagctttcttaaatacaggcgttaatattattttaaaagataaaagagcagtaaaagaaaaagaaaatagttttaaatatgaagggggaattaatgaatatgtaaaatatttgaatcaaggtaaaaatgttgttcatggtcaacctttatttttttcttcaaacaaaaatgatgtaactgttgaatgctcattacagtggactgatagttatcatgagaataccttatgttttactaataacatatcgcaaagagatggtggtactcatttagcaggt

SEQ ID NO: 295010 - DNA, 899 bp, Unknown
  Bacterial polypeptide expressing nucleotide sequence isolated from the Sargasso Sea
attagatgccgtaagaaaaagaccgggtatgtatattggtgatactgatgatggatcaggcctacatcacatggtttttgaagtgattgataactctatagatgaagctctagctggatattgcaaaaatataatagtgacaattaatcaagataacacggtttctattgaagatgacggcagaggaataccggtggatatacataaaggcgagaaaatatcagctgcagaggtaattatgactcaattacatgctggcggaaaatttgaccatgattcttataaagtatcagggggacttcacggagttggggtttcagtagtcaatgcgttatctgaagaacttgaactaaatatttttagagatggtaaagaatatttaataaaatttaaagatggaaattctcttaaaccactaaaacaagttggaaaaacaaaaaaaaagggaaccaagattacttttttaccttcaaaagaaatattttcttctattaaatttagtgcatcaattcttgaaaaaagaataagagaactagcctttttaaataaaggggtcttaattatgttaaaggataattcatcgaaaaaaaacaaagagtttgttcataaatatgacggtggaatagttgaatttattaaacatattaataacaaaaagccaatacttacaaataaaaatgaaaaagaagtatttaaaaagccagtttatgtcacagcaacaaagaataatgtaatagttgaatgttcatttgagtggaacgcaggctattctgaagaagttttgccttttacaaataatattcctcaaaaagatggcggaacacacttattaggctttagaagtgctttaaccagagttattaataaatactccaacgatagaaatagtaaaaaaaata

SEQ ID NO: 295011 - DNA, 970 bp, Unknown
  Bacterial polypeptide expressing nucleotide sequence isolated from the Sargasso Sea
ggacagcagaaaaacaggaactaatatcactttttggccagatgatacaatttttgatcacgtggaattcaattacgatattttagcccacagattaagagaattggcttttttgaataaaggtatcatgatttctatccgggacaatcgcagtgaaagatttcaggaatttaaatatgacggaggaatttcttcttttattaggcatattaatgaaaacaaaaatgtgcttcatgaagatcctgtttatttttcaggtaaatcagaagatgtggaaattgaagtggcttttcagtataacgacagttacactgagaggatatactcatttgtcaataatatcaatactatagatggggggactcatcttacaggtttcaagggggctctaaccagaaccctaaataattatatgacctcaaataaaatttccaacgattccaaagaaaatttctctggtgaggatgttcgtgaagggatggcagctgtgattagtactcgtgtgactgaacctcagtttgaatctcagaaaaaaattaaactaacaaatgttgaaattaaaggaaaagttgaaacacttgtttcggaatacttgggagcatatcttgaagaaaatccttccgtttcaaaaaagatcatggcgaaagccattgatgcgcaaagggcgcgacttgctgcgaaaaaagcaagagaacttacacgaagaaaaaatgtacttgaatttagcacacttccaggaaaactcgctgattgtcaggaatcagacccttctctgagcgagctttttcttgttgagggcgattccgcaggtggatctgctaaacagggtcgtgatagaaaaaatcaggcgatcctgccgctgaaaggtaaaatattaaatgtagaaaaggcgcgctttgacaagatgctcaccaatgaagaaataaaaaccattataactgcaatgggtacaggaattggcaaggaagaa

SEQ ID NO: 295012 - DNA, 823 bp, Unknown
  Bacterial polypeptide expressing nucleotide sequence isolated from the Sargasso Sea
tttgctaaagaaattcttccctgttaatattgaggatgaactaaaacaatcttatctaagttatgccatgagtgtcattcatggcagggcactaccagatgttcgcgatggattaaaacctgtgcacaggagaatactttatgcgatgcatgatcttaaaaataattacaacaaaccctataaaaaatctgcaagggttgttggagatgtaattggtaaatatcatccgcatggagattctgctgcatatgatgcgatcgttagaatggcccaagatttttcaatgagatacacgctcatagagggtcaaggaaacttcggttcaattgatggagatcctccagctgctatgagatatacagaagtaaggatgcaaaaaatttctgatgaaattcttgctgatttagaaaaagaaactgtctctttttcagaaaattatgatggttctgaacaaatgcctgatgttatgccaactaaaatcccaaatcttttaattaatggatcatctggaatagcagtaggtatggcaacaaatgttcctccacataatctcactgaagtcataaatggttctttaaagttgctggagaacccaaaactatctattgatcagatcattgaatcaataagcggtcctgattttccaaccggggggacgattgatggaaaaatgggcatttatgaggcatataaaactggaagaggaataatttatgttcgatctaaatcaaaggtagaggaaagcaaaactggaaagaaatcccttgttatctatgaaatacctttcatggtcaataaagcaagaaccctcgagaagatagca

SEQ ID NO: 295013 - DNA, 797 bp, Unknown
  Bacterial polypeptide expressing nucleotide sequence isolated from the Sargasso Sea
aaagctagcggattgtcaaattcaaaagagggaaggcacagaattatttatagtagagggggactcagcaggtggatccgctaaacaaggtagagttcgagaatttcaagcagttttgccattgagaggaaaaattttaaatacttttgtaaatgggaaaaaaaatggtgaagatcaatccactaaggcattgtctaaaatgatgtcctcaagcgaaatagttacccttattaatgcattaggcactggatcaaaagattttaatattgaaaatctaaggtatgacaaaatcgtaattatgactgatgctgatgtagacggatcccacataagaacacttcttcttaccttttttaacaatcatccttttaaccaattaatagaaaatggtcacatatatttagctcagccacccctttttaaagttacaaaagctaacaagagcatatacatcaaggatgaaaaaaatttggaagattacattttagactcagctaaaaataataaaaaaataaaaaaaggatctatcgaatacaaaaaatttttacaagagcaaaaagacaaattatctattcaaagatttaaaggattgggtgaaatgaacccagaggaactttgggaaacaacactaaatcctgacaatagaacaatgttaagagtacaatattctaaaggaactaaggataagtctaaagatgatcaaaaaatgatcgagattttaatgggtgatgaagtggcgccaagaaaagacttcattacaaataacgctttagatgttacaaatttagatatttaga

SEQ ID NO: 295014 - DNA, 600 bp, Unknown
  Bacterial polypeptide expressing nucleotide sequence isolated from the Sargasso Sea
tgtctatgatgccttagttagaatggttcaagatttttcaatgagtgttcctttaattgatggtcagggcaattttggttcaatcgatggtgatccacctgcagcaatgaggtatacagaaacaaaacttgcaaaaatatctcaatttttgattgatgatatagaaaaaaatactgtctcatttaaaagtaactacgacgaaaccgagcaagaacctacagtgctgccagctcaatatcctaatcttttggtaaatggagctggaggtatcgctgttggtatggcaactagtataccaccacataatcttggtgaaataattgatggaactttagcgcttataaaaaataaagacattaaagttaaagagttaatgaagcatatacctggccctgattttccaacaggaggagtgattattggtaaagatattattcgagaaggatacaaaacaggcagaggctcttttaaaattaggggtgaaataaatgtagaaaatcttaaaaatggtaaagatagattagtaattacttcaataccctatcaagtaaacaaatccaacttaaatgaaaaaattgcagaattagttagagataaaaa

SEQ ID NO: 295015 - DNA, 891 bp, Unknown
  Bacterial polypeptide expressing nucleotide sequence isolated from the Sargasso Sea
atatttagaagacaacccaaatgacgcaaaaagtattcttgaaaaagctgctacagctgctagagcaagggaagcagctaaaaaagctagagatttagtaattaggaaaaatgcaatggagggtggcgccttgccgggtaagcttgctgactgctcagaaaaggatcctgcaaaaagtgaattattcctcgttgagggtgattcagcgggaggctctgcaaagcagggaagggatagaaattttcaagctattctgcctttacgtggaaaaattcttaatgttgaaaaagctcgtcctgataaaatgttgggtcatgctgaaattgctgctctaattacagctactggaacaggaataggtgttgaggattatgacgctagcaagcttcgatatcataaaatagtaattatgactgacgcagatgtagacggagcacacatcaggacactattattaactttcttttatagaaatatgccccaattaattggtgatggaaatttattcattgcacagcctcctctttataaaggaaataaaggaaagtcttctcagtggctttattctgaatcagaaaaagatgcatggttggctgaaaaagtgtttggtaaaataaaaattgtaagctccaaatcacctgacaaaaaaattgaaaaaagggatcttggaattttttcatctaatataaaagattatctagatagttttaaaggtcttgaatcattagaaataccatcattggtgattgaaaaacttatttctgacccagaatattcgaacttagaattttattctaaacccggcccagcctcgtctccatcacagcctcaagcatcttttgatgatctgttaaataatgagtccgaagaagtggttattgaagattctgg

SEQ ID NO: 295016 - DNA, 724 bp, Unknown
  Bacterial polypeptide expressing nucleotide sequence isolated from the Sargasso Sea
ctgaatcattctttgaatgaggaaatgaagacatcgtacatcaactatgcaatgtcagtaatcattggaagagctctccctgatgccagagatggcctgaaacctgttcatcgacgtgtgctttatggcatgcatgaaggagggcatacttccgagaagaaatatagcaagtccgcccgatcagttggggaagtgatgggtaagtatcaccctcatggagatcagtcaatctatgacaccatggtcaggatggctcaagatttctcactaagatacccccttgtcgatgggcaggggaacttcggttctattgatggggacccgcctgcagcaatgagatacactgaaagtagactggataaaatctcaaaacacatgctagaggatattgaaaagaaaatagtcgactttcaacccaacttcgacgattccgagatggagcccacagtacttcctgcaaggttgccaaatcttcttctaaatgggagcgatgggatagcagtcgggatggcgacaagaataccacctcacaaccttacagaggttgcgggagcaattagattgcatgtcgatacgattctcgaagagggggtcgacaaggaggcaattcccagtatttctcttgaagagtacatgcagcatgtgaagggacctgactttcccactggtgctacaatccatggcatagatggcatcgttgacatgtactccacgggcaagggaa

SEQ ID NO: 295017 - DNA, 870 bp, Unknown
  Bacterial polypeptide expressing nucleotide sequence isolated from the Sargasso Sea
tcaagatttttccatgagatatccaattgttgagggtcaaggtaattttggatctattgatggtgatcctccagctgccatgagatacacagaagtacgtatggcaaagattactgatcaaatgttaaacgacattgaaaaagagacagtttcatactcacctaattatgatggtagtgaagatatcccggatgtattacctacaaagataccaaatttattggtaaatggttcatctggaattgctgttggtatggctaccaatattcctcctcataatatcaccgaagttttaaatggctgtattaatttaattaacaatccaaaggtatcgattgatgaattgataaaagatatttcagggcctgattttccgacaggaggaactattgatggaaaagcaggaatatatgaggcttataaaactggaagaggaataattcatattcgctcaaacacatcaattgaagaagataagtccgggaaacagtctttaatcattaacgagattccttttatggttaataaggcaagaatgttggaaaaaattgctgaacttgtaaaagaaaaaaagattgagggcattactgaaattagagatgagtctgacaaagatggattgcgggtagttattgaagtaagaaaaggagactccgttgaggtattagaaaataatttgtttgcgcaaacacaattagaacagtcattcggaattaactttactgttttgtctgagggtcagccaaaagaagtaaatcttaaagaaatgctgcaagcttttgttaagcacagaaaagacatcattattaagagaacaaaacatgatttaagaaaagcaaaagaaagaggtcatgtcgttgaaggtcttat

SEQ ID NO: 295018 - DNA, 301 bp, Unknown
  Bacterial polypeptide expressing nucleotide sequence isolated from the Sargasso Sea
atgtctgaatattcacaaattaaacttgacgatgaaatgcgtcattcgtatatagaatatgcgatgtcggtcattgttggtagagcattgccagacgttagagatgggctaaaaccagtccatagaagagtactttattcaatgcatgaactaaacaatggttacaacaaggcatataaaaaatcagctagaattgtaggtgatgtaattggtaaatatcacccacatggcgatactgcagtatacgacacaattgtaagattagctcagcccttctcaatgagatatccactggttgatg

SEQ ID NO: 295019 - DNA, 882 bp, Unknown
  Bacterial polypeptide expressing nucleotide sequence isolated from the Sargasso Sea
cctagcaggttattgcaaaaatatcaaagttactattaatcaagatcaatcagtttccgttgaggatgatggaagaggaataccagttgatttacataaaggggagaaaaagtctgcagctgaagtgattatgacacagcttcatgccggaggtaaatttgatcatgattcatacaaggtttcagggggactccatggcgttggtgtttctgtagttaatgctttatcagaaaagttaagtttaaaaatatttagagataaaaaagaatattgtgttgagtttaaagatggaaaagcattatctcccttaaaggttaaaggaaaaactaataaaacggggactcttataaattttttaccatcaagagaagtattttctaatactaagttcagttcatcaattttacaaaaaagaatgagagaacttgcttttttaaacaaaggtttaagcataaatttaatagacaaatctggaaaaaaagaaaaggaatataaaaacaaatatgaaggcggtatccaagaatttgttgaatttttagacaggaataaaacaactttagttaataaaaatgatcttagtttatttaaaaaaccaatttatatttctggatcaaaagataatgtagaagtagagtgttcattaaagtggaatgcagactactccgaagagatgttaccttttgctaacaatattcatcaaaaggacggtggaacacatttgttaggttttagaagtgcccttacaagagtaattaataaatatgcagcggatggtaatcttttaaaaaaaaataaaattacgttaactggtgatgatactagagaaggtttaacaggagttttatcaattaaaattcctgaccctaaattttcatcacaaac

SEQ ID NO: 295020 - DNA, 619 bp, Unknown
  Bacterial polypeptide expressing nucleotide sequence isolated from the Sargasso Sea
atggataaaaataccctagaaaaaaataaatctttcaaacctatttttgtacaggatgagatgagttcctcatacttgtcttatgcgatgagcgttattgtaagtagagctcttcccgacgtaagagatggattaaaaccagtacacagaagaataatatatgcaatgtacaaaggtggatatgactggtcaaaaacatttagaaaatcggcaagaatcgtaggagatgtaattggtaagtaccatccacatggagatcaatctgtatacgatgcattagtaagattagtccaagatttttcaatgagcgtgcctcttatttctggccagggtaattttggctctatagatggagatccacctgcagcaatgaggtacactgaaaccaaattagcaagaattgcacagtttctaacagaggacttggagaaaaacacagtaaattttagaagtaattatgatgaaactgaaaaagaacctgaggtacttccatctcaataccccaatattcttgtaaacggtgctggcggaatagctgttggtatggctacaagtatacccccgcataatttaggtgaaataattaacgcaacaatagcttacataaataataaagaaa

SEQ ID NO: 295021 - DNA, 871 bp, Unknown
  Bacterial polypeptide expressing nucleotide sequence isolated from the Sargasso Sea
gagggcggtgtttctagttacgtagactaccttagaggaagaaaaccaccgttaggtcaaacaatcgagtgtgaaggtggacaagaaggggtaactgtagagatcgctatgcaatggaatgattcatacaatgaaaatgtactttgttataccaacaacattcctcaaaaagacggcggaacacatctatcaggttttagatcaagcctaactagggttttaaaagcttttgtaaaaaaagaagagttaaataaaaactcccctatagagctattaggtgaagacgttagagagggattaattgctgtaatatcagtacaagtaccagatccaaagttttcctcacaaacaaaagaaaaacttgtctcttctgaggttgagggaatagtgagtgcagttttaaataaaagcctcaatgagtttttattagagaatccgaaggaagcaatggcaatattatcaaaagtttccgaagcagctcttgcaagggaggctgctagaaaagccagagagatgactagaagaaaaggggtgcttgagttagcagggcttcctgggaagctatccgactgtcaagagaaagacccagccctttcagaaatatacttggttgagggtgattcagctggagggtctgcaaagcagggaagaaatagaaaatatcaagcaatacttccgctgaaaggaaaaattctaaacgtacaaaaagcaagaattgataaagtgctatcatcagctgaaattggcaccatggttaaagcttttgggtgcgggattggaacagaagattttgatatagataaattaaggtatcacagaattataatcatgacagatgccgatgtagacggttctcacataagaacccttc

SEQ ID NO: 295022 - DNA, 617 bp, Unknown
  Bacterial polypeptide expressing nucleotide sequence isolated from the Sargasso Sea
aatggcaaaaaaatctaaggaagccaaatacgactcaagtaacattcaagttctaaaaggtttagaagcggttaaaaaaagaccaggtatgtacataggtgatacagatgacgggtctggattacatcacatggtttttgaggttttagataattgtattgatgaagcaatggcgggttattgttcagacattaatgtcataatcaataaaaatggatctgtaacaatcgaagataatggaagaggaatacctgttgatgttcataaaaaagaaggagtttctgctgcgcaattaataatgaccacccttcactctggtggtaaatttgatgataactcttataaagtttcgggtgggcttcatggtgttggtgtttctgttgttaatgctttatcaaagaaactaactttagaagttcatagagatggtggtgagtatttccaagaatattcagatggcaaaccaaaagcaaaattaaaaaaagttaaaacgtctaaaaagactggaacgaaaattacattcttcccttctgaaaaaatttttacgtccgtagattttgaagttgaaagaatttataaaaggattcaagagttatcatttttaaatgctggcgtag

SEQ ID NO: 295023 - DNA, 691 bp, Unknown
  Bacterial polypeptide expressing nucleotide sequence isolated from the Sargasso Sea
ttgcatcatatggtttttgaggtggttgataattctatagacgaagcaatagttggtttttgcaaaaatatatccgtgatcatgaacagggataattcaattacagtcgaggacgatggaagaggtattccggtcgatttacataaaggtgaaaagaagtctgcagccgaagttattatgacccaattacatgctggcggtaagtttgaccaaaattcctataaagtttctggtggtttgcatggtgttggagtatcagttgttaatgctttatcagaaaaacttcaacttacaattttcagagatggaaaagaacatttcatggaattctttaatggcaaaagtaaaaatgcattaaaagttttgaaaaaaactaaaaaaacagggactaaaattaattttgttccatcaaaagaagttttttcaacaataaaatttaattcaaatattcttcaaaagaaaatgagagaactagcttttctaaataaaggtttaagtataactttaacagacaatactcgacaaaaagaaaaggtttttgagaataaatatgatggcggtataagtgaatttgtaatttttaatgataaaaataaaactcctcttcttaataaaaatgaaaaagagactttcaaaaaaccaatttatttaagtggtgaaaaaaacgatgtgaaagtagaatgttcactac

SEQ ID NO: 295024 - DNA, 820 bp, Unknown
  Bacterial polypeptide expressing nucleotide sequence isolated from the Sargasso Sea
ggagacgttttaggaaaatatcacccacatggagatagctccgtatatgatgcgcttgtaagaatggcgcaaaatttttcaatgaggtatgagcttgtagatggacagggaaactttgggtctattgatggcgacaatgccgcagccatgagatatacagagtctcgaatgacaaggctttcaggtgaaatgttaaaggacctagaaaaagacaccgttgagtgggaaccaaactttgacgaaacccttaaagagccagccgttttaccaacaaccgttccaacccttcttgttaatggttcagagggaattgctgttggaatggccacaaaaataccaccacacaaccttatagaaattatcaacggtcttgtagcgacaattgaaaatgaaaacattaccattgaagagctaatgggttacataaaaggacccgactttccaaccgcgggtctgattttaggtatggatggcctaaaacaagcttacgaaaccggtcgcggaaaaataaaaatgcgcgcaaaagcccacattgaaacaaacaaaaaaggaagagacagtattgttattacagaagttgcctaccaaacaaacaaagcaacccttgtagaaaaaattgcacacctagtccgagacaaaaaggtggtgggaataagagaccttagagacgagtccgacaaagacggtgtgcgcgttgttatagacactaaaaaagacgccgtaccggaagtcattttaaaccaactatatcagcacacacaacttcaggacacttttggtattattttacttgcccttgttgatggtgttccaagataat

SEQ ID NO: 295025 - DNA, 842 bp, Unknown
  Bacterial polypeptide expressing nucleotide sequence isolated from the Sargasso Sea
acttaaatggaatgcaggatataatgaagatgtatatccttatacaaataatatttaccaaaaagatggaggcactcatctattaggttttagaagtgccttgacaagagttgtaaacaaatatgcttcagagcaaaatttattaaaaaaaagtaaagttcttttatctggagacgatgtaaaagagggcttaacttgtgtattatcagtaaaaattccagatcctaaattttcttcccaaacaaaagataaattagtttcctcagaagtaagaaatattgttgaaggtattataaatgaaaaattatcaatttggtttgatcaaaacccttctatttcaaaaattattttgacgaaaataattcaggctgcggtagctagagatgttgccaaaaaagcaagagaaaatgttagaagaaaaggggctttagaactcactggattacctggaaaactggcagattgtcaaaactccaaacaagaaggaacagaactatttatagtagagggagactcagctggtggatcagcaaaacagggaagaaatagagaatatcaagcggtattaccattaagaggaaaaatattgaatacatttactgagcttaatggagtcaaaaaaaacggtaatcaaagtgaattaagaacaaaatctttatcaaagatgatttcttcaaatgaaatagttacattgattaatgctctcggtctggatcctaaaacagaggaaatagacttagaagatttaagatatggaaaaattataataatgacagatgctgacgttgatggctcacatattagagctttacttttaacgttttttaataatattcctttta

SEQ ID NO: 295026 - DNA, 605 bp, Unknown
  Bacterial polypeptide expressing nucleotide sequence isolated from the Sargasso Sea
tttggattattctgacatagttatttctatttttataaatgaaccaagttttgaaggacaaacgaagaaaagaattattatgcccaaatttcaaaaacaacttgagatattgatccaaaacgaatttttattatggctaaacacaaataaaaaaatttcaaaaactttaattgagactttgattgaaagatctttaataagaactgatctaacaaaaattcaagaattagaaagaaaatctattaaagaaagaaataaacttccaggtaaattagttgattgttcaagtaaaaaaattgaaggtactgagctatttattgtagaaggtgacagtgcaggaggctctgctaaacaagcccgtaatagagaattacaagcaattcttccattaagaggaaagatacttaacgtttatagtgtaagtttatctaaaattgctgacaacaatgaaattcaaaaccttatacagtcacttggatgtggtatcgggaaaaattttgatttgtctaaattgcgttatgaaaaaattatacttatgactgatgcagatgttgatggatcacacattgcaactttactaataacattcatttataaatatatga

SEQ ID NO: 295027 - DNA, 927 bp, Unknown
  Bacterial polypeptide expressing nucleotide sequence isolated from the Sargasso Sea
gggaagacaggaacagaaataatttttaagccaagtgacaaaacgttttcttctgttaaatttgattttcaaattttagaacatagaattcgtgaattagcatttttaaacagcggagttagaattaacttagctgatgatagatcagaaaaaaagcatgaagtgaagtttcactttgaaggtggactaaaagagtatgtaagttacctaaatcgatcaagagcaagtatacatgatacaattgtaactaagcacgaaaaaaatggtattacacttgaaatggctatggaatggacagatgtttttcatgaaacaactatatgttttacaaataacatacctcaaaaagatggaggaactcatctggcgggttttagagcagctttgacaagagtaattaacaattattcaacgaattttggttatgcgaaaaaagaaaaaatacaaataactggggatgattgtagagaaggcttgacttcaattatatcactgaaattaccagatcctaagttctcaagtcaaacaaaggataagttagtttcaagtgaagttagacctgttgttgaacaatacgttaatgaagcattgtcacaatggtttgaagaaaacccaaatgaagctaaaaaaataatttcaaaagtttatgacgctgcaagtgctagagaagcagcaaggaaagctagggaacttactcgtagaaaaggtgttttggatataactagtcttccgggtaaacttgctgattgccaagaaaaagatccatctaaatctgaaatatttttagtagagggagattctgcaggaggttctgcaaaacaaggaagagatagaagtaatcaggcaattttacctttaagagggaaaatactaaacgttgaaagagcaagaattgataaaatgctgtcttctgcagaaataggaaca

SEQ ID NO: 295028 - DNA, 373 bp, Unknown
  Bacterial polypeptide expressing nucleotide sequence isolated from the Sargasso Sea
atgacaaatgaagtaaatgaggtaatctcaccaatacctgttgagcaagagattaaacgctcctatttagattacgctatgagcgtaattgttggaagagctcttcctgatgtacgcgatggcttgaaacctgtgcatcgacgttcgttgtatcgcatgcatgaaatgggtaatttatgggggagaccttacaaaaaatcagctcgtattgttggtgatacgatgggtatgtaccatcctcatggagatggcgccatttatgacgctattgctcggatggctcaagatttttcactgcgttatccgctggttgatggacatggtaactttggatcaattgatggtgatgcgccggcagcaatgcgatatacag

SEQ ID NO: 295029 - DNA, 904 bp, Unknown
  Bacterial polypeptide expressing nucleotide sequence isolated from the Sargasso Sea
cattcaggtactgaaggtctggaggcagtccgagtcagacccggaatgtatattggaagcaccgatcaaagagggcttcatcatttaatttatgaaattttagataactgcgtagatgaggcaatggctggattctgtgatactgtcacgatcacaatctccgaagaaggcgaaatagctttaacagataacggtaggggtatccctgtggataaacacgcaaccacaggcctctctgctctggaaacagtcatgaccactttgcatgctggaggtaaattcggaggaggggcgtataaggtcagcggtggtttgcacggagtaggagcatccgtcgttaatgcgttatcttgtaacgtcacagccgagatacatagggaaggcaaaatttatacccaaacatataatcaaggcatatcaaccggtaaactggaagtgacaggtacaactgaaatacatgggaccacgattaaattcacgccggatcctgagatatttccaaatgtggactttgatttcgatattcttaccagtcacttcaaagaaataggatatttgaacaaaggcttaaagattcattttactagctattggcatgacaaaagccgcaaaggagatattgaacgaacttacttttttgacggaggaatagctaacttggtaaggaacatgaataagaataggtcttatcttcatgaaataccgttttattatcagaaagaagttccggaagcagtcgttgaggtggctgttcaatacaatcaaggatacacagaatccgtttactcgttcgccaattgtataaatacacaggaaggtggtactcatttaacggggttcaggttagcccttacgcgcatactgaatgattatgcaaggaagcaaggttttatcaaagaagacc

SEQ ID NO: 295030 - DNA, 782 bp, Unknown
  Bacterial polypeptide expressing nucleotide sequence isolated from the Sargasso Sea
aatgaaatcatcttacttatcttacgcgatgagcgtaattataagtagagcattacccgatgcgcgtgatggtttgaaaccagttcatagaagaatactatacgctatgtttaaaggtggttatgactggagtaaacaatatcgaaaatcagcgcgaatagtgggcgatgtaattggtaaatatcatcctcacggagatcaagctgtttatgatgcaatggtaaggcttgcacaagatttttctatgaaggagaaattactagatggtcaaggaaattttggctctatagacggagataatgctgcagctatgagatatactgaagttaaattagcgaagattacagaacatttggtatcagatattaataaaaatactgtagaatttcaaaataattatgatgacactgaattagagccaaaggttcttccatctcaatttccaaatttaatagttaatggagcagggggaattgcagttggtatggctacaaatataccaccgcacaatttgtcagaggtaatagatggtacattagcttatatagataatgagaatatatctttggagcaattgatgaaaatcattcctggcccagattttccaacaggtggtataattcttggaaaagatcaaataattaagggttataaagagggtagaggttcaataaaaattagaggtgaaattgaaatagaggaacaaaaaaatgaaagaaaacttataataataaaatcaatcccttaccaggtaaataaaattgctttaatagaaaaattgc

SEQ ID NO: 295031 - DNA, 768 bp, Unknown
  Bacterial polypeptide expressing nucleotide sequence isolated from the Sargasso Sea
aatgatagacgatattacctccgaagaatcaaattttaaagatattgaacgcataaacattgaaaaggaaatggaaagctcctttttagattacgctatgagcgtgattgtttcaagagcacttccggatgtttgtgatggtctaaaaccagttcatagaagaataatttatgcaatgaatgaagcaggttatgtttcaggaaaaccttcaagaaaatctgctagaattgtaggggatgttatgggtaaatatcatccacatggagattcggctatttatgatgcaatggttaggcttgctcaagaatttagcatgagagttccacttgttgatggtcaaggaaactttggttcgatggatggagactctgctgctgcaatgagatacacagaagcaaaattatctcctatatcttcttatctcgtaaatgacattaaccatgaaacagttgcatataaagaaaattatgatggaacaactttagaaccagaattactccctgccgaatttcctaatttactaattaatggatctgaaggaattgccgttggaatggcaacaaaaatacctccacattgtccaacagaaataataaatgcttgttgtaaatttgtagaagacccagaaatatctgatgatgatttattgagttatgtaaatggaccagattttccaactggtggaataattgttggaaaatcaggaatacgaagtgcatatttaactgggaaaggctcaattctgattagaggtaggacaagtattga

SEQ ID NO: 295032 - DNA, 832 bp, Unknown
  Bacterial polypeptide expressing nucleotide sequence isolated from the Sargasso Sea
tatcaaggtcttaaaaggtcttgaggcagtaagaaaaagaccaggaatgtatatcggagataccgatgatggaactggtttgcaccacatggtttatgaagttgttgataattcaatagacgaagctcttgcaggatattgtaaaaatatagaagtggatattaattcagatggaacaattacagtaagagatgatggacgtggaattcctacagatatgcataaaggagagaaaaagtctgcagctgaagtaataatgactcaattacatgcaggaggtaaatttgatcatgattcttacaaagtatcaggaggcttgcatggcgtgggtgtttcagtggttaacgctctttcagagaatttggaactccaaatagaaagagatggaaaaaaatattttattgaatttaaagatggaaattcaaaaagtcctttaaaaattattggaaaatcaaaaaacactggaactcaaataaaatttttaccttctaaagaagttttttcattagtaaaatttagctttaacaccattcaaaaaagaatgagagaattagcctttttgaacaaaggtattaaaattgtagtaaatgatttgactcaaaaaaaacctaaaagttccacttttaaatttgatggaggtattgttgaatttgtagaatatttagatgaaaagagagataaattaaaaaataaaaatggtaacgatttattcaaaaaatcgatatttttagaaggcaaaaagcaaaatattgatattgaatgttgtttaaaatggaatgctggttattctgaagatgtatatccttatacaaacaatatattccaaaaggat

SEQ ID NO: 295033 - DNA, 701 bp, Unknown
  Bacterial polypeptide expressing nucleotide sequence isolated from the Sargasso Sea
tctatagatggtgatcctgcagctgctatgaggtacacagagacaagactatcaaaagtttcacaatttttaattgatgatatagaaaaagaaactgtttcctacaaaagcaattatgatgaaacggaaaaagagcctactgttttacctgctcagtatccaaatttactagtaaacggtgctggtggaatagcagttggtatggctacaagtatacctcctcacaatctgggtgaaataattaatggaactttagctttaattgaaaataaagatattaaaattaaagaattaatgaaacacataccaggaccagattttcctactgggggaattatcattggaaaagacgtaattaaacaaggttataacaaaggaagaggttcatttaaaattagaggagaaatttctattgaaacacaaaaaaatggaagagagagacttgtaattaattctattccttatcaagtaaataaatcggttttaaatgagaggattgcacaattagttagagaaaaaaaaattgagggaataaaagatattagagacgagtctaatagagagggtataagagtttcaatagaccttagaaatggtgttgaacctgaaacaatcaaaagacaactctacaaaaatacacaaatcgaaagttcatttggttttaatactttagctattgctgaaggaaaaccaaaaatgtg

SEQ ID NO: 295034 - DNA, 904 bp, Unknown
  Bacterial polypeptide expressing nucleotide sequence isolated from the Sargasso Sea
aatactaaattattttgaaaaaaaatttttattaaaatctaaaattaaagaaaatgagaattttgagacattaatatcatttaattccaatgaaaattcaagtttaatgtcttactgtaatacaattgaaaccccagatggtggttcacatgaaattggtattcgtaatgggattttaaaagctgtaaagctttatggccaaaaaaatcaattttcaaaaataaataatatcaattataacgatatctttgattactctaatgttattatttctatttttattaatgatccaagttttgagggtcaaactaaaaaaagaataataatgcctaatttacaaaaagaaattgaaactaaaacacaacaagaatttttactatggttaaatgctaataaaaaaaattcaaaaatacttttagaaattttaattgaaagagcgcttcaaagaactgatctatctaaaatcaaagagttagataggaagagtatcaaggagagaaacagattgcctggcaaactagtagattgttctagtaaaacaataaaagggtcagaaattttcattgttgagggtgatagcgctggtggatcagcaaaacaagcaagaaatagagaatttcaagcaatactacctttaagaggaaaaattttaaatgtttacagtgttggattatcaaaaattgctgacaataatgaaattcaaaaccttattcaatctttaggatgtggtattggtaaaaattttgatatttcaaaacttcgttatgaaaaaattattttgatgactgatgctgatgtagatggctcacatattgcaacactgctaattacttttttctacaaatatatgaagcaattaataaatgaaaataaactttttttagctatgcctcctctattttag

SEQ ID NO: 295035 - DNA, 796 bp, Unknown
  Bacterial polypeptide expressing nucleotide sequence isolated from the Sargasso Sea
gatgatgcctcaaataagccaccatcagagaatgaaggcagtggaccgcctgatcgtggattgggcggccgacttatcgatctgccaattgagcaagaactcaaggagagttacctgacatacgcaatgagcgttattgtcagtcgagctcttcctgatgttcgcgatggcctcaagccgtcgcaacgacgcattcttgttgccatgaatgacctgaatctgtcacctggttcttcccgtgttaagtgcgcgaagatatcgggtgacaccagtggtaactatcatcctcatggtgaaagtgtgatctatcctacgcttgtccgcatggcgcaagaatggaacatgcgtcatgtgctcgtcgacaagcagggtaactttggatcgatcgccgggttgcctgccgcagccatgcggtataccgaagctcggctgtcgccgattgcgtcgcagatgcttgacgatatcaatctcgatacagtcgactttgtaccaacatacgatgagcgaaatacggaacccgttgtgcttccgagtcgctttccaaacctggtagtgaacggggcaggtggtattgctgtcggtatggcaacaagtattcctccgcacaacttaggcgaagtatgtcgtgggcttgttcaaatgatcgacaacccagacacatcaatggcagagttgctcgagattgtcccgggtccggacttcccgactggtggcattgtcatgggaagggagtccttgcttcgaggatatctcactggaagaagtacaattacgcttcgtgcacgagcacacgtcg

SEQ ID NO: 295036 - DNA, 925 bp, Unknown
  Bacterial polypeptide expressing nucleotide sequence isolated from the Sargasso Sea
atgtctaattcttacttagattacgcaatgagtgtaatcgtttctagagcgcttccagatgttagagatggattaaagccagttcaaagaagaatattatacgccatgtatgacacgggtatgaggtcaagttcctcattcaaaaagagcgcaagacttgttggtgaggtgatgggtaaatatcaccctcatggtgattcagcaatttatgaggctatggtaaggctggcccaatcatggtcaatgaggtacatgcttgtagagggccaaggtaattttggttcaaccgatggtgattcagctgccgcaatgagatatacagaagcaaaattaaggcctatttctgataccatgctttctgatattgagaaagaaactgttccttggaatgataattttgatgcatctatacaagaaccaagcactttacctgcaaccctcccaaatcttttagttaatggggttcagggtattgctgttggcatggcaactaatatggcgcctcataatttaacagaagtttgcgaagcaattgtttatatggttgataacccagaatgttcagtcgatgatcttatgggatatatcaaggcacctgattttccaactggagctcatatatggggcacagatggcattaaatctgcttattcaacaggtagaggcagagtaatgatacaagcaaaccataaagttgaatttatgaataagcaagaagatagaattagattagtttttgatgaacttccttatcaggtgaataaggctaatcttgtaatgagaattgctgaacttatgaagttaaaaaaagttgaaggtatatcagaagtaagagatgaatctgatagaaaaggtactagattagttgtagagcttaaacgaggtgcaagtgaatttgtagtactaaatatttataccaattaac

SEQ ID NO: 295037 - DNA, 247 bp, Unknown
  Bacterial polypeptide expressing nucleotide sequence isolated from the Sargasso Sea
atgaccaaaaaacaagtttctaactaccaagctgactccatcaaagtactcaaaggactagaagcagttcgaaaaagacctggtatgtacattggtgacacagatgatggaacgggcttacatcatatggtttacgaagtagttgataactctattgatgaagcgctagcaggatattgtaaagccattgaagtcagtataaattcagatggcacagtaagcgttaaagatgacggaagaggaatac

SEQ ID NO: 295038 - DNA, 550 bp, Unknown
  Bacterial polypeptide expressing nucleotide sequence isolated from the Sargasso Sea
aatgacaaacaataaaacatatcaagcagactcaataaaagtcttaaaaggtcttgaagcagttagaaaaagaccaggcatgtatattggtgacacagatgatggaactggcttgcatcatatggtttatgaagttgttgataattcaatcgatgaagctctagctggtcattgtaattatatttatgtaaaaattaattcagatggcactattacggtaaaagataatggtcgaggtatacctgttgatatacataaaggtgaaaaaaaatctgcagctgaagtaattatgactcaattgcatgctggaggaaaatttgatcacgattcctataaagtttcaggaggtttacatggcgtaggtgtctctgtggtcaatgctttgtctgaaaaattagaattagaaataaatagagatggtaaaaaatattatattgaatttcaagatggagaagcaaagaaacctcttaaagaaattggtaaatctaaagaatcaggtacacaaataacatttcttccatccaaaaaagtattttcatcaataaaattt

SEQ ID NO: 295039 - DNA, 352 bp, Unknown
  Bacterial polypeptide expressing nucleotide sequence isolated from the Sargasso Sea
aatggaaaaaattgagataaaaaataattctttaccaaaatctattttagttcatcaagaaatgagctcgtcatatttatcatatgcaatgagcgtcattgtaagtagggctctacccgatgtaagagatggtcttaaaccagttcacagaagaattatttatgctatgtacaaaggtggttacgattggagcaaaccatttaggaaatctgcacgtatagtaggagatgttattggtaaataccacccacatggagatcaggctgtttatgatgcgcttgtaagattagtccaagaattttcaatgagtttacccttgatacagggacaagggaaattttggatctattga

SEQ ID NO: 295040 - DNA, 233 bp, Unknown
  Bacterial polypeptide expressing nucleotide sequence isolated from the Sargasso Sea
aatgggcaaaactaatcaatctgactatagcgcagattcaatcaaagtactgaaaggtttagatgcggtcagaaaaagacctggaatgtacattggcgacaccgatgatggaagtggcctacatcatatggtttttgaagtagtagacaattcaatcgatgaggctttagcaggacactgtgatcagattagtgtttctttaaattcaaatggatcagttactatagatgata

SEQ ID NO: 295041 - DNA, 715 bp, Unknown
  Bacterial polypeptide expressing nucleotide sequence isolated from the Sargasso Sea
ggcggactgcacagcaagcgacaccgacctgaccgaactgttcctcgtagagggggattcggccggcggctcggccaagcaggcgcgcgaccgcaagacccaggcggtgctcccgctccgcggcaaaatcctgaacgtcgccagcgccagcgccgaaaagctcggcgccaatcaggagctgtcggacctcgcgctggcgctgggcgtgcgcccgggcaaggatttccagctggatgatctgcgttatggacgcgtcatcatcatgaccgacgccgatgtcgacggggcgcatatcgcggcgctgctgatgacctatttctatcgcgagatgccggcgcttatcgaggccggacgcctgttcctcgcacagccgccgctctaccgcatgacacagggcggcaccacgctctacgcgctcgacgactcgcagcgcgaggagctggagaaaagcggcttcgatgggcgcggcaagatagagatcagccgcttcaagggccttggcgagatgccgccgggccagctcaaggaaaccaccatgaacgcggccacgcggcgcctgctgcgggtcgacctgccgcggcgcgacagctccggcgcggatgcgcggcgcggcgtcgaccagctggtcagcacgcttatgggaaaaaaggccgagctgcgattcggctatatccgcgaccacgccgacgacgtgctggccgacctcgacgtctag

SEQ ID NO: 295042 - DNA, 832 bp, Unknown
  Bacterial polypeptide expressing nucleotide sequence isolated from the Sargasso Sea
gtgctatctattaaaatgccagatcctaaattttcatctcaaaccaaagataaattagtttcatcagaaatcagattaattgtagaaacaatcattaatgacaaagtatctacttggtttgatcaaaatccgtcaatagctaaaacagtgttagagaaaataactcaggcagctatggcaagagatgttgccagaaaagctagggatagcgtcagaagaaagggaacctttgaattatctggtttacccggcaaacttgcagattgtcagatacaaaaaaaagagggaacagaattgtttattgtcgagggagactctgcaggtggttctgcaaaacaaggaagagttagagaatatcaggctgttcttcctttaagaggaaaaattttaaatacattcgttaacggaaaaagtaatggcgatgaccagaccacaaaagcattgtccaaaatgatgtcctcaaatgaaattgttactttaataaatgctttgggtacaggatcaaaagattttaacattgaaaatttaagatatgacaagattataattatgaccgatgctgatgttgatggatctcatattagaactttattattaactttttttaataataatccttttaatcaattaatagaaaacggacatatttatcttgctcaacctccattatttaaagttacaaaatcaaataaaagtgtttacataaaagatgaaaaagctcttgaagattatataattaaaacctcaggtaaagctgacaaaaaaattaaaaagggatctaaagattataacaaatttatgcaagagcaaagggagaaactttcaattcaaa

SEQ ID NO: 295043 - DNA, 788 bp, Unknown
  Bacterial polypeptide expressing nucleotide sequence isolated from the Sargasso Sea
ttcagtatatgatgcgttagttcgaatggcgcaagacttttccatgagatatgagcttgttgatgggcaagggaattttggctccattgatggagacaatgccgcagcaatgaggtacacagagtctcgaatgacaaagctctctagtgagatgttaaaagacctagataaagacaccgttgactggaccccaaattttgacgaaaccctaaaagagccagctgttttaccatcttccgtcccgacgcttttgatcaacggctctgagggtattgctgttggtatggcaacaaagattccacctcacaatctggtagagcttgttaatgggatagttgcattaatagacaaggaagacataacaactgatgaactaatgcaacatataaaagggccggactttcctaccgcgggtcttattttgggtatggacggtctaaaagaagcctatgagactggccgtggaaaaataaaaatgcgagcacgcgcccatattgaaacaagtaaaaaaggtaaagatagtatagtaataactgaggtcgcatatcaaaccaacaaggcaaacctagttgaaaaaatagcagacctggttcgtgataaaaaaattgaaggaattacagaccttagagatgaatcagacaaagatgggataagggtagtaattgaaacaaaaagagacgcagttccagaggtcatactaaaccagctgtacaagcatactcaactacaggacacttttggaattatcttacttgccttggtggaaggcgttcctcaaataatgagtc

SEQ ID NO: 295044 - DNA, 809 bp, Unknown
  Bacterial polypeptide expressing nucleotide sequence isolated from the Sargasso Sea
aatgagttcatcatacttatcttatgctatgagcgttataattagcagagctttgccagacataagggatggacttaaacctgttcatagaagaattatttatgccatgcataaaggtggatttgattggtcaaagcaatttaggaaatctgcaagaatagttggtgatgtgattggtaaatatcatcctcatggtgatcaggcagtttacgacgcattagttagaatggttcaggatttttcaatgagtttacctttaatagaagggcagggaaattttggatctatagacggcgacccgcctgctgctatgagatatacagaaacaagactttcaaaagtatctcaatatttagtcgatgatataaataaagatacagttgcttttaaaagtaactacgatgaaacagaaaaagaacctgagattttaccggctcaatacccaaatctattagtaaatggtgctggaggaatagccgtaggaatggctactagtataccacctcataacctaggagaaattattgatggaactttagccttaattgaaaacagagaaattaaaatacctgaattaatgaaactaataccaggtccagattttccaacaggtggattgataattggaaaagatataataaaacaaggttacaaaacaggacgtgggtcattcaaaattagaggggaaatttctactgaacaattaaaaaatggcaaagaaagattagtagttacatcagttccgtatcaagttaataagtctgttttaaatgaaagaatagctgaactcgtaagagaaaaaaaaatag

SEQ ID NO: 295045 - DNA, 502 bp, Unknown
  Bacterial polypeptide expressing nucleotide sequence isolated from the Sargasso Sea
atgagcaaagcgaaccaaagctatagcgcagaaaatataaaagtattagaaggactagaggccgtaagaaaacgaccagcaatgtatattggagacgttggaagacgcggactccaccaccttgtttatgaagttgtggacaactcaattgatgaggcgcttgcaggatattgtgataaaatagtagtaacgtttaatcaggacggatccgtgaccgtggaagacaacggaagggggatccccgttgatttacacaaagaagaaaaaaagcccgccgtagaggttgtgatgaccgtactgcacgccgggggaaagtttgacaaagggtcctacaaggtgtctggcggacttcatggtgtgggggtttctgttgtaaacgcactgtctgaatggctgtgggtagaagtaaaaagagacggaaaaaaacacaaacaagactacaaaaaaggagaaccacaaaacaaggttaaggttgttggtgatgcgaaaaagaccggaacaa

SEQ ID NO: 295046 - DNA, 790 bp, Unknown
  Bacterial polypeptide expressing nucleotide sequence isolated from the Sargasso Sea
tattccgatgaagttttagcttttactaataatatcaatcaaaaagatggaggtactcatttacttggctttagaagtgcgcttactagagtaataaatagatattcttctgaaaaaaatatatcaaaaaaaaataaagtaactttatcaggagatgacataaaagaaggtttaacagcaatcctttctattaagatgccagacccaaagttttcatctcaaacaaaagacaaacttgtatcttcagaaataagactaattgttgaaaatataataagcgacaaaatatctatatggtttgatcaaaacccatcagtggcaagatatgtcattgaaaagattacacaggcagcaatagcaagagatgtagctagaaaagctagagataatgtaagaagaaaaggaagtttcgaactatctggtttgccaggaaaattagctgattgccaaatttctaaaaaagagggcacggaattattcatagtcgagggagactctgcgggaggttcagctaagcaaggtagaatgagagagtaccaagccgtgttacccctaagaggaaaaattttaaatacttatgttaatgcaaattcaaaaaaaaatgggaatagtgctgagacacatactaaagcattagctaaaatgatgtcatcaagtgagattgttaccttaattaacgcattaggaactggatcaaaagattttaatatagataatttaagatatgataaaataattataatgaccgatgcagacgtagatggatctcacataagaactttacttttaa

SEQ ID NO: 295047 - DNA, 334 bp, Unknown
  Bacterial polypeptide expressing nucleotide sequence isolated from the Sargasso Sea
gtaggaaatccgactgatgattcagatcaaaataaattagaaggaaagttcgatatcacaaaaatgagatatcacaaaataattataatgactgatgcagatgttgatggaagtcatattagaactcttttattaacttttttttataggcatatgaaaccaataattgattcaggcaggttatatatagctcaaccacctttatatagattaaaaaaaggcacctccacagtttacaaaaaagatgatacagatttagaagattatttaattgaagagggattaaagaatactatttttgaaaatactcaacaatctcaagttgctggaaaac

SEQ ID NO: 295048 - DNA, 862 bp, Unknown
  Bacterial polypeptide expressing nucleotide sequence isolated from the Sargasso Sea
ttaactagggtaatcaacaaatatgctaatgaaaataatttactaaagaaaaacaaattagcaatttcaggtgacgatattaaggaaggtctaacttgtgtgctttcaacgaaaatccctgatccaaaattttcatctcagacaaaagataagctagtttcatcagaagtaaggatgattgtagaaacattagtaaatgaaaaattatctatttggtttgatcaaaatccgtctattgcaaaaattattctagctaaagttattcaagctgcaatggcgagagatgttgctagaaaagcaagagaaaatgtacgaagaaaaggagcccttgaattaagtggtcttcccggaaaattagcagattgtcaaattggtaaacaagaaggaaccgaattgtttattgtagagggggattcagcgggtggatctgctaaacaaggaagaaatagagcaaatcaagcagttttaccacttagaggaaaaatacttaatacttatgtagaagattttaatgtgaaaaaaaatggtaacggcaatggaaatggttctgatcaaagaacaaaggctttgtctaaaatgatttcttcaaatgagattgttaccttgattaatgctttaggtttagacccaaaagcgcaagaaattgatttaaaggatttaagatatggaaaaataataattatgacggatgctgatgtagatggctctcatataagagctcttcttttaacttttttcaataataaaccatttaataaattaattgaaaatggtcatgtttatttagcgcaacctcctttatttaaaataaataaaggttctaaaggtatttatattaaggatgagaaggagttagaagatt

SEQ ID NO: 295049 - DNA, 580 bp, Unknown
  Bacterial polypeptide expressing nucleotide sequence isolated from the Sargasso Sea
agggttgataaactgctttctaacaatgagatacagtcaataataacagcactgggaactggttttggtgggggtgatgaagaaacgggcgaaaggtcagctggggactttgatattgaaaaaataagataccataaaattattataatgacagacgccgatgttgacggttctcacataagaacacttttacttacgtttttttatagaaaaatgaaacaattaatagatggtggttatttatacttggcactaccaccactatatagagttcaccaaggtaaaaaagcagcatatgcatatgatgacaatgaaagagaccttttaattgagagaatgaaaaaagacaataaaaacacaaaagttggtatacaaaggtataagggacttggtgagatgaatccagaacagctgtgggacacaacaatggacccagaaaaaagaaccctcttgcaagtaacggtcgaaagcgctgaggccgcggcggttacatttcagaacctaatgggtagtgatgttgaggcaagaaggacctttattgagaaaaacgcaaggtttgtagtaaacctagatatttaga

SEQ ID NO: 295050 - DNA, 541 bp, Unknown
  Bacterial polypeptide expressing nucleotide sequence isolated from the Sargasso Sea
tgaaattcagtccatgataacggcactagggtgtggttttggtgaagacgaagacgatccaaacagctttaatcctgaaaaactaagatatcataaaatagtaattatgacagacgctgatgtagacggtagccacataagaaccctgttgttaacattcttttggagaaaaatgaagagccttgttcagggcggttatttatatatggcaatgccacctctatataaactaaaacagggtaaaaaagagagatatgcatacactgatgaagaaagagataatattttaagaaggctagagtcagaaaataaaacaaaaattgatattcaaaggtataaagggttaggagagatgaacgcagaacagctttgggaaacaacaatgaacgcagaaaccagaaccctaattcaggtaacagttgatcacattatggaagaggaaacgaatgtaaggtttagagaattaatgggatcagaagtagaacacagaagaaagtttataacagagagagcaaagttcgcaaccaacatagacatttaa

SEQ ID NO: 295051 - DNA, 791 bp, Unknown
  Bacterial polypeptide expressing nucleotide sequence isolated from the Sargasso Sea
gagcacccacaagaagcaaaaattattgtcaacaaaattattgaagctgcgcgtgcgcgagaagcagcaagaaaagcgcgagaaatgacgcgaagaaaaggtgctctcgacatagctggtttgcctgggaagcttgcagattgtcaagaaaaggatccatcattatccgaaatatttctggtcgagggagattcggcaggtggctctgctaaacaaggaagggatagaaagacacaagcaatacttcctttaaaaggcaaaattttaaatgttgagaaagctcgctttgataaaatgttatcttctgctgaggttggtacacttattacagcgctgggttgtgggattggaagggaggactttgatccagataaacttaggtatcatagaatcatcatcatgaccgatgccgatgttgacggatctcacattcgaacactcttgctgacctttttttacagacagatgcaagagctgatcaatagagggcatgtttacattgctcaaccacctctttataaaattaaaaagggcaaacaagaaacatatgtcaaagacgatgtagagcttaataaatatttattacagatagcgcttgaaaactctaaattacatatctctaagtcatcaccagcaatttctgatacggcctttgaaaaattagcgcatgattatatggaatgtgaaagcattatatcaagacaatcggcaatatatgacgaagagatccttgaggcgatgggaaacatcaagccaattagctcaaaagacagcagaaatgaaaaaaaact

SEQ ID NO: 295052 - DNA, 361 bp, Unknown
  Bacterial polypeptide expressing nucleotide sequence isolated from the Sargasso Sea
tatgcctaaaccaaaaaaaaataccaatacaaaaaattacgattcatccaacattaaggtcttaaagggcttagacgctgtccgaaaaagacctggtatgtacattggtgatactgatgacggcacaggacttcaccacatggtttttgaggtcgttgacaactctgttgatgaggctttggcaggtttttgtacacacatagaggtaatcattcatgaggatgactctataactgtaaaagataacgggcggggcatacctgtagataaacataaaacagaaaagacttctgcagccgaggtcatcatgaccgtattgcatgctggaggtaagttcgatgatgattcatacaaggtttct

SEQ ID NO: 295053 - DNA, 931 bp, Unknown
  Bacterial polypeptide expressing nucleotide sequence isolated from the Sargasso Sea
tttagaaagtcagcaagaattgttggagatgttataggtaaatatcatccacatggagatcaagctgtttacgatgctttagttagaatggttcaagagttttcaatgagcgttccattagtagatggtcaaggaaacttcggttcaattgatggagatccaccagcagccatgagatacacagagacaaaattagcaaaagtttctcagtttttaattgatgatattgaaaaaaatactgttttattcaaaagtaattacgatgaaaccgagcaagaaccaacagttttgcctgcacaatatccaaatcttttagtaaatggtgcaggaggaatagcagttgggatggcaacaagtataccaccacataatttaggagaagttgttgatgcaacgctagcattaatcaaaaacaaagatattaaaataaatgaattaatgaaacatgtgccagggccagattttccaactggtggtgtaataattggtaaagatattattaaacaaggatacaaaacaggaagaggctcatttaaaatacgaggagaaatatctgttgaaaatttaaaaaatggaaaagacaggcttattatttcatcgatcccatatcaaattaataaagcaaatttaaatgagagaattgcagaactagtaagagataaaaaaatagagggcataagtgatattagagatgagtcaaatagcgaaggtataagagtatctattgatctaagaagaaatgttgaaccagaaacagtaaaaagacaactttacaaatacacttcaatagagtcctcatttggttttaattcgttagcaatagtagatcaaaaaccaaaaacatgcactcttaaagattttttagaaaactttttaaaatttagagaagatgtagttataaaaagaactaaattcgatctcaaaaagcaga

SEQ ID NO: 295054 - DNA, 360 bp, Unknown
  Bacterial polypeptide expressing nucleotide sequence isolated from the Sargasso Sea
aatgagtgaggacaaaagatctaataaaatctcaaatgattatggcgcggaacagatacaggttttagaggggttagaaccagttcgtaaacgccctggaatgtatataggttcaacagggcctaggggattacatcatttagtatatgaggtggttgataactcggttgatgaagcacttgcaggacattgtgatcacatagaaatagttcttcgagcagatggttctgctttaatttctgataatggacgaggtattccaacagatattcatccaagaacaggaaaaagtgctttagaaactgtactaactgttcttcatgcaggaggtaaatttggtagtggtggttataaggtttc

SEQ ID NO: 295055 - DNA, 187 bp, Unknown
  Bacterial polypeptide expressing nucleotide sequence isolated from the Sargasso Sea
atggcaaataaaaactcatatcaagcagactcaatcaaagtactcaaaggcttagaagcagtaagaaaaaggccaggtatgtatattggagatactgatgatggcactggtttacatcacatggtgtatgaagttgttgataattcaatagatgaagctttagcagggtatgtaaaaatattaatgt

SEQ ID NO: 295056 - DNA, 957 bp, Unknown
  Bacterial polypeptide expressing nucleotide sequence isolated from the Sargasso Sea
tgtgattgtgggacgtgctttacctgatgttcgagatggcctgaagccggtgcaccgtcgggttttgtatgcgatggagcagttgggcaatgattggaacaagccatacaaaaaatcagcgcgtattgtaggtgaggtcattggtaaatttcacccgcatggtgaatcagcggtatatgatactatcgtgcgcatggcgcaagattttagtttgcgttatatgttggttgatggtcaaggtaactttggttctatcgatggggattcagcggcggccatgcgatataccgagattcgtctcacgcgtttggcgcataccttaatggcagacatggacaaagaaacggtcgactttctgcctaactacgatgaaacagagcattatcctgcagtattgccagcacgtattcccaatttattggtcaatggttcggctggtattgcagtgggcatggccaccaatataccgccgcacaacatgggtgaagtgttgtcagcgtgtttggctttgattgataattcggcgttgagcattgatgaattgatgacacacattccggggccagattttcctacggcggcgattatcaatggtaaagcggggattgtgcaggcttatcgcactggccgtgggcgtgctgtgatgcgtgctaaaacctcgattgaaactgaggccaatggcaagcaaaccattattgtcaatgagttaccgtaccaagtgaataaagcgcgtttgttagagaaaattgcgcagttggtcaaagagaagcgcattgatggcatcactgctttgcgtgatgagtctgataaagacggggtgcgcatggtcattgaggtacggcgcaatgaaagtgctgaggtactgctcaacaatctttatacccaaacgcaattgcagtcagtgtttggcataaatatggtggccttagagggtggccagcctaaggttatgaatct

SEQ ID NO: 295057 - DNA, 577 bp, Unknown
  Bacterial polypeptide expressing nucleotide sequence isolated from the Sargasso Sea
ctgccacgtgatatcgtggatgaaatgaaagagagttacctaaactactctatgtcggtaattgtatctcgagccctgcctgatgtgcgggatggccttaagccggttcatcgaagaatattgtatggcatgagcgaattgggctccagctggaaccgtccctataaaaaatccgccagaattgtaggagatgttttgggtaaatatcatccacatggggacagctcagtttatgatgctttggtgcgtatggcacaagatttttccatgcgctatgaactagtagatggacagggaaactttggttccattgatggcgataatgctgccgcgatgagatacactgaatcacgaatgacaaagctttctagtgaaatgttaaaagacctggaaaaggatacggtggattgggaacctaattttgatgaaacactgaaagaaccatcggttctaccatctaatgtgccaactcttttggtaaatggatctgaagggattgcggttggaatggcaacaaaaataccgccacataatttaaacgaaattatcaatggactgattgctttaatactaaata

SEQ ID NO: 295058 - DNA, 490 bp, Unknown
  Bacterial polypeptide expressing nucleotide sequence isolated from the Sargasso Sea
atgacaaacaataaatcataccaagcagattcaattaaagttttaaaaggtctcgaagcagtaagaaaaagaccagggatgtacattggagataccgacgatggtacaggtttacatcatatggtttatgaagttgtagataattcgattgatgaagcattagcaggtcactgtaaaaaaattcaagtaagtataaattctgatggatcaattacagttcaagatgatggtagaggaataccagttgattttcacaaggaggaaaaaaaatctgctgcagaagtaataatgacacaacttcacgcaggaggtaaatttgatcatgattcatataaagtttcagggggattacatggtgttggagtctcagtagtaaatgctctctcacaaagattagaattacaagttgaaagagatggaaaaaaatattttgtagagtttataaatggtgaaaataaaacaccgttaaagattactggcaaatcaaaaa

SEQ ID NO: 295059 - DNA, 946 bp, Unknown
  Bacterial polypeptide expressing nucleotide sequence isolated from the Sargasso Sea
aaaataatatttactgatgcaagtcaaaagaaggaaaaaatttcagagtttaaatttgatggtggcgttcttgaatttgtagattttttggatgaaaaaagagaaaagttacaaaataaaaatggaaatgatttatttagaaaaccaatttatattgaaggaaaaaaaaataatattgagttagagtgttctttaaaatggaacgcaggatatactgaggatatatttccatatacaaataatatttatcaaaaagatggtggaacacacttgttgggatttagaagtgcgttgactagagttgttaataaatatgctaatgaaaataatttactaaagaaaaataaattggcaatctcaggtgatgatattaaggaaggtttaacttgtgtactttcaactaaaattcctgatccaaaattttcatctcagacaaaagataaactagtttcttcagaggtaagaatgattgtagaaacattagtaaatgaaaaattatctatttggtttgatcaaaatccttctattgcaaaaattattttggctaaagtcattcaagctgcaatggcgagggatgttgctagaaaagcaagagaaaacgtaagaagaaaaggagcacttgaattaagtggtcttcctggaaaattagctgattgtcaaattggtaagcaagagggaactgaattatttattgtagagggggactcagcaggaggatctgcaaaacaaggtagaaatagagcaaatcaagcagttttaccacttagaggaaaaatacttaatacttatgtggaagatttgaatgtaaagaaaaatggtaatggaaatggtaccgatcaaagaacaaaagccttgtccaaaatgatttcatcaaatgaaattgttacattgattaatgcattaggtttagacccaaaagcacaagagattgatttaaaagatttaa

SEQ ID NO: 295060 - DNA, 697 bp, Unknown
  Bacterial polypeptide expressing nucleotide sequence isolated from the Sargasso Sea
atggcggattctgtgggaccaggaggcggcggtcccggcgattccgacgatcgaatcattcaggcggatcttcgcaacgagatgtcgcgctcctacctggagtatgcgatgagcgtgatcgtgggacgggccctgcccgatgcccgcgacggtctcaagccggtgcatcgccgcatcctttacgccatgtacgagttggggctgacaagcgatcgcccctacaggaaatgtgcccgtgtggtgggcgaagtgcttggcaaatatcacccccatggtgataccgccgtgtacgacgccctggtgcgcatggcccaggacttctccatgtcgatgcccttgatcgacgggcacggcaacttcgggtcggtggacaacgatccgccggcggccatgcgttacacggagtcccggttgcaggcgctgaccaccgacagcctgctggaggacatcgaggcggagaccgttgacttcgccgacaacttcgacgggtctcagcaggaaccaacggtgcttccggctcggattcctcagctgctgctgaatggttcagccggcatcgccgtcgggatggcgacgaacatcccgccccacaacctcaacgagctgatcagtggcctgctggcgctgatcgagaaccccgacatcacggatcaggagttgatccggctgatccctggccccgacttccccactgagg

SEQ ID NO: 295061 - DNA, 849 bp, Unknown
  Bacterial polypeptide expressing nucleotide sequence isolated from the Sargasso Sea
tgggtcagcaaagcaagggcgtgaccgcctaactcaagctatcttgcctttgcggggtaaactccttaatgtagaaaaagccaggttggataaggtgctaaataatgcagaaattaggagcctaatcactgcagttggaacgggaataggcgaccatgagggggagggttcatttgatgctgataaagcacgataccataaaattattataatgactgatgcagatgtcgatggtgctcatatcaggaccttacttttaacatttatctttagacaaatgaaaggcttgattgaaagaggttatgtatatgttgcaatgcctccgctatacaaaataaaaagaagaaaaacagaacaatatattcaagatgattctgaaatgagtaaaatgctaatttctcttggtatggaagaccttcttttaaaaagaaaaacagacaattatgtgtttcataaagatgagttatcaaaaatcatagatttatttattgaaatagaaaaaattggtaaaggattgggaagatatggttgtacccttgagcgttttttccaacaaattgatcagtctgatcattcactgccccgctttcttgcaaggattcgtaccggaaatgacgaagaactaagattttttaaagatatagattcaaagatgggatttgttcactctcacaatataaatgaagaagattcacaagaaaatatatttaaggaagtagaaagagatggcattgtattatctcagcgaatttcaattcatgagattttcgagtccaaagagttagaacgtttaattttagcttgttcagataagggaattgaacagacatttttttcaaatagtacaga

SEQ ID NO: 295062 - DNA, 895 bp, Unknown
  Bacterial polypeptide expressing nucleotide sequence isolated from the Sargasso Sea
gcagcaatgagatatacagaatctcgtttacagtctcttactgatgaaagtttattagaggatattgaatctgaaactgtagatttcgccgataattttgacggttctcagcaagagccaacagttttacctgctaggattcctcaactgcttctaaatggttcatctggaatagcagtaggaatggcaactaatattccacctcataacttaggggaattaattaatggtcttaaatcaataatcaaaaacccttcaattgaagatagagaactttttgaaataattaagggtcctgattttcccacaggtggtcaaatcttaggtagagacggtattagagaaactttcaaaacaggaagggggtcaataaccatgagaggggtagcaaatattgagcaaattaaatccatcggtagagcagataaagatgcagtaataattacagagctgccatttcaaaccaacaaagcggcattgatagaaagaattgctgatttggttaatgaaaaaaaattagaaggaatttctgatattagagatgaaagtgatcgagatgggatgaggattgttattgaactaaaaagagatgcctacccacaagtagttttaaataatttatttaaattaacacctctacaaaataactttagtgcaaatatccttgctttagtaaaaggagagccaacaacactttcactcaggaaaatgttagacgtttttctagattttagggttgaaacaattaggcgaagaactgcatttttattaaaaaaggcagaagaaagagatcatattgtaaagggtcttttattggccttagatgctatggatgagattataaatcttataagatcagcaaaagattcaatatcagctcgagaaaaatacaaaa

SEQ ID NO: 295063 - DNA, 955 bp, Unknown
  Bacterial polypeptide expressing nucleotide sequence isolated from the Sargasso Sea
gacgtgctgggtgatgacgccgcgcgccctgagtggctggagccggaatttggcgtgcgtgacggtcagtactacctgactgaacagcaggctcaggctattctggatctgcgtttgcagaaactgaccggccttgagcacgaaaaactgctcgacgaatacaaagagctgctggaacagatcgctgaactgctgcacattctgggcagcgcagatcgtctgatggaagttatccgtgaagagatggagctgattcgtgaacagttcggcgacgcgcgtcggaccgaaattaccgcgaacagcgctgacatcaacatcgaagatctgattaaccaggaagatgttgttgtgaccttgtctcatcagggctacgtgaaatatcagccgttaaccgattacgaagcgcagcgtcgtggcggtaaaggcaaatctgcagcacgcattaaagaagaagactttatcgaccgcctgctggtggccaacacccatgacacgatcctctgcttctccagccgtggtcgtctgtactggatgaaggtttatcaactgccggaagcgagccgtggtgcgcgtggacgtccaatcgttaacctgctgccgctggaagcgaacgaacgtatcaccgcaattctgccggtacgcgagtacgaagagggcgtcaacgtcttcatggcaaccgccagcggtaccgtgaagaaaacggcattgactgaattcagccgtccgcgttctgccggtattatcgccgtcaacctgaacgaaggcgacgaactgattggcgttgatctgacgtccggtaatgacgaagttatgctgttctctgctgccggtaaagtggtgcgttttaaagagaacgcagttcgcgcgatgggtcgtacggcgaccggtgttcgcgggatcaaactggccggtgaagactccgttgtttccctgatcgttccacgcggtgaagggg

SEQ ID NO: 295064 - DNA, 848 bp, Unknown
  Bacterial polypeptide expressing nucleotide sequence isolated from the Sargasso Sea
ttctggtggtcttcatggtgttggtatctctgttgtaaatgctctttcagaatatcttttattggaaatcaatagagatggttttagttatacacaagaatataaagacgggaccccaaaatcaaaattaaagaaaggcggtaaatcaaataaaactggaaccagcatcacctttattccgtctttagagacttttggaaaaaatagaacttttgatcatgacactctttttaagagactaagagaattgtcatttctaaattctggactatcgataattctaaaagatgagcgcgacggaagatttagtaactttaaatcagacggaggccttgaagagttcgtgactttcctaaacaaaaaaaagtcggtaattaataagccttttagatttttgaaagaaacaaaagacggcatggctgtggagctagccctgcagtggaatgatagttatcaagaaaatactctttgttacacaaacaacatttttcaaaaagatggtgggagtcacttaagcggatttaagactgcgctgaccagaagtttaaataattttatggaaaaggaaggttacttaaaatctggtgatttaactccatctggcgaagatgtcagggaaggtctaactgcagttatttctgttaagttgccggatcctaaattttcatctcaaacaaaagacaaattagtttcatctgaaattaagcctgttgtagagcaagaaacttataagcatttaaatgattttcttttagaaaacccaggagaagcaaaacagattgcaaccaaaataattgatgcttcaagggctagagaagcggctagaaaagctagagaaatgacgagaa

SEQ ID NO: 295065 - DNA, 415 bp, Unknown
  Bacterial polypeptide expressing nucleotide sequence isolated from the Sargasso Sea
tgttgatggatctcatattaggacacttcttttaacattcttttacaggcaaatgtatgaaattgtagaaaaagggtatgtttacatcgccttaccacctctatataaaattactaaaggtaaggagtttgtttatgcttccgatgaatctgaaaaagatgatgctattataaaactttcaaaaaatggtaatagaggcttagaagttcagagatataaaggtttgggtgaaatgaatccagagcaactttggacaacaaccatggaccctattaatagaagaatgatgagggttgacatcaatgatgtacaggatgctaacgaatcatttgaaatattgatgggtgatgatgttgagccaagaagagagtttatagacgctaatgctttatctgtaaaagagttagatatttaa

SEQ ID NO: 295066 - DNA, 484 bp, Unknown
  Bacterial polypeptide expressing nucleotide sequence isolated from the Sargasso Sea
agggaagattattaatgttcaaaaagctagattagacaaggttctatcatcaaatgaaattggaacgcttattaccgcattagggacaggcattggagtagatgagtttgatgtagaaaaattaagatatcacagaattataataatgacagatgctgatgtcgatggttcccatataagaactttattgctcacctttttttacaatcagatgtatgatttgctagaaaaaggacatgtctatttagctcttcctccactttataagattaaaaagggaagcaaaatatcttacgctaaagatgaggaagagaaagaccaaatattattagaattgagaaaagattcaactgatacatcaagagcgccagaaatacagagatacaagggtatgggtgaaatgaatccagagcagctttgggagacaacatttgatcctgaacacagaagattagtccaaattacacttgatcaagcaagagaa

SEQ ID NO: 295067 - DNA, 517 bp, Unknown
  Bacterial polypeptide expressing nucleotide sequence isolated from the Sargasso Sea
atggaaaaaaatagtgcagataacataaaagcttttaaaccaattttcgttcaagatgagatgagttcctcctacttgtcttatgcgatgagtgtaatagtgagtagggccctaccagatgttagagatggtttgaaaccggtacacagaagaataatttatgcaatgtataggggtggatacgattggtcaaaaccatttagaaaatcagcaaggatagtgggagacgtaattggtaaatatcatccacatggcgatcagtctgtttatgatgctttagtaagattagttcaagagttctctatgagcttaccgctaatttctggccaaggtaattttggttctatagatggcgatccaccagcagcaatgagatacacagagactaaactaggtagagtctcccaatttttaacggaagatttagaaaaaaatacagttaattatagaaacaattatgatgaaactgaaaaagagccagaagttttaccctctcagttcccaaatattttggtca

SEQ ID NO: 295068 - DNA, 520 bp, Unknown
  Bacterial polypeptide expressing nucleotide sequence isolated from the Sargasso Sea
atgtcaaaaaattctgaattaaataaaaacctttcttatggtgcagactcgattaaagttttaaaaggtctagatgcagtaagaaaaagaccgggaatgtatattggcgatactgatgatggatcaggccttcatcatatggtttttgaagttattgataattcaatagatgaagcattagcaggacattgtaaaagtattaccacaacgataaactctgataacactgttacagtcgaggatgatggaagaggtattcctatcgatattcataaaggtgaaaaaatatcagctgcagaggtgattatgacacagttacatgcagggggtaagtttgatcatgattcctacaaagtatccgggggacttcatggtgttggggtatcagttgtaaatgcattatctgaaaagttagaattaaatatttatagagagggaaaagagtataaaattaactttgaaaacggtaattcattaaaaccgctcaaaaatacaggtaaaacaaaaaaaagaggtacaa

SEQ ID NO: 295069 - DNA, 706 bp, Unknown
  Bacterial polypeptide expressing nucleotide sequence isolated from the Sargasso Sea
tatgggcgaaataactgcaaaagagattgttccaatagatatagagaaggaactgaagcaatcctatttagattacgcgatgagcgtaattgtaggcagggccttacctgatgctagagacggtcttaaaccagttcataggcgtgctttatacgctatgcatgttttaaataatgatttcggcagaccacataaaaaatcagcaaggattgtaggtgacattattggtaaatatcatcctcacggagacagtgctgcatatgaaaccattgtaaggatggcacaatggtggtccttaagatatccattagtagacggacaaggaaattttggttcgatggatggagacggaccagctgctcagagatatacagaagtccgaatggcaaagatctctcaagaacttttagctgatcttgataaagagaccgtaaattttgttgagaattatgatggtactgaaacgatgcctgatgtccttcctacgagagtacctaatatgcttgttaatggatctgcaggaatagcagttggaatggcaaccaatatggctccacataatttaaatgaaactcttttagcctgcttagcatttatagaaaatccagaaatatctacatctgaattaatggaattcatccctggaccagattttccaacaggcggaataataaatgggaaagctgggattgtgagtgcttatgaa

SEQ ID NO: 295070 - DNA, 497 bp, Unknown
  Bacterial polypeptide expressing nucleotide sequence isolated from the Sargasso Sea
tatgtctactgaagaaaataaaaactacggtgccgattctattaaggtcctaaagggccttgatgctgtaagaaaaagaccaggtatgtatattggtgataccgatgatggaagcggtctccatcatatggtttttgaagtagttgataactcaatagacgaggcgttagcaggctattgtgacacaatttcaattagtttaaacgccgatggttcagtttctgttgaagataatggaagaggaatcccaattgatacccacgaagaggaaggtgtttctgcagctgaggtcattatgacacaattacatgctggagggaaatttgaccaagacagctataaagtttcaggaggtttgcatggtgttggagtttcagttgttaatgctctatcaaataagcttgagctaaatatttttagggatggtaaagagtacaagatagattttaataatggtgatgcagcaagtcctttaaaagagattggtaaagtagata

SEQ ID NO: 295071 - DNA, 292 bp, Unknown
  Bacterial polypeptide expressing nucleotide sequence isolated from the Sargasso Sea
gatgagctcatcatacttatcttatgcaatgagtgttattgttagtagagctcttcctgatatcagggatggtttaaaaccagtacatagaagaattctatatgctatgtataaaggaggttatgattggtcaaaacaatttagaaagtcagcaagaattgtcggagatgttattggtaagtaccatccacatggcgatcaatcagtttatgatgctttagtaagaatggttcaagatttttcaatgagtttacctttagttcaaggtcaaggtaacttttggttctattga

SEQ ID NO: 295072 - DNA, 577 bp, Unknown
  Bacterial polypeptide expressing nucleotide sequence isolated from the Sargasso Sea
atgccaaaaaaacaaaataaaaaaggatcttatgactcatcaaacatccaggttctgaaagggcttgaagctgttaaaaaaagaccaggaatgtatataggtgatactgatgatggatcaggacttcatcatatggtttttgaggttgtagacaattgtattgatgaagcaatggcaggccactgcacagaaataatagtttcaattaataaaaatgggtcaataacagttaaagataacggtagaggaatacctgtagatactcacaaaaaggagaaggtgccggcagcagaacttatcatgacaacccttcactcaggtggaaaatttgatgataacagttataaagtttctggaggtcttcatggtgtaggcgtttccgttgttaatgctctttctgaagaattaacacttaaaatttgcagagatggtgggcagtatgagcaaaaatacgctaacggtaaagcccagacaaaactaaaaaaagtcaaaacttcaaaagaaacaggaactgagattacatttaaagcatctaaagagatattttcttttgttaactttgatatagataagataa

SEQ ID NO: 295073 - DNA, 217 bp, Unknown
  Bacterial polypeptide expressing nucleotide sequence isolated from the Sargasso Sea
atgattaaaactgaaaaaatacaaaattacgaggcagactccataaaagttttaaaaggtctagaagcagttagaaaaagaccaggcatgtatatcggtgatactgatgatggaacagggcttcatcatatggtttatgaggtagtagacaattccatagacgaggcacttgcaggacattgtaaaaatataaaagttgagatcaacaaagatggta

SEQ ID NO: 295074 - DNA, 793 bp, Unknown
  Bacterial polypeptide expressing nucleotide sequence isolated from the Sargasso Sea
tatactgcctctaagaggaaaaattttaaatacatggaaatcaaggacagataaaattttaagttcaaatgaaattggaaccttaataagcgccctgggaacaggaattggaaatcaagagtttgatataaataaacttaggtatcataaagtagttataatgacagacgccgatgttgatggatctcacattagaacgcttttacttactttcttttttaaggaaatgagagaattaattactaatgataatttatatattgctcgccctcctctatataaagtgaaaagaggcaaagaagagttgtatttgatggatgacgatgagcttcaccaggcactggtcaattatggctctaaagacataactttccaaactggtaagggaacaaaatttaaggattccgatcttaaaagagaacttttaaagatagtagaagctcaaaaccttcttaaaaaagtacctgaacgttacaataagaaggctatagaagaaattgcgatttgtggatgtttagatgtccaaaaaataaatgatatgtcggccaaaatagtaaaacaaatatgcgatcttattggcaacagatttaatcgaagatttgctgattttgataggggatgggaatgtagctatgaaaaagaagaaggatttatatttaaaagagaattaagaggggtcgttgatcaatttagtattgatcatgatttattaaattctcaagtaatccaaaatataaatgataattttgcttcagataatggagtgtatgcaatgtttcaagaaacaaagcca

SEQ ID NO: 295075 - DNA, 604 bp, Unknown
  Bacterial polypeptide expressing nucleotide sequence isolated from the Sargasso Sea
atgaataagaaaaacttcacttctatctcccttcaagaagaaatgcaacgttcttatttggagtatgcaatgagcgtaatagttggacgtgctctacccgatgcaagagacggtcttaagcctgtacaaagaagaattctatttgcgatgcacgaattaggtttaacgcctgataaaccatttagaaagtgtgcgagagttgttggagatgtccttggaaagtaccatccacacggagatcaagcagtatatgatgcattagtaaggctagtacaaaatttttcaacaaaatatcctactcttgatggccatggaaattttggatctgtggataatgatccaccagcggctatgagatatacagagaccagattagctccaatagctcacaaaggatttcttgaagaaattggatcagaaacagtaaccttttcaaataattttgacggttctcaaaaagaaccagatgttcttccagcccaacttccatttttattattaaacggatcatcaggtattgctgttggaatggcaacaaatattcctcctcacaacctgggcgaagttgtagatggtttagttgctttagtaaaaaataaagata

SEQ ID NO: 295076 - DNA, 485 bp, Unknown
  Bacterial polypeptide expressing nucleotide sequence isolated from the Sargasso Sea
aatgcaaaattcttacctcgattacgctatgagcgtaatcgttagcagggcattacccgatgttagagacggactaaaaccagttcacagacggattttatatgcaatgcatgagtcaggctatgagtggaataagcaacatagaaagagtgctcgagttgttggtgatgttattggtaaataccatccgcatggagatcaagctgtttatgatgcgttggtcagacttgcccaagacttctcaatgagcgtgccactattagatggtcaaggtaattttggatcaatggatggtgatagggctgctgcaatgagatacacggaagttagaatggcaaaaattgctagtttccttctagaagatatagaaaaagaaacggtcgacttcagacctaattatgatgaaactgaaagtgagccatctgttcttcctgcaaaatatccaaacctacttgtcaacggtgcaggtggtatagccgttggta

SEQ ID NO: 295077 - DNA, 834 bp, Unknown
  Bacterial polypeptide expressing nucleotide sequence isolated from the Sargasso Sea
ccttatactaataacatttatcaaaaagacggaggaacacatcttcttggatttcgaagtgcattaacaagagtagtaaataaatatgcaaatgaacaaaacttgctaaaaaaaagtaaggtttctttatcaggagatgacgttaaagaaggattaacttcagtcctttctgtcaaaattcctgaccctaaattttcgtctcaaacaaaagataaattagtctcatcagaagttcgaaatattgttgaaactataattaatgagaagctgtctatttggtttgatcaaaatccatcgatttcaaaaattatcttaactaaaattattcaggccgcagtagcaagagatgtagctagaaaggcaagagaaaacgtaagaagaaaaggagccttagaattaacgggattgcctggaaaattagccgattgtcaaaactcaaagcaagatggtactgaactatttattgtagagggtgattcagctggcggatcagccaaacaaggcagaaaccgtgaaaatcaagcagtattgccacttagaggaaaaatattaaatacttttacagatcttaatggatcgaaaaagaatggaaatgcaagtgaattaagaactaaaagcttatcaaagatgatttcatcaaatgaaatagttacattgattaacgcacttggtcttgatccaaaaaatgaggatatagatctcaaagatttaagatatggaaaaataataataatgacagatgctgatgttgatggttcacatataagagcactattgttaactttttttaataataaaccatttgataaattaattgagtttggacatgtttat

SEQ ID NO: 295078 - DNA, 676 bp, Unknown
  Bacterial polypeptide expressing nucleotide sequence isolated from the Sargasso Sea
atggaaaatgagccaaatcctacctctaaaaataattcaatagagactattcaaattcaagatgaaatgaaatcctcctatttggattatgctatgagtgtaatcgtaagccgggcaattcctgatctacgagatggcttgaagccggtccaccgcagaattctatatgcaatgtatgagactggtaattcccacgataagccatatcgaaagtcagctcgcccagtgggtgatgtaatgggtaaatatcacccgcatggtgatagcgctatttatgatgctttggtccgtatggctcaggatttttctatgtccgctttgttaattgatgggcaagggaactttggctcaatagatggggactctgccgctgccatgagatatacagaggttagattggcaaaaattactgaaggtattctatcagatatagataaagaaacagtcgacttccaagataactatgatgggaaagaccttgaaccagcagtactacccgctaaatttcctaatttatttttaaatggggctggtggtatagcggttgggatggcgacaaatatacccccacataatttaaaagaattaataggtgcgacaaaaaaactaattaatgaaccaaatagtagccttgaggatttgctggatatagttcctggtcccgactttcccactg

SEQ ID NO: 295079 - DNA, 358 bp, Unknown
  Bacterial polypeptide expressing nucleotide sequence isolated from the Sargasso Sea
atgagttcatcatatctatcttatgctatgagcgtaattgttagtcgagctctaccagatgtaagagacggtcttaagcctgttcatagaagaatactttatgcaatgtataaaggtggatatgattggtctaaacagtttagaaaatctgctagaatagttggagatgttataggtaaatatcatccacacggagatcaatctgtttatgatgcactagtaagaatggttcaagatttttcaatgagtttacctttagtagatggacaaggtaattttggatctatagatggtgatccagctgcagcaatgagatatacagaaacacgtttatcaaaagtttctcaatatttaatcg

SEQ ID NO: 295080 - DNA, 679 bp, Unknown
  Bacterial polypeptide expressing nucleotide sequence isolated from the Sargasso Sea
ccacttaggggaaaaatactaaatacatttgtaaatgggaaaaaaaacggagaagatcaatctactaaagcactatcaaaaatgatgtcatcaagcgaaattgttaccttgattaatgcattaggtaccggttcaaaagatttcaatattgacaatttgagatatgataaaatcgttataatgacagatgcagatgtggatggatcacatataagaactctactattaacattttttaataattatccttttaatcaattgatcgaaaacggtcacatatatttagctcagccgccattgtttaaagtaacaaaagctaataaaagtatttatattaaagatgaaaaagccctagaagattatattttagaaatttctaaaatagacaaaaagataaaaaaaggttcttcggagtacaaaaaatttattcaaacccaaagagaaaaattatctattcaaaggtttaaaggattaggagaaatgaatcccgaagaattgtgggaaactactttaaatcctgataatagaactatgttaaaagttcaatatactaaaggaactaaagataaatcaaaagaggatcagaagatgattgaagttttgatgggagatgaagttgctcctaggaaagattttataacaaacaacgccttagaagttactaatctagatatttaaa

SEQ ID NO: 295081 - DNA, 853 bp, Unknown
  Bacterial polypeptide expressing nucleotide sequence isolated from the Sargasso Sea
ggaggcacccacgaagaaggcttaagaacagcgataacaaaagcgattaatgactttgcaaaatcaagaaatcttcactccgacatttcattaactggcgatgacatcagagaaggaatcaccggagtgatttccgttagggtaaaagagccccaatttgaaggccagacaaaaacaaagcttggaaatacagaaatgaagtcaaaagttcaggttttagtcaataaagagctgccgaaatggttgtccaagaacacaaaagaaggaagagcaattgtggaaaggtgcgccgttgcagcaaaagcaagaatgagcgctaaaaaagcaagagaacttacaaaaagaaagagtatcttagaaacagctgggcttccaggcaagcttgcagactgttcgtctacagatccaattgaaagtgaattatttatagttgaaggagactctgctgcgggaccagcaaaacaggcaagggagtcaaaaacacaggcaatattaccaataaggggaaaaattattaatgtacaaaaagtcacagaaaatagagcacttcagaatgaagaaataagctcgcttataaaagcaataggtacaggaataaaagacgaatataaaggagaggaatcaaggtacggcaagataatatttttaacagacgctgatgttgacggagcccacataagaacacttttattaacgtttttctttaaattcatgccaggactaataaaagaaggcaaggtatggattgctgaacccccactttatagagcaaaatcctctggttcaataaactaccttaaagacgacaaatcgttagaagaatttaaaaaagaaaacaaaaataaaaaattcg

SEQ ID NO: 295082 - DNA, 337 bp, Unknown
  Bacterial polypeptide expressing nucleotide sequence isolated from the Sargasso Sea
aatggcaaataaaaatacataccaagcagattctatcaaagtgcttaaaggtttagaggcagtaagaaaaagaccaggcatgtatattggtgatactgatgatggaactggtttacatcacatggtatatgaagttgttgataactcgattgatgaagctctagcagggtattgtaaaaatataaaagtaagattaaattccgatggaactgtaactgttaatgacgatggtcgtgggatccctacagatatccataaaggagaaaaaaaatctgcagcggaggtaattatgacacaacttcatgctggtggaaaatttgaccatgattcttattaa

SEQ ID NO: 295083 - DNA, 934 bp, Unknown
  Bacterial polypeptide expressing nucleotide sequence isolated from the Sargasso Sea
  misc_feature (55)..(55): n is a, c, g, or t
gaaatcgcccacgagctgatggccgacctggaaaaagagacggttgatttcgtgnataactatgacggtacggaacgtattcctgacgtcatgccgacgaaaatccctaacctgctggtgaacggttcgtccggtatcgccgtcgggatggcaaccaacattccgccgcacaacctgacggaagtgatcaacggctgcctggcctatatcgacgatgaaaatatctccgtcgaagggctgatggagcacatcccgggtccggacttcccgactgccgccattattaatggtcgtcgtggtattgaggaagcttatcgcaccggtcgtggcaaaatttatattcgcgcccgcgctgaggtggaaaccgatgcgaagacgggtcgtgaaaccatcatcgtgcacgaaattccgtatcaggtgaacaaagcgcgcctgatcgagaaaattgccgagctggtgaaagacaaacgcgttgaaggcatcagcgcgctgcgtgacgagtctgataaagacgggatgcgcatcgtgatagaagtgaaacgcgatgcggtgggcgaagtggttctcaacaacctctactcccagacgcagctgcaggtctccttcggtattaacatggttgcgctgcaccatggccagccgaagatcatgaacctgaaagatattctttctgcgttcgtgcgccaccgccgtgaagtggtgacgcgtcgtaccattttcgaactgcgtaaagcccgcgatcgtgcgcatatccttgaagcgctggcgattgcgctggctaacatcgacccgatcatcgagcttatccgccgtgcgccaacgcctgcggaagctaaagctggcctgatcgcgcgtccatgggatctgggcaacgtggcggcgatgctggaacgtgccggtgatgatgccgcgcgtccggagtggctcgagccag

SEQ ID NO: 295084 - DNA, 894 bp, Unknown
  Bacterial polypeptide expressing nucleotide sequence isolated from the Sargasso Sea
tgttcctcttatttctggtcagggaaactttggatcgattgatggtgatcctccagccgcaatgagatacacagaaactaaacttggaaaaatatctcaatttttaactgaagatttagaaaaaaatacagtttcttttagaagtaattacgatgaaactgagaaggagccagaagttttgccctctcaatatccaaatattttagttaacggcgccggtggaatagctgttggtatggctacaagtatacccccacataaccttggcgaaattattaacgctacaatcgcttatattaataataaagatataacaatatcacaattaatgaaacatgtgccaggacctgattttccaacaggaggaataatcattggaaaagaaatcattaaacaaggttataacaaaggtaggggatcttttaaaataagaggcgaaatagagtttgaagaaaaaaaaggaggaagagaaactcttataatcaagtcaataccttttcaggtaaacaaatcaattctaattgaaaaaattgctcagctggtaagagataaaaaaattgaaggtatcagagatttaagagatgagtcaaatagagagggcataagagttgttattgaactaagaaaaggagttgaacctgaaactgtgagaagacagctttacaagcttacaaatattgaaagttcatttggttttaatactctagctattgtaaatgataagccaaaaattttaaatttaaaagagtttatatccgaatttcttaaatttagagaagacactgttgttaaaagagtaaaattcgatcttaaaaaagctgaagaccgtgcacatatattaattggtttggcagcagctgttgaaacattgatgaagttattaaattatcaaaa

SEQ ID NO: 295085 - DNA, 976 bp, Unknown
  Bacterial polypeptide expressing nucleotide sequence isolated from the Sargasso Sea
ggaaattatgggtcaatcgatggcgataacgctgctgcaatgcgatacacggaagcaagaatggcaaagctaagtatggagcttttgcacgacattgaaaaagaaaccgtatcattcacaaaaaactttgatgaatcacttgaagaaccaagtgtattgccatcacgattgccaatgttgctactgaatggatcatcaggaatagcagttggaatggcaaccaatattccaccacacaacttaacagaattaataaatggtgttaaccattttattgataatcctgaagcaacggttccagacttaatgcaacacgttacagggcctgattttccaacaagaggcataatctgtgggcaatctggcataatcagtgcatatgaaaccgggcgtgggatcattacagttcgatcaaaaacacatatagaagaaacaaaaaagaaacgagcgattattgttactgaaattccttatcaagtaaacaaagccaacacaatcatcaaaattgctgaattagtaaatgataaaaaaattaatggaatatcggatcttcgagatgaatctgacaaaaaaggactccgaatttacattgaattaaaacgtgatgcacaagaagcaattattttaaatcaactatttaaacacacgcaactgcaaacatcatttggcattaatattgttgcacttgtgaatgggcatcctaaaacattaaatttaagagaaatcttttatcattatgttgaacatagaaaagaagttattcgtaaacgaacagaatatgatttgaaaattgcaaaaaatagattgcacatattagaaggattacgaattgcattgcaacatattgatgaaatcattgcattaattaaacaatctgaaaacgcacatattgctcgcgaaaaactaatggaaaattataaactttctgaacgtcaagcaaccgcaatattagaaatgagactccaacgcctaacag

SEQ ID NO: 295086 - DNA, 895 bp, Unknown
  Bacterial polypeptide expressing nucleotide sequence isolated from the Sargasso Sea
tggaggaacacatttattaggatttagaagtgctctaactagagtaataaataaatattcaaatgatagaaatagcaaaaaaaataaagtttccctatctggagaagatatcaaagaaggcctgaccgcagtattatcaataaaaatgcctgatccaaaattttcatctcaaacaaaagataaattagtatcttcagagattcgtaatattgttgagcatattattggagagaaagtatcaacttggtttgatcaaaatccttcaacagctaaaacagtaatagaaaaaattactcaagctgctatggcaagagatctagcaaggaaagctagagatagcgttaggcgaaaaggaacctttgaattatccggacttcctggaaaacttgctgactgtcaaattcaaaaaagagagggtacagagttatttatagttgagggtgactctgccggtggttcagccaaacaaggtagagttcgtgaatttcaagctgtattaccattaagaggaaaaattctaaatacttttgttaatggaaaaaaaaatggagaagatcagtccaccaaggcattatccaaaatgatgtcctcaagtgaaatagtaactttaattaatgcattaggtacgggatcaaaagattttaacattgaaaatttaaggtatgataaaattgttataatgaccgatgcagacgttgacggctctcatatcagaacattgttgcttactttttttaataatcatccttttaatcaattaatagaaaatggacatatatatttagcacagccacctctttttaaagttacaaaagctaataaaagcatatacataaaagatgaaaaaaatttagaagattatattttagagtcagcaaaatttaataaaacataa

SEQ ID NO: 295087 - DNA, 704 bp, Unknown
  Bacterial polypeptide expressing nucleotide sequence isolated from the Sargasso Sea
aatgagtgaatcgaactataattcctccagtatcaaagtcttgaaaggactggatgcggtgcgaaagcggccaggcatgtacatcggggataccgatgatggcactggcctgcaccacatggtctttgaattggtggataactccatcgacgaagcgcttgcgggctactgctcagaaattggtgtgattatccacccggacgaatcggtaaccgtgaaagacaacggccgtggcatcccggtggacctccacgaagaggaaggcgtttctgccgcggaagttatcatgaccgtgctgcacgccggcggtaagttcgacgataattcctacaaggtgtccggcggtcttcacggcgtgggcgtctcggtagtcaacgcattgtcctctaccctcaccctgaccattcgtagagacaacaaggtttacgagcagacctatacccacggtgttccaaatgcgcctctggcagctgtcggcgagaccgacgcatcgggtaccaaggtgcatttcattccttcgccggaaacctttacccacattgaatttcattacgacattctcgccaagcgtctacgtgagcttgcgttcctgaacagtggcgtgcgcatacgtctgaccgacgagcgttctggcaaggaagaagttttcgaatatgagggtggtctgcgggcatttgttgagcatctgaacgctaacaaaaccc

SEQ ID NO: 295088 - DNA, 397 bp, Unknown
  Bacterial polypeptide expressing nucleotide sequence isolated from the Sargasso Sea
aatggaaaaaatagaatctaatttagataaaaagcaatataagccaattgttgtttatgatgagatgagctcatcttacttgtcgtatgcaatgagtgtaatagtaagtagagctctacctgatgtaagagatggtttaaagcccgtccatagaagaataatttatgctatgtataaaggtggttttgactggtcaaaacagtatagaaaatctgctagggtggtaggagatgttattggtaagtatcatccacatggagatcaagctgtatacgacgctttggtaagacttacgcaaaatttttcaatgagcctcccattaatcgatggacaaggtaattttggttcaattgatggagatccaccagctgcaatgagatatacagaaactaaatta

SEQ ID NO: 295089 - DNA, 382 bp, Unknown
  Bacterial polypeptide expressing nucleotide sequence isolated from the Sargasso Sea
atgtcagaagaatttaaagatggacatatatcaaaaattgacatagttgatgaaatgtcagaatcatatttgaattattcgatgtcagttattgttagtcgtgcattaccagatgtcagagatggtttaaaaccagtgcatcgtagagtcttatttggtgcttccgatttaggtgcaacatggaatagaaaatataaaaaaagtgcacgtattgttggagaagtaatgggtaaatatcatccccatggagatgcatcaatttatgatacattagttcgaatggcacaaacttggtcattaagatatccattaatggatggtcaaggaaattttggatccattgatggtgataatgctgcagcaatgagatatacagaagcta

SEQ ID NO: 295090 - DNA, 348 bp, Unknown
  Bacterial polypeptide expressing nucleotide sequence isolated from the Sargasso Sea
tatgagcgaagaaagcggtgaaagaatcataccagtaagtattgaagatgaaatgaaaactgcctacattgattattcaatgtcggttattgtttctagagcattacctgatgtaagagatggattaaagccagtgcatagaagggtgttgtacggtatgcaagaactcggtgtaagagctaatagctcgtacagaaaatctgctagaatagtgggtgatgtactgggtaagtatcaccctcatggtgattcatctgtttacgatactatggttaggatggctcaagaatggtctttaaggtatcctttagttgatggtcaaggtaactttgggtctgttgatggcga

SEQ ID NO: 295091 - DNA, 549 bp, Unknown
  Bacterial polypeptide expressing nucleotide sequence isolated from the Sargasso Sea
aatggcttcaaaaaaagattatacaagcagcaatatcaaggtacttaagggtcttgaggctgttagaaaaagaccaggtatgtatattggtgatacggacgatggaactggtcttcaccatatggtattcgaggttgtagataactcaatagatgaggccctcgccggccattgtgatttaatttcggtaacaattcattcagacgagtcaatcacagtctcagacgacggccgcggtgttccggttgatatgcatccagaggagaaaagatcggctgcagaagtaatcatgactgttttgcatgctggtggcaaatttgatgataattcctataaagtatctggaggacttcacggcgtcggggtatctgttgtaaatgcattatcagaaacactgaccttaacgattaatcgagataataaaacctataaacaagaatataaggaaggtgaaccattagcgccaataaaagctgttgggaaatcatcacaaacaggtacgaccctgaagttcaagccgagcgaaaaaacctttagcaatattgagtt

SEQ ID NO: 295092 - DNA, 906 bp, Unknown
  Bacterial polypeptide expressing nucleotide sequence isolated from the Sargasso Sea
aaattttcatctcaaactaaagataaattagtttcttcagaagttagaaatattgttgaaaatattattagtgaaaaattatcaatatggttcgatcaaaatccatctatttcaaagataattttaactaaaattattcaagctgctgttgcaagagatgttgcaagaaaagctagagaaaacgttagaagaaaaggtgctttagagcttactggattgcctggtaaattagcagactgccaaaattctaagcaagaaggtacagaattatttatagtagaaggagattcagctggaggttcggcaaaacaaggaagaaatagagaaaatcaagcggtattacctcttaggggaaagatattaaatacatttacagaaataaatttatctaaaaaaaatggtaattccaatgatttacgaacaaaaactctttcaaaaatgatttcttcaactgaaattataactttaattaatgcattaggattggatccaaaaaatgaagaggtagatataaaagatttaagatatggaaaaattataataatgaccgatgctgatgttgatggatcgcatattagagctttactactaactttttttaataataaaccatttagtaaattaattaaagaagggcatatctatttagcacaacctcctctatttaaaattaataaaggttctaaggggatatacataaaagatgaaaaagaacttgaaagttttattataaaaaattcgagagatttaaaaaaatataaaaaaggttcaaaagattatgaaaagtttttgcaaatcgaaaaaaataaattaaatattcaaagattcaagggattaggagagatgaatccagaagaactttggagcacaacattaaatccagaaactagaaatttacttcaagtt

SEQ ID NO: 295093 - DNA, 868 bp, Unknown
  Bacterial polypeptide expressing nucleotide sequence isolated from the Sargasso Sea
agtctttaaatcaaataatcaaaaaacccctcaaataaaagatagtgaactttttgaaataattaagggtcctgattttcccacaggtggtcaaatcttaggcagagacggtattagagaaacattcaaaacaggaagggggtcaataacaatgagaggggtagcaaatattgagcaaattaaatccattggtagagcagagaaagatgctgtaataattacagagcttccatttcaaaccaataaagcggccttgatagaaagaattgctgatttggttaatgaaaaaaaattagaaggtatttctgatattagagatgaaagtgatcgagatgggatgaggattgttattgaactaaaaagagatgcctacccacaagtagttttaaataatttatttaagttaacacctttacaaaataactttagtgcaaatatccttgcattagtaaaaggagagcccacaacactttcacttaggaaaatgttagacgtttttctagattttagggttgagacaataaggcgaagaacaacatttttattaaaaaaggcagaagaaagagatcatattgtaaaaggtcttttattggccttagatgctatggatcaaattataaacctaataagatcagcgaaagattcaatatcagctcgagaaaaattacaaaacgaccataaattatcttccatacaggcagatgcaattctacaaatgcagttaagaagattaacagcattagaagcagataaaatcaaaggagaacataatgagttaactcgaaaaatcaatctatatcagcaaatattaaatagtaaagaaagaatttttgaaattattcttgaagaacttcataaaattgatgaa

SEQ ID NO: 295094 - DNA, 805 bp, Unknown
  Bacterial polypeptide expressing nucleotide sequence isolated from the Sargasso Sea
aaaaaagaaggagtatcagcagctcaattaattatgaccacccttcactcaggaggaaaatttgatgacaatagctacaaagtttctggaggtcttcatggtgtaggagtctcggttgtaaatgccctttcaaaaaaattaaccttagaagttcatcgtgatggtggagaatattttcaggaatacagcgaaggtaagccaaaagcaaaattaaaaaaaataaaaaagtcagataagacaggaactataataaccttccatccatcaaataaaatttttacttcaacagaatttgatatagaaaaaatttataaaagaattcaagagttgtcatttttaaatgctggtgtgtcaattaatgttgaggacaagagaacaggcaaatctcgtaaatttaaaaataatggagggctctctagttatgtaactcacctaagaggaagaaaacaaattgtttctgatatctttgagtgctcagctgaagaaaatgaagttggtgttgagatcgcaatgcaatggacagattcatactcagaaaatgtattatgttataccaataatataccccaaaaagatggtggcacccatttggctggctttagaggtagcctaacaagggttttaaagtcatttattaagaaagaaaatgctaaaaagacacccacagaccttcttggagaagatgtaagggaggggctaatagcaataatatctgtaaaagtaccagatcctaaattttcatcacaaacaaaagaaaaacgtgtttcatctgaggttgagggcgtagttagcactatttttaata

SEQ ID NO: 295095 - DNA, 238 bp, Unknown
  Bacterial polypeptide expressing nucleotide sequence isolated from the Sargasso Sea
atgattaaaaaaacaaaaaattcatcataccaagcagactcaataaaagtacttaaaggtttagaagcagtaagaaaaagacctggaatgtatattggtgatacagatgatgggactggtttacatcatatggtttatgaagttgtcgataactctattgatgaagcattggcagggcaatgcagtaatattgaaattacaattaattctgatgggacagttacagttagggacgacg

SEQ ID NO: 295096 - DNA, 498 bp, Unknown
  Bacterial polypeptide expressing nucleotide sequence isolated from the Sargasso Sea
gatgagttcatcttatctatcatatgcaatgagtgtaattgtaagtagggctcttccagatattagagatggactaaaacctgtgcacagaaggatattatacgcgatgtataaaggtggatatgattggtcgaaacaatttagaaagtctgcaagaatagttggagatgtaattggtaaatatcacccacatggtgatcaatcagtttatgatgctcttgttcgaatggttcaggacttttcaatgagtttacctctcgttgatggtcaaggaaattttggatctatagatggagatccagcagctgctatgagatatacagaaactagattatcaaaagtttcacaatatctaattgatgacattgaaaaaaatacaattgattttaaaagcaattatgatgaaacagaaaaggaaccatctgtattaccagctcagtttccaaatttattagtaaatggtgcagggggtattgcagttggtatggctaccagcat

SEQ ID NO: 295097 - DNA, 498 bp, Unknown
  Bacterial polypeptide expressing nucleotide sequence isolated from the Sargasso Sea
aatgagcaaccaacagtcatataaagcagattcaattaaagttttaaaaggtctagatgcagtcagaaaaagacccggaatgtatattggtgatactgatgatggtactggcttacatcacatggtctacgaggttgttgataattctatagatgaagcattagcaggtcactgtaaaaatattgaaatagatattaataatgatggaacagttactgtccgagatgatggacgtggtattccagtagatttacataaaggagaaaaaaaatctgctgctgaagtaattatgacccaactacatgctggtggaaagtttgatcacgattcatataaagtatcaggtggattacatggcgtaggagtatcagtagttaatgcattatctgaaaaactggaattagaaattaatagagacggaaaaaaatattttatagagttcaaaaatggaaatgcaaaatctgatttaaaagttgtaggaaaatcaaaaattactgg

SEQ ID NO: 295098 - DNA, 574 bp, Unknown
  Bacterial polypeptide expressing nucleotide sequence isolated from the Sargasso Sea
tacacttataaatgctttgggggaaccggttcaaaagacttcgatattgagaatttaaggtatgaaaaaattattattatgacagatgcggatgtcgatggttcacatataagaactttattattaacttttttcaataacaagcccttcaatgaactaatagaaaaaggtcatttatacttagcgcagccgcctttgtttaaggtgacaagaggaacaaaaagtacatatataaaaaatgaaaaagacttagaaaaatatattttaaaattctcagaaaatggggcaaaaaaattgaaaaaatctgacttagagaaatttttaaacgacgaaaaacaaaaattaaatatccaaagattcaagggtttgggagagatgaacccagaagaactttggcaaacaactttaaatcctgaaaatagaacacttttaaaaattgagtattctaaaggcagtaaagaaaaatctaaggaagaccaaaatataattaaaatacttatgggagatgaagtagctcctagaaaagattttataactgaaaatgccttagaggtagaaaacctagatatttaag

SEQ ID NO: 295099 - DNA, 883 bp, Unknown
  Bacterial polypeptide expressing nucleotide sequence isolated from the Sargasso Sea
aagtccggtttgcttgatgcattaaaagaattttgtgaatacagaagtcttttacccaaaggacttaagctgaacactgaagatgttattacaaatgctatatttgttgtatcttcaaagatgcaaaatccgcaatttgcaggacaaacaaaagagagacttgattctaaagaacatatgtcttttgtaagcagctcaacaaaagatgttctaagtatttggttcaataaacacacagaagaaggagagaagattgcagaacttgcaataatttcagcacaaacaagagcaaaagcttcaaatactgttgaaagaaaaaaaactttcaaaggtccagcattgcctggaaaattgtcagattgcaacagtgaggatttaaatgagacagagctatttttggttgaaggagattccgctggtggttctgcaaaacaagctagagaaagatcatttcaagcaataatgccattaagaggaaaaattcttaatacatgggatttagaaagtgatgaaattattaaatcacaagaaattaaaaatctatctaccgcaataggagttctgccaggtgattcaaatattgcctcattaagatatggaaaaatttgtattcttgctgatgcagattcagatgggcttcacatagcaactttactttgcgctctctttttaagacatttcaaaagtcttgttcaagaaggaagaatctttattgctatgcctcctttgtttagaatagattgtggaaaagatgtaatttatgcacttgatgaaattcaaaaagagaaggcaacaaaagagttcaaagctaaaaaaggcaaaccaaaaattaatatacaaagatttaaagggttgggagaaatgaatccctcccaattaagag

SEQ ID NO: 295100 - DNA, 923 bp, Unknown
  Bacterial polypeptide expressing nucleotide sequence isolated from the Sargasso Sea
ttggatagatcaaaagtatctctaattaatgaacctattttcatatatggagaaaaagacggaatctcccttgaggtagcactttggtggaatagtgcatacaacgagttggtcctgccattcacaaacaatatacctcagggtgatggaggaactcacttagctggatttagaggtgcattgacgagaaccgttaacatgttcgtaggatcgcttgggtcaaaaactaaagataaagttagtgttacaggtgatgatgcaagggagggcctaacctgcgttttatctgtcaaagttccagatccaaaattttcgagtcaaacaaaggataagttagtgtcttctgaggtaaggcctgtagtggaaagttttgttaatgaaaaattatctgagtggtttgaagaaaatccaagtgatgctaaaatagtggtaggtaaagtaatagaagcagccattgctagagaagcagcaagaaaggccagagaactaactaggaaaaaaaattccatagatgttgcaaacttaccaggaaaacttgccgactgtcaggaaaaagatccgacgaaacgcgaaatttttatagttgagggagatagtgctgggggtagtgcgaagcaaggcagatctcgaaagaatcaagcggtgcttcctctcagaggaaaaatactgaatgtagaaagagcaaggccagataaaatgctatccagccaagaaataggaactttgataacggctttaggtactggcataggtaatgatgattttgacattgaaaaattaaggtaccataaaattattataatgacagatgctgatgtagacggcgctcacatacgaactttgttgctgactttcttttttcgaaagatgccagagctaatcgaaaaaggacatatttttattgctgagccaccactatataa

SEQ ID NO: 295101 - DNA, 808 bp, Unknown
  Bacterial polypeptide expressing nucleotide sequence isolated from the Sargasso Sea
aatgagtgtaattgttagtagggcattaccagatataagagatggattaaaacctgttcatagaagaataatatatgctatgtacaaaggtggttttgattggtctaaacaatttagaaaatcagcaagaattgttggtgatgtaattggtaaatatcatccccatggtgatcaagcagtttacgatgctttagtgagaatggttcaagagttttcaatgagtgtaccattaatagatggccaaggaaattttggctcagtagatggagaccctcctgcagctatgagatacacagagactaaactttcaaaaatttcacaatttttaatagatgatattgaaaaaaatactgtggattttaaaagtaattatgatgaaacggaaaaagaacctgttgttttaccagctcaatatccaaatttattggtaaatggtgctgggggtatagctgtaggtatggcaactagtatacctccgcacaatcttggtgaggttattaatgcaacattagctttaataaataataaagatattaagattaatgaattaatgaaacatatacctgggccagattttccaactggaggtacaattattggtaaggatattattaaaacaggatataaaactggaagaggttcttttaaaataagaggtgatataaacatagaacaacttaaaaacggcaaggaaagacttgtgattgcgaatattccttatcaaataaataaatcaacattaaatgaaagaattgtagaattaataagagataaaaaaattgatggcataagtgatataaagagatga

SEQ ID NO: 295102 - DNA, 694 bp, Unknown
  Bacterial polypeptide expressing nucleotide sequence isolated from the Sargasso Sea
caacaggctcaggcgatccttgagctgcgcttacaccgtttaactggtcttgagcacgataagatcatcgccgaatacgaagagctgctcgagtttattgcaggtctgctgtttattctgcgcagccctgagcgtttgatggaagtgattaaagaagagctggaagaaattctggctgaatacggtgatgctcgccgcactgtcatcaacgccaatgaaattgatatgagtcttgaagacttaatcaacgaagaagacgtggttgtgactctgtcacacttaggttacgccaagtaccaaccgctgagcgattaccaagcccagcgccgtggtggtaagggtaaagccgcaactaaagtgaaagacgaagatttcgttgaaaaactgctggttgcgaacacccacgataccattctgtgcttctcagacttcggtaagatgtactggctcaaggtctatcaattaccgctggcgagccgcacatcgcgcggtcgtccgattgtcaacttactgccgctgtccgatggagagcgcattacggcgattctaccggtgcgtgaatacgcagaagataagtacatcatcatggcgacctctaacggtaccgtgaagaagactgcactgacggcttacagcaacccacgtgctaacggcattatcgccgtgaacctgaaagacggtgaccaactgatcg

SEQ ID NO: 295103 - DNA, 931 bp, Unknown
  Bacterial polypeptide expressing nucleotide sequence isolated from the Sargasso Sea
aattattatcatgactgacgctgacgttgatggttctcatatcaggacactcttattaacattcttttacagagagcttcaagatcttatcaacggcggctacttgtatattgcacaaccacctttatataaacttaaaaaaggtaagaaagaggagtatgttttaactgacgatgaacttaatagtttaatacttagcaatgctgttaagggcacggaggtcaggtcaaaaaataagaaaaaaggtattgagggagacggactcttgaacaccattcttgattattctaattcattgtctgtgattgaaaaaattgagaaacaggcaggaactattgctgcaaaagcaatatcagttcataaaccaattaccaaaacagaagctaataacaaaaagaaactagagacttggattaagggcctatcaagaactgcatcaaagatagcaaaagagaaaggatataaggcatctgtaagtatagactacgacgatgatggaataggctacataaacacagaagaagaaattggcggtgtaacccatcatggcaagattgctaactcttttttaagatctaacgattacaaaatttttggccgagttcaaaaagcacagaaagcattcccaggccctgttgtcattgataacggatctgaaattacagaatatgcgaacattgaagattgtctaaaccaaattgttaacacgtctaaaagaggccttaatgttcaaagatataaaggtcttggcgagatgaacccagaccaactttgggaaacaacacttgacccaaccacaaggtctttgttgcaggttaaggcggacgacgatgcaggcctgacctttgaaaccctaatgggtgacgaagtacctcccagaagagagtttattgaagaaaatgccttaaatgcaggaaatgttgatatataa

SEQ ID NO: 295104 - DNA, 937 bp, Unknown
  Bacterial polypeptide expressing nucleotide sequence isolated from the Sargasso Sea
atcaaagaaggactaatatgcgtgctatcaataaaaattccagatccaaaattttcttcacaaacaaaagataaactagtttcctcagaagtaagaaatgttgttgaaacaattataaatgaaaaactatcagtttggtttgatcaaaacccatctgtaacaaaaattgtattagcaaaaattgtacaggcagcacttgcaagagatgttgctaggaaagcgagagagaatgttagaagaaaaggtgccttggagttgactggattgccaggaaaattagctgattgtcaaaattctaagcaagagggtacagaattgtttatagtagagggagattcagctggaggttcagctaaacaaggaagaaatagagaatttcaagcagtacttcctttaagaggaaaaattttaaatacttatacaagctcaaatggtaataaaaaaaatggaaatggaaatgaagtcagaaccaaaaccttggctaaacttatttcatcaaatgaaatcgtaacattaataaatgcattaggtttagatcccaaagatgaagaaatagatttaaaagatttaagatatggtaaaattattatcatgacagatgctgatgtagatggctctcatattagggcattactacttacattttttaataataaaccattcaataaattaatagaaaatggacatatatatttagctcagcctccactatttaaaattaataaaggatccaaaggtatttatataaaagatgagaaggagcttgaaaaatatattttagaaaattctaaagtattaaaaaaaataaaaaaaggatctaaagaatttgaaaaaagatttcaggaggaaaagtcattagtaagcattcaaaggtttaaaggtttaggcgaaatgaatccagaagaactttggaatacaacacttgatcccagctcaa

SEQ ID NO: 295105 - DNA, 560 bp, Unknown
  Bacterial polypeptide expressing nucleotide sequence isolated from the Sargasso Sea
tgttgaaaaagcaagaattgataaagttctttcttcacaagaaataggaactatggttactgctttaggatgtggaattggaagagatgattttgatatttcaaaacttagatatcacagaatcataataatgacagatgccgatgttgatggatcacacataagaaccctgctcctaacttttttctatagacagatgtttgagattgttgaaagcgggcatatttatatagcgatgccacctttgtataaaatcacaaaaggcaaaacagctttatattcatcaaatgaagccgaaaaagaaaaccacgttaaagaactttctaaaggaggcaccaaaggtctcgaggttcaaagatataaaggtcttggcgagatgaatcctgatcagctatggtcaactactatggatcctgataacaggagaatgatgcaggtaaccataaaggatgctaaggaagcagatgatgcttttgaagtcctgatgggtgatcaagtagagccaagaagagagtttatagatgctaacgctttgtcagtatctaatttagacatttagc

SEQ ID NO: 295106 - DNA, 874 bp, Unknown
  Bacterial polypeptide expressing nucleotide sequence isolated from the Sargasso Sea
aaatcaaaacaaacaggaacccaaattacattcctgccctctaaagacattttctcatcaataaaatttagctcaaatgtgcttattaaaagaatgagggaattagcttttttaaacaaaggtctgaagatattattcaccgatgctagagaaaaaaaaataaaaactttagaattcaagtttgatggtggtttaatagagttcgtagattttctagatgaaaaaagagaaaaactacttaataaaaatggaaatgatttatttaaaaaaccaatttatatagagggaaaaaaaaataatattgaattagagtgttccttaaagtggaacgctggctattcagaagatattttcccatatacaaacaatattcatcaaaaagatggaggaactcacttattaggttttaggagtgcattgaccagagttatcaacaaatatgccaacgaaaataatttattgaaaaaaaataaattagcaatctctggtgatgacatcaaagaaggacttacttgtatcttatcaacaaaaattcctgatccaaaattttcttctcaaacaaaagataaacttgtttcatcagaagttagaatgattgttgaaacaataattaatgaaaaattatctatctggtttgatcaaaatccctcaatagctaaaataattttagcaaaagttattcaagcagcaatggctagagatgttgctagaaaagcaagagaaaatgtaagaagaaaaggagctcttgaattaagtggcttacctggaaaattagcagattgtcagataggaaaacaagaagggacagaattatttatagttgaaggagactcggcaggaggatctgctaaacaaggcagaaatagatcaaatc

SEQ ID NO: 295107 - DNA, 403 bp, Unknown
  Bacterial polypeptide expressing nucleotide sequence isolated from the Sargasso Sea
catattaggacacttcttttaacattcttttacaggcaaatgtatgaaattgtagaaaaagggtatgtttacatcgccttaccacctctatataaaattactaaaggtaaggagtttgtttatgcttccgatgaatctgaaaaagatgatgctattaaaaaactttcaaaaaatggtaatagaggcttagaagttcagagatataaaggtttgggtgaaatgaatccagagcaactttggacaacaaccatggaccctattaatagaagaatgatgagggttgacatcaaggatgtacaggatgctaacgaatcatttgaaatattgatgggtgatgatgttgagccaagaagagagtttatagacgctaatgctttatctgtaaaagagttagatatttaat

SEQ ID NO: 295108 - DNA, 931 bp, Unknown
  Bacterial polypeptide expressing nucleotide sequence isolated from the Sargasso Sea
tgtgaaaggtcaaagaaattttggatcaatagatggtgatcctgctgctgctatgagatataccgagaccagactttcaaaggtatctcaatatttgattgatgatatagaaaaaaatactgtaagtttcaaaagtaattacgatgaaacagaaaaggaaccatcagtgctacctgcgcaatttcctaatctattagttaatggagctggaggaattgctgttggtatggcaacaagtattcctccacataatttaggagaagtaataaatggtactttagcactcattgaaaataaagatattaagattaaagatttaatgaaacatattccaggtcctgattttccaacaggtggtgtgattattggtaaagatataattaaacaaggatataataaaggtagaggctcttttaaaattagaggtgaaatttcaatcgagactttaaaaaatggaagagaaagattagtgataacctcaataccttatcaagttaataaatcagttttaaatgaaagaatagctcaattagttcgagaaaaaaagattgaaggaattagagatataagagatgagtcaaatcgagaaggtatcagagtctcaattgatctaagaaatggtgttgagccagagacagttaaaagacaactttataagaatacacaaattgaaagttcttttggatttaacacattagcaattgtagatggaaaaccacaaacttgtaatttaaaagaattcttatcaaatttcttaaattttagagaagatgttgtaattaaaaaaacaaagtttgatttacaaaaagcagaagaaagagcccatatattaattggcttatctgtatcagttgaaaatttagataaaataataaaaattattagaagctctaaaacacctgatgaagcaaaaaaaactatcttaaagaat

SEQ ID NO: 295109 - DNA, 708 bp, Unknown
  Bacterial polypeptide expressing nucleotide sequence isolated from the Sargasso Sea
tatggcagaaggtgaaaaattaattccaataaatattgaagaagctatgaaatcggcttacattgattattcaatgtcagtgatagtttcaagagcacttcctgacgttagagacggtttaaaaccagttcacagaagagttcttttcggaatgagtgagttaggtttgagatcaaatagtaagtataaaaaatcagcattcattgttggtgaggttttaggaaaatatcaccctcatggtgatagctctgtctatgatacaatggttagaatggcccaagagtggagtctaagatatatgttagtcgatggtcaaggtaattttggatcaattgatggtgatagcccagctgcaatgagatacacagaggctaggcttaagaagatttctgaggagatggttgaggatcttgataaagatactgttgattttcaactgaattatgatgattctataaaggaacctaccgttctgccaactaaaattcctagcttacttgtcaatggtgcttcagggattgcagttggtatggctactaatatgcctccacataacttatccgaagtaattgatggtacagttgcttatatcgatgataataatattgaaatagatgagctttataagcatgttaaagctcctgattttccaacgggtggtgttatttatggttatgatggtgtaaaaaatgcctttgagactggaaa

SEQ ID NO: 295110 - DNA, 275 bp, Unknown
  Bacterial polypeptide expressing nucleotide sequence isolated from the Sargasso Sea
aatgataaaaaaaaatacaaacaattatcaagcagactccattaaagtgcttaaaggtttagaggctgttagaaaaagaccaggcatgtacattggagacactgatgatggaactggtttgcatcatatggtttatgaggttgttgataactcaattgatgaggcattagctgggcattgtaaaaatatagaagttaatatcaactctgatggatcagttactgtcaaagatgatggaaggggaattcccacagatattcataaagaagaaaaaa

SEQ ID NO: 295111 - DNA, 508 bp, Unknown
  Bacterial polypeptide expressing nucleotide sequence isolated from the Sargasso Sea
ctcgttaccgccttaggttgtggtatcggaacggatgagtttgatgttgataaactaagatatcacagaataattataatgaccgatgctgatgtagatggatcacatataagaactttgcttctaacatttttctttaagcaaatgcttcaaattattgaaagagggcatatttacatagcattgcccccgctatataaagttacgaaaggtaaaaaggctatatattgctcatcagaagtggaaaaaaataatgcattaaaagagttatctaaaagcggaaacagaggcattgaggttcaaaggtacaagggtttgggtgaaatgaaccctgatcaattatggacaactacaatggatccagaaaatagaagaatgatgaaagtaacagttgaagacgcaattgaagcaagagaaatgtttgaaactcttatgggagacaatgtggagccaagaagagagtttattgatgaaaacgccctttctgttgcaaatttagatatttagt

SEQ ID NO: 295112 - DNA, 559 bp, Unknown
  Bacterial polypeptide expressing nucleotide sequence isolated from the Sargasso Sea
atgccaaaaacaaagaaaagcactaacaccaaaaaatacgactcttctaatataaaagtcttgaaaggccttgatgctgttcgaaaaagaccgggaatgtatattggcgacacagacgatggaacaggcctgcaccatatggtctacgaagttgttgataattccgtcgatgaagcgctagcaggatattgttcagaaatatctgtaataatccatcaagatgactctataaccgttaaagacaacgggagaggcgtgcctgttgacaaacacaaagaggaaaataaatctgctgctgaagttattatgaccgttcttcatgccggcggtaagtttgatgacgactcttataaggtttctggcggactccacggcgttggagtctcggttgtaaatgctctttctcagactttaagtttacgaatccataaaaatggaaacatatacgaacaagattatgctcatggagcgccaaaaaaaccacttaagaagggtgcaaagaccaatagaacaggaacaaccatatcgtttcagcctagtaaaaaaactttttcaaaca

SEQ ID NO: 295113 - DNA, 898 bp, Unknown
  Bacterial polypeptide expressing nucleotide sequence isolated from the Sargasso Sea
caagcagctctagcgagagatgtgcaaagaaaagcaagagaaaatgttagaggaaaaggagctctagaattgactggattgccaggaaaattagcagattgtcaaaattcaaaacaggaaggcacagaattatttatcgtagaaggagattcagcaggcggatcagcaaaacaaggtagaaacagagaatatcaagcagttcttccactaagaggaaaaattttaaatacttatactagcaccaatggatcgaaaaaaaatattaatggaaatggaaacgaaattagaacaaaaactctggcaaaattaatttcttctaatgaaatagttactttaataaacgcactcggtttagatccaaaaaatgaagaaatggatataaaagatttaagatatggaaagataattattatgaccgatgctgatgttgacgggtcacatattagagctttgcttttaactttttttaacaataaaccatttaataaactaatagaaaatggaaatatttatcttgctcaaccacctttatttaaaattaataaaggatctaaaggaatttatattaaagatgaaaaagagctcgataattatattataaaaaattcaaaagaatttaaaaaaataaaaaaggggtcaaaagattttgaaaaaaaattacaagaggaaaaatctaaaataagcatacaaagattcaagggattaggagaaatgaatcctgaagaattatggaatactactttaaaccctgaaactagaaatttgctacaagttaagtattcaaaagatttaaaaaaagattatgggctaattcatacacttatgggtaacgatgttgctttaagaaaagattttattgtagaaaatgccattaatgtatcaaacctagatgtttagt

SEQ ID NO: 295114 - DNA, 763 bp, Unknown
  Bacterial polypeptide expressing nucleotide sequence isolated from the Sargasso Sea
tctgaggagtgacaggaggtcacaaattgtttattatgaggtagaggaacataaagtgaaaaatgagcagatagagaatagctacgatgcagattctataaaagtcctcaaaggattagaggctgttaaaaaacgtcctggaatgtatattggggatacggatgatggatctggattgcaccacatggtgtatgaagttgttgataattgcgttgatgaagctttagcaggacactgtgatgaaatcacagtgtctcttaaagaggggtccaatgtcacggttactgataatgggcggggtatacctactgatattcatccaggagagggcatttctgctgctgaagtgattatgactcaattacatgccggtggtaaatttgatcaaaattcctacaaggtttctgggggattgcatggagtcggagtatctgttgttaatgcactgtcagaatttcttgagctaaaaatttggagagatgggctggaacatattgcaacgttcgaaaacggtgccacaataagaagcttagaatctataggcccagctaaatctagatctggaacccaaattacatttcgtccttctaaagatattttttcaaatatcaatttcagtatcaagactcttgaagctcgattgagggaattagcctttttaaatgcaggactgacaatagtgcttgtggatgaaagggaaaaagacggtaaaagaataaaaatgcattatgagggtggtgtctgtgaatttgtaaatacatag

SEQ ID NO: 295115 - DNA, 817 bp, Unknown
  Bacterial polypeptide expressing nucleotide sequence isolated from the Sargasso Sea
actttcatggcgtctccagatatgtttgcaacaattgaatatgaccgcagcaccttggaacatcggcttagggagctagcatttttaaattcaggcgtggctttaaagctcatagacgcacgtgaggttgataccattgaggtagatcttcattatgagggcggtttgagggcatttgtggattatttagatcgttcgaagtccgccttaaacgagcacatcatcgctatttctggtgaacgagaaggaataactgtcgaaatagcaatgcagtggaacgatagttatcacgaaacgaccttatgttttactaacaatattcctcagcgtgatggcggtacgcatttagcggggtttcgcggcgctttaacgcggaccattaatgcttatgctgcttcatctggtatggcttctaaagccaaggttaacataactggagatgatgcacgtgaaggcatgacgtgtgtcctctctgtgaaggtgcctgatcctaaattttcttcacagaccaaggataagctggtttcctcagaggtgcgtccggtagttgaaagcttggtcggtgagggtcttggccgttggtttgaagagcacccgacggaagccaaaaaagtgattgggaaaattgctgaggcggccgttgcccgagaggcagctcgcaaggctcgggaactaactcggcgcaaaggggcgctagatataaattcgcttccagggaaattagccgattgtcaggagcgggatcctaccttatctgaattattcatcgtagagggtgattctgcggggggatctgcgaagcagggccgaaatcgag

SEQ ID NO: 295116 - DNA, 697 bp, Unknown
  Bacterial polypeptide expressing nucleotide sequence isolated from the Sargasso Sea
aatgagttcatcatatttatcttatgctatgagtgtaataattagtagagcactcccagatgtaagggatgggttaaaacctgtacatagaagaatactttatgcaatgcacaaaggtggttttgattggtcaaaacaatttagaaaatctgcaagaatagttggggatgttattggtaaataccatcctcatggagatcaagctgtttatgatgctttagtgcgaatggttcaagaattttctatgagtttaccccttattgatgggcaaggaaattttggttcaatagatggagatccaccagctgctatgagatatactgaaactaaactagctaaggtttcgcaatttttaattgatgatattgaaaaaaatacggttgaatttaaaagtaattatgatgaaacagaaatagaaccaacggtacttcccgctcaatatccaaatttacttgttaatggggctggtggaattgccgtgggtatggcaactagtattcctccgcataatttagcagaaattatagatggaacacttgcgttaattaataataaagacataaaaattaaagaattaatgaaacatattccgggtccagattttcctaccggtggtattattataggaaaaaatattattaaagaaggttataaaagtggaagaggttcatttaaaataagaggtgaaatttcagta

SEQ ID NO: 295117 - DNA, 310 bp, Unknown
  Bacterial polypeptide expressing nucleotide sequence isolated from the Sargasso Sea
atggcaaaaaacaacagtacttatcaggcagactccatcaaagtcctaaaagggcttgaagcagtgagaaaaagaccaggtatgtatataggcgacactgatgatggcacaggtcttcatcacatggtctatgaagttgttgacaattctattgatgaggccttagcaggtcactgtaaaaatatttcagtagatattaatcaagatggatcagtaacagtcagggatgatggtaggggtgttccagttgatattcataagggtgaaaaaaaatcagcagctgaagttataatgacccaagttacatgct

SEQ ID NO: 295118 - DNA, 559 bp, Unknown
  Bacterial polypeptide expressing nucleotide sequence isolated from the Sargasso Sea
ttgaaaaaaacagatgatgcaaaaatatataaaaatacagaaattcaatcactaatcactgctttgggattgggtataaagggtgaagagtttaatattaattctctaagatatcatcgtgttgtaataatgactgatgcagatgtagacggggcacacattagaactttactattaacatttttttatagatatcaaagggatcttgttgaaaaaggtttcatatacattgcatgtccccctctatataaagttgaaagagggaaaaattataaatattgctacaacgaaaatcaattgaagaaaactatagaagattttggagaaaaagccaattataatatacagagatttaaaggtttaggtgaaatgatgcctaaacagttatgggatacaacaatgaatcctgagacaagaatgatgaaaagagtagaaattgaagatgctttagaagccgatagaatattcaatattttaatgggagataaagtcgctccaagaagagagtttattgaaactcatagtgcgaatttagacatggcgactttagatatatgat

SEQ ID NO: 295119 - DNA, 763 bp, Unknown
  Bacterial polypeptide expressing nucleotide sequence isolated from the Sargasso Sea
tctgaagtaagaccagttgttgaaagccttattaatgatcttttatctaattggtttgaagaacatccaaatgaagcaaaaattatagttgggaaagtagtcgaagctgctgctgctagagaagcggcaaggaaagcacgggatcttactcgcagaaaaggagctttagatatctcatcattacccggtaagcttgctgactgccaagaaaaggatccagaaaagtgtgaaatatttatagttgagggtgaatcggcaggaggatctgccaaacaaggtagagatagatctactcaagcaattcttccattaaagggtaaaattattaattgtgaaaaagctagattatcaaaagtcttatcttctaatgaaatagctacattaataacagcacttggaggaggaattggtaattctattaatgaagatgatgaagatgatgaaagtttcaaaacagaaaaattacgctataaaaaggtaattataatgactgatgctgatgtcgatggcgcacatataaaaactctactcttaacctttttttatagacaaatgagaccgttaataacagatggatgtttatatattgcgcaaccacctctttacaaagcaaagaaaggaaattcagaaacttatttaaaagatgatgatgatctggagaattatcttataaattcaggaattaatgattcttcattaattttaaataatggagaggttatagcgtctaatgacttacttgatttagtaactaagagtaggc

SEQ ID NO: 295120 - DNA, 779 bp, Unknown
  Bacterial polypeptide expressing nucleotide sequence isolated from the Sargasso Sea
agtttctattactctttgcaataaagctacaaaaaaagatgaagaatttaaacataaatacgatgggggtataactgaattcgtaaaacacattaataaaaaaaaaccaattttagtgaataaaaatgaaaaagaggtatttaaaaagcctgtttatgtaacttcgacaaaaaataatgtcataatagaatgttcattcgaatggaacgcaggttactcagaggaagttctgccatttacaaataatattcctcaaaaagatggaggtacacatttacttggatttagaagtgccttaacaagagtaataaataaatattccaacgagagaaacaataaaaagaataaaattactttatccggtgaggatattaaggaaggtttaacagctgtcttatctattaagatgcaagatccaaaattttcatctcaaacaaaagataaattagtttcatctgagatcagattaattgttgagaatataattagcgataaagtatctacttggtttgaccagaatccatcaattgcaaaaactgttttagaaaaaattacccaagcggcaatggctagagacgttgctagaaaagcccgagacagcgttagaagaaaaggaactttcgagctttcaggtctaccaggaaaattagctgactgtcagattcaaaaacgagaaggtacagaattatttatagtcgagggagactccgcaggaggatcagctaaacaaggaagagtaagagaatatcaagcagttttacctctaagaggaaaaatat

SEQ ID NO: 295121 - DNA, 859 bp, Unknown
  Bacterial polypeptide expressing nucleotide sequence isolated from the Sargasso Sea
cgaaaaggacggaatcacggttgaagtggcgatgtggtggaacgacagctaccacgaaaacgtgctctgcttcaccaacaacattccccagcgcgatggcggcacccatatggccggcttccgcggcgcgctgacccggcagatggtctcctatgccgacacgtccggcatcctgaagcgcgagaaggtgacgctttcgggcgaagactgccgcgaggggctgacggcggtgctttcggtgaaggtgccggacccgaaattctcgtcacagaccaaggacaagctggtctcctccgaagtgcgtcccgtggtcgaaagctgcgtcaacgacgcgctcggccagtggctggaggagcatccgaacgaggcccgcattctcgtcaccaagatcgccgaggccgcgaccgcccgcgaggccgcacgccgcgcacgcgaactgacccggcgcaagggcgcgctcgatatcgcctcgctgccaggcaagctcgccgactgctccaaccgcgatcctgccaagtctgaactggtgctggtggagggtgattccgctggcggttccgccaagcagggccgttcgcgcgagacccaggcgatcctgccgctcaggggcaagatcctgaacgtcgagcgcgcgcgtttcgacaagatgctgtcgagccaggaaatcggcacgctgattacggcgcttggcaccggcatcggcaaggacgagtacaaccccgacaagctgcgctaccacaagatcatcatcatgaccgatgctgacgtcgacggcgcgcatatccgcaccctgctgctcaccttattcttccggcagatgccggagctgatcgagcgcggccacctctatatcgcccag

SEQ ID NO: 295122 - DNA, 865 bp, Unknown
  Bacterial polypeptide expressing nucleotide sequence isolated from the Sargasso Sea
gatgcagttagaaaaagaccgggaatgtacattcggagacacagatgatggaacgggcttacaccacatggtatttgaagtcttagataattctatcgatgaggccctaggtggattttgcaaaaatattattgtgacaatgaattctgataatactattacagttgaggacgatggaagaggaatacctatcgatatgcataagggagaaaaaatgtctgcagctgaagtgataatgacacaattgcacgccggtggtaaatttgaccataattcttataaagtttcagggggacttcacggtgttggagtatcggtggtaaatgctttatcggaaaagttaaaactgagtatttttagagatcaagttgaatattttatggaatttcaaaatggaaattctatcaaacctcttaaaaaaataggaaaaacaaaaaaaagaggaacaagaattactttttcaccttcaaaagatattttttcctcaacaaagtttagctcctcaacacttcaaaagagaatgagagagttagcatttcttaacaagggtataagcctaaccctttttgataaatcttcttcaaagacaaaagagtataaaaataagtatgaaggaggaattttagagtttgttaaatatattaataataaaaaacccattctccaaaacaaaaatgaaaaaactgtttttaaaaaacccttatatatctcagctaataaaaatgatgtaagcgttgaatgctctctagagtggaatgctgggtattcggaagaagtattggcttttacaaataatatccatcaaaaagaccggggaacacatttattgggatttaggagtgctctaactagaattattaaataa

SEQ ID NO: 295123 - DNA, 912 bp, Unknown
  Bacterial polypeptide expressing nucleotide sequence isolated from the Sargasso Sea
gacaaaacgattttttctggaggaattgaatttgaatatgctcttctttcatctagattaagggagctagcttatcttaatggcggagtaaaaattgttttcagagatgaaagaaatcaattatcagatggttcgtttaaagaagaaatttacatttatcaaggaggtattaaagaatatgttgaatacatgaatgctgaaaaagattctattcatcctgaaataatttatgttgactcgcagaaagaaaatgtatatgtagaagctgctttgcaatggtgttcagatgtatattcagataatattttaggatttgcaaataatattagaactattgatggaggaactcatattgaagggctaaaaacagttctcacaagaactttcaataatcttgcaaaaaagagaggcaaaagaaaagatattgaaaaaaatttagctggcgaaaatattagagagggtttgactgttgttttatcagtaaaagttccagatcccgaatttgaggggcaaacaaaaacaaaattaggaaatacagaagtacggggaattgtggattctctcattggggaggctctaacaaaatatatggaattcaatcctggcattttggatttgattcttgaaaaagcaattcaatcatttaatgcagcagaagctgcgagaagggctagagaattagtaagaagaaaaagtgttctagaaagttctacattaccggggaaattagcagattgtagttctagagatccttcagaatctgaaatttacatagttgaaggagattcagctggtggctccgcaaaacaaggaagagatagaaattttcaggctattttgcctctcaggggtaaaattctcaatatgaaaaaactgacgatactaaaatatataaaaacacagaaatacagt

SEQ ID NO: 295124 - DNA, 922 bp, Unknown
  Bacterial polypeptide expressing nucleotide sequence isolated from the Sargasso Sea
accgatgatggaactggattgcatcacatggtttatgaggttgttgataattcaattgatgaagcactaggaggtttttgtaagaatatctttgttaaaataaatattgatggaacagtcacagttcgtgatgacggtcgaggaattccagtagatattcacagaggagaaaaaaaatctgcagcagaagttattatgacacaattacatgctggtggtaaatttgatcacaactcttataaagtttctggaggattgcatggtgttggtgtttcagttgtaaatgcattatctgaaaatttaaagcttgaaatttacagggatggtaaaaaatattatattgaattccaaaatggaaaggcaaaagccccattaaaagttattggcaagtctaaagaaacaggaacccagattacattcaaaccttctaatcaaattttctcctcaataaaatttagtgaaaaaattcttactaaacgaatgagggaattagcgttccttaataaaggcattaaaattatttttatagatgcttctcaaaaaaaagaaagatctaccgagtttaaatttgacggtggtattctagagtttgtagagtttttggaccagaaaagagaaaaattacaaaacaaaaatggaaatgatctatttaaaaaaccaatttatattgatggtagtaaaagtaatattgagattgaatgttcattaaaatggaattcgacttttactgaggaagtttttccttatacaaataatattttccaaaaagatggtgggacacatttattaggttttagaagtgctttaacgagagtaataaacaagtatgctaacgaacacaatcttcttagaaagaataaattatcaatttctggtgatgacattaaagaaggtttgacatgtgtgttatctatcaaaatcc

SEQ ID NO: 295125 - DNA, 706 bp, Unknown
  Bacterial polypeptide expressing nucleotide sequence isolated from the Sargasso Sea
aatgagttcttcatatctatcttacgcaatgagcgtcatagtaagtagagctttgcccgacgtaagagacggtttaaaaccagttcatagaagaataatatatgcaatgtacaaaggtggttatgattggagcaaaccatttagaaaatctgctagaatagttggtgatgttatcggtaaatatcatcctcacggtgatcaagcagtttatgatgctttagtcagacttgttcaagatttttcaatgagtcttcctttaataaaaggtcaaggaaattttggatctatagacggtgatcctcccgccgctatgagatatacagaaacaaaattatcaaaagttacgcaattcctgacagatggtttagaaaaaaatactatcaattacagaaataattatgacgacactgaaaaggaacctgttgttcttccatcacagtttccaaatttactcgtcaacggagctggtggtattgccgttggtatggcaacaagtattccaccacataatttaggtgaggttatcgatggaactattggctatattaaaaacagagacattactgtttcgcaattaatgaaacatattccggggcccgactttccaactggtggagtaattataggaaaagatataataaaacagggttacaacaaagggagaggttcttttaaaattaggggagaaattgatgaagaaaattaa

SEQ ID NO: 295126 - DNA, 868 bp, Unknown
  Bacterial polypeptide expressing nucleotide sequence isolated from the Sargasso Sea
tttagaaaacccatttatgtacagggaagtaaaaatgatgtttcaatagaatgttcaatacaatggaattctggctactcagaagacgtgatggctttcacaaataatattcatcaaagagatggaggtactcatttattaggatttagaagttctttaaccagaactataaacaaatatgcatcagatactactttgcttaagaaaagcaaggttgcaatttcaggagaagatataagagaaggacttactggaattctttcaattaaaatgcctgatcctaaattttcatcacaaacaaaagacaagttggtctcatcagaagttagaattatagttgaaagtattttaaatgaaaaactctcaatttggtttgatcaaaatcctggagtatctaggatagttttagaaaaagtaataaaagcagcgatagctcgagatgtagcaagaaaagctagagaaaatgtaagaagaaaaggatccttggagttatcagggttacctggaaaactcgctgattgccaattgtcaaccaaagaaaatacggaattatttatagtagagggggattctgctggtggatcagcaaaacaaggacgaaacagagagtttcaagcagttttaccgttgagaggaaaaattttaaacacttttacagatgtaaacggatcttctcgaaatggatcacaagaagatattcaaaataaagttttttcaaaaatgatgtcctcaaatgaaattgttacgctaataaatgctttgggcactggttcaaaaagttttaatctagatgatttacgctatgataaaattataatcatgaccgatgccgatgttgatggatctcatatcagatctcttcttttaa

SEQ ID NO: 295127 - DNA, 962 bp, Unknown
  Bacterial polypeptide expressing nucleotide sequence isolated from the Sargasso Sea
cttaggtgagtttataaaatatctagatgagtcaagagagcccattattaatgatatcattaaaatggaaggagagaaaaataatataccagttgaggttgcaatgatttataattcctcattctctgaaaatcttcactcatatgtcaacaacataaatactcatgaaggtggaactcatttatcaggttttagaagaggtttaactaatactttgaaaaaatatgcagattcttctggacttacagataaacttaaatttgatatttcaggagatgattttagagaaggactaacagctgttatatctgttaaagtagcagaacctcaatttgaaggtcaaacaaaaactaagctcggtaacagagaggttagtgctgctgtttctcaggctgtgtctgaaatgcttgaaaattatctagaagaaaatcctaatgattctaaaataattgttcaaaaggtaatacttgctgctcaagcaaggcatgctgcaagacaggcaagggaaatgattcagagaaagactgtcatgacaggaggaggtcttccaggtaaattatctgattgttctgaaactgatccactaaaatgtgaagtctttcttgttgagggtgactcagcaggtggaacagctaaacaaggtagggatagagtctttcaagcaattcttccattaagaggtaagattctcaatgttgaaaaagcacaacaacatagagtatttgaaaatgaagaaattagaaatatatatacagctctcggagtttcaattggtactgaagaagatagtaaagctttaaatcttgaaaaattgaggtataataaaattattatcatgtgtgatgccgatgtagatggtagccatatttcaacactaattttaaccttcttctttagatatatgagagagctttgtgaaggagggtatgtttacattgctaccccaccactatatttagtta

SEQ ID NO: 295128 - DNA, 670 bp, Unknown
  Bacterial polypeptide expressing nucleotide sequence isolated from the Sargasso Sea
gatgagctcgtcatacttatcatacgcgatgagcgttattgttagcagagcattacctgatattagagatggactgaaaccagttcacagacgaataatttatgcaatgtataaaggtggttttgattggtctaaacaatttagaaaatcagcgagaattgttggtgatgttattggtaaatatcatcctcatggagatcaagctgtatacgatgctttagtaagaatggtacaagatttttcgatgagtgttccactcatagatggtcaaggaaattttggttcagttgacggagatccacctgctgctatgagatacacggaaacgagactttctaaaatttctcaatatttaattgatgatattgaaaaaaatactgtagattttaaaagtaattacgatgaaacagaaaaagaaccagttgttctacctgctcaatatccaaatttacttgtaaatggagcaggaggtatagctgttggaatggcaactagcatacctccgcataacctaagtgaggtcattaatgcaacactagccttaataaacaacaaagatattaaaattaacgaattaatgaaacatataccaggtccagattttccaacaggtgggactataattggaaaagatattataaaaacaggatataaaactggaagaggttct

SEQ ID NO: 295129 - DNA, 800 bp, Unknown
  Bacterial polypeptide expressing nucleotide sequence isolated from the Sargasso Sea
aatgtcaaaacaatctcgtttaaatcaaaaaaataatgaatatagcgcatcgtctattaaagttttaaaaggcttagatgctgtaagaaaaaggccaggaatgtacatcggtgatacagacgatggcaccggtttacatcacatggtttttgaagttttagataattcaatagacgaagctcttggaggacattgtaaaaatatttctgtttttataaatccaaataatactattaccgtcgaagatgatggaagaggaattcctattgatatgcataaaggggaaaaaatgtctgctgctgaagtaatcatgactcaattacatgcaggtggaaaatttgatcataattcgtataaagtttctggaggattgcacggggttggagtttctgtagtgaatgcattgtctgaaaaactcgaattaaaaatatttagagatggtgtggagtattttatagaatttgagaacggtaaatctctaaagccattaaaaaaaataggtaaatcttcaaaaagaggtactaatataacttttttaccatcaaaagaaatattttcatcaataaaatttagttcaacggttctacaaaagaggatgagagaattggcatttttaaataagggaataaatttaactttggtagataaaacatcatcaaaaataaaaaaatacgaaaataaatttgatggtggaatattagaatttgtccaatttattaatcagaaaaaacctattttatcaaacaaaaatgaaaaaccagtatttaaaaaaccaatttattttatctctagtaaaaatg

SEQ ID NO: 295130 - DNA, 508 bp, Unknown
  Bacterial polypeptide expressing nucleotide sequence isolated from the Sargasso Sea
aatgactgaattaattaatactaaaataaataaaatacttagtgataagtacttagcatatgcaatttctactattgtttcacgttcactgccagatgttagagatggtttaaagcctgtacaccgaagaattatttattctatgtatcaattaaaactttttaatgattcttcttttaaaaaatctgcaaggatcgttggtgatgtaatgggcaaatttcaccctcatggtgatcaggctatctatcaaagtcttgtgagaatggctcaagatttttctacaagagtaactttaattgagggacaaggaaactttggaaatattgatggcgataacccagccgcaatgagatacactgaggctagattagaaaaaattacaaattatttttttgatggaattgatgaaaattcagttaattttaaagaaaattatgatggtcaaaatttagaacctgaagttttaccaactaaacttccaaatttattattaaatggttcaaccagg

SEQ ID NO: 295131 - DNA, 895 bp, Unknown
  Bacterial polypeptide expressing nucleotide sequence isolated from the Sargasso Sea
tcttatatacgaggttgttgataactctattgatgaggctcttgctggacactgtactaaaataacagtttttttcaacaaagatgggtctattacggttgaggacaatggtcgcggaattccggttggaatgcacaaagaagaaaaaaaaccagctgtagaggttgttatgacggttctacacgcaggtggaaagtttgacaaagacacttataaggtttcgggtggacttcacggagttggggtttctgtggtaaatgcgttatcagagtggctgtgggttgaggttcaaagagatggaaaaatatacaagcaggattacaggattggcgtaacccaaaacaaattaaaagaagtgggtaaaacgaaaaaaagcggaacaagggtttgtttcatgccagacagcggggtttttaacactacggtatttgaatacgacataatagcagagagacttagggagttggcttatttaaacaaggggcttgaaatcaaccttcgagacaaaagagaaaaagagggacaaagcgactgttttaaatttagaggaggattaagtgactttgtaaagtatcttgatgagaataacaaccccctccacaacaaagtcataacggttacaaaagaagatggtgaaataccggttgatgttgcccttaggtatggaaacacttacaacgataatattctaacatttgtaaacaatataaacacaatagagggaggaacacacctatcaggttttcgctctgctctaactagggctatgaacaatcacgcctcgaaaaacaatctaatcaaaacgaagaaaactgaaaaaatatctctcaccggagaagacttcagggaggggttgaccgcaataataagcgttaaggtcccagagccacaattt

SEQ ID NO: 295132 - DNA, 826 bp, Unknown
  Bacterial polypeptide expressing nucleotide sequence isolated from the Sargasso Sea
aaagacacaaacgatgttccagtggaggttgcgatgcgctatggtaacacctataatgataatattttaacattcgtaaacaacattaacaccattgagggtggtacccacctgtcgggttttaggtctgctcttactagggccatgaacaaccatgcttcaaaaaataaccttattaaatctaaaaagaatgaaaaaataaacctcacaggtgaggattttagagagggtttaaccgctattattagcgttaaggttgctgaacctcagtttgaaggacaaacaaaaacaaaacttggcaatggggatgttaagggtattgttgataaaatagtttacgagggtattttagattttttagaacaaaatccctctattggaagaagggtgattgaaaaagcattgttagctgcacgcagtaggtctgctgcaagaaaagcccgcgaactaataagaagaaaaagtgcactgggtgggtcgtcgctgcctggcaaactctctgattgttctaataaagacccggtgttttgtgagttataccttgttgagggagactctgcgggtggttcagccaaacaaggcagggacagaagaacacaagcaatactacccctccgtggcaaggttattaattcagaaaaagcaagggttgataaattgctttctaacaacgaagtgcaatcaatgattactgcgcttggcgctggatttggggggtctgaggatgaatcgggtgaaaagtcagctggagattttgactctgaaaaactgcgttatcacaaaataattattatgacagatgcggatgttgatggttcgcacatta

SEQ ID NO: 295133 - DNA, 802 bp, Unknown
  Bacterial polypeptide expressing nucleotide sequence isolated from the Sargasso Sea
gcaatgagcgtaatagtaggcagagccttacctgatgctagggacggtctaaaaccagttcataggcgtgccttatacgctatgcatgtcctgaataatgattatggtaggccgcacaaaaagtctgcgagaatcgttggagacattattggtaaataccatcctcatggagatggtgctgcttatgaaaccattgtaagaatggcacagtggtggtccttaagataccctttggtagacggacaaggaaattttggttcgatggatggagacgggccagctgctcagagatacacggaagtcagaatggcaaagatttctcaagaactgttagctgatcttgataaagagaccgtaaattttgttgagaattatgatggtacagaaacaatgcctgaagtgcttccaacgaaaatacctaacatgcttgttaacggttctgctggaatagcagttggaatggcaacaaatatggcccctcataatctaaatgaaacactctcggcctgtttagcttttattgaaaatccagagatttctacttcagaattaatggaatttatccctggcccagattttcctacgggtgggataataaatgggagagccggaatagttagtgcctatgaaagcggaaaaggaagagtaaagattagggccaagactcattttgaagatgaagataaggataaagctaagattgtaattactgagatgccttatcaagtcaataaatctaagttaattgaaaagatagctgagttatctagagataagaagatagaaggagttagggatataa

SEQ ID NO: 295134 - DNA, 478 bp, Unknown
  Bacterial polypeptide expressing nucleotide sequence isolated from the Sargasso Sea
catggaggatgattcagagcctatctcaatagaagaagaaatgaaaaagtcctacttggactatgcgatgagtgtaatagtgagtagggccattccagatctccgtgatgggttgaagccagtacatcgtaggattttatacgcgatgaacgaaacaggaaatacttttgataaatcttacagaaagtcggcaagaccagttggcgatgtcatgggtaaatatcaccctcatggagacggggcaatttatgatgctctcgtaaggatggcacaagatttttctatgtctctccctttattagatggccagggaaactttggatctatggatggtgattcagctgctgccatgaggtacactgaagttaggttagcagaatctgccaactttattttatcagatatagaaaaaaatactgtagaattccaagataattataatggtaaggaccgtgagccgtcagtacttccatctaga

SEQ ID NO: 295135 - DNA, 871 bp, Unknown
  Bacterial polypeptide expressing nucleotide sequence isolated from the Sargasso Sea
gtccgtggtaatgctctgtcagatacttttggagctaaggatatggcgggacggcctcgaacatgtgatgacgtttagggacggtgaggtagaacaatcattggaagttgtgggtgacgccgggggcaaaactggctcccaggttacttttctggcgtcaaagtgtatcttctccaatacggattacgactttgcgactttagagcaccggttgcgggaactagccttcctaaattccggtgtccggctcgtcatcaccgatgcgcgccatgttgagaccgatgtggttgaactccattacgacggcggtctagaggccttcgtctcctatctagatcgttccaaaacggcacttaatccaaccatttcagtcagcggcgaaaaagacggtattgtcgtggaggccgcgttgcaatggaacgatagttatcacgaatctactctgtgttttacgaacaatattccgcaacgggatggcggcacacatctggctggcttccggggcgctgtcacccggaccattaacacctatggtgcgggcgacagtgcgaaaaaggcaaaggtcaccatctctggtgatgacgcccgggaaggaatgacatgcgttctatccgtgaaggtgccggatccaaaattttcctcccaaactaaggaaaagctagtgtcttccgaagtacggcctgtggttgagagtgttctgggcgataagctaaaccaatggttcgaagaacacccggcggacgccaaacgcattattggaaaaattatagaggctgctgccgcgcgtgaggctgcccgcaaggcacgggaactaacccgacgcaagggagcacttgaagtgtcttctttacccggcaagctggcggattgt

SEQ ID NO: 295136 - DNA, 877 bp, Unknown
  Bacterial polypeptide expressing nucleotide sequence isolated from the Sargasso Sea
acggtcaaagatgatgggagaggcattcctgtagatattcataaaggagaaaaaaaatcagcggctgaagtgattatgacccagttacatgctggtggaaaatttgaccatgattcatataaggtttcaggaggtttgcatggagttggagtttcagttgttaatgctttgtccgaaaaattagaattaacgattaacagagatggaaagaagtattttttagaatttaaaaatggtgatgcaaaagtacctttaaaacctattggtaaatcaaaaaactcaggaacagaaataaaatttttaccatctaaagaaatattttcttcaacaaaatttagttttttaataatacagaaaagaatgcgtgagctagcatttttaaacaaaggtattaaaattactttaaatgacttaacacaaaaaaaaataaaaaattctgaatttaaatttgatggaggtatccttgaatttgtagaatttttagatgaaaaaagagaaaaattaaaaaataaaaatgataatgatttatttagaaagccaatttatatagaaggattaaaaagtaatattgatgtgcaatgttctttaaaatggaatgctggatacaatgaagacgtctatccttacactaataatatttatcaaaaagatggaggaacacatttactaggttttagaagtgctcttacaagagtaataaataagtatgcatctgagcaaaatttattaaaaaaaaataagtttaccctatcaggcgatgatattaaagaaggattaacttgtgtattatcagtaaaaataccagatccaaaattttcatcacaaacaaaagataagttagtatcttcaggaagtaagaaaatattgttgaaactat

SEQ ID NO: 295137 - DNA, 646 bp, Unknown
  Bacterial polypeptide expressing nucleotide sequence isolated from the Sargasso Sea
atgactgatctggcatcatctatttcgccaattaatatcgaagacgaactaaagaattcgtaccttgattacgccatgagcgtcatcgtgggacgtgcattaccagacgtgcgtgatggccttaagcctgtgcatcgccgcgtgctgtttgccatgagtgaattgaagaacgattggaacaagccgtacaaaaagtctgcccgtgtggtcggtgacgtgatcggtaaatatcacccccatggtgattcggcggtttacgatactatcgtacgtatggctcagcctttctctctgcgttacaccttagtcgacggtcaaggaaacttcggttcggttgacggtgactccgcagcggcaatgcgttataccgaaatccgtatggacaagttagcgcaccagctcctcgccgatcttgaaaaagaaaccgttgactatgtgcccaactacgatggcacagaacaaattcccgctgtattaccgacacgtgtccctaacctgttaatcaacggttcatcgggtattgcggtaggtatggcgacaaacattccgcctcacaacttaaccgaagtggtcaaaggctgtttagcgctgatcgccgatcctgcgctgtctattgaacagttgatggaacatattcctggtccag

SEQ ID NO: 295138 - DNA, 721 bp, Unknown
  Bacterial polypeptide expressing nucleotide sequence isolated from the Sargasso Sea
atgacaaaaacacagccaaattcaaattataaagcagactcgattaaagtattaaaaggtttagacgcagtaagaaaacgaccaggcatgtatattggtgatactgatgacggaactggattacatcacatggtttatgaggttgttgacaattcgattgatgaagccttagccgggtactgcaaaattataactgtagagattaataaagatggaacaataagtgtttcagacgatggtcgaggtataccagttgattttcataaaaccgaaaaaaaatcagctgccgaagtaataatgacacaacttcacgctggtggaaaatttgatcacaattcttataaagtctctggtggattacatggagttggtgtttcagtcgtaaatgctttatctgaaaaacttgagttagaaatagagagagatggaaaaaaatattttgtagaatttaaaaatggaaatccaaaatctccattaaaacaaattggaaaatcaaaaaatacagggaccaaaataacctttctaccttcaaaagaaatattttcatcaacaaaattcagtagctctataattcaaaaaaggatgcgtgaactggctttcttaaataaaggagtaaatttagttgttttggataaaactctaaaagcagagaaaaaagtagaatttaaatatgaaggtggaataatagaatttgttaattttttaaatgaaaaaaaagata

SEQ ID NO: 295139 - DNA, 946 bp, Unknown
  Bacterial polypeptide expressing nucleotide sequence isolated from the Sargasso Sea
ttgcgaagactgcagagagggtttggttgcaataatttcaataaagatgtcagaccctaaattttcatctcaaacaaaagacaagcttgtctcttctgaaatcaagtctttaacagaaacaacgctctcatctaaactatctgaattcttagaagaaaatccaaaagatgctaaactaattgttggtaagattcaacaagctgcaatagctagagaagaagctcggaaagccaaagatttaattaggcgcaaagatccattaggtatagcaaatcttccaggtaaacttgccgactgccaagaaaaagatagggagttgtgtgaactttttattgtcgagggtgactctgctggcggttctgccaagcaagctcgtgatcgtaaaactcaagctatactcccgcttaagggtaaaatcctaaatagtgaacgatctcaagattacaaaatattatcatcatctgaagttggatcacttatatctgcattaggttgtggcttcaatcatgaatctgatgattttaatttagataagttaagatatggaaaaattattatcatgactgacgcagatgttgatggcgcacatatcaggacacttctacttactttgcttgcaagaaagcttaaacctctctttgatgatggccgtgtctttatagcacaaccaccgttatataaaatcaagaaaggtaaaactgagaaatatatttctaatgatgacgagcttaataagttcctttctaatggtttctttgatggaaagcatattgttttcaatgacaatcaattaacacctaaagaatgttctggcatacttatgaattattctaaaataaattctattatcaaacacacctctaaatctaaagataatactattctaacttgtatgtcgtttatagagcctctttctgacatactaatcctggtagccaggagctag

SEQ ID NO: 295140 - DNA, 450 bp, Unknown
  Bacterial polypeptide expressing nucleotide sequence isolated from the Sargasso Sea
ttatttaataatgcaccttttaaaaaatcagcacggattgttggtgatgttatgggtaaatttcatcctcatggtgatcaagcgatttatcaaagcttagtaagaatggctcaggattattcttcacgacttactttgattgagggacagggtaattttggaaatatagatggtgataatgcagctgccatgagatataccgaagcaagactagaggaaataactgaattattttttgacggtatagaggaagactctactacttttagtgataattatgatggtcaaaaccttgaaccagatgtcttgccatctaaattaccaaatattttgttaaatggttcaacaggtattgcggttggaatggcaactaatattccaccacacaatttaatagaaataaatgattgcttaactaaactaatactgaaaccaaactcctctgaatcc

SEQ ID NO: 295141 - DNA, 777 bp, Unknown
  Bacterial polypeptide expressing nucleotide sequence isolated from the Sargasso Sea
atgctaaatgacttagaaaaggaaacagtatctttttcaccaaactacgatggaagtgaatatataccagatgttttaccaacaaaaattccaaacttattagttaatggatcttctggtattgcagttggaatggctacaaatattcctcctcacaatctaaatgaagttataaatggctccataagccttattcataatccaaaaatttccattgatgaattgattaaagatatttcaggacctgattttcctaccggaggaacgattgatggtaaggctggtatttatgaggcgtataaaacaggaagaggcattatccatgtaagatctaacacgtccattgaggaggataaatctggtaaacagtcacttattattaatgaaataccttttatggttaataaagcaagaatgcttgaaaagatagctgagctagtaaaagataaaaaaattgaaggcattacagaaattagagatgaatctgataaagatggcctaagagttgttattgaaataagaaaaggagattccgcagatgtcatagaaaataatttattttctcaaactcaactagagcaatcatttggcatcaactttactgtcctagtagatggacaaccaaaagaagttaatctcaaagaaatgcttcatgcttttataaagcatagaaaagaaattattaccaaaagaacaaaatatgacttaaaaaaagcaaaagaaagaggtcatatcgttgaaggactaatggtagcaatagcaaatatcgatgaagta

SEQ ID NO: 295142 - DNA, 367 bp, Unknown
  Bacterial polypeptide expressing nucleotide sequence isolated from the Sargasso Sea
tatggcagaaaatcaagaaataagatttgaacaggaaatgaggcaatcatatctagattatgccatgagtgtgattgtaggtagagctttacccgatgttagagacggactaaaaccagttcacagaagagtattattttcaatgcatgagctcaataatggctggaataaatcatataaaaaatctgctagaattgttggtgacgtcattggtaaataccatccacatggtgattcagcggtctatgatactattgttagattagctcaaccattttctatgagacatccgttggttgatggacaaggtaactttggttctgtagatggcgactctcctgcggccatgaggtacacagaagttaga

SEQ ID NO: 295143 - DNA, 544 bp, Unknown
  Bacterial polypeptide expressing nucleotide sequence isolated from the Sargasso Sea
atgccaaaaacaaagaaaagcactaacacaaaaaagtacgactcttctaatataaaagtcttgaaaggccttgatgctgttcgaaaaagaccaggcatgtatatcggcgacacagacgacgggacaggcctacaccatatggtgtacgaagttgttgataattccgtcgatgaagcgctagcaggatactgttcagaaatatctgtaataatccatcaagatgactctataaccgttaaagacaacgggagaggcgtaccagttgacaaacacaaagaggaaaataaatctgctgctgaagttattatgaccgttctccatgccggtggtaagtttgatgacgactcttataaagtttctggcgggctccacggcgttggggtctcggttgtaaatgctctttctcagactttaagtctgcgaatccataaaaatggaaacatatacgaacaagattatgctcatggagtgccaaaaaaaccgcttaagaagggcgctaagaccgacagaacaggaacaaccatatcatttcaaccccagtaaa

SEQ ID NO: 295144 - DNA, 488 bp, Unknown
  Bacterial polypeptide expressing nucleotide sequence isolated from the Sargasso Sea
aatgataaaaaaaaataatacatatcaagctgactccataaaagtattaaagggacttgaggcagttcgtaaaagaccaggaatgtatattggcgatacagatgatggtacaggtttgcatcatatggtttatgaagttgtagataactctatagatgaagcactagcaggatattgtaaaaaaatagaggtaagtattaattctgatggatcaattacagtaaaagatgatggaagaggtataccggtagatattcataaaggagaaaaaaaatccgctgcagaagtgattatgactcagttacatgcaggaggtaagtttgatcataattcttataaagtttcaggtggactacatggtgtaggtgtatcagttgtaaatgctctttcacaaaaattagaattaaacatagaaagagatggaaataaatattttatagaatttaaagatggaacagctaaagctcctcttaagttagtgggtaaat

SEQ ID NO: 295145 - DNA, 448 bp, Unknown
  Bacterial polypeptide expressing nucleotide sequence isolated from the Sargasso Sea
aatggcaaaaaaagaaaacaaaaagaaaactggaaaagataataacgattatggtgcagagtccatcaaggtactcaagggtttggaggctgtgagaaagagacctggtatgtatattggagatacagatgacggaactggtcttcatcacatggtgtatgaggtggttgataattctgttgatgaggctttagcaggtcattgtaaaatgatctcagttattttgaatgctgatgagtctgtaaccgttaaggatgacggaagaggaataccaactgagatccataaagaagaaggaatctcagctgctgaagtaataatgacacagttacatgctggaggaaaatttgaccaaaattcttacaaagtttctggaggtctccatggagttggtgtctcagttgttaatgcattatcggaaaaattagatctatcgataaagagagat

SEQ ID NO: 295146 - DNA, 889 bp, Unknown
  Bacterial polypeptide expressing nucleotide sequence isolated from the Sargasso Sea
agcagcagaagttataatgacccaactgcacgcaggtggtaaatttgatcacgattcctacaaagtttctggaggactacatggcgttggtgtgtcagttgttaatgctttatcagaaaaattagatctaactgtatttagagatcataaagaatattttgtatctttctcaaacggaaaaacaaaaagtccaattaaatttacaaaaaaaactaaaaaatctggtacaaaaattaactttcttccttcaaaagacattttttcatctatcaagtttagtgcagcaactttacaaaaaaaaatgagggaattggcctttttaaacaagggtttatcaattaatttgatagatgagactcacgcaaaaacaaaaacttacgaaaataaatatgatggaggaatcagtgaattcgttacgtttttggatcaaaaaaaatctattttaatcaacaaaaatgaaaaggcggtttttaaaaaaccactttatctaaaaggagaaagatccaatgtagtagtggagtgttctttagaatggaatgctggattttcagaagaggtattggcttttaccaacaacatccaccagaaagatggaggaacacatttattgggttttaggagctccttgacaagaataattaataaatatgcttctgaaaagaatttaaccaaaaaaaataaagtaaccataagtggcgaggatataaaagaaggactaacggcaattttatcaattaaaatgccagatccaaaattttcatctcaaaccaaagacaaattggtttcatcagaaataagaaatattgttgagtctatagtaggtgataaaatttcggtttggtttgatcaaaatccttcagttttaagatcagttttggataaagtttta

SEQ ID NO: 295147 - DNA, 715 bp, Unknown
  Bacterial polypeptide expressing nucleotide sequence isolated from the Sargasso Sea
tagagagtttcaggctgtgttaccgcttagaggaaaaattctaaatacttatgtaaaaaataaaagtaaagttaatggcaatggaaatgattatgccacaaaagctttatctaaaatgatgtcatcaagtgaaattgtaaccctaattaatgctctgggcacaggttcaaaagattttgatattgaagatttaagatacgaaaaaatagttataatgacagatgctgatgttgacggatcgcatattagaactttgcttctaactttttttaacaattatccatttaaccaattaatagagaatggaaatctttatttagctcaaccgccactctttaaagtcacaaaatctggaaaaggaatttatattaaagatgagaaagaactagaaaaatatattattgagaattcaaatgagaatataaaaaaaaataagataaattcaaaagagtttaaaaaaataattgatgaggaaagacaaaaattatccatacaaagattcaaaggattaggtgaaatgaacccagatgaactatgggaaaccacgctaaacccagataacagaatcttattgaaagtacaatattcaaacgggactaaggaaaaatcgaaagaagaccaaaagattattggaattttaatgggagatgaggtggctccaagaaaagaattcattacaagcaatgcattagacgtagctaatttagatatttaa

SEQ ID NO: 295148 - DNA, 896 bp, Unknown
  Bacterial polypeptide expressing nucleotide sequence isolated from the Sargasso Sea
gttgttcgcgatgcgccagcttcggctggaaccggattccgggtacaagaaatgtgcgcgggtcgtgggcgacgtcattggtaaatatcatccccatggcgatgtcgcggtgtatgatgcgctggttcgtttggcgcaggatttcgcggtccggtatccgctagtcgaagggcaggggaatttcggcaatgttgacggcgataacgcggccgcgatgcggtacacggaatcccggctgacagattacgcgatggcgatgctggaaggcatcgacgaagacgccgtcgatttccgcgaaaactatgacggctcggaagaggaaccagttctattgccggccagtgtgccgaatctgctgtgcaacggggcggccggtatcgcggtgggcatggcgaccaatatcccgccgcacaatctggatgaagtctgcgctgcgttactgcacctgctgaaatttccgaatgcgactatcgccaagctggtcgaaatggtgccgggaccggattttccgacgggcggcgtgctggcggaaggccgggacgccgtcgctgaagcctatgccacgggccggggctcgttccgggtgcgcgcccagtgggaggtcgaaaagctgagccacggccagtatcagattgtggtgaccgaaattccctttcaggttcaaaaagggcggatcgtcgagaagatggccgatctgttgaacgccaaaaaactgccattgctgggggatatccgcgacgaaagcgcggaggatatccgcctgatccttgaaccgcggaatcggtccattgaacccgaacagctcatggaacagatattccgggtcaccgacttggaaacccgagtcgggttgaacatgaacgtactcgattccaaggtggtgccgcgagtgatga

SEQ ID NO: 295149 - DNA, 886 bp, Unknown
  Bacterial polypeptide expressing nucleotide sequence isolated from the Sargasso Sea
aaaaaagcaatggctaaaaaagctacatattcagcaaaaaatatagaagttttagagggactagagcctgttagaaaaagaccaggcatgtacataggaagtacgaatgaacaaggattacatcacctggtcaatgaagttttagataatagtatagatgaagtcgttgcagggcatgcaagtgaggtttcttttcattataaaaaagatggatcaattacaattaaagataatggaaggggtataccaattgattttcatcctaaatttaaaaataaaagagctttagaaatagtactttctacgctccacgctggagggaaatttgataataattcttataagacatctggaggattacacggtgttggaatttctgttgtaaatgccttaagttcttttttagaggtcaacgtacataagaatagtaaaaaatattctcaattgtattcaaaaggaaagcctaaaactaaaatcaagataacaaaatgtaaaaaaaatgaaaaaggaactgaaataatttttagacctgatgacagtatttttgagacaactcaattttcaccaagaaaattatatgattttataaaaatgaaggctgtgcttgtatcaagaacaattatcgattttaaaatcgataaagaattaataagtgataacactccgaattatgaaaaattttattttaaaaatgggatttctgactttttaaatataaaaaataagaatactgctaaattatttgataagcaattttcaataattaaaaatattaatgataatgagaagtgtgaaatattcataagttttaatcaaaatgaaaaatcttcattaatttcattctgtaataccatagaaacacctgatggaggatcacatgaaaatg

SEQ ID NO: 295150 - DNA, 853 bp, Unknown
  Bacterial polypeptide expressing nucleotide sequence isolated from the Sargasso Sea
aaattgctttacaaataatattcctcaaaaagatggaggcactcatttggctggtctcagatcagcattgacaagagttgtaaattcttatgcgcaagatacaggtttaacaaaaaaagaaaatgttcagcttgtaggtgaagatattagagaaggctttacatgcgttttatctgtaaaagtcgctgatcccaaattttctagtcaaaccaaggataagttagtctcctcagaagtaagacctgttgttgaaagcctaataaatgatcttttatcgaattggtttgaagagcatccagcagaggccaagatcattgtcggaaaagtagtcgaagctgctgctgctagggaagctgctagaaaggctcgagaccttacaagaagaaaaggcgctctagatgcttcatcactacctggaaaattagctgattgccaagaaaaagacccagaaaaatgtgaaatctttattgttgagggtgagtcagctggaggttcggcaaaacaaggtagagacaggtctacacaagcaattcttcctctaaaaggaaaaattatcaattgtgaaaaggcaagattatctaaggttctctcatcaaatgagattgcaactttaattacagcattaggaggaggggttggaaattctacaaatgaacttgacgataataacgaagatgatgaaagttttaaaactgataaacttagatacaagaaagtaataattatgacggatgccgatgtagatggtgctcatatcaagacattacttttgacattcttctacagacaaatgaaatcattaattacagatggctgtttatatatagcacaacccccactatacaaagcaaag

SEQ ID NO: 295151 - DNA, 358 bp, Unknown
  Bacterial polypeptide expressing nucleotide sequence isolated from the Sargasso Sea
tatgtcggataatgaatcttataattcggacagtattaaggttttaaaaggacttgaggcggttaaaaaaaggcccggcatgtatattggtgatactgaggatggcaccgggcttcaccacatggtccacgagttggtggataattcgatagatgaggcgctagcaggctattgtgacgagataaaagtaattattcacaaagaagaggcggtaacagtaaaagataatggccgtggtataccagtcgatttgcatccggaagaaaaggttagcgctgcagaggtgataatgacaactcttcacgctggtgggaagttgatgataacagttacaaagtatcaggcggccttcacgggg

SEQ ID NO: 295152 - DNA, 636 bp, Unknown
  Bacterial polypeptide expressing nucleotide sequence isolated from the Sargasso Sea
aatgccaaaaaaacaaaataaaaaaggatcttacgactcatcaaacatacaagttcttaaaggtcttgaagctgttaaaaaaagaccaggaatgtatataggtgacacagatgacggctctgggcttcatcatatggttttcgaggttgttgataattgtattgatgaagcaatggcaggacattgttcagaaatagttgtttcaattaataaaaatgggtcaataactgttaaagataatggtagaggaattcctgtagatacacacaaaaaagaaaaagtacctgcagcagaacttattatgacaacccttcactctggtggaaagtttgatgataacagctataaagtttcgggtggcttacatggtgtgggtgtgtctgttgtaaatgctctttctgaggaattaacacttaaaatttgcagagatggtgggctatatgaacaaaaatatgcgaacggtaaagctcaaaccaaactcaaaaaagttaaaacctcaaaagaaacaggtacagagatcacatttaagccatctaaggaaatattttcgttcattaactttgatatagataaaataaataaaagagttcaggagttatcttttcttaatgcaggtgtgaatatccttgttgaaga

SEQ ID NO: 295153 - DNA, 898 bp, Unknown
  Bacterial polypeptide expressing nucleotide sequence isolated from the Sargasso Sea
gtaggtgtttcagttgtaaatgctttatcagaaaatttgacagttgaaattcatagagatggaaaagaattttttcaatcatataaaaatggagagcctgagagtttattaaaagagagaggcaattcatctaaaaaaggaactaaaataaaatttttaccctctactaatatattttctttaacagagtttgatttcagtactatagaacaccgaatgagagagcttgcatttttgaattcgggagtaaaaattgttttaaatgatttaagaggagtagatgctaaagaagtttcaatgcattatgatggcggtgttgctgcttttgttgaccatttagacagaaataaacaaaaacttcatccaacaataattatacatggagaaaaagaaggtgtaggtgttgaattggcccttcagtggaatgatagttatcatgagaatgttctttgtttcaccaataatattccacaaagagatggtggtactcacttagccggcttccgtagtggtcttacaaggacaataaataatttttcaaagagcacaaataagaatcaaaaactatctttatcaggagatgatgcgcgagaaggtctaacttgtgttctctcagttaaagttcctgatccaaagttttcttctcaaacaaaagataaactagtatcttcagaagtaagaccaattgtggaaagtctagtaaatgataaattgattcagtggtttgaagaacatccttctgatgtgaaagtagttataaataagataattgaagcagcccttgcgcgagaagctgctcgaaaagctagagaacttacgagaagaaaaggtgccttagatatatctaatcttcctgggaagctggctgattgtcaggaaaaggatgctactaaatcag

SEQ ID NO: 295154 - DNA, 895 bp, Unknown
  Bacterial polypeptide expressing nucleotide sequence isolated from the Sargasso Sea
agtttgtttttatcctgacagctcaatatttaaaaccattgcctttgagtatgatataatagcagaaagacttagagagttagcatatctaaatagtggtttagagattgttctccaagaccaaagaacagaagatggagatgttgactcgtttaagtttaaaggtggattaagtgatttcgtaaaataccttgatgaaaacaacaatccacttcacaataaagtaatcacagtccaaaacgattcaggagaggttcctgttgatgtagcccttcgctacagccactcttacaatgacaacattttaacctttgtcaataatattaatacaattgaaggaggaacccacctgtcgggttttcgatccgcgcttacgagggcgatgaataaccacgcatcaaaaaacaaccttattaaggcaaaaaagaatgaaaagatttctttaacaggtgaagattttagagagggtctaacagcgatcattagtgttaaagttgctgagccacagtttgaaggacagacaaaaacaaaactcggaaacggagacataaaaggagttgttgataaaatagtttatgagggtatcttagacttcttagaacaaaacccttctattggtcgcaaggtgattgaaaaagcattgcttgccgcaagaagtaggagcgcagcgaaaaaggcaagagagcttatcaggagaaaaagcgctctaggaggatcatctcttccaggaaaacttgctgattgctctaatcgagacccaaacttttgtgagttgtatttagttgaaggggattctgcaggcggatcagcaaagcagggtagagatagaaaaattcaagcaattcttcctctaagaggtaaggttataaactcagagaaagcaagaatagacaaa

SEQ ID NO: 295155 - DNA, 663 bp, Unknown
  Bacterial polypeptide expressing nucleotide sequence isolated from the Sargasso Sea
agactaagggaactagcttttcttaatacaggagtaaaaattgtacttaaagacaatagatctactcagaaaaaagagattatatttaaatatgaaggtggaataattgagtatgtaaattatctcaacaaaggtaaaaactgtataaacaatactccaatatattttttaggaataaagaataatgttaatgttgaatgtgcattgcaatggactgatgcttatcatgaaaatacactatgctttactaacaatattgcccaaagggacggtgggacgcatcttgctggttttagaggggcgttaactcgctctatagtaaattatatcaatcaaaaaattaagaatagcacaaatatttcaggtgatgatgcgagagaaggtcttacttgtgtaatttcagtgaagctacctgatccaaagttttcaagtcaaactaaagataaattagtttcttctgaggtcagacctgtagttgagtctgtgagtttagacaaaatagaacagtggattgaagaaaatcctaatgaaattaaaaaagtagttgagaaagttgtagaagcttctgatgctagagaagcagctagaaaagcaagagaacttactagaagaaaaaccggactagaaaattcatctttacctggaaagcttgcagattgtcag

SEQ ID NO: 295156 - DNA, 988 bp, Unknown
  Bacterial polypeptide expressing nucleotide sequence isolated from the Sargasso Sea
gtttaaatggaatgctggctattcagaagacatttatccttatacaaataacatatatcaaaaagatggcggaactcacttaattggttttagaaatgctttaacaagagttataaacaaatatgcttctgaacaaaatttgctcaaaaaaaacaaaatttctatttctggtgatgatatcaaagaaggattaacatgtgtactatcgataaaaactcctgatccaaaattttcgtctcaaacaaaagataaattagtttcatctgaagttagaaatattgttgaaactatagtaaatgaaaaattatctgtttggttcgatcaaaacccttcaatttcaaaaattgtattagctaaagttgttcaagctgctctagctagagatgttgcaagaaaagcaagagaaaatgttagaaggaaaggagctcttgaactgacaggtctaccaggaaaattagcagattgtcaaaattcgaagcaagaaggtacagagttatttattgtagagggagattctgcgggagggtcagcaaaacaaggcagaaatcgagaatatcaagcagttcttcccttaagaggaaaaattttaaatacatacacaagcataaatggggcaaaaaaaaatgttaatggaaataaaaatgaaattagaacaaaaactttagcaaaattaatttcatcaaatgaaattattactctaattaatgctctaggtttagatccaaaaaacgaagatttggatattaaagatttaagatatggaaaaataattatcatgacagatgctgatgttgatggatctcacattagagctttacttctgacttttttcaataataaaccatttaataaattgatagaaaatggaaatatttatcttgcacagccgccattatttaaaattaataagggatctaaaggaatttatataaaagatgaaaaagaattagaaaagtatattttagataattcaaaggaattaaaaaaa

SEQ ID NO: 295157 - DNA, 813 bp, Unknown
  Bacterial polypeptide expressing nucleotide sequence isolated from the Sargasso Sea
aatgagagaattagcttttttgaataaaggtataaaaataatttttattgattcaagtcaaaaaaaagaaaaaatttatgagtttaaatttgatggtgggactcttgaatttgtagattttttagacgaaaaaagagaaaaattaaaaaataaaaatggaaatgaattatttaaaaaacctatttatattgagggaaaaaaaaataatatagaaatagaatgttcgttaaaatggaacgctagttatggtgaagatatttttccatatacaaataatatatatcaaaaagatggtggaacacatttactaggttttagaagtgctttaacaagagtaataaataaatatgcaagcgaacataatcttttaaaaaaaaataaattagcaatttcaggagatgatattaaagagggactaacttgtgttttatctacaaaaattcctgatcctaagttttcatctcaaactaaagacaaactggtttcatctgaagttagaatgattgttgagactgttattaatgaaaaactatctatatggtttgaccaaaacccatcaattgcaaaaataattttagcaaaaattattcaagcagctatggcaagagatgtagcaagaaaagctagagaaaatgttcgaagaaaaggtgctctagaattaagtggacttccaggcaaattagcagattgtcaaataggtaaacaagagggaacagaactgtttattgttgagggagattcagcaggaggatcagcaaagcaaggtagaaatagagcaaatcaagctgtattacttttaagaggtaaaatttt

SEQ ID NO: 295158 - DNA, 844 bp, Unknown
  Bacterial polypeptide expressing nucleotide sequence isolated from the Sargasso Sea
ggcattattgaatatgttaaagaacttactaaaaagaaaactccgattcaagagaagatcataaacatatcatcttctaagaagaatatctcagtcgatctcgctctaatgtggtctaacaattatcaggaagaagttttatgtttcacaaataatattccacaaaaggatggcgggacacacctatctggctttaaaacatcgctaacaagaacgcttaattcgataattttaaaaaataatcctaaagataaaattgatataacaggagaggatacacgagagggaataaccgcaatcatctctgtgaagatgccagatcctaaattttcatcacagactaaagacaaattagtatcttcagaagttaaaggcatagttgagacacttgtcagttcaaaacttaaagaatatctcgacgagaatcccaaggatctaaaatcaatcactgctaagatttatcaagctgcaaaggcaagagaagaggcgcgaaaagcaaaagaactaattaggcgcaaagatccattgagtatcggcaatctacctggcaagcttgctgattgccaagaaaaagaccctactaaatgtgagctttttattgttgagggtgactcagctggtggttcagctaaacaagctagagatagaaaaacgcaagccatacttccacttaaaggcaagatattaaatactgagagagcgcaagaccacaaggttctttcatcatctgaaatttctactcttattactgctttaggatgcggtgttggtgatgattgttctttagatgaaaatagcaaaatgattaagaatctaagatatggtaaaattgttattatgacag

SEQ ID NO: 295159 - DNA, 832 bp, Unknown
  Bacterial polypeptide expressing nucleotide sequence isolated from the Sargasso Sea
gccgtcggttcttccagccagcttccctcagcttctagtaaatgggtcatcgggaatcgcagtgggcatggctactaatattccgccacataatttagctgagatagtggatgcggccattcatattattgatgaacctgaatgctcaatcgatgatttattgcaaattgtaaaaggtccagattttcccacccgcggaattatccagggaagaaatggaattatttctgcttacaagacaggccgcggaattatacgcgtaagaggccgcgcagaaattgaaacaatggaaaaaggagaccgggaaaggattgtgatcaatgaaatccctttccaggttaacaaggctagattggttgaaaaaatagcggagctggtgagagataagaagctggaaggaatctccgatttaagagatgaatcagaccgtgaaggagttcgcgttgtggttgaattaaagaagggcacggtggggcaggtggtgttgaacactctgtataaaaacacccagcttcaagacactttcggcgtaattctcctagctttggttaaccaacaaccaaaagtattaaacctgaaagaatatttgcgctacttcgttttattccgaaaagaagtcattacgcttcgaacagaatacgatcttaaaaaagcgagggaaaaggaacatgttctcgaaggtttgaatattgcgctggataatcttgatgccgttgtaaagcttatccgcaattcagaagacccggtttctgcgagggaggacctcatgtcaacctttgcgttgtcagaagttcaggcaaaagcgattctggaaatgaggttacagcgtttg

SEQ ID NO: 295160 - DNA, 520 bp, Unknown
  Bacterial polypeptide expressing nucleotide sequence isolated from the Sargasso Sea
aatgaataaaaataataattatcaagctgactccattaaagttcttaaaggtctagaggcagttagaaaaagacctggaatgtatattggtgacacagatgatggcactggcttacatcacatggtttatgaggttgttgataattctatagatgaggctcttgctggacattgtaaaaaaatagaggtaagtataaattctgatggttcagtaactgttgaggatgatggtagaggaattccagtagacattcataaagaagaaaaaaaatccgctgcagaggttatcatgactcaattacatgcaggaggaaagtttgatcatgactcttataaagtttctggaggtttacatggagttggagtttctgttgtaaatgctctttctaaaaaattagaactatatattgaaagagatggaaaaaaacattttgttgagtttataaatggtgaggccaaaactccattaaaaatcatcggtaattcaaagaatacaggtaccaagattaattttctaccc

SEQ ID NO: 295161 - DNA, 595 bp, Unknown
  Bacterial polypeptide expressing nucleotide sequence isolated from the Sargasso Sea
aatgaaaaaagatcagtcaacagagatcaaagaatctaaagttagttctatctcaatgtatgatgaaatgagttcatcgtatttatcctatgctatgagcgtaataataagtagagctctaccagatataagagatggattaaaacctgttcatagaagaataatttatgcaatgcataaaggagggtttgattgggcaaaacaatttagaaaatctgcaagaatagttggagatgttatgggtaaatatcatccacatggtgatcaagctatatatgatgctcttgtaagaatggcacaagacttttcaatgagtttaccgttaatagaaggacaaggaaattttggatcgattgatggtgatcctcctgccgcgatgagatatacagagacaagattatccaaagtatcacaacatttagtagacgatattaataaggaaactgttgaatttaaaagtaactatgacgaaacagataaagaaccagaaattttgccagcccaatatccaaatcttcttgttaatggagctggtggtatagccgttggaatggcaacgagtattccgccacataatcttggtgaaattattgat

SEQ ID NO: 295162 - DNA, 928 bp, Unknown
  Bacterial polypeptide expressing nucleotide sequence isolated from the Sargasso Sea
tcaatatgaaggtggtattattgagtatgtcaattacctaaataaaggtaaaaattgtattaacaacacccccatatattttttaggcactaagaataatgtaaacgtagaatgtgctctacaatggactgatgcatatcatgaaaacactctttgttttacaaataatatagctcaaagggatggaggtactcatcttgctggatttagaggagctttgaccagatgtattgttaactacataaacaaaaaaattaagaatagtgtaaatatatcaggagatgatgcaagagaaggtcttacttgtgtaatatcagttaaacttccagatccaaaattttcaagtcaaacaaaagataaattggtctcttctgaagtaagaccagtagttgagtctgtcagtttagacaaaatagagcaatggattgaagaaaaccctaacgaaattaaaaacgttgcagataaagtagttgaggcttctaacgccagagaagcagcaaggaaggcacgagaacttacgagaagaaaaactggtttagaaaattcttcattgccaggtaagctagcagattgccaagaaaaaaatccagaattttctgaattatttattgttgagggtgactcagcaggaggatctgcaaaacaaggcagagatagaaaaaatcaagctattcttcctttgagaggtaaaattttaaatgttgaaagagctagtccaaaacaaattcttacaagcaatgaaataggtgtgctcataactgcaattggggcaggagttggtaatccaacaggtaatgaagaacaagataaatcagagggaaaatttaatatagaaaaaatgagataccacaaagttataataatgaccgatgcagatgtagatggaagtcatattagaactcttttgcttacatttttctacagacac

SEQ ID NO: 295163 - DNA, 547 bp, Unknown
  Bacterial polypeptide expressing nucleotide sequence isolated from the Sargasso Sea
atggagagttctttccttgactatgcaatgagtgtgattgtttcaagagctttgcctgatgtttgtgacggtttgaagccagttcatagaagaattatatatgcaatgaatgaggcaggctataccgcaggcaagccatcaagaaaatctgcaagaattgtcggagatgtcatgggtaagtatcaccctcatggagattctgcaatctatgatgcaatggtaagattagcacaagactttagcatgagagtacctttaattgatggtcaaggaaattttggatctatggatggagactctgcagcagctatgagatatacagaagcaaaattgtcgccaattgcctcttatttagttaatgatatagataatgaaactgttaattttaaggaaaattatgatgggacagcttttgaacctgaacttcttcctgcagagtttcctaatttattgataaatggatctgaaggcatagcagttggtatggctacaaaaatccctccaccattgtcacaagtgaaattattgatgcttgctgtaaaataat

SEQ ID NO: 295164 - DNA, 1003 bp, Unknown
  Bacterial polypeptide expressing nucleotide sequence isolated from the Sargasso Sea
gtgcaggtgacggtgcgccgtcaggggcaggtccatcagcaacgttttgagcgtggtgctgcgatcggcagcctcgcctctgagcctcagcccgctgaagaggccggtcagaccggcaccacggtgtgcttcaagccggacactgagatcttcaccggcggcatcgtgttcgattacgccaccctttcggcgcgcttgcgcgaactggcctacctcaatggtggtgtgcggatcgtcttccgcgatgaacgggactcagcccgtaacgcggctggcgaggcccatgaggacatttatttctatgagggcggcattaaggaatatgtcgcctacatgaacaaggaaaaggatgctctccatcccgacatcatctatgtgaattccgagaaggatggtgtgcaggtggaggcggcgttgcagtggtgttccgatgcctactccgacagcatccttggctttgccaacaacatccgcaccgtggatggcggcacccacatcgagggcctgaaaacggttctgacccgcaccctcaatgccttcgccaagaaactgggcaagcgcaaggaatcggattccaatctggcgggtgaaaacatccgggaaggactcaccgccgtgctttcggtgaaggtgccggatccggaatttgaaggccagaccaaaaccaaactcggcaacaccgaagttcggggcatcgtcgacaatcttgtcggtgaaggactcagccagttccttgagttcaacccgtcggtgatcgggttgatcctggagaaggcgattcaggccttcaatgcagccgaggctgcccgtcgggcccgcgagctggtgaggcgcaagagcgttctagagagttcaaccctgcccggcaagttggcggattgcagctcaagggatcccggtgaatccgagatttatatcgttgagggtgattccgccggaggttcggccaagcaggggcgagatcgccgtttccaggcgatcttcccctgcgcggaaaaatctc

SEQ ID NO: 295165 - DNA, 894 bp, Unknown
  Bacterial polypeptide expressing nucleotide sequence isolated from the Sargasso Sea
attttaacattgaaaaacttagataccataaagtaattataatgacagatgcggatgttgacggcagtcatattaggactttgttgttaacctttttctatagaaaaatgaaagagttaattgataagggttatctgtacatagctcagccacctttatacaaagccaaacaaggaagttcagaagtctatttaaaggatgatgaagccctagaggattacttgattacggctggtataaaggattgtgtcttaacactcggtaatggagaggaaatagggggaattgacttaacaagtcttgttaattcagcgagacaaatcagtttacaactaaaaggtttaactacacgggtgccgcttgatatagttgagcaagcagcaatattgggagcattagatagtgatgttctagcacaacatgaccaggcagaccaagcagctaaatatatagctaaacgtcttgatgctttggagacaccatctgataggggctggaaaggggaagcctcgcctgatggtgggctgtcttttgtaaggaatataaggggtgtaccagatgggcctcatataattgatggatcagtcattaggagtacagaggctcatacaataagtaaaaatgcagatgctcttcaagagtcatattcccgtcactctgtgcttagacagaaagaaatagagttttctattacaggcccagtttcccttgttgattctatcatggagcttggtcgaaaaggggttagtatgcagcgttataaaggtctgggagaaatgaacccagaccagctgtgggagaccactctcgatcctaacgcaagaaccttacttcaagttagagaaaagcatgctgaaaaagctgaagatattttttcaaccccttatgggtgac

SEQ ID NO: 295166 - DNA, 557 bp, Unknown
  Bacterial polypeptide expressing nucleotide sequence isolated from the Sargasso Sea
aatgaataaatcagattattcttcagattcaattaaagtactaaaaggattagaagctgtcaaaaaaagacctggtatgtatattggcgatacggatgatggatctggtctccatcaaatgatttatgaagttgttgataattcgatagatgaagcccttgcaggtttctgtgatgaaattaaagtaattttaaatccagatggcacattaacagtatcagataatggtagaggtatacctgtagatatgcataaatctgagggagtatcggcagctgagcttattatgacagaattacacgctggtggcaagtttgaccagaatagttacaaagtttcgggtggcctacatggcgttggtgtctctgttgttaatgctttatcagaatatcttaatcttgaaattaatagagatggtgatttatatcagatggagtttagcaatggtaaagttattaaaagtttatctaaaatatctaattcagagaaaattaacaataaatctataactggtacaaatataacatttttaccttcaaaagaaatatttaataata

SEQ ID NO: 295167 - DNA, 545 bp, Unknown
  Bacterial polypeptide expressing nucleotide sequence isolated from the Sargasso Sea
catggaaaaaaacaccgtagagaacaataaatcttttaaacctattttcgttcaagatgaaatgagctcgtcttatctatcttacgctatgagtgtaatagttagtagagctcttcctgatgttagagatggcttgaagccagtccataggagaattatttatgcaatgtacaagggtggatatgattggtcaaaaccatttcgaaaatcagctcgtatcgttggagatgttattggtaaataccacccacatggtgatcagtcagtttatgatgctttggttagattagtgcaagatttttcaatgagtgttccattaatctcaggacaaggaaactttggatctattgatggagatccacctgcagcaatgcgatatacagaaacgaaattaggtaaaattgcacagtttttaacagaagatttagaaaaaaatactgttagttatagaagtaattacgatgaaacagaaaaagaacctgaagttttaccttctcaatacccaaacatattagttaatggtgcaggtggtatagcagttggaa

SEQ ID NO: 295168 - DNA, 797 bp, Unknown
  Bacterial polypeptide expressing nucleotide sequence isolated from the Sargasso Sea
tgatcgcaatcctgacgaaaatggctttaaaaaaggcacgcgggtaaccttccacgcctctgacagcacattcaagaatgtgaccgtgttcgatttcgacaagctggagcaccgttaccgagaattggcttttctcaattccggcgtccgcatcctgctgcgcgacaatcgcggcgaggaagtgctggagcatgacctgttttacgaaggcggcattgcagcctttgtcagctatctcgaccgtaacaaagagccgctgatcgcagcgccaatctctgtttcggctgaaaaggacgggatcgggatcgatgtcgctctggaatggaacgacagttactacgaaaatgtactcacgttcaccaacaacatccctcagcgcgatggcggcacacacctggccgcattccgcgctgcattgacgcgcacgcttaacaattacgccgcctccagcgggcttttgaaaaaagagaaagtcagcctttcaggtgaagacatgcgcgaagggctcaccgccattgtcagcgtgaaactgcccgatcccaaattcggttcacagaccaaggacaagctggtcagctccgaagtgcgacagccgctcgaatcgctgatgggcgagaagatgagcgaatggcttgaagaaaaccccggtgaggcgaagatcatcatccagaagatcatcgacgctgccgccgcacgcgaggctgcgaaacgcgcccgcgaaatgagccgcaagggcgcgatgagcgtcgcctcgctccccggtaaactttccgattgccgcgaacgcgatgcaacga

SEQ ID NO: 295169 - DNA, 468 bp, Unknown
  Bacterial polypeptide expressing nucleotide sequence isolated from the Sargasso Sea
aatgaatcaaaattattcatcagaatcaataaaagtacttaaaggtcttgaagcagtaagaaaaagacctggtatgtatattggtgatacagatgatggttctggccttcatcaaatgatttatgaagttgtagataactccattgacgaatcattggctggctattgtgataaaattgaagtacttttgaactcagatggtacagttacaatttcagataatggtagaggaattccagtagataatcataaggaggaaggaattccagctgcacaactaatcatgacagaattacacgctggtgggaagtttgatcaaaactcttataaagtttcaggcggtcttcatggtgtgggagtttctgttgttaatgctttgtctgaaaaattattattagagattaatcgtgatggtagtatttataatatgcagtttgctaatggcgttgttttagataaattaaaaaa

SEQ ID NO: 295170 - DNA, 883 bp, Unknown
  Bacterial polypeptide expressing nucleotide sequence isolated from the Sargasso Sea
accagttcatagaagaattttgtattctatggatgaattgaatatgcgaccaggaagctcatataaaaaaagtgccaggcttgttggagaggtattaggtaaatatcatcctcatggtgatacctcagtctatgatgcaatggtgcgattagctcaagacttttcaatgcgatatccacttgtcgatggacaaggaaactttggtagtattgatgatgatcctccagctgctatgcgttatacagaagctaaacttgcaagtattgctatggaaatgcttggtgatattgaccgaggtactgtagattttgctccaaattttgacgattccctttctgagccagttgttttaccctcgcggattccaaatcttattgttaatggctctacaggaattgcagttggaatgactactaatataccaccacataatctatcagaaatatgtgatggtattgttcacttaatcaaaaatcctagagctgacgttgaagaattaatggaatatgtaaaaggtcctgatttccctacaggcgctttgataatgggaactacgggtattcgtgaagcatttgagacaggtcgaggaagagtagtaattaggtcaaatattgaaatagaagaattaggtagaaacggcagatatcaatttgttataactgacataccatttatgactaataaagcaaatcttgtccaaaaaattgccacactatccaaagagaaaaaaattgaaggtatctcagaaattcgtgacgaatcagacagaaaaggaatgagaattgtaatagaacttagaagagatgctcaagctcaagttgtaaaaaatatattatataaacaaacagcattacaaacatcattacattacaatatgtggcgc

SEQ ID NO: 295171 - DNA, 708 bp, Unknown
  Bacterial polypeptide expressing nucleotide sequence isolated from the Sargasso Sea
cgactcatcgaaaattaaggtgctaaaagggctagaggccgtcagaaaacgccccggaatgtacataggagacaccgaagacggaacgggccttcatcatatggtctttgaggtcgtcgacaacagcatagacgaggctttggcagggtattgtgatttaataaaggtggtcattcacgctaatgagtcaatatctgtctctgacaacggcagaggaattccggttggcattcatgaggaagaaggaaggtctgccgcagaggtaattatgaccacattgcacgccggcggaaaatttgatgataattcttataaggtttctgggggtttacacggggtcggcgtatctgttgtaaacgcgctttctgaggatcttgagcttattatcagccgagaaggacatattcatagccaaaactataaaaacggcgatcctgtctccccgttgtcaaaaaaagaaaaaacgggcaagacgggaactgaggtacgcttcttgccaagcgtcgatgtgttcaaacgggtcgaatatgactatgatattcttgctaaaagactacaggagctttcttttttaaattcaggggtttgcattgagctaaccgacgagcgcgacggcaaaacggatcgtttcgaatatcaaggaggaataaaagcttttgtagagcatctaaacagaaataccaccccaattcacaataccccggttga

SEQ ID NO: 295172 - DNA, 861 bp, Unknown
  Bacterial polypeptide expressing nucleotide sequence isolated from the Sargasso Sea
cggtcctaccggcctacatcatctcgtgtatgaagttgtagataatgcagttgatgaagcaatggcgggacattgtactcaaatagaaattgaaatactttcggatggtggttgtgaggttcgggataatggacgaggtataccagttggcaaccatcatcaatatgaagatctaacagctgctgaagtcgttcttactgtccttcatgctggaggaaaatttgggggggaaggttataaagtttctggcggacttcatggagtgggggtatctgtcgtaaatgcgttaagttcccaagttgaagtggaaattgatagagatggaaaacgtcactttatgtcgtttaaagacggcggcacaccagatcaaaaactctgcattattggagatgctcctaatcagcgaactggaacaactgtccgattttggccagataaggaaatatttaaagaaggaattgaatttagagcggcaactcttattgaacgtttccaaatgatggcttttctcaacaaaggcttagaaattaagttcctagactctcgtagagacactggtgtgaaagaaaaaacattttgttatgacggtggaattatggactttgtccaacatgtaaatgcttcaaaagaagctctctttcaagatgttgggtatttcgaagaagaagatgaagaacaagaagttgaaattgcctttcaatggaatacgggttttaatacagatggaattcatagttttgctaatgggatagcgacaagtgaagggggtatgcatgaacaaggttttcgtactgctttaaccagagttattaatcaatatgcacgtgataaaaatcatttacgtgaaaaagatgacagtct

SEQ ID NO: 295173 - DNA, 937 bp, Unknown
  Bacterial polypeptide expressing nucleotide sequence isolated from the Sargasso Sea
aattcaggtgttaaaatcaatttaagtgatttaagaggtgttgaagctaaagaagtttctatgcgttatgatggaggggtagcagcctttgttgagcatttagatagaaacaagcaaaaactacacccaactataattatttctggagaaaaagaaggtgttcaggttgaattggcattacaatggaatgatagttatcatgaaaacgttctttgctttacaaacaatattcctcaaagagatggtggcacgcacttagctggttttagaagtgggcttacaagaacaataaataacttttctaagaacgccaataaaaatcaaaaaatttctttgtcaggggatgatgctcgtgagggtttaacatgtgttctttcagtaaaggttcctgatccaaaattttcatctcagacaaaagataagcttgtttcttcagaagtcagaaccattgtagaaagtttagttaatgataaattaaaccagtggtttgaagaacacccatcagatgtgaaaattgttataaataaaattgttgaagctgctcttgctagagaagcagcgagaaaagccagagaacttacaagaagaaaaggagctttagatatatctaatcttccaggtaagctagctgattgccaagaaaaggatgcttcaaagtcagaattatttcttgtcgaaggtgactcagcaggtggttctgctaaacaggctagagatagaaaatttcaagcagttttaccgttaaaaggaaagatacttaatgtagagcgagctggtgaaaataaagtaattggctcgacagaaattgggacgttaataacagcattaggttcagggtttaaagatgactttgatttatcaaagataaggtatcacaaaattgtaattatgaccgatgcagatgtggatgggtcacatataagaacactccttctta

SEQ ID NO: 295174 - DNA, 828 bp, Unknown
  Bacterial polypeptide expressing nucleotide sequence isolated from the Sargasso Sea
gatgagcgagcaagtcgccgataatttgacgggcgaaggttacggagccgattctattaaggtcctgcgaggccttgatgccgtgcgaaagagacccggcatgtatatcggcgatactgacgatggaaccggcctacaccacatggtcttcgaagtcgtcgacaacgcaatcgacgaagcgatgggtggccattgtgatcaaatcgacgtcgcgcttaatggcgacggttccgtcaccgtagccgataatggccgcggcattcctgtggatatccacgcggaagaaggcgtctcggcggcggaagtcattatgactcagttgcatgctggtggtaaattcgaccagaacacctacaaagtctccggcggactgcacggcgtcggcgtatcggtagtgaatgcactgtcctccgaactgaaactcaccatcaagcgcgatggtcgagttcattgcatgagtttccgcgacggggaggcggccgcaccgctagaagtcacgggcgacagtagtggtgagaccggaaccgaggtgactttcacgccgtcgtcgaaaacatttacacgaacagagtttgattattcaatcctggaacatcgcctgcgcgagctcgcctttctcaacccgggcattcgcatcgtgctcaccgatagccgcaaaccggatacgccgagtgagacctttcattacgaaggcggcctgacggaattcgctaaatatctcgaccggtcgaagacccccgtttttgaaccgccaatttctataaagggcgacaaagacgaggtcgtggttgagatcgccatgcagtggaacgacagcttccacgaaac

SEQ ID NO: 295175 - DNA, 775 bp, Unknown
  Bacterial polypeptide expressing nucleotide sequence isolated from the Sargasso Sea
aacaaaaatggaaatgatttatttagaaaaccaatttacattgaaggcaaaaaaaataatatagaattagagtgttctttaaaatggaatgcaggatatgcagaagatatatttccatatacaaataacatctatcaaaaagatggtggaacccatttattgggatttagaagtgcattaacaagagtaatcaacaagtatgctaatgaaaataatttactaaagaaaaataaattagcaatttctggggatgatattaaggaaggtctaacttgtgtactttcaactaaaattcctgatccaaaattttcatctcagacaaaagataagctagtttcatcagaagtaagaatgattgtagaaacattagtaaatgaaaaattatctatttggtttgatcaaaatccttcaattgcaaaaattgttttagctaaagttattcaagctgcaatggccagagatgttgcaagaaaagcaagagaaaatgtgagaagaaaaggagctcttgaattgagtggtcttcctggaaaattagctgattgtcaaattggcaaacaagaaggaactgaattgtttattgtagagggggattcagctggtggatctgctaaacaaggaagaaatagagcaaatcaagcagttttaccacttcgagggaaaatacttaatacttacgtggaagatttaaatttgaagaaaaatattaatggtaacggtagtggaaatggttctgatcaaagaacaaaggctttgtctaaaatgatttcttcaaatg

SEQ ID NO: 295176 - DNA, 412 bp, Unknown
  Bacterial polypeptide expressing nucleotide sequence isolated from the Sargasso Sea
catgtcatctcaaaataatttaaaatatcaagctgactcaattaaagttctcaagggtttagaggctgtaagaaaaagacctgggatgtacataggtgatacagatgacggcacaggtctccatcatatggtttacgaagttgtagataattcaattgatgaagcgcttgctggtttctgtaaaaatatagaagtaagtattaattctgatgaatcagttacaattaaagatgatggaagaggtatacctgtagatattcataaaagtgaaaaaaaatcagctgcagaagtaattatgactcaattacatgctgggggtaagtttgatcacgactcgtacaaagtttcaggtggactacatggtgttggagtgtcagttgtaaatgcattatccgaaaagcttaaattgaat

SEQ ID NO: 295177 - DNA, 913 bp, Unknown
  Bacterial polypeptide expressing nucleotide sequence isolated from the Sargasso Sea
tactaacaacatccatcaaaaagatggtgggactcatttattaggctttagaagtgcattgactagagtgataaacaagtatgcaaatgaaaataatttacttaagaaaaataaattagcaatttcaggtgatgatattaaggagggtcttacttgcgttctttcaacgaaaattcctgaccctaagttttcatctcaaacaaaagataaactagtttcgtcagaagtaagaatgattgtagaaacattaataaatgaaaaattatctatttggtttgatcaaaatccgtcgattgcaaaaattattttagcaaaagtaattcaagccgcaatggccagagatgttgctagaaaagcaagagaaaatgtaagaagaaaaggagcgcttgaattaagtggtcttccaggaaaattagcagattgccaaattggaaaacaagaagggacagaattgtttattgttgagggagactcggcgggaggttctgcaaagcaaggaagaaatagatcaaatcaagcagttttgcctcttagaggtaaaatattaaacacttatgtggaggattttaatgtgaagaaaaatcagaatggtaatggaaatggatctgaccagagaacaaaagctttatctaaaatgatttcttcaaatgagatagttactttaataaatgctttaggtttagatccaaaagcacaagaaatagatttaaaagatttgagatatggaaaaataattattatgactgacgctgatgtggatggatcacatataagagctcttcttttaactttttttaataacaaaccatttagcaaactaattgaaaatggtcatatttatttagctcaacctccattatttaaattaaacaaggttcaaaaggtatttacatcaaagatgaagaggaattag

SEQ ID NO: 295178 - DNA, 902 bp, Unknown
  Bacterial polypeptide expressing nucleotide sequence isolated from the Sargasso Sea
aggtatagggcctaatgaatttaattctgataagttaagatatcataaagttataataatgactgatgctgatgttgatgggtcacatataagaacacttttactgactttcttttttaaggaaatgagaggacttattgaaaatggtaatttatatattgcaagaccacctttgtttaaaattaaacgaggtaaggaagaactatatattagtgatgaagaaaatcttcagaaatctcttataaaatatggagtagatgatgcaatttttaagactgcacttggaaatcaattgaaagaagaggatttgataaatactctagttaaaattacagaagtcattgacatttatagtaaagttccaggtagatatgataaaaaagttttagagcaaattgctatttcaggatgtctggatgttaataagtttttaggctcaaaagaaaaaacaaaagacgctattaactatatttcaaaaaggattaatataagtaggccagattatgatagaggctggaaaggcgaatattcaatcgataagggatttgtatttaggcgagaattaaggggtcttgaggacagtattgtcatagacaataatctgttggagtcgcagcttataaaaaatcttaactcaaattactcagaactttttcaaatgtttgaaatgcctagtgaactaattttaaaaaatgaaacactcaaggtttattccccatctcaactcttcaatactattcaaaatttaggcaaaaaaggcctatctatgcagagatataagggtttgggcgaaatgaatccagatcaactttgggaaacaacattggatccaaaaaatagatccttaatacaagtcaaaattgatgatgaagagtccacaaaaggtgtattgaagatttaat

SEQ ID NO: 295179 - DNA, 691 bp, Unknown
  Bacterial polypeptide expressing nucleotide sequence isolated from the Sargasso Sea
ttggaaaataattcagataactcatccaaagaaaatattacatctatatctataagcgatgagatgaaaaaatcctatttagattacgctatgagcgtgattgtttctagagcattgccagatgttagagatggcttaaagccagtccatagaagaatattatatgctatgtacaaaggaggttatgattggtcaaaaccttatagaaaatcagcaagaatagttggcgatgttatgggtaattatcatcctcacggcgattctgctatttatgactcaatggttcgcatggcgcaagacttctcaatgagagttgaattagttgatgggcaagggaattttggttctgttgatggtgatccgccagctgcaatgagatatactgaatctagactttcaagatcagcagaattattattacgtgacattgataaagaaactatttcatttgttccaaattacgatgaatctcaattagaaccatctgtacttcctgcagaatatccaaatatattagttaatggagctggtggtatagctgttggtatggcaacaaatattccacctcataacccagttgaagttattaatgcttgtaaagaacttatttataatgcggaattgtcaattgaagatttaatcgagcaggttaaaggccctgattttccaacatctggatttattcttggaa

SEQ ID NO: 295180 - DNA, 592 bp, Unknown
  Bacterial polypeptide expressing nucleotide sequence isolated from the Sargasso Sea
aatgtcagactctacagctcgtgatgcatcaaactacgactcgtcgcatatcaaggttctcaaaggactagatgccgttcgcaagcgaccaggcatgtacatcggagatacagatgacggaacaggcttgcaccacctggtttttgaggttgttgataactcaattgacgaagcgcttgccggatattgtagtcatatagaagtcactatccatgccaacaacgctattacggtatcagataatggacgtggtatccctgttgatatacaccctgaagaacaacgctcagcagctgaggttatcatgacggtattacatgctggcggtaagtttgatgacaatgcctataaagtatctggcggcctgcatggcgtcggcgtctcagttgttaacgcgctatcatcagagcttacactcaccatccataaaaatgaaaaacgctatcgccaaacctaccagtacggaacccctgaagcgccacttgctaccgtcggcgactcagaacgcagtggaacaaccattcacttcttgccctgccctaacatatttgctatcacagaattcagctatgaaacactggcttcaagactt

SEQ ID NO: 295181 - DNA, 799 bp, Unknown
  Bacterial polypeptide expressing nucleotide sequence isolated from the Sargasso Sea
tgctgattgtcaaatatctaaacaagaaggtacagaattatttattgtcgaaggagattctgcaggaggttcagctaaacaaggaagaaatagagaaaatcaagcagtattaccattacgtggaaaaattttaaatacttacgttgattctaatggttctaaaaaaaatggaaatgcaaatgacataaaaactaaaactttatcaaaaatgatttcttcaaatgaaatagtaacattaataaatgctttgggattagacccaaaagtagaagagatagatttaaaagatctaagatatggaaaaattattataatgacagatgcagatgtagatggttctcacattagagcattattactaactttttttaataatcaaccatttaacaaacttatagaaaatggttttgtttacttggctcaaccacctttatttaaaattaataagggatcaaaaggaatttatataaaagatgaaaaagaactttttcaatacattttaaagaactctaaagagttaaaaaaatttaaaaaaggttctaaagaatttgaaagaatctattctgaacaaaagtcaatgttgagcatacaacgctttaaaggattaggagaaatgaaccctgaagaattgtggaatactacactaaatccagaaacaagaagtttgcttcaagttaggtattcaaaagatttaaaaaaagatcaagatattatccatacattaatgggcaacgatgtgtcttcaaggaaagattttatagtgtctaatgcaattaatgtttcaaatttagacatataa

SEQ ID NO: 295182 - DNA, 904 bp, Unknown
  Bacterial polypeptide expressing nucleotide sequence isolated from the Sargasso Sea
aaagtacctgaccccaaattttcctctcaaactaaagaaaaactagtgtcatcagaagtagaaagcattgttagcagcgtccttaataaaggattaaatgaattcttgttagaaaatccaaaagaggctcatgttattttatctaaagtttctgaggcagcgctagccagagaggctgcaagaaaagcaagagaaatgacaagaaggaaaggggttttagaattagctggacttccaggcaaacttgctgattgtcaagaaaaggatccagcactttcagaaatatacctagttgagggtgattctgccggaggttctgctaaacaaggcagaaataggaaatatcaagccatattgccattaaaaggaaaaatcttaaacgtacaaaaagctaggattgataaggttttgtcatctgcagaaatcggaacattggttaaggctatgggttgtggcattgggagcgaagactttgatatcgataaactaagataccatagaataattatcatgaccgatgctgatgtcgatggctcacatataagaactcttttgctaactttcttttatcaacagtactatgatattttagaaaaaggacatgtatatattgccatgccacctctttataaaattactaaaggtaaatcctttgtttatgcgtccgatgaggatgaaaaagataaggctataaaagatttttcaaaatcgggttcgaggggtatagatgtccaaagatataaaggccttggggaaatgaaccctgatcaactttgggaaacaacaatggatcctgaaaacagaagaatgatgagagtggacattaaagatgctcaagatgcatcagatatgtttgaaaccttaatgggtgatgatgtagagcctagaagagagtttatgaaac

SEQ ID NO: 295183 - DNA, 619 bp, Unknown
  Bacterial polypeptide expressing nucleotide sequence isolated from the Sargasso Sea
tatggaaaatggaactacattggaggaaagtcttaaggaagcaatatcctcacgttatctaacttatgcagtatcaacaattgtaaatagggctttgccagatgggagagacggactaaagccagttcatcgtagaatcctctatgcgatgtttaaattatctcttctatcaaatagcccttataggaaatgcgcaaaaattgttggtgaggttatgggaaattatcacccccatggcgataaggctatctatgatgcgctagtccgtttagctcaggattttagtgttcgatatacacttatcgatggtcagggtaattttggtaacattgatggagacaatcctgcagctcaacgctacacagaggccagattagataaggttggagagtttcttttagaaggtataggtgaagactctgtagattttagagataattatgatgggtcagaaaaagaacctgaggtaatgcctgctagtttcccaaatcttctagcgaatggtgctagtggtattgctgttggaatggctacgaatattcctcctcataacatatctgaactttcagacgctatgcttaagttgattaagtctccaaatatcagcgatgaaaagtaa

SEQ ID NO: 295184 - DNA, 229 bp, Unknown
  Bacterial polypeptide expressing nucleotide sequence isolated from the Sargasso Sea
atgacaaataataataccaattcttatcaagcagactccatcaaagttttaaaaggtcttgaggcagtaagaaaaagacctgggatgtatattggtgacacagatgatggaactggtttacatcatatggtctatgaagtagtagataattctattgatgaggcattagcaggtcattgtaaaaaaattgaagtgagtataaattctgatgggtcaattacagttcaag

SEQ ID NO: 295185 - DNA, 905 bp, Unknown
  Bacterial polypeptide expressing nucleotide sequence isolated from the Sargasso Sea
aagaaagaaaaaatatcagagtttaagtttgatggtggtgttctcgaatttgtagattttctagatgaaaaaagagaaaagttacaaaacaaaaatggaaatgacttatttagaaaaccaatctatatcgaaggaaaaaaaaataacatagaattagaatgttctttaaaatggaatgcaggatactcagaagatatatttccatatacaaataatatttatcaaaaagatggaggaactcacttactgggatttagaagtgcattgacaagggtagttaataaatatgccaatgaaaataatttattaaagaaaaataaattagcaatctcaggtgatgatattaaagaaggtcttacttgtgtactttcaactaaaattcctgatccaaaattttcttcgcagacaaaggataagttagtttcatcagaggtaagaatgattgtagaaacattagtaaatgaaaaattatctatttggtttgatcaaaatccgtctattgcaaaaattattttagctaaagttattcaagccgcaatggcaagagacgttgctagaaaagcaagagaaaatgtaagaagaaaaggagctcttgagctaagtggtctccctggaaaattagctgactgtcaaattggcaaacaagaaggaactgaattattcattgtagagggagattcggctggtggatctgcaaaacaaggaagaaacagagcaaatcaagcagttttaccacttagaggaaaaatacttaatacttatgtagaagattttaacgtaaagaaaaatggtaatggaaatggttcagatcaaagaacaaaagctttatctaaaatgatttcttcaaatgaaatagttactttgattaatgcgctaagtttggatccaaaagcacaagagattga

SEQ ID NO: 295186 - DNA, 858 bp, Unknown
  Bacterial polypeptide expressing nucleotide sequence isolated from the Sargasso Sea
acaaaaagaacaactgttaattctgtatttcattttgtaaaagaagcttcagatggcataaccatcgaagtatcccttcaatggaatgatggctatcaagaaaacattcaatgttatacaaacaatattaaacaaagagacggtggaacccacttagtaggattcaggacagccttaacaaggacactgaataactacatggaaaaggaggggatgaataaagagaaggtgtctacctcaggcgatgatgccagagaaggtttggttgctgttgtttctgtcaaagtcccagatccaaaattctcctcacaaaccaaagataaattagtttcttccgaggtaagaccagcagtagagcaagaaacttataaagctttgacagaatatctgttggagaatcctgcagaggcaaagttaattgctactaaaataatagaagctgctagagctagagaggctgctcgtaaagcaagagaacttactaggcgaaaaggcgtatttgagggaggtggtttaccgggcaaactttcggattgccaagaaaaagatcctgctaaaagcgaaatctatttagttgagggagaatcagcaggaggttcggctaagcaagggcgtgatagacattttcaagccattcttcctttgaaaggaaaaattctcaatgtagaaaaagcaagactagacaaggttctatcatcagaagaaattatcattttaatctctgccttaggttgtgggataaaaggagaagactggcaagaagagaaattgagataccatagaataataattatgactgatgctgatgtagatggctctcacatcagaactctgatattaactttattttatcgccaa

SEQ ID NO: 295187 - DNA, 509 bp, Unknown
  Bacterial polypeptide expressing nucleotide sequence isolated from the Sargasso Sea
aatgtcaaaaaattctgctttaaactccaatccatcttatggtgcggattcgataaaagttctaaaaggcttagatgccgtaagaaaaagaccaggcatgtatattggagataccgatgatggttccggcttacatcacatggtcttcgaagttatcgataacgctattgatgaagcattagccggtcactgcaaaaatattactgttataattaataacaataacactattacagtagaagatgatggcagaggtataccagtagatatgcacaaaagtgagaagatttctgctgccgaagtaataatgacccagctacatgcaggtggaaaatttgatcacgattcatataaagtatcaggcggtcttcatggcgttggcgtatcggtggtaaatgctctatcagaaagattagagcttaatatttatagagatggaaaagaatattcagtcatttttaaaaacggcaatacattaaaaccattaaaacaaattggtaaaacaaaaa

SEQ ID NO: 295188 - DNA, 622 bp, Unknown
  Bacterial polypeptide expressing nucleotide sequence isolated from the Sargasso Sea
aatgaaaaataataattatcaagctgattcaatcaaagttttaaaaggtttagaagctgtaagaaaaagacctggaatgtatatcggtgatactgatgacggcactggtcttcatcatatggtctatgaggttgttgataactccatagatgaagcattagccggttattgtaaaaatattagtgtaaagattaatcgtgaaggaacagttactgttaaagatgatggtagaggaataccaattgacactcataaaggggaaaaaaaatctgcagcagaagtgataatgacacaattacatgcaggtggaaaatttgatcatgattcctacaaggtttcaggaggattgcatggagtaggtgtatctgtggtcaatgctttatctgaaaaattacaattagaaattaatagagacggaaaaaaattttttatagaatttaataatggagatgcaaaatctccaataaaggttattggaaaatcaaaagaaacaggaacacaaattactttcttgccgtcgaaaaaagttttttcttcaattaaatttagtggaaacatacttattaaaagaatgcgaaaattggcatttttaaatagaggtattaagataacttttgttgat

SEQ ID NO: 295189 - DNA, 801 bp, Unknown
  Bacterial polypeptide expressing nucleotide sequence isolated from the Sargasso Sea
tgttttatcaactaaaattcctgacccaaaattttcatcacaaaccaaagataaattagtctcttctgaagtgagaatgattgtagaaacagttataaacgaaaaattatcaacatggtttgatcaaaatccaactgttacaaaaataattctagctaaaattattcaagcagctatggccagagatgttgctagaaaagcaagagagaacgtcagaagaaaaggtgcccttgaattgagtggtcttcctggaaaattagctgattgccagataggaaagcaagaagggacagaattgtttattgttgagggagattcagcaggaggttcagcaaagcaaggaagaaataggtcaaatcaagctgttttacctctaagaggaaagattttgaatacttatgttgaggatttgacagttaaaaaaaatggaaatggaaatggatcagataaaagaactaaagcattatcaaaaatgatatcttcaaacgagatagtaacattaatcaatgcattgggcctagatcctaaagcagaagagatagatttaaaagatttaaggtatggtaaaataataataatgaccgatgcagatgtcgatggttcacacatcagggctttattattaactttttttaataacgaaccatttaataaattaattgaaaatgggcatatatatttagctcaaccaccgttatttaaaataaacaaaggaactaaaggcatttatataaaagatgaaaaagaattagaagattatattataaataacaacaaagaaattaagaaaataaaaaaagg

SEQ ID NO: 295190 - DNA, 622 bp, Unknown
  Bacterial polypeptide expressing nucleotide sequence isolated from the Sargasso Sea
aatgaaaaataacaatagttataaagcagattctataaaagttttaaaaggtcttgaggcggttagaaaaaggccaggcatgtatattggcgataccgatgatggtactggattacatcatatggtttatgaggtagtagacaattctatagatgaagcattagcgggtcattgtgatagaattgaaatttcaattaattcggatggatcaataacagttaaagataatggcaggggaattcctgtggatttgcataaaggtgaaaaaaaatctgctgctgaagtaattatgactcagttgcacgccgggggaaaatttgatcacgattcttataaagtatcagggggtttacatggagtaggtgtttcagtagttaatgcactatcagaaaaattaaaactcgaaataaacagggatggtaaaaaatattttatcgaatttaaagatggtaaggctaaagcggcacttaaagtaattggaaaatctaaaatatctggaacagaaataaattttgttccatccaaagaaattttttcttcaacaaaattcagttcgagtataattcaaaagaagatgcgtgaacttgcattcttaaataagagcataaaaattatagtaaat

SEQ ID NO: 295191 - DNA, 676 bp, Unknown
  Bacterial polypeptide expressing nucleotide sequence isolated from the Sargasso Sea
atgagttcatcatatctttcttatgccatgagtgtaattgtaagtagagcattacctgatattcgagatggattaaagccagttcatagaagaatattatttgcaatgtacaaagggggctatgattggagtaaacaatttagaaaatcagcaagaattgttggagatgtaattggtaaatatcatccgcatggtgatcaatcagtttatgatgctttagtaagaatggttcaagatttttctatgagtttaccacttattgaaggtcaggggaattttgggtcaattgatggagatcctgcagctgctatgagatatactgaaacaagactgtcaaaagtttcacaatttctaattgatgatattgaaaaaaatactattgaatttaaaagtaattacgacgagacagagaaagaaccttcagttttaccagctcagtatccaaatttattagtaaatggtgcaggaggtattgcagttggtatggcaacaagtattcccccacataaccttggtgaaataatagatggaaccttagctctgattaacaacaaagatattacagtcaaacaattaatgaaacacattccagggcctgattttccaactggtggagttataattggtaaagatataattaaacaagggtactacaaaaggacgaggctcatttaaa

SEQ ID NO: 295192 - DNA, 921 bp, Unknown
  Bacterial polypeptide expressing nucleotide sequence isolated from the Sargasso Sea
ggggcacaagaataatattgagttcagttgctctctttggtggaatgacagttattatgaacaaattctcaccttcactaataatattagacaaaaggatggaggcactcatttatcaggtttcagagcagcacttacgagggttgttaataactatttagatagtagcaaagtttcaaagaaacaatccataagtccaaatagtgatgatattagggagggattaacttcagttttatctgttaaagttcaagatccaaagttttcttcacaaacaaaagacaagcttgtttcatctgaagtaaggccagtggtagaaaatttagtcaatgaaaaattgtctgactggtttgaacgacatccgaatatagcaaaagaaattttcctaaaaattcaaaaagctgctgaggcaagagaagcagcaagaaaagctagagaacttacaagaagaaaatctgcacttgaaataacgaacttaccaggaaaactagctgactgtcaggaaaaagatccattactctcagaaatatttattgtcgagggagattcagctggtggctcagccaaacagggtagagatagaaagtttcaggcaatcttaccattaagaggtaagatacttaatacttggaaatcgagaacagataaaatcttaggctcacaagaaataggaactttaattacagcacttggaacaggtatagggcctaatgaatttaattctgataagttaagataccataaagttataataatgactgatgctgatgttgatgggtcgcacataagaacacttttattgactttcttttttaaagaaatgagaggacttattgaaaatggtaatttatatattgcaagaccaccattatttaaaattaaacgaggtaaggaagaaatttatataagtgatgaggaaaa

SEQ ID NO: 295193 - DNA, 723 bp, Unknown
  Bacterial polypeptide expressing nucleotide sequence isolated from the Sargasso Sea
tatgatgctttggttagaatggtacaagatttctctatgagtctacctttgattcaagggcaaggaaattttggttctatagatggtgatcctgctgcagcaatgagatataccgaaactcgcttgtcaaaagtttctcaatatttaattgatgatattgaaaaaaatacaatttctttcaaaagtaattatgatgaaactgagaaagaacctagtgttttaccagcacagtttccaaatttattagtaaatggagctggtggtatcgctgttggtatggcaacaagtatacctcctcacaatttaggtgaaattattgatggcactttggccttaatagataataaagatattaaaattagagaattaatgaaacatatacctggtccagattttccaactggtggtgtaattataggtaaagatataattaaacaagggtataataatggaagagggtcctttaagataagaggagaaatctcaattgaacaacaaaaaaatggtcgtgaaagactagtaataacttcaataccgtatcaagttaacaaatctgttttaaatgaaaggattgctcagttagtaagagaaaaaaagattgaaggtataagagatattcgagacgaatcaaatagagaaggtatcagagtagcaatagatttaagaaacggtgtagaaccagaaactataaagagacaattatataaaaatacacaaatagag

SEQ ID NO: 295194 - DNA, 898 bp, Unknown
  Bacterial polypeptide expressing nucleotide sequence isolated from the Sargasso Sea
atcaaaatataaatatcaatggatatattttgattatactgataccttaatttctatttttatcaattctccaagctttgaagggcaaacaaaaaaaagaattacaatgccaaaattacaaaaacaattagaagaattattacaaaaccaaattttattatggttaaatagcaataaaagagaatcattaaaggttatagaaattttaattgagcgttctttgttaagaacagatttatcaaagataaagaaattagatagaaaatctataaaagaaaaaaatagattacctggaaaattagttgattgtactagcaacacaataaagaataccgaactttttatagttgaaggagatagtgctggagggtcagcaaaacaagcaagattcagatctacgcaagccattcttcctcttaaaggaaaaattttaaatgtttatagtgtatcattgtcaaaaattgcagataataatgaaattcaaaatcttgttcattctcttggttgtggactagggaaaaactttcaattatctaaattaagatatgaaaaaattattttgatgacagatgcggatgttgatggatctcatatagctactttattaattacttttttttataaatatatgagaaaaattattgaagaagggaaactttatttagcaatgcctccattatataaaatttcttataaccaagagaatttttttgcatacaatgaaaaagataaggataaaatactcaatgacaataagggggcgccacaacttacacgttttaagggactgggagagatgccagctactcaattaaaagatacaacaatggatcctgaaaaaagatctttaatacaattaaaattagctgatggtattaaatatattaaacacaactga

SEQ ID NO: 295195 - DNA, 893 bp, Unknown
  Bacterial polypeptide expressing nucleotide sequence isolated from the Sargasso Sea
gtatgatggaggggtattggagtttgtagaatttttggatgagaaaagagaaaaacttttgaataaaaacggaaataatctttttaaaaaaccaattattattgaaggaaaaaaagagaatgttacgattgaatgttctttaaaatggaacggtacatacacagaggatatatatccatatacaaacaatatttatcaaaaagatggaggaactcatttattaggctttagaagtgcattaaccagagtaatcaacaagtatgcaaatgaacataatttgctaaaaaaaaataaatttacaatttctggagatgatattaaagaagggttgacttgtgtaatttctacaaaaataccagatccaaaattttcttcacaaacaaaagataaacttgtttcgtctgaagttagaatgattgttgaaacgataattaacgaaaagttatcaatttggtttgatcaaaatccctcagttgctaaaataattttagcgaagattattcaagcagctttagcaagagatgtagctagaaaagctagagaaaatgttagaagaaaaggagcgatagaactcagtggattacccggtaagttagctgattgccaaattgggaaacaagagggcacggagctttttatagtagagggagattcagcaggaggatctgcaaagcaagggaggaatagggaaaatcaagctgtgttacctcttaggggtaaaattttaaatacttatgtagaggatttgaatattaaaaaaaatggaaacaataatggaactgaacaaaggaccaaagcgctatctaaaatgatttcttcaaatgaaattttaactttaattaatgcacttggattagatcctaagtcacaagaaattgacttaaaagattaag

SEQ ID NO: 295196 - DNA, 253 bp, Unknown
  Bacterial polypeptide expressing nucleotide sequence isolated from the Sargasso Sea
atgtctgagaattatgactcgtcgagtattaaagtacttaaaggattagacgcagtaagaaagcgtcctgggatgtatataggggacaccgatgatggcacaggcttacaccacatggtgtttgaggtcgttgataactcaatagacgaagcccttgctggtcattgtgatgatatttttgtaacgattcacttagatggctctgtatcggttagagataatggccgtggtatcccagtggtctatccatgaa

SEQ ID NO: 295197 - DNA, 307 bp, Unknown
  Bacterial polypeptide expressing nucleotide sequence isolated from the Sargasso Sea
atgtctaaaccaaacaataattatcaggcagattccataaaagttttgaaaggtcttgaagcagtaaggaaaagaccaggtatgtatataggtgatacggatgatggaactggtttgcatcatatggtttatgaagttgttgataattctattgatgaagcattagcaggatattgtaaaaatataagtgtaagaattaattctaatggaacaatcacagtaaatgatgatggaagaggaattccggtagatattcataaaggtgaaaaaaaatcagctgctgaagtaattatgacacaacttcatg

SEQ ID NO: 295198 - DNA, 871 bp, Unknown
  Bacterial polypeptide expressing nucleotide sequence isolated from the Sargasso Sea
acaaaaaagaatgaaaaattttcgttgtctggagatgattttagagaaggtttaaccgttgttatttctgttaaagttcaagaaccccaatttgaaggacaaacaaagacaaaattgggtaacggcgaggtaaagggcttagtagataatgttgtatatgatggcatacaagcctttttagaacaaaatccaaaagtaggaaaaagaattattgaaaaggcggcagaagctgcaagagcaagaatagccgcaaaaaaagcgagggaattagtaagaaaaaaatcaggactaggatcaaccacccttccaggaaaattagcagattgttcaaacaaagatcccatgcagtgtgaattatttctcgttgagggagattctgctggaggaacagctaaacaaggaagagatagaagaactcaagccattttacctttgcgcggaaaagtaattaattctgaaaaagcaagagaggacaaacttctggccaataatgaaattcaatccatgataacggcacttgggtgtggttttggtgaagacaaagatgatcctaacagctttaaccctgaaaaattaagatatcataaaatagtaattatgacagacgctgatgtggacggcagccacataagaactttattattaacgtttttttggagaaaaatgaagagccttgttcagggcggttatttatatatggcaatgccacccctatataaattaaaacagggtaaaaaagaaagatatgcatataccgatgaagaaagagataatattttaagaaggctagagtcggaaaataaaacaaaaattgatattcaaaggtataaagggttaggagagatgaacgcagaacagctttggaaacaac

SEQ ID NO: 295199 - DNA, 864 bp, Unknown
  Bacterial polypeptide expressing nucleotide sequence isolated from the Sargasso Sea
aatgcgagaattagcctttttaaataaaggtataaagatttcattcgtagacttaagtcaaaaaaaagaaaaaattatagagtttaggtatgatggtggggtatcagaatttgttgaatatttagatgagaaaagagaaaaacttcaaaataaaaatggaaaagatatttttaaaagaccaatttatattgaaggcaagagtcataatatagagatcgaatgttctttaaagtggaattcaagctactctgaagaagtatatccatacacaaataatatctatcaaaaagatggtggaacacatttattaggttttaggagcgcattgacgagagttgtgaataaatatgctcatgaacataatctattaaagaaaaataaattgacgatctcgggtgatgacattaaagagggtttaacttgtgttttatcaactaaaataccagatcctaaattttcctctcaaaccaaagataaattagtttcctcagaggtaagaatgatagttgaaacattattaaatgaaaaactatcaatatggtttgaccaaaatccatctattgctaaagtagttttagcaaaaattattcaggctgctttagcaagagatgttgcacgaaaagctagagaaagtgtgagaagaaaaggagcgctagaattaagtggactaccgggtaaattagctgactgtcaaataggcaaacaagaaggcactgaattatttattgtagagggagactcagctggtggttcagctaagcaaggtagaaacagaacaaaccaagcagttttgcctttgagaggaaaaattttgaatacatatgtagaagagtttaaaaataagaaaaacggaaatggtaataa

SEQ ID NO: 295200 - DNA, 688 bp, Unknown
  Bacterial polypeptide expressing nucleotide sequence isolated from the Sargasso Sea
atgagctcgtcttatttatcgtatgcaatgagtgtgatagttagtagagctttaccagacattagagatggattaaaacccgttcatagaagaattctttttgccatgcacaaaggtggttatgattggtcaaaacaatttagaaaatctgcaagaatagtaggtgatgttattggtaaataccatccacatggagatcaatcagtttatgatgccttagttaggatggtccaagatttttctatgagtttacctttaatagatggccaaggtaattttggttcagttgatggtgatcctgctgcagcgatgaggtatactgaaactaaactttcaaaagtttcccaatttttaattgacgatatagataaaaatactgttgattttaaaagtaattatgatgaaactgaaaaagaaccatgcgtattacctgctcaatttccaaatttattagttaatggtgctggtggaatagcagtaggtatggccacaagtataccaccacataatcttggagaagtaattaacgcttcactagctcttattcaaaacaatgatattaagcttagcgaattaatgaaacatataccaggacctgattttcctacaggcgggataattattggaaaaaatattataaaagaaggttataaaactggaagaggttcatttaaaataagtaggtgaa

SEQ ID NO: 295201 - DNA, 853 bp, Unknown
  Bacterial polypeptide expressing nucleotide sequence isolated from the Sargasso Sea
aattcaaaaatcagttcaaatattactggagatgatgcaagggaaggcttgacatgtattatttcagtaaaattacctgatccaaaattttcaagtcaaacaaaagataaattagtatcatctgaagtaaggccagttgtagaatctgttagtttagataaattagagcaatggatggaagaaaatccatcagagataaaaaaaataattgataagattgtggaggcatcaaatgctagagaagctgctagaaaagcaagagaattaacaagaagaaaaactggcttagaaaactccgcactacctggaaagcttgcggattgtcaggaaaaaaatcctgagttgtcagaattatttattgtagaaggtgattcagcagggggttccgcaaaacaaggaagagatagaaaaaaccaagccattttacctttaagggggaaaattttgaatgtagaaagagcaaatcaaaaacaaattcttacaagtaatgaaattggagttttaattacagcaattggtgcaggagttggtaatccttcagggaatgaagaatttgataaggctgaaggtaagtttgatttaaataaaatgagatatcacaaaataattgtaatgactgatgctgatgttgatggaagtcatataagaactttactattaacttttttctatcgccacatgcgacctttaattgagtcagggagattatttatcgctcaacccccattatttaggtccaaaaaaggaaactcaattcagtatataaaagatgagaatcaaatggaacaacaccttattaatgaaggttcaaaaaaacttatttatgaagttccaaaaagtaaaaatgaaacaa

SEQ ID NO: 295202 - DNA, 892 bp, Unknown
  Bacterial polypeptide expressing nucleotide sequence isolated from the Sargasso Sea
ctttatgcaatgcacaaaggtggttttgattggtcaaagcaatttcgaaaatctgctagaatagttggagacgttattggtaaatatcatccacatggagaccaagctgtttatgatgccttagttcgaatggttcaagaattttcaatgagcttacctcttattgatggacaaggaaattttggttctatagatggagatccacctgctgctatgaggtataccgaaacaaaattagctaaagtttcacaatttttgattgatgatatagaaaaaaatacagttgaatttaaaagtaattatgacgaaacagaaatagaaccaacagtacttcctgctcaatatccaaatttacttgtaaatggtgcgggcggaattgccgtaggtatggctactagtattccaccacataatttaggagaaattatagatggaacgcttgctctaattaataacaaagacataaagattaaagaattaatgaaacatatacctggtcctgattttcctaccggtggtatcattataggtaagaatattattaaagaaggttataaaagtggaagaggttcattcaaaataagaggtgaaattgctgtagaaaatttaaaaaacaatagagacagacttgtaattacatcaattccatatcaagtaaataaatcagttctaaatgaaagaatagcagatttagttcgggataagaaaattgaaggtattagagatattagagatgaatccaatagagaaggtataagagtggcaattgatttaagaactggcgtagagccagaaacagtaaaaagacaactgtttaaatatacttcaatagagagctcttttggttttaatacactggcaatagtcaacaacaaaccaaaaacttgtaatc

SEQ ID NO: 295203 - DNA, 860 bp, Unknown
  Bacterial polypeptide expressing nucleotide sequence isolated from the Sargasso Sea
atacactgagacaaagttaggaaaaattgcccaatttttgaccgaagacttagaaaaacaaacagttaattatagaaataattatgatgaaacagaaaaagaaccaacagttttgccatcacaatttccaaatctattggtaaatggtgctggcggtatagccgttggaatggcgacaagtataccaccccataacttgggtgaaattattgatgctactattgctttaatagagaacagggaaataacaatatctcaactgatgaaacatgtacccggtccagattttccgactggaggagtcataattggaaaagatattatcaaacaaggatacaataagggcagaggctccttcaaaataaggggtgagattgaatttgaggaaaaaaagggaggaagatcggttctaataattaaatcaattccatttcaagttaacaagtcaacactaattgaaagaatagcacaactagctaaagataaaaagatcgaaggtattagtgacataagagatgagtcaaatagagaaggtataagagtagttttagagctaagaagaaatactgaaccagaaacagttagaaggcaactatacaagcttacaagcatcgaaagctcatttggttttaatactttagccttggttgacaataaaccaaaaattctaaatttaaaggaatttatatctgaattcttaaaatttagagaagaaacagtaattaaaagaattaaatttgatttaaaaaaagcggagaaaagggctcatattttgatcggactagctaccgctgtggaaaatattgatgaagtaattaaaataatcaaaaaatctaaagatattgtcattgcaaaaaaag

SEQ ID NO: 295204 - DNA, 404 bp, Unknown
  Bacterial polypeptide expressing nucleotide sequence isolated from the Sargasso Sea
gatggataagaaaaaactcacttctatctctctccaagaagaaatgaaacgttcttatctggagtatgcaatgagtgtaatagttggccgtgctcttcccgatgcaagagacggccttaagcctgtccagagaagaatactttttgcgatgtacgaattaggtttaacacctgatagaccatttagaaagtgtgcaagagttgttggagatgtcttgggtaaataccatcctcatggtgatcaagcagtatatgatgcgctagtaaggcttgtacaaaatttttcgactaaatatccaactctggatgggcatggcaattttggatctgtagataatgatccaccagcagcaatgagatacacagagacacggttagcaccgatagcaaacaaggggatttctt

SEQ ID NO: 295205 - DNA, 880 bp, Unknown
  Bacterial polypeptide expressing nucleotide sequence isolated from the Sargasso Sea
gatgaggcacttgctggtcattgtaaaaaaatgaaagtaactctaaattcaaacggatcagtaactgttaaagatgatggaagaggaattcctgtagatattcataaaactgagaaaaagtctgcggcagaagtaattatgacacaactccatgctggaggaaaatttgatcacgactcgtataaagtttctggtggtttgcatggtgtgggtgtatcagttgtaaatgctttatcagagaaattagaacttacgatcgaaagagatggaaaagtatattttattgcatttaaaaatggtgaagcaatctcacccttaaaagcaaaaaacaaatcaaaaaattctggaactgaaatcactttttttccgtctaaagaaatattttcaactactaagtttagctttactattgttcaaaagagattgcgagaactagcttttttaaataaaggaattaaaattaatttaattgataaaattaataaaaaagttagatcagaagaatttcaatatgatggaggaatatctgaatttgtcgagtttttagatgaaaaaagacaaaagctaaaaaacaaaaatggaaatgatctatttaaaaaaccaataattgtaaatagcaagaagaattcactagaacttgagtgttcacttaaatggaattcaacttatagtgaagatgtttacgcttatacaaataatatatatcaaaaagatggcggaacccacttgcttggatttagaagtgcattaacaagagtaataaataaatatgcgaatgagcataatttattaaaaaaaaataaagtttctatctcaggagatgatattaaggaaggtcttacttgcgtcctatctataaaaatacctgacccaaaatttc

SEQ ID NO: 295206 - DNA, 647 bp, Unknown
  Bacterial polypeptide expressing nucleotide sequence isolated from the Sargasso Sea
aatggcaaataacaaaacatatcaagcagactccataaaagttttgaaaggccttgaagccgttcggaaaagacctggaatgtatattggagatacagatgatggaacaggcttacatcatatggtctacgaagttatcgataactcaatagatgaagctttggcaggatattgtaaaaatatttttgtaaaaataaactcaaacggaactgtaacagttaaagatgatggtagaggtatccctgtagataaacataaaggagaaaataaatctgctgcagaagttattatgacccagctacacgcgggtggaaaatttgatcacgactcttataaagtttcgggtggattacatggagttggtgtttcggtagtcaatgctttgtcagaaaaattagatttagaaattaatagagatggaaaaaaatattttgtagaatttaataatggtgaagcaaaaaaaccactaaaagaaataggaaaatcaaaagaaacaggtacacaaattacatttcttccttctaaagagattttttcgtcaattaaatttagtggaactattttaattcagcgaatgagagaactcgccttttttaataaaggaatcaagataacttttatagacggttctcaaaaaaaagaaaaaa

SEQ ID NO: 295207 - DNA, 710 bp, Unknown
  Bacterial polypeptide expressing nucleotide sequence isolated from the Sargasso Sea
aatgactgaactacatgcaggaggtaagtttgatcaaaatagttataaagtatcaggggggttacatggagtaggtgtttctgttgtaaacgccttatcagaatttctaattttagaaattaatagagatggaaaaatttataatttagaatttagtaatggtattgttacaaaacaattaaatgtagttggagaatcaataaaaaaagaaaaaaaattctttactggaactaaaataacttttttaccaacaaaagatatttttaataatattgaatttaattttaaagtaattgaaaaaaggcttagagaacttgcttttcttaatacaggagtaagtattgatttaatagataaaagacaatctaatgaaataaaaataaattttaaatatgatggaggaatacaagaatatgtaaaatatattaatgatggtaaaaatgtaattaatattaaacctatttcttttaatggagaaaaaaataatatcacaatagaatgtgcattacagtggacagagagttatcatgaaaatacgatatgttttactaataacataattcaaagagatgggggaactcatcttgccggctttagaggagctttaacaagatcaattgtaaattatataaataaaaatacaaaaaactccaacaatataactggggatgatgctagagaggggttgacttgtataatatctgtaaagt

SEQ ID NO: 295208 - DNA, 649 bp, Unknown
  Bacterial polypeptide expressing nucleotide sequence isolated from the Sargasso Sea
tttgggaaaaaacaaaaaagttctccatcctgaacctatctatattgaaagggagaaagatggttgtgatttgcaattagccattcaatataatgacggttaccatgaagaaatgtttacttttgttaataatgtgaacactcgtgatggaggaacacacttaagtggctttagatcagctttaaccagaacagtaaatagttatgcagtacaaaataatttggccaaaaactcgggtgttgctttaacgggcgatgatgtgagagaaggtttgattttagttttaagtataaaaatatcagacccgcagtttgaaggtcagaccaaaggaaaacttggtaatacagaggttaagggaatcgttgaacagatagttaatgaaaaactcgggcaattctttgaagagcagcctgttattgctaaacagattgtttccaaagttattagtgctgctcaagctagagaagcagctaaaagagctaaggatctggtcaggagaaaaagtgcgttagaggtaagttctttgccggggaaattagcagactgctcggagaaggaccccgccctttcggaactttatatagttgagggtgattcggcgggaggctccgcaaaacaaggtcgaaacagagagaaccaggcaattttg

SEQ ID NO: 295209 - DNA, 932 bp, Unknown
  Bacterial polypeptide expressing nucleotide sequence isolated from the Sargasso Sea
gtggctcgaagagaacccgaacgacgccaagcagatcatccagaaggtcatcgacgcggccgccgcgcgtgaagctgcccgcagggcacgcgagatgagccgcaagggcgccatgagcatcgcttcgctgcccggcaaactcgccgattgccaggaccgcaatcccgaaaactgcgaactctttctggtcgagggcgattcggcaggcgggtcggccaagcagggtcgcgaccgcaagacgcaggccatccttccgctcaagggcaagatcctcaatgtggaacgtgcccgtttcgaccggatcatctcgtccaaggaagtcggcacgctgatccaggcgatgggcaccggcctgcgcgacgaattcaatctcgaaaagctgcgctatcacaagatcgtgatcatgaccgacgccgacgtcgacggcgcccatatccgcacgctcctgctgaccttcttccatcgccagatgcccgagatcgtcaaggccgggcacctcttcatcgctcagcctccgctgtacaaagtgtcgcgaggcaagagcgaagtctatctgaaggatcagccggcctacgaccgttacctgatcgcacaggggctcgacgggcgggtgctcgaagcgcagggggggccggttcgcggtggcggcgaactgcaggcgctggtcgaccacggtctgcgcatgcgcaacatgctcggtttcgtgcctcgcaaatacaattcggagctgatcgaggcgatggctctggccggcgcgctcgaccctgccggagatcgttctgctgctctcgatcgtgccgccgcccacctccagatgggcgatcccgatgctcgctggaaggccgagacgggcgaggacggcaaggttcgtctcagccgcgtgtggcgcggtgtgacggacgtgcacgaaatcgaaccggcatttctcgaaa

SEQ ID NO: 295210 - DNA, 934 bp, Unknown
  Bacterial polypeptide expressing nucleotide sequence isolated from the Sargasso Sea
tattaaagaatatgttcaatatatgaatgcagaaaaggagtctattcatccagagataatttatgttgactcacaaaaagaaaatgtttatgtggaagcagctttgcaatggtgttcagatgtatattcagataatattttaggttttgcaaataatataagaactattgatggaggcactcatattgaaggattaaaaacagtcttgactagaactttcaataacctcgcaaaaaagaggggaaaaagaaaggatattgaaaaaaatttagctggtgaaaacataagagagggtttgacagtggttttgtcggttaaagttccagatcctgaatttgaagggcaaacaaaaacaaaattagggaatactgaagtaagaggaattgttgattctcttattggtgaggctcttacaaaatatatggaattcaatcctggaattttggatttgattcttgaaaaagcaattcaatcatttaatgcagcagaagctgcaagaagggctagagagttagtcagaagaaaaagtgtgcttgaaagttcaactttgccaggtaaattagctgattgtagttctagagatccctctgaatcagaaatttatatcgttgagggagattctgctggaggttcagcaaaacaaggaagagatagaaattttcaggctattttgcctctcagaggtaagattcttaatatcgaaaaaactgacgatactaaaatatacaaaaatacagaaattcagtcattaataactgctctaggattaggaataaaaggtgaagaatttgatgtaagctctttgagatatcatagagttgtgatcatgactgatgctgatgttgatggggctcatattagaaccttattattgacatttttttatagatatcagagagaacttgttgagaaaggttttatatatatagcttgc

SEQ ID NO: 295211 - DNA, 709 bp, Unknown
  Bacterial polypeptide expressing nucleotide sequence isolated from the Sargasso Sea
gaaaaaaaatcagctgcagaagttataatgactcaacttcatgcaggggggaaatttgatcataattcttataaagtttctggtggtcttcatggtgtcggagtttctgttgtcaatgcattatctgaaaaacttgaacttgaaatagatagagatggaaaaaagttttttgttgagttcagaaatggtgatccaaaatccccacttaaacaaattggcaaatcaaaaaatactggaactaaaattacctttcttctttcaaaagaaatattttcatctattaaatttagtagcacaattattcaaaaaaggatgcgcgaactagctttcttgaacagaggaataaatttagtggtattggataaaactcttaaaaaagagaaaaaagtggaatttaaatatgatggtggaataatagaatttgttaattttctaaatgaaaaaagggaaaaactcaaaaataaaaatgggaatgacctttttaaaaaaccaatttatcttgaaggagataaaaatggtgtaaacatagaatgttctcttgaatggaattcaggctattcagaggatatgcacacttatacgaataatatatttcaaaaagatggaggaacacaccttttaggctttagaagctcattaactagaattttaaacaagtacgtaaatgaaaacaacatactaaaaaaaaaacaagtttctattaccggag

SEQ ID NO: 295212 - DNA, 535 bp, Unknown
  Bacterial polypeptide expressing nucleotide sequence isolated from the Sargasso Sea
aatgtcaaaaaaatctgaattaaataataaccaatcttatggtgctgactcaataaaagttcttaaaggtctagatgctgtgagaaaaagacctggaatgtacatcggtgatactgacgatggttcaggtcttcatcatatggtctttgaggtcatcgataactctatcgatgaagctcttgctgggttttgtaaaaatatttttgtttctattaattctgacaatacagtaactattgaggacgatggacgaggaatacccgttgatactcacaaaggtgaaaaaatatccgcagctgaagttattatgacacaattacatgcagggggaaaatttgatcacgattcatacaaagtttcaggaggattacacggggtaggagtttctgtagttaatgctttgtcaaaaaaacttgaattaaaaatttttagagaaggcaaagaatatgaaataaattttgaggacggatattctgtcaaaccacttaaacagataggtaaaacaaaaaaaactggtacaaaaataaccttccta

SEQ ID NO: 295213 - DNA, 910 bp, Unknown
  Bacterial polypeptide expressing nucleotide sequence isolated from the Sargasso Sea
gatagaaaaacgcaagccatactaccacttaaaggcaagatcttgaatactgagagagctcaagaccataaggttctttcatcatctgaaatttctactcttattactgctttaggttgcggtgttggtgatgattgttctttagatgaaaatagcaaaatgattaagaatctaagatacggtaaaattgtcattatgacagatgctgacgtcgatggtgcacacatcagaactttactcttaactttttttcatactaaacttcggttacttgttgacaatggaaatgtctatattgcacaaccgcctctttacaaaataaaaaaaggtaaaactcaaaaatattttttagatgataaagaactgaatgattttatttatcaagatatatccaatacattctcagtatcatatgggaaaactaaactagaacatgatagtgttaaagaacttttattatcttattctaaactattgtcgatagtagaaagtttctcggcaaaccgtgatccagatttcattcttaatcttgcatttactgataaattatcaagcgagaattttaaaaacaagaagatactttcaaagtggttgtctgattatgaaatacttctaaattcatccactccaattaatgtttcgtactcattttctctacaagaatcagataaatctggtgaatatggtttcacaattacaaagactttgaatggtgtacgttctaatctaccttctatggataagagattttttagttcagatgcttatcttgaaatatccgctctcaatctaaatgattatcatgaaaaggttttctcttataccaagaatgattctgaccaaagcaattcagacttggcaatatctcagctatacgatgctcttgttactagctctcgtaactctataa

SEQ ID NO: 295214 - DNA, 802 bp, Unknown
  Bacterial polypeptide expressing nucleotide sequence isolated from the Sargasso Sea
atgagttcatcttacttatcttatgctatgagtgtaatagtgagtagggcactacctgatatcagagatggattaaagccggttcacagaagaattatatatgcaatgcacaaaggtggctttgattggtcaaaacaatttagaaaatctgcaagaattgttggagatgtaataggtaaataccacccccatggtgatcaagcagtttatgacgctcttgttagaatggttcaagaattttcaatgagcttacctttagtggatggacagggtaatttcggttctatagatggagatcctcctgcagcaatgagatataccgaaactaaacttgcaaaagtttcacagtttttaattgatgatatagaaaaaaataccgtatcttttaaaagtaattacgatgagacagagcaagaacctattgtattgcctgcacaatatccaaatcttttagttaatggtgctggtggaattgcagttggaatggcaacaagtataccacctcataatttaggagaggttgtagatggaactttagctttaattaaaaacaaagatattaaaattaatgagttaatgaaacatataccaggcccagattttccaacaggcgggttaataattggaaaagatataataaagcaaggatacaaaactggaagaggatcttttaaaatacgtggagaaatttcagtagaaaatttaaaaaatggtaaagatagactggtagtttcatcaataccttaccaaattaataagtctaatttaaatgaaagaattgccgaattagtaagagataaaa

SEQ ID NO: 295215 - DNA, 394 bp, Unknown
  Bacterial polypeptide expressing nucleotide sequence isolated from the Sargasso Sea
atgtcagacgaaaacatagagaacccagaatcaggggattacgattcctccagcattaaagtactgaagggcttggatgctgtgcgcaagcggcccggtatgtacattggggatacggatgacggtaccggcctgcaccacatggtgtttgagctggtggacaacagcgttgatgaggccttagctggccactgcagccaaattgacgtcatcattcacccagacgagtcagtgacagtggctgacaacggccgcggtattcccaccgaacagcacgaggaaggtgtgtcggccgcagaggtcatcatgacggtactgcacgctggcggtaagtttgatgataatacctacaaggtgtcgggcggcctccacggtgtaggcgtctcggtagtca

SEQ ID NO: 295216 - DNA, 797 bp, Unknown
  Bacterial polypeptide expressing nucleotide sequence isolated from the Sargasso Sea
caatttatttaaaaaacctgtatatatagaaggaattaaaaataataccgacatacaatgctcactaaagtggaatgcaggatatagtgaagatgttttagcttttacaaataatatctatcaaaaggatggcggaacacatttattaggttttagaagcgcactaacaagagtagtaaacaaatatgcaaacgatcaaaatttattaaaaaaaaataaagttagtttatctggagacgatattaaagagggattaacttgcgttttgtcaatcaaaatacccgatccaaaattttcatctcaaactaaagacaaattagtatcgtcagaagtaagatatattgtcgaaaatttcattaatgaaaaactatcaatttggtttgatcaaaatccgtcaatatctaaaataattttgtctaaaataattcaagcagctgtggctagagatgtagctagaaaagcaagggagagtgtaaggagaaagggtgcattggagctaactggccttcctggtaaactagctgactgtcaaaattctaaacaagagggtacggaacttttcattgttgagggggactcagcgggaggatcagcaaagcaaggtagaaacagagaatatcaagctgttcttcctttaagaggaaaaatattaaatacgtttacagataaaaatgaaaaaaatggaaaatctggagattataaaactagatctttgtcaaaaatgatgtcctcgaatgaaattgtaaatttaataaatgctctaggactagacccaaagtctgaagagatagattaaa

SEQ ID NO: 295217 - DNA, 823 bp, Unknown
  Bacterial polypeptide expressing nucleotide sequence isolated from the Sargasso Sea
agaagctcgcttaccagaattttaaataaatatgttaacgaaaataatattttaaagaaaaaccaagtttctattaccggagatgatattaaggagggtttatgtgcagtattatccattaagatgcccgaccccaaattttcatctcaaacaaaagataaattagtctcttctgaagtaagaaacattgttgagaattttatgaacgaaaagttatctatttggtttgatcaaaatcctagtattataaaaattgttttattaaaaataattcaagcagcacaggcaagagacgttgcgaggaaagcaagagaaagtgttagaagaaaaggagcactcgagcttacaggtttaccagggaaactggctgattgccaaaattcaaagagagacgggactgaattatttattgtcgagggagattctgctggtggttcagctaaacaaggaagaaacagagaatttcaagctgtattgcctcttagaggaaaaatattgaacacatatgtggaagaaactaattcaaaaagaaatggaaactcgagtgacagcaaaactaaagcattatcaaaaatgatttcatcaaatgaaatcgttacattgataaatgctttaggtctagatccaaaagttgaggaaattgatttaaatgatctgagatatggtaaaataattattatgacagatgctgatgttgatggatcgcatattagagcactactattaacattttttaataacaaaccatttaataaacttatagaaaatggaaacatttttttaactcaaccacccctgtttaaaattaacaaatcaggtaaaa

SEQ ID NO: 295218 - DNA, 763 bp, Unknown
  Bacterial polypeptide expressing nucleotide sequence isolated from the Sargasso Sea
acaatctcaacaaaataaaaaaaacgactatagcgcttcatcaataaaagttctcaagggtttagatgctgtaagaaaaagacctggaatgtatataggtgacacagacgacggtaccggtctacaccacatggtctttgaggttttagataactcaattgacgaagctctcggaggatactgtaaaaatatttctgttttaattaattcaaacaatactattacagttgaagatgatggaagaggaatacccatcgatatgcataaaggtgaaaagatgtctgcagcagaagttataatgacccaacttcatgctggaggaaaatttgatcatgattcttataaagtttcgggcggacttcatggtgtcggtgtatctgtagtaaatgcactttcggaaaaccttgaattaagaattttcagagatggtgttgaatattttatagagtttgaaaatggcaaatcattaaaaccgcttaaaaagataggtaaatcttcaaaaagggggaccaacattacttttttaccatctaaagaaatcttttcatcaataaaatttagctcttcagtattacaaaaaagaatgagggaattagcatttttaaatagaggaataagcctgactttaattgataaaacatcttcaaaacaaaaaaaatatgaaaataaattcgatggaggtatattagaatttgttcaatttattaatcaaaaaaaacctattttagagaagaaaaatgaaaaagcagtatttaaaaaacca

SEQ ID NO: 295219 - DNA, 769 bp, Unknown
  Bacterial polypeptide expressing nucleotide sequence isolated from the Sargasso Sea
actatctataaaaatacctgatccaaaattttcatctcaaacaaaagataaactagtttcatcagaggtaaggaatattgtcgaaagtttaataaatgaaaaattatcaatatggtttgatcaaaacccttctgttgcaaagataattcttacgaaagtcattcaggcagctttagctagagatgtagcaagaaaagctagggaaaatgtgagaagaaaaggtgctttagagcttacgggtctgccaggtaaacttgctgactgtcaaaattctaaacaagatggtacagaattatttattgttgagggagactctgctggtggttctgcaaagcaagggagaaatagagagtttcaagcagtcttgccattacgaggtaaaattttaaatacttatatggataatagctcaaagaaaaataacggtaacggaaaagatttgaaaacaaaagcactttcaaaaatgatatcttctaatgaaattgtaactttaatcaacgcacttggattaaatccaaatgatgaggaaattgatattaaagatttaagatacggaaaaataattattatgaccgacgcagatgttgatggatctcatattagagctttacttctgaccttttttaacaatagtccattcaataaattgatcgaaaatggaaatatatatcttgctcaaccaccattgtttaaaattataaaaggttcaaaaacaatatatttgaaagacgaaaaagatttagaaaactatattttaaaaaattcaaaa

SEQ ID NO: 295220 - DNA, 763 bp, Unknown
  Bacterial polypeptide expressing nucleotide sequence isolated from the Sargasso Sea
tatgcctaaatcaaaaaaaaataccaatacaaaaaattacgattcatccaacattaaggtcttaaaaggattagacgcagtccgaaaaagacctggtatgtacattggtgatactgatgacggcacaggactacaccacatggtttttgaggtcgttgacaactctgttgatgaggccttggcaggtttttgtacacacatagaggtaattattcatgaggatgactctataactgtaaaagataacgggcgtggcatacctgttgataaacataaaacagaaaagacttctgctgctgaggttatcatgaccgtattgcacgctggtggtaagtttgatgatgattcatacaaggtttctggaggcttacatggtgtcggggtttcagtggtaaatgctttgtcagaaactttaaacctaagaatacataaaaacggacatacttatgaacaagactatgtacacggcgttccacaaaaaccgcttaaaaaaggctctaaaacagacagaagcgggacaacagtaactttcaagccaagccctaaaacatttactaataccacctatagttttgatattttatctaaaagattaagagagctttcattcttaaactcggggctaagcattaagcttgctgatacaaggtctggaaaagaagaagagttttactttgaaggcgggatcagtgcatttgtatctcatctaaacaaagttcaaagtcccgtacatgagtctgtcatcaatttcagcaagacaatt

SEQ ID NO: 295221 - DNA, 739 bp, Unknown
  Bacterial polypeptide expressing nucleotide sequence isolated from the Sargasso Sea
gctgatttatcggaatcttctaccgagaggtgtaaaactttcacctgaagatgtttggatgggtttgagctacattatttcagtcagaattgaggatccacaattctcaggacaaacgaaagagaaactcagttcgagagctgtttcaggttttgttacaggcctcattaaagatgctttcacgctttggttgaatcaacatcctgaagcgggagaccaaattgtcgcaagggcaattgagaatgctcaaaaaagagccaaaaagaatgtaaaggtaaaacgaaagaaggccacaggtggaccaacattgcctggcaaactcgcagactgtacgagcgacgagcctgatctttgtgaattatttattgttgaaggtgattctgctggcggatctgcaaagcaagccagagatagagtctttcaggcaattcttccacttagaggaaaaattcttaatagttgggaagtcgatgagagcaatctactttcttctcaagaaatcagcaatatttctcaggcactaggtgttgagcctggtgccgatgagcttggtaatcttcgataccataaaatttgtatacttgcagatgctgattcggatggactccatatcgcaacattgatttgcgccctgtttttgaaacattttagaaaattggtcgaagatggtcatgtgtacgtagcaatgccacctttgtatcgaatcgatgttggaaaagaggtgcattatgcgcttgat

SEQ ID NO: 295222 - DNA, 802 bp, Unknown
  Bacterial polypeptide expressing nucleotide sequence isolated from the Sargasso Sea
cttcttgggatttagaagtgcattaacaagagtagtaaataaatatgcaaatgaacaaaatttgttaaaaaaaaataaagtttctttatcaggagatgacgttaaagaaggattaacttcagttctttctatcaaaattcctgaccctaaattttcgtctcaaacaaaagataaattagtctcatcagaagttagaaatattgttgaaactatcattaatgagaagctgtctatatggtttgatcaaaatccatcgatttcaaaaattatcttaactaaaattatccaagctgctgttgcaagagatgtagcaagaaaagcaagagaaaatgtaagaagaaaaggagccttagaattaacgggattgcctggaaaattagccgattgtcaaaactcaaagcaggatggtactgaactatttattgtagagggtgactcagccggtggttctgccaaacaaggcagaaaccgtgaaaatcaagcagttttgccgcttagaggaaaaatattaaatacttttacagatttgaatggatcgaaaaagaacggaaatgctaatgatttaagaactaaaagcttatcaaagatgatttcatcaaatgaaatagttacattgattaatgcacttggtcttgatccaaaaaatgaggatatagatctcaaagatttaagatatggaaaaataataataatgacagatgctgatgttgatggctcacatataagagcattattattaactttttttaataataaaccatttgataaattaattgagtttggacatgtttatcttgctcag

SEQ ID NO: 295223 - DNA, 704 bp, Unknown
  Bacterial polypeptide expressing nucleotide sequence isolated from the Sargasso Sea
gatgggggaggaacgcatcgtggacgtggaactggcgagtgaggcgaaggaatcgtacctgtcgtacgccatgtcggtgatcgtgggacgggcgctgccggacgcgcgggacggtttaaaaccggtgcatcgaaggatcctgtatgggatgcatgaactgggattgcgaagcgataaaccgcatcgaaagtgcgcgagagtcgtcggggacgtgttggggaagtttcacccgcacggggatgggtcggtgtacgaggcgttggtgcgactggcgcaggatttttcaatgagcgcgacgttggtggacggacacgggaattttgggtctctggatgatgatccgccggcggcgatgcgatacacggagtgtcgattgaataaattggcggagaaggcgctgttggcggacatcgggagcgagtgcgtgagtttcgcggagacgttcgacgggagtcagacggagccggtggtgctgccggcgcgcgtgccgaatttactcgtgaacggttcgagcgggatcgcggtggcggtggcgacgaacatggcgccgcataatctcggtgaagccttggacgcgatgtgcgcgctcgcgaagaatcccgactgcacgctggaggagctcgtcgcgctcatgccgtcgccggattttcccaccggcggcgtcatcatcaaccagagcgggatgaaggatatttacagaacgg

SEQ ID NO: 295224 - DNA, 844 bp, Unknown
  Bacterial polypeptide expressing nucleotide sequence isolated from the Sargasso Sea
atataaggtttccggaggtcttcatggtgttggggtatcagttgtaaatgcattatcagaaaaattagatctaacaattaaaagaaatggaaaagaacatgcaatgtcttttgcaaatggagaagcctcgaaagcccttaaggcagtaaaagattgtaaagatgaaacaggaacagaaattactttttatccatcaaaatcagtttttactatgacagaatttagtcgcagaactttagaaacaagattgagagaaatggcttttttaaattctggtatttccattcatttggaagataaaagaaaagatgaaccttgggtcaaaactatgtcttatgaaggaggattagaggaatatgttaggcatattgatcaaacaagaaaatctctaatggaagtcccaataagttttactggtaaaaaagatgaaatagaggttgatgtatcaatgtggtggaatgacagttattacgaaactgtaaattgttttacaaataatattcctcaaaaagacggcggcactcacttagccggattaaggtcagcattaacacgagtcgtaaattcatatgctcaagaatcaggcttaacaaaaaaagaaaatgttcaacttgttggagaagatattagagaaggtttcacatgcgttttatcagtaaaagttgccgaccccaaattttcaagtcaaacaaaagataaattggtatcatctgaggttagacctgttgttgaaagtttaattaatgatcttttatctaattggtttgaagagcatcccaatgaggccaagataattgttggaaaagtcgttgaagctgcttctgctagagaagcagctagaaaa

SEQ ID NO: 295225 - DNA, 883 bp, Unknown
  Bacterial polypeptide expressing nucleotide sequence isolated from the Sargasso Sea
ggatgagagactttcttttttaaataaaggaattaccatttctattacagataatagaaaaaaaggtaaagatggagacccagtatgtgaaacctttcattcaaaagagggtcttagcgaatttataaaatacctagatgagtcaagagagcctattattaatgatataattaaaatggaaggagaaaaaaacaatataccagttgaggttgcaatgatttataattcatcattctctgaaaatcttcactcatatgttaataatataaatactcatgagggtggaactcatttatcaggttttagaagaggtttaactaatactttaaaaaaatatgcagattcttctggacttacggataaacttaaatttgatatttcaggagatgattttagagaaggtttaacagctgttatatctgttaaagtagctgaacctcaatttgaaggtcaaacaaaaactaagcttggtaacagagaggttagtgctgctgtctctcaggctgtatctgaaatgcttgaaaattatcttgaagaaaatccaaatgattctaaaataattgttcaaaaggtaatacttgctgctcaagcaaggcatgctgcaagacaggcaagggagatgattcaaagaaagactgttatgacaggaggaggtctacctggtaaattatctgattgctctgagactgatccattaaaatgtgaggtctttcttgttgagggtgactctgcaggtggtacggctaaacagggtagggatagggtctttcaagcaattcttccattaagaggaaagattcttaatgttgaaaaagctcaacaacatagagtatttgaaaatgaagaaattaggaatatatataccgctcttggagtttcaata

SEQ ID NO: 295226 - DNA, 880 bp, Unknown
  Bacterial polypeptide expressing nucleotide sequence isolated from the Sargasso Sea
tgtagaatacttagataaagatagacaaaaacttaaaaataaaaatgataatgatctatttaaaaaatcaatttttattgaaggaaaaaaagataatatagaaattgaatgttctttaaaatggaatgctggatattcagaagatgtttatccatatactaataatatatatcaaaaagatggtggaacacacttattgggctttagaagtgcattaacaagagtaattaataaatatgcaactgaacaaaatcttttaaaaaaaaataaagttactatttcaggagacgatataaaagaaggtcttacatgtgttttatcagttaaaatacctgatccaaaattttcttctcaaacaaaagataaattagtttcttctgaagtaagaaatattgttgaaaacatagtaaatgaaaaattatctgtttggtttgatcaaaatccatcaatagcaaaaattattttatccaaagtggttcaggctgctctagcaagagatgttgctagaaaagcaagagaaaatgtaagaagaaaaggagcactagaattaactggattaccaggaaaattggcagattgtcaaaattcaaagcaggaaggtacagaattgtttattgtagagggagactcggcaggcggatcagctaaacagggaagaaatagagaatttcaagcagttcttccattaagaggaaaaattttgaacacatatacaagtgttaacggtacaaaaaaaaatgtaaatggaaatggaaatgaaattagaacaaaaactttagcaaaattaatttcatctaatgaaataattactttaataaatgcccttggtttagatccaaaaaatgaagatatagatataaaggatttaagatatggaaaa

SEQ ID NO: 295227 - DNA, 988 bp, Unknown
  Bacterial polypeptide expressing nucleotide sequence isolated from the Sargasso Sea
tgtagaaacattagtaaatgaaaaattatctatttggtttgatcaaaatccgtctattgcaaaaattattttagcaaaagttattcaagctgcaatggctagagatgttgctagaaaagcaagagaaaatgtacgaagaaaaggggcccttgaattaagtggtcttcctggaaaattagctgattgtcaaattggtaaacaagaaggaacagaattatttatcgttgagggagattcagctggtggttctgcgaaacaaggaagaaatagagcaaatcaagcagttttaccacttagagggaaaatacttaatacttatgtagaagattttaatgtgaaaaaaaatagtaacggcaatggaaatggttctgatcaaagaacaaaggctttgtccaaaatgatttcttcaaatgagattgttactttaattaatgcactaggattggacccaaaggcgcaagaaattgatttaaaggatttaagatatggaaaaataataattatgacggatgccgatgtagatggttctcatataagagcccttcttttaactttttttaataataagccatttaataagttaattgaaaatggtcatgtttatttagcgcaaccaccgttatttaaaattaacaaaggctcaaaaggaatttatataaaagatgagaaggagctagaagattacatcataaataataataaggatttaaaaaaaattaataagggatctaaagattattttaaaaaaattgatgaagaaaaatcaaaaatgaatattcaaagattcaaaggtcttggggaaatgaacccagaggaattatggagcactacattagatccagaaacaagaaatttactaccagtacaatactcaaaagatttgaaaaaagatcaaaatttaattcatacattgatggggtatgatgtagcattaagaaaagattttatagtctctaatgctataaatgttagaaatcttgatatttaa

SEQ ID NO: 295228 - DNA, 901 bp, Unknown
  Bacterial polypeptide expressing nucleotide sequence isolated from the Sargasso Sea
atggtgtacgaagttgtagataattctattgatgaagcgttggctggatattgcaaaagcataaatgttagcataaattctgatgggagtatcacagttaaagatgatggtagaggaataccggtcgacattcataaaggagaaaaaaaatctgcagcagaagtaataatgacacaattacacgctggaggtaaatttgatcatgaatcatataaagtttcaggtggtttacatggtgtaggtgtttctgtagtaaatgcactttcagaaaaactaaatttaattatagagagagatgggaataaatattttattgaatttagaaacggagatacggttaaacccttaaaacttctaggtaaatcaaaaattagtggaacccaaataacttttttgccatcaaaaaaaattttttcatcaacaaaatttagttttaatataattcaaaaaagaatgagagaacttgcttttttgaataaaggaataaagatttcaataaatgatttatcacttaaaaaaaataaaaatgtagagtttaaatttgatggaggaattttagaatttgtagaatttttagataaagatagagcaaaattaaaaaataaaaatgaaaacgatttatttaaaaaaccaatttttgtagaaggaaaaaaggaaaacttagaggttgaatgttccttaaaatggaatgcaggatactctgaagatgtctattcatatacaaacaatatatatcaaaaagatggaggaactcatttattaggatttagaagtgcattgacaagagtaatcaacaaatatgcattagaacaaaatttactaaaaaaaaataaagtttctatttcgggagacgatataaaggaagggttaacgtgtgtcttatcaataaaaaatccctgat

SEQ ID NO: 295229 - DNA, 541 bp, Unknown
  Bacterial polypeptide expressing nucleotide sequence isolated from the Sargasso Sea
gacaaggttttaggatctcaagaggtaggaacacttataaaagcacttggctgcggtattggagaagaagattttgatataaataacttaagatatcacagaattataataatgacagacgcagacgttgatgggtctcatataagaaccttgttattaacatttttttatagacagatgtatgagatagttgataaaggccatatttatatagcccttccccctttatataaaattactaaaggaaaagagtttttctatgcttctgatgaaaaagagaaagataaggcaataaaatcattatcaaaatcaggaacaaggggcttagaggttcaacgttataagggtttgggagaaatgaaccctgaacaactgtggactacaaccatggatcctcagaatagaagaatgatgcgagttgatattaaagatgtgcaggacgccaatgaatcatttgaaattcttatgggtgatgacgttgaaccaagaagagagtttattgataaaaatgcattatcagtaaaagaattagatatttagt

SEQ ID NO: 295230 - DNA, 902 bp, Unknown
  Bacterial polypeptide expressing nucleotide sequence isolated from the Sargasso Sea
ggatcgggcaaggtggaatgggccgttgcctggcctgtggatgagaatccgttctttaactcctattgcaacacagtgccaaccccgttgggcggcacccacgagctaggtttgcgcggtgcactaactaaaggcctccgcgcctacggggagctcgtcggcaacaagcaagccgccaagctcagcggtgacgacgtggtcggcggcaccgtagtcatgttgtctgtgttcatcgctgatccgcaattccagggccaaactaaggataagctatccacggtggaggcccaaaaactggtggaaaacacggtccgcgaccacttcgaccactggttgtctggggcacctgacgcggcgaaggcactgttggagcacgcgattgagcgggcagagatccgactcaaacggcgtgcgcagaagcaaaccaaacgccaatctgctacccggaaattgcgcctcccaggcaagctttcggattgtacccggaccacggcgcaaggcactgaactttttatcgtcgagggagattcggctggtggctcagccaagcaggcacggaaccgcgagacccaggccatccttcccttgcgcggaaagattctcaatgtcgccagcgccaccgccgacaagatgcgcgccaaccaagagctgtccgacctgatcgaagccttaggctctggtttaggtgaggccttcatggaggatgacctccggtacgagaaggttatcatcatgaccgatgctgacgtggacggggcccatatctcctcattgctgatgacctttttcttccaggagatggccgggctggtgggctcgggccacctttatctcgcaatgccgccgctctaccgcatcaatcagggctcaaaatccatgtatgcgcgggatgatgcgcacaa

SEQ ID NO: 295231 - DNA, 595 bp, Unknown
  Bacterial polypeptide expressing nucleotide sequence isolated from the Sargasso Sea
aatgacaaaaagtaatccaaacaattatcaagctgactcgataaaagtactgaaaggtttagaggccgtcagaaaaagaccaggaatgtatatcggagatactgatgatggaactggtcttcatcatatggtttatgaggttgtagataattccattgacgaagctcttgcaggctattgtaaaaaaattgaagtaaatataaatcaagacaattcagtaacagtaattgatgacggccgtgggatacctgtggacatgcacaaaggtgaaaaaaaatctgcagcagaggttataatgacccaacttcatgctggaggtaaatttgaccatgattcttacaaagtctctggaggattacacggtgttggtgtgtcagttgtaaatgccttatcagaaaaattaaaacttacaataaacagagataacaaaaagtattacatagaatttaacaatggcgacgccaagacttcactaaaaaatattggaaaatcaaaaacaagcgggactgaaataaattttattccttcaacagatattttttctactataaagtttagcttttcagtattagaaaaaagaatgagagaattggca

SEQ ID NO: 295232 - DNA, 907 bp, Unknown
  Bacterial polypeptide expressing nucleotide sequence isolated from the Sargasso Sea
tgcgctgccggatgcgcgcgatggcttgaagccggtacaccgccgtgtgctctacgccatgagcgagctgggcaacgactggaacaagccctacaagaaatccgcccgtgtggtcggtgacgtgatcggtaaatatcacccgcacggcgacacagcggtgtacgacaccatcgtgcgtatggcgcaggacttctccctgcgctacctgctggtcgacggccagggcaacttcggttcggtggacggcgacaacgccgcggccatgcgatacaccgaagtgcgcatgaccaagctggcgcatgaactgctggctgacctggacaaggaaaccgtcgactgggtgcccaactacgacggcaccgagcagatcccggcggtcatgccgaccaaggtaccgaacctgctggtcaacggctccagcggtatcgccgtgggcatggccaccaacatcccgccgcacaacctctccgaggtgatcgatggctgtctggcgctgatcgacaacgccgagctgaccgtcgatgacctgatgcagtacatccccggcccggatttccctactgcgggcatcatcaacggccgtgccggcatcatcgaggcctaccgtactggccgtgggcgcatctacatccgcgctcgcgtcgaggtcgaggacatcgacaaggtcggcggtcgccagcagctggtggtcaccgagctgccgtaccagttgaacaaggcgcgtctgatcgagaagatcgccgagctggtcaaagagaagaagatcgaaggcatcaccgagctgcgtgacgagtccgacaaggacggtatgcgcgtggtgatcgaactgcgtcgtggcgaagtgccggacgtggtgctgaacaacctctacgcccagacccagatgcagagcgtgttcggcatcaac

SEQ ID NO: 295233 - DNA, 835 bp, Unknown
  Bacterial polypeptide expressing nucleotide sequence isolated from the Sargasso Sea
aaggttttaaaaggtttagaagctgttcgaaaaagacctgggatgtacattggcgatactgatgacgggtcaggtttacaccatatggtttttgaggtagttgataactctattgatgaggccatagtcgggtactgtaaaaacattactgttaccattcataaaaataactctgttacagtagaagatgatggaagaggtattccagtagatcttcacaaaggtgaaaagaaatctgccgctgaagttattatgacccaattacatgcaggtggtaagtttgatcaaaactcctacaaagtttcaggtggtttacacggggttggtgtttctgttgtaaatgccctttccgaaaaactagacttaacaatatttagagatcaaaaagaatattttatttcatttaaaaatggaaaggctttgaactctataaagttcataaaaaaaactaaacagtcaggtacaaaaattaacttcttgccttcaaaagaaattttttcaaatattaaatttagtttggcaatcttgcaaaaaaagatgagagaattagcttttttaaatagaggtttaaaaataaatttaatagaccaaacacacgctaaaactaaagtttacgagcataagtatgatggtggggttggagaatttgtaacttttttagatcaaaaaaaatcattaatgataaacaaaaatgaaaaagctgtttttaaaaaacctatttatctaaaaggagaaaaaaaagaagtaacagtggaatgctcttttcaatggaatgcaggtttttctgaagaagtcatggctttcacaaacaatatacatcaaagagatggaggta

SEQ ID NO: 295234 - DNA, 854 bp, Unknown
  Bacterial polypeptide expressing nucleotide sequence isolated from the Sargasso Sea
taaagtaataggaaaatcaaaaaactcaggtactgaaataaaatttttaccttcaaaagaagtattttctacaactaagtttagcccaaatattattcaaaaaagattacgcgaattagcttttttaaataagggagtaaaaatttgtataaatgattttacccaaaaaaagcacaaaaggatagaatttaaatttgacggaggaattacagaatttgttgattatatagacgataaaagagaaaaattaaaaaataaaaatggtaacgactcattcaaaaaaccaatttacatagacggcaaaaaaaataatattgagattgaatgttctttgaaatggaacgcagcttatagcgaagatgtatactcatatacaaataatatccatcaaaaagatggaggaacgcatttattaggattcagaagtgccctaactagagtcataaataaatatgctaatgaaaataatttattaaaaaaaaataaactaacaatatctggtgatgatattaaagaaggccttacatgtgtattatcagtgaaaatgcctgatccaaaattttcatctcaaactaaagataagttagtttcatcagaagtaaggatgatcgtagaaacagtaataaatgaaaaattatctatatggtttgatcaaaacccaggaacttcaaagattattcttacaaaagtaattcaagcagctctcgcacgggatgttgcaagaaaagctagagaaaacgttagaagaaaaggtgcattagagttaacaggtttacctggaaaattggcagattgtcaaatatcaaaacaagaaggtaccgaattatttattgttgagggagattctggcggag

SEQ ID NO: 295235 - DNA, 880 bp, Unknown
  Bacterial polypeptide expressing nucleotide sequence isolated from the Sargasso Sea
gactacagctttaaaaatattacaactagatttaaacaaatggcttatcttaatcctggcttaaccataagatttagaagtgaatttcatcaagacttatggccaaacaatagcacaacttatatgtttaccgggggtgtacaaagttatgtaagaagcctaaataggcctaggacccctatacacccaaacatcgcttcaataaacggaaagctatcgcctgatgatgtaaaagcaaaagttgatacccctgtagtggtggacatagcatttcaatataatgaaacttttcaagaaaatgttttatcatttgcaaactgtatcgttactcctgaaggagggactcacctaactggttttcgtcgctcgctaactagagcaattaacaactatggaaagaaaaatggcatcttaaaagatgacctaaaagatgtttcaggcgaagacgtaagagaagggttgatggctgttataagcgtaaagcttggtgagccgcaatttgagggacagacaaaagcaaaacttggaaatccggagatagagtcggcagttacttcattaatgactcaacagctcacagaatacctggaagataatcccggcgatgcaagaagtatattagagaaagcttcaactgctgcaagagcaagagaggctgctaaaaaggcaagagaccttgtaatcagaaaaaatgctatggagggtggggctctgccaggaaaactagcagattgttcagagaaagatccagcgaaaagtgaactatttcttgttgagggtgattcagccggaggttctgctaagcaagggagagatagatatttccaagctattttgccattacgtggaaaaattcttaatgtgaaaaggctcgaccaga

SEQ ID NO: 295236 - DNA, 670 bp, Unknown
  Bacterial polypeptide expressing nucleotide sequence isolated from the Sargasso Sea
atgcaaaaaatagagatttctaaaaatttaaatataaaacctataacaatgtatgatgagatgagctcatcatacttatcttacgcaatgagtgtaattataagtagagcccttcctgacgtaagagatggattaaagcctgttcacagaagaattatatacgctatgtataaaggaggttttgattggacaaaacaatttagaaaatcagcaagaatagttggagacgttataggtaaatatcatccacatggtgaccaagcagtttatgatgctttagttagaatggttcaggatttttcaatgagtagaccgctaatcgatggacaaggtaattttggatctattgacggagatccaccagcagcaatgagatatactgaaacaaggctttcaaaaattgcaaagtttttaatcgaagatatagaaaaaaatactgttacatttaaaagtaattatgacgaaaccgaacttgagcctgaagtgcttccctcacaatatccaaacttacttgtaaatggagcaggaggtatagcagttggaatggcaacaagtatccctccgcataatttaggggagattattaatggaactttggccttaattaaaaacaaagatattaaaattaatgaactaatgaaacatattccaggaccagattttccaacag

SEQ ID NO: 295237 - DNA, 919 bp, Unknown
  Bacterial polypeptide expressing nucleotide sequence isolated from the Sargasso Sea
aaagataagctgggtttcatcagaagcaagaccagcagtcgaaacgcttattaatgactactttatggactttttgcttgcaaacaaaccacaagctaaagagattcttggcaaggttctcgaagccgcatatgcaagagaagctgcaagaaaagcaaaagaaatgacaagaagaaaaggtcttctggacataggggggctgcctggcaagctagcagattgccaagaaaaagacccagcgctatcagaattatttttggttgagggagactcggctggaggatcggcaaaacagggcagggacagaagctttcaggccatattgcctcttaaaggaaaaattataaacgtacaaaaagcacgcctagacaaagtcttatcttctaatgagattggaacccttataacagctttagggacaggcattggcattgacgagttttcactagaaaaacttagataccatagagtcataataatgacagacgcagacgtagatgggtctcacattagaacactcttacttactttcttttacaatcagatgtttgatctgttagaaaaaggacatatttatttggccttacctcctctttacaaaattaaaaagggcgggaaaacacattacgcaaaagatgaggaagaaaaagacgcaattcttaaagaacttagaaaagaagcaacagaaggctctagacctcctgagatacagagatataaagggctaggagaaatgaatcctgaacagctgtgggagacaacatttgaccctaaacacagaaggcttgtgcaaattactttagatgaggcaagagaactcgttgatgatatctttgaaacattaatgggcgatcaggtacagccaagaagagagtttattgatgataatgctcttagagcagagaatatagacttttaa

SEQ ID NO: 295238 - DNA, 664 bp, Unknown
  Bacterial polypeptide expressing nucleotide sequence isolated from the Sargasso Sea
aatgacaaatacacctaaatacgattcttcaaatatcaaggtcttgaaaggtttagaggctgtcagaaaaaggcctggcatgtatataggggatacagatgatggcactggccttcaccatatggtttttgaagtagttgataattcaattgacgaagccttagctgggcattgcagtgaaatcagtgtagagattaatgtagataattcaattacagtttcggataacgggcgaggtattcccgtggacctccatcctgaagaaaaaaaacctgcggcagaagttataatgactgtattacatgctgggggtaaatttgacgacaattcttataaggtctctggaggacttcacggcgttggtgtttctgtcgtaaatgctttgtccgaaaagttggagctagagatttgcagagatggcaatattcataaccaaagttactctatgggagagcctcaaacaaaactcctaaaaggtagcaaaactaaagagacaggcaccaaagttactttcatgccaagcaaagaaatttttacggatacagaattccattttaatattcttgcaaagaggctaagagagctctctttcttgaattcaggaatcaagatacttttatctgaccaccgcacagatacaacagaagagtttcattatgctggc

SEQ ID NO: 295239 - DNA, 718 bp, Unknown
  Bacterial polypeptide expressing nucleotide sequence isolated from the Sargasso Sea
tttggctcaacaacaagattacacacaagatagtattcaggttttagaaggattagtccctgtaagaaaacggcctggaatgtacataggaagcactgatgaaagaggcctccaccatttaataaatgaaattgtagataatagtgttgatgagttcatggcagggcattgtgacgaaatatttctacatattgatgaaaatcaatatgtagaaataacagacaatgggcgtggaatacctgtcgaaaaacatagaaccacaaacaagccaacagtagagaccgttttgacaactctgcacgcaggaggaaagttcgaacaaggggcgtatcaagtatcaggggggctgcatggagtcggggcgtctgctgtaaacgctttatcgcaagattttattgttagtgtatacagagaaggtaaagaacacactatgtcattttctgaaggaataaaaaaatctgacttaactacttcaaatttgccagaaaacgaaaaaaacaaaactggaaccaaaattaggttcaaagcggatacaactatatttatcgacgatgaaactaaacaacctttagattatgactttaataaaattttagctcgaactaaagaaattgcttatctgaataaaggtcttaaaataatatttagtagtgattttcacaaaaatttatggccaaacaacaagtatatgtactacttcgaaggtggtatatcttct

SEQ ID NO: 295240 - DNA, 217 bp, Unknown
  Bacterial polypeptide expressing nucleotide sequence isolated from the Sargasso Sea
atgacagataaaatttctcagatcaatttagaagatgaaatgaagaaatcctatctggattatgcaatgagtgtcattattggacgagcgttgcctgatgtcagagatggattaaaaccggtacatagaagagtgctctatgccatgaaagtccttggcaatgatcatacaaaagcatacaaaaaatcagcaagaattgtgggtgatgtaattggta

SEQ ID NO: 295241 - DNA, 769 bp, Unknown
  Bacterial polypeptide expressing nucleotide sequence isolated from the Sargasso Sea
atatctgctcaagaaagagttaaggcatcatccactgtagaaagaaagaaaacttttaaaggacctgctttacctggaaagctttccgattgtaacagcgaagatctaaataaaactgaattatttttagtcgaaggagattctgctggtggttcagcaaaacaagcacgagaaagatcatttcaagcaataatgccacttagaggaaaaattctaaacacatgggacttagagagtagtgaaataattaagtcccaagaaataaaaaatctttctactgcgattggagttctgcctggaaatgcggatgtatcctccttgaggtatgggaaaatatgtattttagctgatgctgattcagatggcttacatattgctactttattgtgcgcattatttttaagacattttaagccacttgtaaacgatgggagaattttcattgcaatgcccccactttacagagtcgactgtggaaaagaggttttatatgcgttagatgaattacaaaaagataaaatagttaaagattttaaaaataaaaagggcaaaccaaaaattaatatacaaagatttaaaggcttgggtgaaatgaatccatctcagctaagagaaactgttatggatccagaatcaagacaactagttaggttatcaatttcagctaccgataatgcaaatgcaatgatggatcttttactttcaaagaaaaatgcgccggcaaggaaagagtggcttgaaaagaaaggttcactagtgaggatgtagg

SEQ ID NO: 295242 - DNA, 463 bp, Unknown
  Bacterial polypeptide expressing nucleotide sequence isolated from the Sargasso Sea
atgagttcgtcatatttgtcttatgctatgagcgttatagtaagtagggccttacctgatgttagggatggtttaaaaccagtacatagaagaattctttatgcgatgcataaaggaggttatgactggtcaaaacaatttaggaaatcagcaagaattgttggagatgtgataggtaaatatcatcctcatggtgaccaatcagtttatgatgctcttgtaagaatggttcaagatttttcaatgagtttacctttggttgatggacaaggtaattttggttctgtagatggagatcctcctgctgcaatgagatatactgaaacaagattatcaaaagtttcacaatatttgattgatgatatagataaaaatacagtaagttttaaaagtaattatgatgaaacagagaatgagccatctgtattaccagctcaatttcccaatctactagttaatggtg

SEQ ID NO: 295243 - DNA, 275 bp, Unknown
  Bacterial polypeptide expressing nucleotide sequence isolated from the Sargasso Sea
tatgagcgcagaagcacaaacagccactacgcaatatagcgcagaaaacattaaggtattagagggactcgaagcggttcgtaagcgcccggccatgtacattggcgatgtaggaaaacgtggtctacatcaccttgtttatgaagtggtagataattccattgatgaggcccttgcgggttattgtacaaaaataatagtcacctttaatgcagatggatctgtgacagtggaagataatggtcgtggtattccagtagatattcataaagaag

SEQ ID NO: 295244 - DNA, 323 bp, Unknown
  Bacterial polypeptide expressing nucleotide sequence isolated from the Sargasso Sea
aatgagtgaggaaaaaagatctaataaaatctccaacgattatggtgctaatcagattcaggttttagagggtttagaacctgttcgtaaacgaccaggaatgtatattggttcgactggtccaagaggattacaccatctggtatatgaagtcgtagataattctgtagatgaggcacttgcgggtcattgtgatcagattgagatagttcttaaagaagatggatcagctttgatttcagataatgggaggggtattcctacagatatacatcctagaacaggcaaaagtgctcttgaaactgttcttactgttcttcatg

SEQ ID NO: 295245 - DNA, 905 bp, Unknown
  Bacterial polypeptide expressing nucleotide sequence isolated from the Sargasso Sea
aattatgatgatacagaaactgagcctgtagttctgccagctcaatttccaaatttattagtaaatggtgcaggtggaattgctgttggtatggcaacaaatatcccccctcacaatttaggtgaagtaatagatggtacgttggcttatttggaaaataataaaattacaattttagaattaatgaaaagtattccaggacctgattttccaactggtggattaatactaggtaaaaatgatattaaaaatggttacgaaactggaagaggttctattaaaattagaggagaaatagatattgaggaaagtattaaagatagaaaattaatattaattaaatcagttccatatcaaattaataaaaccgcattaatagaaaagattgcgctgctaattagggagaaaaaattggaaggaatagccgacttgagagatgagtctaataaagaaggtgtgagaattgtaattgaaactaagaaaaatataaatcaagatattattattaatcaactttacaaatttacacctctagaaagctcttttggttttaatactttggctataaatgagaaaaaaccagaattattaaatttaaaacaatttattcaaatctttattaaatttagagaatcaacgattgttaaaagaacactttttgaattaaaaaaagcgaaagaccgatctcatatactgattggtttatttatatctattgaaaatattgatgaaataatcgggatcatacggaaatcaaaaacacctaatgatgctagatcattacttcttaaaaaaaaatggaactttaaaaaatctaatttggataaaaatattttaagtttaaacgaactaaatcaaatagatgaatatcaattatcagatcatcaagtaaaagcaattcttga

SEQ ID NO: 295246 - DNA, 874 bp, Unknown
  Bacterial polypeptide expressing nucleotide sequence isolated from the Sargasso Sea
gtgatctatccaacgctcgtccgtatggctcaagaatggaacatgcggcacgtgcttgtggataagcagggtaacttcggatcaatcgccggattgcctgccgcagctatgcgatacaccgaagctcggctatccccgattgcgtcacaaatgcttgatgacatcaatctcgatacagtcgatttcgtgccaacctatgatgagcgaaatactgaacccgtcgtgcttccgagtcgctttccaaacctggtagtgaatggagcaggtggtattgctgtcggtatggcaacaagtattccgccacacaatcttggcgaggtatgtcgtgggcttgttcaaatgatcgacaacccagacacatcaatggcagagttgcttgagattgtccctggccctgatttcccaactggtggaatcgtcatggggagggaatccttgctacgtgggtatttgactgggagaagcacgattacgttgcgtgcacgtgctcacgtcgaagaatttggaaaaaaccgtaataggatcgtaattacagaaattccgtaccaacaaacacgagacgctattgaggaaaaaattgcggatcaggtgagtaacgagcgaataaaagggatttctgcgatccgtaacgaaagtgacctgaaagaacctgtacgacttattttggagttgaagcgcgatgctgatccagacgttgttctcaatcagctctatcaattttcgccacttcagacgagtttttcgctcatctttcttgccctagtagatggcaagccaaggatgctctcgttcaaaaatatgcttgaagagtttctgcggcatcgaacgacagttcttcgtcgaaggacgcagcatcttcttgcacgagcgagga

SEQ ID NO: 295247 - DNA, 817 bp, Unknown
  Bacterial polypeptide expressing nucleotide sequence isolated from the Sargasso Sea
tttaaagagggtttaacatgtgttttatctgtaaaaattcctgaccctaaattttcttctcaaacaaaagataaattagtttcttccgaagtaagaaatatagtggagggtattgttaatgaaaaactatctatttggtttgatcagaatccttcaatttcaaagataattttaacaaaaataatacaagcggctgtggcaagagatgttgctaaaagagcaagagaaaatgtaagaagaaagggtgctttggaactaacaggtttaccggggaaacttgcagattgccaaaattcaaaacaggagggaacagaattatttatagttgagggggactcagcaggtggatcagctaaacaaggaagaaatagagaatatcaggctgttttaccacttagaggaaaaattttaaatacatttactgaaataaatgaaagtaaaaaaaatggtggtcaaaatgatttaagaacaaaatcgttatcaaaaatgatatcttctaatgaaatagttacactaattaatgctttaggtttagatccaaaatcagaggagattgatttagaagatcttagatatggaaaaattataattatgacagatgcagatgtggatggatcacatataagagcattacttttaactttttttaacaacattccttttaataaattaattgaaaaaggtcatgtttatttagcacaaccacctctttttaaagttaataaaggttccaaagggatttatataaaagatgagaaagatcttgaaaattatataattaaaaattcaaaagatctaaaaaaaataaaaaaaaatt

SEQ ID NO: 295248 - DNA, 907 bp, Unknown
  Bacterial polypeptide expressing nucleotide sequence isolated from the Sargasso Sea
aatgtatataggtgacactgacgatggaacaggtttgcaccatatggtttatgaagttgttgataattccatagatgaagctttagctggatattgtaaaaatattgatatttttattaactcaaatggaacagtgacagttaaagatgatggaagaggtattccagtagatttgcataaaggagaaaagaaatctgctgctgaggtaataatgacccaacttcattctggaggcaaatttgatcatgattcttataaagtatcaggaggtttacatggagttggtgtatcagtagtaaacgcattatcagaaagtttaaaacttgaaatttctagagatggaaaaaaatatgttatagaatttaaaaatggtgatgcaaaagcaaatttaaaagctgttggtaattcaaaagaaacaggaacacaaattacatttttaccgtctaaagaaattttttcatcaattaagtttaatccaagtataattcaaaaaaggatgcgtgaacttgcatttttaaataaaggaattaaaatttctattcacgatctaacttcaaaaaaaagtaaaattaatgttttcaaatttgaaggtggaattttagagtttgtaagttttcttgatgaaaaaagggaaaaactaaataataaaaatggaaatcttttatttaaaaaaccaattttaattgaaggtaaaaaagatgatgtggaaatagaatgtgcactacaatggaatgcgatgtatagcgaagatgtttacccttataccaataacgtttatcaaaaggatggaggaacacaccttttgggttttagaagtgctttaactagagtagtaaataagtatgcaagtgaattaaatttattaaagaaaaataaaatttctatttctggcgatgatgttaaagaa

SEQ ID NO: 295249 - DNA, 910 bp, Unknown
  Bacterial polypeptide expressing nucleotide sequence isolated from the Sargasso Sea
ccgaacgtcatctcggtcaccggcgagcacaacaatatcgtcgtggacgtggcgctgcagtggaccgactcctaccaggagacgatgtactgcttcaccaacaacatcccgcagaaggacggcggtacccaccttgccggcttccgtggtgcgctgacccgcgtgctcaacaactacatcgagcagaacggcatcgccaagcaggccaagatcaacctgaccggcgatgacatgcgcgaaggcatgatcgcggtgctgtcggtgaaggtgcccgacccgagcttctccagccagaccaaggaaaagctggtcagctccgacgtgcgcccggcggtggaaaacgcctttggtgcgcgcctggaagagttcctgcaggaaaacccgaacgaagccaaggccatcgccggcaagatcgtcgatgccgcgcgtgcacgtgaagccgcgcgcaaggcccgcgacctgacccgccgcaagggcgcgctggacatcgccggcctgccgggcaagctggccgactgccaggaaaaggatccggcgttgtccgagctgttcatcgtcgagggtgactcggcaggtggctcggccaagcaggggcgcaaccgcaagaaccaggcggtgctgccgctgcgcggcaagatcctcaacgtggaacgcgcgcgcttcgaccgcatgctgtcgtcggaccaggtcggtacgctgatcaccgcgctgggcaccggcatcggccgtgacgagtacaacccggacaagctgcgttaccacaagatcatcatcatgaccgacgccgacgtcgacggcgcgcacatccgcaccctgctgctgacgttcttctaccgtcagatgccggagctgatcgagcgcggttatgtctacatcggcctgccgccgctatacaagatcaagcagggca

SEQ ID NO: 295250 - DNA, 880 bp, Unknown
  Bacterial polypeptide expressing nucleotide sequence isolated from the Sargasso Sea
ggttatgattggtctaaacaattcagaaaatcagcaagaatagtcggggatgtaattggtaaatatcatcctcatggtgatcaatctgtatatgatgctttagtaaggatggtgcaagatttttcaatgagtttacctttggttcaagggcaaggtaattttggatctattgatggcgaccctgcggccgctatgaggtacacagaaactagattgtctaaagtttcacaatacttaattgatgatatcgaaaaaaacacgataagttttaaaagtaattacgacgaaacagagaaagaacctagcgtattacctgcacaatttccaaatttattagttaatggtgctggtggaattgctgttgggatggcaacaagtattcctcctcataatcttggtgagataattgatggaactttagccttaatagataacaaagatattaaaataaaagagttaatgaaacacattcctggaccagattttccaactggaggagtaataatcggtaaagatataattaaacaaggttacaacaatggaagaggttcttttaaaattagaggtgaggtatcagtagaaagcttaaagaatggtagagataggttagtaattacctcaattccatatcaagtaaacaaagctgtattgaatgaaagaattgcacaattagttagagaaaagaaaattgaaggaattagagatattagagacgagtccaatagagaaggcataagagttgctattgatctaagaaatggtgttgaaccagaaacaattaaaagacaactttataaaaacactcaaatagagagttcttttggttttaacactttagcaatagtagaaggaaaaccaaaaacatgcactttaaaagaat

SEQ ID NO: 295251 - DNA, 801 bp, Unknown
  Bacterial polypeptide expressing nucleotide sequence isolated from the Sargasso Sea
cgtgtcgccagtatcactagagacagaaatgaaatctgcttatctggactatgcaatgagtgtaatagtaagtagagctattccagatcttagagatggattaaaaccagttcatagacgaattttatactctatgcatgagacaaataatacatttgatcgaccatacagaaagtctgctaggcctgtaggtgatgtgatgggtaagtatcatcctcatggagatcaggctatttatgatgcgcttgtaagaatggctcaagatttttcaatgtctttggtcctgttggatgggcaaggaaactttgggtcgattgatggggactctgctgccgctatgagatacacagaagtccgaatggcaaacccgacagctgctttgcttgacgacattgaaaaaggtactgttgatttccaagataattatgatggcaaagatatagagccaagaattttaccagcaagatttccaaatttattggtaaacggtgctggaggtattgctgttgggatggcaacaaatattcctcctcacaatatcggagaagtgatcgatgcttctttggctgtaatagaaaatccgcatatagaaattgaagaattattgaaacttttgcctgcccctgattttcctacgggtggaattattttgggccaaagtggatctaggcaggcatatttgactggaaaaggctcaatagttatcagagcgaaacatacggttgaggagcagaaaaaagacaggttttctattgtgataactgaaattccatatcaggtgaataaatcatctctagttga

SEQ ID NO: 295252 - DNA, 511 bp, Unknown
  Bacterial polypeptide expressing nucleotide sequence isolated from the Sargasso Sea
atggttgatataaatagagataacacactcccaagagacattgttgatgaaatgagagagagttatttaaactactctatgtctgtaattgtatcaagggcgctcccagatgttcgagatggcttaaaacctgttcatagaaggattttatatgggatgagtgagctgggttcttcttggaaccgcccatacaaaaaatcagcaagaatagtaggggatgttttaggtaaataccacccacatggtgattcctctgtttacgatgcgctggttaggatggcccaagatttttcaatgagatatgaattggttgatggtcaaggaaactttggttctgtggatggcgataacgcagcagcaatgaggtatacagagtctagaatgaccaggttgtctagtgagatgttaaaagaccttgataaagagacggttgattggacagttaattttgacgaaacacttaaagaaccatctgtgttgccgacaaccgtgccaacccttttggttaatg

SEQ ID NO: 295253 - DNA, 460 bp, Unknown
  Bacterial polypeptide expressing nucleotide sequence isolated from the Sargasso Sea
agcccgcgaggccgcgcgcaaggcgcgggaaatgactcgccgcaaaggcgcgctggatattgcgggcctgcccggcaaattggcggactgccaggagcgcgacccggcgctgagcgagctgtaccttgtggagggggattctgcgggtggctctgccaagcaaggccgtaatcgaaaattccaggccatcttgccgcttaaaggcaagattttgaatgtggagaaggcgcgcttcgacaaaatgttgagctccgcagagatcggcaatcttgtgaccgcgctgggctgcggcattggtaaagacgagtttgatccagacaagctccgatatcaccgcatcattatcatgacggatgcggatgtagatggatcgcatattcgcacgctgtatttgaccttctttttccgggagatgcgggagctcatcgatcgtgggcatgtctacatcgcgcaacccccg

SEQ ID NO: 295254 - DNA, 439 bp, Unknown
  Bacterial polypeptide expressing nucleotide sequence isolated from the Sargasso Sea
gaagtgggcactctgatcacggctctgggctgtggtatcggccgggaagaattcaatcccgataaactgcgttaccactccattatcatcatgaccgacgcggacgtggacggttctcacatccggacactgctgctgaccttcctgttccgtcagatgcgcgaaatcatcgagcgtggccatgtctttatcgccatgccgccgctttacaaggtcaagcgtggtaagcaggagcagtacctgaaggacgagaaggccaaggaagcttacctcacccagaccgctctggaaggtgcccagctctatgtgaacccggaagccccggcgatcaaggattccgctctggaaaccatggtcaaggactaccaggcggtcatgaacatgattgggcgactgtcccgggcctacccggccaaggtgctggagcagatgctccaga

SEQ ID NO: 295255 - DNA, 873 bp, Unknown
  Bacterial polypeptide expressing nucleotide sequence isolated from the Sargasso Sea
tatgcaatggagcgtaataattggacgtgctctacccgatgcaagagacggtcttaagcctgtgcaacgaagaatactatttgctatgtacgaattaggtttaacacctgataaaccatttaggaagtgtgcgagagttgtgggagatgtacttggaaagtaccatcctcatggagatcaagcagtatatgatgcattagtgaggctagtacaaaatttttctacaaaatatcctattcttgacggccatggaaattttggatctgtagataatgatccgccagcagcaatgagatatactgaaaccagattagcccagatagctcataaaggttttcttgaagaaattggatcagaaacagtaagcttttcaaataactttgacggttctcaaaaagaaccagatgttcttccggcccaacttccatttttattgttgaacggctcatcaggtattgctgtcggcatggcaacaaacataccccctcacaacctaggagaaattgtagatggtttagttgctctagtaaaaaataatgatattagtgataaaaaactttcgaacattattcgagggccagattttcctacaggcggagagttaatttatagtccagcaataaaagaactttatgaaacaggcaaagggtctttaacaataagaggagttataaatattgaagaagtaaatttaggcaaagggaaacataaaaagaatgcactaataattacagaacttccttaccaaattaataaagcaggttggattgaaaaacttgcagaacttgtcaattcagggaaaattcatgggatctctgatattagagatgaaagcgatagagatggaatgagaattgtaatagagttaaaaaa

SEQ ID NO: 295256 - DNA, 732 bp, Unknown
  Bacterial polypeptide expressing nucleotide sequence isolated from the Sargasso Sea
agggaaggaatagagaatttcaagcggttcttcctttgcgaggcaaaatacttaacacttatattgatgttaatggatcaaaatctaaaaatggtaataatcaagatttacaaaccaaggccttttcaaaaatgatgtcctctactgaaatagtaactttaattaatgctcttggaacaggatctaaagattttagtatagaaaatttaaggtatgaaaaaattattataatgacagatgctgacgttgacggttcacatattagaacacttttgttaacgttgtttaataattatcctttctatgaacttatagagaaaaatcatatatatctggcccaaccacctttgtataaagtttccaaaggtagtaagagtttttatataaaaaatgataaagaattggaaaattttttaataaagatgtcagataaatcaaaaaattcaattaaaaaaaataccaaggaatttattaaatttattgagaaagaaaaaagcaaacttactattcaaagatttaaaggtttaggagaaatgaacccagaggagttgtgggatactacacttaatcctgaaaaacgaacattattacaggttaaatactcaaataatacaaaagacaaatcaaaaaaagatcaagatctaataaaagttcttatgggtgatgaagttgctccaagaaaagattttataattaatcgagctttggaagtttcaaatttggatatataat

SEQ ID NO: 295257 - DNA, 745 bp, Unknown
  Bacterial polypeptide expressing nucleotide sequence isolated from the Sargasso Sea
ttggaagcaaaaaacattaatcagaacaatgtagattatgacgcagaatctataaaagtcctaaaaggtttagatgctgttcgaaaaagaccgggaatgtacattggtgacactgacgatggctcaggcctccatcacatggtttacgaagttgttgataactctatagatgaagcattagcagggttttgtgactcaattacagttaaattaaataaagatgactcggtaactgttatagataatggaagaggaattccaactaatgttcataaggaggaaggtgtgtcagcagctgaggtaattatgactcaattacatgcaggaggaaagtttgatcaaaactcttacaaagtctctggtggacttcatggtgtcggtgtttcagttgtaaatgccctatcggaaaaacttgatcttaaaatttgtagagaaggaaaaaaatattgtattaatttctcacatggaaacccagagtcccctctaaaagaagtgggcaatactgaagatagtggtacagaaattactttccttccctcaaaaaaaactttcagcttaactaaatttgacttcgctaaacttgaatcgcgtctcagagaacttgcatatctaaactctggagtaaatattaaactggtcgatgaaagaggtaatgaagaaaaaatttcggagttatcctctcggggaggattaaaagcatatgtatcatttttggataaatcaagagagtcaattattaaagatg

SEQ ID NO: 295258 - DNA, 934 bp, Unknown
  Bacterial polypeptide expressing nucleotide sequence isolated from the Sargasso Sea
cctaaaaaaatatgcagatgcttcaggtttacttgataaacttaaatttgagatttcaggagatgattttagagaaggtcttacagcaattgtttctgttaaagtaaatgaacctcaatttgaagggcaaactaaaactaaattaggaaatagggaagttacttctgcagtttcccaatcagtgtctcaaatgttagaaaattatttagaagagcatcctaatgatgctaaagttattgttcagaaagtaatacttgctgcgcaagcaagacatgcagcaagaaaggctagggagatggttcaaaggaaaacagtaatgagtggaggcggtttacctggtaaattagctgattgttctgagcaagatcctcaattatgcgaggtttttcttgttgagggggattcggcaggaggaactgcaaagcagggaagagatcctaagtttcaagcaattctccctctcagaggaaaaatacttaacgttgaaaaagcgatgcaacataaggtttttgagaatgaagagattagaaatatatatacagcattgggagtttctattggtacagaagaagatagcagagctttaaatttagaaaagttaagatatcataagatagttattatgtgcgatgctgatgttgatggaagtcatatttcaacacttatattaacatttttcttccgttacatgagagaattaatagattctggctatgtttatattgcaacacccccactatatcttgttaaaaaaggaaataaaaaagattatgcttggtcagatgaagaaagagataaattgatgaaagaaaatggtactggttctaatattcaaagatataagggattaggtgaaatgaatgctgatcaattatgggagacaacaatgaacccagataaaagaactttaaaaagaatagatattaactcctta

SEQ ID NO: 295259 - DNA, 862 bp, Unknown
  Bacterial polypeptide expressing nucleotide sequence isolated from the Sargasso Sea
tgtaaattacgtaaatacaaatacaaaaaattctaataatattacaggtgaagacgctagagagggattaacatgtataatatcagttaaattaccagatcctaaattttcaagtcaaacaaaagacaagcttgtgtcttctgaagttcgaccagttatagagtcaacaagtttgaataaattagaacaatggattgaagaaaacccttcggaaataaaaaaagtaattgataaaatactcgaagcttctaatgctagagaggctgctcggaaagcaagagaactcacaagaagaaaaacgggtttagaaaatacttccctcccagggaaattggcagactgtcaagagaaaaaccctgaattatcagaattatttatagttgagggagactcagccggaggatctgctaaacaaggaagagacagaaaaaatcaagctatacttccattaagaggaaaaatattaaatgtagaaagagccaacgacaaacaagtttttacaagtaatgaaattggagctttaattactgctataggagcaggtgttggcaatccaactgatgataataaccaaaataaattagagggtaaatttgatgtctcaaaaatgcgctatcataaaataattatcatgacagatgcagatgtagatggaagtcatataaggacactactattaacttttttttacaggcatatgaaaccgattatagactcaggaagattatttatagctcaaccacctctatacagacttaaaaaaggtaattcaactgtgtacaaaaaagatgataatgatttagaagattacttgattgaagaaggattaaaaaatactatttttgaaaatactcaactttct

SEQ ID NO: 295260 - DNA, 840 bp, Unknown
  Bacterial polypeptide expressing nucleotide sequence isolated from the Sargasso Sea
cgttgattttatcgagaactatgatggctccgaatctgaaccatctgtgatgccaacaaaatttccaaatttactaattaatggctcctctggaatagcagttggaatggcaacaaatatcccacctcataatctctcagaagtcatcaacgcatgtttggcgatgatagacaaccccgccattgaaataaaagaactgatggagcttattcccggaccggattttccaacagcaggaataataaatggtgcacagggtatccatgaggcttatgtcacgggaagaggacgtgttcatatcagaggaaaggttgatattgagccaataggtaaaaaaaatagagaagcaataattgttaaagagctgccttatcaagtaaataaagcccgattaattgagaaaattgctgaattggttagagataagaaaattgagggtattactgaactaagagatgaatcagataaagatggaatgagaatagtgattgagcttcgccagggtgaggtcgttgatgtggttttaaataatttgtacaaacaaacgtctctacaaactgtttttggtatcaatatggtggctttgcatgatggtcaacccaaattacttaatttgaagcaagttctcgaggcattcatttctcatcgacgtgaagtagttacaagaagaacaatatttgatctcaataaagcaagagatcgagcacatatccttgagggccaggctgttgccctttcaaatattgatgctgtaattaagttaatcaaatcatctccaacacctgttgatgcaagagaggctctactcaaaaaatcctggaaaccaggtgcagtaaagaa

SEQ ID NO: 295261 - DNA, 796 bp, Unknown
  Bacterial polypeptide expressing nucleotide sequence isolated from the Sargasso Sea
tggtaaacaggagggtaccgaattatttattgttgagggagactctgcaggaggttccgctaaacagggaagaaatagggccaatcaagctgttctgcctcttcgtggaaaaattttaaatacttatgttgaggatctacaagtaaaaaaaaacggaaatagtcataaaaatggtgctgatcaaagaactaaagcattagcaaaaatgatttcttcgaatgaaatcataacattaattaatgctttaggactagatccaaaagctcaagagatagatttaaaagatttaagatatggaaaaataattattatgacagacgcggatgttgatggatctcatattagagctttattattaactttttttaataataaaccatttaataaattgatagaaaacggatttgtttatcttgcccaacccccattatttaaaattaataaaggttcgaaaggaatttatataaaagatgaaaaggaactagaagattttattattaataataataatgaatttaaaaaaattaaaaaaggtagtaaagattttaataaaagaattgaagtggaaaaatctaaaatgaatatacaaagatttaaaggtttaggagagatgaacccagaagaactttggagcacaactttagatcctgaaacaagaaatttgttgcaggttaagtattctaaagatagtaaaaaagatcaaaatttaatacatacattaatgggtaatgatgtgtctttgaggaaggattttatcattaccaatgcaatcaatgtacataaccttgatatatag

SEQ ID NO: 295262 - DNA, 747 bp, Unknown
  Bacterial polypeptide expressing nucleotide sequence isolated from the Sargasso Sea
aatgagttcgtcttacttgtcttatgcgatgagtgtaattgttagtagagcacttccagatgtgcgagacggtttaaaaccagttcatagaagaataatatatgcaatgtacaaaggtggttacgattggtctaaaccttttagaaaatcagcaagaatagtaggagacgtaattggtaaatatcacccacatggtgatcaatcagtttatgatgctttagtaagactagttcaagatttttcaatgagtgtcccacttatctccgggcaaggaaactttggatctattgatggagatcctcctgcagcaatgagatatacagagactaaacttggaagaatttctcaatttttaaccgaagatctcgaaaaaaatactgtaaactttcgaagcaattatgacgagactgaaaaagaacctgaggtactgccgtcacaatatccgaatattttagttaatggggctggtggtatcgctgtggggatggctacaagcattccgccacataatcttggagaaatagtaaacgctacgatagcttttataaataacagagaaattacaataagccagttaatgaaatatgttccaggacctgattttcctacaggaggagtaataattggcaaagacattataaaacaaggttacaataaaggtagaggatcatttaaaataagaggagaaatagaatttgaggaaaaaaagggtggaagagagacgttagttattaaatcgattcctta

SEQ ID NO: 295263 - DNA, 877 bp, Unknown
  Bacterial polypeptide expressing nucleotide sequence isolated from the Sargasso Sea
tggtttgatcaaaatcccgctgtagtaaaaatagttttacttaaaattatacaagctgcccaagcaagagatgttgcaagaaaggcacgtgagagcgtaagaagaaaaggagccttagaactaacaggattaccaggaaaattggcagactgccaaaatccaaaaagagatggcacagaattatttattgttgagggagactctgctggaggttcggctaagcaaggaaggaatagagagtttcaagctgtattgcctctaaggggtaaaattttaaacacttatgttgaaactaatggatcaaaaaaaaatggaaatcattccgatctaagaacgaaagctcttacaaaaatgatttcctctaatgaaattgtaacattaataaatgcattaggtttagatcctaaatctgaagaaattgatcttgaagatttaagatatggaaaaataataattatgactgatgctgatgtagatggctcccacatcagagcattgttgttaacattttttaacaacaaaccatttaataaattaattgagaatggtcacatttacctcgctcaaccacctttatttaaattgaataaatctgggaaaagtttttatattaaagacgaaagagaattggacaactttttaataaataattccaaaaatctaaaaaaaacgaaaaaaaatacaaagctttacgaagaaatcttatctgaagaaaagtctaaattaaatatacaaaggtttaaggggttaggggaaatgaatcctgatgaactctggaatacaacgctagatccaaaaaatagaaatctcctccaagttaaatattcaaaagatcaaaaaagagatcaggatataattcatactttaatgggaaatg

SEQ ID NO: 295264 - DNA, 997 bp, Unknown
  Bacterial polypeptide expressing nucleotide sequence isolated from the Sargasso Sea
catggtgaccaagctgtttatgacgcttttggtcagaatggtacaagaattttcaatgagccttcctcttatagatgtcaggggaaatttcggatctattgatggagatccgccagcagcaatgaggtatacggagacaaaacttgcaaaaatttcacagtttttaatcgatgatattgataaggaaactgtaaattttaaaagcaactacgatgaaaccgaaaaagagccagttgttttacctgcacaatatccaaacttattagtaaatggtgctggaggtatagctgttggtatggcaacaagtattcctccacataatcttggagaagtaatagatggtactttagctttcattaataacagagatataaaaataaatgaattaatgaaacatattcctggtccagattttccaactggaggtactataatagggaaaaatataattaaagaaggttataaaaatggaagaggatcatttaaaattaggggagaaattaagatagagcaaagaaataatggaaaagagagaattgttataacatcaataccttaccaagttaataaatcatctctcaatgaaagaattgtagaacttgtgagagaaaaaaagattgagggtattagcgatattcgtgacgagtcaaatagagaaggtgttagagttgcaattgacttaagaagaggtgttgaaccagaaactgttaaaagacaattgtataagtatacatcaatagaaagctcatttggatttaacactttagcaattgtagaccaaaaaccaaaaacgtgtaaccttaaagattttatagatcactttttaaaatttagagaagatgtcgtaattaaaaaaacaaaacacgatttaaaaaaggcagaagacagagcacatgttttaattgggttatcagtgtcagttgaaaatttagataaaattataaaagtaataagatcatcaaaaactcctgatgatgcaaaaaaagaattatcaaaa

SEQ ID NO: 295265 - DNA, 940 bp, Unknown
  Bacterial polypeptide expressing nucleotide sequence isolated from the Sargasso Sea
gctaatgaaaacaacttattaaagaaaaataaattggcaatttcaggtgatgatattaaggaaggtcttacctgtgtactttctactaaaattcctgatccaaagttttcatctcagacaaaggataaacttgtctcatcagaagtaaggatgatagtggaaactctaataaatgaaaaattatctatatggtttgatcaaaacccttcgattgcaaaaactattttagctaaaataattcaggctgcaatggccagagatgttgctagaaaagctagagaaaatgtgagaaggaaaggagctcttgaattaagcggtctcccaggaaaattagctgattgccaaattggtaaacaagatggaacggaattatttattgttgagggtgattcagcgggtggttctgcgaaacaaggaagaaatagagcaaatcaagctgttttgccattaagaggaaaaatattaaacacatacgttgaggacttaaatattaaaaaaaataggaatggtaatggtaccgaccaaagaacaaaagctttgtcaaaaatgatttcatccaatgagatagttactttaattaatgctctaggattagatcccaaagctcaagaaattgatttaaaagatttaagatatggtaaaatcattataatgactgatgctgatgttgatggttctcatataagagctcttcttttaactttttttaataacaaaccattcaacaaactaattgagaacggccatgtctatttggctcaacctccactttttaaaataaataaaggcaccaaaggaatttatattaaagatgaacaagagttagaggaatatattgttaataataataaagaattaaaaaaaataaaaaaaacatcaaaacaatatttatcagctatagacgcagaaaaatccaaattaaatattcaaagattaaagg

SEQ ID NO: 295266 - DNA, 694 bp, Unknown
  Bacterial polypeptide expressing nucleotide sequence isolated from the Sargasso Sea
agatacccataagggtgagggagtcccagcagcagaactaattatgacaacccttcactccggcggtaaatttgacgacaattcatataaagtatctggaggtcttcatggggtcggcgtatccgttgtaaacgcgctttctaaggaacttactttaactatatgcagagatggcggcatgtatcaacagaaatacagtgaaggtttggccaaaacaaaattaaaaaagattaaagcatccaaagatacaggaacagagataacatttacagcatctgacaaaatctttacttcaataaacttcgaggctgacagagtaaacaaaagagtgcaggagctttcttttcttaatgcaggggttagtattgaggtcacagacgctagaacaggcaaatctaaaaaattcaagaatgaaggcggcgtatctagttatgtagactacctaagaggtagaaagccaccgctatgtcaaacaattgagtgtcagggcgggcaagagggggtaacagtcgaggttgcaatgcagtggaatgactcatataacgagagcgtcctatgttatacaaacaatattcctcaaaaagatggcggcactcatttatctggctttagatcaagcctaacccgcgttttaaaagcctttgtaaaaaaagaagaacttaataaaaactcaccagtagaattattaggagag

SEQ ID NO: 295267 - DNA, 803 bp, Unknown
  Bacterial polypeptide expressing nucleotide sequence isolated from the Sargasso Sea
catggtttatgaagttgttgataactctatagatgaggctcttgctggtcattgtagctctatatctgttagtctaaaccctgataattctgtttcaataatagataatggtaggggcatccctaccaatattcacaaagaagaaggtatttctgctgctgaagtaataatgacacaacttcatgctggaggaaaatttgaccaaaactcttataaagtttcaggcgggctccatggggttggaatttcagttgttaatgctctttctgaatggcttgagttgacaataaggagagacaaaagtgaatactttataaaatttaaagatggtatagctgatgcacctttgaaaaaaattggaaattctgatttaagtggaactatgataacttttatgccgtcaaaaaaaactttttccaaaacagattttgattttcccaagttagaatcaagattaagagaattagcttatcttaattctggggtaaatatcgttcttattgacaaaagaaaaagtgaggtttttgaatctcaattgtcatcaagaggtggattaaaagggtatgtaaaatacctagataaatctaaagaatcgattataagtgaaatcatttcaatcaaaggcgattcaagtgatattcatgttgagatggcattacagtggaacaagagttatcatgaaaactgcctagtgtttacaaacaacatccctcaaagagatggtggaacacatttagctggttttagatctgcattaacaagaactattaacactgcatctaataatttaggattgcaaaaga

SEQ ID NO: 295268 - DNA, 934 bp, Unknown
  Bacterial polypeptide expressing nucleotide sequence isolated from the Sargasso Sea
tggtgtgccgatgcctattccgacagcattctcggcttcgccaacaacatccgcaccgtggatggtggcacgcatattgaaggcctgaagacggtgctcacccgcaccctcaacgccttcgccaagaagctcggcaagcgcaaggaagccgattccaatctcgccggagagaacatccgtgaggggctcactgctgtgctctcggtgaaggtgccggagccggaatttgagggtcagaccaagacgaagctgggcaacaccgaggtgcgtggcatcgtcgacaatctggtcggtgagtcgctcagtcagttcctcgaattcaacccctccgtgatcggcctaatcctggagaaggcgatccaggccttcaatgctgccgaagcggctcggcgggccagggagctggtgcgccgcaagagtgtgctggagagttccacgcttcccggcaagctggccgactgcagttcccgtgatccgggtgaatctgagatctacatcgtggagggagactccgctggagggtcagcgaaacaggggcgggaccgacgcttccaagccattcttccgctgcgaggaaagatcctcaacatcgagaagaccgacgacgccaagatctataagaacactgagattcaggctttgattacggcgctcggtcttggcatcaagggagaagactttgatgaaaagaatctccgctatcaccgcattgtgatcatgaccgatgctgatgttgatggtgctcacatccgcacgttgattcttactttcttctatcgctaccaaaaagcgttggttgaaggaggctacatctacatcgcctgtccgccgctctacaaagtggagagaggtaagaatcacacctattgttataacgaatcggatctgcagaaaaccctgaaaggattggcgaaaaagccaactacaccattca

SEQ ID NO: 295269 - DNA, 900 bp, Unknown
  Bacterial polypeptide expressing nucleotide sequence isolated from the Sargasso Sea
tagctataaaatttctggaggccttcatggggttggtgtttctgttgtaaatgcactatcagaaagactatcattaacaattcgcagaaatggcaaaattcatacaatggaatttaaagatggtgttacaacaaaaaaattaaaagagatcggttcaatgaaaaagacggagagaactggcacaacagtccaattttggccatcaaaaaaaattttttccaatacaactcttattcttaaaacactggaaaatagagttcgccagttagcttttctgaattctaacgttcgcattacattatctgatatgcgcacatcaaaagtagaacctattgaattctattatcaaggaggtttaacggcatatgtgcaatttcttaattcaagaaaatcaactttaaataaaattataccttttaatggcgagtcaaatggaattaaagttgaaggcgctttacaatggaatgatggatacaatgaaaatatgctctgctttactaataacattcctcaaggagatggaggaacacatttacaaggttttcgatcagcactaacacgctcattagttggatactcaaatacagttgcagttgctaaaaaaggcaatatcaccatttcaggagatgatgctagagagggcatgacatgcgtactatctgtaaaggtaccagaccctaaattttcatcccaaaccaaagataagctagtttcgtctgaggtaagaccagttgttgagaaaataatatctgaacaattaagcgcttggttagagcaaactcctggagaggcaaaaaagctagtttcaaaaattattgaagcagcaagtgccagagaggcagcaagaaaagcaagagaacttacaagaaggaaaaatgtattagagacatcatcgcttcc

SEQ ID NO: 295270 - DNA, 832 bp, Unknown
  Bacterial polypeptide expressing nucleotide sequence isolated from the Sargasso Sea
ttagaaccagttcgtaaacgccctggtatgtatattggttctactgggcctaagggattacatcatctagtttatgaggtagttgataactccgttgatgaagcacttgcaggacattgcgatcttatagaaatagttcttcgagtggatggctctgcattaatttctgataatggacgaggtattccaacagatattcatccaagaacagggaaaagtgctttggaaactgtacttacagtgctacatgcaggaggtaaatttgggagtggtggttataaagtttcaggtggattgcatggagtaggaatatctgtagttaacgctctaagcgaatgggttaatgtaactgtttatagggatggtaacgaatttaatcaaagatttgaaaaaggtttatcaaagggggaattgcaaactaaaaagcagactggtaaatcatctaagaaaggtacaactatttgctttaaacctgataaagagattttttcaggaggaattgaatttgaatatgctctgctttcatcaagattaagagaactggcttatcttaacggcggagtaaaaattgtttttagagatgaaagaaatcaattatcagatgggtcttttaaagaagaaatatatttatatcaggggggcatcaaagaatatgtagaatacatgaatgctgaaaaagagtctattcatcctgaaataatttatgtcgactcacagaaagaaaatgtatatgtagaggcagctttgcaatggtgttcagatgtatattcagataacatcttgggatttgcaaataacattagaactattgatggaggaactcatatagaag

SEQ ID NO: 295271 - DNA, 703 bp, Unknown
  Bacterial polypeptide expressing nucleotide sequence isolated from the Sargasso Sea
atgaataatgaaaatgaaataagtttaattgataaacctttatcttctcctttctctgaagagttaagtaaaagatttcttcaatacgccttatcaacaattacgtctagatctcttccagatgttagagatggcctaaaaccagttcaccgtcgattactttttgcgatgcaattacttaaattagatcccgataagggctttaaaaagtctgcaagggttgtgggtgacgtaatgggtaagtttcacccacatggggatgctgctatttatgatgcaatggttagaatggctcaagaattttctttaaattatttattagttgaagggcaagggaattttggaaatgtagatggtgataatgcagcagctatgagatacactgaagctagattaagtgaatttgcaagtttaatgttagatggcattgatcagaacgcaattgattttggtcctacatacgatggagaaggtaaagaacccctcattcttccatctggaattccaaatttattagctaatggagctcaaggaatagctgttggaatggcaacatctattcctccacataatttaatagaactatttgatgctgcaaagtttttaattgaaaataaaaatgctacctcatctgagatatgtgaaataattaaggggccagattttccaactggtgggggtgttattagaaagttcagaatcg

SEQ ID NO: 295272 - DNA, 988 bp, Unknown
  Bacterial polypeptide expressing nucleotide sequence isolated from the Sargasso Sea
tagaagaattatttacgcaatgtacaaaggtgttattgattggagcaagccatttaggaaatcagccagaatagtcggagatgtcatggtaaagtatcatccacatggagatcaagctgtttatgatgctcttgtaagacttgtacaagaattttcgatgagtctacctttgatacaggggcaaggaaattttggatcaattgatggtgatccgccagcagcaatgagatatacagaaaccaaactttcaaaggtttctcaatttttaaccgatggtattgaaaaaaacactatagattatcgaaacaactatgatgacaccgaaaaagaacctgtagtgctaccgtctcaatatccaaatcttttagtaaacggtgctggaggtattgctgtcggtatggccacaagtatacctccacacaatctgggtgaagtgattaacggaacaatagattttataaaaaatagagatataacgatctctcaattgatgaagcgtattccaggcccagattttcctacaggcggtatcattattggaaaagacattattaaacaaggatacaataaaggacggggctcgtttaagattaggggagaaatagatgaagaggctcttaaaaacggcaaaactagattaataattaaatcaataccataccaggtcaataaatcagttttaaatgaaaaaattgctgaactttcaagagagaaaaaaattgagggtgtaagcgatatcagagacgagtctaatcgggacggaatcagagttgttatagatttaagaaggggtgttgagcccgaaacaattaaaagacaactttataaacttacatcgatagagtcatcttttggttttaacactttggcaattgttaatggaagaccaaaagttttaaatcttaaggagtttatttctgaatttgttgattttagggaaaaaactgttataagaagaataaaatatgatttaaaaaaaactgaggag

SEQ ID NO: 295273 - DNA, 325 bp, Unknown
  Bacterial polypeptide expressing nucleotide sequence isolated from the Sargasso Sea
gatgagctcatcatatctttcttatgcaatgagtgtaattgtaagtcgtgcattacctgatgtaagagacggattaaaaccagttcatagaagaattttatacgcaatgtacaaaggtggatacgattggtctaaacaatttagaaaatctgcaagaatagttggagatgttattggtaaatatcaccctcatggtgatcagtctgtttacgatgctttagttagaatggtgcaagacttctctatgagcttacctttaattcaaggtcaaggaaaatttggttccatagatggtgatcctgctgctgcaatgagatatacagaa

SEQ ID NO: 295274 - DNA, 685 bp, Unknown
  Bacterial polypeptide expressing nucleotide sequence isolated from the Sargasso Sea
caagaaaaagaccctgcgctgtcagaaatatatatctttgagggtgactctgcgggtggatcagctaaacaaggaagaaatagacaaaaccaagcaatacttcctttgaagggaaaaattttgaatgttgaaaaagctagattagataaagttttatcttcacaagaaataggaacacttgtaacagctttaggttgtggcattggaacagatgagtttgatgctgacaagctaaggtatcacagaataattataatgactgatgctgatgttgacggttcccatataagaaccctgcttttaacattcttctttaggcaaatgtttgaaatcttgaatagaggacatgtctatattgcattaccacccttatacaaaatctcaaaaggaaagaatattaaatacgcagcttctgaaaaggaaaaggatatttctctaaaagagctatctaaaactggtaataggggaattgaaatacaaagatacaagggtttaggagaaatgaatccagatcaactatggacaacaacaatggatcctcaaaatagaagaatgatgagagtttgtattgaagatgccaacgaagccaacaactcttttgaagttctgatgggtgaccaagttgagcccagaagagagtttattgatgaaaacgctctttctgttgcaaatttagatatttaat

SEQ ID NO: 295275 - DNA, 769 bp, Unknown
  Bacterial polypeptide expressing nucleotide sequence isolated from the Sargasso Sea
gggaaaatttcatcctcatggagatgctgcaatatacgatgcaatggttaggttagcgcaagatttctctcaacgttatccattagtcgatggtcaaggaaattttggtaatattgacggtgataacgccgcagcaatgcgttataccgaagctcggatgaccactgttgctgagcgtttattgcagggcatagatgaagaaacagtcgattttcgtgaaacatatgatggtgaaggcaaagaaccgctcgttttacctgcagcattcccaaacttactcgctaatggcgcgcatgggattgctgttgggatggcaacatccattccgcctcataatatctgtgaaatatgtgatgcattgttgcatctgataaaacacccaaatgtatcctttgaaaaactatttgaatatatacctggcccagactttcctactggcgggtggttggtagaaaataaagaaaatataatcgaggcgtatagaaccggcagagggagtttccgtgtaagggcacattggtacaaagaagagttaaaaaatgggacctaccagattgttgttgccgagataccttatcaggtccaaaaatcaaaacttgtcgaaaaactggctgagctacttgaaagtaaaaaattgaacattcttaatgacgttcgtgatgaaagcgcagaagatcttcgtctagttttagaaccgaagagtagaaatatagatccagaaattttgatggagaccttatttaaacagtgcgatttagaagtaaaagtt

SEQ ID NO: 295276 - DNA, 881 bp, Unknown
  Bacterial polypeptide expressing nucleotide sequence isolated from the Sargasso Sea
tgatggttctggattacatcatatggttttcgaggttcttgacaactgtatagatgaagccatggctggacattgttccaatattgaggtcattataaataaagatggctctgtcacagttgcagacaatggtagaggaattccggttgatgttcataagaaggagggagtatcggcagcgcaattaataatgaccacacttcactcaggtggtaaatttgatgacaatagttataaagtttcaggaggtcttcatggcgtcggggtatctgttgtaaatgccctctctaaaaaattgaccttagaagtccatcgtgacggcggtgaatattatcaagaatataatgagggaaaacctaaagccaaattaaaaaagataaaaaaatctagtaagacaggaacaataattactttctttccatcgaaggaaatttttacatctacaaagtttgaaattgaaaaaatttataagaggattcaagagctatcatttttgaatgcaggcgtttcaattaatgttgaagacaaaaaaacaggcaaatctaaaaaatttaaaaataatggagggctttcaagctatgtaacccatttgaaaggaagaaaacaaggtctttcagatattttcgaatgttctgctaccgaaaatgaggttggagttgaaatttctatgcaatggacagattcttattctgagaatgtattatgttataccaataatatacctcagaaagatggtggtactcacttagctggctttaggggtagcttaactagggtattaaagacatttataaaaaaagaaaatgctaaaaaaacacccacagacttattgggagaagacgttagagagggtttaattgcaataatatctgtaaaagttc

SEQ ID NO: 295277 - DNA, 853 bp, Unknown
  Bacterial polypeptide expressing nucleotide sequence isolated from the Sargasso Sea
aaaagatctaataaaatctcaaatgattatggcgcggaacagatacaggttttagaggggttagaaccagttcgtaaacgccctgggatgtatataggttcaacaggacctaggggattacaccatttagtatatgaggtagttgataattcggttgatgaagcacttgcaggacattgtgatcacatagaaatagttcttcgagcagatggttctgctttaatttctgataatggacgaggtataccaacagatattcatccaagaacagggaaaagtgccttagaaactgtactaactgttcttcatgcaggaggtaaatttggaagtggtggctataaagtttccgggggtttgcatggagtaggaatatctgtagttaatgctctaagcgaatgggttaatgtgactgtttatagggatggaagcgaatttaatcaaagatttgaaaaaggtgtatcaaagggtgaattggaaactaaaaagcagactggcaaaccatctaagaaaggaacaactatttgctttaaacccgataaaacgattttttctggaggaattgaatttgaatatgctcttctttcatctagattaagggagctagcttatcttaatggcggagtaaaaattgtttttagagatgaaagaaatcaattatcagatggttcgtttaaagaagaaatttacttgtatcaaggaggtattaaagaatatgttgaatatatgaatgctgaaaaagattctattcatcctgaaataatttatgttgactcacagaaagaaaatgtatatgtagaagctgctttgcaatggtgttcagatgtattttcagataatattttaggattcgcaa

SEQ ID NO: 295278 - DNA, 770 bp, Unknown
  Bacterial polypeptide expressing nucleotide sequence isolated from the Sargasso Sea
tgaaaaattgtcaatttggtttgaccaaaacccatctgtttctaaaataattttaacaaaaataattcaagctgccgtagcaagggatgttgccaaaagagcaagagagaacgttagaagaaaaggtgctctagagctcaccggattacctggaaaattagcagattgtcaaaactcaaaacaagaaggtaccgaattgtttattgttgagggagattcagccggcgggtcagctaaacagggaagaaatagagagtatcaagcagtactaccattgaggggaaaaattttaaatacatatactgagataaatggttctaaaaaaaatggaaatcaaagtgacctgagaacaaaatcattatcaaagatgatttcctcaaatgaaattgttacattaataaatgctctcggattagatcctaaaacagaagaaatagaattaaaggatttaaggtatggaaaaattattatcatgacggatgcagacgttgatggttcacatattagagcgttacttttaactttttttaataatatcccttttaataaattaatagaaaaaggtcatgtctatttagcccaaccacctctttttaaaattaacaaaggctccaaaggtatttacataaaagatgaaaaagatcttgaaaattatataattaagaattgtaaagatataaaaaaagttaagaaaaattctaaagaatttgataaaattattcaattagagaagtctaaacttaacattcaacgatttaaaggacttggag

SEQ ID NO: 295279 - DNA, 619 bp, Unknown
  Bacterial polypeptide expressing nucleotide sequence isolated from the Sargasso Sea
gatggatttaggtagagataatatattagataaacaactagttaaagagcttgaagaaagctatctaaactattcgatgtctgtcattatgtcgagagcgcttcccgacgcgagagatgggctaaaaccagtacacagaagaattttatttagtatgagtgaaatgtctgctatgtggaataggccttataaaaaatctgctagggtggtgggagaggttttaggtaaatatcacccacacggagatagttctatctatgatgctcttgtaagaatggcacaagaattttctatgagacatgaactcgtgcaaggtcagggaaactttggatctgttgatggtgatagagccgccgcaatgagatatacagaatctagaatgtctagaattggaagcgagcttttaagagatattgaaaaagaaacaataccgtggacaacaaactttgatgaaacgctaaaagagccagcagttttaccagctgtttatccaaatttattagtaaacgggtcagagggtatagccgttggtatggcgacaaaaattccaccacacaacctttctgagctggtgggtgggcttgttgagctaatggacaaccccgaatgtgaaacaaaa

SEQ ID NO: 295280 - DNA, 925 bp, Unknown
  Bacterial polypeptide expressing nucleotide sequence isolated from the Sargasso Sea
ttgaacaggggcatcacgatatcaatcagggataaccgcagtgagcgttttcaggaatttaaatatgacggcggaatttcttctttcatcaggcatatcaacgaaaacaaaaatgtgcttcatgaagaaccagtttatttttccggaaaatcagaagatgtggaaattgaagtagctttccagtacaacgacagctacacagagcgaatatactcttttgtaaatactattaatacaattgatggaggaacacaccttacgggcttcaagggggctcttacccgaactctcaataattatatgacctcaaataacattgccaacgattccaaagaaaatttttcaggtgaggatgttcgggaagggatggctgctgtgattagcactcgtgtgcctgaaccacagtttgaatctcagaaaaaaatcaaattaacaaatgttgaaattaaaggaaaagttgaaacactagtttcggaatacttgggagcatatcttgaagaaaatccttctgtttcaaaaaaaattgtggcaaaagccattgatgctcaaagggcaagacttgctgccaaaaaagcacgggaacttacacgaagaaaaaatgtacttgaattcagcacgcttccgggaaaacttgcagattgtcaggagtccgatccttctcttagtgagctttttctagttgagggtgattccgcaggaggatctgctaaacagggtcgtgaccggaaaaatcaggcaatcttgccgttgaaaggtaaaatcttaaatgtggaaaaggcacgttttgacaagatgcttaccaatgaagaaataaagacgatgataactgcgatgggtacaggaattggcaaggaagaatttaatttagaaaaaattcgctaccacaaaatcattattatgactgacgcggatgtagacggcagcc

SEQ ID NO: 295281 - DNA, 880 bp, Unknown
  Bacterial polypeptide expressing nucleotide sequence isolated from the Sargasso Sea
atgacagaagaaaataaatataatagcggaaacatacaatctagagacattgtccatgaaatggaagagtcttatttaaactattcaatgtctgtaattgttagcagggctttacctgatgtaagagatggccttaaaccagtacacagaagagtattgtatggcgcctctgatttgggggcaacatggaacaggtcttataaaaaatctgcaagaattgtaggtgaggttctcggtaaatatcacccccatggagactcttcagtttatgactctcttgtaagaatggcccaaccatggtctttaagatataacctaattgatggacaaggcaattttgggtctattgatggagacaatgctgcagccatgagatacacagaggctcgtatggacaaaattgcagccgaaatgttgcaagacatagacaaagaaacggttgattttacaaacaactttgatgactctttacaagaaccaacagttttaccatctattattcccaaccttttgatgaacggatctgaagggattgctgttgggatggcaacgaaaatccctcctcataatttatgtgaattaataacagggttaaaaaacttattatcaaacccagagattacggttgatgaaattatagaaaaccatatacaaggaccagactttccaacagcaggatatattatggggtcagacggtattaagtctgcatactctacaggccgaggaagggtggtgatgagaggcaaagcatctattgaagagctagagaatggaaaagaaaaaataattataacagaacttccataccaagtaaacaaagccaacctagtagaaaaaattgcagacctagttagagaaaaaaaattagagggcattc

SEQ ID NO: 295282 - DNA, 204 bp, Unknown
  Bacterial polypeptide expressing nucleotide sequence isolated from the Sargasso Sea
tatgccaaaagataacgcttacgattcgtctaaaataaaggttttaaaaggccttgaagctgtcagaaaaagacctggcatgtatatcggcgacaccgaagacgggaccggactccaccacatggtttttgaggtcgtggataacagcattgatgaagcgctagctgggcattgtgatgaaatcagggtcgtaattcacgctaa

SEQ ID NO: 295283 - DNA, 893 bp, Unknown
  Bacterial polypeptide expressing nucleotide sequence isolated from the Sargasso Sea
aatgagttcatcttatttatcatatgcaatgagtgttattgtaagccgagctcttcctgatattagagacggattaaaaccagttcatcgaagaatactttatgcaatgtataaaggtggttatgattggtctaaacaatttagaaaatctgctagaatagtcggtgatgtcataggtaaatatcatccacatggagaccaatctgtttatgatgctttagtaagaatggtacaagagttttctatgagcttacctttggttgaaggtcagggtaatttcggatctgtagatggagatcctcctgctgcaatgagatatacagaaacaaaattagcaaaagtttcacaatttcttatcgatgatcttgataaaaaaactgtagattttaaaagtaattacgatgaaacggaaaaagaaccttctgtactaccagctcaatatccaaatcttttagttaatggagcaggcggtatagctgttggaatggctaccagtataccacctcacaatttaggagaagtaataaatggaactcttgcattaattcaaaataaagacataaaattaaacgaattaatgaagcatatacctgggcctgattttccaacaggaggtataatcattggtaaaaatattattaaagaagggtataaatctggaagaggatcatttaaaataagaggtgaaattaacattgaacaagctaaaaataatagggaacgcttagttattacttcaataccttatcaagttaataaatcaaatttaaatgaaagaatagctgaacttgtaagagataaaaaaattgagggaattaaagatattagagacgagtcaaatagagaaggtattagagtcgctattgatttaagatcaaatgttgagcctgaaa

SEQ ID NO: 295284 - DNA, 763 bp, Unknown
  Bacterial polypeptide expressing nucleotide sequence isolated from the Sargasso Sea
acctttaattcaaggccaaggaaattttggttctattgatggcgatcctgctgcagcaatgagatataccgaaactcgtttgtctaaagtttctcaatatttgattgatgatattgaaaaaaatacaattactttcaaaagcaattacgatgaaactgagaaagaacctagtgttttaccagcacagtttccaaatttattagtaaatggagctggtggtattgccgttggtatggcaacaagtatacctcctcacaatttaggtgaaattatagatggtactttagccttaatagataataaagatattaaaattaaagaattaatgaaacatatacctggtccagattttccaactggtggtgtaattataggtaaagatataattaagcaaggatataacaatggaagaggatcctttaaaattaggggtgaaatctcaattgaacaacaaaaaaatggacgtgaaagacttgtaataacttctataccttaccaagttaacaaatctgttttaaatgaaaggattgctcaattagttagagaaaaaaaaattgaaggaataagagatattagagacgagtctaacagagaaggtattagggtagcaatagatttaagaaatggtgtagaaccagaaactataaagagacaattatataaaaatactcaaatagaaacttcatttggttttaatactttagcaattgttggaggaaaacctcaaaagtgtacactaaaagattttttatctaatttttta

SEQ ID NO: 295285 - DNA, 385 bp, Unknown
  Bacterial polypeptide expressing nucleotide sequence isolated from the Sargasso Sea
atgacaaaaaataactcaaaatatcaagcagactctataaaagttcttaaaggtttagaagccgtaagaaaaagacctggtatgtacattggtgatacagatgatggcacaggtttgcatcatatggtttacgaagttgttgataactctattgatgaagcattagctggatattgcaaaaatatttctgttgatattaattcagatggttcaattacagtcagagatgatggaagaggtatccctatagatattcacaaaggagaaaaaaagtcagcagctgaagtgattatgactcaactacatgctggtggaaaatttgatcatgattcctataaggtatcaggaggattacatggagttggagtttcagttgttaatgctt

SEQ ID NO: 295286 - DNA, 562 bp, Unknown
  Bacterial polypeptide expressing nucleotide sequence isolated from the Sargasso Sea
tatgccaaaaacaaagaaaaacactaacaaaaaaaagtacgactcttccaatataaaagtcttgaaaggccttgatgctgttcgaaaaagaccaggtatgtatattggcgacacagacgacggaacaggcctgcatcacatggtgtacgaagttgttgataattccgtcgatgaagcgctagcaggatactgttcagaaatatctgtaataatccatcaagacgactctataaccgttaaagacaacggcagaggggtgcctgttgacaaacacaaagaggaaaataaatctgctgcagaagttattatgaccgttcttcatgccggcggtaagtttgatgacgattcttataaggtttccggcgggctccacggcgttggagtctcggttgtaaacgctctttctcagactttaagtttgcgaatccataaaaatgggaacatatacgaacaagattatgcccatggagtgccaaaaaaaccacttaagaagggagctaagaccgacagaacaggaacaaccatatcgtttcagcctagtaaaaaaactttttcaaacacc

SEQ ID NO: 295287 - DNA, 862 bp, Unknown
  Bacterial polypeptide expressing nucleotide sequence isolated from the Sargasso Sea
cgctgatgaatttgacatagaaaaactgagataccataaagtaattataatgactgatgccgacgtagatggtgctcatattcgaacacttcttttaacttttttctatcgtaaaatggaagagttagtaaaggcgggtcatttgtacatagctcagcctcctttatacaaggtaaatagaggaaaatcagaagtttacctaaaggatgacgcggccttgcaggattatttaatagagacaggtattgatgaagcgaccttgaattttggggaaggtgcaagtgcggctggagctgatctaaaacgtatagtatcgttaacaaaaaaaataactaagcttttggataatttaaacacaagcataccaagctttttatttgaacaagttgcaatggctggtggtttaaatcctgaccttggccagcatgaaaaagattctgtaggaaagaaagtttctgagagattagatttattgtctacagaacatgaaaaaggttgggcttgtaactacgatgcaatacggggattagaaatttatcggacattgagaggtgtaactcaagaatatgtcattgataatgagagtttatctcagaaagaaaccattatgcttgatagccttaagggcgaaatgcttgagaccttcgagaaagaggctttttttcacaaaaaggaaaaagatattagggttacttctccttctgagctattaaaactagtactaaaagaaggagaaaaaggacttaatttgcaaagatataaggggttcggcgaaatgaatgcagaccagttatgggagacaacgcttgatccagctgctagaacacttttgcaggttcagataaagcatactacagaagaa

SEQ ID NO: 295288 - DNA, 568 bp, Unknown
  Bacterial polypeptide expressing nucleotide sequence isolated from the Sargasso Sea
aatggaaaaagaaaaacttatacctataaaaattgaagatgaaatgaagtcagcttacatcgactattcgatgtctgtaatcgtttctagagcactaccagatgttcgtgatggattaaaacctgttcataggcgagtgttgtttggaatgaacgagatgggtgtaagatcatcctcttcttacaagaaatccgcaagaattgtaggtgatgttatgggtaaatatcatcctcacggtgatagttctgtgtatgatacgatggttagaatggctcaagaatggagtttgagatatttacttgttgatggtcagggaaattttggatctgttgacggtgatagtccagctgcaatgagatatactgaggcaagaatgcaaaaaatttctgaagaccttctctcagatattgacaaagaaactgtagacttccaattaaactttgatgatacaattatggaacctacagttcttccaactagagttcctgctttgcttataaatggtgcatcaggaatagctgttggaatggccacaaatatgccacctcacaacatatctgaagttatt

SEQ ID NO: 295289 - DNA, 919 bp, Unknown
  Bacterial polypeptide expressing nucleotide sequence isolated from the Sargasso Sea
gggtcgcgccttgccggatgtccgagacggcttgaagccggtgcatcgcagagtgctgtttgcgatgaacgagctgaataatgactggaacaagccctacaaaaaatcggcgcgcgtggtcggcgatgtgatcggtaagtatcaccctcatggcgactcggcggtgtacgacaccatcgtgcgaatggctcaggatttctcactgcgctacacgctcgtagacgggcagggcaactttggatcaatcgacggcgactctgccgccgccatgcgctataccgaaattcgcatgtcgaaaattgcccatgctttgctcgctgatctagacaaagaaacggtcgattttgtcgacaactacgacggcactgagcagatacccgcggtgctgccgacccgggtacccaatctgctggtcaacggatcgtcgggcatcgcggtgggaatggccaccaacattccgccccacaacctgcgtgaggtagttgcgggctgtttggcgaccctccagaaccctgacatcgacgtggatgagctgatgcagtacatccccggccccgatttccccaccggtgcccagatcaatggccgtgcagggattgtgcaggcctatcgcacggggcgcggtcgtatctatgtgcgcgccaaggccggggtcatcacagatgaggcgaagggcaaagacaccatcatcatccacgagattccctaccagctgaacaagtcgcgcttgatcgagcggattgccgagctggtgaaagagaagaagcttgaggggatcaccgaactgcgggatgagtcagacaaggacggtctccgcgttgtgattgagctgcgccgtggggaagtgggtgatgtggtgctgaacaatctgtacgcgcagactcaactacagtcggtcgtgggcatcaacatggtggcc

SEQ ID NO: 295290 - DNA, 748 bp, Unknown
  Bacterial polypeptide expressing nucleotide sequence isolated from the Sargasso Sea
gatgagctcatcttatctatcatatgcaatgagtgtcattgttagtagagctcttccagatgttagagatggactaaaacctgtacacagaagaatattatatgcaatgtataaggggggctatgattggtcaaaacaatttagaaaatcggcaagaatagttggagatgtaattggtaaatatcacccacatggtgatcaatcagtttatgatgcacttgtgcgtatggttcaagatttttcgatgagtttgcctcttgttgatggtcaaggaaattttggatctatagatggggatccagcagccgctatgagatatacagaaaccagattatcaaaagtttctcaatttttaatagatgacatagaaaaaaatactattgattttaaaagtaattatgatgaaacggagaaagaaccaacagtattaccagctcagtttccaaatttattagtaaatggggcagggggtatcgcggtcggtatggctacaagtattccaccccataatttaggtgagatcattaatggtacattagctttaattgataataaagatctaaaaattagagacttaatgaaacatattcctggccctgattttcctacaggtgggataattattggtaaagatattattaagcagggctacaataaaggtagaggttcttttaaaatcagaggtgtaatatcaaacgagacacttaagaatggtagagatagattagtaattaatttcattccttat

SEQ ID NO: 295291 - DNA, 523 bp, Unknown
  Bacterial polypeptide expressing nucleotide sequence isolated from the Sargasso Sea
atgagtaattcatacttatcctatgcgatgagtgtaattgttagccgagccttaccagatgttagagatgggttaaaaccagtccatagaagaataatatacgctatgtataagggcggttatgattgggataaaaattttagaaaatctgctagaatagttggagatgtaataggtaaatatcacccacacggagatcaagctgtttatgatgctttagtaagattggttcaagacttttcaatgagcttaccacttttaaaaggacaaggtaatttcggctcaatcgatggtgatccacccgctgctatgagatacactgaaaccaaacttgggaaaatatctcaatttttaactgaagatcttgaaaaaaatacagtctcttatagaaacaattatgatgaaactgaaaaagaaccaacagtactaccatcgcaatttcctaatttattagttaatggagcagggggtatagcagtaggaatggctaccagcataccaccacataattgggcgaagtaat

SEQ ID NO: 295292 - DNA, 718 bp, Unknown
  Bacterial polypeptide expressing nucleotide sequence isolated from the Sargasso Sea
aatgtcaaaaaactctgctttaaattccaatgcgtcttatggtgcggactccataaaagttcttaaaggcttagacgccgtaagaaaaagacctggcatgtatattggtgacaccgatgatggttctggtttacatcatatggtctttgaagttatagataatgctattgatgaggcattagccggtcattgtaaaaatattactgttataatcaataatgataatactattacagtagaagatgacggtagaggtataccagtagatatgcataaaagcgaaaagatctctgctgctgaagttataatgacccagctacatgcaggaggaaaatttgatcacaactcatataaagtatcaggtggtctccatggtgttggtgtatcagttgttaacgcactatcagaaaaattagaactcaatatttacagagatgggaaagaatattcagtaatttttaaaaatggcaatacaataaagcctttaaaacaaattggtaaaacgaaaaaaaggggtactagaataaattttttaccttcaaaagaggttttttcttcagttaaatttagctctacaattttagaaaaaagaattagagaattagcttttttgaataagggaatatgcgtaaagctacttgaccaaacatctaaaaaagaaaaggaatttgtactaaaatatgatgggtggaattgtagaatttgtaaaacatattaa

SEQ ID NO: 295293 - DNA, 694 bp, Unknown
  Bacterial polypeptide expressing nucleotide sequence isolated from the Sargasso Sea
aatgtatattggtgacactgatgacggcacaggcttacaccacatggtatacgaggttgtagataactcgattgatgaagctttggcgggttattgtaaaaatatatttgtaaaaataaatcccaatggcaccgtaacagtaaaagatgatggtagaggaatacctgttgatattcataggggtgaaaaaaaatcagctgcagaagtaatcatgacccaactacatgcaggagggaaatttgatcatgattcttataaagtttcaggtggtttacatggtgtaggggtttcagttgtaaatgcattatcagaaaaattagaacttgaagttaatagagatggtaaaaaatattatatcgaatttaataatggagaagcaaaaaaaccattaaaagagattggtaagtccaaacatactggaacacaaataacgtttttaccatcaagtaaaattttttcatcaattaaatttaatgggaatattctcattaaaaggatgagagaattagcttttttaaatagaggtataaaaattacttttattgatggatcaaataagaaagaaaaaattcaagattttaaatttgatggtggtgttttagaatttgttgagtttttagatagtaaaagagaaaaattacaaaataaaaatggtaatgatctttttaaaaagccaatttatatagaaggaaaa

SEQ ID NO: 295294 - DNA, 613 bp, Unknown
  Bacterial polypeptide expressing nucleotide sequence isolated from the Sargasso Sea
aatgaaaaaagatacatatcaggcagattccatcaaagttttaaagggtcttgaagctgttcgaaaaagaccaggaatgtacatcggagatacagacgatgggactggactacaccatatggtttatgaagtagtcgataattctattgatgaagctttagcgggttattgtaagaatattcatgtttacattaattctaatgggaccataactgtcaaagatgatggaagaggtatacctgttgatattcataaaagtgaaaaaaaatcagctgcagaggtaataatgacccaattacacgccgggggtaagtttgatcatgactcatataaagtatctggtggtttacacggtgttggtgtttctgtagttaatgctctttcaaaaaatttaaagttagaaattgatagagatggaaaaaaacattatattgaattcatcgatggaaaagcaaaatcaccattaaaaatcgttggaaagtcaagggcaactggaactcagataactttttcaccatcacaggaagttttttcttcaattaagtttaatgtaaatgttcttacaaaaagaatgagggaattggcttttttaaataaaggaataaaaattata

SEQ ID NO: 295295 - DNA, 791 bp, Unknown
  Bacterial polypeptide expressing nucleotide sequence isolated from the Sargasso Sea
aatgttgggcgatattgaaaaagatactgttagttattcaccaaattatgatggtagtgagcatatcccagatgttttaccaactaaaattcctaatttattggttaatggttcatctggaattgctgtcgggatggcaactaatatcccaccccataatctaagtgaagtattaaatggatgtattaatttaattaataatcctaagatatcaatagatgaattaattaaagatatttctggacctgattttccaactggcggaactattgatggaaaagctggaatctatgaagcttataaaactggtagagggattattcatatcagatcaaacacctctattgaggaagataaatcaggaaaacaatcattaataattaatgaaataccctttatggtaaataaagctaggatgcttgagaaaatagctgaattagtaaaagaaaaaaagattgagggcatcactgaaataagagatgaatcagataaagatggattaagagttgtaattgaagttagaaaaggagattcggttgacgtattagaaaataatctttttgcacagacgcaacttgaacaatcttttggtataaatttcactgttttgtctgagggtcagcccaaggaagtcaatctaaaagaaatgcttcaggcttttgtgaagcatagaaaagatattattacaaaaagaacaaaatatgacttaaagaaagccaaagataggggtcatgttgtagaaggtttgatggttgcaattgcaaatattgatgagattataactataatta

SEQ ID NO: 295296 - DNA, 955 bp, Unknown
  Bacterial polypeptide expressing nucleotide sequence isolated from the Sargasso Sea
gctgccgaagttataatgacccaacttcatgctggtggtaaatttgatcataattcttataaagtttctggaggactacacggagtaggggtttcagttgttaatgctctttctgagagattaaaacttacaattaatagagataataaaaaatattatatagaatttaaaaatggagacgctaaaatttctttaaaacaagttggaaaatcaaaaaccagtggaaccgaaattaattttgttccatccaaagatatattttcatccattaaatttagtttttctattttagaaaaaaggatgagagagttagcttttttaaataagggcataaaaatagttttaagtgatttaagacaaaaaaaaccaaaaacattagagtttaaatttgaaggaggtatcagtgaatttgtacaattcattgatgaaaaaaaagaaagtttaaaaaacaaaaatgaaaatgatctttttaaaagacccatatatattgaaggtttaaaaaataatattgatgttcaatgctcccttaagtggaatgcagggtatagtgaagatgtattaccttatactaataacatttatcaaaaagatggaggaacacatcttcttggatttcgaagtgcattaacaagagtaataaataaatatgcaaatgaacaaaacttattaaaaaaaaataaagtttctttatcaggcgatgatgttaaagagggattaacttcagtcctttctattaaaattcctgacccaaaattttcatctcaaacaaaagataaattagtctcatcagaagttagaaatattgttgaaactatcattaatgagaagttgtctatttggtttgatcaaaatccatcaatttcaaaaattgtcttaactaaaattatccaggctgctgtagcaagagatgttgctagaaaggcaagagaaaatgtaagaagaaaggagctttaga

SEQ ID NO: 295297 - DNA, 834 bp, Unknown
  Bacterial polypeptide expressing nucleotide sequence isolated from the Sargasso Sea
agtttatgacgcattagtaagaatggttcaagatttttcaatgagtttacctttaattgaaggacaaggaaattttggatcactagatggtgatccaccagcagctatgaggtatacagagacaagactttcaaaagtttctcaatatttggtagatgatattaataaagacacggtagaatttaagagtaactatgatgaaacagaaaaggaaccagaaatactacccgctcagtatccaaatttacttgtaaatggtgcaggaggaatagctgttggaatggcaacaagtataccaccacataatttaggagaaattattgatggaaccttagctttaattgaaaatagagagataaagattccagaattaatgaaattaattcctggtcctgattttccaacaggaggattaataattggcaaagatataattaaacaaggatataagacaggaagaggatcatttaaaataagaggggaaatttctacagagcaacttaaaaatggcaaagaaagattgattataagttctgttccttatcaagttaacaaatctctcttaaatgaaaaaatagccgaacttgtgagggaaaaaaaaattgaaggaattagtgacattagagatgaatcaaatagagaaggaataagagtagtaattgatttaagaagagctgttgagcctgaaacaattaaaagacaattatacaagtacacatcaatagaaagttcttttggctttaacactttagctattgtcgataaaaaaccaaaaacatgtaaccttaaagattttctggatagttttttagattttaggcaagaagtagttat

SEQ ID NO: 295298 - DNA, 611 bp, Unknown
  Bacterial polypeptide expressing nucleotide sequence isolated from the Sargasso Sea
aatgcagaagtcagaagtaaaaaataattctaattataaaccaatttttgtgcatcaagagatgagttcttcatatctatcttatgcgatgagtgtaatagtaagtagagctttaccagatgtaagagatgggcttaaaccagttcatagaagaataatttatgctatgtacaaaggtggatatgattggggaaagccgtttagaaaatctgcaagaattgtaggagatgtaattggtaaatatcatccccatggtgatcaagcagtttatgatgctttagttagattagtccaagatttttcaatgagtttacctttgattgaaggtcaaggaaacttcggttcaatcgatggtgatccaccagctgctatgagatatacagaaacaaaactttccaaggtggcacaatttttgactgaaggattagaaaaaaatactgtagattatagaaacaattatgacgaaaccgaaagagaaccgattgtattaccatctcagtatcctaaccttttagtaaatggtgctggtggaatagcagtaggtatggctacaagtatacctccgcataacctaggcgaaataattgatggaactattggtttcattaaaa

SEQ ID NO: 295299 - DNA, 709 bp, Unknown
  Bacterial polypeptide expressing nucleotide sequence isolated from the Sargasso Sea
tatgttgaaatctaaaaacaattatcaagcagattctataaaagttttaaagggtcttgaagcagttagaaagagaccaggtatgtatattggggacactgacgatggaactggtttacatcatatggtttatgaagttgtggacaactcaatagatgaggcgctagctggttattgtaagaatattgctgttaaaataaacgcaaatggcaccattactgtgaatgatgatggaagaggtattccagttgatatccacaaaggagagaaaaagtcagcagcagaagttattatgacccaacttcatgccggtggtaagtttgatcatgactcgtataaagtttctggtggattgcatggtgtgggtgtttcagttgttaatgcattatccgaaaaattacagctagaaatttttagagatggaaaaaaacattacatagaatttcaaaatggcgaagctaaatctccattgaaggtggttggaaaagcaaaaaatactggaactcaaataacttttttaccttctaaagaaattttttcttcaataaaatttagtgcaaatattttaattaaaagaatgcgtgaattagcatttttaaataaaggaattaaaataatatttactgacgcaagtcaaaagaaagaaaaaacatcagagtttaagtatgatggtggtgttcttgaatttgtagattttttagacgaaaaa

SEQ ID NO: 295300 - DNA, 715 bp, Unknown
  Bacterial polypeptide expressing nucleotide sequence isolated from the Sargasso Sea
ggtaagcttgcagattgccaagaaaaagacccagctttatcagatttatttttagtagagggagattcagctggcggatcagcaaaacagggcagggacaggagcttccaggccatattgccgcttaaaggaaaaattataaatgtacaaaaagcacgcttagacaaagtcttatcttctaatgagattggaactcttataacagctttaggcacaggcatcggtattgatgagttttcactagaaaaacttagatatcatagagtcataataatgacagacgcagacgtagatgggtctcacattagaacactcttacttactttcttttacaaccagatgtttgatctattggaaaaaggacatatttatttggctttacctcctctttacaaaatcaaaaagggcggtaaaacacattacgcaaaagatgaggaagaaaaagacgcaattctcaaagagcttagaaaagaagcaacagaaggctctagacctcctgagatacagagatataaagggctaggagaaatgaatcctgaacagctgtgggaaacaacatttgatcctaaacatagaaggcttgtgcaaattactttagatgaggcaagagaactcgttgatgatatctttgaaacattaatgggtgatcaggtgcagccaagaagagagtttattgatgataatgctctcagagcagagaatatagacttttaaa

SEQ ID NO: 295301 - DNA, 892 bp, Unknown
  Bacterial polypeptide expressing nucleotide sequence isolated from the Sargasso Sea
aaaaaaaaatcagctgcagaagtaattatgacacaattgcatgctgggggaaaatttgatcatgattcatacaaggtttctgggggattgcatggcgttggagtttcagttgtaaatgcactttctttatctttgaaattaaaaattgaaagagatgggaacaaatatcttattgagtttaaaaatggagatgcaaaatcacctctaaagaaaataggaaaatcaaaaaatagcggaacagaaattaattttattccctccaaagaaatattctcatcaactaaatttagtttttcgatattagaaaaaaggcttcgcgagcttgcttttttaaataagggaataaaaattgttcttaatgatttttcgcaaaaaaaaacaagatcttcagaattcaaatatgatggaggtatattagaatttgtagaatttttagataataaaagggaaaaattaaaaaataagaatgataatgaattgtttaaaaaacctatatatatggaaggctccaagaataacatagatattcaatgttcaattaaatggaatgctggatatagtgaagatgtttatccatttacaaataatatttatcaaaaagatggaggtacacacttattaggatttagaagtgccttaactagagtaattaataagtatgcaaatgaccaaaatttattaaagaaaaataaagtaagcttgtcaggagacgatgtaaaagagggtttaacttgtgttttatcaattaaaattccagatccaaaattctcgtcgcagacaaaagataaattagtatcctcagaggtaagaaatattgttgaaaacttcataaatgaaaaattatctatatggtttgatcaaaatccttcgattgcaaaagttgtattagcaa

SEQ ID NO: 295302 - DNA, 283 bp, Unknown
  Bacterial polypeptide expressing nucleotide sequence isolated from the Sargasso Sea
atgaattcatctaattactcttcagaatctatcaaagttttaaaaggcttagaggcagtaaaaaaaagaccaggtatgtatattggtgatacagacgatggatctggacttcatcatatgatttatgaagttgttgataattcaattgatgaagctttagcaggattttgcacagaaatttcagtttttttaaaccctgatggcacaataactgtagaagataatggcagaggtataccagtagatattcataagacagagggagttcctgccgctcaattaa

SEQ ID NO: 295303 - DNA, 684 bp, Unknown
  Bacterial polypeptide expressing nucleotide sequence isolated from the Sargasso Sea
gagggagggggcctgccaggtaagttagcagattgtcaaagtaaagatccttctgaatccgagctttttattgttgagggagattcagcaggaggaactgctaagcaaggtagagatagagctacgcaggcaatccttccattgcgtggtaaaattttgaatgttgaaaaatcccgtattgataaaatattagcaaataatgaagttatggctttgattactgcaatggggtgcagtataactggagttgaagaagaagatgaatttgagcttgataaagccagatatcacaaattaataataatgactgatgcagatgtagatggcgcccatattcgcacactattattgactttcttgtatagacatatgaagggtttaattgatgcaggatatgtgtatgtggcccagccacctttatacaaagtcagtaaaggcaaaaagatgtcatatgcctatgatgatgtacaattagaaagattattgtcagaatatggttcaggctcttcagtacaaaggtataagggacttggagaaatgaatgcgattcaattatgggatacaacaatggatcctaccaaaagaacactactgcaagtcgaaattgaagatgcagaattagctgataaggcctttgttgaacttatgggagatgatgttcagccaagaagagaatacattgaa

SEQ ID NO: 295304 - DNA, 843 bp, Unknown
  Bacterial polypeptide expressing nucleotide sequence isolated from the Sargasso Sea
tatcacagatttcgatttcgaagaagtggatacccgagtaggagagaccgctttcctgaatgcgggattaaagattacgattaccgatgagagagatgagaacagacatacatcagagcacctgtatgaaggagggctttccgaatatgtgagtcagttgaatgaaagaagagaagtcttacattcagaagtgataaagatcagaggggataaggaaatcgagaaaggtaatgtggaggtagagctggctttacagtggtcggatgctttcagtgagtcgattcgttgctatactaacatcataaggaacaaggatggagggacacatatgtcaggccttcgtactgcccttactagttctgttaactcatatgccaagaagaagaaattactcaaaggggacgctttgtccggagatgatgtcagagagggcttggcggccgtagtcagcgtaaagcacccggatccgtcattctcatcgcagacaaaagataagcttgtgagtagtgaggtcactggcatagtacagaccattgtttatgacaaattgggcgagttcttcgaagaaaatccgtcggttgctaagcaaattgtcgaaaaggctcttctcgcatctaaagccagggaggcggcaagaaaagctagagatttgactcgcaggaagggcgtcttagaaggaggtgggctacccgggaagcttgcggactgtcaatcaagagaccctagtgagtgcgaggtatatctcgtcgagggagattccgcgggaggatcagcaaaaaccggtagagatcggagaatacaagcgatactccctctaagggggaagatactcaatgtagagcg

SEQ ID NO: 295305 - DNA, 631 bp, Unknown
  Bacterial polypeptide expressing nucleotide sequence isolated from the Sargasso Sea
ctgacaggcgaaatctacggagccgattcgatcaaggttctgcgaggtctcgatgcggtgcgcaagcggccgggtatgtatatcggcgacaccgacgacgggaccggcctacaccatatggtcttcgaagtcgtagacaacgccatcgacgaggcgatgggcggtcactgcgaccagatcgacgtctctctcaatggcgacggttcggtgacggtggccgacaacggccgcgggattccggtagacatccatgcggaagaaggggtctccgccgccgaagttattatgacccagcttcatgctggcggcaagttcgaccaaagtacctacaaggtttctggcggactgcacggtgtgggtgtctcggttgtgaatgcgctgtcatcagagctaaatcttacggtcaagcgcgacggacaaattcacttcatgcgctttcatcacggcgagtcggcggcgccactcgaagtggtaggcgacagcgcaggcgataccggaactgaagtgaccttcacgccatcggccgagacctttacccgcatcgagttcgactacgcaatcctagaacaccgactgcgcgaactcgcttttctgaatccgggaattcgtatgtctaacggacggccgcaag

SEQ ID NO: 295306 - DNA, 472 bp, Unknown
  Bacterial polypeptide expressing nucleotide sequence isolated from the Sargasso Sea
gagttcgacgtaagttctttgagatatcacagagttgtaattatgacagatgctgatgttgacggagctcatataagaactttattgttgacatttttttacagatatcaaagagaactcgttgaaaaagggtttatatatattgcatgtcccccactttataaagtagaaagaggaaagaatcataaatactgttataacgagaatgaattaaaggatactattgatggttttggagaaagtgcaaattataatattcaaagatttaagggattaggtgagatgatgccaaaacaactgtgggatacaactatgaatcctcaaactaggatgatgaaaagagttgaaattgaagatgcacttgaagctgacagaatatttaatatattaatgggagataaagttgcaccaagacgagaatttattgaaactcatagtagcaacttagatatggcaactttagatatatgat

SEQ ID NO: 295307 - DNA, 789 bp, Unknown
  Bacterial polypeptide expressing nucleotide sequence isolated from the Sargasso Sea
aatagtaggagatgttataggtaaatatcatcctcatggtgatcaagctgtttatgatgcactagtgagaatggttcaagatttttcgatgagtttacctttaatagatgggcaaggtaattttggatctattgatggtgatcctcctgctgcgatgcgatatacggaaactagattatctaaaatttcacagtttttaactgatgacattgaaaaaaatactgtcgaatttaaaagtaattatgatgaaacagaaaaagaaccatctgttcttccagctcaatatccaaatctattagtaaatggtgcaggaggaatagcagttgggatggctactagtattccacctcacaatttaggagaagttatcgatggaactcttgccctaattaataataaagaaataaaaattaaggatttaatgaaatttatacctggtccagattttcctacaggtggcattattataggaaagaatattataaaagaaggctataaaacaggcagaggttcttttaaaattagaggtgaaattactgttgaaaatctaaaaaataatagagatagattggttattacatctattccttatcaagtaaataaatcagcacttaatgaaaaaattgctgatttagtcagagaaaagaaaattgaaggtataagagatattagagatgaatctaacagagaaggtataagagttgcaattgacttaagatctagtgttgaaccagaaacagttaaaagacaactttttaaatatacatcaattgaaagctcttttggatt

SEQ ID NO: 295308 - DNA, 811 bp, Unknown
  Bacterial polypeptide expressing nucleotide sequence isolated from the Sargasso Sea
acacccttcgccgagtttgccgaactaaatggtcaaaaatttgagtgggcgatcacctggcttggtggtggtgaggatgggtttttcaattcctactgcaataccgtgccgacacctcttggtggcacccatgagaccggatttcgccaggcgatcgtgcgtggccttcgggcctttggtgatctgtccggcaatcgtaaggcggccgacatcaccgccgacgacgtttttgccaacagcgctatcatgctgtcggttttcctgcgtgatccccaatttcagggacagaccaaggataagctggtttctggtgatgccacacgcctgaccgaacaggcggtgcgtgaccgtttcgatcactggctttctgctgacgccacccgcgcaacatttttgctggaggcagcaattgaacgcgccgaggaacgcaaacgtcgcaagaaggaaaaggaagttgcgcgcaaatcagcaacccgcaagctgcgccttcccggcaaacttgccgactgcacggccaacgataccgacctgacagagttgttccttgtcgagggcgactcagctggcgggtcagcaaagcaggcgcgaaaccgcaagacgcaggccgtgctgccgctacgtggtaaaattctgaatgtagcaagcgcgaccccggaaaaactgaacgccaatcaggagctgtccgatctggcgctggcattgggtgtgcgccctggcaaggatttcaaacttgatgacctgcgctatggccgcgtcatcattatgaccgatgccgatgttgatggtgcccatatcgcagcgctgctgatga

SEQ ID NO: 295309 - DNA, 820 bp, Unknown
  Bacterial polypeptide expressing nucleotide sequence isolated from the Sargasso Sea
gtaattaatactaatggtagatatgattttgagccaaaattcgatttcgattatttatgtaatagaattagggagctagcttttttaaatggtggattaaaattatctattaatgatgaaagagatagtaagtctgaaacttttttttataaaggcgggattaattcttttgttgaacatcttaataatggaaaaaaagttgtaaattctaagccaatttttattaagggctctaaggaagggactatagtagaaattgctattcagtataacgatggctattctgaaaatatttattcttatgttaacaatatcaatactattgaaggaggcacccatttaagtggatttagaagtgctctaactaggtcaataaataagtatgccaaagatcaaaatttatttaaaaaccaaaatatccaaattacaggagatgatacaagagaaggattggcggcagtcgtcagcattaaggttccagagccaaaatttgagggtcaaacaaaaaccaaattaggtaactctgaaacatctggaattgtagagtctttaatgaatgattttttgggagatttttttgaaaagaatccttcccaagctaaaaaaatagttggaaaatcaatagatgcagctaaggctagagaggcagcaaaaaaagccagagatttaactagaaggaaaagtgccctagacttaggttcattaccaggaaagttagctgattgccaagaaaaagatccagaaaaatctgaactttttattgttgaaggtgagtctgctggaggctcagctaagcaaggaagagacaggaaaacacaag

SEQ ID NO: 295310 - DNA, 439 bp, Unknown
  Bacterial polypeptide expressing nucleotide sequence isolated from the Sargasso Sea
ttgagtaaaaaggcatatacttcggatagcataaaggtactgaaaggtcttgaagcagttcagaaaagaccagggatgtacatcggtgatacggatgatggcagcggtcttcatcagatgatctatgaagtagtagataatgcggttgatgaggcattagctggatattgcaagaacatcgtggtgacccttaatgaggatgcgtctgttactgtaaaagatgatggtcgaggaatccctgttgatatacacaaaactgagaataaatctgcagcagaagtaataatgacaacacttcatgctggaggaaagtttgatgatgactcctacaaggtatctggtggtttgcatggtgttggcgtatctgttgttaatgcactgtcagagagattatctctaacaatacacaaagatggttacaaatatcagcaagactaca

SEQ ID NO: 295311 - DNA, 1027 bp, Unknown
  Bacterial polypeptide expressing nucleotide sequence isolated from the Sargasso Sea
ccagcgcaccggcaaggaagaagacttcgccttctcgggcggcgtgaagggcttcgttgagtacatcaacaagaacaagaccgtgctgcaccccaccatcttctttgccgccggcgagaaagacggcgtggccgtagaagtgtcgatgcagtggaacgacgcctacaacgagcaggtgctctgcttcaccaacaacatcccgcagcgcgacggcggcacccacctcacgggcctgcgcgccgccatgacgcgcgtcatcaacaagtacatcgccgacaacgagatcgccaagaaggccaaggtcgatacctcgggcgacgacatgcgcgaaggcctgacctgcgtgctgtccgtcaaggtgccggagcccaagttcagttcgcagaccaaggacaagctcgtctcgtcggaagtgcgcctgccggtggaagaagtcgtcgccaaggcgctgagcgacttcctgctggaaacgcccgtcgacgccaagatcatctgcggcaagatcgttgaagccgcccgcgcgcgtgaggctgcccgcaaggcccgcgaaatgacgcgccgcaagggcgtgctcgacggcatgggcctgcccggcaaactggccgactgccaggagaaagaccccgcgctgtcagaactcttcatcgtcgagggtgactccgcaggtggctcggccaagcagggccgcgaccgcaagttccaggcaatcctgccgctcaagggcaagatcctgaacgtcgagcgcgcgcgctttgacaagatgctctccagccaggaagtgctcacgctcatcaccgccatgggcaccggcattggcaaagacgactacaacctcgacaagctgcgctaccaccgcatcatcatcatgaccgatgctgacgtagacggctcgcacatccgcacgctgctgctcacgttcttctaccgccagatgcccgagatcatcgagcgcggccacgtctacatcgcccagccgccgctcttacagatcaagcacggcaaaggaggagcgctacatcaaagacga

SEQ ID NO: 295312 - DNA, 820 bp, Unknown
  Bacterial polypeptide expressing nucleotide sequence isolated from the Sargasso Sea
catatggtctatgaagtgttagataattctattgatgaggcattagcaggtcattgtaaaaaaattgaagtgagtataaattctaatgggtcaatcacagttgaagacgacggtcgaggtataccagttgactttcacaaagaagaaaaaaaatcagcagcagaagtcataatgacacaactgcatgctggtgggaaattcgatcacgattcctataaagtttcaggaggtttacatggtgttggggtttctgtagtcaatgctctttcacaaaaattagaattatatgttgaaagagacggaaaaaaacattttgtcgagtttatgaatggagaaactaaaactccactaaaggtaacaggtaagtcaaagaatactggtacaaaaatcaattttttaccttcaaaagatattttttcatctacaaaatttagttttttaattattcaaaaaagaatgcgtgaattagcttttttgaataaaggaattaaaatcatacttaatgatctaacacaaaaaaaaacaaagactcaagaatttaaatttgagggtggcataaacgagtttgttgaatttttagatgaaaaaagaccaaaattaaaaaataagaatgataatgatttgtttagaaagccagtatatatcgaaggaattaaaagtaatatcgatgttcaatgctcattaaaatggaatgcaggatataatgaggatgtttacccatatactaataatatttatcaaaaagatggaggaactcatcttttaggatttagaagtgcattaacaagagttgtaaataaatatgcatctgagcaaaatt

SEQ ID NO: 295313 - DNA, 788 bp, Unknown
  Bacterial polypeptide expressing nucleotide sequence isolated from the Sargasso Sea
tatagttatgtatgatgagattagttcatcatatttatcttacgctatgagtgtaataattagcagagcactaccagatgttcgtgatggtttaaaaccagtacatagaagaattttatacgccatgcataaaggtggttatgattggaataaacattatagaaaatcatccagaatagttggtgacgttatgggtaaatttcatccacatggtgaccaagcaatttatgatgctctagtaagaatggttcaagatttttcaatgagtcttcctttaattgatggtcaaggtaactttggttctattgatggagatagagctgctgctatgaggtacacagaaacaagactttctaaggtggcccagtttttaatcgatgatatagaaaaaaatacagtaaactttaaaagtaattatgatgaaactgaaaaagaacctgaagttctaccagcacaatttccaaatcttttagttaatggagctggcggcatagccgtaggtatggctaccagtataccaccacataatttaggtgaagtaataaatgggactctagcattaattaataatagtgaaattaaactcaatgaactaatgaaacatattccaggaccagattttccgacaggtggagttatagttggaaaaaatataattaaagaaggatataaagtaggcagaggttcatttaaaataagaggagaattaaaagttgaaaatcttaaaaatggaaaggatagaatagtaatcacatcaattccatatcaagtcaataaatcaaattgaa

SEQ ID NO: 295314 - DNA, 685 bp, Unknown
  Bacterial polypeptide expressing nucleotide sequence isolated from the Sargasso Sea
aatggccaaaaaatcacaagaagccaaatatgactcaagcaacatccaagttttaaaaggtttagaagcggtaaaaaaaagaccgggaatgtacattggtgacactgatgacgggtccggattacatcacatggtttttgaagttttggataactgtatcgatgaggcaatggcaggatattgttctgacattaaagtaataattaataaaaacggatcagtaacaattgaagataatggtagagggattccagtagatgttcataaaaaagagggcgtatctgcagctcaattgataatgacaactttacactcaggcggtaaatttgacgataactcatataaagtttcaggtggattgcatggtgttggtgtttcagttgttaatgctctttcaaaaaaactaaccctagaggttcatagagacggtggagaatattttcaagagtactcagatggaaagcctaaagcaaaattaaaaaaagtaaaaaaatcagacaagactggaacaaaaataaccttcttcccttctgagaaaatattcacatcgattgattttgaggttgatagaatttacaaaagaattcaagaactgtcatttttgaatgcgggagtttcaattaatgttgaaaatgaaaaatcaggcaagtcaaaaaaattcaaaaataatggagggctatctagt

SEQ ID NO: 295315 - DNA, 385 bp, Unknown
  Bacterial polypeptide expressing nucleotide sequence isolated from the Sargasso Sea
atgtcaaataaatcagaattaaaaaataaattatcttacggcgctgatgcgattaaagttttaaagggtttagatgcagtaagaaaaagaccaggaatgtatattggagacacggatgatggctctggtttacaccatatggtcttcgaagttttagataattctatcgatgaagctttagcaggctattgtaaaaatatatgcgtgattattaataatgataacacaattaccgtagaagatgatggaagaggcatcccagttgacatgcataaaagtgaaaaaatgtcagcagcagaagttattatgacacaattacatgctggaggtaaatttgatcatgattcttataaagtgtctggtggtctacatggggtaggcgttt

SEQ ID NO: 295316 - DNA, 589 bp, Unknown
  Bacterial polypeptide expressing nucleotide sequence isolated from the Sargasso Sea
aatgaaaaattatctatttaggtttgatcaaaatccttctgttgcaaaaattattttagctaaagttatccaggctgcaatggctagagatgttgctagaaaagcaagagaaaatgtaagaagaaaaggagcccttgaattaagcggtcttcctggaaaattagctgattgtcaaataggcaaacaagagggaactgaattgtttatcgtagagggggattcagctggtggatctgctaaacaaggaagaaatagagcaaatcaagctgttttaccactcagaggtaaaatacttaatacttatgttgaagattttaatatgaaaaaaaatggtaacggcaatggaaatggatctgatcaaagaacaaaagctttgtccaaaatgatttcttcaaatgaaattgttactttgattaatgctttaggtttggacccaaaagcacaagagattgatttaaaagatttaagatatggaaaaattattattatgacggatgctgatgtagatggttctcatataagagctcttcttttaactttttttaataacaaaccatttaataaattaattgaaaatggccatgtttat

SEQ ID NO: 295317 - DNA, 841 bp, Unknown
  Bacterial polypeptide expressing nucleotide sequence isolated from the Sargasso Sea
ccatttgttgggatttagaagtgcattaacgagagtagttaacaaatatgctaatgaaaataatttactaaagaaaaataaattagcaatttcaggtgatgatataaaggagggactgacttgtgtgctatcaactaaaattcctgatccaaaattttcttctcagacaaaagataagctagtttcatcagaagtaagaatgattgtggaaacattagtaaatgaaaaattgtcaatttggtttgatcaaaatccatctattgcaaaagttattttggctaaagttattcaagctgcaatggccagagatgttgcaagaaaagcaagagaaaatgtaagaagaaaaggagctcttgagttaagtggtcttcctggaaaattagctgactgtcaaattggcaaacaagaaggaaccgaattatttattgtagagggagattctgctggtggatcagcaaaacaaggaagaaatagggcaaatcaagcagttttaccactaagaggtaaaatacttaatacttatgtagaagattttaatgcgaaaaaaaatggtaacggcaatggaaatggatctgatcaaagaacaaaggctttgtctaaaatgatttcttcaaatgagatagttaccttgattaatgctttaggattagacccaaaagcgcaagaaattgatttaaaggatttaagatatggaaaaataataattatgacggatgctgatgttgatggttcccatataagggcccttcttttaactttttttaataataagccatttaataaattaattgaaaatggccatgtttatttagcgcaaccaccgttatttaaaattaataaa

SEQ ID NO: 295318 - DNA, 538 bp, Unknown
  Bacterial polypeptide expressing nucleotide sequence isolated from the Sargasso Sea
aatgagctcgtcttatttatcctatgcaatgagcgtaattataagtagagcgcttccagatgttagagatggtttaaaacctgtgcatagaagaatcttgtacgcaatgcataaaggtggttacgattggtcgaaacaatttagaaaatctgcaagaatagtaggggatgttatcggtaaatatcatccacatggcgatcaatcagtttatgatgcattggttagaatggttcaagatttctctatgagtttacctttggtggatggacaaggtaattttggatctgttgatggagatcctgctgctgctatgagatatactgaaactaaactttctaaagtgtcacagtttttaattgatgatatagacaaagaaacaatagaattcaaaagtaactatgatgaaactgaaatagaaccctcggtattacctgcgcaatttccaaacctcttggttaacggcgcaggaggtattgctgttggtatggctacaagtatacctcctcataatttgggcgaagttatagatgggactctg

SEQ ID NO: 295319 - DNA, 935 bp, Unknown
  Bacterial polypeptide expressing nucleotide sequence isolated from the Sargasso Sea
ggaactggtttacatcatatggtatatgaggttgtagacaattccattgacgaggcgttagcaggccactgtaaaaaaattgagataagtataaatactgatggatcaattactgttgaagatgatggtaggggaataccagttgattttcataaggaagaaaaaaaatctgctgcagaagtaataatgacccaactccatgctggaggaaagtttgatcatgattcttataaagtttcaggaggtttgcatggtgttggtgtttcagtagttaatgccctctcacaaaaattagagttatatgttgaaagagatggaaaaaaacattttgttgagtttaaaaatggtgaaactaaaacgcctttaaaagtaataggtaactcgaaaaatacaggtacaagaattaattttttaccatctaaagatattttctcatcaacaaagtttagctattctgtcattcaaaaaaggatgcgtgagttagcttttttaaataaaggagtaaaaattattctccacgatttaacacaaaaaaaaattaagacttcaaatttcaagtttgatggtggaataaatgaatttgttgaatttctagatgaaaaaagagaaagcttaaaaaataaaaatgataatcacttatttaaaaaacctatatatattgagggtataaagaataatatagatattcaatgttcacttaaatggaatgcaggatataatgaagatgtatatccttatacaaataatatttaccaaaaagatggaggcactcatctattaggttttagaagtgccttgacaagagttgtaaacaaatatgcttcagagcaaaatttattaaaaaaaagtaaagttcttttatctggagacgatgtaaaagagggcttaacttgtgtattatcagtaaaaattccagatcctaaattttcttccca

SEQ ID NO: 295320 - DNA, 811 bp, Unknown
  Bacterial polypeptide expressing nucleotide sequence isolated from the Sargasso Sea
atgccgactaagaaaaaatctgctgcatcgaaaactaccaaagcccctacaaaagctcaaaaaaaagctcccaaaaaaaccgattctgactcttacgattcgtcaagcataacagtgctcaaaggcctggaggcggtcaaaaaaagacctggtatgtatattggagacacagacgatggaacaggtctacatcatatggtctatgaaattgtagacaattcaattgacgaagcgctggccggacattgcgacgaaatcacagtaaaaattattgcggatgattgtgtgtccgtttcggacaatggaagaggcataccaaccgacatgcatgaagaaggcatgtctgctgctgaagtaatcatgacaaaattacatgcaggcggtaaatttgacgataattcttacaaagtgtctggtggtctgcatggcgttggagtttctgttgttaatgccctatcagaggacctcaggctaaccattcacaggggcggaaaaatccatgaacaagaatatgctgatggagcacctaagggaaagttaaaagctacaggcaaaacagataaaacaggaacagaagtaacattcgtaccatctccaaccaccttctcagacattaatttccaatatgatgtcttggagacaaaactaagagagttgtcttacttgaatgcaggattgaaaattattctcatagatgaaagaagttcaaagaaagtggaatttttccacaaaggcggtttagctgaatttgtaactttcttaaacacaaaaagaactactgtaaattcagtgtttcatttcgtaaaagaag

SEQ ID NO: 295321 - DNA, 922 bp, Unknown
  Bacterial polypeptide expressing nucleotide sequence isolated from the Sargasso Sea
tattagcagtatttctttagtttccgaaatggaaaaatcgtaccttgattatgcaatgtctgtaataatttctagagcacttccagacattagagacggattaaaacctgttcatagaagaattttatactctatgaacgaatctggatacacttactcaagaccatataaaaaatctgcaagaatagtaggagatgttatgggaaaataccatcctcatggagatgcagcaatctatgactcaatggtacgaatgtcacaaaatttttccatgagtgaacaacttattgatggtcaaggcaattttggatcaatggatggggatccaccagctgcaatgaggtatactgaggctagattatctaaaattactgaaaaattagtcactgatttagacaaagaaactgttgcttatcaatcaaactatgacgatacaacttttgaaccaacagttttacctgcacaattcccaaatttattagttaatggagcatctgggatagctgttggtatggcaacaaatatacctcctcataatttgacagaggtaattaatgcaactttacatcaaattgaaaatcctgaatgttcaattgaagatttaaataattttattttaggccctgattttcctactggaggacaaattataggcctaaaaggtattaaagaatcttatcaaaatggaaaaggtggatgtattttaaggtctaaaacttcaatagaggagtttaaaaaagatagagaagcaataattattcatgaaattccatatcaagtaaacaaatcaagattaatagaaaagattgctgaaaatgttaaaaataatattattgaaggtatatcggatataagggacgagtcagacagaaatggcgtaagagttgttatagaattaaaaagggatactgatcataaaata

SEQ ID NO: 295322 - DNA, 604 bp, Unknown
  Bacterial polypeptide expressing nucleotide sequence isolated from the Sargasso Sea
tttggcagaacctgaagatccaaattccccagatgacgaaaataataatgaagatgcaaatcctttagaagaaggcattttacctgtaactatttcagatgaaatgagaaagtcttatttagactatgctatgagtgtaatagttagtagggctcttcctgatgtaagagatggtttaaaaccagtccataggcgtattctttatgctatgaaagaaggaaattatcattggaatagaccttatagaaaatcggcaagagttgttggagatgttatgggtaaatatcacccgcatggtgataatgctatttatgatgcaatggttagaatggctcaatcattttctatgagtcttaagttactagatggtcaaggtaatttcggttctatggatggagatccaccagcagctatgcgttatacagaagttagaatggatcaagcttcaactatgttaattgatgacatagataagaatactatagattttcaagacaattatgataattctacacaagagcctagtgttcttccagccaaatatccaaacctcttagttaatggagcaggcggtattgcagttggtatgggcacaatgttccac

SEQ ID NO: 295323 - DNA, 922 bp, Unknown
  Bacterial polypeptide expressing nucleotide sequence isolated from the Sargasso Sea
aaaagtactgggtacaaaaattaattttttaccttctaaaaaaattttttcatcgactaaatttagttttgttattttgcaaaaaagaatgagagaattagcatttttgaataaaggaattcaaatttctttaaatgacttaacccagaaaaaaccaaagaatattaattttaaatttgatggaggtatattagaatttgttgaatatttagatcaaaatagagaaaaattaaaaaataaaaatgataatgatttattcaaaaaaccaatttatatagaaggactaaaaaataatgtagatattcaatgttcattaaaatggaacgcaggatataatgaagatgtatatccttataccaataatatttatcagaaagatggaggtacacatttattaggttttagagctgcgcttacaagagtaattaataaatatgcttcagagcaaaatttactaaaaaaaagtaaagtttctctttctggtgatgatgtaaaagaaggtttaacatgtgtattatcagtaaaaatacctgacccaaaattttcatctcaaactaaggataaattagtttcctctgaagtaagaaatattgttgaaactataataagtgaaaagttatcaatatggtttgatcaaaatccttctgtatcaaaaataattttaacaaaaattattcaagcagctgttgcgagagatgttgctagaaaagccagagaaaatgtaagaagaaaaggtgcgctagaactgacaggactacctggtaaattagcagattgtcaaaattctaagcaagaaggtactgaattatttattgttgagggagactcagctggaggctcagcaaaacaagggagaaatagagaaaaccaagcagttttgccgcttagaggcaaaatactcaatacatttactgaaataaat

SEQ ID NO: 295324 - DNA, 629 bp, Unknown
  Bacterial polypeptide expressing nucleotide sequence isolated from the Sargasso Sea
aatgacaaataaaaacacatatcaggcagactccatcaaagttttaaagggtcttgaagcggttagaaaaagaccaggtatgtacattggagatacagatgatggaactggtttgcatcatatggtctatgaggttgttgataattctattgatgaggcattagcaggatattgtaaaaatattaatgtaaaaattaactatgatggaacaattacagtaaatgatgatggaagaggtattcctgttgatattcataaaggagaaaaaaaatcagcagcagaagtgattatgactcaacttcatgctggtgggaagtttgatcatgattcttataaagtttctggtggactacatggtgttggtgtttcagttgtcaacgcgctttcagaaaaattacaattagagatatttagagatggaaaaaaacactacatagaatttcaaaatggtgaagctaaagctcctttaaaggtagtaggaaaagcaaagcaaaccggtacacaaattacttttttaccttcaaaagaaattttctcctcaataaaatttagcgctaatattttgattaaaaggatgagagaattagcatttttaaataaaggaattaaaataatatttactgatgcaa

SEQ ID NO: 295325 - DNA, 890 bp, Unknown
  Bacterial polypeptide expressing nucleotide sequence isolated from the Sargasso Sea
tagaaaagccagagaaaatgtaagaagaaaaggagctcttgaattaagtggtcttcctggaaaattagctgattgtcagattggcaaacaagaaggaactgaattgtttattgtagagggagattcagctggaggttcggcaaaacaaggaagaaatagagcaaatcaagcagttttaccacttagagggaaaatacttaatacttatgtagaagattttaatattaaaaaaaatggtaacggtaatggaaacggtaatggaaacggtactgatcaaagaacaaaagctttgtctaaaatgatttcctcaaatgagatcgttaccttgattaatgctctgggtttggatccaaaagcacaagaaattgatttaaaagatctaagatatggaaaaattattattatgacggatgctgatgtagatggttctcatataagagcccttcttttaactttttttaataacaagccatttaataaactaattgaaaatggtcatgtttatttagcgcagccgcctttatttaaaattaacaaagggtctaaaggtatttatattaaggatgagaaggagttagaagattacatagtaaataatagtaaggagttaaaaaaaattaaaaaaggatctaaagattattcaaaaaaaatagatgaggaaaaatcaaaaatgaatattcaaagatttaaaggtctgggagaaatgaacccagaagaattatggagcactacattagatccagaaacaagaaatctacttcaagtacaatactcaaaagatttgaaaaaagatcaaagtttaatccatactttaatgggcaatgatgtggcattaagaaaagattttatagtttctaatgctataaatgttagaaatcttgatatttaaa

SEQ ID NO: 295326 - DNA, 799 bp, Unknown
  Bacterial polypeptide expressing nucleotide sequence isolated from the Sargasso Sea
tatgaacgatataaatagagaccacactttaaacagagatatagttgatgaaatgaatgaaagctatttgaattattctatgtcagttattgtttcaagggctttgccggacgtgcgagacggactaaaaccagtacacagaagaattttgtatggtatgagcgaactcggctcttcttggaaccgcccctataaaaaatgtgctagaattgttggtgaggttatgggtaaataccacccgcacggagactcatctatatatgatgcgcttgtaagaatggctcaggatttttctatgcgttatgagcttgtagatgggcaaggaaactttggctctattgatggagacaacgccgctgcgatgaggtacaccgaatcccgtatgacaaaactgtctgcggagctattaaaagaccttgaaaaagatacagttgattggagtccaaactttgacgagaccctaaaagaaccaaccgttttaccaacaacagttccaacgctactggtaaacggctctgaaggaatagctgttgggatggcaacaaaaatacccccacacaaccttagtgaaattgtagacggtttaattgcgcttattgacgacaaaacaattacaacagaaagtttgatggaacacattaaagggccagattttccaacagcaggaatgatcctcggggttgacggtttaagagcggcatatgagacagggcgtggaaaaattaaaatgcgcgcacgcgcacatattgaaaacagcaaaaacggtaaagatagtattgtttatacagaagttccttat

SEQ ID NO: 295327 - DNA, 869 bp, Unknown
  Bacterial polypeptide expressing nucleotide sequence isolated from the Sargasso Sea
actgaaacgagattagcacccatagcccataaaggatttcttgaagaaatcggatcagatacagtaaatttttcaaataactttgatggttcacaaaaagaaccagatgttcttccggcacagcttccatttttattgttgaacggatcatcgggtattgcagttgggatggcaacaaacattccccctcacaatctgggagaaataatagacggattaattgctttagtagaaaaccaagatatcagtgataaaaaactttctagtattattaaaggacctgattttcctacaggaggagaattgctttgtggtaaagcaatagaagaactttacgcaacaggaaaaggatcaataacaataagaggcgttataaaaaaagaggagttaaatttaggaaaaggtaagcataaaaaaaatgctttaatcattacagaacttccttatcaagtcagcaaagcaggttggattgaaaaacttgcagagcttgttaattcaagcaaaattaatgggatatctgatattagggatgaaagcgatagagatggaatgagaattgttatagaattaaaaaaagattctaatacggaacttgtaatttctaatttatataaaaagacaactctccaaactaactttggggcaatatttttagctttaatcaatggaaagcctgtccaactaaacttaaaagaatatctaaactattttcttagatttcgagaagaaacaattagaaaaagaacaaattattatctaaaaaataccttagaaagacttgaaatatcagaaggtttatctaaagcaacaaaagatataaaaaaagtgatcaaaattattgaagagtcaaaaaattcagcagaagctaa

SEQ ID NO: 295328 - DNA, 800 bp, Unknown
  Bacterial polypeptide expressing nucleotide sequence isolated from the Sargasso Sea
tttgcatcacatggtttttgaagttttagacaattgtattgatgaggcaatggcaggacattgtactgacataaatgttgtcataaataagaatggatctgttactgtgaaggataacggaagaggaatacctgttgatgttcataaaaaagaaggagtctctgcagcacaattaattttaacaacccttcattcgggtggaaaattcgatgacaattcttataaggtttcaggtggattacatggagtaggagtttcagttgtgaatgctctttctaaaaagttaatcttggaagttcatagagatggtggtgaatattttcaggaatataatgaaggtaaaccaaaagcaaaattaaagaaggtaaaaaaatcagataaaactggaacaacaataaccttctttccctcagagaaaatttttacatcaatagattttgaaattgaaagaatctataaaaggattcaagaactatcttttttgaatgcaggagtttcaataaatgttgaagacaagaaatcaggaaaatccaagaagtttaaaaacaatggcggtttatctagctacgtaactcacttaaaaggaagaaaacaaaccgtttctgatatttttgagtgttctgcttctgaaaacgaggtcggagttgaaatagcacttcaatggactgattcttatagtgaaaacgtgctttgttacacaaataatattcctcaaaaagatggtgggactcatctagcgggcttcagggggagcttaacgagagttttaaagtcttttattaaaaaagaaaatgctaaaa

SEQ ID NO: 295329 - DNA, 938 bp, Unknown
  Bacterial polypeptide expressing nucleotide sequence isolated from the Sargasso Sea
taagaaaaataaaataaatttatctggagaagatattaaagagggcttaactgcagtgctttcaataaaaatgcctgatccaaaattttcatcacagacaaaagataagttagtttcatccgaagtaagaaatattgtggaaaatattattggagaaaaagtttcaacttggtttgatcaaaatccatctgtgtcaaaagttgttctagaaaaaattactcaagcagcgatggccagagacgttgcaagaaaagcaagagacagtgttagacgtaaaggaacttttgaattatctggtttaccaggaaagttagcagattgtcagattcaaaaaagggaaggaactgaattatttattgtagagggagattctgcaggtggatcagccaaacaagggagggtaagagagtttcaagctgtacttccacttaggggaaaaattttaaacacttttgtcaacggaaagaaaaatggagaagaccaaacaacaaaagcactttcgaagatgatgtcttcaagtgaaatcgtaactttgattaatgctttaggtacaggatcaaaagattttaatttagaaaatttaagatatgataaaattgttataatgaccgatgcggatgtagatggttctcacataagaaccttactgctaactttttttaacaatcatccatttaatcaattaattgaaaatggtcacatttatttagcacaaccacctttatttaaagttacaaaagccaataaaagtgtttatataaaagatgagaaatcactagaagaatatattttacaatcgtctaaagttgataaaaaaattaaaaaaggaactgatgattttaaaaaatttattcaagatcaaaaagaaaaactctcaattcaacgattcaagggattaggtgagatgaatcccgaggagctatgggaaactacctgaa

SEQ ID NO: 295330 - DNA, 811 bp, Unknown
  Bacterial polypeptide expressing nucleotide sequence isolated from the Sargasso Sea
aatgagtattgttggaaaagtgtctgaagcagctttagcaagagaagctgcaagaaaagccagagaaatgactaggagaaagggtgtgcttgaaattgctggattacctggaaagcttgcagattgtcaagaaaaagatccaacattatctgaaatatatatagttgaaggtgattcggctggtggatcagcaaaacagggaagaaatagaaaaaaccaagcaattcttcctttaaaaggtaaaatcattaatgttgagaaagctagaattgacaaggtcttaggttctgctgaagttggcacacttattaaagctcttggttgcggtattggtagggaagattttgatattgataatttaagataccacagaataataataatgacagatgcagacgttgatggatctcatataaggacacttcttttaacattcttttacagacaaatgtatgaaattgttgaaaaaggtcacatttacattgctttgccacccttatataaaatcactaaaggtaaggagtttgtttatgcttctgatgaatctgaaaaagataatgctatcaaaaaactttcaaaaaacggcactagaggcctagaagttcaaagatataaaggtttgggcgagatgaatccagagcaactttggacaacaaccatggatcctactaatagaagaatgatgagggtggacatcaaggacgtacaagatgcgaatgaatcatttgaaatacttatgggtgatgatgtggagccaagaagagagtttatagacgctaatgctttatctgtaaaagagctagatatttaa

SEQ ID NO: 295331 - DNA, 1894 bp, Unknown
  Bacterial polypeptide expressing nucleotide sequence isolated from the Sargasso Sea
ttgtcaaaaaaggcttacgattcaaaagcaattgaggttttgtcgggtctcgatcccgtcaaaaaaagaccaggtatgtatacagatacctcctgcccaaatcatcttattcaagaagtgcttgataactctgtagatgaagctttatcaggttactgtaagcgcattaaagtaaatctttataaggataatagcgttgaagtttcagacaatggtagaggtatgcctgttgatgttcaccctgagcacaagcttacaggtgttgaattaattatgtgtaagttacatgctggggcaaagttctctggtgaagattatggtttttctggaggacttcatggagttggagtctctgtagtaaatgctttatctaccaaactcaatgtaaaaattaaacgtgactcacaagaatatgaaataaatttttctgccggagacaaagataatgatttaaaaccaattggcgatgttggagctacgaactcaggaacctcaattagattttatccagataaacaatacttcgaaacattaaacatcaacaaaaagagcttaaaacatctattaaaggctaaggcagttctctgcccaggacttcaaatagactactttgatgaaaaaaagaatgagagaattaaatggatttttgatgagggactaagcgactacctcgatgagttttcaggctgcaatgaaaaacttcttgatgaaactattattctttctaaaacttctgatgatcaagcgttagatgtagcagttaattggactgaagaggtatcaaataacttactgaaagaaacctttgtaaatttaattccaactgcactaggtggctctcatttaaatggttttaaatctggtcttctcgaagcaataaaagaattctgtgattacaggagtttaattccaaaaggtataaaaattaactccgatgatattcttgctaattgtatttttgtcatttcttcgaagttgaagaatcctcagttcgctggtcaaactaaagagaggcttgattctaaagatcatatgagctttgtttcttcctcaacgaaagattctctaagtatttggcttaatcaacatacagaagagggtgaaaaaattgcagatcttgctattgctgccgctcaaaagaggattaaaagctcaacaaaagttgatagaaagaaaacattcaaaggtccagctcttcctggaaagctttctgactgtaactgcaataacattgaagagagcgagttgtttttagttgagggagactcagcgggaggttcagcaaaacaagcccgagatagaagattccaggcaatcatgcctttgagaggaaaaattcttaatacctgggatttagaaagcgcagatataattaaatctcaagagattaaagatcttgctactgcaatcggatctttgcctggagatgaaaatgtttccaacctaagatatggaaagatttgtattcttgctgatgccgactcagatggactgcacatagcgactttattatgtgcattattcctaagacactataagaatttagtaacttctggaaaaatctttgtctcaatgcccccgctatataggattgatgctgcaaaagaagttttttatgccctcgatgagaatgaaaaagaatctattgtgaaaagaattaaaaaacaaaactccaaaattaagatagatatccaaagatttaaaggacttggagaaatgaatccttctcaattaagagagacggttatgaaaccagaatcaagaagactggtccaactaactttaactagttctgataatgcaaattctgtatttgatttgctgctttctaaaaagagagctccagatagaaaagaatggcttgaaaagaaaggtaacttagcggagatttaat

SEQ ID NO: 295332 - DNA, 973 bp, Unknown
  Bacterial polypeptide expressing nucleotide sequence isolated from the Sargasso Sea
tataataaatgataaaatttcaatgtggtttgatcaaatcccatcaactattaaaaatgttttagaaaaaatacaccaagccgcaatagcacgtgatgttgctagaaaagcaagagacaatatacgtaggaaaggaagttttgaaattactggtcttccaggaaaactcgcagattgtcaaatttcaaaaaaagagggaaccgagctttatattgtagaaggagactcagcgggaggttcagcaaaacagggtagaaacagagaatttcaggcagtactaccattaagaggaaaaatccttaatacttatgttaatactaacggaaggaatgcgggaaaaactgtagaaaatgagaacaaggctctttctaagatgatgtcatctagtgaaatagtaacattaataaatgctttgggcacaggctcaaaagagttcaatatagaaaatttaagatatgaaaaaatagtaattatgacagatgccgatgtagatggttcacatataagaactttgcttttaactttttttaacaattacccttttaataaattaattgaaaatggacatttatatttagctcaaccgcctttatttaagataactaaaaataataaaagttattatatgaaagacgaaaaagacttagaaaactttattatccaacattcaaatacaaaagaaaaaaaaggaaaattcaactctaaagaaatgcacaaaattattgagaatgaaaagcaaaaactttcaattcaaagatttaaaggacttggcgaaatgaatccagaagagctttggcaaactacattaaacccagataatagaaatttacttaaagttcaatattctaatggaactaaagagaaatcgaaagaagatcaaaagataataagtattttaatgggtgatgaagttgctccaagaagagaatttattacgagtaacgcattggatgtagctaatttagatatttaa

SEQ ID NO: 295333 - DNA, 1079 bp, Unknown
  Bacterial polypeptide expressing nucleotide sequence isolated from the Sargasso Sea
tggcttaaaaccagtgcagcgtcgtattatttacgcgatgagcgaattaggcttatcggccgcagctaaatacaaaaagtcagctcgtaccgtgggtgacgtactcggtaaatatcaccctcatggcgatagtgcttgttacgaagccatggtacttatggcgcaaccgttttcgtatcgctatccacttgtcgatggtcaaggaaactggggtgctgctgatgatccaaaatcatttgctgcaatgcgttatactgaagcgcgtttatctaagttttctgaagtactgcttaaagagcttggccaaggcacggtagattggacaccaaactttgatggtacactagacgaaccagttgtattgccctcacgcttaccacatattttacttaatggtattaccggtattgctgttggtatggcaactgatattccgcctcataacgtgagagaagtagccagtgcatgttgtttattactcgataaaccaaagacagagcttgatgaattattagagctagtacacgcacctgactacccaaccgatgccgaaataattaccccaaaagccgatattcataaaatatacaaaaccggccgaggctcaattaaaatgcgtgcggtgtatagtgaagagcaaggcgatattgtgatcaccgcgcttccgcatcaatgttcaggcggtaaggtacttgagcaaattgcagcgcaaatgaacgcaaaaaaactgcctatgattgctgatttacgtgacgagtcagatcacgaaaacccaacacgtatagtgattataccacgctctaatcgtattaaagcagagccattaatggctcacttgtttgcgaccaccgatttagaaaaaaactaccgcgtaaacttaaatatgctggggctagatggtcgtccgcaggttaaagatttgcgtagtattttaagtgagtggctcatatttaggcgcgagactgttcgtcgtcgtttgcagtatcgtttagataaagtactggcgcgattacatattttagaaggcttattagcagcattcttaaatattgatgaagtgattgaaattattcgcagga

SEQ ID NO: 295334 - DNA, 1586 bp, Unknown
  Bacterial polypeptide expressing nucleotide sequence isolated from the Sargasso Sea
tgatgggcagggtaattttggatctatagatggagatccgccagcagcaatgaggtatacagaaacaagattggctaaagtatctcagtacttaattgatgatatagaaaaaaatactgtatcttttaagagtaattatgatgaaacagaactagaacccaatgtccttccagcacaatatccgaatttattagtcaatggcgcaggtggtattgccgtaggaatggctacaagtatacctccgcataatcttggtgaagtaattgatggaactttagcattaataaaaaacaaagatattaaaattaaagaactaatgaaatttatacctggacctgattttccaactggaggaataataataggaaaagatattattaaacaaggttacaaaattggaagaggttcttttaaaataagaggagaaatcaatgtagaaaacttaaaaaatggtaaagatagattggtaatcacatcgatcccatatcaaattaataaatctaatcttaatgaaagaatagctgaattagttagagaaaaaaaaattgaaggtataagtgatattagagatgaatctaatagagaaggtatcagagttgctatagaccttagaagaaacgttgaaccagaaacagtcaaaagacagttatataaatatacatctattgagagttcatttggatttaatagccttgctattgtagacaataaacccaaaacatgtggtctgaaagactttttagaaaattttttaaaatttagagaagatgtagtaattaaaaaaactaaatatgatttgcaaaaagctgaggatagagctcatatattagtaggattatctgtaagtgtagaaaatattgataaagtaattaaaattataagatcatcaaaaaatcctgaagatgctaaaaattctttattaaaaacaaagtggaaaataaataaatcttccaaattaataaagcttgttgataataaaaactataaaggtttatataatttatcggtagatcagataatttcaattttagaattaagattacaaaagttaacggcacttggtatcaatgaaattgaaattgagcttaagaaattggctgaattaattattaagtataaaaaaataattaattcaaaaagtgaattgttaaaagtaataagttctgatcttcaaactattaaagaaaaattttcttttcctagaagaacaaaaataattgacgctatattaaattacgacatagaagaaactatacataaggagtcggtaataattacaattactcttcagggatatataaaaagaggagcattaagcagtgttaaacaacaaaagagaggcggtaaaggtaaatcaggtataaaaactagagaagaagattctgttgttcaaactctttctgtaaatacgcatacttctgttttgtttttttctactcaaggattagcttataaagttaaggcatggaagatacccgaaggctcatcttcatcaaaaggtaaatctctgtttaatattttacctttgaaaaatcatcaatcaattagttctataatgcctttcccagatgaaaatattgataaaa

SEQ ID NO: 295335 - DNA, 1732 bp, Unknown
  Bacterial polypeptide expressing nucleotide sequence isolated from the Sargasso Sea
aatgtatgatgagattagctcatcatatctatcatacgcaatgagcgtaattattagtagagcattaccagatgtacgtgatggacttaaaccagtccacagaagaattttatatgcaatgcataaaggtggctacgattggaacaaacactttagaaaatcatctagaattgttggtgatgtaatgggtaaatatcacccgcacggtgatcaagcaatatatgatgctttagtaagaatggttcaagatttttctatgagtttaccattgattgatggtcaaggaaattttggatctatagatggagataaagcagcagctatgaggtataccgaaacaaaactttcaaaagtaactcagtttttgattgatgatatagaaaaaaatactgttaattttaaaagtaattatgatgaaacagaaaaagaacctgaagttttaccagcgcaatttccaaatttactagttaatggagcgggagggatagcagttggtatggctactagcatacctcctcataatttaggtgaagtaataaatggaactttagcattaattaacaataacgaaataaaaattagcgaattaatgaaacatataccaggaccagattttccaaccggcggtgttatagtgggaaaaaacatcattaaagaaggttataaaattggcagaggatcatttaaaattagaggtgaagtaaaagttgaaaatttaaaaaatggaaaagatagaatagtaattacctctattccttatcaagttaacaaatcaaatcttaatgaaaaagttgctgaacttgtaagagataaaaagatagaaggaataagcgatataagagatgaatcaaatcatgaaggtataagagtttctatagatttaagaagaaacgttgaacctgaaactataaaaagacaattatataagtttacacctttagaaagttcttttggatttaatacattagcaattgttgaaaataaacctaaaacttgctctttaaaagatttcttagaaaattttttaaattttagaaaagatgttgttgtaaaaagaacaaaatataatttaaaaaaagccgaagaaagagcacatatattaattggtttgtcggttgctgttgataatttagataaagttataaaaataattagaagttcaaagtcaccagaagaagccaaaaaaactttagttacaacaaaatggaaaattaataaatcaaaaaaattgattttaatgatagaaaataaaaaaaatatcacatcatatagtttatctgaacaacaagtaatatcgattttagagttacgtttacaaaaacttactgcacttggaattaaagaaattgagaatgaaattaatgatttgtcaaaaatgattatttcttataaaaaaattatttcatcaaagaaagaacttttaaatgttattagcgatgaacttaaacatattcgtgataaatattcacatccaagaagaactaaaataactgatgctgttttaaattatgatatagaagaaactattcaaaaagagtcagttattattactgttacattacaaggatatattaaaagaagtcttttagataaagttaaacaacaaaaaagaggtggtaaaggtaaatcaggtattaaaactagagacgaagattcagttgttcaaactttatctgttaatactcatacaccagttttatttttttcacacagggattggtttataaaataa

SEQ ID NO: 295336 - DNA, 1365 bp, Unknown
  Bacterial polypeptide expressing nucleotide sequence isolated from the Sargasso Sea
aaaatttagctcatcaattcttgacaaaagaataagagaacttgcatttttaaataaaggaatttccattagtttaaaagacgatacaacaaaaaaaacaaaagaatttgttcacaaatacgacggtggaattattgaatttgttaagcatataaataagaaaaaacctattttagtgaataaaaatgaaaaagaagtcttcaaaaaacctatatttgtcacagctacaaaaaataacgttattgtcgagtgctcttttgaatggaacgcagggtattcagaagaagtattaccttttacaaataatatacctcagaaagacggaggaacccatctcttgggctttagaagtgctttaacaagagtaataaataaatattacggagataaaaacaataacaaaaaaaataaattagctttatctggcgaggatattaaagaaggtttaacagcagtgctttcaataaaaatgcctgatccaaaattctcctctcagacaaaagataaattagtttcttcggaaataagaaatattgttgaacatataattggtgaaaaagtttctacatggtttgatcaaaatccgtctgtagcgaaaattgttttagaaaaaattacccaagcggctatggcaagagatgttgctaggaaagctagagacagcgtgaggagaaaagggacatttgaattatcagggctaccaggtaaacttgcagattgccaaatacaaaaaagagagggtacagaattatttattgtagagggagattctgccggcgggtcagccaaacaaggaagagttcgagaatatcaagcagtacttccattacgtggtaaaattttaaatacttttgtaaacggcaaaaaaaacggtgaagaccaatcaactaaggccttatcaaaaatgatgtcatcaagtgaaataataactttaattaatgcactggggactggttcaaaagagtttaatatagaaaatttaagatatgataaaattgtgataatgactgatgcagatgttgatggatcccatattagaactctgcttttaaccttttttaataatcatccattcaatcaattaattgagaatgggcatttatatcttgcccaaccacctttatttaaaattactacatcaaataaaagtatttatataaaagatgagaaagccctcgaggattttattttgaaaagttcgaaggtagatcgaaaaattaaaaagggaactgacgaatttaatagatttattcaagatcaaaaagaaaaattatctatacaaagatttaaaggtttaggtgagatgaatcccgaggaattatgggatactacactaaatccagataatagaaccatgttaagagt

SEQ ID NO: 295337 - DNA, 772 bp, Unknown
  Bacterial polypeptide expressing nucleotide sequence isolated from the Sargasso Sea
atgataaaaaaaaatacaaataactatcaagcagactcaattaaagttcttaaaggtttggaggctgtcagaaaaagaccaggcatgtacattggagacaccgatgatggaactggtttgcatcatatggtctatgaggttgttgataactcaattgatgaggctttagctggacattgtaaaaatatagaagttaatatcaactctgatggatcagttactgtcaaagatgatggaagaggaattcccacagatattcataaagaagaaaaaaaatctgcagcagaagttatcatgacacaacttcatgcaggaggaaaatttgatcacgactcttacaaggtctctggtggactacatggagtaggtgtttctgttgtaaatgctctttcagaaaatttacaacttacaatcaatagagatggaaaaaaatattatattgaatttaaaaatggagactctgtttctcctttgaaagaaaaaggaagctccaaaacctcaggtactgagattagatttctgccgtcaaaaaaaattttttcttttactaaatttagtttttctacaatacaaaaaagattacgtgaattagcttttttaaataaaggaattaaaattgtattaaatgatttgactttaaaaaaaatcaaaactttagaatttaaatttgatggaggaattaatgaatttgttgagtttcttgatgaaaaaagagaacacttaaaaaacaaaaaagataaagatttgtttaaaaaaccaactatatcttgag

SEQ ID NO: 295338 - DNA, 1035 bp, Unknown
  Bacterial polypeptide expressing nucleotide sequence isolated from the Sargasso Sea
atcctaaattttcttctcagacaaaagataaattagtttcctcagaagtgagaaacattgtagaaggtatagttaatgaaaaattgtcaatttggtttgatcaaaacccatctatttctaaaataattttatcaaaaataatccaggctgcagtagcaagagatgttgccaaaaaagcaagagaaaacgttagaagaaaaggtgctttagagctcactggattacctggaaagttggcagattgtcaaaactcaaaacaagagggaacagaattatttattgttgaaggagactcagctggaggatcagctaaacaaggaagaaatagagagtttcaagcagtgctaccactgaggggaaaaattttaaatacatatactgaaatgaatgggtctaaaaaaaatgtaaatcaaagtgacctaagaacaaaatcattatcaaaaatgatttcttcaaatgaaatagttacattgataaatgctctaggattagatcctaaaacagaggaaataaacctagaggatttaagatatggaaaaattataattatgacagatgcagatgtagatggttcacatatcagagcactacttttaactttttttaataatgtcccttttaataaattaatagaaaaaggtcatgtttatttagcccaaccccctctttttaaaataaataaaggctctaaaggcatttacatcaaagatgaaaaagatctcgaaaattatataattaagaattctaaagatcaaaaaaaagttaagagaaattctaaagaatttgataaaattattcaattagaaaaatctaaactaaatattcaaagatttaagggtcttggagaaatgaatcctgaagaattatggaatactactttaaatccagagacaagaaatttacttcaagttcaatattcaaaaaatttacaaaaagatcaaaatcttatacaaacattaatgggtaacgatgttgcttctaggaaagattttattgtagataacgcaataaatgttgttaatttagatatttaat

SEQ ID NO: 295339 - DNA, 1302 bp, Unknown
  Bacterial polypeptide expressing nucleotide sequence isolated from the Sargasso Sea
aatgacaaacaaaaacacatatcaagcagattctattaaagtacttaaaggcttagaggcagtaagaaaaaggccaggcatgtatattggtgataccgatgatggaactggtttgcatcatatggtttatgaagtggttgataactcaattgatgaagctctagcggggtattgcaaaaatataaatgtaaaattaaattccgatggaactgtaactattaatgatgatggtcgtggtatccccacagatatacataaaggagaaaaaaaatctgcagcagaggtaattatgacccaactccatgctggtggaaaatttgaccatgattcttataaggtttcaggtggactacatggcgtaggagtttctgttgtcaatgccctttcagaaaaactattcttagaaataaatagggatggaaaaaaatattttattgaatttcgtaatggtgaagcaaaagcacccctcaaaatttcaggtaaatcaaaacaaacaggaactcaaataacttttttaccttcaaaagaagttttctcatcaatcaaatttagtgcaaatatcctaattaaacgaatgagagaattggcttttttgaataagggtataaaaataacctttattgatgatagtcaaaaaaaggagaaaatattagaattcaaatatgatggaggcctaatagaatttgtagattatttggatgagaaaagagaaaaattacaaaataaaaatggaaatgatttattcagaaaaccaatttatattgaaggaaaaaaaaataatgtagaattagagtgttctttaaaatggaatgcaggctatactgaggacatatttccttatacaaataatatttatcaaaaagatggtggaacgcatttattaggctttagaagtgctttaacaagaataattaataagtatgcaaatgaaaataatcttcttaaaaaaaataaactaacaatttctggggatgacatcaaagaaggtttgacatgcgttctatcaacaaaaattcctgatcctaaattttcttctcaaactaaagacaaattagtttcatcagaagtaagaatgattgttgaaacattggtaaatgaaaagttgtctatatggtttgatcaaaatccttcagtagccaagatagttttagctaaagtaatacaagctgcaatggccagagatgtagcaagaaaggcaagagaaaatgttagaaggaaaggtgctatcgaattaagtggtcttccaggtaaattagcagactgtcaaattggaaaacaggaagggacagaattatttattgt

SEQ ID NO: 295340 - DNA, 696 bp, Unknown
  Bacterial polypeptide expressing nucleotide sequence isolated from the Sargasso Sea
aatgtatgtcatccttgatagggctctaccacacataggtgatggacttaagccggttcaaagaagaattatttacgctatgtctgagttaggcctaagttctgcagctaagtacaagaagagtgcgagaacagtaggagatgtaataggtaaatttcatcctcatggcgatactgcagcttatgaagcaatggtccttctctctcaatctttttcaactaggtatcctcttattgacggacaagggaattggggctctatagatgacccaaaatcctttgcagctatgcggtacactgaatgccgactctccccttatgccaaaagtcttcttgaggagcttggtcaaggcactgttgattgggcaagtaattttgatggaacgcttttggagccttctgttttgccagcacggttacctaatttattattgaatggcgctacaggcatagctgtaggaatggcaactgatatacctcctcacaatttaaacgaagttgtaaacgcatgtatcaaaattttagatgaacctaaagtgactgtagaggaactatataaaattattcctggtcctgattttccaacaaaggctgaaatcatatccactgtagatgaacttaaggaaatttatcaatctgggagagggtcagttaggatgcgatctacttatgccatagagaatggcgagattgtgat

SEQ ID NO: 295341 - DNA, 1279 bp, Unknown
  Bacterial polypeptide expressing nucleotide sequence isolated from the Sargasso Sea
atgaaaattaaaaacattaacttcactgatgcgttagaagaaaagtatctatcctacgcactttcaacaattactcatcgagcacttccagatattcgggatgggttaaagccggtacatagaaggttattgtttgcgatgtttcaattgaggctaaactcaagttctggttttaagaaatcagcaagaattgttggcgatgtaattggtaaatttcacccgcatggagaccagtctgtttatgaagccctcgtaagattagctcagaatttctcaacaagatatccgttagttgatggccaaggaaattttggaaacattgacggagataatgcggctgcaatgagatatacagaagcaagattgactgcgttagcagagctcatgctgaaagatatatcagaggataccattgattatataaatacctatgatggcatcgatcacgagccaatagtacttccatcagcgtttccaaatttgctagctaatggaagttcaggaattgcagttggaatggcgacaaatattcctcctcataatattaatgaattatttaaggccttatcaaaattattaaaaaacccaaattatactaactcacaattattgaagcttattccaggaccagattttccaacaggaggggaaataattgacagtgatgatgcattgaaagatgcttatgccaaagggaagggcacaataaggctaagggccagatggaaaaaagaagaccttggaagaggccaatatcaaattattgtctatgaaattccgtatcaagtaaataaagctagaatcatagaaaaaatatctgatcttattgataacaaaaaagcaaattatctggaggcaattcaagatgagtctgcagaagatatcagaatagttctaattccaaaaaatagaagttttaaagctgaggtaatttttgaggacttatgcaagaattcagatttagaaataagatatgctattaattttaatgcaatcaatcacaaacatgagccaaaattattctcacttaaagagagtttaagatcatttattgatcatagatttaatgttttaaaaagaaggacaaaatatagattaattcaaactgagaacaggctggagatactcaaaggttttttaatagtttataaaaatttaaacaaagtaatcaaaataatcagaacagaggcagatccagagaaaaagttgattaacatatttagaataaataagaggcaggcggaagctatactagcaatgaggcttaggcagttaaaaa

SEQ ID NO: 295342 - DNA, 1450 bp, Unknown
  Bacterial polypeptide expressing nucleotide sequence isolated from the Sargasso Sea
gatgagttcatcttatctatcatatgcaatgagcgtaattgttagccgtgctctaccagacatacgagatgggttgaaaccagtacacagaagaattttatatgctatgcacaaaggtggatatgattggtcaaaacaatttagaaaatctgcaagaatagttggagatgtaattggtaaatatcatccacatggagatcaatcagtatatgatgcgcttgttcgaatggttcaagatttttcaatgagtcttcctttagtagatggacaaggtaattttggatccattgatggagatccagctgctgcaatgagatatacagaaactagactttctaaagtatcacagtttttaatcgatgatattgataaaaacactattgagttcaaaagtaattatgatgaaactgaaaaagaaccatcagtattacctgctcaatttcctaatttattagttaatggggcaggaggaattgccgtaggaatggcaacaagtattccacctcataatttgggtgaagttattgatggaactttagctctaattgaaaataaagatataacagtaacacaattaatgaaatttataccaggtccagattttccaactggtggagttatcattggcaaagatatgataaaacaaggttataaaagtggaagaggatcatttaaaattagaggggaaatatctgttgaacaaggtaaaaatggaagagaaagattagtaattacatctataccttatcaagtaaacaaatctgtattaaatgaaagaatagcccaattggtaagagaaaaaaaaattgaaggtataagagatattcgggacgaatctaatagagaagggatcagagtggctatagatttaagaggcggtgtagagcctgaaactattaaaagacagttatataaaaatactcaaatagaaagctcttttggttttaatactttagctattgtagatggtaaaccagaaacttgtgatttaaaaaagtttttatcgaattttttaagttttagagaagatgtagtaattaaaaaaacaaaatttgatttaaaaaaagctgaagaaagagcacatatattaattggattgtcagtctcagttgaaaatttagataaaataattaaagtaataagatcctctaaaacaccagatgatgcaaaaaaaactatattaaaaaataaatggaaaataaacaaatctcaaaagttgatatctttagtagaaaacaaaaagattaaaggtttatatagtttttctgaacaacaagtaaatgcaatcctggaattaagattacaaaaacttactgctcttggaattaatgagattgaagcagaaatcaaaaaactttcagagatgatttcaaaatataaaaaaattatatcatctaagaaggaattattaaaagtaattggtaaagaattaattgatattaaagaaaaa

SEQ ID NO: 295343 - DNA, 1178 bp, Unknown
  Bacterial polypeptide expressing nucleotide sequence isolated from the Sargasso Sea
gaagaccctggtctttcgaatctacatagtggaaggggactctgctggcggtagcgctaagcagggacgtaaccgtaagaaccaagcgattctgccactgaaaggtaaaatcttaaacgttgagaaagctcgtttcgataaaatgctttcttctcaagaggttgccacactaatcaccgcgcttggctgtggtattggtcgtgacgaatacaacccggataagacgcgttaccacaacatcatcatcatgacggatgctgacgtcgacggctcgcacattcgtaccttgctgttgaccttcttcttccgccaaatgcctgaactgattgaacgtggttatgtgtatattgctcagccgcctttattcaaagtgaagaaaggtaagcaagaacaatatctgaaagacgaagcggcactgacgcagtatctgaccactcaagcgttagatggtactagcatttatccatctcaaggtgcgcctggcatgtcgggtgagccattagagcgtttagtgactcaatatcgtgaagtggaagcgattgttgctcgtttagagcaacgttacccaacgcagatcaccaaccgcatgctttatcacccaatgatcaacaacgaaatgttggcggatgaaggcaagatgaaggaatgggtcgacgcctttatccatgagctggtggaattagaaaacagcggtgtgttgtattctggtgagcctgtactcgatcctgagcgcaaagtgtatctgccgaagatcactatccgtaaacacggtatcgatacacactacctgttcagctatgacttcttccaatcaaccgactaccaacgcattggtaagttaggtgcggcgctcgaaggcctgattgaagtcggtggttatgtgcaacgtggcgaccgtgtgaaggaagtaggtagcttcattgaagcgttagattggaccatcggcgaagccaagcgtggcctctacatccaacgctataaaggattgggtgagatgaaccctgagcaattgtgggaaaccacgatggatcctgaatctcgccgcatgctgcaagtgacgattgatgatgccgttggtgcggatcagctgtttacttgtttgatgggcgaccaagttgaaccacgccgtgactttatcgaagccaacgcgctgaacgtggctaacttagatgtttaac

SEQ ID NO: 295344 - DNA, 521 bp, Unknown
  Bacterial polypeptide expressing nucleotide sequence isolated from the Sargasso Sea
tatgtctgatattttagatcccgataactcaggattaaacgaagataacgatcgaattattcaaactgacctaagaaatgaaatgtctcgttcatacctcgagtatgcaatgagcgttatagttggtcgcgctctgccagatgcaagggatggattaaaacctgttcacagaagaattctttatgcaatgtatgaacttggtttgactagcggtagaccatacagaaaatgtgcaagagttgtaggagaagtattaggtaagtaccaccctcatggcgatactgctgtttatgatgctttggtaagaatggcccaggatttttctatgaggatgccactcatagatggccatggaaactttggttctgttgataacgaccctccagcagcaatgagatatacagaatctcgtttacagtctcttacggatgaaagtttattagaggatattgaatctgaaactgtagattttgccgataattttgacggttctcagcaagagccaacagttctacccgcta

SEQ ID NO: 295345 - DNA, 1009 bp, Unknown
  Bacterial polypeptide expressing nucleotide sequence isolated from the Sargasso Sea
atgaaaaaaaattcaaattatcaagcagactcaataaaggtattgaaaggtctagaggcagttagaaaaagacctggaatgtatattggtgacacagatgatggaactggtttacatcatatggtttacgaagttgtcgataattctatagatgaagcattagctggatattgtaaaaatatagatattcatatgaatatggatggcagtgttacagttaaagatgatggaagaggtattcctattgatattcataagggagaaaaaaaatctgcagcggaagtaataatgacacaattgcatgcaggaggaaaatttgaccatgattcatataaagtttcaggtggtttgcatggtgttggtgtttcagtagtaaatgcactttcagaaaaattagaactaactatagaaagagatggaaataaatattttattgaatttgaaaatggagagtcaattaaacctttaaaacttgtaggtaaatctaaaaataagggaacacaaattaaatttttaccatctaaaaaaattttttcttctgtgaagtttagttttaatataattcaaaaaagaatgagagaacttgcatttttaaataaaggaataaaaatttcaattaatgacttaactttaaaaaaagtaaaaaatatagaatttaaatatgagggagggatcttagagtttgtagaatttttagataaagatagaacaaaattaaaaaataaaaatgaaaatgatttattcaaaaaaccaatttttatggaaggaaaaagggaaagtttggaaattgaatgttccttaaaatggaatgcaggatattcagaagatatttatccatttacaaacaatatatatcaaaaagatggtggaactcacttactaggatttagaagtgcattgacaagagtaattaacaaatatgcagcagaacaaaatttattaaaaaaaaataaactttcaatttcaggagatgatataaaagaaggcttaacttgtgtattatcgataa

SEQ ID NO: 295346 - DNA, 628 bp, Unknown
  Bacterial polypeptide expressing nucleotide sequence isolated from the Sargasso Sea
atggaaaaaaacgaaattccaaaaataaataataatattaaaccaatctcaatgtatgatgagatgagctcatcatatctatcttacgctatgagtgttatcgtaagtagggcattgcctgatataagagatggattaaaacctgttcacagaagaattatatatgcaatgcacaaaggtggctttgattggtcaaaacaatttagaaaatctgcaagaattgttggagatgtaattggtaaataccacccccatggggatcaagctgtttacgacgcacttgttagaatggttcaagaattttcaatgagcttacctttagtagatggacagggtaatttcggttctatagatggggatcctcctgcagcaatgagatataccgaaactaaacttgcaaaagtttcacagtttttaattgatgatatagaaaaaaataccgtatcctttaaaagtaattacgatgagacagagcaagaacctattgtattgcctgcacaatatccaaatcttttagtaaatggtgctggtggaattgcagttggaatggcaacaagtataccacctcataatttaggagaggttgtagatggaactttagcattaattaaaaacaaagaatattaaa

SEQ ID NO: 295347 - DNA, 1475 bp, Unknown
  Bacterial polypeptide expressing nucleotide sequence isolated from the Sargasso Sea
ggtggggtatgtgagtttgtaaaatatcttgataagtcaagaacggctttgatagaaaatccgatttttatcgctggtgaacgcgatggtgtaagccttgaaatagcgatgtggtggaatgatggatatcatgaaaatgtgtttcctttcaccaataacattccacaaagagatggaggaactcatattgctggttttaggggggcgttgacaagatcactaaatatgtacgcttcttccgctggaattagcaaaaaagaaaaaatttctttttctggggaggattcaagagagggtttgacgtgtgtattatcattaaaagtacctgaccccaagttttcatctcaaaccaaagataagcttgtttcttcggaagtccgtcccgttgttgaaagtcttatgaatgaaaaactatcagagtggtttgaagaacatcccaccgaaggtaaaattattttatcaaaggttgtagaagctgctttagctagagaggctgccaggaaagcacgcgaattaaccagaaaaaagactgctatggatatagctaatttgcctggaaaactagctgactgccaagaaaaagatccaacaaaaactgaactctttatagttgaaggagatagtgctggtggaagtgcaaagcaaggaagatctagatctaatcaagcagttctaccgcttaggggaaaaattttgaatgttgaaagagctagagccgataggatgctatccagtcaagaaattggaactttaattactgctttaggtactggtataggcagtgatgaatttaacatcgataaactaagatatcataaaataattataatgacagatgcagatgtagatggtgcgcacattcgcacattattgctaacttttttctttcgacaaatgcgggagttaattgagtcagggcacctttatattgcccaaccaccactttacaaagtaactaggggaaaatcggaggtatatttaaaggatgagtttgctttgcaagattatttgatccacatgggtatggaaggagcaacattaaagctatcagatgggtctcaaattgctggcaaagatctgagtagaattgtttctgaagcaaaaaaggtgatggcaatattaaaatcttttcctgctaggtactctaaatttgttttggaacaagccgctctctcaggggtgctggtagatggcttgtttaaaagcaagccggaaaacgttattgaaaaactaactaatcgcctcaattattcagcagaagaatttgaaaagggttggcatggtacgataaacgataacggagggttacgcttaactcgacttgtacgtggagttgaagaggttagagatattgactcatcagttttaaattcctccgaagctagaaatttaggtaaaatgttcgagagtttaaacgagatctacgagactccagcaacattaatatggaaaactaaagaaaggtcagtgaaatc

SEQ ID NO: 295348 - DNA, 847 bp, Unknown
  Bacterial polypeptide expressing nucleotide sequence isolated from the Sargasso Sea
atgacaaaaaataatactaatacttatcaagcagactccattaaagttttaaaaggtctagaagcagtaaggaaaagacctggtatgtatatcggcgacacagatgatggaactggcttgcatcatatggtctatgaagttgtagataattccattgatgaggcattagcaggtcattgtaaaaaaattgaggtaagtataaattctgatgggtcaatcacagttgaagatgacggtagaggaataccagttgactttcacaaagaagaaaaaaaatcagcagcagaggttataatgactcaattgcatgctggtggaaaattcgatcacgattcctataaagtttcaggaggtttgcatggtgttggagtttcagtggtcaatgcgctttcacacaaattggaattacacgttgaaagagatggaaaaaaacattttgttgagtttgtaaatggtgaaactaaaataccactaaaagtaacaggaaagtcaaaaaatactggtacaaaaatcaattttttaccatccaaagatattttttcatctacaaaatttagtttttcaattattcaaaaaagaatgcgtgagttagcatttttaaacaaaggaattaaaattataattaatgacctaactcaaaaaaaaataaagacttctgaatttaaatttgagggcggtataaatgagtttgttgaatttttagatgaaaaaagagaaaaattaaaaaataagaatgataatgatttgtttagaaagcctatttatatcgagggaataaaaagtaatattgatgttcaatgttcattaaaatggaatgcaggatataatgaggatgtgttccccttat

SEQ ID NO: 295349 - DNA, 1486 bp, Unknown
  Bacterial polypeptide expressing nucleotide sequence isolated from the Sargasso Sea
ctgcatcaggagatgcagcgctcctacctcgaatacgccatgagcgtgatcgtgggtcgggccttgcccgatgcccgcgacggtttgaaaccggtgcaacgccggattctctatgcgatgcaggaacttgggctcaccccagaccggccgtaccgcaaatgcgcccgcgtcgtcggggatgttctcggtaagtaccacccccacggcgatcaagcggtttacgacgccttggtccggcttgttcagaccttcgccagtcgccacccactgctggatggtcatggaaacttcggatccgtcgacgatgatccgccggcagccatgcgctacaccgaaacgcgcctggcaccgattgctcaccaggcattgctggaggaaatcggcgacgacaccgtcgatttcgctgcgaacttcgatgggtcccagcaggaacccaccgtgctgccggcgcaactgccctttctcctgctgaacggctgttcgggcattgccgtgggcatggccaccagcatccctcctcacaaccttggcgaagtggtggacggcctggtggccttgatccgtcaaccggaactcagcgacagcaaactgctggaattgattccaggacctgatttccccacgggtggtgaagtgctgctgagcagtggcctgcgtgacacctacctggtgggacggggcagcatcccgatgcgagggattgcccacatcgaagaagtgcaacccggcaagggtcgccacaaacgcaatgccgttgtggtgacggaactcccctatcagctgagcaaggccggctggatcgaaaaactggcggaatcagtcaatgacggcaagatcggcggcatcgccgatatccgcgatgaaagcgaccgcgagggaatgcgggtggtggtggagctgcgacgcgataccgatccagccaaggtgcttgctgatctgcaacggcgtacggcactgcaaagcaatttcggagccatccttctggcccttgttgatggtcagccccgccagctctccttacgccagttgttgcagaccttcctggattacagggaactgaccctgatccggcgcaccagccatgcgttgcgcaaaacagaagaccgcctcgaagtggtcgacggcctgatcaccgccctgaacaaccttcaagcagtgatcatgatgattcaggaggctcgcgatgctgcttcggcgcgagccagcctgatggtgcgcctcgatttgactgaacgccaggctgacgccgttctggccatgccactgcggcggttgactggtttggaacaggaaagcctgcgtcaagaactcgaggagttgcaagcggaacgggaacgtttgcgcctgctgctggacaaccgggatcaactgctcgatgccatggtccaggagctgaagggactgaaaaagcgcttcagcacgccgcgccggacgcgactggtggaaggtggcgatgctctgatggctgaacgggccgccagccagc

SEQ ID NO: 295350 - DNA, 2383 bp, Unknown
  Bacterial polypeptide expressing nucleotide sequence isolated from the Sargasso Sea
atggctgaatcagcaccatctcctgcagaggatccatctgaagcaggttactcaagtactgacttgaagcatctctctgaccgtgagcatgtgagagaacggtttggaatgtatatcggtgacaacacggcacgagggctgcatcatctggtctacgaagttgtcgataactctattgatgagtgtatggctgaatacgcttatcgagtatcagtgacggtgaatgttgacggtagtgtgaccgttgaagatgacggacgagggatccctacggggattcacgagcaactctcagaggagatggatcgcgaagtatcgacccttgaaggcgtgatgacagttctcaaatttggaggaaaatttgagaagggtgcgtatcagacatccggtggtcttcatggtgttggtgtgacggtcgtcaattttctttctgagtggtgtgaggttgaggtcgcacgagacggacatctctggcaacaggaatatcagcgcggcgagccaaccgggccggttcggaagatgggtaccgcgacttcgacaggaacaaaaacaacatttaaaccagaccctcaaatattccctcagacaaaattttcttgggatatccttgctcgccgtttacaggaattagcattcctcaattctggtgtgcgcattgtctttaccgatgcttcgagcggtcagacagaggagtatcactatgagcgaggtgttgaagagtttgttgagtggctgaacaggtcaagtgatgccgtccatcccgatgtcatctgtctcaaaggtgaaacagagggtgtctcctgggacatagcccttcaatacaccggcgactttactgagaacgtgcacagttacgtgaataatatttccacaaatgaaggtggaacgcatgtttctggttttcgctcagcgcttactcgaagtctgaattcatacggtaagaagacaggaatctataaggatttagtaccaacaggtgatgatgtgcgggaagggatcacagctgttgtgagcgtgcgagtcgctgagccacaatttgaagggcagacaaagaccaagcttggcaatagtgaagttgagagcatcatcacctcagcggtgggtgagttccttgggaaatatcttgaggaacatcccaagagtgcaaaagctattgtccagaaaggtgttctggcggctgaagcgcgtactgctgctcagaaagcaaaagcactcctgcgtgaacggaaaggtgcactctcgggtggtggtctaccaggaaagcttcgtgactgcacaagcaaagatgtcgataaatgcgaactctatctcgtcgagggtgattcagcaggtggctcggccgagggtgggcgtttacgtgaatatcaggcaattcttcctcttcggggaaaaattatcaatgcgtacaaaagtcgtgaggacaaggttcttgcaaacgaagaagtgcggagtgttatttcggcaattggcgcaggcattggacctgaagcagacctaacaaagcgacgatacgataaagtcgttattatgacggatgctgatgttgatggttcccacattcggacactcttactgacctttttctacagacagatgtaccaactggttgtatctggccatgtctatgttgcgcaaccaccgctgtttcgtgtacgcaataagaagcatgtgtactatgtgcaaaccgaagaagagatgaaacagcaactgcttgaccaaggcctcggagaaggtgtctttttgcctggtgatgggcgtgagttggccggtgaagagatgcagaaactctgtcggacattggcagggttagaggatgccttggtcgcccttgagcgtcgcggaatcagcttgcgagaccacgcggatcgccgtgaatcggagaccaaaaaactcccgatgtatcacgtcttttttggtgctgaagagcattggttcacgagtcgggatcagcttgagtcatttgttgagtcaaaagagaaaattacaggtggtgaattagaggctggcaaagctgatgaaaataagccaggagggggtggtgcagccaatccggaatccgctgaacatcaactcatcgttatcgatcttcatgaggtccgtagtatcaatgcagggcttgcggagcttgaatcaatggggtttggaattgagtctctcatgcctgaggaccgaacgggtacagaagagcctcggtatctgctgcgtcgtggtgagaataaaatcggacttgatgacctgcgaggtctcctcactgcagtgagacgtgctggtgagaaaggcttggcaattacccgtttcaagggtctgggtgaaatgaacgcggaagaacttcgggaaacaaccctcgatccatcaaacaggacacttcttcgtgtcagcatgg

SEQ ID NO: 295351 - DNA, 1420 bp, Unknown
  Bacterial polypeptide expressing nucleotide sequence isolated from the Sargasso Sea
cgcgccttaccggacgtaagggatggtttaaagccggtacaccgtcgcgtgttgtttgcgatgaaggaactgggcaatgactggaacaaagcctataaaaagtcggcccgtgtggtcggtgatgttatcggtaaatatcacccgcatggcgacagtgcggtgtacgacactattgtccgcatggcgcagcctttctcattacgctacatgctggtggacggtcagggtaactttggctctatcgatggcgactctgcggcagcaatgcgttataccgaagtgcggatggcgcggattgcgcatgaattactggccgatttagataaagaaaccgtcgactatgtgcctaactacgatggcactgagcaaattccagcggttatgccaactaaggtgccgaacctgttgattaacggctccagtggtattgccgtaggtatggccactaatattccgccacacaacttaaccgaagtgattgatggctgtttagccttaattgctaatccggatatcgaactgcatgagttgatgcagtatatcccagggccagatttccccacagccgctattatcaatggccgtaaaggcattgaagaagcctaccgcaccggtcgtggcaaggtgtacatccgcgcaaaaaccgaaattgaaaccgatgaaaaaaccggccgtgaagctattatcgtcaacgaaattccctatcaggtaaacaaagcgcgcttaattgaaaaaattgccgagctggtaaaagaaaagcgtattgaaggcatttctgcactgcgtgacgagtctgacaaagacggtatgcgtattgtcattgagctaaagcgcggcgaatcttcagacgttatgctgaaccaattgtatgccaatacccaaatgcagacggtatttggtatcaacatggtcgccttggatcagggccagcctaagctgttaagcttaaaagaaatgctgcagtgctttgtattgcaccgtcgtgaagtggttacccgtcgtaccgtctacgatttacgtaaagcccgtgaccgcgctcatattttagaaggcttggccatagcactggccaatattgatgacattatcgagctgattaaaacctcgcccagcccggctgaagccaagctgcgtttagtggatcgcggctggcagttaggtgatgttagcgccatgctggaacgcgcaggacaagatgcagcgcggccagagtggttagaagcgcattttggtattcgcgacggcaagtatttcttaaccgagcaacaggctcaggccattctggacttgcgtttacacaagctgaccggccttgagcatgagaaaattcttgatgaatacaagcagctattagaacttattgctgaattgctgcacattctggcaagcccagagcgcttaatggaagtgatctgcgaag

SEQ ID NO: 295352 - DNA, 1247 bp, Unknown
  Bacterial polypeptide expressing nucleotide sequence isolated from the Sargasso Sea
aatgtcagattttgccaaagaaatccttcctgttaatatcgaggatgaactaaaacaatcttaccttagctatgccatgagtgtaattcatggaagggcgctaccagatgttcgtgatggcttaaaacctgtgcatagaagaatactttatgcgatgcatgatcttaaaaataattacaacaaaccatataaaaaatctgcaagggttgttggagatgtaattggtaaatatcaccctcatggagattctgctgcatatgatgcgattgttagaatggctcaagatttttcaatgagatacacgctcatagagggccaaggaaactttggctcaatagatggagatcctccagctgctatgagatatacggaagtcaggatgcaaaaaatttctgatgaaattcttgctgatttagaaaaagaaactgtctctttttcagaaaattatgacggctctgagcaaatgcctgatgttatgccaactaaaatcccaaatcttttgattaatggatcatcgggtatagcagtaggtatggcaacaaatgttcctccgcataatctcactgaagtaataaatggttctctaaagctgcttgagaatccaaaattatctattgatcagatcattgattcaataagcggacctgatttcccaaccgggggaaccattgacgggaaaatgggtatctatgaggcatataagactggaagaggaataatttatgtacgatctaaatcaaaggtagaggaaagcaaaaatggaaagaaatctttagttatctatgaaatacccttcatggttaacaaagcaagaactctcgagaagatagcagagcttgttaaggagaaaaaactcgatggtataagtgagatcagagacgaaagcgataaagatgggctaagaatagttatcgatgttaagaagggggagtctgttgaagtattagaaaataatctttttgctcagactcaacttgagcagtcatttggtattaacttcactgtcttggttgatggacaaccaaaggttcttaatttaaaagaaatccttcaagaatttttaaagcatagaaaagacgttgttttaaaaagaacaaaattcgagcttaggaaggctaaagaaagaggacatattgtagaaggcttaatggttgccattgctaatatcgatgaaatcataaagattattaaaaaatctaaggacccaaagatagcagctcaggagttagtaaaaagaaatgaaagct

SEQ ID NO: 295353 - DNA, 2029 bp, Unknown
  Bacterial polypeptide expressing nucleotide sequence isolated from the Sargasso Sea
atgtctgatattttagattctgggaattctggattaagcgaagataaagatcgaattattcagaccgacttgagaaatgagatgtctcgctcatatctcgagtatgcaatgagtgtcatagttggtcgagcgcttccagatgcgagggatggattaaagcctgttcatagaagaattctttatgcaatgtatgaactaggtttaactagcagtagaccttacagaaaatgtgcaagggttgttggagaagtacttggtaaataccacccccatggtgacacagctgtttatgatgctttggttagaatggctcaggatttttctatgaggatgccactcatagatggccatggaaactttggttctgtagataacgaccctcctgcagcaatgagatatacagaatctcgtttaaagtctctcacagatgaaagtttattagaggatattgaatctgaaactgtagatttctcggacaactttgatggttctcaacaagagccaactgttttacctgcaagaatccctcaacttcttttaaatgggtcttcaggtatagcagtagggatggcaactaatattccacctcataatctaggagaattaatcaatggtttaagatcaataatcaaaaacccttccatcgaagatagagaactttttgaactaattaaaggccctgattttcccactggtggtcaaattttaggaagagaaggtattagagaaacattcaaaacaggaagaggttccataactatgagaggggtagcaaatattgagcaaattaaatctgctggtagagcagaaaaagatgcagtaataattacagagcttccatttcaaactaataaagcgggtttgatagagagaattgcagatatggttaatgaaaaaaaattagagggtatttctgatattagagatgaaagtgaccgagatggcatgagaatcgttattgagttaaagagagatgcttatccacaggtagttttaaataatttatttaagttaacacccctacaaaacaactttagtgcaaacattttagcactagttaaaggagagcccacaactctttcacttaggaaaatgttagatgtatttttagattttagggtagaaacaataagaagaagaactggatttttattaaaaaaagcagaagagagagatcacattgtaaagggtcttttattagcattaggttctttggatgaaattataactttaataagatcggcaaaagattcaaattcagctcgagaaaaattgcaaacagatcatgaattatcttctaatcaggcggatgcaattttacaaatgcagttaagaagattaacagcattagaggcagataaaatcaaagcagaacataatgaattaacgcaaaaaattgaacaatatcaacaaatattaaatagtaaagagagaatctttgaaataatccttgaagaacttaataaaatcgatgaaagattctcttctcccagaaaaacagaaatattagatttaggtggtgggttagatgatattgatctcatagctaatgaacgatcagtagttttattaactgaagcaggttatttaaaaaggatgcctgttaatgagtttgaatctaccagtcgagggtcaaggggtaaggctggcacaaagacccaagaagatgatgacgtgaaattatttataagttgtaatgatcatgatactcttttgcttttcagtgataggggagtagcctatgctctcccagcatatagagtccccatgagtagcagaacagcaaaaggtactccttcagtgcaacttctcccaatcccaagagaagaaaaaataacttcactagtagctgttgattcttttgttgaagactgttatttattaatgttaaccaaggctggatttataaaaagaactgcactttctgctttttcaaaaattcgctcaaatggattaatagcgattaatctcgaagatggagacgccctaacttgggtcagattatcaaaagaaggcgacagtgtcttaa

SEQ ID NO: 295354 - DNA, 1435 bp, Unknown
  Bacterial polypeptide expressing nucleotide sequence isolated from the Sargasso Sea
tatgagcaaaaaatacgaagctgcggacatagaagtattaagtgggctagagccagtaagaagaagacctggcatgtataccgacacctctagaccaaatcatctggctcatgaagtaattgataatagtgtagatgaggcacttgcaggccattgcaaaaaaatcagcgttactctttataaagacgggtcacttgaggtggtcgacgatggaagaggcatgcctgttgatacccatccaaaagaaaagataccaggagttgagttaatattgaccagacttcatgcgggtggaaaattcaataaagataactatcaatattctggtggcttgcatggcgttggcgtctctgtcgtcaatgcactttcaaaaaacctagaagtctgggtcagaagagatggtaccgaacaaaatatgagctttgccggaggaaaaaaacaaggcgatcttgaggaagttggcaaagtaggcaaagccaacacaggtactacaatcaggttttggccagacccacaatactttgattcatccaatatttcagcttcgaaacttcagcatgctctgaaagccaaggcagtgctttgtccgggcttagaggtaaagctgaagattgagagcactggagagaaaattacatggatgtatacgggcggtcttgaacagtatcttgctgaaactataggtcagacacaacacattcctgaggttccattcagtggcgggtttaaaagtgacaacgagacagtagactgggctttggtatggctccaagaagaaggcagcaacttatcagagagttatgtcaatctcatacctactgcacaaggaggcacacatgttaatgggttaagaacaggacttgcaaatgcaataagagaattttgtgaattcagaagtcttcttccaagaggagttactcttacaccagaggatgtttgggataatgtgaattatgtgcttagcgtgaaacttgaagaccctcaattttctgggcaaacaaaagaaaggctttcttccagagagtcagctgcatttgtgacaggggtaattaaagatgaattttctttgtggttaaaccagcatccagaaacaggagatttgatcgcacaattggcaatagagcgagctcaaaaaagaataaaaagtgcgaaaaaagtagtcagaaaaaaagtggtttctggaccatcattacccggaaaacttgcagattgcacatcgcaagaaccagagttatgcgaactatttttggttgaaggagattcagcgggcggttctgcgaaacaagcaagagacagaataactcaagcaataatgccattgagaggaaaaatactaaacacatgggaagtggaaacaacagagatacttgcttctcaggaagtgcatgatattagtgttgctattggtgtcgatccagtgaatcaaaaaatatag

SEQ ID NO: 295355 - DNA, 1582 bp, Unknown
  Bacterial polypeptide expressing nucleotide sequence isolated from the Sargasso Sea
tatggcaaataaaaatacataccaggcagactccataaaagttttaaagggattagaggcggtaagaaaaagaccaggtatgtatattggtgacacagatgatggaaccggtttacatcatatggtttatgaggtcgtagataattctattgatgaagctttagcaggtcactgtaaaaacataaatgttataattaatccagacggaacagttactgttagcgatgatggtaggggaatacctgtggatatacacaaaaccgaaaaaaaatctgcagcagaagttattatgactcagcttcatgctgggggaaaatttgaccatgattcctataaagtatcaggaggattgcatggagttggtgtctcagttgtaaacgccctgtcagaaaagttacttttggagataaatagagataacaaaaaatattttgtagagtttaaaaatggtgaggcaaaatcagcattgaaagccattggcaaatcaaaacaatctggaaccaaaataacttttttgccatctacagaaattttttcttcaataaaatttagcaccagtattttaattaaaagaatgagagagttggccttcctaaataaagggattaaaattatttttattgatgccaccttaaaaaaagaaaaaatatcggaatttaagtttgatggcggtgtaacagagtttgttgatttcttagatgaaaaaagagaaaagttgcaaaataaaaatggaaatgatttattcaggaaaccaatttatatagaaggaaaaaagaacaatatagaaatagagtgttccttgaaatggaatgctggttatggcgaagaaatatttccatatacaaataatatttatcaaaaagatggtggaacacatttattaggatttagaagtgcattaactcgagttgtgaataaatatgctaacgaacacaatttgttaaagaagaacaaattagctatttctggagatgatataaaagaaggattaacatgtgttttatctactaaaattcctgatccaaaattctcatctcaaactaaagataaattagtctcatctgaagtgagaatgattgtagagacagtagtaaatgaaaaattatcaacatggtttgatcaaaatccaactgttacaaaaataattctagctaaaattattcaagcagctatggcaagagatgtagccagaaaagcaagagaaaacgttagaagaaaaggagccctagaattgagtggtctacctggaaaattagcagattgccagataggaaaacaagaagggacagaattgtttattgttgagggtgattcagctggaggttcagcaaaacaaggaagaaataggtcaaatcaagctgttttacctcttagaggaaagattttgaatacttatgttgaggatttgacagttaaaaaaaatggtaatggaaatggatcagataaaaggactaaagctttgtcaaaaatgatatcttcaaatgagatagtgacattaattaatgctttgggcctagatcctaaagaagaagagatagatctaaaagatttaagatacggtaaaataataattatgacagat

SEQ ID NO: 295356 - DNA, 1254 bp, Unknown
  Bacterial polypeptide expressing nucleotide sequence isolated from the Sargasso Sea
gatgagctcatcatatctttcttatgcaatgagtgtaattgtaagtcgtgcacttccagatgtaagagatggtttaaaacctgttcatagaagaattttatatgcaatgtataaaggtggatatgattggtctaaacaatttagaaaatctgcaagaatagttggagatgttattggtaaatatcaccctcatggtgatcagtctgtttatgatgctttggtaagaatggtacaagatttttctatgagcctacctttaattcaaggtcaaggaaattttggttctatagatggtgatcctgctgcagcaatgagatataccgaaactcgtttgtcaaaagtttctcaatatttaattgatgatattgaaaaaaatacaatttctttcaaaagcaattacgatgaaacagagaaagaacctagtgttttaccggcacaatttccaaatttattagtaaatggagcgggcggtatcgctgttggtatggcaacaagtatacctcctcacaatttaggtgaaattatagatggtacgttggccttaatagataataaagatattaaaattaaagagttaattaaacatatacctggtccagattttccaactggtggtgtaattataggtaaagatataataaaacaaggatataacaatggaagaggatcatttaagattagaggtgaaatctcaattgaacaacaaaaaaatggacgtgaaagacttgtaataacttctataccttatcaagttaacaaatctattttaaacgaaaggattgctcaattagtaagagaaaaaaagattgagggaataagagacattagagatgaatcaaatagagaaggtataagggtagcaatagatttaagaaacggcgtagaaccagaaacaataaaaagacaattatataagaatactcaaatagagagttcatttggttttaatactctagcaattgttgaaggaaaacctcaaacatgcacactaaaagattttttatctaattttttaacttttagagaagatgtagtcattaagaaaactaaatttgatcttcaaaaagcagaggagcgagcacatatattaataggattatcagtttcagttgaaaatctagataaaataattaaaattattcgatcatctaaaacaccggatgatgctaaaatatcaattctaaaaaccaaatggaaaataaataaatcacaaaaattaatttctttagtagagggaaaaaaaggtaagaacct

SEQ ID NO: 295357 - DNA, 1742 bp, Unknown
  Bacterial polypeptide expressing nucleotide sequence isolated from the Sargasso Sea
cctagcgggccattgcgaccggatcttggtgaccctcggcgaggacggttccgcgtccatcagcgacaacggtcgcggcattcccaccgacgttcacccgcgcaccggcaagagtgccctggaaacggtgctcaccgtgctgcatgccggcggtaagttcggcgccggcggttacaaggtgtccggcggtctgcacggtgtcggtgtgtccgtcgtcaatgccctaagtgagtgggtgcaggtgacggtgcgccgtcaggggcaggtgcatcggcagcgctttgagcgtggtgctgccatcggcagcctggcttctgaggaccagcccgccagtgaaaccggagagaccggcaccacggtgtgcttcaagccggacattgagatcttcaccggcggcatcgtttttgattacgccaccctttcggctcgtctgcgcgagcttgcttacctcaacggcggtgtgcggatcgtcttccgcgatgaacgggaatcagcccgtaacgaggcaggcgaggcccacgaggaaatctatttttacgagggcggcatcaaggagtacgtcgcctatatgaataaggaaaaagatgccctgcatccagacattatttacgtgaattctgaaaaggatggtgtgcaggtggaggctgctctgcagtggtgctctgatgcctattccgacagcatccttggctttgccaacaacatccgtactgtggatggcggtacgcatattgaaggtctcaagactgttctcactcgcaccttgaatgcttttgccaagaaattaggcaagcgcaaggaatcggattccaacctggcgggtgaaaacatccgtgaaggtctcaccgccgtgctgtcggtaaaggtgccggagccggagtttgaaggccaaaccaaaaccaaactcggcaacactgaagtccgtggcattgtcgacaacctggtgggtgaaggcctcagccaatttctggaattcaacccctcggtgatcgggttgattctggagaaggcgattcaggccttcaatgcagccgaagcggcccggcgtgcccgggagctggtgcgccgcaagagcgttctggagagttcaaccctgccgggcaagctggcggattgcagttccagggatcccagcgaatccgagatctacattgtggagggtgattcggctggtggatccgccaagcaaggtcgtgatcgccgcttccaggccatcctcccgttgcgcggaaaaattctcaacattgagaaaactgatgacgccaagatttataagaatactgagatccaggcattgattacggctctcggcttgggcattaagggtgaagactttgacgtgaaaaatctgcgctatcaccgcgttgtgatcatgaccgacgctgatgtggatggtgcacacatccgcacgttattgctcacctttttctatcgctatcaaaaggctttggtggaaggtggttacatctacattgcttgtccgccgctctacaaagtggagcgcggaaagaatcacacctattgctacaacgaaggggatctgcaaaaaacactgcagggtttcggtgagaaggccaattacacaatccagcgtttcaagggccttggcgaaatgatgcctaagcagttgtgggaaaccacgatggaccccaccacccgaacgatgaagcgggtggagattgaggatgctctggaggcggatcgcatcttcacgattctgatgggcgacaaggtggcaccac

SEQ ID NO: 295358 - DNA, 2419 bp, Unknown
  Bacterial polypeptide expressing nucleotide sequence isolated from the Sargasso Sea
atgtcagagaatagttacgattcttcgagtattaaggtccttaagggccttgatgcagtacgtaagagacctgggatgtatattggtgataccgacgacggtacgggtctacatcatatggtgttcgaagtagtcgataactctatcgatgaagccttagcgggccattgtactgatatcacaattactatccatgtggatggttcggtttctgttaaggatgatggccgtggtattccggtctctatccatgaagaagaaggtgtatcggccgcagaagttatcatgacggttctgcatgctggtggtaagttcgacgataactcctataaagtgtcaggtggtctgcacggcgtaggtgtgtcggtggtcaacgcgctttctaaaaagctgcaattaaccattcgtcgcgatggtaaagtccacgagcagttttacacccacggtgtacctgatgcgccaatcaaagagattggtgatgcaactaaaacgggtaccgaaatccgtttctggccaagtgagcaaactttcagtgatgttgagtttcactttgaaatcctggctaaacgggtgcgagaactatcgttccttaactctggtgtggggattcgcttagtcgacgagcgtgataataaaaacgaattctttaaatacgaaggcggtatcagcgcattcgttgattacttgaatcgtaataaaacgccggtaaacaaagatgtattccactttatgcaggagcgtgacgacggcattaccgttgaagtggcgatgcagtggaacgatggttaccaagaaaacatattctgttttaccaacaacatcccgcagcgtgacggtggtactcacttagccggtttccgtagtgcgttgacacgtaacctcaacaactacatggaaaacgaaggttataacaagaaaggcaaaaccaatgcgactggcgatgacgcccgcgaaggtttaacggctgttatctcggttaaagtgcccgatcctaagttcagctcgcaaaccaaagacaagctagtgtctagcgaagttaaagccgcggttgaacagaccatgggtgaaaagctaaacgactatctgcttgaaaatcctgccgatgctaagttaatcgttggtaagattgttgatgcggcccgtgcccgtgaagcggcgcgtaaagcccgtgaaatgacccgtcgtaaaggcgcgcttgatttaggtggtttgcctggtaagctggccgattgccaagagaaagatcctggtctttcagaaatctacatagtggaaggggactctgctggcggtagcgctaagcagggacgtaatcgtaagaatcaagcgattctgccactgaaaggtaaaatcttaaacgttgagaaagcccgtttcgataaaatgctgtcttctcaagaggttgcaacactaatcaccgcacttggctgtggtattggtcgtgatgaatacaacccagataagactcgctaccacaacatcatcatcatgacggatgctgacgtcgacggctcgcacattcgtaccttgctgttgaccttcttcttccgccaaatgcctgaactgattgaacgtggttatgtgtatattgctcaaccacctttattcaaagtgaagaaaggtaagcaagaacaatatctgaaagacgaagcggcactgactcagtatttgaccactcaagcgttagatggcaccagcatttatccatctcaaggtgcgccaggtatgtcgggtgagccattagagcgtttagtgacgcaataccgcgaagtagaggcgattgttgcccgtttagagcaacgttatccaacgcatatcactaatcggatgctttaccacccaatgatcagcaatgagatgttggccgatgaagctaagatgaaggaatggatagacgcctttatccatgagttggtggaattagaaaatagcggcgtgctgtattctggtgagcctgtactcgatcctgagcgtaaagtgtatctgccaaagatcaccattcgtaaacatggtatcgacacgcattacctatttagctatgacttcttccaatcaatggattatcaacgtattgctaagttaggtgcagccctagaaggcttgattgaagccggtggttatgtgcaacgtggtgaccgagtgaaagaagtcggcagcttcattgaagcactagattggacgatttcagaagctaaacgtggtttatatatccaacgttataaaggattgggtgagatgaaccctgagcaattgtgggaaaccacaatggatcctgaatcacggcgtatgctgcaagtgaccattgatgacgccgtcggcgcagaccaattgtttacttgcttgatgggcgatcaagtagaaccgcgtcgtgagtttattgaagccaacgcgctgaacgtggctaacttagacgtttaat

SEQ ID NO: 295359 - DNA, 621 bp, Unknown
  Bacterial polypeptide expressing nucleotide sequence isolated from the Sargasso Sea
ttcaagcagcacaagctagagatgttgcaagaaaagcaagagaaacagtacgtagaaaaggagccttagagttaacaggcttaccaggaaaacttgctgattgtcaaaattcaagccaagaagaaactgaactttttattgtagagggtgactctgcaggaggatcggcaaaacaaggtagaaatagagagtatcaagccgtattacctttgaggggaaaaatacttaatacttatgttgacacaaacggaggaaaaaaaagaggagaaaatgaaattcgaacaaaaactttatcaaaaatgatttcatcaaatgaaataatgactttaataaatgctcttggattggaccctaaagatgaggaaatagaattgaaaaacctaagatatggaaaggttattattatgactgatgctgatgtagatggatcacatatcagagcattacttttgactttttttaacaacaaaccatttaacaagcttatcgaaaaaggtcatatatatttagctcagcctccactttttaaaataaataaaaatggaaaaattacttatataaagatgagaaggaacttgaaaactttattgaaaagaattcaaaggaacttaaaaaaataaa

SEQ ID NO: 295360 - DNA, 1090 bp, Unknown
  Bacterial polypeptide expressing nucleotide sequence isolated from the Sargasso Sea
tatgtctgatattgttgattctgagaattctggtttgagtgaaaataacgatcgaatcattcagactgatttaagaaatgagatgtcacgctcttatctagagtatgcgatgagtgttatcgtcggacgtgctctccctgatgcaagagatggattaaaaccagtgcatagaaggattttatatgcgatgtatgagcttggtttaacaagcggtaggccatatagaaaatgtgcgagggtagttggagaggttttaggaaagtaccatcctcatggagatactgctgtttacgatgcattagtacgtatggcacaggatttttctatgagaatgccattaattgatggacatgggaacttcggatccgtagataatgatccccctgccgcgatgagatatacagaatcacgtcttcaatccctaacagatgaaagtttgctcgaggatattgaatctgagactgtggatttttccgataattttgatggctcacaacaagaaccaaatgtattaccagctaggatcccccaactcttattaaatggatcatcaggtattgctgttggaatggcaactaatatacctccgcataatttaggagaattaatcgatggtcttaaagctataatcaaaaatccctcaacagaagataaagaactttttgaattaattaaaggaccagattttccaactggaggccagatattaggaagagatggtatcagagagaccttcaaatctgggaaagggtcaataacgatgagaggtgttgcagatattgaacaaatcaaatctcctgggagagcagaaaaagatgccgtaataattactgagcttccatttcaaactaataaagcagctcttatagaaagaatcgcagatctagtaaatgagaaaagattagatgggatatcagatattagagatgaaagtgatagagatgggatgagaattgtaattgagcttaaaagagatgcctatcctcaagttgttctaaataatttatttaaaataacacctctacaaaataactttagtgcaaatattttagctcttgtcaacggagaacctacaacccttctctcagaa

SEQ ID NO: 295361 - DNA, 2059 bp, Unknown
  Bacterial polypeptide expressing nucleotide sequence isolated from the Sargasso Sea
aatgataaaaaaaaatacaaacaattatcaagcagactccattaaagttcttaaaggtttagaggcagttagaaaaagaccaggcatgtacattggagataccgatgatggaactggtttgcatcatatggtttatgaggttgttgataactcaattgatgaggctttagctgggcattgtaaaaacatagaagttaatatcaactctgatggatcagttactgtcaaagacgatggaaggggaattcccacagatattcataaagaagaaaaaaaatctgcagcagaagttatcatgactcaacttcatgctggaggaaaatttgatcacgactcttataaggtctccggtggactacatggagtaggtgtttctgttgtaaatgctctttcagaaaacttacaacttacaatcaatagagatggaaaaaaatattatattgaatttaaaaatggagactctgtttctcctttaaaagaaaaaggaagctctaaaacctcaggcactgagattcgatttctgccatcaaaaaaaattttttcctttactaaatttagtttttctacaatacaaaaaagattacgtgaattagcttttttaaataaaggaattaaaattgtattaaatgatttgactttaaaaaaaatcaaaactttagaatttaaatttgatggaggaattaatgaatttgttgagtttcttgatgaaaaaagagaacacttaaaaaacaaaaatgacaaagatttatttaaaaaaccaatatatcttgagggtcaaaaaaataatatagatattcaatgctccttaaagtggaattcaggatatagcgaagacgtttatccatacacaaataatatttaccaaaaagatggaggaacacatttgttaggcttcagaagtgcattaaccagggtcataaataaatacgcgactgaacagaatttgcaaaaaaaaaacaaagtagctttatctggtgatgatgttaaggaaggtttaacatgtgttttatctgtgaaaattccagatccaaaattttcttctcaaactaaagataaattggtttcatcagaagttagaaatattgttgaaacgatcgtaaatgaaaaactatcaatttggtttgatcaaaacccttccatctcaaaaattattttaacaaaaattattcaagcggcagttgctcgagacgtggcgagaaaagccagagaaaatgtaagaagaaaaggtgccttagagctaactggtttaccgggaaaacttgcggattgtcaaagttcgaaacaagagggaacagaattgtttattgtagagggagactctgcaggaggttcggcaaaacagggaagaaatagagaaaatcaagctgtccttcctttaagaggcaagattttaaatacttatgttgatcttaatgactcaaaaaaaaatggcagtagttcagagttacgaactaaaacactttcaaaaatgatatcatcaaatgaaatagttaccctgatcaatgcacttggattagatccaaaagcggaggaaattgatatgaaagatttaagatatggaaaaattattataatgactgatgcagatgttgatggttctcatatcagagcgctccttttaacattttttaataatgcgccatttaataaattaatcgaaaatggaaatatttatttagcccaacctcctttatttaaaataaataagggcacaaagggtatttacataaaagatgataatgaactagaaaattatatactaaaaaatacaaagtctttaaaaaaatacaaaaaaggatcaaaagaatttaacaattttattgagagcgaaaaatcgcatttaagtattcaaagatttaaaggattaggagaaatgaatccagatgaactttggaatacaactttaaatcccgaaactagaaatttattacaggttcaatattcaaaggatatcaaaaaagatcaagaaattattcatactttgatgggtaatgatgtttcttcaagaagagatttcattgtatctaatgctattaatgttttaaatttagatatttaa

SEQ ID NO: 295362 - DNA, 1318 bp, Unknown
  Bacterial polypeptide expressing nucleotide sequence isolated from the Sargasso Sea
attttaaaaaaacccatttatttgtcaggagaaaaaaacggcgtaaaagttgaatgttcattagaatggaatgctggattttctgaagaggtgttggcttttacaaacaatattcaccagaaagatgggggtacccacttacttggttttagaagtgctttaacgagaattattaataaaaatgtttcagaaaaaaatcttaataaaaaaaataaattaagtattggaggtgaagatataaaagagggtcttactgcagttttgtcaattaaaatgcccgaccctaaattttcttcacaaactaaagataaattggtctcctcagaaattaggatggtagtagaaacaatagtgagtgaaaaactttctacttggtttgatcagaacccttcaatcgtaagagtggtgttagacaaaattttacaggcagcaattgcaagagatgttgcaagaaaagctagagatagcgttagaagaaaaggttctttagaattatcaggtctacctggaaaattagcagattgtcaaatttcatcaatggagggaaccgagttatttattgtagagggagactcagcaggcggatccgctaagcagggaaggaagagagaattccaggccgtactacctttaagaggaaagattttaaatacgtatattgatgagagtaaaagaaaaataaatggaggtaatggagcaatagagaataaaactctatcaagaatgatgtcatcgaatgaaatagttactcttattaatgcactgggaacaggatctaaggactttaatttagaaaacttaaggtacgaaaaaattattataatgaccgatgctgatgttgatggatcacatataagaactctattactcactttctttaataatcacccatttaatgaactaattgaaaaaggacatttatatttagcaagaccacctttattcaaaattaccaaaggaacaaaaagcacttatatcaaagacgaaaaagatttggaaaaatatatattaaaaaattcagaaaatggtgttaaaaaatttaaaaaagtagaattagaagaatttttaaataaggaaaaacaaaacttaaatattcaaagattcaagggtttaggtgaaatgaatcccgaagaactatggcaaaccactttaaatccagaaaatagaactttattaagagttgaatactctaagggaaccaaaattaaatcgaaagatgatcaaaacattattaaaatacttatgggtgatgaagtagcgccaaggaaagactttataaccgaaaaagctcttgaggtaaaaaacttagatatttaat

SEQ ID NO: 295363 - DNA, 2521 bp, Unknown
  Bacterial polypeptide expressing nucleotide sequence isolated from the Sargasso Sea
atgagttcattttatctatcatatgcaatgagtgtaattgttagtagagctcttccagatgttagagatggtttaaaacctgtacatagaagaatattatatgcaatgtataagggtggttatgattggtcaaaacaatttagaaaatctgcaagaatagttggagatgtaattggtaaatatcatccgcatggtgatcaatcagtttatgacgctctagttcgtatggtccaagatttttcaatgagcttacctctcgtggatggtcaaggaaattttggatcaatagatggtgatccagcagccgctatgagatatacagaaactagattatcaaaagtctcacaatttttaatcgatgatattgaaaaaaatacaattgattttaaaagtaattatgatgaaacagaaaaagaaccatctgtattacctgcgcagtttccaaatttattagtaaatggagcagggggtatcgccgttggtatggcgacaagtattccacctcataatttaggagagattattaatggtacattagctttaattgataataaagatataaaaattaaagatttaatgaagcacatacctggacctgattttcctacaggaggtgtaattattggtaaagatattattaaacagggttataacaaaggtagaggttcttttaaaatcagaggtgaaatatcaaacgaaactcttaaaaatggtagagatagattagttataaattctattccttatcaagttaataaatctgtgttgaatgagagaatagcacaattagtcagagaaaagaaaatagagggtattagagatatacgagatgagtccaacagagaaggtataagagtctctatagatttaagaacaggcgttgaacctgagactgttaaaagacaattatacaagaacactcaaatagaaagttcatttgggtttaatactcttgcaattgtagatgggaagccaaagacttgtaatcttaaagaatttttagagaattttttaaaatttagagaagatgttgtactcaagaaaacaaaatttgatctcaataaagcagaggatagagcgcatatcttaattggtctatcagtatccgttgagaatttagataaagtaataaaaattataagaggttcaaaaactccagatgatgcaaaaaaatctttattaaatactaaatggaaaattaataaatcaaaaaaaatggtttcattgatagagaccaaaaattcaaaaggtttatataatttatcagtagtgcaagttgaagctatattagaattaagattacaaaaattgacagcacttggtattaatgaaatagaagttgaaataaaaaaactatctgagttaatttcttcattaaaaaaaattatatcctcaaaaaaagaattattaaaagtaatcagcaatgaacttaaagaaataaaagaaaaatatgcaacaccaagaagaacaaaaattattgatgcagtacttaattacgacattgaagaaacaatacaaaaagaaactgttcttataactgttaccttacaaggctatataaaaagaggatcacttaaaactgtaaagattcaaaaaagaggaggtaaaggtaaaactggtatcacaactagaaatgaagactctgtagttcaaactctatcagttaatactcatacttctgttctatttttttctactgaaggtcttgtttataaagtaaaagcatggaaaatacctgaaggttcagcatcatcaaaaggcaaatctttatttaatattttgccacttaaaaatcatcaatcaataagttcaattatgccatttcccgaaagtgatgaagattcaagtaaatatcatatagtttttgcaacctcacaaggcaaagttagaaaaaacagtttagaagatttcgcttcaattaatacatcaggaaaaatagcaatgaagctagatactaatgataaaataattggagttaagatttgtaaagatgatcaagatataatcttaagtacaaaatttggaaaatgtattagatttgagtctaaaaaattaagaatatttaagggaagatcatcaaaaggtataaagggaatagaattagcatctaatgatgaaatagtctccttatcaattattgataataataagttaaagaaaaatggaaaaaatacaaaagatgataagtctgaattagcggcgaaacaaaaatttattttatctattagtgaaaatggttttggcaaaaaaacctcgcattatgactacagaacaacaaatagaggtggtaaaggaattattggaataatcaattcaccaaggaatgggaatattgcatcatcgtttcctgtatatgagggagacgaaataatgatttctacaaacaagggtagagtgataaggttagctgttaaagaaatcagaacagctggaagaaacacacaaggagtaagaataattaagttatctggcgatgaaaaagttgtttcagcaattaaaattgatgataatttaatataat

SEQ ID NO: 295364 - DNA, 911 bp, Unknown
  Bacterial polypeptide expressing nucleotide sequence isolated from the Sargasso Sea
tagaaaaattactcaagctgctgtagcccgcgatgttgctagaaaagctagagacaatattcgaagaaaaggaaattttgaaataacaggccttcctgggaaacttgccgattgtcaaatttctaaaaaagaagggacagaactttatattgtagagggagactctgctggaggttcagctaaacaaggaagaaacagggagtttcaggctgtgttgcctttgagaggcaaaatactaaatacttacataaatactaatggcaggaatgccggtaaaactattgagaatcaaactaaagccctttcaaaaatgatgtcctctagtgaaatagtaacattaataaatgctcttggaacgggatcaaaagatttcaatatcgaaaatttaagatatgaaaaaatcgtaataatgaccgatgctgatgtagacggctcacatatcagaacgctacttttaactttttttaacaatcatccgtttaatcaattaattgaaaatggacatttatatttggctcagccaccgttatttaaagtaaccaaaagtaacaaaagccattacatgaaagatgaaaaagatttagaaaattttataattaaaaactcaagttttaaagaaaaaaaaggaaaaattaattctaaagaactcagtaaaattattgaacaagaaaagcaaaaaatttcaattcaaagatttaaaggtttgggagaaatgaatccagaagaactctggcaaactactttaaaccccgataatagaaatttactcaaggttcaatattctaacggtactaaagaaaagtcaaaagaagaccaaaaaattataagtattttgatgggtgatgaggttgctcccagaagagaatttattaccagtaatgctttagatgtagctaatttagatatttaat

SEQ ID NO: 295365 - DNA, 677 bp, Unknown
  Bacterial polypeptide expressing nucleotide sequence isolated from the Sargasso Sea
gatgacaaaaaataatataaatacttatcaagcagactcaattaaagttttaaaaggtcttgaagcagtaagaaaaagaccaggcatgtatattggtgatactgatgatggaactggtttgcatcatatggtctatgaagttgtagacaactcaattgatgaggcattagcaggccactgtaaaaaaattgaagtaagtataaattctgatggttcaattacagttgaggatgatggaaggggaataccagttgacttacataaagaagaaaaaaaatcagcagcagaagttataatgacacaattacatgctggcggaaaatttgatcatgaatcttacaaagtttcaggaggtctgcacggtgttggagtctcagttgtaaatgctctttcagaaaaattagaactacatgttgaaagagatggaaaaaaacattttgtagagtttataaatggtgaaactaaaataccactaaaagtaacaggcaaatcaaagaatactggtacaaaaatcatctttttaccttccaaggatattttctcatctacaaaatttagtttttcaattattcaaaaaagaatgcgtgaattagcttttttaaataaaggaataaaaatcatactaaatgatctatcccaaaaaaaagtaaagacacttgaatttaaatttgagggtg

SEQ ID NO: 295366 - DNA, 1583 bp, Unknown
  Bacterial polypeptide expressing nucleotide sequence isolated from the Sargasso Sea
gatgagctcatcatatctttcgtatgcaatgagtgtaattgttagtcgtgctcttcctgatgtgagagatggcttaaaaccagttcatcgaagaattttatttgcaatgtataaaggtggatacgactggtcgaaacaatttagaaaatctgcaaggatagttggggacgtaattggtaaatatcatcctcatggtgaccagtctgtttatgatgctttagtaagaatggttcaagatttttctatgagtctgccattagttcaaggtcaaggaaattttggttcaatagatggtgatccagctgctgctatgagatatactgaaactcgtttatcaaaagtttctcaatatttaatcgatgatatagaaaaaaacacaatatccttcaaaagtaattatgatgaaacagaaaaagaaccaagtgtcttacccgcgcaatttccgaatttgttagttaatggtgctggtggtatcgctgtgggtatggcaactagtataccaccacataatcttggagaaattatagatggaactttagcgctaattcaaaataaagatattaagattaaagaattaatgaagtatatacctggtccagattttcctacaggaggaattattataggaaaagacataattaaacagggatataataatggaagaggatcatttaaaattagaggcgaaatttctattgaacaacaaaaaaatggtcgtgaaagacttgttattacttcaattccatatcaagtcaataaagcagttttaaatgaaagaatagctcagttagtaagagaaaaaaaaatcgagggaattaaagatataagagatgagtcaaacagagaaggaattagagtagcagtggatttaagaaatggtatcgagccagaaactataaaaaggcaactttataaaaatactcaaattgaaagttcatttggcttcaatacattagccatagttgatggaaaaccaaaaacttgcacactaaaagaatttttatcaaattttttaacatttagagaggatgtagtaattaaaaaaactaaacacgatcttcaaaaagcagaggagcgagcacatattttaattggattgtccgtatctgttgagaacttagataagattatcaaactcattcgttcatctaaaacaccagatgatgccaaaaatttaattttaaaaacaaaatggaaaataaacaaaacacaaaaactaatatccttggttgagggaaaaaaaccaaagaatgtttactcgttatctgaacctcaagtaattgctatattagagttaagacttcaaaaattaacagctttaggtataaacgaaattgaagttgaaattaaaaaattagcggaattaatttcaaaatatagaaaaattatatcctctaaaaaggagttgttaaaagtaattagtgaagagttaaaaaatattaaggaaaaatttgcagtaccaagaagaacaaaaattatagatgcagttttaaattacgacatagaggaaacaattcaaaaacaatcagtaataatcaccgttacattacaaggttatattaaaagaggatctttagatggag

SEQ ID NO: 295367 - DNA, 927 bp, Unknown
  Bacterial polypeptide expressing nucleotide sequence isolated from the Sargasso Sea
actgtagagacggtcttaagccagttcataggagaatcctctatgctatgaatgaatctggctataattataacaagccctttagaaaatcagcaagaatagttggtgatgttatgggtaaatatcacccccatggtgatggagcaatttaccagtccatggttagaatggctcaagacttctctatgagattagaattaattgatggtcaggggaattttgggtcattggatggagatcctcctgcagcaatgagatatacagaagctaggcttgcaaaagtagctgaaaagattgttgctgatttggaaaaagaaacaataacttttcaaccaaactacgatgacagtactctagaaccatctgttttacctgcgcaatatccaaatttacttgtaaatggtgcatctggaattgctgttggaatggccactaatattgctcctcacaatcttggtgaagtaattgaagcgactcttcatttgattgaaaatccaaatgcagaattagtagatttgactaagtatatactaggtccagacttcccaactggaggtcagataattggaaaaaaaggtatcatagatgctttccaaactggtaaaggaggtgttgttcttagatcaaaaacttcaattgaaaattttaaaaaagatagagaggcaataataattcatgaaattccttatcaggttaacaaatctaagctgatagaaagaattgctgaaacagcaaaaaataatattattgaaggaatatctgatcttagagatgagtctgatcgtaatggtgttcgcgttgttgtagaacttaaaaaagatgttgatgcttatattattttaaatcaactttataaaaacacacttcttcaaactacttttaattctaacatgttagctttgataaaggtaagcctgaacaaatgaa

SEQ ID NO: 295368 - DNA, 1264 bp, Unknown
  Bacterial polypeptide expressing nucleotide sequence isolated from the Sargasso Sea
aatgagtaaaaataactacggtgcagataaaatttctgtattaaaaggtctagaagctgttagaaaaagaccagccatgtatattggtgacgtaggaaaaagagggtatcaccatttagtcagtgaggttgttgataatagtattgatgaagctctggcaggcttttgtacgtctataatagttactataaaaaatgatggttttatatctattgaagataacggaagaggaattcctgttgaaatccataaaacagaaggaaaaccagcgcttgaagtggtcatgacagtattacatgccggaggtaaatttgataaaaatacatataaggtatctgggggtttacatggtgttggtgtttctgttgtaaatgctctttcagaaatcttaatagccgaagttcacagggatgggttttattataaacaagaatataaaataggagagcctacaacagaggtagaaaaaattggaaaaagcgataaaacaggaacaattatttcatttaaacccgaccaatctgttttttctcataaaggctttgaagaagaaataataaaaggaagacttaaagagctggcttatttaaataaaaatctttcaattaaattaataaatgaacccgaagaaactgaaacggaatattgttttcctggaggattatctgattttgttaaatatttagacggaaacgaagacctcattcatgacgaagttatttctgttacaagagaagacatagaggttccagtagatttagcactaagatatagcacaaactataatagtaatattttttcttttgtaaacaatattaatacaattgaagggggaacacacctttctggttttagatctgcccttacaagagcattaaacagttatgccaataaaaacgacttaattaaaacaaaaaagaatgaaaagttttctctttctggagatgacttcagagaaggattaacagttgttatttctgtaaaagttcaagaacctcaatttgaaggacaaacaaaaaccaagctcggaaatggtgaagttaagggaatggtagataatgttgtatatgatggaatacaggcgtttcttgaacaaaatccaaaagttggaaaaagaataattgaaaaggcagcagaggctgcaagagcaagaattgctgctaaaaaagcgagagaattagttagaaaaaaatctggattaggctcaacaaccctgccaggaaaattagcagattgttcaaataaagatcccctacaatgtgaa

SEQ ID NO: 295369 - DNA, 1440 bp, Unknown
  Bacterial polypeptide expressing nucleotide sequence isolated from the Sargasso Sea
attggcaaaaaaatcatatgattcaaaagcaattgaggttttatccggactagaccctgtcaggaaaagaccgggcatgtacacagatacgtctaatccaaatcatctcattcaagaagttttagataattccattgacgaggctctatcaaatttttgttccgtaattcagatttcaattcttaaaaatggtttcatagagatttcagatgacggaagaggtatgccagttgatatccatcctgagcataaagtttctggagtagagttaataatgtgtaagcttcatgctggtgcaaagttttctggtgaagattataatttttctgggggtcttcacggcgtcggtgtttctgtagttaatgcgctatctgaaaatctggaagtaagaattaaaagagactctaaagagtacaaaatttcttttagtaacggagaaaaaaaagatgatcttgaagaaattggtcaagttggtccaagaaatactggaacctcagtaaaatttatacccaacccaatttattttgaaactattgaggtgcagcttaaagaactaaaacatcttcttaaagcaaaagcagttttgtgccctggtttgagaataaagtttttttatgaaaaaaagaatgaaagagaggattggatatacgagaaaggcctgcaatcttacttgaaggaatcagttgatgaaaatgatttaattttaaatgaatctatcttagattcaaaaaagtcagaatcacaagagattcaatttgcagttaactggtctaataaaaacataaaaaataaaattagtgaaacttatgtaaatttaattccaacgtcgcaaggaggttcccatttaaatggatttaaatcaggactattagacgctttaaaagaattttgtgattatagaagtttattaccaaaaggcttaaaaataaatgctgacgacgtaataagtcatgctatatttgtagtatcttctaaattacaaaatccacaattttctggacaaactaaagaaagattagattcaaaagatcatgcattatttgtagcaaattctacaaaagatattttaagcatatggttgaatacacatacagaagagggagaaaaaattgcagaacttgcaatagattctgcacaaacaagagctaaagtatctaatattgttcagaggaaaaaaacttttaagggtccagcattaccaggaaaattgtcagattgtaatagcgaagatcttaacgaaactgaactttttttagttgaaggtgactcagctggaggttctgcgaaacaagctcgagaaagatcttttcaggccataatgccattaagaggcaaaatattaaatacttgggatttagaaagcagtgaaataattaaatctcaagagattaaaaatctttctactgcaattggagttttaccaggaacatctgacgtaga

SEQ ID NO: 295370 - DNA, 1984 bp, Unknown
  Bacterial polypeptide expressing nucleotide sequence isolated from the Sargasso Sea
attgtcagaaaacaaccaagattcaactaaaaaaaatgaaaaaataaattcttcaatagaaagagtagaaattgaagatgaaatgaagaagtcatatttagactatgctatgagcgtcatagtaagtagggctcttccagatattagggatggtttaaaacctgtacatagaagaatactttattcaatgtatgatggcaattatgattggaataaaccatacaggaaatctgctaggattgttggggaggttatgggtaaatttcatcctcatggagatagtgccatatatgaatccatggtcagaatggcacagaatttctctatgagtctaaagctgttagatggtcaaggaaattttggctcaatggatggagatccacctgcagcaatgagatatactgagattaggttaggcaaagtagccagtactttgcttgatgatatagataaagatactgtcaactttatagaaaattatgataactctttaaaagaaccatctgtattaccagcaaaatatcctaatttattagtaaatggagcaggtggcatagcagtaggaatggcaactaatatacctcctcacaaccttggagaaataattgatgcaactattttacttttaaaaaatccaaaaacggaggacagtgaaataaaaaaatgtattctagggcccgattttcctactggaggaataataataggaaatagtggaatacaaagttcctatattacaggtcgtgggtcaataatcataaggggtagtacagaaattgaaacaaatgcaaaagaaaaatcttctataattattaatgaaataccttatcaagtcaataaatcacgtttagtggagcaaatagctgattgcgtccgtgcaaaaaaaatagaagggattacagatttaagagacgagtctgacaaagacggtgttcgtatagtagtagaactcaaacgtgatgctacagcagaagtggtattaaatcaacttcataaatttacatctttacaaactagttttggtacaaacattctagctttaaaaaatggaatgccaacccagtttggaattagagagatactagaaacatttatagattatagaattgaagtgataatcaaacgtacttcatttgacttaaataaagcaagagaaaaagaacatattttaataggtttagctatagctatagaaaatatagataaaattatagaaattataaggtcatcgaaagactcttctgaagctaaagaaaatcttgttaagaataaatggcaatcaaaaaacttagtttctttattaaaaaaacataaagatgatagattattaaataaaattgaaggagcaatgtatctttctgttgaacaagcaaaagcaattttagagttaaggttgcagagacttactggattagaaagaaataaggtagaaactgatttattagaaatatcaaaaaaaatagcagaattattaaaaattctctcttcagataagctgattagaaaaataataatagaagagttaagtgatattaaaagcaactatgctgtagatagaagaactaaaatatttgaaaattatgaagaaaaaaatattgatgatttaattgagaaagaagatgttgttcttactttaaccaactctggttacgtaaaaatagttccagtagatttttatagatctcaaaagagaggtggaaaaggaagatcaggaatgactacaaaggaagatgactttgttgaaaaagttttaactgtcaatagtcatgacatagttttatttttcacaaataaaggaacagtccatcaaattaaggtttataaactgccaaaaggctctcctcaatctaaaggaaggccactaatcaacgtaattccacttacagagaatgagctaacaacagctatgttaatattgcctaatgaagaaacagataaaactttgatttttgttaccaaatttggaaatgtaagaagaaataaa

SEQ ID NO: 295371 - DNA, 817 bp, Unknown
  Bacterial polypeptide expressing nucleotide sequence isolated from the Sargasso Sea
catggaaaaatctagtatagagaataaatcttttaaacctattttcgttcaagatgaaatgagctcatcttatttgtcttatgctatgagtgtaatagtaagtagagctcttccagatgtaagagatggactaaaaccagtccacagaagaattatatacgcaatgtataaaggcggttatgattggtctaaaccttttagaaaatcagcaagaatagttggagatgtaattggtaaatatcatcctcatggtgatcaatcagtttatgatgctttagttcgaatggttcaagatttttctatgagtctgcctttaatatcagggcaagggaattttggatcaatagatggagatcctccagcagctatgcgttataccgaaactaaactcggtagaattgcacaattcttaacagaagatttagaaaaaaatactgtaaattatagaaataattacgatgagactgagaaagaaccagaagttcttccatctcaatacccaaatatactagttaatggtgcaggcggtattgcagtaggaatggctacaagtatacctcctcacaatttaagtgaaattatcaacgcaacagtagcttatattggagacaaagatattaccataggtcagttgatgaaacatgtaccaggtccagattttccaacaggaggagtaattattggaaaagatattttaaaacaaggatacaataaaggtagaggctcttttaaaattagaggagaaatagatttagaagaaaaaaaagcaggaagagaatgtttgataatcaaatctattccttatcaagtcaataaa

SEQ ID NO: 295372 - DNA, 1270 bp, Unknown
  Bacterial polypeptide expressing nucleotide sequence isolated from the Sargasso Sea
tttgtatcaaggaggtattaaagaatatgttgaatatatgaatgctgaaaaagattctattcatcctgaaataatttacgttgattcacagaaagaaaatgtatatgttgaggcagctttgcaatggtgttcagatgtatattcagataatattttaggatttgcaaataatatcagaactattgatggaggtactcatattgaagggcttaaaacagttctgaccagaactttaaataatcttgcaaaaaagagaggcaaaagaaaagatattgaaaaaaatttagctggcgaaaatattagagagggtttgactgttgttttatcagtaaaagttccagatcccgaatttgaagggcaaacaaaaacaaaattaggaaatactgaagtacggggaattgtggattctctcattggggaggctctcacaaaatatatggaattcaatcctggaattttggacttgattcttgaaaaagcaattcaatcatttaatgcatcagaagctgctagaagggctcgagaattagtaagaagaaaaagtgttctagaaagttctacattaccgggtaaattagcagattgtagttctagagatccttcagaatcagaaatttatatagtagaaggagattcagctggtggatccgcaaaacaaggacgagatagaaattttcaggctattttgcctctcaggggtaaaattcttaatatcgaaaaaactgacgatactaaaatttataaaaacacagaaatacagtcattaataacagctctaggattaggaataaaaggagaggagtttaacgagagctctttgaggtatcatagagttgttattatgacggacgctgatgttgacggtgctcatataagaactttactgcttacatttttttacagataccaaagagaacttgttgagaaaggttttatatatattgcttgcccccctctttataaagttgaaagaggtaagaatcataattactgttataacgagaatcaattaaaggatacaattaaaggttttggagaaaatgcaaattataatattcaaagatttaagggattaggtgagatgatgcctaaacaattatgggatacaactatgaatcctcaaactaggatgatgaaaagggttgaaattgaagatgcacttgaagctgacagaatattcaatatattaatgggagataaagttgcaccaagaagagaatttattgaaactcatagcagtaacttagatatggctactttagacatatga

SEQ ID NO: 295373 - DNA, 1072 bp, Unknown
  Bacterial polypeptide expressing nucleotide sequence isolated from the Sargasso Sea
tcatttggcgggttttagaggaagtttaacaagagttctaaaatctttcattaaaaaagaaaatgcaaagaaaacgccaactgatttattgggagaagacgtaagagaaggtttaattgcaataatttcagtaaaagtgccagatcctaagttttcatcgcaaacaaaggaaaaacttgtctcatcagaagtagaaggtgtcgtaagtacaatttttagtaaatatttcaatgaattcctactggaaaacccgaaagatgcaatgagtattgttggaaaggtttctgaagcagctttagcaagagaagctgcaagaaaagccagagaaatgactaggagaaagggcgttcttgagattgctggattgcctggaaaacttgcagattgtcaagaaaaagacccaacactatctgaaatatatatagttgagggtgattcggctggaggatcagcaaaacaaggaagaaatagaaaaaatcaagcaattcttccgttaaaaggcaaaatcattaatgttgagaaagcaagaattgataaggtcttaggttctgctgaagttggcacacttataaaggcgcttggttgcggtattggtaaggaagattttgatattgagaacttaagataccatagaataataataatgacagatgcggatgttgatggatctcacatcaggacacttctattaacattcttttacaggcaaatgtatgaaattgttgaaaaaggtcatgtttatatagccttgccacctttatataaaatcacaaaaggaaaggagtttgtttatgcctcagacgaatctgaaaaagataatgctattaaaaaactttcaaaaaacggcactagaggcctagaagtgcaaagatataaaggtttgggtgaaatgaatccagagcaactttggacaacaaccatggatcctattaatagaagaatgatgagggtggatatcaaggacgtacaagatgcgaacgaatcatttgaaatacttatgggtgatgatgtagagccaagaagagagtttatagacgctaatgctttatctgtaagagagctagatatttag

SEQ ID NO: 295374 - DNA, 1885 bp, Unknown
  Bacterial polypeptide expressing nucleotide sequence isolated from the Sargasso Sea
gatgccgactaagaaaaaatctgctgcatcgaaaaccaccaaagccccaaaaaaagctcaaaaaaaagctcccaaaaaaaccaatcctgactcttacgattcgtcaagcataacagtgctaaaagggctggaagcagtcaaaaaaagacctggaatgtatataggagacacagatgatggaacaggtctgcatcatatggtctatgaaattgtagacaattctattgacgaagcgctggccggacattgcgacgaaatcacagtaaaaattattgcggatgattgtgtgtccgtttcggataatggaagaggcataccaaccgacatgcatgaagaaggcatgtctgctgctgaagtaatcatgacaaaattacatgcaggcggtaaatttgacgataattcttacaaagtgtctggtggtctgcatggcgttggagtttctgttgttaatgccctatcagaggacctcaagctaaccattcacaggggcggaaaaatccatgaacaagaatacgctgatggagctcccaagggaaagttaaaagttacaggcaaaacagataaaacaggaacagaagtaacattcgtaccatctccaaccaccttctcagacatcaatttccaatatgacgttcttgaaacaaaattaagagagttgtcttacttgaatgccggattaaaaataattcttatagacgaaagaagttctaagaaaattgaattttttcacaaaggcggcttggctgaatttgtaactttcctaaacacaaaaagaacaaccgttaattcagtttttcattttgtaaaagaagctgccgaaggaataacaatagaagtctcccttcaatggaatgacggttaccaagaaaatattcaatgttatacaaataatattaaacagcgagacggagggactcaccttgttgggtttagaactgctcttacacgcacactgaataactatatggaaaaggagggtatgaacaaagaaaaggtttctacctccggcgatgacgccagagaaggattggttgcggttgtctcggtaaaggttcctgatcctaaattttcttctcagacaaaagataaacttgtttcttccgaagttaggccggctgtggagcaagaaacctataaagctctaacagaatatctattagaaaatcctgccgaagctaaattgatagctacaaaaattattgaagcagcaagagccagagaggccgcaagaaaagcaagagaacttacaagaagaaagggagtgtttgagggaggaggattgccaggtaagctgtcagactgccaagagaaagatcctgcaaagagtgaaatctaccttgttgagggagagtctgccggtgggtctgcaaaacaagggagggatagacatttccaagccatactcccactaaaaggcaagattcttaatgtagagaaggcgagactagataaagtgctctcttcagaagaaattataattttaatatctgctctgggttgcgggattaagggagaagattggcaagaagaaaagttaaggtatcacagaattataatcatgactgacgccgatgtagacggttcacacatcagaacattactattgactttattttatcgccagatgccagaactaattgagaagggttacatatatatcgcccagcccccactatataaattaaagaagggcaaacaagaaacatatgttaaagacgactctgagctaagagagcttttagtggccgaaatattagatgatgcaaaattagttcttaacaaaaagggagaatccatcaccggtccaggccttaggaaaatttatttcccaacacgagaaagttcaaaacattttgaacggcttgactcacatttatcctgttga

SEQ ID NO: 295375 - DNA, 1501 bp, Unknown
  Bacterial polypeptide expressing nucleotide sequence isolated from the Sargasso Sea
taacattactggaactaaaattacatttcttccatcagagaaaaccttttcaaatatacagtttaattttaaaacaatagaaaaacgattaagagaattagcttttttaaatactggtgtgaatattcaattaattgataaaagaccagcaaaagaaatttcaaatcaatttaaatatgaaggtggtattattgaatatgtaaaatatttaaatgatggaaagaatataatacataatgatccaatatttttttcatcaaataaaaacaatgttaccgtagaatgttctttacaatggacagatagttatcacgaaaatactttatgttttactaataatatatctcagagagacggaggaactcatttagctggttttagaggggcacttactagaagtattgttaattatattaataaaaatacaaaaaatggtaatagtgtttcaggtgatgatgctcgtgagggattaacatgtataatttcagtaaaacttccagatcctaaattttcaagtcaaacaaaagacaaattagtttcctctgaagttagaccagttgttgaatcaataagtttagaaaaattagaacaatggatggaagagaatccgaatgaaataaaaaaagttattgataaagtaattgaagcatcaaatgccagagaagctgcgagaaaagctagagagttaactaggagaaaaacaggtttggaaaactcatcacttcctggaaaacttgctgattgtcaggaaaaaaatccagaattttctgaattattcatagtagagggtgattccgcaggtgggtctgcaaaacaaggaagagatagaaaaaaccaagcaattcttccattaagaggtaaaatattaaatgtagaacgtgcaaatcctagacaaatattaacgagtaatgagataggaatattaatcaccgcgattggtgctggtgttggtaatccatctgggaatgaacaacaggataagaatgaaggtaagtttgatttgaataagatgcgataccataaaattattataatgacagatgccgatgttgatggaagtcatatcagaacattgcttcttacttttttttatagacatatgcgaccaatgattgaagcaggtcgtttatttatagcgcaaccgcctctttatagatctaaaaaagggagttcaattcaatacataaaagatgagaaagaaatggagcaatatttaattaatgaaggttcaaaaaatttaatttttgatactatttcttctgaaaataaacaaataaatattagcaatcaagatcttataaaattaattaatctatcaaaagaagtacaaaaattagttcaacaactagctagaagaattgataataaacttgtaattgaacaagcagcagtaattgcagctttaaaacctgaatcgttacagaataaaaaagttggtcaggaattagctaaatatttagaattaagattaaatactatacaaggcaaaatgggaaagttc

SEQ ID NO: 295376 - DNA, 334 bp, Unknown
  Bacterial polypeptide expressing nucleotide sequence isolated from the Sargasso Sea
atgcccaaatcaaaaaaaagcactgaaacaaaaaattacgactcctcaaatatcaaagtcttaaaaggactcgatgctgttcgcaaaaggccaggcatgtatattggcgacacagatgatggaacaggccttcatcatatggtctacgaggttgttgataattccgttgatgaggcgctggcaggatactgttcagaaatatctgtaattatccaccaagacgactctattactgttaaagacaacggtagaggcgtacctgttgacaaacacaaaggaaaaaataaatctgctgcagaagttattatgactgttcttcatgctggcgggaagt

SEQ ID NO: 295377 - DNA, 430 bp, Unknown
  Bacterial polypeptide expressing nucleotide sequence isolated from the Sargasso Sea
atgaatactgaatattcttctgactcaattaaagtcctaaaaggattagaagcagtcagaaaaagacctgggatgtacataggagataccgacgatggatcaggtcttcatcaaatgatttacgaagtgcttgataattccatcgacgaagctttagctggattttgtgataatgtagaagttgttctgaatgtagatggtacagtaaccgtcagtgataatggtcgaggaattcctgtagatttacataaaacagaaaaaatatctgcggcacaattaataatgactgaactacatgcaggaggtaagtttgatcaaaatagttataaagtatcagggggtttacatggagtaggtgtttctgttgtaaataccttatcagaatttctaattctagaaattaatagagatggaaaaatttataatttag

SEQ ID NO: 295378 - DNA, 490 bp, Unknown
  Bacterial polypeptide expressing nucleotide sequence isolated from the Sargasso Sea
atggcaaataaatcaccaaagaaacaacctaagaaaaagcccaaaaagcaggacgattatggcgcagaggcaataaaggttttaaagggccttgaggcagtaaggaagcgtcctggtatgtatataggcgataccgatgacgggtctggcttacatcacatggtttatgaagttgttgataattctgtagatgaagctttagcggggtactgtacaaaaatttcagttatattgaatgcagacgaatcagtaacggtcaaagatgatggaagaggtattccaacagaaattcataaagatgaaggcgtatctgctgcggaagttattatgacacaattacacgcaggtggtaaatttgaccagaattcatacaaggtttccggcggtttacacggtgtcggagtatcggttgttaatgcattatctgaaaaactagatctaacaattaaaagggatgggaaagaacattttatgtctttcacgaatggtg

SEQ ID NO: 295379 - DNA, 1134 bp, Unknown
  Bacterial polypeptide expressing nucleotide sequence isolated from the Sargasso Sea
agatggagatccgcctgcagctatgagatatacagagactaaacttggtaaaattgctcaacatctaacagaagaccttgaaaaaaatactgtaaattacagaaataattacgatgacactgaaaaggaacctgaagttctcccctcccaatatcctaatatattagtcaatggagcaggtggaatagctgttggaatggctactagcattcctcctcataacttaggggaagtaataaacggcacaattgcctttattgaaaataaagacatcactatcgggcaattaatgaaacacgttcctgggcctgatttcccaactggaggcataattattggaaaagatattttaaaacaaggatataacaaaggaagaggatcttttaaaatcagaggagagattgacctagaagaaaaaaaagggggcagggaatgtttaattataaagtctattccttatcaagtaaataaatctgtacttatagaaaaaattgcacaattagttagagacaaaaaaatcgaaggaataagagacataagagacgaatctaatagagaaggcataagagttgtgattgaactaagaaaatctgtagagcctgagactattagaagacaattatataaattaactagtattgaaagctctttcggatttaacacacttgcaattgtaaataagaaaccaaaaattttaaatttaaaagaatttatttcagaatttttaaaattcagagaagatacggtggttaaaagaattaaatatgatttaaaaaaagccgaggaaaaagctcatatcttaattggtcttgcaaccgccgttgaaaacattgatgaaattataaaaataataaaaaattccaaagatactgaaattgcaaaaaaaagtcttttatcaaaaaaatggaagattaaaaaaagtgtaaaacttatttcattaattgaaaaaaagaaaagcatttcaagttaccaattatctacagtacaagtaaatgctattcttgaattaagactacaaaaattgactgcatacggaattttagaaattcaaaatgagatcaataaattatcagatatgataattgaatttaataaagtattaaattctaaaaaagaactttataaattaatagt

SEQ ID NO: 295380 - DNA, 346 bp, Unknown
  Bacterial polypeptide expressing nucleotide sequence isolated from the Sargasso Sea
gatgagttcgtcttatctctcttatgcaatgagcgttatagttagtcgtgctcttccagatgtaagagatggtttaaagccagttcatcgaagaattttatacgcaatgtataaaggtggttatgactggtctaaacaatttagaaagtcagcaagaatagttggagatgttattggtaaataccatccacacggcgatcagtcagtttatgatgcactagtaagaatggttcaagatttttcaatgagtttaccgttagttcaaggtcaaggtaactttggttcaatcgatggcgatcctgcagctgctatgagatatacagaaactagattatctaaagttctc

SEQ ID NO: 295381 - DNA, 1360 bp, Unknown
  Bacterial polypeptide expressing nucleotide sequence isolated from the Sargasso Sea
agaatagttggtgatgtcttaggaaaatatcacccgcatggagatagctctgtttatgatgcgttagtaagaatggcacaaaacttttctatgcgatatcaacttgtagatggacaaggaaactttggttctattgatggtgataatgctgccgctatgagatatacagaatcgagaatgactcgacttacaagtgaaatgttaagagaccttgataaagaaacagtaagctgggatctaaactttgatgaaacactaaaagagccttccgttttaccttcagcagttccaactttattaataaatggatcagaggggatagcggttggtatggcgacaaaaataccaccccacaatctaaaagaagttgttaatggcttagtggcaataattgataacaaaaagatatcggttgaagagttaatggagcacgttaaaggcccagattttccaacagcaggttttattatgggtatggatggtttaaaagatgcatataaaacaggtcgcggaaagattaaaatgagggcaagagctcacatagaaacaacaaaaacaggcaaagacagtattgttataacagaggttccttatcaaacaaacaaagccagtcttgttgaaaaaattgcagaccttgttcgtgataaaaaagttgtcggtatttcagaccttagagatgagtcagataaagacggtattcgtgttgtcatcgaaacaaaaagagatgcggttccagaagttattttaaaccagctatatcagtttacccaactacaagacacttttggtattattttactcgcgctagtagagggcattccaaaaatcatgccattaaaaacaatattaaatcactttattgactttagacatgaaattgttgttaaaagaacaaagtttgaattaaaagaagcggagggaagagctcatatattagaaggattaaaaatagccctagacaacattgatgaggttattgccattattagaggaagcaaagacccctcacaggcaaaagagggcttaatgaacggctttgatctgtctgaaacccaatctcaagcaatattagacatgagactccagagacttacaggccttgaagtcgataaagtcgtagcagaatacaaagaactgttaaaagtaatatctaatctaaaaggaatcttggaaagcaaaaacaagagaatggagataataaaaaaagaactcatagggattagagatcaatatggagatgaacgcagaacagaaataatacaagttgactcaaacttttcaatggaagacatgattgctgaagaagaggtggttttaaccatcactcaccagggatatataaaaagaaccgcgcttaata

SEQ ID NO: 295382 - DNA, 1027 bp, Unknown
  Bacterial polypeptide expressing nucleotide sequence isolated from the Sargasso Sea
attaaaatttttagtcataaaaatcaattaactaaatatcaaaatataaatatcaacgacatatttgactatactaataccttaatttctatttttattaattctccaagttttgaaggacaaacaaaaaaaagaattacaatgcctaaattacaaaaacaattagaggagttattacaaaaccaaattttattatggttaaatagtaataaaagagaatcgttaaagcttatagaaatactaattgaacgagctttattaagaacagatttatcaaagataaagaaattagatagaaaatctataaaagaaaaaaataggttacctggtaaattagtagattgtacaagtaacacaatagagaatactgaactctttatagttgaaggagatagtgctggaggttcggcaaaacaagcaagattcagatctactcaggccattcttcctcttaaaggaaaaattttaaatgtttatagtgtttcattatcaaaaattgcagataataatgaaattcaaaatcttgttcactctcttggttgtggactaggaaaaaactttcaattatctaaattaagatatgaaaaaattattttgatgactgatgcagatgttgatggatctcatatagctactttattaattacttttttttataaatatatgagaaaaattattgaagaaggaaaactttatttagcaatgcctccattatataaaatttcttataaccaagagaatttttttgcatacaatgaaaaggataaggacaaaattcttaatgataataaaggatcgccacaacttacacgttttaaaggacttggagagatgccagcaaatcaattaaaagatacaacgatggatccagaaaaaagatctttaatacaattaaaattagctgatggtattaaatataataaacaaactgaaaaactgtttgaagacttaatggggaaaaaagcagagaaaagatttaattttattcaagaaaatgctaactttataaataaccttgatatataat

SEQ ID NO: 295383 - DNA, 1502 bp, Unknown
  Bacterial polypeptide expressing nucleotide sequence isolated from the Sargasso Sea
aatgaaaaacgatttaaaaacaaataataatcaagcatatcgagcagactctataaaagttcttaaaggattggacgcagtaagaaaaagaccaggaatgtatattggtgatacagacgatggttctggcttacaccatatggtttttgaggttttagacaactctatcgatgaagcgatagtaggtttttgtaagaatattaaagttactatgcataaaaataattcagtcacagtggaagatgatgggagaggtatccctgtagatacccataaaggtgagaaaaagtctgctgcagaagtaataatgacacaacttcacgcaggaggaaaattcgatcaaaactcctataaagtttcaggaggattacatggtgtgggtgtttcagttgtaaacgctttatctgaaaaattagatctaactatttatagagatcaaaaagagtattttgtctctttcgagaatggaaagacaataaaaccaataaaatttttaaataaaacaaaaaaatctggaactaagataaattttttaccctctaaagaaacattttcatcaattaaatttagtgccgcaacattacagaaaaaaataagagaattagcttttttaaacaagggtttgaagatagatttaatagatgagacgcactcaaaacccaaagtttatgaaaataaatacgatggaggaataagcgaatttgttacatttttagatcaaaagaagtctattttaattaataaaaatgaaaaggctgtcttcaaaaagcccctttatttacagggtcaaaaaaacaatgtaattgttgaatgctctttgcaatggaacgcaggttattcagaagaagtcttaccatttacaaacaatattcatcaaaaagatggaggtacacatcttttaggctttagaagctcattaaccagaattatcaataaatatgcttccgaaaaaaatcttaccaaaaaaaataaagtaactattggaggtgaagatgtaaaagaaggtcttacagcaattttatcaattaaaatgcctgatcctaaattttcatctcaaacaaaagataaattagtttcctcagagatcagaaatatcgtagaaacaattgttggtgaaaaaattgcagtgtggtttgaccaaaatccatcaattgttaaatctgttttagataaagtcttacaagcggctttagctagagatcttgctagaaaggccagggatagcgtcagaagaaaaggaacattagaattatctggtttaccgggtaaattagcagattgtcaaatctcatctatggagggcactgaattgtttattgtagagggagactcagcaggaggatccgcaaaacaaggcagaaaaagggaatttcaagcagttttgccgttaaggggaaaaattttaaatacttatgtaaatgaaaataaaagagttaatggggcaaatggagccaacgaaatgaaagcattatccaagatgagtcttcaaatgaaattgtaca

SEQ ID NO: 295384 - DNA, 1543 bp, Unknown
  Bacterial polypeptide expressing nucleotide sequence isolated from the Sargasso Sea
tcgcaacgaccgggaatgtaccatcggaagtacgtcgacgaaaggtttacatcacttggtatgggaagtgttagacaactctgtggatgaggttcaagcgggacatgcgagtcacgtgagagtgacggtcgaatcagacggttttgtcagcgtgatggatgacggtcgtgggatcccaaccgatatccaccctgttaccggcaagagttcgctggaaacggttctcaccattttacacgccggtggtaagtttggtggagatgatagtggatatcatgtctctggtggtcttcacggggtaggtatttccgtcgtcaacgctttgtctgaggcggtggacgtgacagtgtggcgagatggaaaagagcacgcacagtccttcagccgaggcttgtccctcggaccgatgactgagaaacaacagcagggatctggacgacagaagggaacgatgattcgtttcaaaccggacgatcaaatctttgacaaggtgaagtttgacgctaatatcattcgcacgaggatgaaggagttggcgtttttgaacagtgggactgagctgcacttgagaacgtatgacaagaagacggattctcacaaggatgaaaagctgctttttgcggatggtctgaaagattatgttttagatttgacgtccgatgcgactcgtttacatgacccgattacgtttagtggggtcatggagggagtacgcgtcgagggggcactttgctggaccgcagactcgtactccgacacgctgttgggttacgcaaacagcatccgaactaccgacggtggcacccatctcgatggcttaaaatacgctctcacacgatcgatgaatgcaatgagtcgtaaagcaaagttgctgaaagattctgatggcaacctaggcggagatcatgtacgcgaaggcttgtccggtgtaatcgccgtttgggtccctgagccagaatttgagggacagacgaagacaagattaggtaacagcgaggttcgaagaatcgttgaaactatagctaatgatgcggtaacgactcacatggagttcaacccctcagtcctgaagtcagttttcgccaaggcgcagtctgcttacaaggctgcggaagccgcgaagagagcgcgagaaatggtgagacgtaaaacggtgttgacggcaaaccgtttacctggaaaattatcggactgctcgtcttccgatgctgagcggactgaaatattccttgtggagggagactcagctggaggtagctgcaagcaagggcgcgatagaagttttcaagcggtgcttccgttgcgaggtaaaatcatgaacgttgagaggaagcttgatgcagccgcactctacaaaaacactgaaattacaaacatgatttctgccttgggactcggtgaaatgggtgaagatctcgatacaagcgctcttcgatactcgaagataatcatcttgacggatgctgacgttgacggggcacacatcagaacattgctactcacatttctctatcgttaccaacgagacttgtttgaaaaaggg

SEQ ID NO: 295385 - DNA, 433 bp, Unknown
  Bacterial polypeptide expressing nucleotide sequence isolated from the Sargasso Sea
tatgcctaaaccaaaaaaaaataccaatacaaaaaattacgattcatccaacattaaggtcttaaaaggattagacgcagtccgaaagaggcccggtatgtacattggtgatactgatgacggcacaggattacaccacatggtttttgaggtcgttgacaactctgttgatgaggcattggcaggtttttgcacacacatagaggtgatcattcatgaggatgactctataactgtaaaagataacgggcgaggcatacccgttgataaacataaaacagaaaagacttctgctgctgaggtcatcatgacagtattgcacgctggaggtaagtttgatgatgattcatacaaggtttctggaggtttacacggtgtcggtgtctcagtggtaaatgctttgtctgaaacgttaaacctaagaatacacaaa

SEQ ID NO: 295386 - DNA, 718 bp, Unknown
  Bacterial polypeptide expressing nucleotide sequence isolated from the Sargasso Sea
atgagtgaatcaatatttgaatctgatatagttcacgaaatgcgagactcttatatggagtacgccatgagcgtgattgtaggcagagcccttccggatgtaagggacggattgaagccggtacatagacgcgtgcttttctcaatgaacgaacaaggtaatgattacaataaaccctaccgaaaatctgcaaatgttgttggtgatgttatgggaaaatatcatccgcacggagacgctgcgatttacgacacagtagtccgtctttcacaggatttttcaatgcgctaccagctaattgacggacaggggaattttggctcagttgatggtgattctcctgcggcaatgcgctatacagaagtcaggatgcgacggattacgcatgagatgctggcagatctcgataaagaaacagtagactttataccaaattatgatgattcactcaaagaacctatagttttaccttcaaggattccaaacttactgaccaatggttcaaccggcatcgcagtgggtatggcaagcaatattcctccacacaatctcaatgaggtgatggaagccctcctttattacattgataatcgccacactgccactgtccaagaactaatgcagttcgtgcccggtccagactttccaacaggagggacaataatagggaagagtggaatttatgaagcctatagcaatggtagaggaataatacgta

SEQ ID NO: 295387 - DNA, 896 bp, Unknown
  Bacterial polypeptide expressing nucleotide sequence isolated from the Sargasso Sea
aatgagctcgtcatatttatcatatgcaatgagtgttattgtaagtagggctctacccgatgtaagagatggtcttaaaccagttcacagaagaattatttacgcaatgtacaaaggtggttacgattggagcaaaccatttaggaaatctgcccgtatagttggagatgttattggtaaatatcacccacatggagatcaggctgtttatgatgcacttgtaagattagtccaagaattttcaatgagtctacctttgatacagggacaaggaaattttggatctattgatggcgatccaccagctgcaatgagatatacagaaaccaaactttctaaggtttctcaatttttaactgatggtattgaaaaaaatacaatagattatcgaaacaactatgacgatacagaaaaagaacctgtagtacttccgtcacaatatccaaatctattagtaaatggtgctggagggattgctgttggtatggccacaagtattcccccacataatctaggtgaagtgattaatgggacaatagattttattaaaaatagagatataacaatctctcaattaatgaaacgtattccaggcccagattttcctactggtgggataattataggtaaagacattattaaacaaggatacaataaaggacgtggatcatttaaaattagaggagaaatagacgaagaagctcttaaaaatggcaaaactcggttaattattaaatccataccatatcaagttaacaaatctgtcttaaatgaaaaaattgctgatctctcaagagaaaaaaaaattgaaggagtaagcgatataagagatgagtctaatcgagacggaattagagttgtcgtagatttaagaagaggtattgagcccgaaacaa

SEQ ID NO: 295388 - DNA, 727 bp, Unknown
  Bacterial polypeptide expressing nucleotide sequence isolated from the Sargasso Sea
tatgccaaaaacaaagaaaagcactaacaccaaaaagtacgactctactaatataaaagtcttaaaaggccttgatgctgttcgaaaaagaccaggcatgtatattggcgacacagacgacggaacaggcctacaccatatggtgtacgaagttgttgataattccgtcgatgaagcgctagcaggatattgttcagaaatatctgtaataatccatcaagatgactctataaccgttaaagacaacgggagaggcgtgcctgttgataaacacaaagaggaaaataaatctgctgccgaagttattatgacagttcttcatgctggcggtaagtttgatgatgactcttataaagtttctggcgggctccacggtgttggggtctcggttgtaaatgctctttctcagactttaagtttgcgaatccataaaaatggaaacatatacgaacaagactatgctcatggaacgccaaaaaaaccacttaagaagggcgctaagaccgagagaacaggaacaaccatatcgtttcagcccagtaaaaaaactttttcaaatacctcattcagctatgaaacgctctctaaaagattgagagaaatgtcatttctaaacccaggacttaccattaatctcaatgacgaaagaacaaataaggcagactcttattgttatgagggaggcttaaaagattttgttcgtcatcttaataaaccccaaaagcca

SEQ ID NO: 295389 - DNA, 561 bp, Unknown
  Bacterial polypeptide expressing nucleotide sequence isolated from the Sargasso Sea
ccgtgattgtttcccgggcactccccgacgttagagatgggttgaagccagtacacagaagaatattatatggaatgaatgaactagggtcaggttggaataggccgtacaaaaaatcagcgagaattgtgggagacgtcttgggtaaataccacccacacggtgatagctctgtatatgatgctcttgtcagaatggctcaaaacttttcaatgagatatgagctagtagatggccaaggcaatttcggttcaattgatggagacaacgctgcagcaatgcgctacacagaatcaagaatgacgcggctttcaagcgaaatgttaaaagacctcgaaaaagagacagttgattggggtttaaactttgacgaaacattaaaggagccaaccgttttaccaacaacagttccaaccctattgattaatgggtccgaaggaattgccgttggtatggcaacaaaaatcccaccacacaacctaggtgaggttgttgatggtttggttgctcttattgacaacgagaacatttcaacagaagatcttatgggtcttcattaaa

SEQ ID NO: 295390 - DNA, 1057 bp, Unknown
  Bacterial polypeptide expressing nucleotide sequence isolated from the Sargasso Sea
atggctaaaaaagctacttattcagcaaaaaatatagaagttttagagggactagaacccgtaagaaaaagaccaggcatgtacataggaagtacaaatgaacaaggattacatcacttagtaaatgaagtgctagataatagtatagatgaggtcgtagcaggctatgcaagtgaggtttcttttcattacaaaaaagatggatcaattaaaattaaagataatggaagagggataccaatagattttcatcctaaatttaaaaataaaagagcattagaaattgtgctttgcaccctacatgctggggggaaatttgatagtaatgcttataaaacttcgggggggttgcatggtgtaggaatttcagtggtcaacgctcttagctcgtctttacaagttaatgtatataaaagtaataaaaaatattcccaattatattctaaaggaaaaccaaaaactaaaattaaaatagaaaaatgcaaaagaaatgaaaaaggtacagaaatagatttcatgcctgatgagagtatttttgaaacaattcaattttctccaaaaaaattatatgattttataatgatgaaagctgttctagtatcaggaacaactattgaatttaaaattgataaagaattaataaaagacaataccccaaaatttgaaaaatttcattttaaaaatggaattggagactttttagatataaaaaataaaaacatacctaaattatttgagaaaaaattttcaataactaaaaatattaatgaaaatgaaaaatgtgaaatatttgtaagttttaatcagaacgaaaattcttcattaatttcattttgtaatacaatagctactccggatggaggctctcatgaaaatggttttaaaaatggagtcttaaaggcattaaaattatatggcaaaaaaaatcaagtgtctaaaatatctaatataaatattaatgatttattagattattcagacatagttatttcaatatttatcaatgaaccaagctttgaaggtcaaactaaaaaaagaattattatgccaaaacttc

SEQ ID NO: 295391 - DNA, 422 bp, Unknown
  Bacterial polypeptide expressing nucleotide sequence isolated from the Sargasso Sea
catggaaaagaatattgtagagagcaaaaaatttaaacctatttttgttcaggatgaaatgagttcatcttacctatcatacgcaatgagcgttatagtaagtagggctctaccggatgtaagagatgggttaaagccagtacatagaagaattatatacgctatgtataaaggtggttacgattggtcaaaaccttttagaaaatcagctcgtatagtcggagatgtaattggtaaatatcatcctcatggagatcaatcagtttatgatgctttagtaagactagtacaagatttttcgatgagtgttccattaataactggccaaggtaattttggctcaattgatggagatccgccagctgcaatgagatacacagagacaaaattaggaaaaattgcacaatttttaactgaagatt

SEQ ID NO: 295392 - DNA, 2545 bp, Unknown
  Bacterial polypeptide expressing nucleotide sequence isolated from the Sargasso Sea
atgggtgaaattgctgccaaggaaatagtacctgttgatataggtaaagagcttaaacaatcttatttagattatgcaatgagcgtaatcgtaggaagagccttacctgatgcaagagacggcttaaagccagtgcatagaagagttctttatgcaatgcatgtactcaataatgattttggaaggcctcataagaaatcagctagaatcgttggtgacgtaataggtaagtaccatccccatggagacagcgcagcctacgaaacaattgtaagaatggcgcaatggtggtctctaagatatccacttgtcgatggacaaggcaattttggatccatggatggtgatggtcctgctgctcaaagatatacagaagtcagaatggctcgcatatctcaagaacttttagccgatctcgaaaaagaaaccgttaattatgtagaaaactacgatggtacagaaatgatgccggaagttttgcctacccgaattcctaatatgctcgtcaatggctcagctggaatagctgttggaatggcaacaaatatggcaccgcataatctcaatgaatctttatcagcttgtttagccttcattgataatcctgaaattactgtccaagagctaatggaatatataccaggtcccgattttccaaccggagcaataattaatggaagggctggaatagttagtgcttatgaaacaggaaggggaagagtaaaaataagagcaaaaacagaatttgaggacgaagaaaaagataaagcaaaaattatcattactgagatgccttatcaggttgttaaagcaaggctgatagaaaaaatagctgaactttcaagagataaaaagttagaaggaattagagatatcagagatgaatctgacaaagatggtgttcgtgtcgttatagaacttaagtcaggacaaattcctgatgttgttctcaataacctttatgcacaaacacaaatgcagacggtctttggaattaataatgtagctttaatagacggagaacctaaattattaaaccttaaatctattctctctgtattttttaatcatagaaaagaagtcgtctctagaagaaccttttttgatttaagaaaggcaaaagaaagaggccacatcctagaaggtctcactattgctcttgcaaatattgatgaaatgatagatttgattaagaagtctaaagaaggctctgaggcaaaaaagaaactcttggctaaaaaatggaagccaggaaagataattgcaatgctagaaaaagcaggacccgatgcttgtaagatcgatgtcaatgacaaatctgttggattgattggaaaaacatatcagctgtctgaacaacaggctcaagcaattctggatatgaggttacaaagacttactggccttgaacaggataaattaataaaagaatatgaagaaataatagatcacataacctacctactggaaattttaggagattccgataggttgattgaagttgtcaaagaagaactgaaagaagttcaagaaaaatataaagatgatagaagaacagagattcaagactctgctgcagatttaactgaagcagatttaattactccggaagacagagtggtgacaatctctcacgaaggctatgctaaaacccaaccccttgaagaatacagagcacaaagaagaggtggaactggtaagacggcagcttctgtaaaagatgaagacttcgtcgagcagcttttagtagcaaatacccatactactcttctatgcttttccaatttaggacaagtttattggcttaaagtttatgagattccttcagcgggtagagcagctaaaggacgccctcttgttaatcttatccaactcagtgaaggagaaagaataactagtatggtccccgttgaagaatatgatgataaacattttatcctcatggctaccagagctgggacagttaagaagacagtattaactgagttccaaaaccaaagaaaaggcggaaaaagagctattactctagaagagggcgatgagttggttggaactaccataacggatggaagtaaatttgtaatgctagttactaatgccggaaaggcagcacatttctcagagactgaagttaggtctatggggagaactgctaaaggtgtcagaggtataaagcttgaaaaagatcaacatgtgatttctctaataattcctgaagaagaggcgagcatatttactgtaagtgaaaatggatacggtaaacgttcaaaatctatagattttaggaaaactagacgaggagcaaaaggtgttatcgctatgcagatctctgaaaggaatggccaacttatcggcgctgctcaggtttcagatgatgatgaattaatgcttatttctgataaaggtatgttggttaggacaagagttgccgaagtaaatatcattggaagaaatacccaaggagtaactgtaattaggcttaaagattctgaaaaactgattagcatagctcctataagtgaagaattcataggagatgaataat

SEQ ID NO: 295393 - DNA, 1894 bp, Unknown
  Bacterial polypeptide expressing nucleotide sequence isolated from the Sargasso Sea
gttggccaagaatacatacgactctaaagcaatagaagttctttctggactggatcctgttaagaagagacctggtatgtatacagatacatcatgccctaatcatttaatacaggaagtgcttgataattctgttgatgaggcaatatctggccattgctcaaatataaaaataaaaatagaaaaagatgggtttataaaagttagtgatgatggaagaggtatgccagttgatattcatccagagcacaaagtaagtggagttgaattaattttatgtaaattacatgctggcgctaaattttctggagatgaatataatttctctggtggtttgcatggagttggggtgtctgttgtgaatgcattatctgatttgcttcaagtcaatattaagagggactctaaagaatatgaaatgcattttaataatggtgataaaaaaagtgagctaaaagttattggagatgttggtcttagaaatagtggtacaacaataagatttaaaccaaatataaaatatttcgaatcagatcaaataaacttaaaagatcttaaacatcttctaaaagcgaaagcagtattatgtcctggattaacaattgatttttatcatgaaaagaaaaaagaaagaattaaatggttttttgaggatggcttaaaaagttatttagaagatgcttctgatggtatagatttaattcttgaagaatcaattctgtcttcaaaagattccaagaatcaagaagtagaattcgtaataaactggacaaacaaaccaccaaaaaacaaacttgatgaaacttatgtgaatttaatacccacagcattaggcggctctcacttaaatggatttaaatcaggtcttctagattctttaaaagagttttgtgaatatagaagcttgataccaaaaggtcttaaaattaatgctgaagatgttatagcaaatgcaatatttgttgtttcttctaaaatgcagaatcctcaatttgcaggacaaacaaaagaaaggcttgattcaaaagatcacatgtcatttgtaagtagctcaacaaaggatgttttaagtatctggtttaacaaacatactgaagaaggagaaaaaattgcagaactagcaatagcatcagctcaggcaagagcaaaagcttctagtagtgttgaaaggaagaaaacttttaagggaccagctttgccagggaaattatcagactgtaatagtgaagacttgaatgaaacagaattatttctagttgaaggtgattcagctggaggatcggctaagcaagcaagagagagatcttttcaggcaataatgccattgagggggaaaatacttaatacatgggacttagagagtgaggagataattaaatctcaagaaataaaaaatttatcaacagcaattggagttttgcctggaagttctgataccacctcattgagatatggaaaagtatgtattcttgctgatgcagactctgacggtttgcacatagcgactcttctttgtgctttatttttaagacatttcaaaaatcttgttaaagaaggtaggatttttattgcaatgccgcctttatacagaatagattgcgggaaagatgttttatatgcattagacgagaaccaaaaagatgatattgttgaggattttaagggtaaaaaaggtaaacctaaaattaatattcaaagattcaaaggtcttggagaaatgaatccatctcaattaagagaaacagtaatggaccctcaaactagacagcttgtaagattatcggtatcagcaacagataatgcaaacgcaatgatggatcttcttctttcaaaaaagaacgcagctgctagaaaagaatggcttgaaaagaagggctcattagtgaggatttaa

SEQ ID NO: 295394 - DNA, 1205 bp, Unknown
  Bacterial polypeptide expressing nucleotide sequence isolated from the Sargasso Sea
tatgtccgaatttgggcccactcaggacgatgatgtccagcttgtaaatattgaagaggaaatcaagcagtcctatttagagtacgctatggctgtaatagttggccgagcattaccggacgtccgtgatggcttaaagcccgttcataaacgcgtattatatgcgatgaatgagttaaacaacgtatataaccgcccttatgtgaagtctgctcgtgttgtaggagaggtgattgggaaatatcatcctcatggtgacgctgcagcttacgaaacaattgtacgaatggctcaagatttcaacatgcggtatatgcttgttgatggtcaaggtaatttcggttcaatagatccagaccctcctgctgcccagcggtacacagaagtcagaatgacaaaaattgccagtgctttattggaggatctagataaggacaccgttgatttcgtcaacaactacgatgacacgttaacaatgccatcggtcctgccaactcgaattcccaatctattggtcaatggaagtgctggaatcgctgtgggttttgcttcgaacataccgccccataacattggcgaggtacttgatgcttgtattcatttgcttaacaacccagaagcctcggttgaagaaataataggctttgtgcaagggcctgattttccaacaggtggaattataaatggtaggtcaggaatagttcagggctataaaactggccgaggaaaaatctatgtcagaggccgggctacagtagaggttgataagtcggaaaaagaaagaatcattattaccgagatcccttatcagctcagaaaaaatgctttattagaaaaaatagcggagctcttcaaagaaaaaaagatagaaggtatcactgagttaagagatgaatcagacaaggatggattgagaatagttgttgagctcagaagaggggaatcaggtgaggtggtgttgaataatttgtattcccaaacccaacttcaatcggttttcagcataaacaatatcgcgttagttgatggtcaaccgaagcttctaaatctcaaagaaatgattgaggctttcgtagagcatcgcaaagaggtagtgactagacgtacattatatttattgcgaagggcgcgccaacgagcgcacatactagaagggcaggctgttgcgttagcgaatatcgatgaagtgattgaactaattaaat

SEQ ID NO: 295395 - DNA, 1033 bp, Unknown
  Bacterial polypeptide expressing nucleotide sequence isolated from the Sargasso Sea
tatgcagaatcctctggacttactgataaacttaaatttgatatatcaggtgacgactttagagaagggcttaactgctgttatatctgtaaaggtagcagagcctcaatttgagggtcaaacaaaaactaaactaggtaatagggaagtaagctctgctgtatctcaatcagtatctcaaatgcttgaggattatcttgaggagaatccagaagattcaaaaataattgtacaaaaagtaattctggctgctcaagcaagaaatgctgcgagacaagcaagagaaatgatccaaagaaaaactgtaatgactggaggtggtcttccaggtaaactatccgattgctcagaaacagacccttcaaagtgtgaagtatttttggttgagggtgactctgccggaggaactgctaaacaaggtagagatagggtttttcaggcaattcttcctttgaggggtaaaatattaaatgttgaaaaggctcaacaacacagagtttttgaaaatgaagaaattagaaatatttatactgctctaggcgtttctgttggaacagaggaagatagcaaagcccttaacctcgagaaattaagatatcataaaataataattatgtgtgacgctgatgttgatggaagtcatatatcaacattaatcttgacttttttctttagatatatgagagagcttgttgaagctggaaatatatatattgctactccacccctttatttagtaaaaaagggcaataaaaaagtttatgcatgggatgataaagaaagagataattatgctaaagattttggctcaggtgtatcaattcaaagatataaaggtttaggagagatgaacgccgatcagctatgggatacaactatgaatcctgagtctagaacattaagacaaatttctctgaattttgataattctcaagaagctgaaagatggttttcaactttgatgggtgatgatgttcctcctagaagaaaatttatagaggataatgcagtttacgcaaaaatagatgtttag

SEQ ID NO: 295396 - DNA, 763 bp, Unknown
  Bacterial polypeptide expressing nucleotide sequence isolated from the Sargasso Sea
aatggcaaaaaataatagtacttatcaggcagactccatcaaagtcctcaaaggacttgaggcagttcgaaaaagaccaggtatgtatataggtgacactgatgatggcacaggtctgcatcacatggtatacgaagttgttgataactctattgatgaagctttagcaggacactgtaaaaatatttcagtagatattaatcaagatggatctgtaacggttaaggatgatggaagaggtgttccagttgatatacataagggtgaaaaaaaatcagcggctgaagttataatgacccagttacatgctggtggaaaatttgaccacgactcatacaaagtttctggtggattacatggagttggtgtctcagtagtaaatgcattatctgagagacttgagctcactatagatagagacggaaaaaaacattttattgaatttaaaaagggtgatgcaaaatcacctttaaaagttgttggtaaatcaaaaaatacaggtacggaaataaaatttttgccatctaaagaaatattttccttaaacaaatttagctttttaactttgcaaaaaaggatgagagaattagcttttttaaataagggaattaaaataatattaactgatctaactcaaaaaaaacctaaaagtgttgagtttaaattcgatggtggaatagttgaatttgttgattttcttgacgaaaaaagagaaaaattaaaaaataaaagcgacaatgatttgttaaaagaccaatttata

SEQ ID NO: 295397 - DNA, 1062 bp, Unknown
  Bacterial polypeptide expressing nucleotide sequence isolated from the Sargasso Sea
aatgaaaaataacgcaaacactaactctaacaaagaatacaaagccgattcaattaaagttcttaaaggattagacgcagtaagaaaaagacccggtatgtatattggtgatacagatgatgggtctggtttacaccacatggtttttgaggtcttggacaattctatagatgaagcaatagttggtttttgtaagaacattaaagttacgatgcataaaaataattcagttaccgtagaagatgacggtagaggtattcctgtagatactcacaaaggtgagaaaaagtcagccgcagaagtaataatgacacaacttcacgcaggtggaaaatttgatcaaaactcctataaagtctcaggaggattgcatggagtaggtgtctcagttgtaaatgctttatctgaaaaattggatctaactatttatagagatcaaaaagaatactttatctctttcgagaatggaaagacaataaaaccaataaaatttttaaagaagacaaaaaaatctggaactaaaataaattttttaccctccaaagaaacattttcatcaattaaatttaatgctgtaacattacaaaaaaaaataagagaattagcttttttaaacaagggtttaaaagtagatttaattgatgagacttcctcaaaacccaaagtttatgaaaacaaatacgatgggggtataagcgaatttgttacatttttagatcaaaagaaatctattttaattaacaaaaatgaaaaggctgtgttcaaaaaacccctttatttgcaaggtcaaaaaaataatgtaacagttgaatgttctttgcaatggaacgcaggctattccgaggaagtcttgccgttcacaaataatattcatcaaaaagatgggggtacacatcttttaggatttagaagttcattaaccagaattatcaataaatatgcatctgagaaaaatcttaccaaaaaaaacaaagtaactattggaggagaagatataaaagagggtcttacagcaatcttatcaattaaaatgcctgatcctaaattctcatctcaaacaaa

SEQ ID NO: 295398 - DNA, 794 bp, Unknown
  Bacterial polypeptide expressing nucleotide sequence isolated from the Sargasso Sea
aatgagtaaaaataattatggcgcagataaaatatccgttttaaaaggattagaggctgtaagaaaaagaccggctatgtatattggagatgttggtaagagagggtatcaccatttagttagtgaggttgtagataacagtatcgatgaagctttagctggtttttgtacttctatcattgtaaccataaaaaatgacgggtttatttctattgaagacaacggaagaggaattccagtagaaattcataaaactgaaggaaagccagcactagaggtggttatgaccgtgttacatgctggaggtaagttcgataaaaacacctataaggtttctggtggactgcacggtgttggagtatctgtggttaatgccctttcagaaaacctggttgcagaagtccatagagatgggtttcattataaacaggaatataaaataggtcagcctactactgaggttgaaaaaattggtaaaagcgataaaacaggaaccatcgtttcgtttaagccggatgaaacagttttttcacacaaaggttttgaggaagaggttataaaaggaaggttaaaagaattagcttatcttaataaaaacctatcaataaaactggttaatgaaccagaagaaacagaaacagaatattgttttccagggggattatcagactttgttaaatatttggatggtaatgaagatttaattcacgatgaagttattattgtaagcaaggaagatatagaggttcctgttgatctagccttgagatatagcacaaattacaacagtaata

SEQ ID NO: 295399 - DNA, 880 bp, Unknown
  Bacterial polypeptide expressing nucleotide sequence isolated from the Sargasso Sea
atgagttcatcatatttatcttacgctatgagtgttatagtaagtagggcactacctgatataagagatggattaaaacctgttcacagaagaattatttatgcaatgcacaaaggtggttttgattggtcaaaacaatttagaaagtctgcaagaattgttggagatgtaattggtaaatatcatccacacggagatcaagcagtttatgatgctttagttagaatggttcaagaattttcaatgagcttacctttagttgacggacaaggtaattttggttctattgatggagacccaccagctgcaatgagatatactgaaactaaacttgcaaaggtttcacagtttttaattgatgacattgaaaaaaataccgtctcttttaaaagtaattacgatgaaacagagcaagaacccattgtattacctgctcaatatccaaatcttttagttaatggtgctggcggaatagcggttgggatggcgacaagtataccaccccataatttaggtgaggtcgtagatggaactttagcattgattaaaaataaagatattaaaattaatgagttaatgaaacatattcctggaccagattttccaacaggcggactaataattggaaaagatataattaagcaaggatacaaaactggaagaggctcttttaaaatacgtggagaaatttcagttgagaatttaaaaaatggtaaagatagactggtagtttcatccataccttaccaaattaataagtctaacttgaatgaaagaattgccgaattagtaagagataaaaaaattgaaggtataagcgatataagagatgagtcaaatagcgagggtataagagtgtcaattgatcttaggagaaatg

SEQ ID NO: 295400 - DNA, 1036 bp, Unknown
  Bacterial polypeptide expressing nucleotide sequence isolated from the Sargasso Sea
atgagtgaggaaaaaagatctaataaaatctccaatgattatggcgctgatcagatacaggttttagaggggttagaacctgttcgtaaacgaccaggtatgtatattggttctactggtccaaaaggattacatcatctagtatatgaagtggtagataattctgtagatgaagcgctagctggtcattgcgatcaaattgagatagttcttaaagacgatggatcagctttgatctcagataatgggaggggtattcctacagatatacatcaaagaacaggtaaaagtgctctggaaactgttcttactgttcttcatgcagggggaaaatttggaagtggtggatataaggtttctggtggtttacatggtgtcggaatatctgttgttaatgctttaagtgagtgggtgaatgttactgttttaagagacggcaatgagttcaatcaaagatttgagaaaggcattgcaaaaggtgaattaaaatcccaaaaacaacaaaataaaccattaagaaaaggtacaacaatttgttttaagccagatacatcaatatttactgatgggattgaatttgattatgctcttttatcctcaagattaagagaattggcttatcttaatggcggagtcaaaattatatttagagatgagaggcaaaatttatcggatggttctttcaaagaagaaatttacttatatgatggcggcattaaacaatatgttgagtatataaataaagaaaaggaatccattcattctgaggttatttatgtcgattcacaaaaagataatgtttacgtggaggcagctttacaatggtgctcggatgtttattcagataatatattaggatttgcaaataatatcagaactattgatggtggcacacatatagatggcttaaaaactgtattgactagaacttttaatgctatcgcgaaaaaaagaggtaaaagaaaagaagttgataaaaatttgtcaggagaaaatattagagaaggtttgacagtcgtattatctgtaaaagttc

SEQ ID NO: 295401 - DNA, 667 bp, Unknown
  Bacterial polypeptide expressing nucleotide sequence isolated from the Sargasso Sea
tgaaggtactgaattgttcattgttgagggagactcggcaggtgggtccgcaaagcaagctagagaaagattaacgcaagcaattcttcccttaagaggcaaaataataaacgttaaaaatgcaaatgctgcaaaaatacttgcaaatactgagattggtaatcttttacaagccttagggtgtcaaagaggaaaaaaatataattcaaaagatttgagatatgaaaaaattattattatgactgatgccgatgttgatggtgatcatatctcaacattattactaacatttttcttttcagaaattccaaatcttataaaagatggaaaattatttttagcagttccaccgttgtacaaaatatcgtctggaaaagaagttttatacgtcaatgatgacaaaacgaaagacagattaattaagaaaaatggtaaaaattatgaaataagcagatttaagggactgggtgaaatgatgcctgctcaattaaaagaaactacgatgaataaagagactagaaaacttataaaagttaccttgccaaatttgaaatctaaagtttctaaggtttcaaaatttattgataaccttatgggtaaaaatccagaaaatagattaaaatttatttctgataatgcaaataaaaatttaaatttagatgtttaa

SEQ ID NO: 295402 - DNA, 1596 bp, Unknown
  Bacterial polypeptide expressing nucleotide sequence isolated from the Sargasso Sea
ggacactgttgactttataccgaattacgatgattcgctcaaagaacccatagttttgccttcacgcattccaaacttactgaccaatggttccaccggcattgcagtaggcatggcaagcaatattcctccgcacaatctcaaggaggtaatggacgccttcctttactacattgataatcgccacacggccacagtccaggaactgatgcagttcgtgcccggcccggattttcccacgggaggtacaataattggcaaaagtggaatttatgaagcctacagcaccggtcgcggaataatacgtattcgggcaaaaacccattttgaacagacaaatgacggaaaagacctaataatcgtgactgaactccctttcatggtcaacaaggctgtactactggaaaaaattgcagatcttgttaggcagaaaaaaatggaaggaattgcagatctccgtgatgaatctgaccgtaagggaatgcgaatttacatccagctcaagcgtggagaaaatcctgaagttgttttgagtaatctttacaaacacacctcactgcagtcaagtttcggcattatcatgcttgccattgtggacaggcagccaaaggtgctggctttgccacaattgctggagtttttcctgcaacaccgaattgaagtagtaacacgacgtacacgctacgaactccgccaggctgaagataaaatgcacctgcttgaaggcctgatgatcgctcttcaaaacctggatgatgtgctggaaatcatcagaaaagctgaaagcggtgtaactgcagaagcagctcttgtagagcgttatgccctttctaaacgacaggcgcatggaattttagacatgaaactgcagcgtttgacaggaatggagcaagacaaaatccgttctgatcacgaggaattaggagaagccattgctgactacaaggatatcctggaaaaagaggagcgtgtaatcaagattattcgtgatgagagtgaggaaatccgtgacaaatatggagatgaacggcgtactcaaataattgagggagacagctccataatgattgaggagcttatcaatgaagaagacatggtggtcacaatttctagagagggctacattaagcgcagctcggtcagtgaatacaggcttcagcgccgaggcggaaaaggacgccttggcatgggcaccaaagatgaagatttcgttgagcagctgtttgttgccaatacacatgattacctgctcttttttaccaacaaaggccaggttttccgtaaaatcgtgttcgagctaccccaggcaggacctaccggacgcggcaaagcagtaatcaatatgctgcctttacgtgagggtgaaagcatttgtgcatgcctgaatgtgccaaaggaagcagaaaataagtatattttcctctgcacagagggaggtgtagccaaaaaaacgcccatgctggattgtgcaaaaatccgtgtaagtggtttgagggtaatcactcttgatgaaggagattcggtaatttccgttcagcttaccgacggtgaccaagaactgttttttgccacccgagacggtatgggattacgtgt

SEQ ID NO: 295403 - DNA, 751 bp, Unknown
  Bacterial polypeptide expressing nucleotide sequence isolated from the Sargasso Sea
gtcgaaggagattcagccggcggatcagcaaaacaaggccggaagagagagtttcaggctgttttgcctttgagagggaaaattttaaacacttatgttaatgaaaataaaaaaaggaatggagccaatggaagccacgaaaataaaaccctttcaaaaatgatgtcctcaaatgaaattgtaactttgattaatgctctggggactggatcgaccaatttcaacatggaggatcttagatacgaaaaaataattattatgaccgatgcagatgttgacggttcacatataagaacattgcttttaacttttttcaataataagccatttaacgaattaatcgaaaaaggacatttatatcttgcccagcccccattatttaagataacaaaaggtggaaaaacttcttacatcaaaaatgagaaagatttagaaaaatatattctcaaatcactagataatgtaaaaaaattcagcaaaaaagaattagaaaaaattattgatgaggaaagacaaaaattaaatattcaaagatttaaaggtctgggagaaatgaacccagaggaactttggcaaactactttaaatccagataatagagttttgttaaaggttgaatattcaaaaggaacaaaagaaaagtcaaaagaagaccaaaatattataaaaatattaatgggagatgaagtggctcctcgaaaagattttattactgaaaaagcccttgaggttgaaaacttagatatctaac

SEQ ID NO: 295404 - DNA, 2068 bp, Unknown
  Bacterial polypeptide expressing nucleotide sequence isolated from the Sargasso Sea
tatttacgactcgtcgagtatcaaagtattaaaaggcctggatgccgtacgtaaaagacccggtatgtatatcggtgatacggacgacggttcaggcttgcaccacatggtattcgaagtcgtcgacaactccatcgatgaagccttagctggccactgtactgatgtatgggtcactatccatactgacaactcagtatcagtacgcgacaacggtcgtggtattcctacagatatgcacgaagagggtgtatcagcagctgaagtcatcatgacggtattacacgccggtggtaaattcgatgataactcctataaagtatcaggtggtttgcacggtgtaggtgtatctgtagtaaacgccttatcagacaagttagagctcaccattcgccgtaagcaaaaagtacattcacaaatctaccgtttaggtgtgcctgacgcgcctttagctgtagtaggtgaaacagaaggcactggtacttccattcgtttctggccaagcccaacgattttcagtgatatcaatttccactacgatattctggcgaaacgcttacgtgaattgtctttcctgaactccggtgtcagcattattctgaccgacgaacgtgacgacaaaacagaccatttcaaatacgaaggtggtatcgaagcttttgtgcagtacttaaaccgcactaaaactccggttcaccaaaaagctttttacttcacctctcagcgtgaagaagatggtatttctgttgaagttgcgatgcagtggaatgattccttccaggaaggcatttactgtttcactaacaacattccccaacgggatggtggtactcacttagcgggtttccgttctgctttaacccgggtgttaaacacctatatggagcatgaaggctacgcgaagaagatgaagatctctgctacaggggacgacgcccgtgaaggtttaactgctgtaatcagcgttaaagtgccggaccctaagttcagttctcagaccaaagacaagctggtatccagtgaagtgaagtctgcagttgaaagtgcgatgcacgaaaaactgaatgaatacctgttagaaaacccgggcgaagccaaaattatcgtcggtaaaattgttgacgcagcccgcgcccgtgaagctgcccgtaaagcccgcgaaatgacgcgccgtaaaggtgcattagatatagcaggtttgccaggtaaattggccgactgtcaggaaaaagatccagccttatcagaactttacctggtagagggtgactctgcgggtggttcagccaagcagggccgcaaccgcaaaaatcaggctattctgccgttaaaaggtaaaatcctgaacgtagaaaaagcccgtttcgacaagatgatttcatctcaggaagtagggactctgatcacagctttaggttgtggtattggccgtgacgaatacaacccggacaaaacccgttatcacagcatcatcctgatgacggatgctgacgtcgatggttctcacatccgtactctgttattgaccttcttctaccgtcaaacaccagagctgattgaacgtggttacatctatattgcacagccacctttgtacaaagtgaaaaaaggtaagcaagaacagtacattaaagatgacccggctttaacagagtacttaactactcttgcgcttgatgaggcgacattacatgtcaatgcagacgcgccaggcataggcggagctcagcttgaaactttggtacagctgtaccataaagtgacagctactattactcgcttaagtcgtaagatcccgtcgaacctactgaacgaactggtctatgtgcctgctattaggcctgatctatgtaaagacgcagctttggccgaaacctgggcgaagaacctggttacccgcttacaagagcgtgaaggcgatggctcaagctacgcttatgctgtagtggaagaccgcgaacgccagttgtttgtaccaaaaagtgatcatccgtcagcacggtatcgacaacgaatacctgctgcattacgacttcatcacgtcagtagactacggccgcatgtttga

SEQ ID NO: 295405 - DNA, 670 bp, Unknown
  Bacterial polypeptide expressing nucleotide sequence isolated from the Sargasso Sea
gatgagctcttcatatctgtcttacgctatgagtgttatagtaagtagggcattacctgatatcagagatggattaaaaccagttcacagaagaattatatatgcaatgcacaaaggtggctttgattggtcaaaacaatttagaaaatctgcaagaattgttggagatgtaataggtaaatatcaccctcatggagatcaagctgtttatgacgctttagttagaatggttcaagaattttcaatgagcttacccttagtagatggacagggcaattttggctctatagatggagatcctcctgcagcaatgagatacacagaaaccaaacttgcaaaagtttcacaatttctaattgatgatatagaaaaaaataccgtatcatttaaaagtaattacgatgagacagagcaagaacctgttgtattacctgctcaatatccaaatcttctagttaatggtgctggtggaattgctgttggaatggcgacaagcataccaccacataatttaggtgaggttatagatggaactttagctttaattaaaaataaagatattaaattaaatgaattgatgaaacatatacctggtccagatttcccaacaggtggattaataattggaaaagatataattaaacagggttacaaaacaggaagaggatct

SEQ ID NO: 295406 - DNA, 1182 bp, Unknown
  Bacterial polypeptide expressing nucleotide sequence isolated from the Sargasso Sea
catgacagataaaatttctcagatcaatttagaagatgaaatgaagaaatcctatctggattatgcaatgagtgtcattattggacgagcgttgcctgatgtcagagatggattaaaaccggtacatagaagagtactctatgccatgaaagtccttggcaatgatcatacaaaagcatacaaaaaatcagcaagaattgtgggtgatgtaattggtaaatatcatcctcatggtgacagtgcagtatatgaaaccattgtaagaatggcacaagatttttcacttcgatatacccttgttgatggacaaggaaattttggttcaatcgatggtgaccgagctgctgctatgcggtatacagaagtcagaatggaaaaaattactcaagaactcctttccgatattgataaagagacagttgagttcattcctaattatgatgagtctgaatgggagccatctgtactcccaacgaggttacccaatcttttaatcaatggttctgctgggattgcagtgggtatggctacgaatatacctccacataatcttaaagaaatcatagacggttgtttatttattttagataacgatcaagccacaattgatgaccttataaaactcatacctgctcctgatttcccaacagctgccactattcatggtattgatggcatcaagcaagcttatgaaacaggcagaggaaaggtttatgtaagggcaaaaacctcaattgaagaaaatggagatcgagaatcaatcatcatttctgaacttccttatcaggtgaataaagcacgtttaatagagaaaattgccgaactagtcagagacaagaaattggaaggtatttctgaaattcgagatgaatctgacaaagatgggctcagggttgctatagatcttaagagaggaacagtttcagatgtccttttgaataacttatacaaacaaacggtattagagagcacattctctatcaacatggttgctctatcaaatggtcagccacaattgatgaatcttaaaagcatgcttgatgctttccttggtcataggcgtgatgtagttaccaaaagaactatctatcaactcaatcggtccatcaacagagctcatattctcgaaggtcaaacaatcgcactgacaaacattgacgaaatgattgccataattaaaaa

SEQ ID NO: 295407 - DNA, 674 bp, Unknown
  Bacterial polypeptide expressing nucleotide sequence isolated from the Sargasso Sea
tatgaacgaatcacaatcaaataaaaattatagcgcagaaaacataaaagtattagaggggttagaggcggttagaaagcgccccgctatgtatattggtgatgttggaaagcgcggattacaccaccttgtttatgaggttgttgataattcaatcgacgaagcgctagcgggttattgtacaaaagtgacggtagtttttaataaagacgggtcggtaacggtggaggataatgggcgcggaattccagttgatattcacaaagaagaaaaaaaacccgcggttgaggttgttatgacggtgcttcatgctggtgggaagtttgataaagggtcttataaggtttcaggggggttgcatggcgttggtgtttctgtggttaacgctctttctgagtggctctgggttgaggtgaaaagggatggcaaggtatacaaacaagactataaaataggtgagccacaagccgacttaaaagcaaccggatcagcaaaaaaaacaggcaccaaggtttgtttttaccccgataataaaatatttaaaaccatcacttttgaatatgatattataagcgaaaggcttcgggagttggcatatctaaacaagggcatagaaattaacctaaaagatgagcgcgacgaagaagggagaaatgatgtttttaaatttaaag

SEQ ID NO: 295408 - DNA, 1691 bp, Unknown
  Bacterial polypeptide expressing nucleotide sequence isolated from the Sargasso Sea
aatgtcagaatttaatagagataatacactaccaagagatattgtagatgaaatgaaggaaagctatctcaattactcgatgtcggtaattgtgtctagggcgctgccagatgtgcgcgatgggcttaaacctgttcatagaagaatattatatggaatgagcgaattggggtcaagctggaacaggccttataaaaaatcagctagaattgtgggagatgtgctgggtaaatatcatcctcatggagatagttcggtttatgacgccctggttagaatggctcaagatttttcaatgcgctatgagcttgtagatgggcaagggaattttggctctatagacggtgataacgctgcagcgatgcgctataccgaatctagaatgaccaaactttcaaatgaaatgcttaaagacctagaaaaagaaacagttgagtgggatcttaattttgatgaaacactaaaagagccaagcgtattgccttcagcggttccaacactacttgtgaacggctctgagggaatagcggtgggtatggcaacaaaaattccaccccacaatctatcagagattattgatggtcttattgctttaattgatgatgaatcaattggaacagaggttttgatgcaacacataaaagggccagactttccaacagcgggtttaattcttggtatggatggattagaacaggcttatgagacaggacgaggaaaaattaaaatgagggccagggcgcatattgaaaccaataaaaaaggaagaaacagtattgttgttaccgaggttccttatcaaacaaataaagcagcgctagttgaaaagattgctgacctagttcgcgacaaaaaggttgtaggtataagcgacctgcgagatgaatcagataaagatggaatacgcgtagttgtggaaacgaagcgagatgccgttcccgaggtgatactaaaccaactttacaaacacacacaactacaagatacatttggaataatactattagctcttgtagacggaatcccaaaaataatgccccttaaaacagttttaaatcattttattgattttagacatgaagtagttgttaggcgcactgaatttgaattaaaagaggccgaaggaagagcccacatattagaggggttaaaaattgcactagacaatattgatgaggtcatcaaagttattaggggcagcaaagatcccgctcaagccaaagaaggccttatgaacagttttaatttatcagaagcccaatcccaagccattcttgatatgcgccttcaaaaacttaccggcttagaggttgataaagtggtggccgagtataaagaactaatccaaattatttcaaatttaaaaagcgttctagaaaacaaaacaaaacgcatgaacattattaaaacagagctccttgaaataaaagatcaatacggcgatgagcgaagaacagaaattataccagtggacacagatttttctatggaggatatgatagctgaagaagaggttgtgcttacaataacacaccaaggttatataaaaagaacagctttaaatacatacagaactcagcgcaggggtggtcgcggcgttcaaggagcaatgagcaaagatgaagattttgtagaacatttatttattgcaaacacacacaattatatgcttttctttaccgacacaggga

SEQ ID NO: 295409 - DNA, 598 bp, Unknown
  Bacterial polypeptide expressing nucleotide sequence isolated from the Sargasso Sea
atggttgattttaatagagacaatacactcccaagagacattgtagatgaaatgagggagagctatctaaactattctatgtctgttatcgtttctagagcccttccagatgttagggatgggctaaagccagtgcatagaagaatattgtacgggatgagcgaactaggttcaagctggaataggccatacaaaaagtctgcgagaatagttggagatgttcttggaaaataccacccgcatggggacagttcggtctatgatgctctcgttagaatggcccaagacttttcaatgagatatgagctagttgacgggcaaggaaactttgggtctattgatggagataatgctgctgctatgagatatacagagtcccgaatgacaaagctgtccagtgaaatgttaaaagacctagagaaagacacggttagttgggagccaaacttcgacgagaccctgaaagaaccatctgttcttccatcttctgttcccgccttattgataaacggatcagagggaatagctgttggaatggcgacaaaaatcccaccacacaacttagtggaaatcgtaaatgggattgtggccttaatag

SEQ ID NO: 295410 - DNA, 1073 bp, Unknown
  Bacterial polypeptide expressing nucleotide sequence isolated from the Sargasso Sea
agagggtcttacagcaatattatcaatcaaaatgcctgatcctaaattctcatctcaaacaaaagataaattagtttcgtcagaaattagaaatatcgtagaaacaattgttggtgaaaaaattgcagtatggtttgaccaaaacccatcagttgttaaatctgttttagataaagtgttacaagcagctttagctagagatctagcgagaaaggccagggatagtgtcagaagaaaaggaacattagaattatctggtttgccgggtaaattagcagattgccaaatctcatctatggagggcactgaattgtttatcgtagaaggagactcagcaggaggatctgcaaaacaaggaagaaaaagggaatttcaagcagtattgccattaagaggaaaaattttaaatacatttgtaaatgaaaataaaagagttaatggagccaatggagcaaatgaaacaaaagcattatccaagatgatgtcttctaatgaaattgttacacttataaatgctttaggaaccggttcaaaagacttcgatattgagaatttaaggtatgaaaaaattatcattatgacagatgctgacgttgatggttcacatataagaactttgttattaactttttttaataataagcccttcaatgaattaatagaaaaaggtcatttatacctagctcagccaccgttgtttaaggtgacaagaggaacaaaaagtacatacataaaaaatgaaaaagacttagaaaaatatattttaaagtcttcagaaaatggggcaaaaaaattgaaaaaatctgacttagagaagtttttaaacgatgaaaaacaaaaattaaatatccaaagatttaaaggtttgggggagatgaacccagaagaactttggcaaactactttaaatcctgaaaatagaacactattaaaaattgagtattctaaaggcagtaaagaaaaatctaaggaagatcaaaatataattaaaatacttatgggagatgaagtagctccaagaaaagagtttataactgagaaagcattagaggttgaaaacctagatatataag

SEQ ID NO: 295411 - DNA, 655 bp, Unknown
  Bacterial polypeptide expressing nucleotide sequence isolated from the Sargasso Sea
tatgcaaaaagacgaaatttctaaaaatcaaaatataaaatctatatccatgtatgatgagatgagctcatcttacttgtcttatgctatgagtgtaataatcagtagagcattacctgatgcaagagatggattaaaacctgttcatagaagaataatctacgcaatgcataaaggtggttttgattggtcaaaacaatttagaaaatcagcaagaatagtaggggatgtaattggtaaatatcatcctcatggtgatcaagctgtttatgatgctttagtaagaatggttcaagatttttctatgagcttacctcttgttgatgggcaaggtaattttggttctatagatggtgatcctcctgctgctatgagatacactgaaacaagactgtcaaaaatttctcaatttctaatagatgatattgaaaaaaatactgttgaatttaaaagtaattatgatgagactgaaaaagaaccttctgttcttccagctcaatatcccaatcttcttgtaaatggagcaggtggtattgctgttgggatggctaccagtataccacctcacaatttaggtgaagttatagacggtgctcttgcattaattgacgataaaaatattaaaattaatgagttaatgaaacatataccaggt

SEQ ID NO: 295412 - DNA, 2329 bp, Unknown
  Bacterial polypeptide expressing nucleotide sequence isolated from the Sargasso Sea
tatgagcgaaatgtctgcaatgtggaatagaccatataaaaaatctgctagagtggttggtgaagttttaggtaaatatcacccacacggagacagttctatttatgatgcaatggttagaatggcccaagaattttcaatgagacacgaacttgttcaaggacagggaaattttggatctgttgacggagacagggccgctgcaatgagatataccgaatctagaatgtcaaaaattggcagcgaacttttaagagatatagacaaagaaaccattccctggacaagtaattttgatgaaaccttaaaagagccagctgttcttcccgccgtatatccaaacctgcttgttaatggttcagaaggtattgctgttggaatggcaactaaaattcctccccacaacttatcagagttggtagacgggctggtagaactgttgcataaccctgaagcagaagtaaaagatttaatgaaacacataaaaggaccagactttccaacctctgggaaagcccttggcattcaaggcattgttgatgcctatgaaaccggaagaggaaaagttattatgcaaggaagggcacacgttgagcccgcctctaaaggaagagattctttggttgttacagagctgccataccaagttaacaaagcaaacctaattgaaaaaatagcgtatttagctagagacaaaaaaattgaaggcatagcagagctaagagatgaatctgataaagatggaatgcgaattgttattgaaataaaaagagatgccgttccagaggtggttttaaaccaactatacaaacaaacccaactacaggacacctttggaataattttgttggcgctagttgatggaacaccaaaggttatgaacttaaaagaaatccttgaggtttttatatcctttagattagacgtggtagtaaaaagaacaaaatttgatctttccaaagccgaggcaagagcacacatattagagggtttaaaaattgccctcaaaaatatagataaaattgttgaaacaattaaaaaaagtaaggacccggtgtctgccaaagaagccctaatggagggttttggtttatccgaaaaacaatcacaagccattcttgacatgagactacaaagattaaccgggcttgaaacagataaaattatgagcgaatacaaagatattatccaacatatatctgagctaaaaggaattttagaaagcaaatcaaaaagagtagaaattattaaagaagaacttcttgaggttaaagaaaaatatggagaagaaagaagaacggaaataataaaagactttacaaccctcagcattgaagatatgattgctgaagaggaaatggttttaacaataacccacaacggctacataaaaagaacaaaccttaatacctatagaagccagcgaaggggcggtaggggtgttcagggagcaacctctagagatgaagactttgttgaacacttgtttgtggcaaacacacacagctacattttgttttttaccgacaaaggaaagtgctattgggtaaaggtttatgacataccagaagggggaagagcggctaaaggcagggcaatcgtaaaccttattggttgtgagccagacgaaaaagtaagcgcgttcataagcgtcaaagaatttaatgacgaacactttgttgtaatggcaacagagaaaggaatagttaaaaaaacaaagctttccgcatattcaaatccaagaaagaagggtatttatgctgttgaaataagagatggcgacaggcttatagaggcgcgagtttctacgggagataacgacatattgttaggaactagaaatggaaaatccataaggttttctgaagagcaaattagaccaagcggaagaaaaacaatgggagtaaaaggaataaccttaagctcaaaagatgacaagctggttggaatgttgttaatcaaaagagagggaaccacggtgttggttgctacagaaaagggttttggaaaaagaacagaaatatcacagtatcgcgcacaaaagaggggcggaaaaggcgttttaaccatgaaaaccacagacaaggttggaaaaatggttacaattaaagaggttgttgacaaagacgatctaatgattattacaaaccagggcgtgttgattagacagcccgtagctcaaataagggccattggaagagcaacccaaggagttaaactaattaagcttggagaaggaacgctggtttcttctattaccagaattatgtctgaagaagaagatggagatgaaaacaatagcgcagaacctgcaggcgattcagaatag

SEQ ID NO: 295413 - DNA, 1416 bp, Unknown
  Bacterial polypeptide expressing nucleotide sequence isolated from the Sargasso Sea
aatgtcaggtgatacgtacgattcaggcagcattaaagtattaaaagggctagaggcggttaaaaaaaggccaggaatgtatatcggggataccgatgacggcactggacttcatcatatggtttttgaagtgcttgataactcaatagacgagggaatggctggcttctgtaagcagatagatgtagtaataggcaaagatgggtctgtatcagtttctgatgatggaagagggataccggttgacatgcatgaagaaggtgtatcggcagctgaagttattatgacaacactacactcaggaggtaagtttgatgaaaatagctataaagtctctggaggactacatggagttggtgtttcagttgtaaacgctcttagcagcaagttaattttagagattgaaagggacggagcaaaatataaacaagaatactcagacggtgagcctaaaacaaagcttgaaaaagtaggaaaaagtgaaaaatcaggaacaaaagttacttttacaccctcaaagaaaatatttacacagactaaattcgatgtagaggtactaaaaaagcggattagagaactttccttccttaacaagggaattgccattcatgttcttgacgaagcctcaggaagtaagcttgaatttaagtcagacggagggctattagagtttgtaaaacaccttacaggcaaaaaagaagtaattggcacacctttttatgcgcaagcaaacatgaaaggaataggtgttgagatagctgcgcaatggacaggaacatatagagaaaatgtacagtgcttcacaaacaacataccacaagttgatggaggcacccatcttgctggctttaggggagggcttacaagagcaattaaaaactttattaaaaaagaagacttaatgcgcaaaaaagaagttgaaataacaggagaagacgttagagaaggcatgatagcagtcatttctctaaaaatgcctgaccctaaattctcttcacaaacaaaggataagctggtttcatcagaagcaagaccagcagtcgaaacgcttattaatgactactttatggactttttgcttgcaaacaagccacaagctaaagagattcttggcaaggttctcgaagccgcatatgcaagagaagctgcaagaaaagcaaaagaaatgacaagaagaaaaggtcttctggatataggggggctgcctggcaagctagcagattgccaagaaaaagacccagcgctatcagaattatttttggttgagggagactcggctggaggatcagcaaaacagggcagggacagaagctttcaggccatattgcctcttaaaggaaaaattataaacgtacaaaaagcacgcctagacaaagtcttatcttctaatgagattgggacccttataacagcttt

SEQ ID NO: 295414 - DNA, 271 bp, Unknown
  Bacterial polypeptide expressing nucleotide sequence isolated from the Sargasso Sea
aatgagtgaggacaaaagatctaataaaatctcgaatgattatggggcggaacagattcaggttttagagggtttagaaccagttcgtaaacgccctggaatgtatataggttcaacaggacctaggggattacaccatttagtatatgaggtagttgataactcggttgatgaagcacttgcaggacattgtgatcatatagaaatagttcttcgagcagatggttctgctttgatttctgataatggaagaggtattccaacagatatt

SEQ ID NO: 295415 - DNA, 2197 bp, Unknown
  Bacterial polypeptide expressing nucleotide sequence isolated from the Sargasso Sea
atgaaaaaaatattaaataaaaatattgacgatattttaagtgaaaaatatctagcatatgcagtctcaacaattatatctagatctctaccagatgtaagagatggtttaaaacctgttcatagaagaataatatattctatgtatcaattaaaattatttaaaggttcttcttttaaaaaatctgctagaattgttggagatgtcatgggtaaatttcatcctcatggtgatcaagctatttatgatagtcttgtaagacttgcacaagaattttcaactagaataccccttattgaaggccagggtaattttggaaatattgatggtgataatgctgcagcaatgcgatacactgaagctagattagaaaatatagcgaattatttttttgacggcttagaagaaaatgctgttgatttaaaagaaaattatgatggtcaaaatttagaaccatcagtacttccaagtcagttaccaaatattctattaaatggttcctctggaattgcagttggaatggctacaaatatacctcctcataatatatttgaattaaataatgctttaattgaattaattaaaaaaccagaaatatcactttcaaaactactaaaaattactttaggacctgatttaccaactgggggagttgcaatcataacccccgatgagcaaaaacaaatttataaaactggcaagggcacttttaatatcagagccaattactttattgaaaatttaaaaaatggcacttatcaaataattattactgatattccttatcaagttaataaatctagattgattgaacaaatagcaaatttaatcgtcaataaaaagattcctttagatgatatttatgatgaatctgatgaaaatataagaattgttttaaaacctaaaaatcgtaatattgattcacataaattaattgagttatgttttaaagtatcagatttatctattcgatattcatgtaattttaatgttttagttgatggaacatatccaaaacttttaggtttaaaagaaatactaaataattttattaattatagatatttaacaataaaaaggaaatctaaatttaatattgaaagaataaataaaagattagatatccttaaaggatatttaattgtttataaatttattgatactattattaagataattagaactaaagaaaatccaaaaaaaattattataaaaaaatataaattaaaagatattcaggcagatgcaatattaaatatgagacttggatcattaaaaaagttagatgaatatgaaactaaaaatgagataaaacgattaaatgaagaattaaaactcttaaataaattaataaaaaacaaaggttttttaaatgaatatttaataaatgaaattaataaaactaatcaagaactaaaggatgaaatttataaaagaaaaactaaagtcttaattcaaaaagatattcaagaagatatagattttgatgaatttgaaactgttgaaaagttaacaattgtaattgataaagagggttttttaaaatcttacaaagatcatttgtcaatagatcaaattaagaaaaatcaaaaaaatacaaaaaatatttttcatattcactctaatcaaaaattattaatctttgtttcttctggaagagtttttactgttaatcctaatgaattaccatcaggaaaatcaaatccaaaatcatatatttattttatagaaactgaatctagtgaaaaattagtaggagcattagtaccaggagaaaataaaaattgtttagtaacttctttaaatggaaaaggttttattgttgactccaattcattaatttcaaatcagaagaaaggaaagaaactttttaatttaaaaatttcagatatactaattaaagttttaaatgctaataaacaatatattgctataacaaataaatcagggaaattattaatatttaatattgaaagcctacctattttgcaaaaaggtagcggagttaaacttatgaaattaaagaaaaatgaattaattgcagatattaaattatttgatcaacaagaagctttaacttggtattctggttcaaaagtaaaaaaactaaatgatataaccttttggataggaaagagagcacaatctggtaaaaaagtgcctaaatattttaataaaaattttaaatttgaataat

SEQ ID NO: 295416 - DNA, 1252 bp, Unknown
  Bacterial polypeptide expressing nucleotide sequence isolated from the Sargasso Sea
gaagcactagcaggccattgtaaaaatataaatgtaagaattaattctgatggaacaataacagtcaatgatgatggaagaggtataccagtcgacatgcataaaggagaaaagaaatctgcagccgaggttattatgacccaacttcatgcaggaggaaaatttgatcatgattcttacaaagtttcaggtggattacatggcgtaggtgtttcggttgtaaatgcattgtcagaaaaattacaattagaaattagtagagatgggaaaaaacattttatcgaatttaaaaatggagaagcaattgctccattaaaaatagttggaaaatcaaagaactcaggtactcaaataactttcttaccatctaaagaaatattctcttcaataaagtttagtgcaaatattttgattaagagaatgagagaattagcttttttaaacaaaggaataaaaattatttttacagatgcaagtttaaaaaaagaaaaagtttcagaatttaagtttgatggtggtgtacttgaatttgtaaattttttagacgaaaaacgtgaaaaattagaaaataaaaatggtaacgatttattcaagaaaccgatctatatagagggaaaaaaagataatatagagttagaatgttcgctaaagtggaatgcaagttatgcagaagatatatttccttatacaaataatatatttcagaaagatggtggaacacatttgctaggttttagaagtgcgctgacaagagttgttaataaatatgctaacgagcataacctcttaaaaaaaaataaattggcaatatctggagacgatataaaagagggacttacttgtgtattatccactaaaataccagatccaaaattttcatctcaaacaaaagataaattagtttcgtctgaagtaagaatgattgtagaaacagtcgtcaatgaaaaattatctatatggtttgatcaaaatccgtcagtagcaaaaattattttagccaaagttatacaagctgcaatggcaagagatgttgctagaaaggcaagagaaaatgtaagacgaaaaggtgcccttgaattgagtggattacccggaaaattagctgattgtcagataggaaaacaagaaggcacagaattgtttattgttgagggagattcagcgggtggatcagcaaaacaaggaagaaatagagctaatcaagctgttttacctcttagaggtaaaattttgaacacttatgttgaagatc

SEQ ID NO: 295417 - DNA, 1552 bp, Unknown
  Bacterial polypeptide expressing nucleotide sequence isolated from the Sargasso Sea
aaatatcatcctcatggcgactcagctgtatatgaagcaatggtcagaatggcccaagatttttcaatgagatataccttggtcgagggacaaggtaatttcggttccatcgatggagactctccggctgccatgcgttataccgaagtgagaatggcaaaaattacagacatgatcctcaatgatattgagaaagaaactgtaagttattctcctaattatgacggaacagagcagatccctgatgtgatgcctacacggattccagctctgcttgttaatggctcatcaggtatcgcagttggtatggcaacaaatgtaccccctcataacttaacagaagtattaaatggctgcttgcttttattggacaatcccaaagctagtattgatgaaatcattcaaattattaccggccctgacttccctacaggtgggaccatagatggaagaattggaatatacgaaggctataaaactggcagaggaattattcatgttcgcgctaaaacttctgtagaagaggataaatcaggaaagagctcattgataattaacgagataccttacatggtaaataaagcaaaaatgctcgaaagaattgctgagatggtaaaagaaaagaagatcgatggaatcagcgaaattagggatgaatctgataaagatggtctgagggtagtgatcgaggttaagcgtggagagtcggttgaagttctagaaaataacttgtttgctcaatcacaattggaacaatcctttggaattaatttcactgttcttgtggatggtcagccccgagtattaaatattaaagagatccttcaagaatttatcaaacatagaaaagatgttgtcactaagagaacaaagtttgatcttagaaaggctaaagagagaggtcacattgttgagggattaatggttgcaattgccaacattgatgaagttattaaaataattaaaaaatctaaagacaccaagattgcagcaactgagctatgtaagaaatcttggaaagcgggtccaattgaggcaattcttaaaaaagctggtaaggatgcttgtcgccctaaaggtctttcatctgaatatggcataaaaggaaaaagctacaagctatctccaacccaagctaaatcaatacttgagttaagacttggaagacttaccggtctagagcaagataatctctccgcagaattcaatgaaattctagccgtgattttagagcttcagaaaatacttgatgacaaagatactctcttacagttaatcaaagatgagctaatagaagtaagagaaaattttggcgatgaaagaaaaacaaatatcaatgacactcgtcatgacatttccaatgaagacttaattccagaggagactcgagttttaactttatcaagaagcggctacgcgaaaactcaaccacttgatgaatacagagagcagcgcagaggcggtgtaggcaaagccggtgcatcggttaaggaggaagacttaattcaaaatctctatgtcttgagttctcatagtcagcttctttgctttt

SEQ ID NO: 295418 - DNA, 1966 bp, Unknown
  Bacterial polypeptide expressing nucleotide sequence isolated from the Sargasso Sea
atgagtgattttgcaaaagaaattatatctgtaaatattgaagatgaacttaaacaatcatatttaagttatgctctaagcgttatacatggaagagctttacctgatataagagatggtcttaagcctgttcatagaagaattctatacgcgatgtatgatcttagaaattattacaataaaccatataaaaaatctgcaagagtagttggcgacgttataggaaaatatcatcctcatggcgattcagctgtatatgatgcaatggttagaatggcacaagatttttcaatgcggtatccaatagttgaaggacagggtaactttggatctattgatggagatcctcctgctgcaatgagatataccgaagtcagaatggcaaaaataactgatcaaatgcttgatgatatagagaaagagactatttcttattctccaaattatgatggcagtgaaaatattcctgatgtactcccaacaaagatacctaatctattaattaatggctcatctggtattgcggtggggatggctaccaatattcctcctcataatttaaatgaagttttaaatggctgtgttaatttgataaagaatccaaaaatctcaattgatgagttaattaaagatatatcaggaccagactttccaactggtggcactatcgatggtaaggctggaatctttgaagcttataaaacagggagaggaataattcatataagatcaaacacttcaattgaagaagataagtctggcaaacagtctctagttataaatgaaataccatttatggtaaataaagccaagatgttagaaaaaattgctgaacttgtaaaagaaaaaaagatagaaggaataactgagattagagatgaatctgataaagatgggttgagagttgtaattgaagttaggaagggggactcagttgatgttcttgaaaataatttatttgcacaaacacaactagaacaatcctttggaataaactttacggtgttatcagaaggtcaaccaaaggaagtaaatctaaaagaaatgctccaagcatttgtcaaacatcgaaaagatgtcatcactaaaagaacaaaatttgatcttaaaaaagctagagaaagaggacatgttgtagagggattaatggttgctattgcaaacatagatgaaatcatcgcaattattaaaaaatcaagagatccaaagatagctgcaagtgaattatgcaaaaaagtatggaaatctggcccagttgaagctattttgaaaaaggttggaaatgatgcatgcaaaccaaaaggattaagtaaggatcttggtttaaaaggtaaaaaatataaattatcttctgatcaatcaaaagcaatattagaattaaggcttggaagattaacgggtcttgagcaagacaatttaagcaaagaattttctgatattgttgaaaaaataattggattacaaaagatccttgatgataaatcaactcttcaagacttaatgattaacgagcttgaagaaataaaaaataattttggagatgaaagaagaactctaattaatgatactagaagaggcatcactaatgaagatttaataccagaagagatgagagttctaacagtatctagaagtggttatgcaaagacacaacctcttgaagaataccgtgagcagagaagaggaggtcagggcaaagctgcagcttcagttaaggaagaagatttgatacaaaacttatatgttttgagtagccatgttcaaatattatgttttacaactaaaggaaaagtatattggttaaaagtatatgaaataccagttgcctcaagaacttcaaaaggtaggccattagtaaatatgctaaaccttgatgatgatgaaagggtgagcgagatacttcctgtagaagagttttcagataaaaaatttatctttatggcaactagaaaagggaataactaag

SEQ ID NO: 295419 - DNA, 2764 bp, Unknown
  Bacterial polypeptide expressing nucleotide sequence isolated from the Sargasso Sea
tatgactgatctggcatcatctatttcgccaattaatatcgaagacgaactaaagaattcgtaccttgattacgccatgagcgtcatcgtaggacgtgcattaccagacgtgcgtgatggccttaagcctgtacatcgccgcgtgctgtttgccatgagtgaattgaagaacgattggaacaagccgtacaaaaagtctgcccgtgtggtcggtgacgtgatcggtaaatatcacccccatggtgactcggcggtatacgacactatcgtgcgtatggctcagcctttctcactgcgttacaccttagtcgacggtcaaggaaacttcggttcggttgacggtgactctgccgcggcaatgcgttataccgaaatccgcatggataagttagcgcaccagctcctcgccgatcttgaaaaagaaaccgttgactatgtgccaaactacgacggcacagaacaaattcctgcggtattaccgacacgcgtacctaacctgttgattaacggttcatcgggtattgcggtgggtatggcgacgaacatcccgccacacaacttaacggaagtggttaaaggctgtttagcgcttatcgccgatcctgcgctgtcgattgaacagctcatggaatatattcctggccctgatttcccaacggcggcgatcatcaatggtcgtaagggcattatcgatgcgtacaagacggggcgcggccgcgccgttatgcgcgcgctggctgaagtcgaaaccgaagataacggccgtgaacgtattatcgtcaccgaaattccttatcaggtgaacaaggcgaaactcatcgagaaaatcgctgagctagttaaagataagaagattgaaggcattagcggtctgcgcgatgagtctgacaaagacggtatgcgcatcgttatcgaaatcaagcgtggcgaagtgggcgaagttgttctgaacaacctctatgcccagacacaaatgcaatgttcttttggtatcaacatggtggctttgaccaatggtcagcctaagttgttcaacttaaaagaaatgctcgaatgctttatcctgcaccgccgtgaagtggtgactcgccgtaccgtattcgaactgcgtaaagcgcgcgaacgcgcccatattcttgaggcattagcggtcgcgctggccaacatcgacccgattattgcgctgatcaaagcttcgccaacgccagcagacgctaaagtcaaactggttgagcagggctgggcgctcggtcatgtacagggcatgcttgaaaaagcgggtgatgatgcggcgcgtcctgaatggttagagccagaattcggtatccgtgacggcttatattatctgactgagcaacaggctcaggcgattctagagctgcgtttacaccgtttaaccggtcttgagcacgataagatcatcgctgaatacgaagagctgctcgagttcatcgcaggtctgctgtttattttgcgcagccctgagcgtttgatggaagtgatcaaagaagagctggaagaaattcttgctgaatatggcgatgcgcgccgcacggtgatcaacgccaacgaaattgatatgagtcttgaagacttaatcaacgaagaagacgtggttgtgaccctgtcgcacttaggttacgccaaataccaaccgctgagcgattaccaagcccagcgccgtggtggtaagggtaaagccgcaactaaggtgaaagacgaagatttcgttgaaaaactgctggttgcgaacacccatgatacgattctgtgcttctcagattttggtaagatgtactggctcaaggtctatcagttaccgctggcgagccggacatcgcgcggtcgtccgattgttaacttgctgccactggccgatggcgaacgcattacggcgattctgccggtgcgtgaatacgccgaagataagtacattatcatggcgacctctaacggtaccgtgaagaagactgcgctgacagcttacagcaacccacgtgctaacggcattatcgctgttaacctcaaagacggtgaccaactgatcggtgtcgatatcaccaatggtgatgatgagatcatgttgttctcgaacgaaggtaaagtggttcgctttaaagaaggcgaagaagttgctgtcctcgatgaaaacggcaacccagtgctggatgaagaaggcaatccacaaatcaacttcaagggcgtgcgtccaatgggccgcggtgcgaccggtgttcgcggtatcaagcttgaagaaggccaaaaagtggtgtctctcatcgtacctaagggcgatggcgctatcctaaccgtgactgaaaacggctatggtaaacgtactgaactgtctgaatacccatctaagagccgcgcgaccaaaggtgtggtatcgatcaaggtgagtgagcgtaacggtgcagttgttggcgcggtacaagttggcggcaatgatgaaatcatgctgatcagcgacaaaggtaccttagtgcgtacgccggcgaacggtgtgtctatcatcggccgtaacacccaaggtgtgaccattatccgcaccgcaagtgatgagaaagtggttggtctgcaacgtatcgatgagatccaaggcgacgaagatgaagtcgagctggatgaaaacggtatgccaatcgtcccagttgtcgctgaaggtgactctgttcaacaagagcctttagaggaagaggatgaactggaagaagaattagacgaagacgaagagcttgacgacgagcaagacgaagactaa

SEQ ID NO: 295420 - DNA, 958 bp, Unknown
  Bacterial polypeptide expressing nucleotide sequence isolated from the Sargasso Sea
gatgagctcatcatatctttcttatgcaatgagtgtcatagtaagtcgtgctctaccagatattagagacggacttaaacctgttcatcgtagaattttatatgcgatgtataaaggtggttatgattggtcaaaacaatttagaaaatccgcaagaatagttggtgatgttattggtaaatatcatcctcatggagatcaatctgtttatgatgctttagttagaatggtacaagatttttcaatgagcttacctttggttcagggccaaggaaacttcggttcgattgatggtgatcctgctgcagcaatgagatatactgaaacacgtttatcaaaagtttcacaatttttgattgatgacattgagaaaaatacaatttcctttaagagcaattatgacgaaacagaaaaagaaccaagcgttttacctgcacaatttccaaatttactaataaatggtgcaggaggtatagcagtaggtatggcaactagtattcctccacataacttaggtgaaataatagacggaactttggcacttataagagacaaagaaattaaaattagagaattaatgaaacatatccctggaccagattttcctacgggtggcgttataattggaaaagatatcattaaacaaggttataataaaggaagaggttcttttaaaattagaggtgaagtctccatagaacagcaaaaaaatggtagagagagattagtaattacttctattccttaccaagttaacaaatcagttttaaatgaaagaattgctcagcttgtaagagaaaagaaaattgaaggaataaaggacataagggatgagtctaatagagaaggaataagagttgctattgatctgagaaatggtgttgagccagaaacaataaagagacaactttataaaaatactcagatcgaaagttcttttggatttaacactttagct

SEQ ID NO: 295421 - DNA, 1439 bp, Unknown
  Bacterial polypeptide expressing nucleotide sequence isolated from the Sargasso Sea
actgatatataataatattatattatacaacatcatcgtgaaaaaaaaatatacatcatctgatatagaggttctcaaaggaatcgaaccagttcaaaaaagacctggtatgtatactgatacatccaaccctaatcatcttgtccaagaactcatcgacaatagtgtagacgaggcaatttccggattttgcaatagtatccttataactcttgataaagacaattctataaccgtagaagatgatggcagaggaatgcctgttgataaacatcctgactataaagtctctggtgtagaggtaataatgacgaatttacattctggagcaaaattctcaaacaaaaactataaattttcaggtggtcttcatggagtaggagtctctattgtgaatgctctcgcagcaatgcttgaaatttctgtttatagattggactccaaaaaagagcataggatgagctttcttaatggatctattaaaaaaaaattaggagagcatgtaaaatctaaaaataaaaagcagggtacaattattaaatttattcccaatgagaaatattttgacaccattgacgttgatataaaaagcctacttaacttaatcaaagcaaaatcaattctacaacctgaacttaaacttactcttgatgataaaaaatatggatcaggtataagtgctttttatcataaaggtactttaagggaatatataatctctcaatttaataaagatactaacattttgcctaacgagacctattcaaattcaattgattgtggagatttttctatggattggagttgtgcttgggtagatagtgatgttgataatattcaagaaagctttgttaatcttataccaacatcacagggtggtacacatgtgaatgcatttagaaatgcggtagttgattcaattaggaattattgtacagaaaagaaattaatgaccaaacagattaaaatactaccagacgatgtttggaaacatataacttttattgtctccttaaaaatgatgaaccctcaatttgctggacaaacaaaaaataaattacaatctaataatatttcatcaaaactcacttctgaaattaaagataattttgatatatggcttaacaagaatccccagaaagctgaacaaatagctaagcatattatagctaatgcagaattaagattagattctgaatcttataaaccaaaattaccaactactaaaaatcttctattaccaagcaggttagcagactgtacattaaatgattcacgtgtaacagaattatttattgttgaaggtgactctgcgggagggtccgcgaaacaagcaagggataagtcgtttcaagctattctccctttgagaggaaaaatattgaatacatgggagattaatcatgcaaagatacttgactctaaagaggttaaagata

SEQ ID NO: 295422 - DNA, 1969 bp, Unknown
  Bacterial polypeptide expressing nucleotide sequence isolated from the Sargasso Sea
atgagtgaggacaaaagatctaataaaatctcaaatgattatggcgcggaacagatacaggttttagaggggttagaaccagttcgtaaacgccctggaatgtatataggttcaacagggcctaggggattacatcatttagtatatgaggtggttgataactcggttgatgaagcacttgcaggacattgtgatcacatagaaatagttcttcgagcagatggttctgctttaatttctgataatggacgaggtattccaacagatattcatccaagaacaggaaaaagtgctttagaaactgtactaactgttcttcatgcaggaggtaaatttggtagtggtggttataaggtttcagggggtttgcatggcgttggaatatctgtagttaatgctctaagcgaatgggttaatgtgactgtttatagggatggaagcgaatttaatcaaagatttgaaaaaggtgtatcaaagggtgaattggaaactaaaaagcagactggtaaaccatctaagaaaggaactactatttgctttaaacccgacaaaacgattttttctggaggaattgaatttgaatatgctctcctttcatcaagactaagggagttagcttatcttaatggcggagtaaaaattgtttttagagatgaaagaaatcaattatcagatggttcgtttaaagaagaaatttacttgtatcaaggaggtattaaagaatatgttgaatatatgaatgctgaaaaagattctattcatcctgaaataatttatgttgactcacagaaagaaaatgtatatgtagaagcagctttgcaatggtgttcagatgtctattcagataatattttaggatttgcaaataatattagaactattgatggaggaactcatattgaagggctaaaaacagttctgacaagaactttcaataatcttgcaaaaaaaagaggcaaaagaaaagatattgaaaaaaatttagctggcgaaaatattagagagggtttgactgttgttttatcagtaaaagttccagatccagaatttgagggacaaacaaaaacaaaattaggaaatactgaagtacggggaattgtggattctctcattggggaggccctcacaaaatatatggaatttaatcctggtattttggatttgattcttgaaaaagcaattcaatcatttaatgcagcagaagctgctagaagagcaagagagttagtaagaagaaaaagtgttctagaaagttctacattaccgggcaaattagcagattgtagttccagagatccctcagaatcagaaatttatatagttgaaggagattcagctggtggctccgcaaaacaaggacgagatagaaattttcaggctattttgcctcttaggggtaaaattctcaatattgaaaaaactgacgatactaaaatatataaaaatacagaaatacagtcattaataacagctctaggattaggaataaaaggagaggagttcgaagagagctctttgagatatcatagagtagtaattatgacggatgctgatgttgacggtgctcatataagaactttattgctgacatttttttacagataccaaagagaacttgttgagaaaggttttatatacattgcttgtccccctctttataaagttgaaagaggtaagaatcataattattgttataacgagaatcaattaaaggatacaattcaaggttttggagaaaatgcaaattataatatccaaagatttaagggattaggggagatgatgccaaaacaattatgggatacaactatgaatcctcaaacgaggatgatgaaaagggttgaaattgaagatgcacttgaagctgacagaatattcaatatattaatgggagataaagttgcaccaagaagagaatttattgaaactcatagtagcaacttagatatggcaactttagacatatgat

SEQ ID NO: 295423 - DNA, 1660 bp, Unknown
  Bacterial polypeptide expressing nucleotide sequence isolated from the Sargasso Sea
attggaaatagttctctcaacccttcatgccggtggaaagtttgataataattcttacaaaacttcaggtggattgcatggtgttggtatttccgtagtcaatgctctaagctcacatttacaagtaatagtttttaaaagtggtaaaaaatattcacaaacatatgcaaagggaaaagctaagacaaagattaaaatagaaaagtgcaaaaaaaatgaaaaaggtactgaaattaattttatacctgatgagtctatatttgagactacacaattttctcctaaaaaattatatgagttcataaaaatgaaagctgttcttgtatcaggaacatcaatagaatttaaggttgataaagaattaataaaagacagcactccaaattttgaaaaatttcattttaagaatggcattgctgattttttagataataatagtaaaaattctaataggttatttgataaaaaattttcaataattaaaaaaataaatgaaaatgaaaaatgtgaaatatttacttgctttaatcaaaatgaaaaatcatcatttatttctttttgtaatactattgaaactccagatggaggctcccatgaaaatggatttaaaaatggaatactaaaagcaatcaaattatatggtcaaaaaaaccaaatcgcaaaaatatcaaacattaatataaatgatttatctgactactccgacatagttatctctatatttatcaatgaaccaagctttgaaggacaaacaaaaaaaagaattataatgccaaagcttcaaaaacatcttgagaaccttattcaaaatgaatttgtattatggttaaattctaataaaaaaattgcaaaaactcttcttgaaactttaattgaaagatctttacttagaactgatttaacaaaaataaaagagttggagagaaaatcaatcaaagagaggaataaacttcctggtaaactagttgattgttctagtaaaggaattgaaggtactgaactatttattgttgaaggcgatagcgcaggaggttcagctaagcaagcaagagacagagaattgcaggcaattcttccacttagaggcaaaatattaaatgtctttagtgtcagtttgtcaaagattgctgacaataatgaaattcaaaatcttattcagtctttgggatgcggtattggtaaaaattttgatttagcaaaattacgatatgaaaaagttattctgatgaccgatgctgatgttgatggttcacacatcgcaactttactaatcacttttatctataagtatatgagacctattattgataataatagattgtttttagctatgccacctctttttaaaatacaacataaagaaaaaattttttatgcatatgatgagaatgaaaaagataaaataattaaatcagaatttaaaaaaataattcctacgttaagtcgatacaaaggacttggggaaatgcctgcagatcaactgaaatcaactacaatgaacccagaaaagagaaaattattaaatgtaaacattaagcaaggaaaaaaagaactgaaagaaactgaaaaattatttgagtccttgatgggtaaaaaggctgaatatagatttaagtttattcaagaaaatgcaaactttacaaatcaaatagatatttaa

SEQ ID NO: 295424 - DNA, 2482 bp, Unknown
  Bacterial polypeptide expressing nucleotide sequence isolated from the Sargasso Sea
atggacctaggcagagacaatatattagataaacagttagttaaggaacttgaagaaagctatttaaactattcaatgtcggttattatgtcgagagctcttccagacgcaagagatggtttaaaaccggttcacagaagaattctttttagcatgagcgaaatgtctgcaatgtggaacaggccatataaaaagtctgccagggtggttggtgaggttttaggtaaataccacccacacggagatagttctatatatgacgcaatggttagaatggcccaagaattttcaatgagacacgagcttgttcagggccaaggaaactttggatctgtagatggagacagagcagctgcgatgagatataccgaatccagaatgtcaaaaattggcagcgaacttttaagagatatagacaaagaaactattccttggacaaacaattttgatgaaaccctgaaagagccagctgttcttcctgcagtatatccaaacttacttgttaatggttcagaaggaattgctgttggaatggcaaccaaaattccaccgcacaatctatcagaactggtagatgggctggtagagcttttggctaaccccgaagcagaagtaaaagacctaatgaaacatataaaagggccagactttccaacctccggaaaagcccttggcattcaaggtattgttgatgcctatgaaactggcagaggaaaggttattatgcagggaagggcacatgtcgaaccagcctctaaaggaagagattctttaattgttacagagctaccataccaagttaataaagcaaacttaattgaaaaaatagcctatttagctagagataaaaaaattgaaggcatagcagaactaagagatgaatctgacaaagacggaatgcgaattgttattgaaataaaaagagatgcagtccccgaagttgtattaaatcaactatataaacaaacccaactacaagacacctttggaataattttattagctctagtcgatggaacaccaaaggttatgaatctaaaagagatccttgaggtttttatatcctttaggctagacgtagtagtaaaaagaacaaagtttgatttagcaaaagccgaagctagggcacacatattagagggtttaaaaattgcccttaaaaatatagacaaaattgttgaaacaattaaaaaaagcaaggatcctgtttctgctaaagaagccctaatggagggctttggtttatctgaaaaacaatcacaggctattcttgatatgaggctacaaagattaaccggacttgaaacagataaaattatgagtgaatacaaagacataatacaacacatatctgaattaaaaggaattttagaaagcaaatcaaaaagagtagaaattattaaagaagaacttcttgaggttaaagaaaaatatggagaagaaagaagaacagaaataataaaagactttacaacccttagcattgaagacatgattgctgaagaggaaatggttttaacaataactcataatggatacataaaaagaacaaaccttaacacctacagaagccagcgaagaggcggcagaggggttcagggagcaacatctagagacgaagattttgttgaacacctgtttgtagcaaacacacacagctacattttattttttacagacaaaggaaagtgttattgggtaaaagtgtatgatataccagaaggcggaagagcagcaaagggtagggctattgtaaatcttattggttgtgagccggacgaaaaggttagtgcatttataagcgttaaagaatttaatgacgatcactttgtggtaatggcaactgaaaagggaatagtcaaaaaaacaaaactttctgcatactcaaacccaagaaagaagggaatttatgctgttgaaataagagatggcgacaaacttatagaggctcgagtttctactggagataatgacatattgctcggaactagaaatggaaaatctataagattttctgaagaacaaattaggccaagcggaagaaaaacaatgggagtaaaaggaataactttgagctcaaaagatgacaggcttgttgggatgttgttaattaagagagagggaactacggtgttggtcgcaacagaaaagggttttggaaagagaactgaaatatcacaataccgcgcacaaaaaagaggcggaaaaggcgttttaaccatgaaaaccacagagaaggttggaaaaatggttacaattaaagaggttgttgataaagacgacttaatgattattacaaaccagggcgtactaattagacagccggtatcccaaataagagcaattggaagagcaacccaaggagttaaattaattaaactgggagaaggaacgctggtttcttcgattaccagaattatgtccgaagaagatgatggagatgaaaacaatagcgcagaacctgaaggcagttcagaatagc

SEQ ID NO: 295425 - DNA, 1366 bp, Unknown
  Bacterial polypeptide expressing nucleotide sequence isolated from the Sargasso Sea
ctggcttatttaaataaaaaactttcaattaaattaataaatgaacccgaagaaactgaaacggaatattgttttcctggaggattatctgattttgttaaatatttagacggaaatgaagatcttattcatgacgaagttatttctgttacaaaagaagacatagaggttccagtagatttagctttaagatatagcacaaactataatagcaatattttttcttttgtaaataatattaacacaattgaagggggaacacacctttctggttttagatctgctcttacaagagcattaaacagttatgccaataaaaatgacctaattaaaacaaaaaagaatgaaaagttttctctttctggagatgatttcagagaaggattaacagttgttatttctgtaaaagttcaagaacctcaatttgaaggacaaacaaaaaccaagctcggaaatggtgaagttaagggaatggtagataatgttgtatatgatggaatacaggcatttcttgaacaaaatccaaaagttggaaaaagaataattgaaaaggcagcagaggctgcaagggcaagaattgctgctaaaaaagcgagagaattagttagaaaaaaatctggactaggctcaacaaccctgccaggaaaattagcagattgttcaaataaagatcccctacagtgtgaactttttcttgttgagggggattctgctggaggtacagcaaagcaaggtagagacagaagaacacaagccatattaccccttagagggaaggtaattaactcagaaaaagcaagagaagacaagcttttagcaaacaacgaaattcagtctattataacggcgcttggatgtggttttggtgaagacgaagacgacccaaacagctttaaccccgaaaaattaagatatcataaaatagttattatgacagacgctgatgttgatggtagccacattagaacgcttttattaacattcttttggagaaaaatgaaaagcttggtacaaggaggttttttatatatggcaatgccaccattatataaaatgaagcagggtaaaaaagaaagatatgcatatacagacgaagaaagagatcaggttttacaacgaatggagtccgaaaataaggcaaaaattgatatacaaaggtataagggtttgggagaaatgaacgcagaacagctttgggaaacaacaatgaatgcagaaaccagaacacttatgcaggttacagttgatcatattatggaagaagaaacaaacgtaagatttagagaattaatgggaacagaagtggaacacagaagatcttttataacagaaagagcaaaattcgcaacaaatatagatatataat

SEQ ID NO: 295426 - DNA, 2437 bp, Unknown
  Bacterial polypeptide expressing nucleotide sequence isolated from the Sargasso Sea
catgccaaaaccggtaaaaaaatcaccaaaaaaacctctccaaaaagctaaaaacgaagccagttatgactcctcaaatataacggttctaaagggcttagaagctgttaaaaagcgtcctggtatgtacataggtgataccgatgatgggactggccttcatcatatgatctacgaagtgctggataactctatcgatgaagcgcttgctggctactgtgagaatgtcactgtaacggttcacgacgattccaaggttaccatttcagatgacggaagaggtataccagtagatatccataaagacgagggtatttcagcagctgaggtcatcatgacaaagcttcacgctggaggaaaatttgatgacaattcatacaaagtttctggtggacttcatggtgttggtatttccgttgtaaatgctctttcagaatatcttttattggaaatcaatagagatggttttagttatacacaagaatacaaagacgggaccccaaaatcaaaattaaagaaaggcggcaaatcaaataagactggaaccagcatcacttttattccatctttagaaacttttggaaaaaatagaacttttgatcatgacactctttttaaaagactaagagaattgtcatttctaaattctggactatcgataattctaaaagacgagcgcgatggaagatctagtaactttaaatcagatggaggccttgaagagttcgtgaccttcctaaacaaaaaaaagtcggtaattaataagccttttagatttttgaaagaaacaaaagatggcatggctgtggagctagccctgcagtggaacgatagttatcaagaaaatactctttgctacacaaataacatttttcaaaaagatggtggaagtcacttaagcggatttaagaccgcgctcaccagaagtttaaataattttatggaaaaggaaggttacttaaaatctggtgacttaactccatccggtgaagatgtcagggaaggtttaactgcagttatttctgttaagttaccggatcctaaattttcatctcaaacaaaagacaaattggtttcatctgaaattaagcctgtagtcgagcaagaaacctataagcatttaaatgattttcttttagaaaacccaggagaagcaaaacagattgcaaccaaaataattgatgcttcaagggccagagaagcggcaagaaaagctagagaaatgacaagaagaaaaggggttctagatggaataggcctccctggtaaattagcagactgccaagaaaaagatccttctctaagcgagttgtacattgtagaaggagagtcagcaggtggttcagccaagcaagggagaaacagacataatcaagctatttatccgatgaaaggaaaaatccttaacgttgaaagagcaagaatagataaagtcttaaactccgatgaaattgtaaatatcataaccgcactgggttgcggtcttaaagaagactttgatttggaaaagttaagatatcattcagttgtaataatgactgatgctgatgtagatgggtctcatataagaactttgttattaactttcttttatcgtcacatgccagaagttttggaagccggtcatatttttatagcgcaaccgcccctgtataaagttggtcgcggcaaatcagaggaatatataaaaaatgattccatgttaagaagcttcctggtgaataagatttctcaagagacggttcttcatctaactaaaacaaaaaaattaaccgaacaggatttctctagcatgctcgcttcatataactcaatggtggactttgttgaatcttcaaccaacaatgctccaaccttattcattgaggcaattttaaattccaaagactatgctcagaaaaatattgcaggatggctgaaagaaataaattcaaacctaaataaaatttcttcagatgatatagaaatcaaagttgaattagacaatgaaagcaaatctagattaataatctcccaaacagaacacggaaacacattagcaactatattgcctctatctttctttaagtctaagggctataaattaattttggaattcaaaaagaaaattttcggaatcaagccaaattcttcttttttcatgaaaggagaagctaaaaaagaatttacagacaactttatcgattcttttgaagaattattcgaggattcgaaaaaaggactaaccattcaaagatacaaaggtttaggagagatgaatgcagaccagttatgggaatcaacgatgaatccagatagtcgatctttactaaaagttacaatagaagacgctgaagcagctgatgaaatcttttacaacctaatgggagacgatgttgagtccaggagagaattcattgaaactaacgccgggctagttagtaatattgatatttaa

SEQ ID NO: 295427 - DNA, 721 bp, Unknown
  Bacterial polypeptide expressing nucleotide sequence isolated from the Sargasso Sea
atgccaaaaacaaagaaaagcactaacacaaaaaagtacgactcctcaaacataaaagtcttaaagggccttgatgctgttcgcaaaagaccaggcatgtacatcggcgatacagacgatggaactggtcttcatcacatggtatacgaggttgttgacaactctgttgatgaggcgttagctggttactgctcagaaatatctgtaataatccatcaagatgactctataaccgttaaagataatggaaggggcgtgcccgtagataaacacaaaggcgaaaataaatctgctgcagaagttattatgactgttctgcatgccggcggtaagtttgatgatgactcttataaggtttctggcggactccacggtgttggagtctcggttgtaaatgctctttctcagaccttaagtttgcgaatccataaaaatggaaacatatacgaacaagattatgctcatggagcgccaaaaaaaccacttaagaagggcgctaagaccgagagaacaggaacaaccatatcctttcagccgagtaaaaaaactttttcaaatacctcattcagctatgaaacgctctcaaaaaggctgagagaaatgtcttttctaaatccaggactcaccattaatctcaatgacgaaagaacaaacaaagcagattcttattgttatgaaggaggcttaaaggattttgttcgtcaccttattaaaccaaaaa

SEQ ID NO: 295428 - DNA, 1804 bp, Unknown
  Bacterial polypeptide expressing nucleotide sequence isolated from the Sargasso Sea
atggttgattttaacagagacaacacccttcctagggatattgttgatgaaatgagagaaagctatctcaattactctatgtctgtaatagtttcaagagccctaccagatgttcgagacggtcttaagcctgtacatagaagaatattgtatggtatgagtgagcttgggtcgagctggaacaggccttataaaaaatctgcaagaatagtcggagatgttttaggaaagtatcacccgcatggtgacagttcggtttatgatgccctggttcgtatggctcaagacttttctatgagatatgagcttgtagatggccaaggaaactttggctctattgatggcgataatgcagctgctatgagatacactgaatctcgaatgacaaagctgtccagtgagatgctcaaagacctcgataaagacacggttgactgggagccaaactttgacgaaaccctgaaagaaccctctgttttaccttcatctgttccaacattgttaatcaatgggtcagaaggcattgctgtaggaatggcaaccaaaatccccccgcacaacctgatggaacttgttaatggaattgtcgcgttaatagaaaagcccgatattttaacagatgagttaatggggcatataaaaggacccgactttcccacggccggtcttattttaggaatggacggactaaaggaggcctatgaaactggtcgcggaaaaataaaaatgcgtgcccgcgctcatatagagtccaacaagaacggcaaagacagtattgtaataacagaggttgcgtatcaaaccaacaaagctaacttagttgaaaaaattgcagacctagtaagagataaaaaagtccaaggaattacagatttaagggatgagtcagataaagatggcataagggttgtgattgaaacaaaacgagatgctgtgccagaggtaatattaaaccagctttataaacacacacagcttcaggacacctttggtattattcttcttgccttggtaaacggtataccaaaaataatgagcttaaagaccgtgctccagcattttatagacttccgccatgatgttgtggttaggcggaccgagtttgagcttcgagaagctgaggccagggcacatattcttgaggggttaaagattgccctagataatatcgacgaggtgatttcaattatcagagaaagcaaagaccctgtcatggccaaagagggactgatgaatggttttaatctaaccgagattcagtctcaggcaattttggatatgagactacagcgccttacgggcttggaggtagataaggtcgtaaaagaatataaagaactcatccagcacattgctcacttaagaggtattttagaaagcaaaagccaacggatggatattataaagtctgagctcttagaggttcgagaccaatatggagatgagcgcagaacagaaattgttcccgtagactctgatttttcaatggaagatatgattgccgaagaagaggtggtattaacaattacccatcagggatatataaaacgaacagcgctaaacacctatagaacacaacggcgtggaggtcggggagttcagggtgctatgagtaaagaagaggattttgtagaacaccttttcattgcaaacactcacaactatatgctttttttctccgaccagggaaagtgttactggcttaaggtgtacgatattccccaaggaggtcgcgctgcgagaggaagagcaattgttaaccttattgggtgtgatcctggtgaaaaagtagaggcgtttgttg

SEQ ID NO: 295429 - DNA, 1086 bp, Unknown
  Bacterial polypeptide expressing nucleotide sequence isolated from the Sargasso Sea
gaggtactcatttgtcaggatttagaagaggattaaccaacacactaaaaaagtatgctgaatcctctggacttactgataaactgaaatttgatatatcaggtgatgattttagagaaggtctgacggctgttatttctgtaaaggtagcggagcctcaatttgagggtcaaacaaaaaccaaattaggtaatagagaagtgagttctgctgtatctcaatcagtgtctcaaatgcttgaggattatcttgaggagaatccagaggattcaaaaataattgttcaaaaagtaattctggctgctcaggcaagaaatgctgctagacaagcaagagaaatgatccaaagaaagactgtaatgacaggtggaggtcttccaggaaaactatctgattgttcagagacagacccttcaaagtgtgaagtatttttggttgagggtgattctgccggaggaactgccaaacagggtagagatcgagtctttcaagctattcttccattaaggggtaagatattaaatgtagaaaaggctcaacagcacagagtttttgaaaatgaagaaattagaaatatatataccgcgttaggggtttctgttggaaccgaggaagatagtaaagctcttaacctcgagaaattaagatatcataaaataattattatgtgtgatgctgatgttgatggaagtcatatatcaactttaatactaacttttttctttagatatatgagagagcttgttgaagctggaaatatttatattgctacaccacctctttatctagttaaaaaaggtaataaaaaagtttatgcttgggatgataaagaaagagataattatgctaaagattttggtacaggtgtgtcaatccaaaggtataaaggtttaggagaaatgaatgctgatcaattatgggacacaactatgaatcctgagtctaggacattaaggcagatatctttgaattttgataattctcaagaagctgaaagatggttttcaactttgatgggagatgatgttcctccaagaagaaaatttattgaggataatgcagtttatgcaaaaatagatgtttaaa

SEQ ID NO: 295430 - DNA, 2206 bp, Unknown
  Bacterial polypeptide expressing nucleotide sequence isolated from the Sargasso Sea
aatgaaaatcaaaaacattaacttcactgacgcgttagaagaaaagtatctagcatacgcactttcaacaattactcatcgagcgctaccagatattcgtgatgggctaaagccggttcatagaaggctattgtttgcaatgtttcaattaaggttaaactcaagttctggttttaagaaatcagcaagaatagttggcgatgtaattggtaaatttcacccacacggagatcagtctgtttatgaagcactcgtgagattagctcagaatttttcaacaaggtatccgttagttgatggccaaggaaattttggcaacattgatggagataatgcagctgcaatgagatatacagaggcaagattgactgcgttagcagagctaatgctaaaagatatatcagaggataccattgattacattaatacatatgatggcatcgatcatgagccaatagttcttccatcatcgtttccaaatttgctagctaatggaagttcaggaattgcagttggaatggcgacaaatattcctccccataacattaatgaactgtttaaggctttatcaaaattattaaaaaatccaaattatactaactcacaattactaaagcttattccaggaccagattttccaacaggaggagaaatcattgatagtgatgatgcattgaaagatgcctatgtcaaaggaaagggaacaataaggcttcgggcaagatggaaaaaagaagaccttggaagaggtcaatatcaaattatcgtctatgaaattccctatcaagtaaataaagccagaattatagaaaaaatatctgatcttattgataataagaaagcaaattatctagaggcaattcaagatgagtctgcagaagacatcagaatagttctcattccaaaaaatagaagttttaaagctgaagtaatttttgaagacttatgtaagaattcagatttagaaattagatacgccatcaattttaatgcaatcaatcacaaactcgagccaaaattattttcacttaaagagagcttaaaatcatttattgaccatcggtttaatgttttaaaaagaagaacaaagtatcgattaattcaaactgagaataggcttgaaatactcaaaggttttttaatagtttataaaaatttaaacaaagtaattaaaattattagaacagaagcagatcctgagaaaaagttgattagtgtatttagaataaataagaggcaagccgaagcaatattggcaatgaggctaaggcaattaaaaaaattagaagaaaaagaaattaaaaaagaaaatgaagatttgaatacatacaagaaagaattaaacaaactactaaaatcaaaaaaagagcaaataaaggaattaaatttagaattcacaaaaagtttagaaatattttcaaaagatgaaaatgctacaaatagaaaaactgttgttaatacagaatataaagaaattgactactcgactgaagaatttgaaagtaaagatcccgtaacagtgatactctcaaaaaatggatggataaaaaccataaaaggacatcaggatgattatacaaacgtgaagtataaagaaggagatgctgagaaatttattataaaattaaaaaataatagtaaacttctgcttttttctactttaggtaaattttatacaattaattgtaacaaaatatctgccggaagaggttttggcgatcctgtcagtctattgatagataaaaatgataatgaagaaattttatttgcaactacttatgagcaagagaaggaatatctaattaccagtagtgcaggcaagggatttttcgtaaatacctcagatttaatggcgtctactaaatcggggaaaagggttatgaatttaaaaggtaatgaaaaagccatctcctgttttcaaaagaaaggagacttaatagctgtttttagtggtgaaaagaaagcggtaaaacttctaatttttgatcattcagaaatacctttaatgcaaaaaggaagaggggtgacattacagaaattcaaaagtggaaaaactttgagcggtatttgctttgactctaaggaaggtattttaaatgagaataatggtaaaactcttttggcggccaatgaaataaaaaaatggctgggtaaaagagctcaagctggtaaaattgaacctaaaagtttacattccaaaatttaa

SEQ ID NO: 295431 - DNA, 655 bp, Unknown
  Bacterial polypeptide expressing nucleotide sequence isolated from the Sargasso Sea
gatgagctcatcatatctttcatatgcaatgagtgttattattagtagagctcttcctgatattagagatggcttaaaacccgtacatagaagaattttatatgcaatgcataagggaggatttgattggtcaaagcaatttagaaaatctgcaagaatagttggagatgtaataggtaaatatcacccacatggagatcaagctgtttatgatgctttggtaagaatggtgcaagatttttcaatgagtttacctttaatagatggtcaaggaaactttggatctatagatggagatccacctgcggccatgagatatactgaaacaagattggctaaagttgcccaatttttaattgatgatattgaaaaagaaactgtttcttttaaaagcaattacgatgaaacagaatttgaaccaaatgttttacccgctcagtatccaaatctattagttaatggagcgggaggtattgccgtaggaatggctacaagtataccgccacataatcttggtgaagtaatagacggaacgttagcattaataaagaacaaagatattaaaatgaatgaattgatgaaattaatacctggaccagactttcctacagggggaataataattggtaaagatattattaaacaaggatataaa

SEQ ID NO: 295432 - DNA, 2626 bp, Unknown
  Bacterial polypeptide expressing nucleotide sequence isolated from the Sargasso Sea
tttggatactaaaatatatccaaacatagatattacagatgaattagaaaaaagttatttagattatgctatgagcgtcatagtctctagagctttacctgacgttagggatggattaaaaccagttcacagaagaatactttactctatgtatgagtcttcgtaccatcacaacaagccttataaaaaatctgcaagaatagttggagatgttatgggtaaatatcaccctcatggtgactctgcaatatatgagtctatggttagaatggcacaagattttacaatgcgtctccccttgatagatggccagggaaattatggttctatggacggagatcctgctgcagcaatgcgttacaccgaagctagattagataaaatctcgtcttatatgttagaagaattagagtatgaaacagttcaacttagagcaaattacgatgagacattaacagagccaaaagttttaccatcaagatttccaaatatttttgtaaatggcgccagtggtattgcagtaggaatggcaacaaatattcctcctcacaatcttggtgaaattatagacgctactttacttctagtagatgaaccagatacaacttctaaacaacttcataagatcgttaaagggccagattttccaactggaggaattatatctggtactgctggtctaagctcaatgtatgaaacaggtaggggaagcgttacagtcttatctaaacttcatgaagaaaaaattaagagtagaaatgcaattataattacagaaattccttacttgcaaaataagtcaaaacttttagagcgtattgctgacgtagttaacaataaaacgatagagggtattaacgatattcgtgatgagtcgaataaagagggcgttagaattgtagttgaattaaaatcatctgctgtgcctgaaataataaaaaatcagctatttcaatatactcccttaaaaacctcattcagcagtaatatgcttgcattaaaagagacaaagcctttaacacttaatttaaaagatggcctcacttattttattaattttagaaaagatgttattacaaaaagaactgtatataaacttaacaaagcaagagaaaaagctaacattttaattggattatcaattgctgttaataatattgatgcagtaattaaccttattaaaaaatctaaaactccattagaggctaaagaaaaattattatcaacaaaatggacagtaaaatccaatgttactcaatacattaagttaataaacccttcttttaagttatcaggatctaagatactgttagatgaggaacaagctaaggctattctagaattaagacttcaaaagttaacagctttagaaagagatgatttatttaataatttaaaatcacttgtagaagatattaatatatatctcaaaatattaaattcagataagcaactattaaaagtattaaaaagtgaattgaaagaaattaaagataatttttctacagttcgaaaaactgaaattcaaaaacatgatattgaagacatagatacggaagatctaataatcgaagaggatgttgtagtcacagtttcccatcaaggttatttaaaaagagttctaaaatcctcttacaaagttcaaaaaagaggtggtaaaggtaaaaaagctatgactacacgagatgaagattttcttgaacaagtatttgcagccactactcgtgatacaatattattttttacttcagttggaaaagtttattctatgaaagcctatgaattacctgctggcacacctacatcgaggggaaaagcaatagttaatcttattccaataacaaaaaacgaaaaaatttcttctattcttacattgccaaaagatattgatgattttgagaattataatttagtttttgctactagtcttgggaacattagaaaaaataaactaaaagatgttgcaatgagtggttcaagaaaattatctagaacaggtaagactgccattaaacttaaaacaggtgataggttaattggtgtaatttctgttatagaaaatgatgatgtacagcttgcaacaacaaatggtaaatcaattagatttgctacaaaagatttaagagagttttcaggattaggctctgcaggtgtaagggggattaaactagctaaagatgataaagttgtatctgtatgtagtttacttcataataaaatatctatagatgtaagagagtcctatttaaaagcaaaaaatgaggctaaaaaagatatatcaaaaataaataataaatttaaagaacttgcaaatacagaagaatatcttttgtcaattaccgaaaatggttatggtaagttaagttctgcttatgaatacagaattactaatagaggtggatcgggagttactaatattactgttacccctaaaaatggaagagttattcaatcattaaaagtaaatttggatgataatatagctttaatttcagatactggtaaattattaaggtgtaatgttggagataacatcagagtagttggaagagtttcccaaggtgtctctgtatttaaagtagatgcaaatgaaaaaattgtctctgtagcaaggttagaagattaa

SEQ ID NO: 295433 - DNA, 949 bp, Unknown
  Bacterial polypeptide expressing nucleotide sequence isolated from the Sargasso Sea
aatgaagataaaaaatattaattttactaaggctttggaggagaaataccttgcttacgctttatccacaattactcatcgagctcttccagatgtaagggatggcttaaaaccagttcatagaaggcttctctacgccatgtatcagttgagattaagttctaattcaggatataaaaaatcggctagaatagttggagatgtaattggtaagtttcatcctcacggtgaccaatcagtatatgaagctcttgttcgtttagctcaggatttctcaactcgctatccattagttgatggacaaggcaactttggaaacattgatggcgataatgcagcggcaatgagatatacagaagcaagactaacagcactagctgaattaatgattcaagatatatcagaggaaacgattgattatataagtacttatgacggagtagatttagagccaatagtattaccatcatattttcctaatcttttagcaaacggaagttcaggcatagcagtgggtatggcaacaaatattccaccacacaatataattgaattattttcggctctaacaaaattattaaaaaatccaaattacactagctcacaattaataaatattataccaggtcctgattttccaacaggaggtgaaattgtcgatagtaagacagctatcagagaagcttatttaaaaggaagagggactatacgtctaagagcaaaatggaaaaaagaagacctaggaagaggacagtatcaattagtaatttatgaaattccttatcaagtaaataagtcaaagattattgagagagtatctgaattaattgattctaaaaaaataaattatcttggagcgatacaagatgagtctgctgaggatattagaattgttttagtgcccaagaatagaacttttaagccagaagtaatttttgagggatttgtg

SEQ ID NO: 295434 - DNA, 1927 bp, Unknown
  Bacterial polypeptide expressing nucleotide sequence isolated from the Sargasso Sea
atgccgaaaaaacaaaataaaaaaggatcctacgactcatcaaacattcaggttctaaaagggcttgaagcagttaaaaaaagaccaggaatgtatataggtgatactgatgacggttctgggcttcatcatatggtttttgaggttgtagataactgtattgatgaagcaatggcaggtcactgctcggaaatagttgtttcaattaataaaaacgggtcaataactgtgaaagataacggcagaggaatacctgtagatacccataaaaaagaaaaagttcctgcagctgaacttattatgacaacccttcactccggcggaaaatttgatgataacagttataaggtctccggaggccttcatggtgtaggtgtatctgttgttaacgcactctctgaggaactaacgctgaaaatttgcagagatggcggacaatatgaacaaaaatattcaaatggcaaagcccaaacaaaattaaaaaaagttaaagcttcaaaagaaacaggaactgagattacatttaagccatctaaagagatattttctttcgtaaactttgatatagataagataaataaaagagttcaggagttatctttccttaatgctggagtcaacattcttgttgaagataaaaaaacaggtaaatcgaagaagttttccaatagcggtggattatctagttacgttaaatttttaaaaggaagaaaacaaaacatatctgaaatatttcattgcgaaggagagcaagacggactaactgttgaaatagcccttcagtggaatgatgcatattcagaaaatgttctgtgttatacaaataatattcctcaaaaagatggcggaacacacctttcaggatttcgatcaagcttaacaagggtaatgaaagcctttgtaagaaaggaagagctaaataaaaaatcgcctgttgaacttttgggtgaagatgttagagagggcttaacagcaatagtctcagtaaaaatacccgacccaaaattttcatcacaaacaaaagaaaaacttgtatcttcagaggtcgagactgtagtcagcaacgtttttaacaaaaactttaaagattaccttctagagaatccgaaggaagcaatgtcaatactaacaaaaatatctgaagcagctcttgctagggaagcagcaagaaaagctagagaaatgacaagaaggaagggagttttagaggttgcaggattaccaggtaagttagcagattgtcaggagaaagatcctgcattatcagaaatttatattgtagagggtgattctgctggaggatcagctaaacaaggaagaaatagacaaaatcaagcaatactccccctaaaaggaaagattttaaatgtagaaaaagcaaggctagacaaggttttatcctcccaagagataggaacccttgtaaaagctttagggtgtggaattgggaccgatgaatttgatgcagataaattaagatatcacagaataattatcatgacagatgctgatgtagacggttctcatataagaaccttgctcctgacatttttctttaggcaaatgtttgaaatcctaaacagaggccatgtttatattgccctaccacccttatataaagtctcaaaaggaaaaagtattaaatatgccgcgtcagaaaaagaaaaagatgctgctttaaaagaactatctaaaacgggtaatagaggcatagagatacaaagatacaaaggtttaggggaaatgaatccagaccagctttggacgacaacaatggatccccaaaatagaagaatgatgaaagtaaggattgatgatgcaaatgaagccaataactcttttgaagtgcttatgggtgatcaggttgagccaagaagagagtttattgatgaaaacgctctatcagtagcaaatttagatatttagc

SEQ ID NO: 295435 - DNA, 1255 bp, Unknown
  Bacterial polypeptide expressing nucleotide sequence isolated from the Sargasso Sea
aatggggggtctctcaagttacgtcactcatctcaaaggaaggaaacaaatcgtatcagaaatatttgagtgttccacaattgagaatgatgttggtgttgaaatagcaatgcagtggactgactcttattctgaaaatgtgctttgttataccaataatattccacaaaaagatggaggaactcatttagcaggctttagaggaagtcttacaagggtactaaaatcttttattaagaaagaaaatgcaaaaaaaacaccaacagatttgctgggcgaagatgtaagagaagggcttattgctataatttctgttaaagttccagatcctaaattttcatcacaaaccaaagaaaaactagtttcatctgaagtggaaggagttgttagcacagtatttagtaaatattttaatgagtttttattagaaaaccctaaagactctataagtattattgctaaagtttcagaagcagcgcttgctagagaggccgcgagaaaagcgagagaaatgactcgaagaaaaggcgttctagaaatagcaggattacctggaaaattagcagattgtcaagaaaaagacccaaaactctctgaaatatacatagttgagggagattctgcgggaggatctgcaaaacaaggtagaaacaggaaaaatcaagcaattttgcctttaaaaggaaaaataattaatgtagaaaaagcaagaatagacaaagttcttggttcagcagaagtaggcacactcattaaggcattgggatgtggaattggtgaagaagattttgatataaacaatttacgataccacagaataataataatgacagacgctgatgtagatggctcgcacattagaactctattattaacttttttttacaggcaaatgtatgaaatagttgataatggacatatttacatagcgttaccgcctttatataagataaccaagggtaaggaatttatatatgcatcagatgaaaaagaaaaagatgctgcaataaagaatttgtcgaaaaatgggtcaaggggcttagaggttcaaagatacaaaggtttaggggaaatgaacccagaacaattatggacaacaacaatggatccagtaaacagaagaatgatgcgtgttgatattaaagacgttcaggatgcaaatgaatcttttgaagtcttaatgggcgatgatgttgagccaagaagagagtttattgatgcaaatgccctttcagtaaaagaattagatatttaa

SEQ ID NO: 295436 - DNA, 1921 bp, Unknown
  Bacterial polypeptide expressing nucleotide sequence isolated from the Sargasso Sea
aatggcaaaaaaaaataacgaagccaagtacgactcttcaaatatccaagtactaaaaggactcgaagcagtaaaaaaaagacccggcatgtacataggtgatacagacgatgggtctggtctgcatcatatggtattcgaggttcttgacaactgtatcgacgaggcgatggctggacactgttcagagatattggtaaaaattaataaagattcatcagttacagtagaagataatggtagaggaattcctgttgacgttcataaaaaagagggtgtgtcagcagcacaattaattctaaccacccttcactctggaggaaagtttgatgataattcatataaagtttcaggcggtcttcatggtgttggcgtctcagttgtaaatgccctttcaaaaaaattaactttggaagttcacagagatggcggcgaatatttccaagaatatgcagaggggaaaccaaaggcaaaattaaaaaaattaaaaaaatctaacaagactggaactaaaataactttttatccatcaaataaaatttttacctcaacggactttgatatcgataaaattcataaaagaattcaagagctatcttttctaaatgcaggcgtctcaattactgttgaagataaaagatctggcaaattgaaaaagtttaagaacagtggaggcctaacaagttatgtgaaatttttgaaaggaagaaaacaacaagtttctgaagtatttgaatgctctgcaattgagaatgatgttggtgttgaaatagccatgcaatggacagactcttacactgaaaatgttttatgttataccaataatattcctcaaaaagatggcggaactcatttggctggttttagaggaagcttaaccagagttttaaagtcttttataaaaaaagaaaacgcaaagaaaacaccgactgacttgttaggtgaagatgtaagagaaggattgatggcaataatttcagttaaagtaccagatccaaaattttcatctcaaactaaggaaaagttagtttcgtcggaggttgaaagtgtcgtaagtacaatttttagtaaatatttcaacgattttcttttagaaaacccaaaagacgccatgagtatcatttcaaaggtctcagaagctgcattggctagagaagctgccagaaaagcaagggaaatgacaagaagaaaaggagtgttagaaatagctggactgccaggcaaacttgcagattgtcaagaaaaagatccaaaattgtctgaaatctatatagttgagggtgattctgctggtggatcggcaaaacaaggcagaaatcgtaaaaatcaagcaatacttcctttaaaaggaaaaattataaatgttgagaaagcaaggattgataaagtcctgggttctgctgaggttggtactctaatcaaagccctgggatgtggtattggagaagaggattttgatataaataatttaagatatcataggataattataatgacagatgctgatgtagacggttcgcacataagaacgcttttattaacgtttttttacagacaaatgtacgaaatagttgataaaggacatatatatattgctttgccacccctgtataaaatatcaaaaggaaaagaacatatttatgcatctgatgaggctgaaaaagaagcagccgtaaaaaaactatctaaaaatggcacaaggggactagaggtgcaaagatataagggtcttggcgagatgaaccctgaacagctttggacaactactatggatcctgagaatagaagaatgatgagagttgatattaaagacgttcaagatgcaaatgaatcattcgaaatcctaatgggtgatgatgttgagccaagaagagaatttatagataaaaacgccctttccgtaaaagaattagatatttaa

SEQ ID NO: 295437 - DNA, 1213 bp, Unknown
  Bacterial polypeptide expressing nucleotide sequence isolated from the Sargasso Sea
aatgagtgattttgcaaaggaaattatatctgtaaacattgaagatgagctcaagcaatcctatttaagctacgctctaagcgttattcatggaagggctttaccagacataagagatggtcttaaaccagttcataggcgtattttatatgcgatgtatgatcttaaaaattatcataatagaccttacaagaaatcagcaagagttgttggtgatgttattggtaaatatcatcctcatggtgattctgctgtctacgatgctatggttaggatggctcaagatttctctatgcgatatccaattgttgaaggtcaaggtaactttggatctatagacggagaccccccggctgctatgagatacaccgaagtaagaatggccaaaataacagatcaaatgcttagtgatatagaaaaagaaactgtttcttattctccaaattatgatggtagtgaagatatacctgatgtactcccaacaaaaatacccaatttattagttaatggatcatctggtattgcggttggaatggctactaacataccaccacataatttgaatgaagttttatatggttgtattaatttaataaaaaacccaaagatttctatagatgaattgattaaagatatttcaggaccagatttccccactggcggaactattgatggcaaagctggtatctatgaagcctataaaacaggacggggaataattcatattagatcaaacacctcaattgaagaagataaatcaggtaaacaatctttgataattaatgaaattccattcatggtaaataaagcaaggatgcttgaaaaaattgctgaactagtaaaagaaaaaaagatagaaggcataaccgaaattagagatgagtctgataaagatggcttaagagtcgtgattgaggttagaaagggggattcaattgatgttttagaaaataatctatttgcccaaactcaactcgagcaatcttttggaattaattttaccgttctctctgagggtcagccaaaagaagttaatctgaaagaaatgctgcaggcattcgttaaacatcgaaaagatattattaccaaaaggacgaagtttgatttaaaaaaagccaaagaaagaggtcatgttgtagagggtttaatggttgcaatcgcaaatatagatgaagttattactatcattaaaaaatcaaaagatccaaaaatg

SEQ ID NO: 295438 - DNA, 2521 bp, Unknown
  Bacterial polypeptide expressing nucleotide sequence isolated from the Sargasso Sea
gatgagctcatcatatctttcatacgctatgagtgtaattgtaagtcgtgctcttccagatatcagagacggacttaaacctgttcatcgaagaattttatacgcaatgtataaaggtggttatgattggtcaaaacaatttagaaaatctgcaagaatagttggtgatgtaattggtaaatatcacccacatggtgatcaatctgtttatgatgctcttgttagaatggtacaagatttttcaatgagcctgccattggtgcaaggtcaaggaaacttcggttcaattgatggagatccagctgctgctatgagatatactgaaacacgtttatcaaaagtttcacaatttttaattgatgatattgagaaaaatactgtttcttataaaagtaattatgatgaaactgaaaaagaaccaagtgtcttaccagctcaatttccaaatttattagtaaacggcgctggtggtattgcagttggtatggcaactagtattcctccacataatttaggtgaaataatcgatggaactttggcacttatcgctgacaaagacattaaaattaaagagttaatgaaacatattcctggaccagattttccaacaggaggtgtgataattggtaaagatattattaaacaaggttataacaacggaagaggctcttttaaaattagaggtgaagtctcaatagaacagcaaaaaaatggtcgtgaaagactagtgattacctccataccatatcaggtaaataaatcagttttaaatgaaagaattgctcagctcgttagagaaaaaaaaattgaaggaataaaagatatcagagacgagtcaaatagagagggaattagagttgctattgatctaagaaatggtgttgaaccagaaactattaaaagacaactatacaagaatactcaaattgagagctcttttggatttaacactctagctattgttgagggtaaacctaaaacgtgcacacttaaagattttttagcaaactttttatctttcagagaagatgttgtaattaaaaaaacaaaatttgatttacaaaaagcagaagagcgagcacatatcttaatagggctatcagtttctgtggaaaatttagataaaattataaaaataattcgatcctcaaaaacacctgatgatgctaaaggatctatattaaaaactaagtggaaaattaataaatctcaaaaattaatctccttggttgaaggcaaaaaaggcaaaaacttatattctttatctgagccccaggttctagctattctagaattaagattacaaaaattaactgcacttggaataaatgaaattgaagttgaaataaaaaaactagcagaactgattgcaaactttaaaaaaatcatatcatccaaaaaagaattactaaaagtgataggtgaagagcttagaaatataaaagaaaaatttgcagtaccaagaagaactaaaataatcgatgcagttttaaattacgatattgaagaaacaattcaaaaacaatctgtaattattacagtgacacttcaaggatatattaaaagaggttcattggacggtgttaaaaaacaaaaaagaggtggtaaaggtaaatcaggaataacaactagagaccaagactctgtaatacaaaccttatctgtaaatacacatacttcagtcttgtttttttctacagaagggttggtttacaaggttaaagcttggaaaatacccgaaggatcatctacatcaaagggtaaatccttatttaatattttacctttgaagagccatcaagcaatcagctcaattatgccaatgcctgaagatgaaacagaatctaaaaattatcagataatctttgctacagctctcggtaaagttagaaaaaatagtttagatgatttttcatctattaatgcctctgggaaaattgcgatgaaactagataataacgacaagatagtaggggttaaaatttgcaaagatgatcaagacgtaattttaagtacaaaatttggtaaatgtatacgatttgaagcaaaaaaattaagagtttttaaaggaagatcttcaaaaggtattaagggaattgaattagcaccaaatgatcaaatagtttctttatctgttattgatagtgacaaaatcaaaaaaaatggaaaaaaatctaaagatgaaaaatctgaattaaatgcaaaagaaaagtttgttttatcaataagtgaaaatggatttggtaaaaaaacctctcattttgactacagagtaacaaacaggggaggtaaaggtataattggaattgttaattcaccaaggaatggaaacattacatcctcattccctgttaatgagggtgacgaaattttgatatcaactaacaaaggtagagttataagagttgctgttaaagaaatcagaactgctggtagaaatacacaaggtgtaaggattattaaattatctggtgaggaaaaagttgtgtctgctattaaaatagatgataacttgatttaa

SEQ ID NO: 295439 - DNA, 826 bp, Unknown
  Bacterial polypeptide expressing nucleotide sequence isolated from the Sargasso Sea
tatggataaatcacaaacagagataaaaaataatataaaacccattgaaatgtatgatgagatgagctcatcttatctttcttacgcgatgagcgtaattgtaagtagagccttaccagatataagagatggtttgaaaccagttcatcgaagaatcatttatgcaatgcataaaggtggttttgattggagcaaacaatacagaaaatctgcaagaatagtcggtgatgtaattggtaaatatcatcctcacggagatcaagctgtgtacgatgccttagttagaatggttcaagatttttctatgagtttgcctttaattgatggtcaaggtaattttggttctgttgatggtgatcctcctgctgcgatgaggtacacagaaaccagattagcaaaaatttctcaaaatttaattgatgacatagataaagacacagtagaatttaaaagtaattatgatgaaactgaaaaagaacctgaagttttgcccgctcaatatccaaatttactagtaaatggtgctggaggtattgctgttggaatggctacaagcattccacctcacaatttatcagaagttataaatgctactttggctcttatagaaaataaagatattaaaataaatgaactaatgaaacatataccaggacctgactttccaacaggtggaacaataattggtaaggatattattaaaactggatataaaactggcagaggatcttttaaagtaagagggaatgtttcaatagagcaacttaaaaatggtaaagagagacttgtgatcaactcaataccatatcaaatcaacaaatctgtc

SEQ ID NO: 295440 - DNA, 1894 bp, Unknown
  Bacterial polypeptide expressing nucleotide sequence isolated from the Sargasso Sea
attggccaagaatacatacgactcaaaagcaattgaagtattatctggtttagatccagttaaaaaaagacctgggatgtatacagacacatcctgcccaaaccatcttatacaagaagtccttgataattctgttgatgaggctattgctggtcattgttcaaacataaaggtaaaaatatacaaagatggcaggataatggtttctgatgacggaagaggtatgccagttgatatacatccagagcataaagtgtcaggagttgaattaattctatgcaagctgcacgcaggggctaaattttctggtgaagaatataatttttcaggtggccttcatggtgttggtgtttctgttgttaatgctttatcagaaaatttaaaagtaaatattaagagagattctcaagaatttgaaatgcattttaataatggagacaaaaagaaagatctcaaggtagtaggggaagtaggcgctagaaacactggaacttctattacttttaagccaaatgttaaatattttgagtctgatgaaataaaaataaaagacttaaaacatttacttaaagctaaagcggttctttgtcctggcttaaccatagattttaactatgaaaaaaaatccgaaaaaatcaaatggcattttgaagatgggcttaaaagttatttagatgattcatctgagggccttgatcttgttttagacgaatcaattgtttcttctaaaagcactgaaactcaagaagtagactttgtcataaattggttgaacaaaagctacaaagacacacttgatgaaacatacgtaaatctcataccaacagctcagggaggctctcacctgaatggatttaaatctggtttattagaggcaatgaaagaattttgtgagatcaggagcttattaccaaaagggctgaaaattaatgctgaagatgttattgcaaatgcaacttttgtaatttcatcgaaactacaaaaccctcagtttgctggccaaactaaagaaagacttgactctaaagatcacatggtatttgtgagcagcgcgactaaagatattttgagcatctggttaaatactcataccgaagaaggtgaaaaaattgctgaacttgcaatttcagctgcacaaagcagggcgaaagcatccagcactgtagaaagaaaaaaaactttcaaaggaccagcactgcctggaaagttgtctgattgtaatagcgaagacttaaatgaaacagaattatttctagttgagggtgattctgcgggtgggtctgctaaacaggctagagaaagatcctttcaggcaattatgcctttaaggggaaagattctgaatacttgggatttagaaagccaagaaattattaaatcacaagaaataaaaaatctgtcaacagcaattggcgtattgccaggaaattctgatatttccggacttaggtatggaaaaatatgcatattagctgatgctgactcagatgggcttcatattgcaactttattatgcgcgctgtttctaagacattataaaagtcttgtccaagatggaaggatctatatcgcaatgcctcctttgtatagagtagattgtggtaaagaagttctttatgctttagatgaaatacaaaaagataaagttgtagatgactttaagaagaaaaaaggaaaaccaaaaattaatattcaaaggtttaaaggtctaggagaaatgaatccttcacaacttagagaaactgttatggatcccaaatcaagacaacttgttaggttatctatttctgcaactgataatgctaatgcaatgatggacttacttttatctaaaaaaaatgctcctgctagaaaagagtggttagaaaaaaagggttcattggtgaggttataa

SEQ ID NO: 295441 - DNA, 971 bp, Unknown
  Bacterial polypeptide expressing nucleotide sequence isolated from the Sargasso Sea
aatgacaataactcaaaaaaacacatcaccaaaaagttatcaggcagactcaattaaagttttaaaaggtttagaggctgttcgcaaaagaccaggtatgtatattggcgatacagatgatgggtccggtttgcatcatatggtttttgaggtagtagataattcaatcgatgaagccatagtcggcttttgcaaaaatataactgttattatgcaaaaagactcttcggttacagtcgaggacgatggaagaggtattcctgttgatactcataaaggtgaaaaaaaatctgccgcagaagtcattatgactcaattacatgcgggaggaaaatttgatcaaaattcatataaagtttcaggaggattacatggggttggggtttcagtagtgaatgctttatctgaaaaactagatttaacaatatatagagatcaaaaagaatattttatttctttcaaaaatggcaaggctattaattctataaaatttgtcaaaaaaacaaaaaaatccggaacaaaaataaattttctcccatcaaaagaaattttttcaaatattaaatttagcgcagctactctccaaaaaaaaatgagggaattagcctttcttaacaaaggtttaaagatagatttaattgatgaaacacactctaaaattaagaattatgaaaataaatatgatggaggcataggagaatttgtaacatttttggaccaaaaaaaatctatattgataaataaaaatgaaaaagctgttttcaaaaagcccttgtatcttaagggtcaaaaaaaagatgttatagtcgaatgttcctttcagtggaatgctgggttttcagaagaagttatggcttttacaaataatattcatcaaaaagatggaggaacccatcttttaggttttagaagcgcattaactaggcttattaataaatatgcttcagaaaagaatctgaataaaaaaaaca

SEQ ID NO: 295442 - DNA, 2539 bp, Unknown
  Bacterial polypeptide expressing nucleotide sequence isolated from the Sargasso Sea
aatgacagacataaacagagaccacaccttaaaccgagacatagttgatgaaatgaacgagagttatttaaactactcaatgtcggtgattgtttctcgagccttgccagacgttagagatggtttaaaaccagttcacagaagaattttatacggaatgagcgagctggggtcgtcttggaatagaccctacaaaaaatgtgctagaattgttggagaggttatgggtaagtatcacccacatggagactcttctatttatgacgctcttgtaagaatggcccaagacttttctatgcgttacgagctggtagacggacaaggaaactttgggtcaatcgatggtgacaacgccgccgccatgaggtacacagaatctagaatgacaaagctatcagcagagcttttaaaagaccttgaaaaagatacagttgagtgggggcccaactttgacgaaacgttaaaagaaccaacggtgttaccaacaacagtgccaacccttttagtcaacggctctgagggcattgcagttggaatggcaacaaagataccaccacacaaccttagtgaaattattgatggccttgttgctttaattaataataaaaatataacaacagaagaattaatggaacatattaaaggcccagactttccaacggctggaatgattttaggtatagacggtttaaagttggcatatgaaacaggtcgaggaaaaataaagatgcgagcgcgcgctcatatcgaaacagccaaaaacggcaaagatagtattgttataacagaagttccttatcaaacaaacaaggcgaatgtagttgaaaaaatagccgacctagttagagataaaaagattgttgggataacagatcttagagacgaatctgataaagatggaattcgcgttgtaatcgaaaccaagcgagacgcagttcctgaggtgattttaaatcagctttaccaacaaacccaactacaagatacgttcggaataattttgttagcacttgtagatggcgttcccaaaataatgccaattaaaaaagttttagaacattttgttgattttagacacgaggtggtggttagaagaactgaatttgatttaaaagcggcagaggcgagagcgcatattttagaaggattaaaaattgcgcttgacaacattgatgaaattatttcaataatcaaaggaagtaaagacccagcgcaagccaaagaaggcctaatgaacgcttttaatctatctgaaatacagtctcaagctattttagacatgaggcttcaaaaactaacaggccttgaggttgaaaaagttgttgctgagtataaagaggtaataaagctcatatctttcttaaaaggaatcttagatagcaaaagccaaagaatggacataataaaagaagaaatgcttttggttaaagacgagtttggcgatgaaagaagaacagaaattattcccgtagactctaacttttctatggaggacatgatagccgaagaagaggttgttttaactataacgcacagcggttatattaaaagaacagctttgaacacttatagaactcaaagaaggggtggtcgcggggtgcagggcgccacaagcaacgatgaagattttgttgaacatttatttattgcaaacacgcacaactatatgttgttttttaccaacttaggaaaatgttattggttaaaagtttatgatataccccaaggcggaagagcgacgaaaggaagagctattgttaatttaattggctgtgaacctggagaaaaagttgaagcgtttgttagcgtaaaagagtttgatgataatcattatattgtaatggctacaagaaaaggcttagtaaagaaaactgttttgtcagcctatagcaagcctagaaaaggcggaatctacgcgatcgagattcgcgatggtgacacgcttatagaggcaagaatcacgaacggtgaaaacgatatactgttaggcacaaggggtggaaaatcaatacgtttttcagaaaaaaatattcggccgaccggaagaaaaacaatgggagtaaaaggaattactcttagctcaaaagaagactatgtcatagcaatgctagttgtaaaaagagaaggtacaatattggtcgcaacagagaagggccttggaaaaagaacagatgtaattcaatacagaacacaaacccgcggcggtaagggcgtgatgaccatgagggttactgaaaaaacagggaaaatggtttcaattatggaggtcgttgacgctgatgatttaatagttattacagacaaaggtgtattaatgaggcagcctgtgtctcaaattagaacaattggaagagttacccagggcgtgaaacttgtaaagcttgatgatgggacaaaaatttcatctatatcaagagtaattaacgatgacaacaccccccctaaagacatagaacaaagcgatacaacagaggctataaaagaagaagaaaacccaagccaaccagaagagccagaagagccgcaagaacaggtgtga

SEQ ID NO: 295443 - DNA, 1963 bp, Unknown
  Bacterial polypeptide expressing nucleotide sequence isolated from the Sargasso Sea
aatgtcagaagcgcagaagtatagcgcagaaagtattaaggtacttgaaggtttagaggcggttcgcaaaagacccgccatgtatattggagacgtcggaaaaagaggccttcaccatttagtatatgaagttgttgacaactctattgatgaagcgctcgccggacactgttcaaagataatagtaacatttaacccggataattctgttacagttgaagacaatggaagaggtattcccgttggtcttcacaaagaagaaaagaaaccagcggttgaagttgttatgactgttctgcacgctggcggtaagtttgacaaagatacgtacaaagtatcagggggtcttcatggcgttggagtttcggtggtaaatgccctctcggagtggttgtgggttgaagtaaaaagagaaggaaaaaaacacaggcaagactataaaattggagccacacaaacaaaattaaaagtaacgggagatgcaaaaaaaacaggaaccaaggtttgttttttaccagacaaagacatttttcaagtaacagtttttgaatataatattatagcagaaagattgcgcgaactagcataccttaataaaggtttagaaattatccttagagacgtaagactggaagaaacaaaagaagagtcttttaagtttaaaggaggtttaagcgattttgttaaatatttggatataaacaacaacccgctgcacaataaaataattacagttgacaaacaaaacacagaggttccggttgaggttgcgcttaggtatagtagcacttataatgacaacattctaacgtttgtaaacaatataaacacaatagaaggaggaacccacctttcaggttttcgctcagccttaactagatcaatgaacaactatgcatctaaaaacaacctggttaaagcaaagaaaaacgaaaaacttaccttgactggtgaagattttcgcgaaggtttgacagcaataattagcgtaaaagtggcagaaccgcagtttgaagggcaaacaaaaacaaaacttgggaacggagaagtaaaaggcatagttgacagggttgtttatgaggggattttagaatttcttgaacaaaacccttctgttggaagaagaattgttgaaaaggctttgctcgcagcaaggagtaggtcagcagcaagaaaagcaagagagctaattcgaagaaaaagcgcccttggagggtcttctcttccaggaaaactagccgactgttcaaacagagaccccgagtggtgtgagctttatcttgtagagggagactctgcaggagggtcagccaaacagggaagagacagaaaaacccaagctattttacctttacgaggtaaggttattaatgcagaaaaagccaggattgataagttgctttctaataatgaaatacaatcaatgattacagctataggggctggctttggtggatcagaagatgaagagggagaaaaatctgcaggagactttgacccagataaaattcgttatcataaaataattataatgacagatgccgacgtagacgggtctcacattagaacgttgcttctaacttttttctatagaaaaatgaaagaggttatagatggaggacacttatacattgcgcttcctcccttatatagagtttcccaaggaaaaaaagaagcatatgtttatgatgacaacgaaagagacttaataatagaaagaatgcaaaaagagaacaaaaactccaaagtgtcaatacaaagatataaaggtttaggagaaatgaatgcggatcaactgtgggaaacaacaatggacccagacagaagaacgctactcaaagtcaccgttgaaagcgctgaagaggcggtaaaaacattccaaaacctgatgggaagcgatgttgaggctagaaggtctttcattcaagagcgcgctaaagaagttgttaatcttgatgtttaa

SEQ ID NO: 295444 - DNA, 1669 bp, Unknown
  Bacterial polypeptide expressing nucleotide sequence isolated from the Sargasso Sea
aatgtcagaatttaatagagataatacactaccaagagatattgtagacgaaatgaaggaaagctatctcaattactcgatgtcggtaattgtgtctagggcgctgccagatgtgcgcgatgggcttaaacctgtgcatagaagaatattatatggaatgagcgaattgggatcaagttggaacaggccttataaaaaatcagccagaattgtgggagatgtgttgggtaaatatcacccccatggggatagttcggtttatgacgccctggttaggatggctcaagatttttcaatgcgctatgagcttgtagatgggcaagggaattttggctctatagatggtgataacgctgcagcgatgcgctataccgaatctagaatgaccaaactttcaagcgaaatgcttaaagatttagaaaaagaaacagttgagtgggaccttaattttgatgaaacattaaaagagccaagcgtattgccttcagcggttccaacactacttgtgaacggttccgagggaatagcggtgggtatggcaacaaaaattccacctcacaatctatcagagattattgatggtcttgttgccttaattgatgatgaatcaattggaacagaggttttgatgcaatatataaaagggccagactttccaacggcaggtttaattcttggtatggatggattaaaacaagcttatgagacgggtcgaggaaaaattaaaatgagagctagggctcacattgaaaccaataaaaaaggaagaaacagtattgtaattaccgaggttccttatcaaacaaataaagcagcgctagttgaaaagattgcagacctagttcgtgataaaaaggttgtaggtataagcgacctgcgagatgaatcagacaaagatggtatacgtgtagttgtggaaacgaagcgcgatgccgttcctgaggtgatactaaaccaactctacaaacacacacaactacaagatacatttggaataatactattagcacttgtagatggaatcccaaaaataatgccacttaaaacagttttaaatcattttattgattttagacacgaagtagttgttaggcgcaccgaatttgaattaaaagaggccgaaggaagagctcatatattagaggggttaaaaattgcactagacaatattgatgaggtcatcaaagttattaggggcagcaaagatcccgctcaagccaaagaaggccttatgaacagttttaatttatcagaagcgcaatcccaagccattcttgatatgcgccttcaaaaacttaccggcttagaggttgataaagtggtggccgagtataaagaattaatccaaatcatttcaaatttaaaaagcgtactagaaaacaaaacaaaacgcatgaacattattaaaacagagctccttgaaataaaagatcaatatggcgatgagcgaagaacagaaattataccagtggacacagatttttctatggaggacatgatagctgaagaagaggttgtgcttacaataacccaccaaggttatataaaaagaacagctttaaatacatacagaactcaacgcaggggtggtcgcggcgttcaaggtgcaatgagcaaagatgaagattttgtagaacatttatttattgcaaacacacacaattatatg

SEQ ID NO: 295445 - DNA, 667 bp, Unknown
  Bacterial polypeptide expressing nucleotide sequence isolated from the Sargasso Sea
tgcgggcggttcagccaacaaggcagggaccgaagaacacaagcaatacttcccctccgcggtaaggttattaattcagaaaaagcaagggttgataaattgctttctaataacgaagtgcaatcaatgattactgcgcttggcgctggatttggggggtctgaggatgaatcgggtgaaaagtcagctggagattttgactctgaaaaacttcgttatcacaaaataattattatgacagatgcggatgttgatggttcgcacattagaacactactactaactttcttttatagaaaaatgaaagaagttattgatgggggttatttatatctagcccttcccccactatatagagtttctcagggtaaaaaagaatcttatgcatatgatgacaatgaaagagatttattaattgagcgcatgcaaaaagataataaaaataccaaagttagcattcaaagatataaaggccttggtgaaatgaacccggggcaattatgggaaacaaccatggacccagaaaaaagaaccttaatgaaggtaacagttgaaagcgcagcggaggccgctgaaacctttcaaaacttaatgggtagcgatgttgaggcaaggcgtagttttattgaacgcaacgcaaaatttgttgttaacctagatgtataaa

SEQ ID NO: 295446 - DNA, 1521 bp, Unknown
  Bacterial polypeptide expressing nucleotide sequence isolated from the Sargasso Sea
aatgaataaacacaagaaatacgatgcttcctctatagaagttctcgaggttctagagccattcagaagaagaccaggaatgtatattggaggaacagataatgcttccatgcatcatttgttttctgagttaatagacaatgctatggatgaagccgttgctaattttgcatcttttatagaagtaaaagttgaaacagataatacgatttcaatttatgataatggcagaggaattccaattgatcctcaccctaattttccagataaatctgcattggaggttatcatgactacattacacgcagggggtaaatttagtaataaggtttatcaaacatctggtggtcttcatggggttggtataagcgtagttaatgctctttcagagtttgtagatgttgacgtttatagagataaaaaaatttataatcaaaagttttcaaagggtcatcctacttcgaaactgaaagaaataaaaaagaagacaaacaaaaagggaacaaaaatcagtttcaagcctgatccagaaatttttggaccggataacaactttaattgcaataaattatatgatttcagtaaatcaaaagcatatctttttgcaggcgttgagatcagatggttttgtgatagtgaaatctcaaaaaaagaaaatattcctgaaaatgacattttcaagttttcgcaaggtcttattgacttagttcaaaatgaagttgatgaaaagatgtccctgctatcagaaattttttcaggtaatagagaaaaagataaaaacaatttatctttcgagtgggcaatcaactggtcattaggagctaatacatttcttaactcatactgcaatacagttcctacaccccaaggcggcacacatgagcttggtttaaagggtgggcttttaaaagcaataaggtcccatggtgaacgcacaggtaataaaatcgcacaaaaagtaaattccgatgatatagctaaaaatcttataggcgcaatttcagtctttcttcctgaaccaaagttccaaggacaaacaaaagataaactatcaaataaatccatacaaaaagtaattgaaaatgcaataaaagatagatttgaaacccttttatcaaattccccccaacaaactgaagcattattaaaatatgtttattcaattacagaagaaagacttaagaaaaaacaagataaagaaacaactagaaaaagtgctatcagaaaattaagacttcctggaaaactagctgattgctctcaaggaaacagcgagggtacagaattatttattgtagagggcgatagcgcaggcggctccgcaaaacaggcaagagatagaagatttcaggctattttaccattaagaggaaaggttctaaatgtagctaattctactaaatcaaaaattcgagataatcagcagatttcagatcttattcaggcattaggttgtgggtctggagatctttataatgaagaaaatctgcgatatgagaaaataataattatgacccgatg

SEQ ID NO: 295447 - DNA, 2515 bp, Unknown
  Bacterial polypeptide expressing nucleotide sequence isolated from the Sargasso Sea
atgagttcatcatatttatcttacgccatgagcgtaataattagtagggcattacccgacataagagacggacttaaacctgttcacagaagaattttatatgcaatgcacaaaggtggttttgattggtcaaaacaatttagaaaatctgcaagaattgttggagacgtaattggtaaatatcatccgcatggtgatcaagctgtgtatgatgccttggttagaatggttcaagatttttcaatgagtgttcctttaattgatggtcagggcaattttggttcaatagatggtgatccacctgcagcaatgaggtatacagaaaccaaacttgcaaaaatttctcaatttttgattgatgatatagaaaaaaatactgtctcatttaaaagtaactacgacgaaactgagcaagaacctacagtgctgccagctcaatatcctaatcttttagtaaatggagctggaggtatcgctgttggtatggcaactagtatacctccacataatcttggtgaaattattgatggaactttagcgcttataaaaaataaagatattaaagttaaagagttaatgaagcatatacctggccctgattttccaactggtggagttattatcggtaaagatattattcgagaaggatacaaaacaggcagaggttcttttaaaattaggggtgaaataaatgtagaaaatcttaaaaatggtaaagatagattagtaattacttcaataccttatcaagtaaacaaatctaacttaaatgaaaaaattgcagaattagttagagataaaaaaattgagggtataagtgacattagagatgaatccaatagagaaggtataagagttgcaatcgatctaagaagaagcgttgagcccgagacaataaaaagacaactttataaatatacatccattgaaacttcatttggttttaattcattagccattgttgataacaaacctaaaacatgttcattaaaagattttttagagaactttttaaaatttagagaagatgtagtaattaaaaaaactaaatatgatttaaaaaaagctgaagatcgtgttcatgtcttacttggtttatctgttagtgtagaaaatattgataaagtaataaaaattattagatcttcaaaaaatccagaagaagcaaaaaatactcttataaaaactaaatggaaaataacaaaatctgcaaaattaattaaattagttgatagtaaaaattataaaggatcatataatttatctgaaactcaagttacatcaatactagaacttagattacaaaaattaactgcccttggaattaatgaaattgaagaagaaataaaaaaattatctgaattgattacaaagtataaaaaaataataaattctaaaactgaactattaaaagtaataagtaatgagttatctcaaattaaagagaaattctcatctccgagaagaacgcagattatagatgctgtattaaactataatattgaagaaactattcaaaaagagtctgtaataattacaattactttacaaggatacattaaaagaggcgcattaagtaatgttaaacagcaaaaaagaggtggtaaaggcaaaactggaattaagacaagagatgaagattctgtagtacaaacattatcggtaaacactcacacatctgtactatttttctctacagaaggattagcatacaaagttaaagcttggaaaattccggaaggatcagctgcatcaaaaggtaagtctttatttaatattcttcctctaaaaaatcatcaatcaattagttcaattatgccatttccagatagtgatgttgatacaaaagacatgcatatcatttttgcaacaagtgaaggaaaaattagaaagaataatcttgaagattttacctcaattaatgcttcaggcaaaatagcaatgaaacttgacggtaatgataaaattattggtgttaaaatttgtagagatgatcaggatataattttaagtactaaattaggaaaatgtataaggtttgagtctaaaaaacttagagttttcaaaggtagatcatctaaaggtataagaggtatcaatttagcagaaaatgatactattgtatctctgtctattattgatcatgactcaaataagaaagcaaaaactaaggatcataaatcagaaattaaagctaaagaaaagttcattctgtctattacagagaatggttatggtaagagaacatctaactatgattatagagttacaaatagagggggaaagggaattattggtattgtcaattcacaaagaaacgggaatgtttcttcatcctttccagtttttgaaggagatcagatattaatttctacaaataaaggtagagtaataagaacagctgttaaagaaataagaatagctggtcgtaatacacaaggtgttagaataattaaactgactggtgatgaaaaagtagtttctgctattaaattagatgataatctcatctaat

SEQ ID NO: 295448 - DNA, 1213 bp, Unknown
  Bacterial polypeptide expressing nucleotide sequence isolated from the Sargasso Sea
tatgcaaaaagaacaaatctctaaagataacaatataaaacctatctcaatgtatgatgagatgagctcatcttatctttcatacgcaatgagcgtaataattagtagagcacttcccgatgtaagagatggtttaaagccagttcatagaagaattttatatgcaatgcataaaggtggttttgactggtcaaagcaatttagaaaatctgctagaatagttggagatgtaattggtaaatatcatcctcatggagaccaagctgtttatgatgccttagttagaatggtacaagatttttcaatgagcttaccattgatagatggccaaggaaactttggatctatcgatggagacccaccagcagcaatgagatatacagaaacaagattagcaaaagttgctcaatacttaattgacgatattgaaaaagaaacagtatcttttaaaagtaactatgatgaaactgaatttgaaccgtcagttctacctgctcaatatccaaatttactagttaatggagcaggaggtatagcggttggaatggccactagcataccacctcataatcttggagaagttattgatggaactttagctttgataaaaaataaagatataaaaattaaagatttaatgaaattaataccaggaccagattttccaacaggaggagtaataatcggaaaagatattattaaacaaggatacaagataggaagaggatcatttaaaataaggggtgaaattgatgtagaaaacttaaaaaatggtaaagatagattagtaattacatcaattccatatcaaataaataaatctaatcttaatgagagaattgctgaactagttagagaaaagaaaattgaaggtataagcgatataagagatgagtcaaatagagaagggataagagttgctatcgaccttagaagaggaattgagccagaaactgttaaaagacaattatacaagtatacttctatagagagttcatttggttttaatagtctagctattgttgataacaaacccaaaacctgcagtctaaaagattttctagaaagttttttaaaatttagagaagatgttgtaattaaaaaaacaaagtttgatttaaaaaaagctgaagaaagagcgcatatacttgtaggtttatctgtaagtgtagaaaatattgataaggttatcaagattattagatcttctaaa

SEQ ID NO: 295449 - DNA, 1123 bp, Unknown
  Bacterial polypeptide expressing nucleotide sequence isolated from the Sargasso Sea
tatgtctgataacgctaaagaaatcctccccgttaatattgaggaagagttaaagaactcttaccttgattacgcgatgagcgttattgtcgggcgagccttgcctgacgtaagagatggcttgaagccagtgcaccgtcgtgtgctgttcgcaatgaacgaactgaaaaacgactttaacaagccatacaaaaaatctgcccgtgtggtaggtgacgtaattggtaaatatcaccctcacggtgactctgcagtttacgacactattgttcgtatggcccaaccgttctcacttcgctatatgctagtagacggtcaaggtaacttcggatcggtagacggcgactctgctgctgcgatgcgttataccgaagttcgcatggctaaaattgcgcacgagttacttgccgatttagataaagagaccgtagatttcgtacctaactacgatggtacagagcatattcctgaagtattaccaacgaaggtgcctaaccttcttgttaacggttcatcgggtatcgcggttggtatggcgacgaatattccgccacataacctcaccgaagtaatcaacggctgcgtagcgttaattcaagacccgtctattaccatcgacgacttgatgacacacattccaggtccagatttcccaacggcggcgatgatcagcgggcgcaagggaattgaagatgcgtatcgcacaggtcgcggtaaaatttatcttcgtgctaaggcggaaattgaaactgacagcaacggtaaagaaaccattgttgttaacgagatcccttaccaggttaacaaagcgcgtcttattgaaaagattgctgaactggtaaaagaaaagcgcatcgaaggcgtttctgcactgcgagacgagtctgataaagacggtatgcgcattgttatcgaagttaaacgcaacgaatctgctgaagtcctacttaatcatttatacgcgaatacccagcttcaaacggtattcggtattaacatggttgcgcttgataacggtcagcctaaggtattcaaccttaaagaaacgctagaatgctttattcttcaccgccgtgaagtagtaacacgtcgtactgtttttgaattacgtaaagccccgtga

SEQ ID NO: 295450 - DNA, 1633 bp, Unknown
  Bacterial polypeptide expressing nucleotide sequence isolated from the Sargasso Sea
gatgcggagaattacgcatgaaattctagcagatctcgacaaagaaactgtagattttataccaaattacgatgattcactcaaagaacctgtagttttaccttcaagaattccaaacttgctgactaatggttcaaccggcatcgcagtcggtatggctagcaatattcctccgcacaatctcaatgaggtgatggaagccctcctttactacatagatcatcgctacactgcaactgtccaggaactaatgcagttcgtacccggtccagactttccaacaggagggacaataatagggaagagtggaatttatgaagcctacagcaacggtcgaggaataatacgtatacgcgctaaaacacattttgaacagactagtgacgggcgagacttgataatagtgactgaattgcccttcatggttaacaagtctgcactactggaaaaaattgctgatcttgttcgtcagaaaaaagtggaaggtattgctgatctgcgagatgaatctgaccgtaagggaatgcgaatttatatccaactcaagcgtggagaaaaccccgacgttgttttgagcaatctttacaaacacacgtcacttcagtcaagtttcggcatcatcatgctggccattgttgacaggcaaccaaaagtcctgactttacctcaattgcttgagtatttccttcaacaccggattgaagtagtaacccgacgtacacgatacgaattgcgtcaagccgaagttaagatgcatttgcttgaaggccttatgatcgctcttcaaaatctagatgatgttctggaaatcattagaaaagctgaaagcggtgcaactgcagaaggggctctggtagaacgatatgccctttctaaaaagcaggcgcatggaattttagatatgaagctgcaacgattaaccggaatggagcaggataaaatccgatctgatcatgaagaagtaggaaaagcaattgctgactacaaggacatccttgaaaaagacgaacgtgtgatcaagataattcgtgatgagagcgtggaaatccgtgacaaatatggtgacgaacgacgtactcaaataattgagggcgacggctccatcttgattgaagagctgatcaacgaagaagacatggtggtcacaatttcgcgggagggctacatcaaacgcagttcggttagtgaatacaggcttcagcgccgtggtggtaagggacgccttggcatgggcactaaggatgaagattttgttgaacagctgtttgtcgctaacacgcatgattacctactcttttttactaacaaaggtcaggttttcagaaaaattgtgtttgagctgccccaggcaggacctactggacgcggcaaagcagtaatcaatatgcttcccttacgagaaggtgaaagcatttgtgcctgcctgaatgtaccgaaagaagcagaaaacaagtatattttcctttgtacagagggaggtgtagccaaaaaaactcccatgctggattgtgcaaaaattcgtgtgagtggtttgagggttatcactcttgatgaaggcgattcggtaatttccgttcagcttaccaacggcaatcaggaactgttttttgctaccagagatggtatgggatta

SEQ ID NO: 295451 - DNA, 2536 bp, Unknown
  Bacterial polypeptide expressing nucleotide sequence isolated from the Sargasso Sea
atggattttgctaaagaaattcttcctgtaaatattgaggatgaactaaaacaatcttatctaagttatgccatgagtgtcattcatggcagggcactaccagatgtacgcgatggtttaaaacctgtgcacaggagaatactttatgcaatgcatgatcttaaaaataattacaacaaaccctataaaaaatctgcaagggttgttggagatgtaattggtaaatatcatccacatggagattctgctgcatatgatgcgatcgttagaatggcccaagatttttcaatgagatacacgctcatagagggtcaaggaaacttcggttcaattgatggagatcctccagctgctatgagatatacagaagtaaggatgcaaaaaatttctgatgaaattcttgctgatttagaaaaagagactgtctctttttcagaaaattatgatggttctgaacaaatgcctgatgttatgccaactaaaatcccaaatcttttaattaatggatcatctggaatagcagtaggtatggcaacaaatgttcctccacataatctcactgaagtcataaatggttctttaaagttgctggagaacccaaaactatctattgatcagatcattgaatcaataagcggtcctgattttccaaccggggggacgatagatggaaaaatgggcatttatgaggcatataaaactggaagaggaataatttatgttcgatctaaatcaaaggtagaggaaagcaaaactggaaagaaatcccttgttatctatgaaatacctttcatggtcaataaagcaagaaccctcgagaaaatagcagagcttgtgaaagagaaaaaactcgatggtataagtgaaattagagatgagagtgataaagatgggcttagaatagttatcgatgttaagaaaggggaatctgttgaagtattagaaaacaatctttttgctcagactcaacttgagcagtcatttggaattaactttactgtattggttgatggccagccaaaggttcttaatttaaaagaaatccttcaagaatttttaaaacataggaaagatgttgttctaaaaagaacaaaatttgagcttaggaaggctaaagagagaggccatattgttgaaggattgatggttgctattgcaaatattgacgaaatcataaagattattaagaaatctaaagatccaaaggttgcagcgcaggagttaatcaaaaagaaatggaaaccaggtccagtagaggcaatcctaaagaaggtaggaaaagatgcatgcaagccaaagggcgtagcaaagggcgttggactaacaggtaaatcttataaactttctaatgatcaagcaaaagctattcttgagttacggcttggaaggctaacagggcttgagcaagataatttatctattgagtttaattctttaattgaaaagattacttcacttcaagaaatcattgatcgtaaaggagttcttcaaaaagttataaaagatgagcttaatgaaattaaaaaaacctatggtgatgatagaagaacagatataaacgatactagacaagatatttcaaatgaagatttaataccagaggaaacaagagtacttacaatatcaaggacaggatacgcaaaaactcaaccgcttgaagaatatagagagcaaagaagaggaggccagggcaaagccgctgcctcggttaaagaggaagatgttattcaaaatctttatgtattaagcagtcatgcacaaatgctttgttttacaacaaagggcaaggtttactggttgaaggtttatgaagttcctgttgcaagcagaacatcaaaaggaagacctcttgtgaacatgcttaatttagatgatgatgaaaaggttagtgatattttacctgttgatgagttttcagaggatagatatgttttcatggcaactagaaagggaacaactaaaaaaacacaattaagcttttttgcaaagaaatataaatcgggcattaaagcaattaatttagactctgatgatgaacttattggttcagcaattacaaatggagatgatgaaatacttttggcttcctcagctggaaagttaataagattttcagagaagaaagtaagaccaatgggcagaacagctagaggcgttaggggaatgcgtatcaaaaaagatcaacagattatctctttaatggttgcaaacaatgaaaaagaaattctatgtgtttctgagaatgggtttggtaaaaagacatcagttgatgatttcccaacacataatcggggaggtcagggtgtaatttctatcaaaaccagcgaaaggaatggactaatggttgcatcaactctcgttgataataatgacggaataatgcttataagcgataaaggtacgatgattagaacttctgcagaacaaataccaacaataagcagaaatactcaaggtgtaaaaataattactccaaaagagggcgagaaaatccttgaatgtgtaaggatagatcctgaagaagaggaagaatgag

SEQ ID NO: 295452 - DNA, 1348 bp, Unknown
  Bacterial polypeptide expressing nucleotide sequence isolated from the Sargasso Sea
taaaagagttcaggagctatcttttctgaatgcaggcgtgaatattcttgttgaagataaaaaaacaggcaaatccaaaaagttttcaaacagtggcggcctatccagttacgtaaagtttttaaagggaagaaaacagaatatctctgagatttttcactgcgaaggagaacaggatgggctaagcgttgaaatagcacttcagtggaatgatgcatattcagaaaacgttctttgttatacaaacaatattccccaaaaagatgggggaacacatctttcaggattccggtcaagcttaacaagggttatgaagacctttataagaaaagaagagttaaataaaaaatcaccaattgagttgctaggcgaagatgtgagagaggggttaacagcaatagtttcagtgaaaatacctgaccccaagttctcatcacaaacaaaagaaaaacttgtttcttcagaggtagagggtgttgttagtaatgtttttaataagaattttaatgaatacctactagagaacccaaaggaagcaatgtctatcttaacaaaaatatctgaagcagccttagctagagaagcagcaagaaaagctagagaaatgacaagaagaaaaggggttttagaggttgcaggcttgccaggcaaattagcagattgccaagaaaaagatcctgcgctgtcagaaatatacattgtagagggtgattccgcaggtggatcagctaaacaaggaagaaatagacaaaatcaagcaatacttcccctaaaaggtaaaattttgaatgtagaaaaagctagattagataaagttttatcttcacaagaaataggaacgcttgtaacagcattaggctgcggtattggaacggatgagtttgatattgataaattgagatatcacagaataatcatcatgacagatgctgatgttgatggttctcatataagaaccttacttttaacatttttcttcagacaaatgtttgagatcctaaatagagggcatgtttacattgcactaccgcccttatacaaggtttcgaaaggtaaaactgttaaatatgcagcttcagaaaaagaaaaggatattgcgcttaaagagttgtcaaagactggcagcaggggaattgagatacaaagatacaaaggattaggcgaaatgaatccagatcagctctggaccacaacaatggacccacaaaacagacgaatgatgagagttcgtattgatgacgcaaatgaagcaaataattcttttgaagttttaatgggtgaccaggttgagccgaggagagaatttatcgatgaaaacgctctttcagtcgcaaacttagatatttag

SEQ ID NO: 295453 - DNA, 1192 bp, Unknown
  Bacterial polypeptide expressing nucleotide sequence isolated from the Sargasso Sea
ctgaaatttgtagaatttttagacagcaaaagagaaagtcttaaaaataaaaacgataaatttctttttaaaaaaccaatttatatggagggtttaaaaagtaatatagaagtgcagtgctcacttaagtggaattcaggttatagtgaggatgttcttcctttcacaaataatatatatcaaaaagatggcggaacacatttattaggatttagaagcgcgttaactagagtagtaaataaatatgcaaatgatcaaaatttactgaaaaaaaataaagtaagcctatctggagatgatataaaagaaggtcttacttgtgttttatctataaaagtaccagatccaaaattttcatcccaaacaaaagataaattagtatcatcagaagtaagaaatatagtagaaaattttataaatgaaaaactttccatctggttcgatcaaaacccatctgtagcaaaaataatattatctaaaataattcaggctgcagttgctagggatgttgcaaggaaagctagagaaagtgtaagaagaaaaggagctttagaattaactggtttgccaggaaaattagcagattgtcagaattcaaaacaagatggtacggagctgttcattgtagagggtgactcagctggaggttcggcaaaacaaggaagaaacagagagtttcaagcagtacttcctttaaggggaaaaatattgaatacattcacagaggaaaatggaaaaaatggtagatcaattgattataaaaccaagtcattatcaaaaatgatgtcttcaaacgaaatagtaacactcataaatgctctaggattagacccaaaatcagaagaaattgatattaaagatctgagatatggaaaaataattataatgacggatgcagatgttgatggttctcatattcgagctttactactaacattttttaataacaaaccatttaataaattaatagaaaatggaaatgtctatttagctcaaccacctttatttaaaattacaaaaggatccaaaagtatttatattaaggatgagcctgatttggaaaaatacattaatcataactcaaaagatttaaaaaaattaaacaaaaaaagtaaagaatatcagaatattttaagtgaagaaaagtctaagctatcaattcaaagatttaaaggattgggcgaaatgaacc

SEQ ID NO: 295454 - DNA, 1211 bp, Unknown
  Bacterial polypeptide expressing nucleotide sequence isolated from the Sargasso Sea
tatgggtgaaattgcagctaaagaaataattccaataaatattgaggaagaattaaaggaatcttacttaaattacgctatgcatgtaatagttgggagagcacttcctgacgcaagagatggcctaaaacctgttcatagaaggattttgtatgccatgcacgaccaaaatatggactggaataaaccccctaaaaaatctatgagaatagtaggtgaggtaactggtaagtatcacccacatggagatgcagctgcttatgaaactatagttaggatggctcaatggtggagcttaaggtacacattggtagatcctcaaggtaattttggatcaatggatggagaccctcccgcagctgcaagatatacagaagccagaatgtctaagatagctcatgagttgctatctgacttagataaagaaactgttccttttgttgagaattatgatggccaagaaaccatgcctgacgttttaccaacaaggattccaaatttattagtcaacgggtcttcaggtatagcagttggaatggctactaatatggcgcctcataatcttaatgaatctatatcagcctgtttagcttttatagaaaacccagatatttctactgaagagttaattaaacatatccctgggcctgacttcccgactggcggaataataaatggaagatcaggtattttaagtgcttatgagacaggcaagggaaaggtaaagatacgggctaaagttgacatagtaggagaagatgaaggtaaaactcaaattatagttacagaaataccttatatggttaataaggctaagttggtagaaaacatagctattttaatgagagataaaaaaatagaaggtatcagggagataagagatgaatctgataaggataatccagtaaggatagttatggacttaacttctggctctatagccgatgttgttttaaataatctttataaacaaactcaaatgcagtctgtttttgggataaataatgttgcattagttggaactgaaccaaaattactttctttaaaagaaattcttgagatattttttaacttcagaaaagaagtagtctccaagaggacaatatttgaactaaacaaagctaaagatagaggacatattttggaaggccttacagtagcattatcaaatattgatcaaatgattgagttaatcaagaaatccaaagatg

SEQ ID NO: 295455 - DNA, 1864 bp, Unknown
  Bacterial polypeptide expressing nucleotide sequence isolated from the Sargasso Sea
attggaggagaaaaatatggacgatgagtacagcgcagaaagcatccaggttctcgaagggctagaagccgtaagaaagagacctggcatgtacctaggagatccacatgatggttcggctctacatcactgcatttgggaagtagtagacaactcagtggacgaacatcttgcaggtcatacagactcaattgaaattactcttaatcgggataactcgctctctgtcagggattttggaagggggatcccagtaggcatccatgaagagtttggcatctcagctgctgaagtaataatgactaaattgcatgcaggtggaaaattcgacaatagttcctacaaggtttctggtggtctacatggtgtcggcgtatctgcagtaaacgcagtttctgaatggatggagatgaccatacatagggatggaatcgtctatttccaaagatatgaggcaggagtacctgttgagccattgaaggagatagggcagtgcgaagataccgggaccctcatatcattcaagccagatttatcgattttcaccgatattgtggagtttgattttgaagaggttgataccagagttggcgaaactgcatttctaaatgctggactgaggattgctattgttgatctcagaggttctgaaccacactcttcggagcacctgtacaaagggggactatctgaatacgtgagtcaactcaacgaaaggagagaggtcttgcatgaggaagtcatcaagatcagaggcgagaaagaaattgagaagggcgatgtagaagttgaactagcactgcaatggtccgatgcgttcagcgagtctattcgttgctatacgaacatcataaggaataaggacggaggcacccatatgtccggtttacggacggctttgaccagttcagttaatttgtatgcaaagaagaagaagttgctcaaaggggatgctctgtctggtgatgacgtaagagagggtttggcagcagtagtaagcgtcaagcatcccgatccttccttctcctcccaaaccaaagataagctggttagtagtgaagttacggggattgtgcagacgattgtttatgacaaattgggcgagttcttcgaagaaaacccgtctgttgccaagcagatagtggagaaggcactacttgcgtccaaggccagggaggcagccagaaaggccagggaccttactcgaaggaagggggttttggaaggagggggtttgccaggcaaacttgctgactgtcaatctcgagacccaagcgaatgtgaggtttacctcgttgagggtgattctgccggtggttcagcgaaaactggaagggatcgtagaattcaagccatacttcccctaagaggaaaaatcctcaatgtagaaaggcagaagcataatgctgcaaaggtgttccaaaatcaggagatacagaccatcattcgtgccctaggtgctggcgtagggaataacgaagaggaggagggcgcattcgatacgactaaactccgatattcgaagatcataataatgtgtgacgcggacattgatggtgcgcatattaggactctaatgctgacttttctctggaggttcatgaggccagcaatagaggaagggcacgttttcatcgcccagcctcctctctatcaattgactaaaggaagagtgagcagatacgtattctccgatgaagaaagagactcggtgactctggaattgcagggcggcaaccctgatgcgaaaataggcatacagagatacaaggggcttggggagatgaatcctgagcaactatgggaaactaccatgaatccaatgactcgaacgatgctgaaagtaactgttcgtgatgcagag

SEQ ID NO: 295456 - DNA, 1647 bp, Unknown
  Bacterial polypeptide expressing nucleotide sequence isolated from the Sargasso Sea
ttgattaatggttctgaggggattgctgttggaatggcaaccaaaataccaccacataatcttacggaaataataaatggtctagtttcattaattgataatagtgagatatccacagaagagcttatggaaagcataaagggtccagactttccaactgctggactaatattgggtgtagatggtttgagggcagcctatgaaacggggaggggtaaaataaaaatgcgggcacgtgcccatatagagtcggcaaaaaacggaaaagacagtgttgtaataacagaactaccttatcaatgtaataaggcaagtttggttgaaaaaatagcagatcttgtaagagataaaaaaattgttggtattacagacctaagagatgagtctgacaaagatggtattcgtgttgttgtggaaacaaagagggatgctgttccagaagttatactaaaccagctttatcagtatacccaactacaagatacatttggaattattttattagcccttgttggtggtgttcctaaaattatgccccttaaggaagttttgtctcattttgttgattttagacatgaggtggtggtcaagaggactgagtttgagttgcgacaagcagaagcccgggcgcacatattagagggtttaaaaattgcactggataatatagatgctgtaattgaattgattaaggctagtaagaatccagacgctgctaaagaaggattaatgaatagttttaatttatcagaaaaacaagcccaagcaattttagaaatgaggctacagcgattaactggtcttgaggttgaaaaggtgttggaagaatacaaagatttaataaagctcatttcaaacctaaaaagcattcttgaaaacaaaaaccaacgaatggaaattattaaaacagaacttttagatattcgcgaaaattatggtgatgaaagaaggacagaaatcatccctgttgtatctgatttttcaatggaagatatgatagctgaagaagaggttgttcttacaataactcaccaggggtatattaaaagaaccgctcttaatacctatagaacacaaaggagaggtggccgcggtgttcagggtgctggaagcaaagaagaggattttgtagaacatttatttattgccaacactcataattatatgttgttttttactgatagaggaaagtgtttttggctaaaggtttatgatattccgcaaggtggtcgcgctaccaggggtagagcaatagttaatctaattggttgtgatccaagtgaacgcgttgaggcgtttgtgagtgttagcgatttcaaagatgatgagtttatcgtgatggcgacaaaaaaaggaattgttaaaaaaacagttctatctgcatatggtaagcctagaaagggtggtatttacgcaatagaaataagagaagatgatcaactaattgaggccagaataactaatggtgaacacgacattttactgggaactcgcgagggtaaatctatacggttttctgaaaccaatgttcgggccagtggaaggaaaacaatgggggttcgcggaatacgattaagttctgcagatgactatgttgttggtatgttggttgtcaaaagagagggaactattcttgtcgcaacagaa

SEQ ID NO: 295457 - DNA, 1102 bp, Unknown
  Bacterial polypeptide expressing nucleotide sequence isolated from the Sargasso Sea
atgagcaacgaagggaaaaaatatagtgccgagagcataaaggttttagagggtcttgaagctgttcggaagaggcctgcaatgtatattggagacgttgggaaaagggggctgcaccacctcatatacgaagttgttgacaattcaattgatgaggctctcgccggttactgtactaaaataaccgtattttttaataaagacgggtctattacggttgaggacaatggccgtggaattccagttgggatgcacaaagaagaaaaaaaaccagctgtagaggttgttatgacagttttgcacgcaggtggaaaatttgacaaagatacttataaagtctcgggtgggcttcatggcgttggtgtttctgtggttaatgctctttcagagtggctttgggttgaggtaaagagagatggtaaaaaatataaacaggactataagataggtgtaactcaaaataaattaaaagaaatcggaaaaacgaaaaaaagtggcacaaaagtttgttttatgccagacggtggggtttttaacactacccgtttcgaatatgatataatagcagaaagactaagagaacttgcgtatttaaataaaggccttgaaattaaccttcgcgaccagcgggaggaagaagggcaagaagactcttttaaatttaaagggggattaagtgattttgtaaaataccttgatgagaataataatccgctccacaacaaggttataacggttacaaaagaagatggtgaaataccggtagatgttgctcttaggtatggaaacacctacaatgacaacatactaacttttgtaaacaatataaacacaatagagggtggaacccacttgtcgggttttcgctctgcgttaactcgggcgatgaataaccacgcttcgaaaaacaacctaattaaaacaaagaaaaccgaaaaattatctctcacgggagaagactttagggaggggttgacagcaataataagtgttaaggttccagaaccacaatttgaggggcaaacaaaaacaaaactcggaaatggggaggttaagggccttgttgataaggttgtttatgagggaatattagactttttgg

SEQ ID NO: 295458 - DNA, 361 bp, Unknown
  Bacterial polypeptide expressing nucleotide sequence isolated from the Sargasso Sea
aatggcaaaaaaagaaaacaaaaagaaagctagtaaaaaaacaaaagaggaaaatgattatggcgcagagtccattaaggttctaaagggtttagaggcagtaagaaaaagacctggaatgtatattggagatactgatgatggcactggccttcatcatatggtttatgaggttgttgataattctgttgacgaggctttagctggtcattgtaaaatgatttcggttattttgaatgctgatgaatcagttactgttaaggatgatggtcgaggaatacctactgagatacataaggaagagggtatttctgctgcagaggttatcatgacacaattacatgcaggaggtaaatttgac

SEQ ID NO: 295459 - DNA, 466 bp, Unknown
  Bacterial polypeptide expressing nucleotide sequence isolated from the Sargasso Sea
aatgaataaaaaaaataataacacataccaagcagactcaattaaagttttaaaaggtcttgaagcagtgagaaaaaggccaggaatgtatattggtgatacagacgatggaactggcttacatcacatggtatatgaggttgtagataattcgattgatgaagcattagcaggtcactgtaaaaaaattgaagtaagcataaattctgatggatcaattacagttcaagatgatggtagaggaataccagttgattttcacaaagaagaaaaaaaatctgctgcagaagtaataatgacccaacttcacgcaggaggtaaatttgatcatgattcatataaagtttcaggaggattgcatggtgttggagtttcagtagtaaatgcactctcacaaaaattagaattacaagttgaaagagatggaaaaaaatattttgttgagtttgtaaatggtgaaactaaa

SEQ ID NO: 295460 - DNA, 1480 bp, Unknown
  Bacterial polypeptide expressing nucleotide sequence isolated from the Sargasso Sea
aatgcgtgagttagcttttctaaacaagggaattaaaattaaaattaatgatttaacacaaaaaaaaataaagtcttatgaatttaaattcgagggaggaataaatgaatttgttgaatttttagatgaaaagagggaaaaattaaaaaataaaaatgacaaagatttgtttagaaagccgatttatattgaaggcatcaaaagtgatatagatgttcagtgttcgctaaaatggaatgcaggatataatgaggatgtttatccttatactaataatatttatcaaaaagatggaggaacccatcttttaggttttagaagcgccctaacaagagttgtgaataaatatgcatcagagcaaaatttattaaagaaaagtaaggttcttctttctggtgatgatgtaaaagagggtttaacttgtgttttgtcagtaaaaattccagatcctaaattttcttcacaaacaaaagataaattagtttcttcagaagtaagaaatatagttgaaggtattgttaatgaaaaattatcaatttggtttgatcaaaacccatcagtttctaaaataattttgacaaaaataattcaggctgctgttgcgagagatgtagccaaaagagcaagagaaaacgtaagaagaaaaggagctttggaactgaccggattacctggaaaattagcagactgtcaaaattctaaacaagaaggaacagaactgtttattgttgagggagattcagctggaggatcagctaaacagggtagaaacagagagtatcaagcagtactaccattgaggggaaaaattttaaatacatttactgagattaatggatctaaaaaaaatggaaatcaaagtgacctaagaacaaaatcattgtcaaagatgatttcttcaaatgaaattgttacattgataaacgctctcggattagatcctaaaacagaagaaatagatttagaggatttaagatacggaaaaattataatcatgacagatgcagatgttgatggttctcatataagggcattacttttaaccttttttaataatattccttttaataaattaatacaaaaaggtcatgtgtatttagctcaaccacctcttttcaaaataaataaaggctctaaaggtgtttatattaaagatgaaaaagatcttgaaaattatattattaaaaattctaaaaatctaaaaaatataaaaagaggatcaaaagattttgaaaaagttattcaacaagaaaaatcaagtctaaatattcagagatttaaaggacttggtgaaatgaatcctgaggaattatggaatacaacattaaatccagaaactagaaatcttcttcaagttcaatactcaaaaaatttacaaaaagatcaaaatttaatacaaacattaatgggaaatgatgttgcatctagaaaagattttattgtagataatgcaataaatgttgttaatttagatatttag

SEQ ID NO: 295461 - DNA, 573 bp, Unknown
  Bacterial polypeptide expressing nucleotide sequence isolated from the Sargasso Sea
gatgagctcatcatatctatcatatgcaatgagtgtaatcgttagccgagctctaccagatgtacgagatggtttaaaaccagtacatagaagaattctatttgcaatgcataaaggtggttatgattggtcaaaacaatttagaaaatctgcaagaatagttggggatgtaattggtaaatatcatccacatggagatcaatcagtatatgatgcacttgttagaatggttcaagatttttcaatgagtcttcctttagtagaaggacaaggtaattttggatctatagatggcgatcctgctgctgctatgagatatacagaaactagactgtctaaagtatcacagtttttaatagatgatattgataaaaacaccgttgaattcaaaagtaattatgatgaaactgaaaaagaaccttcggtattacctgctcaatttcctaatttgttagttaatggagcaggtggaattgctgtaggtatggcaacaagtattcctccgcacaatcttggtgaaataattgatggaactttagctttgattaagaataaagaaattaaaattaaaga

SEQ ID NO: 295462 - DNA, 1486 bp, Unknown
  Bacterial polypeptide expressing nucleotide sequence isolated from the Sargasso Sea
atgagtcaaaatgaaatagaacatgatgagtatggtgcggagtcaattaaggttttaaaaggtcttgatgctgtaagaaaacgcccaggaatgtatattggagatactgatgatggttccggtttacatcatatggtttatgaagttgtagataacgcaatagatgaggctttagctgggcattgtgaccacgtaatagttaacttaaattcagatgggtcagttactgtaattgataatggaaggggcattcctgttgaaatgcaccaggaagagggtatttcagctgctgaagtgattatgacacaactccatgcaggaggtaaatttgacaataactcatacaaagtttcaggtggtttgcatggtgttggtgtctcagtagtaaacgctctatctgagtggcttgaattaaaaatttatagagatgataatgagcattttataagatttgaaaatggaaattcagtaaatccaattaggttaaaagggccctctaacggaaaaaaaggtactgagttaacatttaaaccttctagtgaaacatttactaatacaaatttcatcttcaacacattagagcacagacttagagaactagcgtttttaaactcaggtgtacaaataattttgtgtgataaaagagaaagtatagaaaaaaaatctgaatttaattttgaaggcggtttaaaagagtttgttaattggatgaataagtcaagaaatcctatacacaatataatttcagggaaatcagataaagaggaggtaggggttgaagtagttcttcagtggacagattcttatcatgaaagcactcaatgttttactaataatatacctcaaagagatggtggtacacatttagcaggttttagagcagctttaacaagagtaataaattcctatgcacaatcaagtggcatagcgaaaaaagaaaaagttcaactgtctggtgaagatagtagagagggtttaaccgctattctgtcagttaaagttcctgatccaaaattttcgtctcaaactaaagataaattagtttcatctgaggtcaggccaatagtcgaaagtgctgtaagtgaagcattgtctcaatggttggaggaaaatcctgcagaggctaaaaaagtaatcatgaaagcatttgaagcagcatcagcaagggaagcagcaagaaaagcaagagaattaacaagaagaaaaggagcattagatattgcaagccttccaggaaaattagctgactgtcaggagaaagacccatcccaatcagaattatttcttgtagagggaaattctgctgggggtagtgcaaaacagggtagaaatagaaagtttcaagcaattcttccattaagaggaaaaattttaaatgttgagagagctcgtttagataaaatgctttcttcagcagaaattggcactttaatcactgcaataggggcgggtgttggtaataatactgaactggaagatagtgtaa

SEQ ID NO: 295463 - DNA, 994 bp, Unknown
  Bacterial polypeptide expressing nucleotide sequence isolated from the Sargasso Sea
attgggtataagaaatacaaaaatcattacgcttgatgacctaatggaaagtatggatggtatattgtctattttcatcgcagatccagagtttcaaggccaaacaaaagaaaaattaagttcaaaaaatgcgaccactcttacaagtaaaattatcgaggataactttgattattggttatcagaaaatcaaaccgacgcagaaaaattaatcagctttcttattaatacagcaaatacgagaattaatagcaaacacgaaaaggatttaagccgaaagtctgccttaagaaaactgaggcttcctggaaaattagcagattgtctagaagataaagccgctggtactgaattatttatcgttgaaggtgactcagcaggtggatctgcaaaacaggctagagataagaagtatcaagccgtcctgcccttgcggggtaaaatattaaacattgcgagcagtagcgcacaaaaatattttcaaaatcagcagctgaaggatctggtgcaggccctaggctgcggtacatctcagagttatgacgatggaaatttaaggtatgataaaattattataatgaccgatgctgatgttgatggggcccacatagcatctttattgataacgtttttctatattgagatgcctgaattaataaataacgggcatttgtatgtcgctgttccacccctttataaattatcagctaataataaaatattctacgccattgatgacgatgacagagaaagaataataaaagagcattacaagaaaagcgaaaagattgacatatcacgtttcaaaggtttaggtgaaatgcttccaaaccagttaagagaaacaacaatgaataaatcgacaagaaagctattaaaaataacaatgaatagctattcaccggaccaatacgcaaaaacgatcgatgaactaatgggtaataaaccagatgcaagatttaaattcattcaagaaaatgcaagctttaattaa

SEQ ID NO: 295464 - DNA, 709 bp, Unknown
  Bacterial polypeptide expressing nucleotide sequence isolated from the Sargasso Sea
atgacaaaaaactcaaattatcaagcagatgcaatcaaagtattaaaaggccttgaagcggttcgtaagagacccggaatgtatattggtgataccgatgatggaactggtttgcatcatatggtttatgaagtggtcgataactcaattgacgaggctcttgcaggatattgtaaaaatatcaatttagatattaattcagatggcagtattactgttaatgatgatggaagaggaattcctgttgatattcataaaggagaaaaaaaatctgctgcagaagtaataatgactcaacttcatgcaggtggaaaatttgatcacgactcatataaggtttctggtggattgcatggtgttggtgtttctgttgtaaatgcactctcagaaaaattagaattaacagtagaaagagatggaaaaaaatattttatagaatttaaaaatggagattcaaaaaaacctctaaaagaaattggaaagtcaaaaaaatccggaacccaaattaaatttcttccatcaaaaaatattttttcttcaactaagtttagctttaatacaatacaaaaaagaatgagagagcttgcgttcttgaacaagggaataaaaatttcaattaatgatttttcattaaaaaaagtaaaaaatgtcgaattcaaatttgatggaggaattttagaatttgtagaatttttagaaaaaagataga

SEQ ID NO: 295465 - DNA, 1921 bp, Unknown
  Bacterial polypeptide expressing nucleotide sequence isolated from the Sargasso Sea
atgtcaggtgatacgtacgattcaggcagtattaaggtattaaaaggtttagaagcggttaaaaagagaccaggaatgtatatcggagataccgatgacgggactgggcttcatcatatggtttttgaggtgcttgataactcaatagatgagggaatggcaggtttctgtaagcagatagatgttgtaataggtaaagacggctctgtttcagtgtctgatgatggaaggggaataccagttgatatgcacgaagaaggggtatcggcagctgaagttattatgacaacactacattcaggaggaaaatttgatgaaaacagctataaagtctcaggaggcctacatggagttggtgtttcagtcgtaaatgctcttagcagcaagttagttttagaaattgaaagggatggagcaaaatataagcaagaatattcagatggcgagccaaaaacaaaacttgaaaaagtaggaaaaagcgaaaaatcaggcacaaaagtaacatttacaccttcaaagaaaatatttacacagaccaaattcgatgtagaggttttaaaaaagcgcattagagagctttccttcctgaacaaaggaattgctattcatgttcttgatgaagcttcaggaagcaaacttgagtttaagtcagacggaggactattagagtttgttaaacatctcacaggcaaaaaagaagtaattggcacacccttttatgcacaagcaaatatgaaaggaataggggttgaaatcgctgcacagtggacaggaacgtacagagaaaatgttcaatgcttcacaaacaacattccacaagttgatggaggcacacatcttgctggtttcaggggagggcttacaagagcaattaaaaactttattaaaaaagaagatttaatgcgcaaaaaagaagttgagataacaggagaagatgttagagagggcatgatagctgttatttctcttaaaatgcctgaccctaaattctcttcacaaacaaaggacaagttggtgtcgtcagaagcaaggccagcagttgaaacgcttattaatgactatttcatggactttttacttgcaaacaaaccacaagcaaaagaaatacttggcaaagttctcgaagcagcgtatgcaagagaggccgcaagaaaagcaaaagaaatgacaagaagaaaaggtcttctggatataggaggattgcctggtaagcttgcagattgccaagaaaaagacccagccttatcagagttatttttagtagagggagattcagctggcggatcggcaaaacagggcagggacaggagctttcaggccatattgccgcttaaaggaaaaattataaatgtacagaaagcacgcttagacaaagttttatcttctaatgagattggaactcttataacagctttaggtacaggcatcggtattgacgagttttcactagaaaaacttagataccatagaattataataatgacagacgcggacgtggatgggtctcacataagaacactcttacttactttcttttacaatcagatgtttgatctgttggaaaaaggacacatttatttggctttacctcctctctacaaaattaaaaagggtggaaaaacacattacgcaaaagatgaggaagaaaaagacgcaattctcaaagagcttagaaaagaagcaacagaaggctctagacctcctgagatacagagatataaagggctaggagaaatgaatcctgaacagttgtgggagacaacatttgatcctaaacacagaaggcttgtgcaaattactttagacgaggcaagagaactcgttgatgatatctttgaaacattaatgggcgatcaagtgcagccaagaagagagtttattgatgataatgctcttagagcagagaatatagacttttaaa

SEQ ID NO: 295466 - DNA, 1320 bp, Unknown
  Bacterial polypeptide expressing nucleotide sequence isolated from the Sargasso Sea
aatggcaaataaaaacacatatcaagcagattccattaaagttttgaagggtcttgaagcagttagaaaaagaccagggatgtatataggagatacagatgatggcactggtttacatcacatggtttatgaagttgttgataactctattgatgaagctttagctggttactgtaaaaatattaatgtaaaaattaactttgatggaacaataacagttagtgatgatgggagaggagttcccgtagatatccataaaggtgagaaaaaatctgctgctgaagtaattatgacacaacttcatgctggaggaaaatttgaccatgattcctataaagtatctggaggtttacatggagttggtgtttcagttgtaaatgcattatcagaaaaattgcaattagaaataaatagagatgaaaaaaaatattttgttgaatttcaaaatggtgaagctaaagcacctttaaaagtaattggaaaatcaaaacaaactggtactcaaattacttttttgccatcaaaagaaatcttttcttcaacaaaatttagtgcaaatattttaatcaaaaggatgagagaattagcatttttaaataaaggcattaaaattatttttacagatgcaagtcagaagaaagaaaaaacttatgaatttaagtttgatggtggagttcttgaatttgtgaattttttagatgaaaaaagagaaaaattacaaaataaaaatggaaatgatttatttaaaaaaccaatttatatagaaggtaagaaaaataatatagagttagaatgttctttgaaatggaatgcgggctatggagaagatattttaccgtatacaaataatatatatcaaaaagatggaggaacacatttacttggttttagaagtgcattgacaagagtaattaacaaatatgcaaatgaaaataatttattaaaaaagaataaattggctatttcaggtgacgatataaaagaaggtcttacttgcgttctatctactaaaattccagatccaaaattttcttctcaaactaaagataaattagtttcgtcagaaataagaatgatagttgagactgttattaatgaaaaattgtctatatggtttgatcaaaatccatctattgcaaaaataattttggctaaagtgattcaagcagcagtagctagggatgtagcaagaaaagctagagaaaatgttagacgaaaaggtgcgcttgaattaagcggattgcctggaaaattggctgactgtcagataggaaagcaagagggcactgaattatttattgtagagggtgattcagctgg

SEQ ID NO: 295467 - DNA, 1636 bp, Unknown
  Bacterial polypeptide expressing nucleotide sequence isolated from the Sargasso Sea
atttgtaaagtatctagatcgatcaaaaacctctttgatcccagagcctatatttatcacgggtgaaaaagatgaaattggtatcgaggtagcaatgtggtggaatgatagttaccacgagaatgtcctaccttttacaaataatattcctcaaagagatgggggagcccacattgcgggtttccgtggggcgctaactagaacaatcaatagttatgcacaagaaagcggtattgcaaaaaaagaaaaggtgaactttaccggtgacgacgcgagagaaggtttaacatgtgtcttatctgtaaaggttccagacccaaagttttcaagccaaactaaagataagttagtaagctctgaggtgagaccagcagtagaaagcttaatgaatgaaaaattaggtgaatggtttgaagaaaaccccaacgaagcaaaacttatagttggcaaaattattgaagcagctctcgctcgtgaagctgcaagaaaagcacgagagctcacacgtagaaaagcagctttggatgtaaattaccttgcaggaaaactaaaagactgcgcggagaaggatccctcaaaaactgaagtttttctagttgagggagattctgctggaggctcagcccagaccgggcgcgatcgcagaacacaggccattttgcccctcaggggaaaaattttaaatgtagagagagctcgatttgatcggatgctcaacagccaagagattggaaacttggttatggcacttggtaccgggattggaagagatgaatttgatattagtaaattacgatatcataaaattgttatcatgacagatgcagatgtagacggcgctcatattagaacgcttttattgacatttttttataggcaaatgccagagttagttgaaggtggctacctgtatattgctcagcctccattgtacaaagttagcaaaggtaaatctgaagtttacctcaaggatcaatcagctcttgatgattttcttgttcaacaaggaattgaaggggcagtgcttaaagttgggtcgaatgctgatatcgcaggtcaagacctagcaaggttagtggatgaagcacgtcaacttgatagagtattggaagccttcccaacacaatatccacggcatatattggaacaggcagccatcgccggcgcttttgttccaggggcagtagataaagatttacaaggtactgccgatagtattgccgcaagattgaaccttattgctttagaatatgagcggggttggtctggaaggattacacaggacaaaggtattcgcttagcaagagtattaagaggtgtagaagagctacgaactttagatgggcccatgttaagatcaggagaagcaaggaaaactggtacgtttactgaaagccttaaagaaatctatgaaagtcccaccacccttattcgaaaagatcaaagtcaaatcatatacggcccattagaattacttagttcaattttaaaagagggggaaaaaggactttcacttcaacgctataaaggccttggtgaaatgaaccctgatcaactttgggaaacaacccttgatcctgatgctcgaacactattacaagtcaaaataaacgacgcagcagaggctgacgattgt

SEQ ID NO: 295468 - DNA, 635 bp, Unknown
  Bacterial polypeptide expressing nucleotide sequence isolated from the Sargasso Sea
gatgagctcttcatatctttcttatgcaatgagtgtaattgtaagtcgagcacttccagatgtaagagatggattaaaaccagttcatagaagaattttatatgcaatgtataaaggtggttttgactggtctaagcaatttagaaaatctgcaagagtagttggggatgtgattggtaaatatcatccacacggagatcaagctgtttacgatgctttagttagaatggttcaggatttttcaatgagtttacctctgattgatggacaaggtaattttggatctattgatggagatcctgctgcagcaatgaggtatactgaaactcgattatcaaaaattgctgaacatgttttggaagatatagagaaaagtactgttaactttaaaagtaattatgacgaaacagaaatggagccggaggtattaccctcaaaatttcctaatttactagtcaatggtgctggcggaattgcagtaggaatggccaccagtataccaccacataatttaggtgaagttattgatggaacattagccttaattaataataaagatataaaattgtctgaattaatgaaacatatccctggacctgactttccaacaggtggaataataataggaaaagaga

SEQ ID NO: 295469 - DNA, 1222 bp, Unknown
  Bacterial polypeptide expressing nucleotide sequence isolated from the Sargasso Sea
aatgtacattggagatactgatgatggctctggcttgcatcaaatgatttatgaagttgttgataactctattgatgaatctctagctggttattgtgataaaattgaagttatattgaactcagatggcactattacaatttcagataatggtagaggagtgcctgttgataatcataaggaggaaggagttccagcagctcaattaattatgacagagctccatgctggaggaaaatttgaccaaaatagctataaagtttctggtggtttgcacggtgtaggagtgtctgtagtcaatgctctttctgagacattattattagaaattaatcgcgaagataagattcataaaatggaatttgctcatggggctgtgctaaattctcttaaagttattggtgattcagaattaattaatggaaaaagctatacagggacgaaaataacttttttaccatcaaaaaaaatttttaaaaatattgagtttaatttttctacgattgaaaagagactaagagaactagctttccttaatactggagtaaatattgtacttcaagataataggtctgcacaaaaaaaagagatcatttttaaatatgaaggaggaataattgagtatgtaaattatctcaacaaaggtaaaaactgcataaacaataccccaatatattttttaggaacaaaaaataaagttaatgttgaatgtgctttgcaatggactgatgcgtatcatgaaaacactttatgctttactaacaatattgcccaaagagacggtggaacacatcttgctggttttagaggtgccttaacccgttgtatagtaaattatataaatcaaaaaataaagaatagtacaaatatttcaggtgatgatgcaagagaaggtcttacttgcgtaatttcagtgaagttacctgatcctaagttttcaagtcaaactaaagataagttagtttcttctgaagttagacctgtagttgaatctgtaagcttagaaaaaatagaacagtggattgaagaaaatcctaatgaaattaaaaaagtagttgaaaaagttgtagaagcttctgatgctagagaagcagctagaaaagcaagagaacttacaagaagaaaaactgggctagaaaattcatctttacctgggaagcttgcagattgtcaggaaaaaaacccagaatcctccgagctatttattgtagagggtgactca

SEQ ID NO: 295470 - DNA, 547 bp, Unknown
  Bacterial polypeptide expressing nucleotide sequence isolated from the Sargasso Sea
aatggcaaaaaaatctgataaggccaaatacgattcttccaacattcaagttctaaaaggactggaggctgttaaaaaaagaccagggatgtacattggtgatacagatgatggctcaggattacatcacatggtttttgaggttcttgataattgtattgatgaatcaatggctggccattgctctgaaataaatgttgtcattaataaagatcagtcagtaactattgaagataacggaagaggaattcctgttgatgttcataagaaagaaggtgtttctgctgcgcaactaattttaacaactcttcattctggtggaaaatttgatgacaacagttataaagtctcaggtggacttcatggtgttggggtgtcggtggttaatgccttgtctaaaaaacttatgctcgaagttcacagagatggaggaaaattttttcaagaatatgtagaaggaaaaccaaaagcaaaactaaaaaaaataaagagttcaagtaagactggaaccaagatcactttctatccatcaaaagaaatttttgct

SEQ ID NO: 295471 - DNA, 2509 bp, Unknown
  Bacterial polypeptide expressing nucleotide sequence isolated from the Sargasso Sea
atgccggcaaagaaaaaagcagctaaaccttcaactaaaaaaacccaaaaaaaagcacccaaaaaattagcctctagttctactaaaactcaaaaaaagaaaaaatcagagagttcttatgactcatccagcataactgtattaaaggggctggaagcggttaaaaaaagacccggaatgtacataggcgatacagatgacggtacgggactgcatcatatggtttacgaagtggtagataattccattgacgaagctttggctgggcattgcgatgaaataactgtgaaaattctttcagatgatagcgtaacagtaatagataatggaaggggcataccaacagataagcatgaagagggggtatctgcagcagaagttattatgactaagcttcacgcaggaggaaaatttgacgataactcttataaagtttctggtggcttacatggtgtaggagtctctgtagtaaacgccctttctgaagaactaaagctgaccatacacaggggcggaaagatacatgaacaaacttattcaaacggaacgccgactagcaagttgaaaatagttggtaaaacagattcgacaggaacagaggtcatgtttgttccgtcagaaacaaccttttctaacatactctttgattacgatacattggaagccaggctaagggaactctctttcttaaattcaggtttaaaaataaatcttatagatgaaaggacctctaagaaaaaagaatttttacacaaaggcggattagcggaatttgtagaatttttaaataaaaaaagaacaacagttaattccatatttcattttgttaaagaggccaaggatggcattactatcgaggtttctttgcagtggaacgacgggtatcaagaaaatatccagtgctacacaaataatatcaaacaaagggatggaggaacccatcttgtgggatttaggacggcattgaccagaaccctcaataattatatggacagagaagggatgaacaataaggaaaaagtatctacttccggagacgatgcaagagaaggtttggtagctatcgtttctgtaaaagtccctgatcctaaattttcttctcaaacaaaagataaactagtttcctcagaagtaaggccagtcgttgaacaagaggtgtacaaagcactttcagaattcttgcttgaaaatccaacagaggccaagcttatagcaacaaaaataatagaagccgcacgcgcaagagaggcagcaagaaaagctagagagctaacaagaaggaagggcgcttttgaaggaggagggttgccaggaaagctttcagattgtcaggaaaaagatccagcaaaaagcgaaatttatttagttgagggagagtctgctggaggatcggcgaaacaaggaagagacaggcatttccaggccatacttcctttaaaaggaaaaatactcaatgtagaaaaagctcgtttggacaaagtgctttcatcagaagaaattattattctaataactgctctaggctgtggaatcaagggcgaggattggcaagaagaaaagcttagatatcacagaattataataatgacagatgcagatgttgatgggtctcatatacgcactttgttacttactttgttctatagacaaatgcctgagcttatagaaaagggttatatatacattgcacagccccctctctataaactaaaaaagggtaaacaggaaacttatgtaaaggatgatgcagaactaagggaattgttggtagcggagatactggatgatgcccacctagtccttaataaaaaaggtgaatcaattagcggagaggctcttggaaaatttatttcgcaacatgaaaaaatccaattattagttaatggcttaacccatagctatccaattgacttgctggagagcattaagcacgtagaaatattgagtgggttagaaaaagaaaaagaaattaagaagtggtgtaagtctatagaaaactacttgaataaaaatgcagaacagggctctgaatggtcagtagtggccaaagcgaatgaagacgggagtgtgatagagccaaatgtaagcttaataaaacatggcacatcttctaattggatattaaacaaatctttctttagatccaaagcttataaagatattgcagcccatggagcggacatggtcgaactgttcaacaaagacagttattttgaaattaattctaagaagatacctgtagaaaattttgctaatgcacttgaagaaatattaacaatatctgaacggtcctttactaaatcaagatataaaggtctgggtgaaatgaacgcagatcagctatgggacactactatgaatccagatatgcgaatactgggtcaagtgagtatagaggatgcccaagctgcagacgacttgtttcatgcgctgatgggcgatgaagtagaaccaagaagggactttattgacgagaatgcgaaacttgttgttaatcttgacgtttaat

SEQ ID NO: 295472 - DNA, 1984 bp, Unknown
  Bacterial polypeptide expressing nucleotide sequence isolated from the Sargasso Sea
tatgtcaacgaagaaacccagcgcggcctatagcgaagcatcgatcaaggtgctaaagggtctcgagccggtcaagcagcgccccggcatgtacacccgtaccgagaatccgctgcacatcatccaggaagtcatcgacaacgcgtccgacgaggcgctcggcggctacggcaagcagatcacggtcacgctgcacgccgaccagtcggtctcggtcgaggacgacggccgcggcatcccgttcggcatgcacccggaagagggcgtgccggtcgtcgagatcgtattcacgcgcctgcacgcgggcggcaagttcgacaaggccgcgggcggcgcctacacgttctcgggcggcctgcacggcgtcggcgtgtcggtgacgaacgcgctcgcgacgcgcctcgacgtgacggtctggcgcgacggcaagatcgcggagctcggcttcgccgaaggcgatgtcgtcaagccgctcacgacgcagggcgcgggccgcggcgagaagaaatccggcacgcgcgtgcaggtgtggccgaatccgaagtatttcgattcgccgaacctgccgctcggcgaactgcagcgcctgctgcgctcgaaggccgtgctgctgccgggcgtcgaggtcgtgctcgtcaacgagaagtcgggcgagcgccagacgtggaaatatgaagacggcctgcgcggctacctgctcgacgagatgaacggcagcgagttgctgatcccgctgttcgaaggcgagcgcttcgccgattcgcgttcgggcgacgacacctttgccgaaggcgagggtgcgtcgtgggtcgtcgcatggagcgaggaaggctcgctcgtgcgcgagtcgtacgtgaacctgatcccgacgccggccggcggcacgcacgaatccggcctgcgcgacggtctctaccaggcggtgaaaagcttcgtcgaactgcacaacctgcagccgaagggcgtgaagctgctcgcggaagacgtgttcgcgcgcgtgtcgttcgtgctgtccgcgaaggtgctcgatccgcagttccaggggcagatcaaggaacgcctgaacagccgcgacgcggtgaagctcgtgtcgtcgttctcgcgccctgcgctcgagctgtggctgaaccagcacgtcgagcacggcaagaagctcgccgagctcgtgatcaagcaggcgcaggcgcgcacgcgagcgggccagaaggtcgagaagcgcaagagctcgggcgtcgcggtgctgcccggcaagctgaccgactgcgagacggaagatatcgcgcgcaacgagctgttcctggtcgagggcgactcggcaggcggctccgcgaagatgggccgcgacaaggagtaccaggcgatcctgccgctgcgcggcaaggtgctgaacacgtgggaaaccgagcgcgaccgcctgttcgcgaacaacgaggtgcacgacatctcggtcgcgatcggcgtcgatccgcacagcccggatgaaagcgtcgacctgtcgaacctgcgctacggcaagatctgcatcctgtcggatgcggacgtcgacggctcgcacatccaggtgctgctgctcacgctgttcttcaagcacttcccgcaactgatcgagcgtggccatgtgtgcgtcgcgcgcccgccgttgttccgcgtcgacgcgcccgcgcgcggcaagaaggccgcgcagaagctctatgcactcgacgaaggcgaactcgaggcgatcctcgacaagctgcgcaaggaaggcgtgcgcgagacgcaatggagcatcagccgcttcaagggtctcggcgaaatgagcgccgagcagctgtgggatacgacgatgaaccccgacacgcgccgcctgatgccggtgaagctcggcgagctcgactacgaggcgaccgtcgcacggatgacgatgctgatgggcaagggcgaggcagccgcgcggcgcggctggctcgaggaaaagggcaacgacgtcgaagcggacatctaa

SEQ ID NO: 295473 - DNA, 2323 bp, Unknown
  Bacterial polypeptide expressing nucleotide sequence isolated from the Sargasso Sea
gatggacgacaacacttccgatctcttcgccagctccgatgcaccggacgccgaagcgctgacgctcggcaactacgcggagcaggcgtatctcagctacgcggtcagcgtcgtgaagagccgcgcgctgcccgacgtgtgcgacggccagaagccggtgcagcgccggattctctacgcgatgaacgaaatgggcctcggcccggacgccaagccggtgaagtcggcgcgcgtggtcggcgacgtgctcggtaaataccacccgcacggcgaccagtcggcgtacgacgcgctggtgcgtctcgcgcaggatttctcgctgcgctacccgttgatcgacgggcagggcaacttcggctcgcgcgacggcgacggcgcggcggcgatgcgatacaccgaagcccgcctcacgccgatcgcgaagctgctgctcgacgagatcgaccagggcacggtcgacttcatgccgaactacgacggctcgttcgaggagccgaagacgctgccgagccgcatgccgttcgtgctgctgaacggcgcgtcgggcatcgcggtcggcctcgcgaccgaaatcccgtcgcacaacctgcgtgaagtcgcggcggcggcggtcgcgctgatccgcaatccgaagctctcgcacgcggagctgatgaacctgattcccggcccggatttcccgggcggcgggcagatcatctcgagcgacaccgaaatcgcgacggcctatgaaaccggccgcggcagcctgaaggtgcgcgcgcgctggaagatcgaggatctcgcgcgcggccagtggcagctcgtcgtgaccgagctgccgccgagcacgtcgggccagaaggtgctcgaggaaatcgaggaactgacgaacccgaagctcaagctcggcaagaagacgctcacgcccgagcagctcaacacgaagaaggcgatgctcgacctgctcgacgcggtgcgcgacgagtcgggcaaggaggcggcggtgcggctcgtgttcgagccgaagtcgcgcacgatcgaccagacggaattcgtgaacacactgctcgcgtacacgagcctcgaatcgaacgcgacgctgaacctcgtgatgatcggcgccgacggccggccgggccagaagggcctgctgacgatcctcgacgaatgggtgaagttccgccagctgacgatgacgcgccgctgccgccatcgtctcgcgaaggtcgacgaccgcatccacatcctcgaagggcggatgatcgtcttcctgaacatcgacgaggtgattcgcatcatccgcgagtcggacgagccgaaggccgcgctgatgagcgcgttcggcctcagtgaacggcaggcggaagacatcctcgaaatccggctgcgccagcttgcgcgtctcgagaagatcaagatcgagaaggaactcgaagcgctgcgcgacgagaaggcgaagctcgaggaactgctcgcgaacgaaagcgcgatgaagcggctgatgatcaaggagatcgaggccgatgcgaagcagtacggcgacgatcgccgcacgctgatccagcaggaaaagcgcgcgacgttcgaggcgaaggtggtcgacgagccggtcacggtcgtcgtgtcgcagaagggctgggtgcgtgcgctgaagggccacgggctcgatccggccagcttctcgttcaaggccggcgacagcctgtacgcggcgttccagtgccgcacgccggaccgcctgatcgcgtggggcagcagcggccgcgtgtactcggtcgacgtgtcggtgctgccgggcgggcgcggcgacggcgtgcccgtcacgtcgctgatcgagctcgaatcgggctcgcacctgatgcattacttcgcggcgccggccgaccagcaactgctgctcgcgtcgagcaacggcttcggcttcctcgcgaaggtcggcgacatggtgagccgcgtgaaggccggcaaggcgttcatgacgatcgatgcgggcgcggtgccgctcgcgccgatgcccgtgctgccgaacgcgacgcaggtcgcgtgcctgtcgagcggcggccgcctgctcgtgttcggcatggacgagatgaagacgctctcaggcggcggtcgcggcgtgatcctgatggcgctcgacgacaaggaaacgctcgttcaggcactcgcgatcgatccggccggcgtcgtgctgatcggcaccggccgcggcggcaaggcgatggacgagacgctgtcgtatgcagggctggcgccgcacgtcggcaagcgcgcacgcaagggccgagcgcccgagacgaagctcaaggtcgtcagcgaactgcgtccgctgctcggctga

SEQ ID NO: 295474 - DNA, 1124 bp, Unknown
  Bacterial polypeptide expressing nucleotide sequence isolated from the Sargasso Sea
catggtgacagtgcaatttatcaatcaatggtaagaatggcacaagatttttcaatgaggttagaacttattgatggtcaaggtaattttggatcattagatggcgatccaccagcagcaatgcgatacactgaggcaagacttgcaaaagttgctgaaaaaattgtcacagatttagataaacaaacaatttcttttcaacctaattatgatgatagtacaaatgagccatcagttttaccagcacaatttcctaatttgcttgtgaatggtgcttctggcattgctgtaggtatggcaactaatattgcaccacataatttaggtgaagtagtagatgcaactcttcatttaattgaagagcccaaaacagaattagatgatttattaaagttgattaaaggtccagactttcctactggcggacaaataataggaaaaaaaggaatctttgatacatataaaaatggcaagggtggagttgttttaagatcaaagactagtattgaaaaattcaagaaagatagagaggctatagtaattaatgaaattccttatcaagttaataaatctaaacttattgaaaaaattgcagaaacagtaaaaaataatattatagaaggtatatccgatttaagggatgaatctgatcgtaatggtgttcgggtagtcgtagaattaaaaaaagatgtagatgctaatattattctaaatcaactttataaacatacacttcttcaaactacttttaattcaaatatgcttgcacttaataaaggaaagcctgaacaaatgaatttaaaagatatgttaagtgcctttattgattttagagaagaggttatcactaaaagaacaatatttgatttgaataaagcaagagataaggctcatatttttataggcttagtagttgcaaatgcccatatagatgaaattataaatttaattaaagcatcaacagactctaaagaggcgagagaaaaactaatcaacaaaaaatggaaattaagtgaaaaaaatttaaatttcattcggttagttgatgatgaaaatactcaagtcgaaaaaaacatatttcaatttactgaggcgcaagcaaaagcaattcttgaattaagatt

SEQ ID NO: 295475 - DNA, 2130 bp, Unknown
  Bacterial polypeptide expressing nucleotide sequence isolated from the Sargasso Sea
aagttattatgaccgttcttcatgctggcggtaagtttgatgatgactcttataaagtttctggcgggctccacggtgttggggtctcggttgtaaatgctctttctcagactttaagtttgcgaatccataaaaatggaaacatatacgaacaagactatgctcatggaacgccaaaaaaaccacttaagaagggcgctaagaccgagagaacaggaacaaccatatcgtttcagcccagtaaaaaaactttttcaaatacctcattcagctatgaaacgctctctaaaagattgagagaaatgtcatttctaaacccaggacttaccattaatctcaatgacgaaagaacaaataaggcagactcttattgttatgagggaggcttaaaagattttgttcgtcatcttaataaaccccaaaagccaacacatcaaagcattgcatatatcaacaagaaatccaaaaaagacggagatattgaggtagaggttgccatacaatggaatgaatcttatagagaaaatacgttttgttttgcaaacacaattcgacagagagacggaggcacccaccttgctggatttaggggtgcattaacaaggacaatcaatacttatatagataaggaaattccaaaaaatgatacgtctgtaacgggtgacgattgtcgagaagggatgacagcaatcatctcagttaaacacccggacccgaagttttcatctcaaaccaaagataagttggtttcttccgaggttaagggtgtcgttgaatctgcggttaacaaacacctcaaggagttcttagaggaaaacccggtagaggcaaaaataatagtcggaaaaatattagacgcggctcgcgctagggaagcagcaagaaaagccagagaaatgactagaaaaaaaggagcgctcgatattgctggattgccaggaaagcttgctgactgccaggagaaagacccttcactgagtgagctttttattgttgagggagattctgcaggagggtctgcaaaacaaggaagagacaggaaaactcaagcaatattgcctctaaagggaaaaatcttaaacgtagaaaaagcacaaagagcaaaaatgtattcttctgttgagattggaacacttattacagcattaggatgcggtattcacgatgagtttgatatggataaccttagataccataaaattattattatgaccgacgctgacgttgatggttctcatatcaggacactcttattaactttcttctacagagagctccaagatcttatcagtggcggctacttgtatattgcacaaccgcctttatataaactaaaaaaaggtaagaaagaagagtatgttttaactgacgatgaacttaatagtttaatactaagcaatgctgttaagggcacggaggtcagggctaaaaacaagaaaaaaggaattgagggagacgggctcttaaacaccattcttgactattctaattctttatccgtgattgaaaaaattgagaaacaggcaggaactatcgcggcaaaagcaatatcgcttcataagccaatcactaaaacagaagctaataacaaaaagaaactagagacttggattaagggcctatcaagaactgcatcaaagatagcaaaagagaaagggtataaggcatctgtaagtatagactatgacgatgatggaataggctacataatcacagaagaagaaattggtggagtaacccatcacggcaagattgctaactcttttttaagatcaaacgactacaaaatttttggccgagtacaaaaagcacagaaattattctcaggggctgttgtcatagataacggatcagaaattacagaatatgtgaatattgaggattgcctaaaccaaattgttaacaactctaaaagaggccttaatgttcaacgctacaagggccttggcgagatgaacccagaccaactttgggaaacaacacttgacccaaccacaagatctttgttgcaagttaaggcggatgacgacgcaggcctgacatttgaaacccttatgggcgacgaagtaccacccagaagagagtttatagaagaaaatgccttaaatgcaggaaatgttgatatataac

SEQ ID NO: 295476 - DNA, 1522 bp, Unknown
  Bacterial polypeptide expressing nucleotide sequence isolated from the Sargasso Sea
aatgttcaacttgtttggagaagatattagagaaggtttcacatgcgttttatcagtaaaagttgccgaccctaaattttcaagtcaaacaaaagataaattagtatcatctgaggttagacctgttgttgaaagtttaatcaatgatcttttgtctaattggtttgaagagcatcccaatgaggccaagataattgttggaaaagttgttgaagctgcttctgctagagaagcagctagaaaagctagagatctcacaaggagaaaaggagctctagatatttcatcattgccaggaaaactggcagattgtcaggaaaaagatcctgaaaaatgcgaaatatttattgtagagggtgagtcagctggaggttctgcgaagcaaggtagagataggtctacgcaagcgattcttcctttaaaaggtaagattataaattgtgaaaaagcaagattatcaaaagtactttcttccaatgaaatagcaactttaattacagctttaggtggaggtattggcaactcttcaaatgaaagtgatcaagacgatgaaagcttcaagactgataaactaagatataagaaagtaattataatgactgatgcggatgtagatggtgctcacataaagacattacttttaacttttttctatagacaaatgagaccattaatcactgacggttgtttatatatagctcagccccctttatataaagcgaaaaagggtaattcagaaacttatttaaaggacgatgacgatttagaaaactatctaatagattcaggtattaacgattcttcttttatattaaatacaggagaggttatagcttcaaacgatttaattgatttggtaaccaaaagtagaaattttaaaaaattaataaattctttacctaaaaaatataaccaaggatttgttgaggcagtttccgttagtagtgcttttaaacagcctatcgaaatctctgataaagttttagcagaaatatcaaatagactaacaaaaaaatatagtgatattgatgctgattggaaagctagttacgatgacgaaaatggtctcatggtttcaagggaagttagaggagttagtgaaaatatgagtattggtagaggtttatttgattctgcagactcaagaagacttgaaaaaatatctaatgatataaaacaattttttccatttgtagataaggaatcttccaatatttttgaaagagatggaagaagctacataattaatggaccaattgatttgatagaatcaatctttatagagggaagaaaaggattacaaatacaacgttacaaaggtttaggtgaaatgaatgccgaacagctttgggacacaactttagatccagaatctagaagacttttacgtgtaaagattgattctggagttgataatagtggtatatttgccgatctgatgggagatgaagtgataaaaagaagagagtttatccaagatagtattgagtcaggtgacttagtggcaaatttagatatatag

SEQ ID NO: 295477 - DNA, 569 bp, Unknown
  Bacterial polypeptide expressing nucleotide sequence isolated from the Sargasso Sea
tatgccaaaaacaaagaaaagcactaacaccaaaaagtacgactcttctaatataaaagtcttgaaaggccttgatgctgttcgaaaaaggccaggcatgtatattggcgatacagatgacggaacaggcctgcaccacatggtctacgaagttgttgataattccgtcgatgaagcactagcaggatattgttcagaaatatctgtaataatccatcaagatgactctataaccgttaaagacaacgggagaggcgtgccagttgacaaacacaaagaggaaaacaaatctgctgctgaagttattatgaccgttcttcatgccggcggtaagtttgatgacgactcttataaagtttctggcggacttcacggcgttggagtctcggttgtaaatgctctttctcagactttaagtttacgaatccataaaaatggaaacatatacgaacaagattatgctcatggagtaccaaaaaaaccacttaagaagggcgctaagactgagagaacaggaacaaccatatcgtttcaacctagtaaaaaaacatttcaaacacctcattcag

SEQ ID NO: 295478 - DNA, 1024 bp, Unknown
  Bacterial polypeptide expressing nucleotide sequence isolated from the Sargasso Sea
aatggcagaaagagaaaaattaatcccaataaatatagaagaagccatgaaatcagcatacattgattattcaatgtctgtcatagtttcaagagctcttcccgatgtcagagatggattgaaacctgtacatagaagagttctatttggaatgagtgaattaggtcttagatccaatagtaagtacaaaaaatcagcttttattgtcggagaggttttgggtaaatatcatccacatggtgatagctcagtgtatgatacaatggtaagaatggcgcaggagtggagtttacgatatatgcttgttgatggccaaggaaattttggttcaattgatggagacagtccagctgccatgagatatactgaagccagacttaaaaagatctctgaagacatggtacaagatcttgataaggatactgttgattttcaactcaactatgacgattctttgaaggaaccaacagtgctgccaacaaaaattcctaatcttcttgtgaatggagcatcaggaatcgccgtgggtatggctactaatatgcctcctcataacttaagtgaagttattgatggtaccattgcatacatagacaacaataacattgaaatttctaaattaattaatcatattaaggcaccagattttcctacaggtggtattatttatggttatgatggagtcaaacaagcttttgaaacaggtcgagggagagtagtaatgagaggcaaggccatttttgaagaggtaaacggtagagaatgtatcattgtaacagagataccatacctagtaaataaatcagatatgattcaaaaaacagcccaactaatcaatgataaaaaaattgatggaatatcaaacattagagatgagtctgataggaagggcatgagaatcgtatacgtcttaaagaaagatgcaattccaaatattgtattgaataaactttttaaacatacctcactgcaatcttctttcagtgtaaacaacattgctctagtaaatggaagaccaaaactt

SEQ ID NO: 295479 - DNA, 1336 bp, Unknown
  Bacterial polypeptide expressing nucleotide sequence isolated from the Sargasso Sea
catgacagataaaatttctcagattaatttagaagatgaaatgaagaaatcctatctggattatgcaatgagtgtcattattggacgagctttgcctgatgtcagagatggattgaaaccagttcatagaagagtcctctatgccatgaaagtacttgggaatgatcataccaaaccttacaaaaagtctgccagaatcgttggtgatgtaattggtaaatatcaccctcatggagatagtgcagtttatgaaaccattgtaagaatggctcaggacttttcactgcgatatacccttgttgatggtcaaggaaattttggatcaatcgatggtgatagagcggctgctatgcgatacacagaagttaggatggaaaaaattacacaagaacttcttgctgatattgataaagataccgttgactttattcctaactatgatgaatccgaagaagaacctgcggtacttccaactcggttacccaatctattgatcaatgggtctgctggaatagctgttggtatggcaactaacattccacctcataacttaaaagagattatagatggatgtctatttatattagataacgatcaggcaagcattgatgatctaattaaactcattcctgcgccagattttcctactgctgccacaatccatggtatcgatggtattaaacaagcctatgaaactggaagagggcgtgttcacgtaagagcaaaaacctcaattgaagaaaatggagaccgtgaatctatcattatttctgagcttccataccaggttaataaagccagattaatcgaaaagattgctgaactggtcagagataaaaagatagaaggcatctcagaaattcgggatgaatctgataaagatggattaagggttgtaattgatctcaaaagagggacggtttctgatgtgcttttaaataatttgtataaacaaaccttattggagagcacattctctatcaatatggtcgctctatctaatggacaaccgaaactaatgaatcttaaaggaatgcttgatgcattcctctcacataggcgcgatgtagtaactaagagaaccatctatgagctgaatcgatctattaatagggctcatatattagagggacagaccattgctttgacaaatatcgatgaaatgattgccatcattaaaaaatctaaaacgccagcagaagcacaaaaagcattgatttctaaattatggaaagtcgggaaagtcaaagatatgctgaagaaagctggaaatgtttccactattccgaaacaccttttgaatattgaaaactttggtatcgaaaaaagtaaatat

SEQ ID NO: 295480 - DNA, 490 bp, Unknown
  Bacterial polypeptide expressing nucleotide sequence isolated from the Sargasso Sea
catgagcgaagccaaaagcccctcgtcctcgaagattcaggccgcctacggcgccgagcaaatccaggttctggaaggcctggaaccggtgcggaaacgcccggggatgtacatcggcagtacaggccctcgtggtttgcaccatctcgtctacgaggtggtggacaactcggtcgacgaagccctggcagggcattgcaacaccattgatgtctgcctcaaggctgacggttcctgcagcgtggccgataacggacgcggcatccccaccgacgttcatccccgtactggtaagagcgccctggaaacggtgctgacggtgttgcatgccggcggcaaatttggagctggcggttacaaagtgtccggcggcctgcacggcgtcggtgtctcggtggtgaacgccctcagtgaatgggtggaggtcaccgtccaccgccaggacaaggtgcatcgccagcgctttgagcgcggtgcgccgatcggcagt

SEQ ID NO: 295481 - DNA, 2308 bp, Unknown
  Bacterial polypeptide expressing nucleotide sequence isolated from the Sargasso Sea
atgaacttggtcattgtagaaagtccagctaaagccaaaactatcaataaatatttaggtgataattataaagtattagctagttatgggcatattagagatttaccctctaagaatggttctgttgatccagatcaagattttaagatggaatgggagatcgatagcttttcaaaaaaatatcttaaagaaattactgacgcagccaaagattcttcaaaaattatattagctaccgatcctgatcgtgaaggagaagcaatagcatggcatgtaaaagagtatctaaatgaaaaaaaacttcttaaagataaagaaatagaaagagttgtttttaacgaaattacaaaaaaagcagtaattcatggcattgaaaatccaagacaaattgaaccgcttttagttgatgcttacatggctcgaagagccttagattacttggttggctttaatatttcaccaatattatggacaaaacttccaggctctaaatctgcgggaagagttcaatctgtagctttaaaattgataactgaaagagaacatgaaattgagtcctttaagccagaagaattttggactttaagtgtcaaatttaaagatgaaaaaaatcaaaatatccttgcaagtattagtcaactagataacaacaaaattgaaaaattctcttttagaaataaagatgagataaataaagctatatcaagtatcaatcaaaaaaaatttagtattactgatatatcaagtaaagtggtaaatcgtaatccatcaggaccatttactacatcaacgcttcaacaaacagcttcaagtcgattagggttcggtgcatcaagaactatgcaaattgctcaaaagctttaccaaggagtcgaaattgaaggagaaacaataggtttgataacatatatgagaactgatggcactaatttgtcaaaagatgctgtcgtggcttttagagattatatcaaaaaagaaatcggtaatgaatatttgcctgaaagtgcgttaaattattctggtaaaaaggcaaaaaatgcacaagaagcacatgaagcaataagacccacagatgttatcagaactcctcaaagtgtaaaaaagtatctaagcacagatcaaaataaactttatgatttaatatggagtagagctttatcttctcaaatgcaatctgctaaatttgatagaaatactataacgattacatcaaataataatgatacagtatgcaaagcaagtgggtcagttcttaaatttgatggatttttaaaaatttacaataatcaagggaaggatgatgatgaaaacattctgccctctgtgtctaaaggacttgtaaatattgagtccttaatagatgaacagcattttacacaaccccctccaagatattctgaggctagcttagtaaaaaaactagaggaattaggaataggaagaccatctacttacgcgagtataatttctacaatagcaaatagaggttacgctgagatattgaataaaagattttttcctactgatagaggaaaacttatttcagcttttcttgaaaagttgttctcaaaatatgtggattataactttactgctggtttagaggatcaattagacgagattacaactggtaaagaaagctggataaaagttttagagctgttctggaaagacttcaataacaatgtggctgaagtaaaggaaaaaagaacaagagaggtcttagatctgttaaatgatagtttaggagatttggttttcgataaggatgataaaggaaacattgtaagaaagtgtcaattatgtaattcaggcatgttaagcttaaaaaatagctttaggggtggtgcgtttattggttgttctaattaccctgaatgtaaatttacaagacctttatctaaagctaaagcagcggcacaagcacagttagctgaaccaaaatttattggaaaacatgaaaatggtaatgatatttatctcaaaaacggaagattcggaccatacctacaatatgaaaaaattcctgaagatatagagattgaaaaaaaacctaaaaaaaaaagaaaaacaaaaaaacttaaatcagatattaatgaacttttaaaaaatgtttctatcccaaaaggattgggattagagagtattgatttagaaaaagcaaaatttttatgttctcttccaaaatccttaggaatcaatccagaaaatcaaaaagaaataatattgaacactgggagatttgggccttatctaaaatgtgaaaaaaaatctgcacgtatagaaaatatcgaggaaattttttcga

SEQ ID NO: 295482 - DNA, 735 bp, Unknown
  Bacterial polypeptide expressing nucleotide sequence isolated from the Sargasso Sea
aatggcaaaaaaaaataacaacgccaagtacgattcttccaatattcaagttcttaaaggtttagaggctgtcaaaaaaagacccggcatgtacattggagatactgacgatgggtcaggattacatcatatggtttttgaagttcttgacaactgtattgatgaagcaatggctggacattgctcagagatatttgtaaaaattaataaagatgaatcagttacagttgaagataatggaagaggaatccctgttgatgttcataaaaaagaaggagtatctgctgctcaattaatcttaacaactcttcacagtggaggaaaatttgatgataactcatataaggtttcaggaggtcttcatggtgttggtgtgtcggttgtaaatgctctttcaaaaaaactaaccttagaggtgcatcgagatggcggcgaatatttccaggaatacagtgaaggcaagccaaaagcaaaattaaaaaaagttaaaaaatcaaaaaaaactggaacgaaaattacgttttacccatccaataaaatatttacttcaacaaattttgatattgaaaaaatacacaaaagaatacaagagctttcatttttaaatgctggagtttcaatcacagtagaagataaaagaagtagcaaatctaaaaaatttaaaaacaatggtggactgtccagttatgttaaatatttaagaggtaggaaacaggaggtttctgaagtgtttga

SEQ ID NO: 295483 - DNA, 367 bp, Unknown
  Bacterial polypeptide expressing nucleotide sequence isolated from the Sargasso Sea
catggaaaaaaacgaaattccaaagataaataataacattaaacctatctcaatgtatgatgagatgagttcatcttacttatcttacgctatgagtgttatagtgagtagggcacttcctgatatcagagatgggttaaaaccggtacacagaagaattatttatgccatgcacaaaggtggttttgattggtcaaaacaatttagaaaatctgcaagaattgttggagatgtaattggtaaatatcaccctcatggtgatcaagctgtttatgacgctttagttagaatggttcaagaattttcaatgagcttacccttagtggatggacagggtaatttcggttctatagatggggatcctcct

SEQ ID NO: 295484 - DNA, 1303 bp, Unknown
  Bacterial polypeptide expressing nucleotide sequence isolated from the Sargasso Sea
ttggcaaaaaaggcttacgattcaaaagcaattgaggttttgtcgggtctcgatcccgtcaaaaaaagacctggtatgtacaccgatacttcctgcccaaatcatcttattcaagaagttctagacaactctgttgatgaagcactatctggttattgcaaacgcataaaagtaaatctttataaggataatagtattgaagtctcagataatggcaggggtatgccagttgatcttcacccggagcataagttaacaggcgttgaattaattatgtgcaagttacatgccggagcaaagttctctggagaagattatggtttttctggagggcttcatggagttggagtttctgtagtaaatgctttatctaccaaacttaatgtaaaaattaaacgtgattcaaaagagtatgaaataaatttctctgctggagagaaagacaatgatttgaaatcaattggtgatgttggagcgacaaactcaggaacttcaattagattttatccagataaacaatacttcgaaacattagagataaataaaaaaagcttaaaacatctattaaaagccaaggcagttctctgtccaggtcttcaaatagattactttgatgaaaaaaagaatgagagaattaaatggatttttgatgagggactgagcgactatcttgatgagttttcaggctgtaatgagaaacttcttgatgaaactatcattctttctaaagcttctgatgaacaagcattagatgtagcagtgaattggactgaggagtcttcaaataatttactcaaagaaacttatgtaaacttaattcctactgcattaggcggctctcatttaaatgggtttaaatctggtcttctcgaggcaataaaagaattctgtgactacagaaacttgattccaaaaggaataaaaattaactccgatgacattcttgctaattgcatttttgttatttcctcaaagctaaaaaaccctcagttcgctggtcaaactaaggagaggcttgattctaaagatcatatgagctttgtttcatcttcaacaaaagattctctaagtatttggcttaaccaacatactgaagagggagaaaagattgcagaccttgcaattgccgctgctcaaaagaggattaaaagctcaacaaaagttgatagaaagaaaacatttaaaggcccagctcttcctggaaagctttctgattgtaactgcgataatattgaagaaaatgagctatttttagttgaaggagactcagcaggaggatctgcaaaacaagctcgagatagaa

SEQ ID NO: 295485 - DNA, 1519 bp, Unknown
  Bacterial polypeptide expressing nucleotide sequence isolated from the Sargasso Sea
aatgacaaaaataacaaaatcaaagtatcaggcagattctataaaggtcttaaaaggcttagaagcagttagaaaaagacctggaatgtatataggagatactgacgatggtactggcttacatcatatggtttatgaggttgttgataattcaatagatgaggctttagctggatattgtaaaaatattgatatttacattaattcaaacggaacgataacagtcaaagatgatggaagagggattcctgtagatttacacaaaggtgaaaaaaagtctgctgctgaagtaataatgactcaacttcattctggaggtaaatttgatcacgactcatataaagtttcaggcggcttacatggagttggtgtatcagtagtaaatgctttatcagaaagtttaaaacttgaaatttgcagagatggaaaaaagtattttatagaatttaaaaatggtgatgcaaaatcaaatttaaaagttattggaaactcaaaagaaacaggaacacaaattacatttttaccatctaatgaaattttttcatcaattaaatttaattcaagcataattcaaaaaagaatgcgtgaactagcatttttaaataaaggaattaaaatttctattcacgatctaacttcaaaaaaaagtaaaattaatattttcaaatttgaaggtggaattttagagtttgtaaatttccttgatgaaaagagagaaaaactaaacaataaaaatggaaatcttttatttaaaaaaccaattttaattgaaggaaaaaaagatgatgtagaagtagagtgtgcgctacaatggaatgcgatgtacggcgaagatgtttatccttataccaataatgtttatcaaaaagatggaggaacacaccttttgggttttagaagtgccttaactagagtagtaaataagtatgcaagtgaattaaatttattaaagaaaaataagatttctatttctggtgatgatgttaaagaaggtttaacttctgttatatcaattaaaattccagatcctaaattttcatcacaaacaaaagataaacttgtttcttcacaagttagaaatattgtagaaacaatcatcaatgagagactttctttatggtttgatcaaaatccatctatagcaaaggtaatactcgctaaaattattcaagcagctcaagcaagagatgttgctaggaaagcaagagaaacagttcgaagaaaaggagcacttgaacttacaggtttacctggaaaattagcagattgccagaattctagccaagaaggaactgaactttttatagtagagggggattccgcaggaggctctgcaaaacaaggaagaaatagggaatttcaggctgttttaccattaagaggaaaaattttgaatacatatgtagatacaaatggttcaaaaaaaaatggaaacagaaatgaacaaaaaacaaaagctttatcaaaaatgatttcttctaatgaaataatgaccttaattaatgctcttggcctagac

SEQ ID NO: 295486 - DNA, 781 bp, Unknown
  Bacterial polypeptide expressing nucleotide sequence isolated from the Sargasso Sea
tatgattgaagataaaaatcaaaacataattcctgtaaatattgaagatgaaatgaagggagcctacattgattattcaatgtcagtaattgtttctagagctctgccagatgttagagatggtctaaaaccagttcacagaagagtcttatacggaatgttaaatatgggtgttaattataataaatcatataaaaaatctgctagaatagtgggagaggttatgggtaaatatcaccctcatggagattcatctatttatgatacaatggtaaggatggcgcaatcatggtctttacgatatacactagttgatggtcagggtaattttggttctatagatggtgattctcctgcagcgatgcgttatactgaagcaaaattaaaaagaatttctgatgagcttctcaatgacataaataaagaaactgttgattttcaacctaattttgatgattcattaaatgaaccaactgttctaccttctaaaataccaaatctattagttaatgggtcaagtggaattgctgtaggaatggcaacaaatatgcctcctcataatctttctgaagttattgatggtattgttcattacattgataataatgaaatttccattgaagaattaatgaaatatattaaagcacctgattttccaacaggaggaattatttatggatatcaaggagtgaagtctgcatttgaaactggtaaaggtagaattgtcatgagggctaaagcaacaattgaatcaaatgagaaagaaaaagatcaaataatt

SEQ ID NO: 295487 - DNA, 1357 bp, Unknown
  Bacterial polypeptide expressing nucleotide sequence isolated from the Sargasso Sea
catgacagataaaatttctcagattaatttagaagatgaaatgaagaaatcctatctggattatgcaatgagtgtcattattggacgagcattgcctgatgtcagagatggattgaaaccagttcatagaagagtcctctatgctatgaaagtacttggtaatgatcatacgaaagcttacaaaaagtctgccagaatcgttggtgatgtaattggtaaatatcaccctcatggagacagtgcagtttatgaaaccattgtaagaatggctcaggacttttcactgcgatatacccttgttgatggtcaaggaaactttggatcaatcgatggtgatagagcggctgctatgcgatacacagaagttaggatggaaaagatcactcaagaacttcttgctgatatcgacaaggatacagttgattttattcccaactatgatgaatctgaagaagaacctgcggtacttccaactcggttacctaatctactgatcaatggatctgctggaatcgccgttggtatggccaccaatattccacctcataacttaaaagaaatcatcgatggatgcctatttatactggacaatgaacaagcaagcatcgatgacctaattaaactcattcctgcgccagattttccaactgctgccacaatccatggtatagatggaattaaacaagcttatgaaactggaagagggcgtgttcatgttagagcaaaaacctcgattgaagaaaatggagaccgtgaatctatcgttgtttctgagcttccatatcaggttaataaagccagattaattgaaaagattgctgaactggtcagagataagaaaatagaaggcatctcagaaattcgagatgaatctgataaagatggactaagggttgtaattgatctcaaaagaggaacagtttctgatgtgcttttaaataatttgtataagcaaacgctcttagaaagcacattctctatcaatatggtcgctctgtctaatggacagccgaaactaatgaatcttaaaggaatgcttgatgcattcctctcacataggcgtgatgtggtaaccaaaagaaccatctatgagctgaatcgatctattaacagggctcacatattagagggccagacaattgctttgacaaatatcgatgaaatgattgccatcattaagaaatctaaaacgcctgcagaagctcaaaaagcattggtttctaagttatggaaagtaggaaaagtcaaagacatgctgaagaaagctggaaatgtttccaccattcctaaacaccttttgaatattgaaaactttggtatcgaaaaaagtaaatatcgactttcttcagagcaggcc

SEQ ID NO: 295488 - DNA, 1609 bp, Unknown
  Bacterial polypeptide expressing nucleotide sequence isolated from the Sargasso Sea
ttggccaagaatacatacgactcaaaagcaatagaagtactttctggtttagatcctgtcagaaaaagaccaggaatgtatacagatacatcatgtccgaaccatttaatacaggaggttttagataattcagttgatgaagctatagccggacattgctctaatataaaaattaaactttataaaaatggttttattgaggtttctgatgatggaagaggaatgccggtagatattcatccagaacataaattgactggagtagaattaattctttgtaagcttcacgcaggtgcaaaattttctggtgacgaatatagtttttcaggtggccttcatggagtaggcgtttcggtagtcaatgcattatctgagagtctgaaagtaaatgtaaaaagagactctaaagaacatgagatgaattttaatgatggaaataaaaaaaatgagttgaaggttatcagcgatgttggtccaagaaatacaggaactaagattcaattcaaaccaaatgctaaatattttgagtcgatagatgttgataataaacagcttaaacatcttttaaaagcgaaagcagttttatgtccaggactcacaattgatttttttgacgaaaaaagaaaagagaaaattaaatggttttttgaggatggacttaaaagctatcttgaggaaacttcaagtgaaacgaatttattattagatgtacctatattaaattcaaaaaaatctgaagagcatgaagttgaatttgtaataaattggtctgaaaaaccatcaaaaaataaattagatgaaacctatgtaaatttgataccaacttctcaaggaggatcacatctaaatgggtttaaatctggtttgctagattctatgaaagaattttgtgaaataagaaagcttctaccaaaaggtctgaaacttaatgcagacgatgtgattaataatgcaatttttgttatttcatcaaagatgaaaaatcctcagtttgctggacaaacaaaagaaagattggactcaaaagaacatatgtcatttgtaagtagctcaactaaagatgttttgagtatttggtttaataagcacactgaagaaggagagaagatagcagaattggcaattatttcagctcaagctagagccaaagcttcaaaaacagttgaaagaaagaaaacttttaaaggtccagcccttcccggcaagctttcagattgcaatagtgaggatttgaataagactgaattattccttgttgaaggagattcggctggtggctctgcaaagcaagcaagagaaagatcttttcaagcaataatgcctttgaggggtaaaattctaaatacgtgggacttagaaagcgatgagattattaaatctcaagagataaagaatctttcaactgcaattggtgttacccctggtaactctgatatatcaacattgagatatggaaaaatatgtatattagcggatgcagactcagatgggctacatatagcaacattattatgcgccttatttttaagacatttcaaacccttagttaatgatggacgtatttatatagccatgcctccactatacagagttgattgtggtaaagagg

SEQ ID NO: 295489 - DNA, 1663 bp, Unknown
  Bacterial polypeptide expressing nucleotide sequence isolated from the Sargasso Sea
ataaaagtagttttaaatgcagatggtacagtcacagtcaaggacaatggaagaggaattccagtagatattcacaagtctgaaggagtacctgctgctcaattaattatgactgaactgcatgctgggggaaaatttgatcaaaatagctacaaagtatcaggtggtttacatggagttggtgtatctgttgtaaatgccctttcaaaatatttagagcttgaaatcaatagagatggaaaagtttattcaatgctttttaaggatggatcagttgaaaaaaaattaaaaattattggtgattcaaataaaaatgaaaataatttttttactggaacaaaaattacctttttgccttcagagcgaacatttaaaaatattgatttcaattataaaataattgaaaaaagattaagagagttggcttttcttaatactggggtaaatatagttttaaaagataaaagagctgttaaagagatcattaaaaactttaaatacgatggtggtataaatgagtatgttaaattcttaaacaaaggaaaaaatgtaattcataacgactcaatatttttttctgcaaacaaaaacaatattactttagaatgttctttgcagtggacagatagttatcatgaaaatactttatgttttactaacaacatatctcaaagagatgggggcacacatttggcgggatttagaggtgcattaacaagaagtatagtaaattatgtaaacaaaaatacaaaaaatagtgcaaatattacaggggatgatgctagagaaggtctaacatgtgttatatcggtaaaattacctgatccaaaattttcaagtcaaacaaaggaaaagcttgtatcttcagaagttagacctgttgttgaatctgttagtttagagcgattagaacaatggatggaagaaaatccaaatgaaataaaaaaaataatagataaaattgttgaggcttcaaatgcaagagaagctgcacgaaaagcaagagagcttacaagaaggaaaacaggtctggaaaattcttcattaccaggcaaacttgccgattgccaagaaaaaaatcctgaattttctgaattgtttatagtggaaggtgactctgcaggcggatcagcgaaacaaggaagagatagaaaaaatcaagcaatacttcctttaagaggtaaaattcttaacgtagaaagggcaaacccaaaacaaattttaaccagtaatgaaataggtatattaattacggcaattggagctggcgttggaaatccttcaggtaacgaagaagcagataaaaatgaaggaaagtttgatgttaataaaatgagatatcataaagttattattatgactgatgctgatgtcgatggcagccatattagaactcttcttctaacttttttttatcggcatatgaaacccatgattgaatcagggcgtttgtttattgctcagccgccactttatagatcaaaaagaggaaattctattcaatatattaaaaatgaagaggaaatggagcaatatttaattaacgaaggttcaaaaaatttaatttttgaatccacctcttctcaaaagaaagtaatccaaatcagcaatcaggatcttattaagttaataaatatatctaaggaagttttgcgattagtag

SEQ ID NO: 295490 - DNA, 1297 bp, Unknown
  Bacterial polypeptide expressing nucleotide sequence isolated from the Sargasso Sea
atgatagatgcagcactggcaagagaagcggcgcgtaaagccagagagatgacccgcaggaagggcgctctagatgttgccgggttgccaggtaagctagctgactgccaagaaaaagatcctgcagagtcagaaatctacattgtcgagggagattcagctggaggttcggcaaaacagggtcgtaacagaaaaaatcaggcgatacttccattgaaaggtaaaatactgaatgtagagaaggcccgattcgataaaatgttaagttcagcggagattggtactttgatcaaagctctgggttgcggtattggaaatgaggagtttgatccggcgaatttgaggtatcaccgaataataataatgactgatgcggacgtagatggctcgcacatacgaacattgcttctaacttttttctttcggcaaatgcgcgaacttgtggagagagggcatatatttatcgctcaaccgccgctgtacaaaattcgaaaaggtaaacaagagcaatatctaaaggatgatattgaattggcaaattttcagactcaggttgcgctagaaggagccagcctctttgtaaaccccaattctcccgctataaaagaagaacctttagaggctttggttaatcagtataatgagacatactctataatttcccggctcgcaaggctataccctacagagatcttggaggccatgattgttaaccgacagattgcagacaatgtttttgagtcagaagaagatatgaatagttggttagaagacctgtccgtatgtctcaaagaagttcaaccgggagtaagtgctaactatacttttaatgcccattttctaagtgaaagaaaaaaatatgttccagaggctactcttaatcttcatggcttagaaaaaagctatgtgtttaactttgacttttttggctctgctgaatacaactcgatttctaatcttgggaaaactttacgcggcttgatagaaaaaggagcttatgtgcagcgcggagagagaacatgtgaggttagtaagttttcagaagccattgaatggttgaagaaagaagctatgagaggggtttatttacagcgatacaagggcctcggggaaatgaaccctggtcaactctgggaaaccacaatggaccccgaatcaagacgcatgttgcaagtcactatagatgatgctatcggagcagatcagttatttaatacgttaatgggagatcaagtggacccacgaagggaattcatcgaggaaaatgctctctctgctgacaacctggatatttaat

SEQ ID NO: 295491 - DNA, 1039 bp, Unknown
  Bacterial polypeptide expressing nucleotide sequence isolated from the Sargasso Sea
atgggtgaactggccaaagaaatccttccagtcaatatcgaagacgaactgaaacagtcctacctggattacgccatgagcgtaatcgtcggccgggctctgccggatgtgcgtgacggcctcaagccggtacaccgtcgcgtgctctacgccatgagcgagctgggcaacgactggaacaagccgtacctgaagtcggcgcgtgtggttggtgacgtcatcggtaaataccacccgcacggcgactcggcggtgtacgacaccatcgtgcgtatggcgcagaacttctccatgcggtatccgctggtcgacggtcagggcaacttcggctccatcgacggcgacaacgcggcggccatgcgttacaccgaagtccggatggccaagctgacccatgagctgctggctgacctggataaggaaaccgtcgactgggtgcccaactacgacggtaaagagcagatccccgacgttctgcccaccaagattccgcacctgctggtcaatggctccagcggtatcgccgtcggcatggcgaccaacatcccgccacataacctgactgaagtgatcaacggctgcctggccgtgatcagcaaccccgacatcagcatcgacgagctgatggagtttattccggggccggatttcccgactgcgggcatcatcaacggacgtgccggcattgttgaggcctatcgcacgggtcgtggccgcatctacgtgcgcgcccgctgcgaaattgaagatatcgacaaggttggcggtcgccagcagatcgtcatttccgagctgccttaccagctgaacaaagcacgtctgatcgagaagatcgccgagctggttaaagagaagaactcgaaggtattaccgagctgcgcgacgagtccgacaaggacggtattcgcgtggtcatcgagctgcgtcgtggcgaagtgcctgaggtcgtactcaacaacctctattcccagacccagatgcagagcgtgttcggcatcaacgtggtcggtctgctcgacggtcagccgaagattctgaa

SEQ ID NO: 295492 - DNA, 1674 bp, Unknown
  Bacterial polypeptide expressing nucleotide sequence isolated from the Sargasso Sea
aatgtcagacgataatataaccgaaaatcacgaaacaatagcaatagctgatgagctaaaaaaatcttatttagattacgctatgagtgtaattgtaagtcgagccttgcctgatgtcagagacggcctcaaacctgttcatcgccgaatattatacgctatgataaaagggggatatgactggtcaaagccatataaaaagtcagcaagaattgttggtgacgttatgggaaaatatcatcctcatggtgatgcagctatttatgagtcaatggtcagattagcacaagatttttcaatgagagtgccattgatagatggccaaggcaatttcggttcaattgacggcgatcctgcagcggcaatgaggtatactgaggctagattagataaagtttctgaatttttattgagagatatcgactttgaaactgttgattatgccccaaattatgatgaaagccaactagagccacaggtgttgcctgctgaatatccaaacttattagtaaatggagctggtggcattgctgttggcatggcgacaaacattccaccgcataatccagctgaggttattgacgcgtgtatttcatatgtagataaccctgaaattagtatagaagatttaatgacaattctgcctggtccagattttcccactggagcattgataatgggccaagctggcattcagtcagcttatgaaactggaaaaggcagcattgtaatgaggtcaaaagctgaaataatagaaaataacaatagatctcaaataattatttcagaaattccttatcaagtaaataaatcacagttattggagagagttggagaattagttagagaaaaaacaattgaaggtattcaagatttacgagatgaatctgatagagatggtctaagaatagtagttgaaataaaacgtgatagtgatcctaatgtgatattaaaccaactttttaggcatacgcgatttcaaacagcattttctgtaaatcttcttgcattaaatgcaggaaagccagagcagatggggctcaaagaagttctttctgcttttgtagcatttagagaagaggttatatataagagaacacggtttcacttaaataaagctagagagagagcacacatacttgcagggctcatggttgcattaacgagtattgatgaagttatatcactaattcgttcatccccagatgcagatacagcaaaaaaatctcttacatccaaggcatggccagtattaggtatcgaagagtttattaaaattattgatgatcctcaacacattgttaaagatggaaagtaccatttatctgaggaacaagctaaagcaattttagaacttagactccaaagattaacaggtatggaaagggacaaacttgttcaagaaacccaagagcttgctgttaaaattacggaatatttagaaatactctcttcaaaagaagttctcgtgaaattattaaaatctgagctgattgccactaaagaaaaattagatggcaaaaggagaactgaaataagtgatcatgctattgatgcagatgatgaagatcttattcagcaggaggatatggtggtaacagttagtcacaaaggttacataaaaagagttccattagactcctacagagctcaaagaaggggtggcaaaggtaa

SEQ ID NO: 295493 - DNA, 1155 bp, Unknown
  Bacterial polypeptide expressing nucleotide sequence isolated from the Sargasso Sea
ttgcaatgcaatggaatgattcgtataacgagaatgttttatgttataccaataatattcctcaaaaagatggcggcactcatctttcaggctttagatccagcttaactcgtgttttgaaggcatttattaaaaaagaggaattgaataagaatgttcctgtagatttgcttggagaagacgttagagaagggctgatagctgtaatatcagtaaaagtacctgaccccaaattttcttctcaaaccaaagaaaaattggtttcatctgaagtagaaagcatcgttagcagtgttctaaacaagggattaaatgaattcttgctagaaaatccaaaagaagctcatgccattttatctaaggtttctgaggcagcactcgccagagaagctgcaagaaaagcaagagagatgacaaggagaaaaggtgttttagaattagcagggctcccaggcaaacttgctgattgtcaagaaaaggatccagcgctttcagaaatatacctagttgagggtgattcagctggaggatctgctaaacaaggaagaaataggaaatatcaagcaatattgccattaaaaggaaaaatcttaaatgtacaaaaagctaggattgataaagttttgtcctctgcagaaatcggaacactggttaaggctatgggttgtggtattgggactgaagactttgatatcgacaaacttagatatcatagaataattatcatgaccgatgccgatgttgatggctcacatatcagaactctattactaactttcttctatcaacagtactttgatattttagaaaaaggtcatgtttatattgctatgccacctctttacaaaattactaaaggtaaatcctttgtctatgcatctgatgaggatgaaaaagataaggctataaaagatttttcaaaatcaggctcaaagggtatagatgtccaaagatataaagggcttggagaaatgaacccagaccagctctgggaaacaacaatggatcctgaaaatagaaggatgatgagggtagacatcaaagacgctcaagacgcttcagatatgtttgaaacattaatgggtgatgatgtagagcctagaagggatttcattgaatctaatgctctgtctgtttcaaacctagatatttagt

SEQ ID NO: 295494 - DNA, 1333 bp, Unknown
  Bacterial polypeptide expressing nucleotide sequence isolated from the Sargasso Sea
aaactatgattctgagtcgatagaagttctatcaggcttagatccggtcagaaaaagaccgggcatgtatacagacacctccaagccaaaccatttaatacaggaagttcttgataattctattgacgaggctttagttggtcattgctcaaagattaaagttactattcataaggatggttacatttcagtgattgatgacggaagaggaatgccagtagatattcatcctgaacataaggtttcaggcgttgagcttattatgtgcaagttgcatgctggtgcaaaattttcaggtgaggattacaatttttctggtggcttgcatggcgttggcgtttcagttgttaatgctctgtcaaaaaaattatctgttgaaattaaaagggatggccataaatttgagatgaatttcaatggcggcgaaaaaatttctgaccttaagaaagttggagatattggagcaaggaatacaggaacagctataaattttcttcccgatgatcaatattttgaaacaacaaaaattgataaatcaaatcttaagcatttacttaaagcaaaagcagtgctctgttccggcctaactgttgaatattttgatgagaaaaaaaatgaaaaaatactatggaattatgaaagtggtctcatttcttatttatcagaatcttctggggatcttgagctgctattagatgaatcaatttcttgtagcaaatcaggagatgaaaacgcattagactttgtcttgaattggtcaactaagcctgtaaagaatctaatgaatgaatcttatgtcaaccttattccaaccgcacaaggaggatctcatttgaatggatttaaagcaggcttacttgagtcagtcaaagagttttgtgaatttagaaatttaattccaaaaggattgaagataacagctgatgacgtagtgcagcacagtacttttgtcgtttcttcaaaattaacgaatccgcaattcgctgggcaaaccaaagagcgattagattcaaaagatcatcaaacttttgtttactctacaacaaaagatatcttaagtatttggttcaatcagcatacagaggagggtgagaaattagcagacctagctattgcttcagcccaagctagaacaaaagaaacgaaggttgttgaccgaaagaaatcttttcagggcccagctcttccgggcaaactatcagactgtaacagcactgatttatcagaaacagaactgttttttgtagagggagactcagcaggtggctctgcaaagcaatctagagaaagaaaatttcaagcgatcatgcccttaagaggtaaaattttaaat

SEQ ID NO: 295495 - DNA, 1457 bp, Unknown
  Bacterial polypeptide expressing nucleotide sequence isolated from the Sargasso Sea
ttttatgccagacggtgaggtttttaacacaactcgcttcgaatatgatataatagcagaaagactaagagagctcgcatatttaaacaaggggcttgaaattaaccttcgcgaccaacgagaagaagaaggacaaagcgactcttttaaatttaaaggagggttaagtgactttgtaaaataccttgatgagcagaacaacccccttcacaacaaagtaataacagtcacaaaagagggtggtgagataccggtagatgttgctcttaggtatggaaacacttacaacgataatattttaacatttgtaaacaatataaacacaatagagggaggaacacacctatcaggttttcgctctgctctaactagggctatgaacaatcacgcctcgaaaaacaatctaatcaaaacaaagaaaactgaaaaattatctctcaccggagaagatttcagggaggggttgaccgcaataataagtgttaaggtcccagagccacaatttgagggacaaacaaaaacgaaactcggaaacggagaggttaagggccttgttgataaggttgtttatgagggaatattagactttttagaagaaaacccatccattggaagaaaggtaattgaaaaagccctgttggctgcacggagtcgctcagcagcaagaaaagctcgcgaactaataaggcgaaaaagcgcccttggtggttcctctttacctggaaagttggcagattgttcaaacaaagaccctgttttttgtgagctatatttggttgagggtgattcagctggtgggtcagcaaaacaaggaagagacagaaagaaccaggcaattttaccactccgcggaaaggtaattaactctgaaaaagcaagggttgacaaattactttccaataacgaaatacagtccataataacagcgcttggaacaggttttggcggcggcgatgaagaaacaggagagaggtcagccggggactttaatattgaaaaaataagatatcacaaaattattataatgacagatgctgatgtcgacggatctcatataagaacacttttacttacgtttttttacagaaaaatgaaacagttaatagatggtggttatttgtatttggcgttaccaccattatatagggttcaccaaggtaaaaaagcagcatatgcatatgatgataatgaaagagatttgctgattgaaagaatgaaaaaagacaataaaaacacaaagattggaatacaaagatataagggtcttggtgagatgaaccctggacagttgtgggacacaacaatggatccagagaaaagaacccttttgcaagtaacagttgaaagcgctgaggctgcagcggtgacatttcaaaacctaatgggaagcgatgttgaggcaagaaggacctttattgaaaaaaacgcaaaatttgtagcaaacctagacatttaaa

SEQ ID NO: 295496 - DNA, 1607 bp, Unknown
  Bacterial polypeptide expressing nucleotide sequence isolated from the Sargasso Sea
aatggatttaggtagagataatatattagataagcagttagtaaaagagcttgaagaaagctatttaaactattcaatgtctgtcattatgtcgagagcgcttcccgacgcaagagacggattaaaaccagtacatagaagaattttatttagtatgagtgaaatgtctgctatgtggaataggccttataaaaaatctgctagggtggtaggagaggttttaggtaaataccacccccacggagacagttctatatatgacgctcttgtaaggatggcacaagagttttctatgagacacgaactagtacaaggccaaggaaactttgggtctgttgatggtgacagagcggccgcaatgagatacacagagtcaagaatgtctagaattgggagtgagttattaagggatattgaaaaagaaacaataccttggacaacaaattttgacgaaaccttaaaagaaccagccgtcttaccggctgtttatccaaatcttttggtcaatggatcagaaggtatagctgttggtatggcaacaaaaattccaccccacaacctctccgagctggttgatggacttgttgaactggtggataatcccgaatgtgaagcaaaggatttaataaaacacattaaagggccagactttccaaccgcagggaaagcgctaggaattaaaggaattcaggacgcatatgaaaccggaagaggaaaggttattatgcaaggaagagcccacgttgaaccctcaaacagagggagagactctttaattataacagagcttccatatcaggttaataaggcaaacttgatagaaaaaatcgctgagctggcaagagataaaaaaatagagggtattgtagaacttagagacgagtctgacaaagatggaatgagagtggtggtcgaaaccaaaagagatgcagtgccagaagtggtattaaaccaactttacaaacaaacgcaacttcaggacacttttgggataattttgcttgccttggttgacggaacaccgaaagtaatgtctttgaaagagcttttagaggtatttatatcttttaggctggatgttgtagtaaaaagaacagagtttgatctaaaaaaagcagaagccagagcacatattttagagggtcttaaaatagccttaagaaatattgataagattgttgaaacaattaaaaaaagcaaagatcctattacagcaagacagtctttaatggagggttttggattatcagaaatacaatcacaagccatcttagacatgagactacagcgactaacagggcttgaaacagataaaattattagtgaatacaaagacataatacaacacattgccgagctcaaaggtattttagagagcgaatcaaaaagagtgtcgattataaaagaagagcttttagaaattaaagaaaaatatggagaggaaagacgcacagaaattatagaagattttaccagcctaagcattgaggatatgatagctgaagaagaaatggtactaactattacacacaatggctatataaaaagaacaagcttgagcacttatagaagtcaaagaaggggcggaaggggtgtccagggggcct

SEQ ID NO: 295497 - DNA, 511 bp, Unknown
  Bacterial polypeptide expressing nucleotide sequence isolated from the Sargasso Sea
gtgtggttttggtgaagacgaagatgatcctaacagttttaaccctgaaaaattaagatatcataaaatagtaattatgacagacgctgatgtggacggcagccacataagaactttattgttaacgtttttttggagaaaaatgaagagccttgttcagggcggttatttatatatggcaatgccacctctatataaattaaaacagggtaaaaaagaaagatatgcatatactgatgaagaaagagataatattttaagaaggctagagtcagaaaataaaacaaaaattgatattcaaaggtataaagggttaggagagatgaacgcagaacagctttgggaaacaacaatgaacgcagaaactagaaccctaattcaggtaacagttgatcacattatggaagaggaaacgaacgtaaggtttagagaattaatggggtcagaagtagaacacagaagaaagtttataacagagagagcaaaatttgcaaccaacatagacatttaa

SEQ ID NO: 295498 - DNA, 2059 bp, Unknown
  Bacterial polypeptide expressing nucleotide sequence isolated from the Sargasso Sea
aatgacaaataaaaacacatatcaagcagactcgatcaaagttttaaagggcttagaggcagtaagaaaaagaccagggatgtatattggtgacacagatgatggcactggacttcaccacatggtctatgaagttgtagataattctattgatgaagctttagcaggtcattgtaaaaatataaatgttagaattaatgcagacggaacagttacggttagtgacgatggtagaggaatacctgtagatattcataaaagtgaaaaaaaatctgcagctgaagttattatgacacagcttcatgcaggaggaaaatttgatcatgattcatataaagtatcaggtggactacatggcgttggtgtttcagttgtaaatgcactttctaaaaaattgcatctagagattaatagagatagtaaaaaatattttatagagtttgaaaatggcgaggcaaaagcaccgttaaaagcaatcggaaaatcaaagcaatctggtactaaaattacttttttaccatctacagaaattttttctacagttaaatttagtgccaatattttaattaaaagaatgagagagttggcattcttaaacaaagggatcaaaattatttttattgatgctagcttaaaaaaagaaaaaatatttgaatttaagtttgacggaggtgtaatagagtttgtcgactttctagatgaaaaaagagaaaagttgcaaaataaaaatggaaatgatttattcagaaaaccaatttatatagaaggaaaaaaaaataatatcgaaatagagtgttccttgaaatggaatgctggttatggtgaagaaatatttccatatacaaataatatttatcaaaaagatggcggaacacatttattaggatttagaagcgcattaactcgagttgtgaacaaatatgctaacgaacacaatttgttaaagaagaacaaattagctatttctggagatgatataaaagaaggattaacatgtgttttatcaactaaaattcctgatccaaaattctcatctcaaactaaagataaattagtctcatctgaagtgagaatgattgtagagacagtagtaaatgaaaaattatcaacatggtttgatcaaaatccaactgttacaaaaataattctagctaaaattattcaagcagctatggcaagagatgtagccagaaaagcaagagaaaacgttagaagaaaaggagccctagaattgagcggtctacctggaaaattagcagattgccagataggaaaacaagaagggacagaattgtttattgttgagggagattcagctggaggttcagcaaaacaaggaagaaataggtcaaatcaagctgtcttacctcttagaggaaagattttgaatacttatgttgaggatttgacagttaaaaaaaatggtaatggaaatggatcagataaaaggactaaagctttgtcaaaaatgatatcttcaaatgagatagtgacattaattaatgctttgggcctagatcctaaagcagaagaaatagatctaaaagatttaagatacggtaaaataataattatgacagatgcagatgttgatggttcacatattagggctttattattaactttttttaataacgaaccatttaataaattaattgaaaatgggcatatatatttagctcaacctccattatttaaaataaataaaggaactaaaggcatttatataaaagatgaaaaagaattagaagattatattttaaataacaataaagaaattaaaaaaataaaaaaaggaacaaaagaatttacaaaagctttagacttagaaaagtctaaaatgaatatccaaagatttaaaggtttaggagaaatgaatcctgaagaattgtggagcactacacttgatccagaaaccagaaatttacttcaagtacaatattcaaaagatcttaaaaaagaccaaagtttaatacatacacttatgggtaatgatgttgcattaagaaaggattttattgtttctaatgcaattaatgttcagaatcttgatatataa

SEQ ID NO: 295499 - DNA, 1141 bp, Unknown
  Bacterial polypeptide expressing nucleotide sequence isolated from the Sargasso Sea
tatggattggagttgtgcttgggtagatagtgattttgataatattcaagaaagctatgttaatcttataccaacatcacagggtggtacgcatgtgaatgcatttagaaatgcggtaattgattcaattagaaattattgcacagaaaagaaattaataactaaacagattaaaatactaccagatgatgtttggagacatataacttatattgtctccctaaaaatgatgaacccccaatttgctggacaaacaaaaaataaattacaatctaataatatttcatcagaacttacttctaaaattaaagataattttgatatatggcttaataagaatcctcagaaagcagagcaaatagccaagcatgttatagctaatgcagaattaagattagattctgaatctcataaacccaaattatcaactactaaaaatcttctattaccaagcaggttagcagattgtacattaaacgattcacgtgtaacagaattatttattgttgaaggtgactctgccggaggatccgcaaaacaagcaagagataaatcatttcaagccatcctccctttgagaggaaaaatattgaatacatgggaaattaatcatacaaagatacttgactctaaagaggttaaagatattagtctatcgataggtgttcagcctggttctgatgatttatctaatttgcgttatggaaaaatatgtattcttgcggatgcagactctgatgggttacatattgcaaccctacttactgctttatttcttaaacattttaaacctctaattaagaacaatcatatttatatttcaaagcctccgctttttcgaatagattataagcgtgatacacactatgtacttgatgaaaaagaaaaaaagaaattatttacgaaacttaaagtgacagaagacgatgtttctgttactcgatttaaaggccttggtgaaatgaatccatctcagctacgagagacaacattgcaaataaatacacgaaaactagctttgttaaaactgagttcagataccgcagatatgaaacttatgaacatgttattaggtaaaaagaactcaggtgagagaaaattatggttagaaaaaaaagggaatttagctcaattggattga

SEQ ID NO: 295500 - DNA, 575 bp, Unknown
  Bacterial polypeptide expressing nucleotide sequence isolated from the Sargasso Sea
tatggaaaaaaacgaaatctctaaggttaataataatataaaaccaatttcaatgtatgatgaaatgagttcatcatatttatcttacgctatgagcgtaattgtaagtagagcattaccagatataagagatggactaaaaccagtgcacagacgaattatatacgcaatgcacaaaggtggttttgattggtcaaaacaatttagaaaatctgcaagaatagtcggagatgttattggtaaatatcatcctcatggagatcaagcagtttatgatgctttagtaagaatggttcaagaattttcaatgagcgtacctttggtagatggacaaggaaactttggctcgatagatggggatcctcctgcagcaatgagatacacagaaactaaacttgctaaagtttctcaatttttaattgatgacattgaaaagaatacagtagcttttaaaagtaattatgatgaaacagaacaagaacctgtagtattgccagctcaatatcccaaccttctagttaacggagctggaggaattgctgttggaatggctacaagtattcctccccataatt

SEQ ID NO: 295501 - DNA, 1054 bp, Unknown
  Bacterial polypeptide expressing nucleotide sequence isolated from the Sargasso Sea
gatgagttcatcttatctttcgtatgctatgagtgttattataagtcgtgctttgcccgacataagagatggtcttaaacctgttcatagaagaataatttatgctatgtataaaggaggctttgattggaccaaacaatttagaaaatcagcaagaatagttggagatgtaattggtaaatatcatcctcatggagatcaagctgtttatgatgcattggtaagaatggttcaagaattttcaatgaacactcctcttgttgacggacaaggaaattttggatctatcgatggcgatcctccagcagcaatgagatatacagagactcggttatcgaaaatagctcaatatttaattgatgatatagaaaaatctactattaattttaaaagcaattatgacgagacagaaaaagaaccagaggtgttgcctgcacaatatccaaatcttttagtaaatggagctggtggtattgctgtaggtatggctacaagtatacctcctcataatttaggtgaaattattaatggaactttagctttaattgaagataaagatattaaaatttcccagttaatgaaacatatacctggacctgattttcctactggaggagtaattattgggaaggatattattaaacaaggatataaatctggcagagggtcttttaaaataagaggtgaaattaatattgaacagataaaaggaggaaaggaaagattggtaattacatcaattccttatcaagttaacaagtctactttaaacgaaaaaattgcagagctggtaagagataaaaaaattgagggtataagagatataagagatgaatctaacagagaaggaattagagtagccatagatttaagatcaaatgttgagcctgaaacaattaaacgacaactttacaaatacacttctattgaaagttcatttggtttcaatactttagctatagtagataaaaagccaaaaacttgtaacttaaaagattttttagaaaattttcttaaatttagagaagatgttgtaataaaaaaaacaaaacat

SEQ ID NO: 295502 - DNA, 439 bp, Unknown
  Bacterial polypeptide expressing nucleotide sequence isolated from the Sargasso Sea
atgagttcatcttatctatcatatgcaatgagtgtcattgtcagcagggcgcttccagatgttagagatggtctaaaacctgttcatagaagaatattatatgcgatgtataaaggtggttatgattggtctaaacaatttagaaaatctgcaagaatagttggggatgtaattggtaaatatcacccacatggtgatcaatctgtttatgacgcacttgttcgtatggttcaagatttttcaatgagtctaccccttgtagatggccaaggaaattttggatctatagatggtgatccagcagcggcgatgagatacacagagactagattgtcaaaagtttcacaatttttaatagatgatattgagaaaaagacgattgattttaaaagtaattatgatgaaacagaaaaagaaccaactgtgttacctgctcagt

SEQ ID NO: 295503 - DNA, 932 bp, Unknown
  Bacterial polypeptide expressing nucleotide sequence isolated from the Sargasso Sea
tatggcaaaaacacaacaaaattcaaattataaagcagactctataaaagttttaaaaggtctagatgcagttagaaaaagacctggcatgtatatcggtgatactgatgatggaaccggtctacatcacatggtctatgaagttgttgacaattctattgatgaagcattagcaggctactgtaaaaaaattactgtagagattaataaagatgggactatatctgtttcagatgatggtcgtggcatacctgttgatttccataaaactgaaaaaaaatcagctgcagaagtaataatgacacaacttcatgcaggtggaaaatttgatcataattcttataaagtttcaggtgggcttcatggtgtcggagtttcagtagttaatgcattatctgaaaaacttgagttagaaatagaaagagatggaaaaaaatatttcgtagagtttaaaaatggagatccaaaatctccactaaaacaaatcggaaaatcaaacaatacaggcacaaaaattacctttttgccatcaaaggaaatattctcatcaattaaatttagcagcacaataattcaaaaaagaatgcgtgaattagcttttctaaataaaggagtaaatctagttgttttagataaaacattgaaaaaggagaaaaagatagagtttaaatttgacggcggaataatagaatttgtaaattttctaaacgaaaagaaggagaaacttaaaaataaaaacgggaacgatttatttaaaaagccaatttatctagatggtgataaaaatggtattagtatagaatgttcactagagtggaactctgggtattcagaggatatgcacacgtacacaaacaatatatatcaaaaggatggaggaacacatcttttaggttttagaagctcactcacaagaattttaaataaatatg

SEQ ID NO: 295504 - DNA, 2059 bp, Unknown
  Bacterial polypeptide expressing nucleotide sequence isolated from the Sargasso Sea
tatgtcaaaaaataatacatccgaatacaaagcagactctatcaaagttttgaaaggtcttgaagcagtacgtaaaagaccaggtatgtacattggagataccgatgatggaacaggattgcaccacatggtatatgaagtagtagataattctatagatgaagcgttagctggatattgtaaaaatattgttgtagatattaatagcgatggttcaatcactgttaaggatgatggaagaggaatacctgtagatattcacaaagcagaaaaaaaatcggcagccgaggtaataatgactcaattgcatgcaggtggaaaatttgatcatgattcttacaaagtatctggaggacttcatggagttggagtttcagttgttaatgcattgtcagaaaaacttaatttatttattgaaagagacggtaaaaaatactttgtcgaatttaaaaatggagaagcaaagacacctctaaaagtaattggaaaatctaaacatacaggaacacatataaattttttaccttcaaaagatatttttacttcaacaaaatttagtttttctataatccagaaaagaatgcgtgagttagcatttttaaataaaggaattcaaatttctttgaacgacttgacacaaaaaaaattaaaaaatataaatttcaaatttgatggtggaataattgaatttgtagaatttttagatgaacaaagagaaaatctaaaaaataaaaatgataacaatctatttagaaaacctatttatattgaaggtactaaaaataatgtagaagttcaatgttctttaaaatggaatgcaggttacaatgaggatgtatatccttatactaataatatttatcaaaaagatggagggacccatttattgggttttagaatagctcttacaagagtaatcaataaatatgcttctgaacaaaatttattaaaaaaaaataaagtcacactttcaggagatgatgtaaaggagggattgacatgtgtattatcagttaaaattccagatccaaaattttcatctcaaactaaagataaattagtatcctcagaggtaagaaatattgtagaaactattattagtgaaaagttatcaatatggtttgatcaaaatccttcaatttcaaagataattttaactaaaattatacaagctgcagtagctagagatgtagctagaaaagctagagaaaatgtaagaaggaaaggagctttagaacttacaggcttaccgggtaaattagcagattgtcagaattctaaacaagaaggaacagaattatttatagtagagggagactcagctggcggttcagctaaacaaggaagaaacagagaaaatcaagctgttttgccactaagagggaaaattttaaatacttttacagaaatgaatggctcaaaaaagaatggtaattcaaatgaacttagaacaaaaactttagcaaaaatgatttcttctaacgaaattgtaaccctcattaacgctctaggattagatccaaaaaatgaggaaattgatttaaaagatttgagatatggaaagattattataatgaccgatgctgatgtagatggttcccatataagggcgcttttacttacttttttaaataataaaccatttaataaattaattgaaaatggacatgtttatttagcgcaaccaccattatataaaattaataaaggttccaaaggaatatatataaaagatgaaaaagatcttgtgagttacattataaaaaattcaaaagaacttaaaaagttaaaaaaaggatctaaagattttgaaaaatatattcaaaaggaaaaatctaaattaaatatccaaagattcaaaggactcggggaaatgaacccagacgaactttggaatacaactttaaatccagaaactagaaatttacttcaagtccaatattcaaaaaatttacaaaaagatcaaaatcttatcaaaactttgatgggaagtgacgttgcttcaagaaaagattttattgtagataatgctattaatgttttaaatttagatatctaa

SEQ ID NO: 295505 - DNA, 698 bp, Unknown
  Bacterial polypeptide expressing nucleotide sequence isolated from the Sargasso Sea
tatgccaaccaagaaaaactcttctgcatcaaagccacaaaaagccaccaaaaaaccacaaaaaaaagctccaaaaaaaacagaagctgagtcttatgattcctccagcattacggtcctgaagggattagaggctgttaaaaaaaggccaggaatgtatattggagacacggatgatggtaccggtttacatcatatggtttatgagattgttgacaattcaatcgacgaggcactagctggctattgtgatgaaataacagtaaaaatattatctgatgattgcgtctctgtctcggataatggaaggggcattccaactgatatgcacgaggaaggtatgtctgcagcagaggtaattatgacaaagctgcatgccggtggaaagtttgatgataattcctacaaggtatcaggaggcttacatggggttggtgtctcggttgttaatgctttatcagaagacttaaaactgactattcatagaggaggcaaaatacatgaacaagaatatacagatggtactccaaaaggaaaacttaaggtaacaggaacaactgataaaacaggaaccgaagttacgttcgtgccatcgcctactactttttcagatattatttttcagtatgatgttttagaaacaaaactcagagaactatcctatctcaatgcaggccttaaaattatcttaattgatg

SEQ ID NO: 295506 - DNA, 1978 bp, Unknown
  Bacterial polypeptide expressing nucleotide sequence isolated from the Sargasso Sea
ggagatacagatgatggcactggattacatcatatggtttatgaagtggttgataactcaattgatgaagctttagcaggctattgcaaaaatattaatgtaaaaattaattctgatggaacaattacagttaaagatgatggtagaggtgttccagtagatattcataaaggagaaaaaaaatcagctgcagaagtaataatgacacaacttcatgctggaggaaaatttgatcatgactcatataaagtttcaggtggtttacatggtgtaggtgtttctgttgtaaacgcattatcagaaaaattgcatttagaaatatatagagatggaaaaaaacattacattgaatttcaaaatggtgaagctaaatcaccattaaagatagttggtaaagcaaaaattactggcacccaaataacttttttgccttctaaagaaattttttcatcaataaaatttagtgcaaatattttaattagaagaatgagggagttagcatttttaaataaaggaataaaaataatttttactgacggtagtcaaaaaaaagaaaaaatctcagaatttaaatttgatggtggtgttctagaatttgtagaatttttagatgaaaagagagataagttacaaaataaaaatggaaatgatttatttaaaaaaccaatttatattgaaggaaaaaaaaataatattgaacttgaatgttctttaaaatggaacgcaggatattcagaagatatttttccatatacaaataacatctatcaaaaagatggtggaacacacttattgggatttagaagtgcattaactagagttgtcaacaaatatgctaacgaaaataatttacttaagaaaaataaattagcaatttcaggagatgatattaaggagggtcttacttgtgtgctttcgactaaaattcctgatccaaagttttcatcccaaacaaaagataaactagtttcatcagaagtaaggatgatagtagaaacattgataaatgaaaaattatctatttggtttgatcaaaatccatcgattgcaaaaattattttagcaaaagttattcaagcagcaatggctagggatgttgccagaaaagcgagagaaaatgttagaagaaaaggagcgcttgagttaagtggtcttccaggaaaactagctgattgtcaaattggaaagcaggagggaacagaattatttattgttgagggtgactcggcaggaggttcagctaaacaaggaagaaatagagcaaatcaagcggttttaccactaagaggcaagatacttaatacttatgtagaagatttaaatgttaagaaaaatgctaatggtaatggaaatggctctgatcaaaggaccaaggcgttatctaagatgatttcttcaaatgagatagtaacattaattaatgcattaggcttggatccaaaggcacaagagattgatttaaaagacttgagatatggtaaaattattatcatgactgatgccgatgttgacggatcgcacataagagcccttcttttaactttttttaataataagccatttaacaaattaatcgaaaatggtcatgtttatttagctcaaccaccactatttaaaatcaacaggggttcaaaaggaatttatattaaagatgagaaggaattagagaattatatagtaaacaataacaaagaattaaaaaaagtaaaaaaaggttcaaaagagtataataaggcattggaaacagaaagatcaaaaatgaatattcaaagatttaaaggactaggtgaaatgaatcctgaagaattgtggagcacaacgctagatccagaaactagaaatttgctacaggtacaatattctaaagatcaaaaaaaagaccaaagtcttatacacactttgatgggaaatgatgttgcattaagaaaagattttattgtctctaatgctataaatgttcagaatcttgatatttaaa

SEQ ID NO: 295507 - DNA, 2023 bp, Unknown
  Bacterial polypeptide expressing nucleotide sequence isolated from the Sargasso Sea
aatggataagaaaaacttcacttccatctcgcttcaagaagaaatgcaacgttcttatttggagtatgcaatgagcgtcatagttggacgtgcgttgcctgatgcaagagatggtcttaagcctgtacaaagaagaatcatattcgcgatgtatgaattaggtttaactcctgataaaccattcaggaagtgtgcaagagttgttggagatgtacttggaaaataccatcctcatggagatcaagcagtttacgatgcattggtaaagctggtacaaaatttctcaactaaatatcctactcttgacggccatgggaattttggatctgtggataatgatccgccggcagcaatgaggtataccgagaccagattagctccaatagctcataaaggatttcttgaagaaattgcatcagaaacagtaaacttttcaaataactttgacggttctcaaaaagaaccagatgttcttccagctcaacttccatttttattgttgaacggctcatcaggtattgctgttggtatggcaacaaatattccgcctcataatctaggcgaaattgtagatggtttagttgccttagttaaaaataaagatattagtgataaaaaactttctaacattatcaaaggacctgattttcctacaggcggagaattaatttatagtcatgcaatagaagaactttatcaaactggaaaaggatctataacaataagaggagttgtaaataccgaagaggtaaatttaggcaaagggaaacataaaaagaatgcaataatcattactgaacttccttaccaaattaataaagcaggttggattgaaaaactcgcagaacttgttaattcaggaaagattattgggatttctgatattagggatgagagcgacagagatggaatgagaattgtaatagaactaaaaaaagattctaattctgaacttgttatttctaatttatataaaaaaacaactctccaaacaaactttggcgcaatattcttagctttaattaaaggcaaacctgtacaactaaatctgaaaaaatatctcaactattttcttgaatttagagaagaaacaattagaaaaagaactttttattttctaaaaaacactcttgataagctagaaatatcagaaggtttatctaaagctacaaaaaacattaaaaaagttatcgcaattatagaagaatcagaaaattctgtgcaagctagatcaaaattagtagaaaattttttcttaagtgaaaaacaggcaaattcagttttggatatgccactaaaaaaattaacaaatctagaaaaaaatcaaattgataacgatataaaaaatttagaagaaaaaaagaattattttcaaaaattgttgaacgaaagagaattattacttgaattacttatagaagaattattaatattaaagaaaaaatacaatgttatacgtaaaacaaaaataattaaaaatataaatcaaaatcaagaattagaaacgcttaataatcagatattagaagactttataaataaaaaaacaaaattatacatagacaatagactttatttaaaaaagatgattttaggtaattacaagaaatcatttgaggttgtaaataaaattatagataataaaaatattcaaaaatttatatgtaatattgaaaaaaatataaaattaattggaatcacaaatacaggaaaagtatttaacattgattgggaatcaagtattaataaagactataaattagataataaaattcttggaaatattcatcctagtgaaataataaattttcattcaattaaaaaagaagctaaaaattatttgtgcatattaaattcagatggaagatttaaaaaagttttatttgatgaagatatgattaaaagtaatagatctttcactattacaaaattaaaaaataatttaaaaacaattgattcttttatttctaatgaaagcaaggatttaataatattaacctcgataggaagaatttttaaattt

SEQ ID NO: 295508 - DNA, 1789 bp, Unknown
  Bacterial polypeptide expressing nucleotide sequence isolated from the Sargasso Sea
aatgaaaactaataatacatacaaggcagattccatcaaagttctaaaaggacttgaggcagttagaaaaagaccaggaatgtatattggagatacagatgatggcaccggtctacatcacatggtttacgaagtggttgacaattcaatagatgaagcccttgcaggttattgtaaaaaaattgaaatttttttaaataataatggatcaattacagtaattgatgacggcagaggaattcctgttgatattcataaaggtgaaaataaatcagcagctgaagtaattatgactcaattacacgcaggtggaaaatttgatcacgactcttataaggtttcaggtggattacatggagttggtgtatcagttgttaatgctctatctgaaaaattagaacttgaaatatacagagatggaaaaaaatattatgttgaatttaataatggaaaatctaagtcacctttaaaaattactggaaaatctaaagagagtggaaccaaaattacttttgttccttcaaaggaaatattttcatcagtaaaatttagttcccaaattattgaaaaaagaatgagggaattggcttttttaaacaaaggtttaaaaatttctgtagaggataaaactcaaaaaaaagaaaaaaaaagtgaatttaaatatgacggtggaattgtagaatttgttgaacatctagataaaaaaagagaaaaacttaacaataaaaatggtaatgatttgtttaaaaaaccaatatacattcaaggaaaaaaagaaaagattgagttagaatgctcattaaaatggaatgcaagttatagcgaagatgttttaccttttactaataatatataccaaaaggatggtggaactcatttactgggttttagaagtgcccttacaagagttgttaacaaatatgcaaatgagaataatctattaaagaaaaataaattatctatatcgggcgatgatataaaggaaggattgacatgtataatatcaattaaaattcctgatcctaaattttcttctcaaaccaaagataaacttgtttcatcagaagtaagaaatattgttgaaagcattcttagtgaaaaaatttctatatggtttgatcaaaatccttcaatagcaaaaacagtattaagtaaaattattcaagcagccttagcaagagatgtcgcaagaaaagctagagaaaatgtaagaagaaaaggagcattagagttaacaggacttccaggtaaattggcagattgtcaaatatcaaaacaggaaggtaccgaattatttatagttgaaggagactcagcaggtggatctgctaaacaagctagaaatagagaaaatcaagctgttttaccgcttaggggaaaaattttaaatacttatgtagaagaggatactaaaaaaaataattctaatggaaacaatcatagaactaagactctttccaagatgatatcttcaaacgaaatagttactttgataaatgctatgggattagatccaaagtctgacaatatagaaacaaaagatgtaagatatggaaaaataatcattatgaccgatgctgatgtggatggctctcatatacgtgcattattattaacattttttaataatgttccatttaataaacttattaaagaggggtatatttatttagctcaacctccattatttaaaataaataaaggaacaaaagggatttatataaaagatgaaaaagaattagaaaaatatatacaaaaaaattcaaaaatattatcaaatttaaaaaag

SEQ ID NO: 295509 - DNA, 874 bp, Unknown
  Bacterial polypeptide expressing nucleotide sequence isolated from the Sargasso Sea
aatgacaaataaaaatacatatcaggcagactctatcaaagtgctaaaaggtttggaggctgttagaaaaagacctggtatgtatattggagatacggatgatggaacaggtttacatcatatggtttatgaagttgttgacaattcaattgatgaggcgttagcaggctattgtaaaaatattaatgtaaaaattaattctgatggaacaataacagttaatgatgatggtagaggcattccagtagatatccataagggagaaaaaaaatcggctgcagaagtaataatgacacaacttcatgctggtggtaagtttgatcatgattcttataaagtttctggtggtttacatggtgtgggtgtttcagttgttaacgcactttcagaaaaattacagctagaaatttttagagatggaaaaaaatattatatcgaatttgtaaatggtgaagcgacggcaccattaaaagtaataggaaaagcaaaatatactggtacacaaattacctttttaccctctaaagaaattttttcctctacaaagtttagtgcaaacattcttattaaaagaatgagagaattagcatttttaaataaaggaattaaaataatatttattgatgctagtcaaaagaaagaaaaaacttcagaatttaagtttgatggaggtgttcttgaatttgtagattttttagacgaaaaaagagaaattctacaaaataaaaacggaaataatttatttagaaaaccgatatatattgaaggtacaagaaataatattgaattagagtgctctttaaagtggaatgctggatatacggaagatatttatccatatacaaataatatttatcaaaaagatggtggaact

SEQ ID NO: 295510 - DNA, 546 bp, Unknown
  Bacterial polypeptide expressing nucleotide sequence isolated from the Sargasso Sea
gtcaaggaaactttggtaatattgacggcgacaacgctgcagccatgcgttacaccgaagcgagaatgacgaaagttgccgaacgattacttgaaggaatagatgaagaaacagttgattttcgggaaacatacgatggtgaaggcaaggaacccctggttctacctgctgcatttccaaatttacttgctaacggcgcccatggaattgctgtcggaatggccacatctattccaccccataacatctgcgaaatatgcgaggcgttgttgcatttgataaagcaccccaatgcatcttttgaaaaactgcttgaatatattcccggtccagactttcccactggtgggtggcttgtagaaaataaagaaaatattatcgaggcgtataaaaccggcagagggagttttcgtataagagcagattgggaaaaggaagaactaaaaaatggcacatatcagataattattaaagaaattcccttcaagtccaaaaatcgaaacttgtggagaaacttgcagaactacttgaaagtaaaaaattgaa

SEQ ID NO: 295511 - DNA, 835 bp, Unknown
  Bacterial polypeptide expressing nucleotide sequence isolated from the Sargasso Sea
atgtcaaaaaattctgcattaaataccaaaccttcttatggtgcggactctataaaagttctaaaaggacttgacgctgtaagaaagagaccagggatgtacatcggagacactgatgatgggacaggtttacatcatatggtttttgaagttatagataatgctattgatgaggctttagctgggcattgtaaaaatataactgtgataatgaataaagataacaccatcactgtagaggatgatggaagaggtataccagtggatactcataaaacagaaaagatttcagctgcagaagttataatgacccaacttcatgctggaggaaaatttgatcatgactcttacaaggtatcaggcggtcttcacggtgtaggagtttctgttgtaaatgctttatctgaaaaactagaattaaatatttatagagacggaaaagagtttgaggtagtttttaaaaatggaaatacaacaaagtctttaagacaaattggtaaaactaaaaaaagaggaacaaaaataaattttttaccttcaaaagaagttttttcttcaacaaaatttagttcatctacaatagagaaacgaattagagaattggcgtttttaaataagggaatatgtgtcaaacttatcgatcaaacattaaaaaaagaaaaagagtttatacataaatatgatggggggattgtagagtttgtaaagcatataaacaataaaaagccaattttggttaataaaaacgaaaaagaagtttttaaaaaacctgtctacgtgactgcaaaaaaaaataacgtattggttgaatgtgctttagaatggaatgcaggat

SEQ ID NO: 295512 - DNA, 745 bp, Unknown
  Bacterial polypeptide expressing nucleotide sequence isolated from the Sargasso Sea
atggatttaggtagagataatatattagataaacaattagttaaagagcttgaagaaagctatttaaactattcaatgtccgtcattatgtcgagagcactgcccgatgcaagagatggattaaagccagtacatagaagaattttatttagtatgagtgaaatgtctgcaatgtggaacaggccttataaaaaatctgccagagtggtgggagaggttttaggtaaatatcacccacacggagacagctctatatatgatgcccttgtaagaatggcacaagaattttccatgagacatgagcttgtgcaaggtcaaggaaactttggatccgttgatggagacagggctgctgcaatgagatatacagaatctagaatgtctagaattggaagcgagcttttaagagatattgagaaagaaacaataccgtggacaacaaactttgatgaaacactaaaagagccagcggttttaccagctgtttatccaaacttattagtaaatgggtcagagggtatagccgttggtatggcaacaaaaattccgccacacaacctttctgagttagtgggtggacttgttgagctaatggataatcccgaatgtgaaacaaaagatttaatgaaacatattaaaggtccagattttcctactgcaggaaaagcgcttggaattaaggaattcaagatgcatatgaaacaggaagaggaaaggttattatgcagggaagggcacacgtaga

SEQ ID NO: 295513 - DNA, 1147 bp, Unknown
  Bacterial polypeptide expressing nucleotide sequence isolated from the Sargasso Sea
tttggtcgaaggagaatcagcgggaggttctgcaaagcaaggacgtgatagacattttcaagctattcttcctttgaaaggaaaaattctcaatgtagaaaaagcaagactagataaggttctatcgtcagaagaaattattattttgatttctgccttaggttgcgggataaaaggagaagactggcaagaagagaaattgagataccatagaataataatcatgactgatgctgatgttgatggctctcacatcaggactttgatattgactttattttatcgccaaatgcctgaacttatagaaaaaggctatatctatatagcccagccacctctatataaacttaaaaaaggcaaacaagagacttatgtcaaggatgattcggaattaagagaactcctagttgctgaaatcttggatgatgcaaagcttgtcttaaataagaaaggagaatcaattacaggccaggctcttggtaaatttatttcgcaacacgaaaagatacaaagcactctgagggggttaactcatatatatcctgtagagttactagaaggcgtgaagcatacagcccaacttaagggattagatgataaaaaggcattaaaaaaatggacatcaagtattgaagagtacttaaacgaaaaagcggaacaaggatcagcttggaaagttgaagctatctcccgagaaggctcagacgaaatggaaccaagagtctctttaacaaaacatggtacggagtcggaatggctactgaataaaagtttctttaaatccaaggcatataaagatatttccagtcatggggcagatatgacagatatgttcagtaaagaggctcattttgaaattaatggtaagcagatatacattgataactttgaacatgctctagaagaggttttacaaatttctgaaagatctttcacaaaatcaagatataaagggctgggtgaaatgaatgccgaacaactatgggataccaccatgaatcctgatatgagaattcttggtcaagtcacaatagatgatgctgcaactgctagttcactttttgaggcattaatgggcgatgaagttcaaccacgcaaagagttcattgatgaaaacgcaaaactcgttgttaatcttgatgtttag

SEQ ID NO: 295514 - DNA, 1948 bp, Unknown
  Bacterial polypeptide expressing nucleotide sequence isolated from the Sargasso Sea
atggctttaaaaaagacaaaaaatcaatattctgctgacagtatccaagcccttgagggaatggaacatgtgaggaaaagaccttcaatgtacataggagatgttgggtcaagaggactccatcatttagtttacgaagttgtagataattcaatcgatgaagctatggctggccattgttctgaaatatctattcaaattaataaggataaaactatttctattgaagataatggtaggggtattcctgttggtatccataagaaagaaggagtctcagcattagaggtagtgatgacaaagattggagcaggaggaaagtttgataaagactcctataaagtttctgggggtttacatggagttggagtttcggttgttaatgctctatcagagcaattaacagcaaatgtttacagagatggaaaggaatacgaacagacctatagaaaagggaaaccagattccaaagttaaagaagtaggtaaatctgataaaaacggtactcttgtaacatttaaacctgataaagatatttttaaagaagttattgactttgaatatgagatattatccaatagaatgagggaactctcatttctaaataaaggcattaccatctcaataactgatgatagggtagagactaaaaaaggtgaaaaaaaatctgaaacttttcattctaaagaaggtctaagtgaattcattaaatatttagacgaatctagagagcctataatttcgagtattattaaaatggagggtgagaaaaataatattcctgttgaagttgctatgatatacaactcatctttttctgagaatcttcattcttatgttaataatattaatacacatgaaggtggaactcacctatcaggatttagaagaggtttaacgcatactttaaagaaatatgcagattcatcaggacttacagataaacttaaatttgatatatctggtgatgattttagagaaggtttgacagctgttatttcagttaaggttgctgaacctcaatttgaaggacaaacaaaaaccaagttgggaaatagagaggttagctctgctgtatctcaagctgtttcccaaatgcttgaaaattatctagaagagaatccagatgattctaaaataattgttcaaaaagttattttagctgctcaggctaggcacgctgctcgtcaagctagagaaatgattcaaaggaaaacagtaatgacaggaggtggtcttccaggtaagctatccgattgttcggagactgatcccatgaaatgtgaagtcttccttgttgagggagactctgcaggtggaactgcaaaacaaggtagagatagagtatttcaagcgattcttcctcttagagggaaaattcttaatgtagagaaagcacaacaacatagagtttttgaaaatgaagaaataagaaatatatatacagctctaggtgtttctgtcggaacagaagaagatagtaaggccttaaatctagagaagcttagatataataaaattataataatgtgtgatgctgatgttgacggaagtcatatctcaactctaattctaactttcttctttaggtatatgagagaactagttgaacaggggaatatatatatcgctactccaccactttatttagttaaaaagggtaataagaaattatatgcatgggacgatgatgaaagagataaaattgctaaagacttaggtacaggagtatcaatccaaagatataaaggtcttggtgaaatgaatgctgatcaactttgggatacaacaatgaacccagagacaagaacgttaagacaaatatctttaaattttgaaaattcacaagaagcggaaagatggttttctactcttatgggagatgatgtcccaccaagaagaaaatttattgaagataatgctgtctatgctaatattgatgtttaat

SEQ ID NO: 295515 - DNA, 463 bp, Unknown
  Bacterial polypeptide expressing nucleotide sequence isolated from the Sargasso Sea
tatggaaaaaaacgaaattccaaaaataaataataatattaaaccaatctcaatgtatgatgagatgagttcatcatacttatcttacgctatgagtgttatagtaagtagggcactacctgatatcagagatggattaaaacctgttcatagaagaattatttatgccatgcataaaggtggttttgattggtcaaaacaatttagaaaatcagcaagaattgttggagatgtaattggtaaatatcatccacacggagatcaagcagtttatgatgctctagttagaatggttcaagaattttcaatgagtttacctttagttgacggccaaggtaattttggatctatcgatggagatccacctgcagcaatgaggtatactgaaactaaacttgctaaagtttcacaatttttaattgatgacatagaaaaaaataccgtttcattcaagagtaattat

SEQ ID NO: 295516 - DNA, 1546 bp, Unknown
  Bacterial polypeptide expressing nucleotide sequence isolated from the Sargasso Sea
aattttttaccttcaaaagaaattttttcatcaactaaatttagcttttccatattgcaaaaaagaatgagagaattagcttttttaaataaaggaattaaaatatcgttaaatgatttaactcaaaaaaaaataaaaagtgttaatttcaaatttgatggtggaataattgaatttgttgaatatttagatgaaaaaagagaaaaattaaaaaataaaaatgataatgatttgtttaaaaaaccaatttatatagaaggaattaaaaacaatatagatatacaatgttctctaaaatggaatgctggatataacgaagatgtatatccatatactaataatatttatcaaaaagatggaggcacacatatattaggttttagaactgctcttacgagagttataaataaatatgcttctgaacaaaatttattaaaaaaaaataaagtttcactttctggtgacgatgtaaaagaaggtttgacgtgcgtattatcagttaaaatacctgatccaaaattttcatctcagaccaaggataaattagtttcctcagaagttagaaatattgttgaaactattataagtgaaaagttatctatatggtttgatcaaaacccgtctatatcaaaaataattttaacaaaaattattcaagcggctgtagcaagagatgttgctagaaaagccagagaaaatgtaagaaggaaaggtgcattagaacttacgggtttgccaggcaaattggcagattgtcaaaattctaagcaagagggtactgaattatttatagtcgagggagattcagctggaggatcagcaaaacaaggaagaaatagagaaaatcaagccgttttaccccttagaggaaaaatattgaatacttttacagaaattaatgggtctaagaaaaatggtaattcaaatgatcttagaactaaaactctttcaaaaatgatttcttctaatgaaattgtaactttaattaatgcgctaggtctagacccaaagaatgaagaaatagatttaaaagatttaagatatggaaaaattataataatgactgatgctgatgtagatggttcacatattagagccctgttattaactttttttaacaataaaccatttaacaaattaattgagcaaggacatgtttatttagcacaaccacctttatttaaaattaataaaggatctaaaggaatttatataaaaaatgaaaaggaacttgaaaattatattataaaaaattctaaagatattaaaaaaatcaaaaagggatccaaagattatgagaaatttatacaagctgaaaaatctaaattaaatattcaaagatttaaaggacttggagaaatgaatcctgatgagctttggaacacaactttaaatccagaaactagaaatttacttcaagttcaatattcaaaaaatttacaaaaagatcaaaatcttattaaaacattaatgggaagtgatgtttcttctagaaaagattttattgtagataatgcaattaatgttttaaatttagatatttaag

SEQ ID NO: 295517 - DNA, 1461 bp, Unknown
  Bacterial polypeptide expressing nucleotide sequence isolated from the Sargasso Sea
atgtggtggaatgatagttaccacgaaaatgtactcccttttacaaataatattcctcaaagagatgggggagcccatactgcggggttccgtggggcactgactagaacaatcaatagttatgcacaagcaagcggtattgcaaaaaaagaaaagataaactttactggtgacgacgcgcgagaaggtttaacatgcgtgttgtctgtaaaagttccagatccaaagttttcaagccaaactaaggataagttagtaagttctgaggtaagaccagcagtagaaagcttgatgaatgaaaaattaggtgactggtttgaagaaaaccccaacgaagcaaaacttatagttagtaaaattattgaagcagctcttgcccgcgaagctgcaagaaaagcacgagagctaacccgtaggaaaacagctttagatgtaaattatcttgcaggaaagctaaaagactgcgcggaaaaggatccatcaaaaactgaagtttttctagttgaaggagattctgctggaggttcggcccagaccggccgcgatcgtagaacgcaggccattttacccctcagaggaaaaattttaaatgtagagagagctcgatttgaccgaatgttaaacagccaggagattggaaacttggttatggcacttggtaccgggattggaagagatgagtttgatattaataaattacgatatcataaaattgtgatcatgacggatgcagatgtagatggtgctcatattagaacacttttattgacatttttttacaggcaaatgccagagctagttgaaggtggctacctttatattgctcaacctccgctatacaaggttagcagaggaaaatctgaggtttaccttaaagatcaatcagcacttgatgattatcttgtccaacaagggattgaaggggcagtgcttaaaattgggtcaaatgctgatattgcaggtcaagatctagcaagaatagtggatgaggcccgtcaacttgataaggttctggaagcctttccaacgcaatatccgcggcacatattagaacaggcggccatagccggcgcttttgttccaggggcagtagataaagacttacaaggtactgctgataatatcgcgacgagattaaaccttattgctttagaatatgaacagggttggtctggaaggattacacaggaccaaggtattcgcttagcaagagtattgagaggtgtggaagagctacgcactttagatggacccatgttaagatcaggagaggcaagaaaaaccggtacgtttactgaaagtttaaaggaagtctatcaaagccccgctacccttattcgaaaagatcaaagtcaaaccatctacggcccgttagaattactaaactcgattctaaaggaaggagaaaaaggacttacacttcaacgctataaaggtcttggtgaaatgaaccctgatcaa

SEQ ID NO: 295518 - DNA, 1267 bp, Unknown
  Bacterial polypeptide expressing nucleotide sequence isolated from the Sargasso Sea
atgagctcatcttatctttcttacgctatgagcgtaattgtaagtagagctttaccagacataagagatggtttgaaaccagttcatcgaagaattatttatgcaatgcataaaggtggttttgattggagtaaacaatatagaaaatctgcaagaatagttggtgatgtaattggtaaatatcatccacacggagatcaagctgtatacgatgcattagttagaatggttcaagatttttctatgagcttgcctttaattgatggtcaaggaaattttggctcagttgatggcgatccgcctgctgctatgagatacacagaaacgagattagcaaaaatttctcaaaatttaatagatgacatagacaaagatactgtagaatttaaaagcaattatgatgaaactgaaaaagaacctgaggttttgcctgctcaatatccaaatttactagtaaatggtgctggaggtattgctgttggtatggcaactagtattccgccacacaatctttcagaagtgataaacgccactttagccctaatagataataaagatattaagataaatgaattaatgaaacatataccaggacctgactttcctacaggcggaacaataattggtaaagatattattaaaactggatacaaaactggcaggggatcttttaaagtaagaggggatgtttcaatagagcaactaaaaaatggcaaagagagattagttatcaactctatcccatatcaaatcaataagtctgttttaaacgaaaaaattgttgaattaattagaaataaaaaaatagatggaattagcgatataagagatgaatcaaatagagaaggtataagagtagctatagacttaaaaagaaatatagaacccgaaacagttaaaagacaactctataaatacacctctttagagtcttcttttagttttaatacattagctatagtagatagaaagccaaagaactgtaatcttaaagattttctagagtcctttctaaaatttagggaagatgttgttgttaaaaagacaaaatttgatcttaaaaaagcagaagatagagcacacatattgattggtttatcggtttcagttgaaaatatcgataaagtaatcaagattatacgatcttcaaaaaatccagaacaagcaaaaaattctttattaaatacttcatggaaaatcaagtcgtctcaaaaattaataaaattagttgataataaaaaaaataagaatagctattctctttcct

SEQ ID NO: 295519 - DNA, 1345 bp, Unknown
  Bacterial polypeptide expressing nucleotide sequence isolated from the Sargasso Sea
gaagaaaatggagatcgagaatcaatcatcatttctgaacttccttatcaggtgaataaagcacgtttaatagagaaaattgccgaactagtcagagacaagaaattggaaggtatttctgaaattcgagacgaatctgacaaagatgggctcagggttgctatagatcttaagagaggaacagtttcagatgttcttttgaataacttatacaaacaaacggtattagagagcacattctctatcaacatggttgctttatcaaatggtcagccacaattaatgaatcttaaaagcatgctggatgctttccttggtcataggcgtgatgtagttaccaaaagaactatctatcaactcaatcggtcaatcaacagagctcatattctcgaaggtcaaacaatagcactgacaaacattgacgaaatgattgccatcattaaaaaatcgaagacaccagccgatgctcagagagctttggtgtcaaaattatggaaggttggtaaagtcaaagagatgattaagaaagcaggaaatgtttctacagtgcccaaacatctgataaatatagaaacatttggtattgagaagcgaggctatcgattatcttcagagcaagcaaaagcaattcttgatttaaaacttaatcgcttaactggcctagagcaagaaagtatttttaatgaatattctgagctacttgaagatattaaaagattcactcttatcctctctaatccagatgagttgaaatctgtaattaggaaagagcttattgaaacacaggaaacatatggcgacgaacgaaggacagaaatagttgaattctattcagacctcactgatgaagatcttattccagaagaagatctcattgttactttatcaaaagagggttatgcaaaaactcaaccgctcgacgcctatcaagcacagaacagaggtggaacgggtaagagagctgcatctctaaaagatgaggactttgtttcgaaattatttgtagcaaacacacatgacacgttgttgtgtttttctagttatggaaaagtgtattggattaaagtttatcgactcccgagaggtggaagaaatgcaaaaggccgtccaatcgtaaatctcttaccactagaaaaggatgaaagaatacaggccgttcttccagtcaaagaattcaacgatgatcaatttatctttatggcgactgaatcaggcagtgttaagaaaacaaaattatctgcatactctaggccaatgaaatcaggtataaaagcaataaagctaagagaaggtgaccgagtagttaatgcagagatcactgacggttcaaaagaaattatgcttt

SEQ ID NO: 295520 - DNA, 2419 bp, Unknown
  Bacterial polypeptide expressing nucleotide sequence isolated from the Sargasso Sea
atgtcagagaatagttacgattcttcgagtattaaggtccttaagggccttgatgcagtacgtaagagacctgggatgtatattggtgacaccgacgacggtacgggtctacatcatatggtgttcgaagtagtcgataactctatcgatgaagccttagccggccattgtactgatatcactattactatccatgtggatggttcggtctccgttcgcgacgacggccgtggtattcctgtggcgattcacccggaagaaggcgtgtctgccgccgaggtgatcatgaccgtactgcacgcgggtggtaagttcgacgataactcttataaagtgtcaggcggtctgcacggcgtgggtgtgtcggtagttaacgcgctgtctaaaaagctgcagttaaccattcgccgcgaaggtaaagtccacgagcagttttatacccacggtgttcctgacgagccaatcaaagtgatcggcgatgccactaaaactggtaccgaaatccgtttctggccaagtgaagaaaccttcagcgatgttgaatttcacttcgagattctggcaaagcgcgtgcgcgaactgtcgttcctcaactcaggcgtgggtatccgcttagttgatgaacgtgacaacaaaaatgaattctttaaatacgaaggtggtatcagcgcattcgttgattacctaaaccgtaataaaacgccagtaaacaaagacgtattccactttatgcaagagcgtgacgacggtattaccgttgaagtggcgatgcagtggaacgatggttatcaagaaagcattttctgttttactaacaacattccacagcgtgatggtggtactcacttagcgggtttccgtagtgcgttgacacgtaacctcaacaactacatggaaaacgaaggctataacaagaaaggcaaaactaacgcgactggtgatgacgcccgcgaaggtttaacggccgtgatttcagttaaagtgcctgatcctaagttcagctcgcaaaccaaagacaagttagtgtctagcgaagtgaaagccgcggttgaacaaaccatgggtgaaaagctaaacgactatctgctggaaaaccctgccgatgctaagttaattgtcggtaagattgtcgatgcggcccgtgcccgtgaagcggcgcgtaaagcccgtgaaatgacccgtcgtaaaggcgcactcgatttaggtggtttgccaggtaagctggctgattgccaagagaaggaccctggtctttcagaaatctacatagtggaaggggactctgctggcggtagcgctaagcagggacgtaaccgtaagaaccaagcgattctgccactgaaaggtaaaatcttaaacgttgagaaggcgcgttttgataaaatgctttcttctcaagaggttgccacgctaattaccgcgcttggctgtggtattggtcgcgacgaatacaacccggataagactcgctaccacaacatcatcatcatgacggatgctgacgtcgacggctcgcacattcgtaccttgctgttgaccttcttcttccgccaaatgcctgagctgattgaacgtggttatgtgtatattgctcagccgcctttatttaaagtgaagaaaggtaagcaagaacaatatctgaaagacgaagcagcactgactcagtatctaaccactcaagcgttagatggtactagcatttacccatctcaaggtgcgccaggcatgtcgggtgagccattagagcgtttagtgactcagtaccgcgaagtggaagctattgttgctcgtttagagcaacgttacccaacgcagatcaccaaccgcatgctttatcacccaatgatcaacaacgaaatgttggcggatgaaggcaagatgaaggaatggatcgacgcctttatccatgagctggtggaattagaaaacagcggcgtgttgtattctggtgagcctgtactcgatcctgagcgtaaagtgtatctgcctaagatcactatccgtaaacacggtatcgatacacactacctgttcagctacgacttcttccaatcaactgactaccaacgcattggtaagttaggtgcggcgctcgaaggcctaattgaagtcggtggttatgtacaacgtggcgaccgtgtgaaggaagtgggtagcttcattgaagcgttagattggaccatcggcgaagccaagcgtggcctctacatccaacgctataaaggattgggtgagatgaaccctgagcaattgtgggaaactacaatggatcctgaatctcgccgcatgctgcaagtgacgattgatgatgccgttggtgcggatcagctgtttacttgtttgatgggcgaccaagttgaaccacgccgtgactttatcgaagccaacgcgctgaacgtggctaacttagacgtttaac

SEQ ID NO: 295521 - DNA, 1144 bp, Unknown
  Bacterial polypeptide expressing nucleotide sequence isolated from the Sargasso Sea
atgaccagaaagaaaggggccctcgatattgcgggattgccaggaaagcttgctgactgccaagagaaagacccttcactgagcgagctttttattgttgagggggattctgcaggaggctcagctaaacaaggaagagacaggaaaacacaagctatattgcccctaaagggaaaaatcttaaatgtagagaaagcccaaagagcaaaaatgtattcttctgttgagattggtacgcttattacagcattaggatgcgggattcacgatgaatttgatatggataaccttagataccataaaattattatcatgactgatgctgacgttgatggttctcatatcagaacactcttattaaccttcttttacagggagcttcaagaccttatcaatggcggctacttgtatattgcacaaccgcctttatataaattaaaaaaaggcaagaaagaggagtatgttctaactgacgatgaacttaataatttaatactaagcaatgctgttaagggcgcagaggttagggctaaaaacaagaaaaaaggaattgaaggagacgggctcttaaacaccattcttgattattctaattcattatctgtgattgaaaaaatcgagaaacaggcaggaactatcgcggcaaaagcaatatcgctacataaaccaatcacaaaaacagaagctaatagcaaaaagaagttagaggtttggattaagggcctatcaagaactgcatcaaagatagcaaaagagagaggatataaggcgtctgtaagcatagactatgatgatgatggaataggctacataaacacagaagaagaaattggtggagtaacccatcacggtaagattgctaactcttttttaagatctaacgattacaaagtatttggccgggtacagaaagcacaaaaagcattctcaggccctgttgtaatagacaacggatctgaaattacagaatatatgaatattgaggattgcctaaaacaaatagttaacaactctaaaagagggcttaatgttcagcgctacaagggccttggcgagatgaacccagaccaactttgggaaacaacacttgatccaaccacaagatctttgttgcaagttaaggcggaagacgatgcaggcctga

SEQ ID NO: 295522 - DNA, 1987 bp, Unknown
  Bacterial polypeptide expressing nucleotide sequence isolated from the Sargasso Sea
atgtctacgaaaaagccaaacgccgcgtatagcgaagcgtcgatcaaggtgttgaagggcctggagccggtcaagcaacggcccgggatgtacacccgcaccgaaaatccgctgcacatcattcaggaagttatcgacaacgcatcggacgaagcccttggcggctacggtcggcaaatcacggtcacgctgcacgcggaccattcggtttcggtcgaagacgacggccgcggtattcccttcggcatccatccggaagaaggcgtgccggttgtcgagatcgttttcacgcgcctgcacgcgggcggcaagttcgataaagccgccggcggcgcctacacgttctcgggcggcctgcacggcgtcggcgtgtcggtcaccaacgcgctgtccacgcgcctcgacgtcaccgtgtggcgcgacggcaaggtcgccgagttgagctttgccaacggcgacgtcgcgaagcagctcgaagttcggcctgcgacaaaggccgacaagaaatccggcacgcgcgtcactgcgtgggccaacccgaaatatttcgattcaccgaacctgccgctcggcgaactgcaacgcctgctgcgctcgaaagcggtgctgttgccgggcgtcgaagtcacgctcatcaacgaaaaaaccggtgagcagcaaagctggaagtacgaagacggtttgcgcggctacctgctggaaggcatgaacggcagcgatctgctgattccgctgttcgagggtgagcgctacgtcgaaaattcgcgcgcgagcgaagagacgtttgccgaaggcgaaggcgcttcatgggtcgtcgcatggagcgaagaaggcacgctgatgcgcgagtcgtacgtcaatctgattccgacacccgcgggcggcacgcacgaatccggtttgcgcgacggtctctaccaggcggtgaagagctttgtcgagttgcacaacctgcagccgaagggcgtgaagctgctggctgaagacgtgttcgcgcgcgtgtcgttcgtgttgtcggcgaaggtgctcgatccgcaattccaggggcaaatcaaggagcgcctgaatagccgcgatgcggtgaagctggtgtcgtcgttctcgcgtccggctttggagctgtggctgaaccagcatgtcgagcacggcaagaagctcgccgacctcgtcatcaagcaggcacaggcgcgcacgcgtgccggccagaaggtcgagaagcgcaagagttcgggcgtggcggtgttgccgggcaagctgaccgattgcgaatcgacggaaatcggccgcaacgaattgttcctcgtcgagggcgactcggcgggcggctcggcgaagatgggccgggacaaggaatatcaggcgatcctgccgctgcgcggcaaggtgctgaatacgtgggaaaccgagcgcgaccgcctgttcgccaacaacgaagtgcacgacatttcggtggcgatcggcgtcgatccgcatagcccggacgacaaggtcgatctgtcgaatctgcgctacggcaagatctgcattctgtcggatgccgacgtggacggttcgcacattcaggtgctgctgctcacgctgttcttcaagcatttcccgcagttgatcgaacgtggccatgtgtgcgtggcgcgtccgccgctgttccgggtcgacgcacccgcgcgcggcaagaagccggcgcagaagctttatgcgctggacgaaggcgaactcgaagcgatcctcgacaagctgcgcaaagacggtgtgcgtgacacgcaatggtcgatcagccgcttcaagggcctcggcgaaatgagtgcggagcagttgtgggacaccacgatgaaccccgacacgcggcgcctgacgccggtggcactcggcgagctcgactacgacgccacggtggcgcgcatgacgatgctgatgggcaagggcgaagcggcgtcgcggcgcagctggctggaagaaaagggcaacgaagtggaagcggatatctgag

SEQ ID NO: 295523 - DNA, 1332 bp, Unknown
  Bacterial polypeptide expressing nucleotide sequence isolated from the Sargasso Sea
ggatgatggaagaggaataccagtagatttacacaaaggagaaaaaaaatcagctgctgaagttattatgacacaacttcatgccggaggtaaatttgatcatgattcatataaggtttcaggcggactccatggtgtaggtgtttcagttgttaacgctttatcagaaaaattaagcttaaaaatatttagagataaaaaagaatatttggttgaatttaaagacggaaaagctttgtcccccttaaaagcaaaaggaaaaacaaataaaactggaactttaataaattttttaccatcaaaagaagtattttctaacactaaatttatttcatcaatattacagaaaaggatgagagaacttgcttttttaaataagggattatgtattattttagtagaccaaactgtaaaaaaagaaaaggaatataaaaataaatacgaaggtgggatacaggagtttgttgaatttttggataaaaataagtcagctttggttaacaagaatgatcttaatttattcaaaaaaccaatttatatttctggatcaaaagacaatattgaagtcgaatgctcattaaagtggaatgctggatattctgaagaaatgttaccgtttacaaataatattcatcaaaaagacggaggaacccatttattaggttttaggagtgctttaacaagagttataaataaatattccaatgaatataataaaaaaaataagctgtcattaactggtgaggatattaaagaaggattaacagttgttttatctattaaaatgcctgatcctaaattttcttcgcagacaaaagataaactggtttcttctgaaattcgattaatagttgaaaacatcataaccgataaaatttcaatgtggtttgatcaaaatccttcaacaattaaaaatgttttggaaaagatcactcaggccgcgatcgcacgagatgtggctagaaaagcaagagacaatatccgtaggaaaggaagttttgaaatcacgggccttccaggaaaacttgcagattgtcaaatttcaaaaaaagagggaactgaactttatattgtagagggtgactcagcaggaggctcagcaaaacaaggaagaaatagggaatttcaagcagtactaccattgagaggaaaaatactgaacacttatgtaaatattaacggacgaaatagaggtaaaactgcggaaaacgaaactaaggctctttcaaaaatgatgtcttctagtgaaattgtaacactaataaatgctttaggtacaggctcaaaagattttaatctagaaaatttaagatatgaaaaaatagtaattat

SEQ ID NO: 295524 - DNA, 2521 bp, Unknown
  Bacterial polypeptide expressing nucleotide sequence isolated from the Sargasso Sea
atgagttcatcatatctatcttatgccatgagtgtaattataagtagagctttacctgatgttagagatggactcaaacctgtacatagaagaattatttatgctatgcataaaggtggttttgattggtctaaacaattcagaaaatcagcaagaatagtaggagatgtaattggtaaatatcatccacatggtgaccaagctgtttatgatgctttagtaagaatggttcaagaattttctatgagtcagccactaattgatggtcaaggaaattttggctcaattgatggagacccaccagcagcaatgaggtataccgaaaccagattagcaaaaatttcacaacatttaattgatgaaattgaaaaaaatacagttgagtttaagagtaactatgatgaaacagaaaaagaaccaacagtcctaccggctcaatatccaaatttattagtaaatggagcaggaggaatagcagttggaatggcaacaagtataccacctcataatctgggtgaagtaattgacggaacgttagcattaataaacaacaaagatattaaaattcctgagttgatgaaatttattcctggaccagactttcctacaggaggaataataattggaaaaaatattattaaagaaggttataaatcaggcagaggctcatttaaaattcgtggtgatattagcgtagaaaatttgaaaaatggtagagatagactagttatttcttcgataccttaccaggtgaataaatccaatcttaatgagaggattgcagaattggtaagagataagaaaattgagggcataagagatattagagatgagtctaatagtcagggtattcgagttgctatcgatttaagaaccaatgtagagcctgaaactattaaaagacaacttttcaaatatacaactatagaaagttcatttggatttaatacacttgcaattgtaaacaacaaaccaaaaacttgtaatttaaaagattttttagaaaattttttacagtttagagaagatgttgttatcaaaaaaacaaaatttgatcttaaaaaagcagagacaagagcacatatacttattggtttgtcagtttctgttgaaaatttggataaaataataaaaattattagatcatcaaaaaatcctgatgatgcaaaaaattctttacttaaaaataaatggaaaataacaaaatcacaaaaatttttaaagttaattgaaaataaaaaaagtacgtccttttattccttatcagttgaacaagtgacagctatattagagttaagattgcaaaagctaactgctataggtatttcagagatagaggatgaaattaataaactttcaaatttaatccttcaacttaaaaaaattattagttcaaaaaaagaattgcttaaagtgataagtgaagatcttaaaaatattaaagataaattctcagtacctagaagaacgaagataattgacgctgtattaaattatgatattgaagaaacaattcaaaaagaaaatgttattattactgttacattgcaaggctatattaaaagaggagctttaagcaacgttaaacaacaaaaaagaggtggaaaaggaaaaactggtatagttactagggaagaggactccgttgttcaaaccttgtcagttagcactcatactcaagttcttttcttttcgactgaaggtttagtatttagattgaaagggtggaaaataccagaaggatcagcttcatcaagagggaaatcactttttaatattttaccattaaaaaaccatcaatcaattagttcaattatgccttatccagaagaaagtgaaaacaataaaaaattacatataatatttgctactgctaaaggtaaaataagaaaaaataatttagatgatttttcatcaattaatacgagtggtaaaattgcaatgaaattagataatgacgataaaattgtaggtgtaaaaatttgtagcgatgatcaagatataattttaagcactaagctaggaaaatgtattagatttgagtcaaaaaaacttagagtttttaaaggcagatcctcaaagggaattagaggaataaatttgcaagaaaacgatagtatagtttcactttcaatacttgatcatgatgataccaaaaaaaatggaaaaattagtaaaactgataaatcagtaaaattagcaaaagaaaattacatcctctcaataactgaaaatggatttggtaaaagaacttctcattatgaatatagagttacaaatagaggaggaaaaggaatcataggtatcattaactcttcaagaaatggaaatatttcatcgtcatttcctgtaaatgaaggtgatgatgtgcttatttcaacaaataaaggaagagtaatcagaacagcagttaaagaaataagaattgctggtagaaatactcaaggtgttagaattattaagttatctggtgaagaaaaagttgtttcagcaattaaaattgatgataatttgaaataat

SEQ ID NO: 295525 - DNA, 1888 bp, Unknown
  Bacterial polypeptide expressing nucleotide sequence isolated from the Sargasso Sea
tatgacgaatcaatacacctctgacgccattgaagttcttaacggactcgacccagttaaacgccgtccaggtatgtataccgataccacccgacctaaccacttaggccaagaggtcatagataacagtgtggacgaggccttagcgggccacgccactaaaatcgaagttgtgctccataccgataattcccttgaagtcaccgacgatggtcgggggatgccagtcgatattcaccctgaagaaggtattccaggggtcgaactgatcctcactaaactgcatgccggcggtaaattttcgaataaaaattaccaattctccggtggtttgcacggtgtggggatttcggtggttaacgccctgtctcgccgcgtcgaagtgacggtacgccgcgatggccaagtgtatgatattgcttttgaaaatggctttaaagtcgaagagttaaaagttacgggtacttgtggccgtcgcaatactggtacccgagtgcatttctggcccgaggccagttatttcgattcggcgaatttttccaactccaaactcatctatttgctgcgcgccaaggccgtgttgtgtccgggccttaggatcaaatttaccaataagcacaccaatgaagtccatgagtggtactacgagagtggtttaaccgattatctcaaggcggcggttggcgataatttaatgctgccagaagagccctttataggcagctttaaaggccaaatcgaagccgctgattgggccattacttggctgccggaaggtggcgatgcgattaacgaaagctatgttaacttgatcccaacgcctttgggtggaacccatgtgaatggtttccgccaaggtttgctggagtcgatgcgcgagttttgcgagtttcgcaatctgatcccccgtggcatcaagctatcacctgaggatatttgggaccgcgcggccttcattctctcggtgaagatgcaagatccgcagtttgctggccaaacgaaagagaaactctcgagccgtcaaagctctgcctttgtctctggcattgtgcgtgatgcgttttcactgtggctcaactcgaataccgaattggccgagtcgctggcggacatgtgtattaacaacgcccagcgccgcttaaaagccgcgaaaaaagtggcccgtaaaaaagtcacctctggcccggcattaccaggtaaattgaccgactgtagcggccaagatccgatgcgcggcgaactcttcttagtggaaggggactctgcgggcggcagtgccaagcaggcgcgtgaccgtgagtttcaggccattatgccgctgcgcggtaaaatcctaaacacttgggaggtggatgcttcacaggtgttggcctcgcaggaagtgcatgacatctctgtggcgattggttgcgatcccgatagcaacgatatctccgagctaagatatggcaagatttgtatccttgccgacgcggactccgacgggctacatattgcaactttactctgcgccctgtttctgaaacattaccgtgtgctggtcgaacagggccatgtctatatcgctatgccaccgctgttccgtatcgatataggtaaggatgtttactacgccttagatgaggctgaaaaagaaggtattctcgaccgtattactgccgagaataaaaagggtaaggtccaagttacacgctttaaaggtctgggtgagatgaacccgctgcaattgcgtgaaacgactatggatccaaacactcgccgtttagttcagttaaccattgatgatgtagaagaaactgactcactgatggatatgttgctggctaagaaacgttcgcccgatcgtaaaaactggctcgaggataagggtgacatggcggtactttaa

SEQ ID NO: 295526 - DNA, 2278 bp, Unknown
  Bacterial polypeptide expressing nucleotide sequence isolated from the Sargasso Sea
aatgagtgacgcgatcaagttaagcttagatggcgtagagcagatgcccctgcggcgctttaccgaagaagcttatctgaattattccatgtacgtcatcatggaccgagccttgccccatattggtgacgggcttaagcctgtacaacggcggattatttatgccatgagtgagctggggttatcggcccagtcaaaacataaaaaatcagcccgtaccgtcggtgacgtattaggtaagtaccatccccatggcgacagcgcctgttatgaggcgatggtgctgatggcgcagccattttcttaccgttatccgttggtagatggtcaaggtaactggggggcgccagacgatcctaagtccttcgcagcgatgcgttataccgaggcgcgcctgtctaagttctccgaagtcttactatctgagcttggacaagggacggtcgagtggggcgctaacttcgatggcaccttgaaagaacctaaagtattgcctgcgcgtttaccgcatattttactcaatggcatcacaggtattgctgtgggcatggcgacggatattccgccacataatgctagggagttagtcaatgcctgtgtggcgctgctggacgaccctaaactcgaacttgagcagttgatgggctatgtgccaggaccggattatccgaccgaagccgagatcatcacgccatcggccgacattgccaaagtctatgagacgggccgtggctccataaaagcccgcgccgtgtatagcgtcgaagcgggtgagatagtaattacagctctgccacaccaagccagtagcggtaagattttagagcaaatcgccgcccagatgcaggcgaaaaaactgcctatggtggcggacttacgtgatgagtccgaccatgaaaacccggtgcgattggtggtggtgccgcgctcaaaccgcgtcgattgcgaccaactgatggcgcacttgtttgcgaccacagatcttgagaaaagctttagggtaaaccttaacgtattgggtctcgatggtcgcccacgggtgaagggtcttaaagacttattaaccgaatggttagagttccgtgttgataccgtaagacgtcgcctcgagtatcgtctcgataaagtgctggcacggttacatatcctcgaagccttgatgattgccttcctcaatatcgatgaagtgattgaaatcatccgcttccacgatgagccaaaggccgagttaatggcgcgctttaacctgacggataggcaagcagaagccatcctcgagttaaaattacgtcatttagccaagttagaagagtttaaaatcaaggccgagcagaatgagcttgaagccgagggtgagaaattagagcagttattaggctcagaccgtcgcttaaaaaccttgatcaagaaagaattaattcaagatggcgaaacctatggtgacgaccgccgctcaccgattgttgagcgccatgagtcccgcgccttaaccgagcaagagctgacgccgagcgagccagtgactgtggtgttatctgaaaaaggctgggtgcgttgtgctaagggccatgatatcgatgccgagtctttgtcctataaagctggcgatcaatatctatgcagtgcgatggggcgcagcaatcaggcggcggtatttattgattcatcgggccgcgcttttgcgaccgacagtcatagcctgccatcggcccgtagccaaggcgagccaatcactacgcgctttaatatggcgccgggtgaaaccatgcagcatgtgattttgggtgaagacgagcaatgtttcctgctcgccaccgatgcgggttacggttttatctgtacttacaatgacatggtttcgcgcaacaaggcgggtaaagccctgttaagcctgccgacgaatgctaagtccttaccaccaaggtcgattgaccgcaatcgcgagatgtctattcttgctatcaccaatgaaggccgtatgttgctgttttcattggaagcattgccgcaattgtctaagggcaaaggaaacaagattatcggtattccaagcgagcgtgctaagaatcgtgaagaactgatgacccatttacagttagtaccagccgacacaccagtgaccctatgggcgggtaagcgtaaactcaccttaaaaccgagcgatttagagcattatcgtggtgaacgtggccgccgtggcgctaagttaccgcgcgggttacagcgtgttgatagcgtggaattaggcgaaggcgcagaggttttacctagcatttaa

SEQ ID NO: 295527 - DNA, 1151 bp, Unknown
  Bacterial polypeptide expressing nucleotide sequence isolated from the Sargasso Sea
aaatattgaagatgagcttaagcaatcatatctaagttatgctttaagcgttattcatggcagggcattacctgacatcagagatggattaaaacctgttcataggagaattctttatgccatgtatgatctcaaaaattattacaatagaccttataaaaaatctgcaagagtggttggtgacgtaataggaaaatatcatcctcatggcgattcagcagtttatgatgcaatggtaagaatggctcaagatttctctatgagatatccaatagttgaaggccaaggtaattttggatctattgatggcgatcctccagctgcaatgcgatatacagaagtgcgtatggcaaaaattacagatcaaatgcttaatgatattgagaaggaaactgtctcatattcaccaaattatgacggaagtgaaaatattccagacgtattaccaacaaaaataccaaacttattagtaaatggatcatctggaatcgctgttggaatggctacaaatattcctcctcataacattacagaagttttaaatggatgtataaatttaattaacaacccaaaggtttcaattgatgaattaataaaagatatttctgggcctgattttcctactggaggaactatcgatggaaaagcaggaatatatgaagcttataaaactggaagaggaataattcatattcgttcaaatacatcaattgaagaagataagtctggtaaacaatctttaataattaatgaaattccttttatggttaataaagcaagaatgttagaaaaaattgctgaacttgtaaaagaaaaaaagattgagggcatcactgaaattagagatgagtctgacaaggacggattgcgagtagttattgaagtaagaaaaggagactcagtcgaggtattagaaaataatttgtttgcacaaacgcaattagaacagtcattcggaattaactttactgttctgtctgagggtcagccaaaagaagtaaacctcaaagaaatgctgcaagcttttgtaaagcacagaaaggatataatcactaaaagaacaaaatatgatttaagaaaagcaaaagaaagaggtcatgtcgttgaaggtctcatggttgcaattgcaaacattgatgaaattataaaaa

SEQ ID NO: 295528 - DNA, 1249 bp, Unknown
  Bacterial polypeptide expressing nucleotide sequence isolated from the Sargasso Sea
atgagtgaggacaaaagatctaataaaatctcgaatgattatggggcggaacagattcaggttttagagggtttagaaccagttcgaaaacgcccaggaatgtatataggttcaacaggacctaggggattacatcatttagtatatgaggtagttgataactcggttgatgaagcacttgcaggacattgtgatcatatagaaatagttcttcgagcagatggttctgctttgatttctgataatggacgaggtataccaacagatattcatccaagaacaggtaaaagtgccttagaaactgttctaactgtgcttcatgcaggaggtaaattcggaagtggtggttataaagtttcagggggtttgcatggagtaggaatatctgtagttaatgctctaagcgaatgggttaatgtgactgtttatagggacggaaacgaatttaatcaaagatttgaaaaaggtatatcaaagggtgaattggaaactaaaaagcagactggcaaaccatctaagaaaggaacaactatttgctttaaacccgacaaaacgattttttctggaggaattgaatttgaatatgctcttctttcgtcgagattaagggaactagcttatcttaatggcggagtaaaaattgtttttagagatgaaagaaatcaattatcagatggttcttttaaagaagaaatttatttgtatcaagggggtattaaagaatatgttgaatacatgaatgccgaaaaagagtctattcatcctgaaataatttatgttgactctcagaaagaaaatgtatatgtagaagcggctttgcaatggtgttcagatgtatattcagataatattttaggatttgcaaataatattagaactattgatggaggaactcatattgaaggtctaaaaacagtactgacaagaactttcaataatcttgcaaaaaagagaggcaaaagaaaagatattgaaaaaaatttagcaggcgaaaatatcagagagggtttgactgttgttttatcagtgaaagttccggatcctgaatttgaaggacaaacaaagacaaaattaggaaatactgaagtacgtggaattgtggattctctcattggcgaggctcttacaaaatacatggaattcaatcctggaattttggacttgattcttgaaaaagcaattcaatcatttaatgcagctgaagctgcgagaagggctagagaattagtaagaagaaaaaggttctcga

SEQ ID NO: 295529 - DNA, 288 bp, Unknown
  Bacterial polypeptide expressing nucleotide sequence isolated from the Sargasso Sea
tatgcaaaaaaacgaaatttctaataaccataagataaaacttatatctatgtacgacgagatgagctcgtcatatttatcatatgcaatgagcgttattgtaagtagagctcttcctgatattagggatggattaaagccagtgcatagaagaattctatttgcaatgcacaagggaggctatgattgggcaaaacaatttagaaaatctgcaagaattgttggtgatgttattggtaagtatcatccacatggtgatcaatctgtttatgatgcgctggtaagaat

SEQ ID NO: 295530 - DNA, 929 bp, Unknown
  Bacterial polypeptide expressing nucleotide sequence isolated from the Sargasso Sea
tttatccacaattatgcatcgggctcttcctgatgctcgagatggtctaaaaccagttcatagaagaattttgtttgctatgcgagggttgaaattagatgccacgggagtttttagaaaatgtgccaagatagttggtgaggttatggggaatttccatccccatggtgataaagcaatttatgacgcattagctcggctggcacaggattttaatgttagataccccttggttgagggtcaggggaattttggaaatattgatggagataatcctgctgcacagcgatacacagaggcaagattaacgaaagtttcagagttattgatggatgggttgtccgaagatagtgttaattttagagataactatgatggatcggagcaagaacctgtggtcctacctgcaggctttccaaatttgctagcgaatggctctacaggtattgccgttggaatggccactaatataccacctcacaatttgaatgaattgtgcgatgcgtttcttcatctcataaagtttcctaacgctagagaggaaactctttgtgatattattccaggtccagattttcctactggaggaataattgtagaggataagtcaaatattattgaaaactacagaactggtaggggtagctttagattgagagcaaaatattcagttgaagaattaccaagaggcagttggcaaatagtagtaacagaaattccatttcaagttcaaaaatcaaaactaattgaaaaaatagcagatctaattaacgaaaagaaacttgctatacttgcagatgttagggatgaaagtactgatgagattcgattaatttttgaacctcgttctaggtcaattgatccacttattctaatggaaaatttgtttaagtacactgacttggaaacaaagttttcattaatatgaa

SEQ ID NO: 295531 - DNA, 931 bp, Unknown
  Bacterial polypeptide expressing nucleotide sequence isolated from the Sargasso Sea
tatgtcagaagaagaaaaattaattcctattaagatagaagatgagatgaagtcagcttacattgactattcaatgtcagtcattgtctctagggctctcccagatgttagagatggactaaaaccagttcatcgaagagtgctttttggtatgaatgaaatgggagttagatctaactcttcatataaaaaatctgctaggatagttggagatgttatgggtaaatatcatcctcatggagacagttcagtctatgatacaatggtaaggatggctcaagaatggagcttaaggtatttattagttgatggtcaaggaaactttggttctgtagatggagatagccctgctgctatgagatacactgaagctagaatgaaaaaaatctcagaggaacttttgtcagatatagataaagaaactgttgattttcaattaaattttgatgatactataatggagcctacggttttacccactagagttcccaacttattaattaatggagcatctggaatagctgttggtatggcaactaatatgccccctcataatttatctgaggtaatagatggcactataacttatattgaaaataatgaaattgatattgaggaattaatccaaatcataaaagcccctgattttccaactggaggtactatttacggatatgatggggttaaagaggcttttttaactggtaaaggtagagttgttcttagagggaaagctataattgaaaatgtaaaagatcgagaatgtattattgttacagaaattccttatatggttaataaagcggatatgattagaaaaacagctgagttaataaatgacggtaaaattgaaggtatttcaacaataagagatgagtctgatagaaaaggaatgcgaattgtatatgtcttaaaaagggacgctatacca

SEQ ID NO: 295532 - DNA, 979 bp, Unknown
  Bacterial polypeptide expressing nucleotide sequence isolated from the Sargasso Sea
tccgatgatatagctaaaaatcttataggcgcaatttcagtttttcttcctgaaccaaagttccaaggacaaacaaaagataaactatcaaataaatccatacaaaaagtaattgaaaacgcaataaaagatagatttgaaacccttttatcaaattctccccaacaaactgaagcattattaaaatatgtttattcaataacagaagaaaggcttaagaaaaaacaagataaagaaacaactagaaaaagtgctatcagaaaattaaggcttcctggaaaactagctgattgctctcaaggaaacagtgagggtacagaattatttattgtagagggcgatagcgcaggcggctccgcaaaacaggcaagagatagaagatttcaggctattttaccattaagaggaaaggttctaaatgtagctaattctactaaatcaaaaattcgagataatcagcagatttcagatcttattcaggcattaggttgtgggtctggagatctttataatgaagaaaatctgcgatatgagaaaataataattatgaccgatgccgatgttgatggtgcacatattgcgtcattattaataactttttttcatgaggaaattccagaaataattgatcaaggaaaactattcttggctgtgcctcctttatataagatttcacaaggaaaaaagacctcttatgctaaggatgatgacgatagagatgacctgattaaaaataaatttgatgaaacaaaaaaaattgaaattaatagatttaaagggcttggagaaatgatgcccgctcaactaaaagaaacaacgatgttaccaggaaacagaacattattaagaattattaatccagaaaacaaaaaaaatgactctaaaactgtagttaataatttgatgggtaataaaccagaattaaggtttgaattcattagagaaaaggctaatctatacgataacattagaaattaat

SEQ ID NO: 295533 - DNA, 1261 bp, Unknown
  Bacterial polypeptide expressing nucleotide sequence isolated from the Sargasso Sea
tctgaaatggaatgctggttatagtgaagaaatttttccatatacaaataatatttatcaaaaagatggtggaacacatttattaggatttagaagtgcattgactcgagttgttaataaatatgcaaatgagcataatttgctaaagaagaacaaattagctatttctggagatgatataaaagaaggtttaacatgtgttttatcaactaaaattcctgatcccaaattttcttctcaaactaaagataaattggtgtcctctgaagtgagaatgattgtagagacagtagtaaatgaaaaattatcaacatggtttgatcaaaatccaactgttacaaaaataattctagctaaaataattcaagcagctatggcaagagatgtagccagaaaagcaagagaaaacgttagaagaaaaggagctcttgaattgagtggtcttcctggaaaattagcagattgccagataggaaaacaagaaggcacagaattgtttattgttgagggtgattcagcaggaggttctgcaaaacaaggaagaaatagatcaaatcaagctgttttgccccttagaggaaagattttgaatacttatgttgaggatttgacagttaataaaaatggcaatggaaatggatcagataaaaggactaaggctttgtcaaaaatgatatcttcaaacgagatagtgacattaatcaatgcactaggcttagaccctaaagtagaggagatagatttaaaagatttaagatatggtaaaataataattatgacagatgctgatgttgatggttcacatatcagggctttattattaactttttttaataatgaaccatttaataaattaattgaaaatggtcatatatatttagctcaacctccattatttaaaataaataaaggaactaaagggatttatataaaagatgaaaaagaattagaagattatattttaaataacaataaagaaattaagaaaataaaaaaaggaacaaaagaatttacaaaagctttagacttagaaaagtctaaaatgaatatccaaagatttaaaggtttaggagaaatgaatcctgaagaattgtggagcactacacttgatccagaaaccagaaatttacttcaagtacaatattcaaaagaccttaaaaaagaccaaagtctaatacatacacttatgggtaatgacgtagcattaagaaaagattttattgtttctaatgcaattaatgttcagaatcttgatatataa

SEQ ID NO: 295534 - DNA, 2749 bp, Unknown
  Bacterial polypeptide expressing nucleotide sequence isolated from the Sargasso Sea
atgagcgatctggccagagagatcacgccggtcaacatcgaagaagagctcaagagttcctatcttgattacgccatgagcgtgatcgtaggacgagctctgccggatgtgcgtgatggcttgaaaccggttcaccgccgcgttctgtatgcaatgaacgagctggggaacgactggaacaagccctataaaaaatcggcccgtgtggtcggtgacgtaatcggtaaatatcacccgcacggcgacagtgccgtgtatgacaccatcgttcgcatggcgcaggatttctccatgcgttacatgctggtcgatggtcagggcaacttcggttcggtcgacggcgacagcgccgccgccatgcgttacaccgaagtgcggatggcccgcatctcccacgagctgctggccgatctggacaaagagaccgtggactgggtgccgaactatgacggcaccgagatgatcccggctgtcatgcccaccaaggttcccaacctgctggtcaacggctcctccggtattgcggtgggcatggcgaccaacattccgcctcacaacctcaccgagatagtcaacggctgtctggcgttgatcgagaacggcgacctcaccatcgacgagctgatgacctacatcaccggcccggatttccccactggtggcatcatcaacggtcgttccgggatcgtgcaggcgtaccgtaccggtcgtggctccgtctatgtgcgggccaaggccgaagtggaggtggacgagaagaccagtcgcgagaccatcatcgttcacgagatcccctatcaggtgaacaaggcgcggctgatcgagaagatcgccgagctggtcaaagagaagaaaatcgagggcatcagtgccctgcgcgatgagtctgataaagacggcatgcgcatcgttatcgagatcaagcgcggcgagtccggcgagattgtgctgaacaatctctacaagcacacccagatgcagaccacgttcggcatcaacatggtggcgctcgataacaaccagcccaaggtgatgaacctcaaagagatcctggatgcgttcctgctgcaccgccgtgaagtggtgacccgccggaccgtgttcgaactgcgcaaggcgcgggatcgggctcatatcctggaaggtctggcggtggcgctggccaacatcgacccggtcatcgaactcattcgccacagcgcgaccccggccgatgcgaaagcgggcctggttgcccgtggctgggagctcggcaacgtggcctccatgctggagaaagctggtgacgatgcggcccgccccgagtggctggaacccgagttcggcatccgcgaaggtcactactacctgaccgagcagcaggcccaggccatccttgacctgcgtctgcacaagctgaccggcctcgagcacgagaagatcctggaagagtaccaatctctgctggatctcatcgccgagctgctgttcatcctggcgagcccggtgcggttgatggaagtgatccgtgacgagttgctggccgtgcgcgagcagtacggcgacgagcgtcgtaccgagatcagcatgtccagtgccgagatcaacatcgaagatctgatcaccccggaagacgtggtcgtgaccttgtctcaccagggttacgtgaagtatcagccgctctccgactacgaggcccagcgccgcggtggtcgtggcaagtcggccacccggatcaaggaagaggactttgtggagcgtctgctggtggccaacacccacgacaccattctgtgcttctccacccgtggcaaggtctactggctcaaggtgtatcagctgccggaggcgtcccgtggcgcccgcggtcgtccgatcatcaacctgctgccgttggatgagggtgagcgcatcaccgccatcctgccggtcaaggaatatgacgccgacaagtatgtcttcttcgccaccgccaacggtaccgtgaagaagaccagcctgtccgacttcagccgtccgctctcctccggcatccgcgccatcaacctcaaagagggtgatgagctgatcggggtggacatcaccgatggcagcaacgagatcatgctgttctccgatgcgggcaaggttgttcgcttcgcggaaggcagcggtcgcgctgatgccgatgccactgacgaagtcgacaccgacgacgacgccggcaacgacgatgatggcagcgacaacggcgaaggcaccgaaagcaagggcaccttcaagggcgtacgtcccatgggtcgtaccgccgccggtgtgcgcggcatcaagctgggcgccggtgacaaggtggtgtccctcatcgtgccgcgtggcgacggggccatcctcaccgccaccgagaacggttacggcaagcgtaccgcgctggacgagtacccgaccaagagccgtggtacccagggcgtcatctccatcaaggtggatgagcgcaacggcaaggtgatcgatgcgatccaggtcgaagataccgaccagatcatgctgatcaccaacggcggtaccctggtacgtacccgggtgtccgaggtgagcgtcatcggccgcaacaccggcggtgtgcgactgatccgtaccggtgaagacgagaccgtggtcggtctgcagcgggttgccgaaagcgacgaagacgaaaacgaagtgctggccgttgaaggggaggtgtctgaaggcaccgataccgcagcggacaccggtgctgtcgatgcaggtgaagcgggcgacgaataat

SEQ ID NO: 295535 - DNA, 301 bp, Unknown
  Bacterial polypeptide expressing nucleotide sequence isolated from the Sargasso Sea
atgacagaaaaaaatttaaataattaccaggccgactcaatcaaagtacttaaaggtctagaagctgtaagaaaaagacctggcatgtacattggtgacaccgatgatggaacaggattgcatcatatggtttatgaagttgtggataattcaatcgatgaagctttggcaggacactgtaaaaatatagaggtagaaataaattcagatgaatcaattactgtgaaagatgatggaagaggaataccaaaagatttacataaaggggaaaaaaaatcagccgcagaagtgataatgactc

SEQ ID NO: 295536 - DNA, 874 bp, Unknown
  Bacterial polypeptide expressing nucleotide sequence isolated from the Sargasso Sea
acaaaaacaattagaggaattattacaaaaccaaattttattatggttaaatagtaataaaagagaatcgttaaagcttatagaaatactaattgaacgagctttattaagaacagatttatcaaagataaagaaattagacagaaaatctataaaagaaaaaaataggttacctggtaaattagttgattgcactagtaacacaatagagaatactgaactttttatagttgaaggagatagtgctggaggttcagcaaaacaagcaagattcagatctactcaggccattcttcctcttaaaggaaaaattttaaatgtttatagtgtttcattatcaaaaattgcagataataatgaaattcaaaatcttgttcactctcttggttgtggactaggaaaaaactttcaattatctaaattaagatatgaaaaaattattttaatgacagatgcggatgttgatggatctcatatagctactttattaattacttttttttataaatatatgagaaaaattattgaagaaggaaagctttatttagcaatgcctccattatataaaatttcttatagccaagaaaatttttttgcttacaatgagaaagataaggacaaaataatcaataataataaaggatcgccacaacttacacgttttaaaggacttggagagatgccagcaaatcaattaaaagatacaacgatggatcctgaaaaaagatctttaatacaattaaaattaactgatggtattaaatatactaaacaaactgaaaaactgtttgaggccttaatggggaaaaaagcagagaaaagatttaattttattcaagaaaacgctaactttataaataacctagatatataa

SEQ ID NO: 295537 - DNA, 2539 bp, Unknown
  Bacterial polypeptide expressing nucleotide sequence isolated from the Sargasso Sea
aatgaatgatttcgctaaagaaattatatctgtaaatattgaagatgaacttaagcaatcttacttaagttatgctttaagcgttattcatggaagggctcttcccgacataagagatggcttaaaaccagtccatagaagaattttatacgcaatgtatgatcttaaaaatttctataatagaccttataaaaaatctgcaagagttgttggagatgtcattggaaaatatcatccacatggagactctgctgtttacgatgcaatggtcagaatggctcaagatttttcaatgagatatccgatagttgagggtcaaggaaattttggatcaattgatggcgatcctcctgccgcaatgcgttatacagaagtaagaatgtctaaaattacagatcaaatgttaggtgatatagaaaaggagactgtttctttttcaccaaactatgatggtagtgaagatattccagacgtcctgccaacaaaaattccaaatttacttgtaaacggctcttctggaattgcagttggcatggcaacaaatattcctccacataatttaaacgaagttttaaatggatgtatcaatttaatcaataatccaaaaatctcaattgatgaattgatcaaggatatttctggtccagactttccaacaggtggaactatagacggaaaagctggaatatatgaggcttataaaacaggcagaggaataattcatattaggtctaatacctctattgaagaggacaaatctggcaaacaaagtttaatcataaatgagataccttttatggttaataaagcaaagatgttagaaaaaattgctgagttagttaaggaaaagaaaatagaggggataactgaaattagggatgagtcagataaggatggattaagagtagtaattgaagttagaaaaggtgattcggttgatgttctagaaaataacctttttgctcaaactcaacttgaacaatcttttggaattaacttcactgttctatcagaaggtcagccaaaagaagttaatttgaaagaaatgcttcaagcatttgttaagcatagaaaagatattattacaaaaaggactaagtatgatcttcgaaaagccaaggataggggtcatgttgttgaaggcttgatggttgcaattgcaaatattgatcaaataatttcaataatcaaaaaatcaaaagatccaaagatagctgccaaagaactttgtaaaaaagtatggaaatctggtccagttgaagcaattcttaaaaaggttggaagtgacgcatgtaaaccaaaaggattaagtaaggatcttggactcaaaggtaaaaaatataaactttctgaagaccaggcaaaagcaattctcgagctaaggcttggaagattgactggtttggagcaagataatttaagcaaagaattttcagaaatcgttgaaaagattcttggtcttcaaaaaattctcgatgataagcaaacactgatcgatttgatgataggagagcttgaagaaattaaagaaaattttggtgatgaaagaaggacattaattaatgacaccagaagaggtattacaaatgaggatcttattccagaagaaacaagggtgcttacagtttcaagaagtggttatgctaaaacccaacctctcgatgaatatagagaacaaagaagaggaggacaaggcaaggcggctgcatctgtaaaagaagaagatttaattcaaaatctttatgttttgagtagtcatgttcaaattttatgcttcacaacaaaaggaaaggtattctggcttaaagtttacgagatacctgttgcatctagaacatcaaaaggaagacctttagtaaacatgcttaatttagatgatgatgaaagagtgagcgatatcttgccggttgaagaattttctgaagataaatttatttttatggcaacgagaaaaggtataacaaagaaaaccagcttaagcctttttgcaagaaagtggaaatcaggaattaaggctataaatcttgatgatgatgatagattaattgggactgcaataactgatggtaaaaaagaaattttattggcctcatctgcaggaaaactgatcagatttaatgagtctaaagttaggcctatgggaagaaccgcaagaggcgtgaaaggcatgaaattaaaaaaagatcaaagactaatttcgttaaatgttgctgatccatcaaaaactattctgtgtgtatcagaaaatggttatggtaaaaagactgaacttgaagatttcccaacacataacagaggtggacaaggtgtcatttctataaaaacaagcgagagaaacggaatgatggttgcggcagcattagttgaggaagaagatggaataatgttgataagtgataaaggtactatgattagaacgaatgtttcccaagttccaacgttaagtagaaatacccaaggagtaaaaatcattactccaaaagaagaagaaaaacttattgagtgtgtaacaatacctcaagaagaagatcaagattaa

SEQ ID NO: 295538 - DNA, 1111 bp, Unknown
  Bacterial polypeptide expressing nucleotide sequence isolated from the Sargasso Sea
ttaggttttagaagttcgctgacaagaattataaataaatatgcatctgagaaaaatttaagtaaaaaaaataaggttaatattgggggagaagatataaaagagggtcttactgcaattttatctattaaaatgccggatccaaaattttcatcccaaactaaagataagttagtttcttcagaaataagaaatattgtggaatctatagtgggagataaagtttcagtatggtttgatcaaaacccttcaattgtaaaggcagttttagataaagttttacaggccgcactagccagagatcttgctagaaaagccagagatagcgtaagacgaaaaggaactttagaattatcaggactaccgggaaagcttgctgattgtcaaatatcttcaatggaaggcacggaactttttatagttgagggtgactctgctggtggttcggcaaaacaaggaagaaaaagagaatttcaagctgttcttccattaagaggaaaaattttaaatacatatgttaatgaaactaaaaaaataaatggaaacaacggcgctcttgaaaccaaaacactttctaagatgatgtcatcaaacgaaatagttacacttattaatgcactaggaactggatccaaagattttgatatagaaaatttaagatatgaaaaaattataataatgacagatgctgatgttgatggttctcatattagaacactattgctcacattctttaataataggccttttaatcagcttattgaaaaaggtcatttgtatttagcccaacctcctctttttaaagtcacaagaggttcaaaaagtacttatattaaaaatgaaaaagatttagagagatatattttaaaatcatcaattaataattccaaaaagcttaaaaaatctgaaatagaaaaatttttaagtgatgaaaaacaaaaattgaatattcaaagatttaaaggtttaggtgaaatgaatcccgaagagttatggcaaacaactttaaatccagaaaatagaacattattaaaaattgaatactccaagggaagtaaggaaaagtctaaagaaaatcaaaatattattaaaatcttaatgggtgatgaag

SEQ ID NO: 295539 - DNA, 2470 bp, Unknown
  Bacterial polypeptide expressing nucleotide sequence isolated from the Sargasso Sea
aatgacagatcaatatacagcatcctcgataaaagttttaaaaggcttagaggcagtcagaaaaagaccaggtatgtacattggtgataccgatgatggcacaggtttgcatcacatggtttacgaggtacttgataactctattgacgaggctttaggaggttattgtgacagtattcaattaataattaataaagatgggtcagctacaatatcagacaatggtagaggtattccagttgaccagcacaaaactgaaaaagtcccagcagctgaggtaatcatgacccaactacatgcaggtggtaaatttgaccaaaatagctataaaatctctggaggtcttcatggggttggtatttctgtggtaaatgccttatcagaaaaactatctctaacaattcgtagaaatggcaaaattcatacaatggaatttaaagatggtgttacaacaaaaaaattaaaagagattggtttaatgaaaaagacggagagaactggtacaactgtccaattttggccatcaaaaaaaattttttccaatacaactcttatacttaaaacactagaaaatagagttcgccaattagcttttctaaactctaacgtacgcattacattatctgatatgcgcacatctaaagtagaacctattgaattcttttatcaaggaggtttgacagcatatgtgcaatttcttaattccagaaaatcgactttaaataaaattataccttttaatggtgagtcaaacggaattaaagttgaaggcgctttacaatggaatgatggatacaatgaaaatatgctttgctttactaataacataccccaaggagatggaggaacacatttacagggttttcgatcagcactgacacgctcattagttggatactcaaatacagttgcagttgctaaaaaaggcaatatcaccatttcaggagacgatgctagagagggcatgacatgtgtactatctgtaaaggttccagaccctaagttttcatcccaaaccaaagataaactagtttcgtctgaggtaagaccagttgttgagaaaataatatctgaacaattaagcgcttggttagagcaaactcctggagaggcaaaaaagttagtttcaaaaattattgaggcagcaagtgccagagaggcagcaagaaaagcaagagaacttacaagaagaaaaaatgtattagagacatcatcacttccgggaaaattagctgattgccaagaaaaagatccatcaaattcagaattatttatagttgagggtgactcagctggaggctcagccaagcaaggccgtgatagggtcactcaggctatacttccactaagaggtaaaatattaaatgtaattaaagcaaatcctcataaaattttagaaaataatgaaatctctgcacttataacagccatcggtgctggatatggtaatccaccaaaagataaagaatacaatccttctgattatttcaatcctgaatcaatgcgatatcataaaattgttatcatgacagacgctgatgttgatggaagtcacataagaacgctgctactcacatttttctatcaattcatgagagatattataaccacaggtcgtttatatattgctcagccacccctatataaagtaaaaaaaggaaatgctgaaaattacttgttagatgatagagagttaacaaagtttttattgttaaataacaaggatgatcttgatttcaacatttacaataaaaagaaaaaaattcagctaaaagaggaacagttaaacgaattaatagatttagcttctcgtgcaaattctgcttatcaaaacttagatcttacatatttagatgcaaagttttttgatcaaattctaaatacagggttattttttcatgattttcatccaaataagatagaaaagtcacaatttaaaattttcttatctaacttaaatcaagtttataaattagaaaatattaaatttacatttcaaagtatgattagtaatgaattaatttttttacaagaaaaagagggctacaataaaataataaaggtcgctttagataaattattacatctaagagagtttatttcttcagacagcttatctctttataataaaataggctttgcaaaatctacagatactttttttggtatttctaaactttcttcaaaagaaatctttaattgtaatggactggttgaattttttaccactctttttgaaatgagtaaaaaaggccaatcaattagccgttataaaggtttaggtgaaatgaaccctgatcaattgtgggaaacaacattagatagaactaataggaagttgcttcaagttaagctcgaagaccagatcaatgctgaaagacagttgatcatgttgatgggcgatgacgtgactgatagaaaaaactttattcaagataactcagtcaaagtagcaaatttagatatttag

SEQ ID NO: 295540 - DNA, 2758 bp, Unknown
  Bacterial polypeptide expressing nucleotide sequence isolated from the Sargasso Sea
atgactgatctggcatcatctatttcgccaattaatatcgaagacgaactaaagaattcgtaccttgattacgccatgagcgtcatcgtgggacgtgcattaccagacgtgcgtgatggccttaagcctgtgcatcgccgcgtgctgtttgccatgagtgaattgaagaacgattggaacaagccgtacaaaaagtctgcccgtgtggttggtgacgtgatcggtaaatatcacccccatggtgattcggcggtttacgatactatcgtacgtatggctcagcctttctctctgcgttacaccttagtcgacggtcaaggaaacttcggttcggttgacggtgactccgcagcggcaatgcgttataccgaaatccgtatggacaagttagcgcaccagctcctcgccgatcttgaaaaagaaaccgttgactatgtgcccaactacgatggcacagaacaaattcccgctgtattaccgacacgtgtccctaacctgttaatcaacggttcatcgggtattgcggtaggtatggcgacaaacattccgcctcacaacttaaccgaagtggtcaaaggctgtttagcgctgatcgccgatcctgcgctgtctattgaacagttgatggaacatattcctggtccagacttcccaacggcggcgattatcaatggccgtaaaggcattatcgatgcatataagacgggccgcggccgtgcagtgatgcgcgcactggctgaagtcgaaaccgaagataacggtcgtgaacgcattatcgtcaccgaaattccttatcaggtgaacaaggcgaaactcatcgagaaaatcgctgagttagtgaaagataagaagattgaaggcatcagcggcctgcgcgacgagtctgacaaagacggtatgcgtatcgttatcgaaatcaaacgcggcgaagtgggcgaagttgtcctgaacaacctctatgcccagacacaaatgcaatgttcttttggtatcaacatggtggcattgaccaatggtcagcctaagttgttcaacctaaaagaaatgctcgaatgctttatcctgcaccgacgtgaagtggtgactcgtcgtaccgtattcgaactgcgtaaagcgcgcgaacgcgcccatattcttgaggcattagcggtcgcactcgccaatatcgatccgattattgcgctgatcaaagcctcaccaaccccagctgatgcgaaagtcaaactggttgagcagggctgggcacttggccatgtacagggcatgcttgaaaaagcgggtgacgatgcggcgcgtcctgaatggttagagccagaattcggtatccgtgatggcttatattacctgactgaacaacaggctcaggcgatccttgagctgcgcttacaccgtttaactggtcttgagcacgataagatcatcgccgaatacgaagagctgctcgagtttattgcaggtctgctgtttattctgcgcagccctgagcgtttgatggaagtgattaaagaagagctggaagaaattctggctgaatacggtgatgctcgccgcactgtcatcaacgccaatgaaattgatatgagtcttgaagacttaatcaacgaagaagacgtggttgtgactctgtcacacttaggttacgccaagtaccaaccgctgagcgattaccaagcccagcgccgtggtggtaagggtaaagccgcaactaaagtgaaagacgaagatttcgttgaaaaactgctggttgcgaacacccacgataccattctgtgcttctcagacttcggtaagatgtactggctcaaggtctatcaattaccgctggcgagccgcacatcgcgcggtcgtccgattgtcaacttactgccgctgtccgatggagagcgcattacggcgattctaccggtgcgtgaatacgcagaagataagtacatcatcatggcgacctctaacggtaccgtgaagaagactgcactgacggcttacagcaacccacgtgctaacggcattatcgccgtgaacctgaaagacggtgaccaactgatcggtgtcgatatcaccaacggtgatgatgagatcatgttgttctcgaacgaaggtaaagtggtccgctttaaagaaggcgaagaagtggccgttctcgatgaaaacggtaacccagtgctggacgaagaaggcaacccacaaatcaacttcaagggtgtgcgtccaatgggccgcggcgcgaccggtgttcgcggtatcaagcttgaagaaggtcaaagagtggtgtctctcatcgtacctaagggcgatggcgctatcttaaccgtgaccgaaaacggctacggtaaacgtactgaactgtctgaatacccatcgaagagccgcgcgaccaaaggtgtggtatcgatcaaggtgagcgagcgtaacggtgcggtggttggcgcggtacaagttggcggtaatgacgaaatcatgctgatcagcgacaaaggtacgcttgtgcgtacgccagcgaacggtgtgtctattatcggccgtaacacccaaggtgtgaccattatccgtaccgcaagtgacgagaaagtggttggtctgcaacgtatcgatgagatccaaggcgacgaagatgaagtcgagttggatgaaaacggtttgccaatcgtcccagttgtcactgaaggtgactctgttcatgaagagcctttagaggatgaactggaagaagaattagacgaagacgaagagcttgacgacgagcaagacgaagactaat

SEQ ID NO: 295541 - DNA, 1894 bp, Unknown
  Bacterial polypeptide expressing nucleotide sequence isolated from the Sargasso Sea
ttggccaagaatacatacgactcaaaagcaatagaagtactttccggtttggaccctgttagaaagagacctggaatgtatacagatacatcttgcccaaatcatttaatacaagaggttttagacaatgcagtagatgaggctatagccggacattgctctaatataaagattaaacttcataaaaatggtgttattgaagtttctgacgatggaagaggcatgcctgtagacatacatccagatcataaattaagcggggttgaattaatactttgcaagcttcatgctggtgcaaaattttctggtgacgaatatagtttttcagggggccttcatggagtaggcgtttcggtagtcaatgcattatctgagaaccttcaagtaaatgtaaagagagattctaaagaacacgaaatgcattttaataatggaaataaaaaaagtgacctaaaggttgtaggtgatgttggtataagaaatacaggtactaagattcaatttaaaccaaatgctaaatattttgaatcaatagatgttaataataaacagcttaaacatcttttaaaagctaaagcagttttatgtccaggacttacaattgatttttttgatgagaagaaaaaagaaaaaattaaatggttttttgaggatgggctaaaaagttatcttgaggaagcttctagtgaaagcaatttattactggatgagtcgatattaaccgcaaagaaatctaaagagcatgaagtagaatttgtaataaattggtctgacaaaccatcaaaaaataaattagatgaaacctacgtaaatttaataccaactgcccaaggtggatctcatctaaatggatttaagtctggtttgctagattctatgaaggaattttgtgaaataagaaaacttctacctaaaggtttaaaacttaatgcggatgatgttatcaataatgctatttttgttatttcatcaaagatgcagaatccgcagtttgctggtcaaacaaaagaaagacttgattcaaaagagcatatgtcgtttgttagtagttcaacaaaagatgtgctgagtatttggtttaataaacatactgaagagggagaaaagattgcagaattagcaattatttcggcccaagctagagctaaggctacaaatactgttgaaagaaagaaaactttcaaaggtccagctcttcctggcaagctttcagattgtaatagtgaggatttaaataagactgaattatttcttgttgaaggagattctgccggcggttctgcaaagcaagcaagggagagatcttttcaagcaataatgcctttaagaggaaaaattttaaatacatgggatttagaaagtgatgagattattaaatctcaagaaataaagaatcttgcaactgcaataggtgtgatgccaggtaattctgacatttcttcattaagatatggaaaaatatgtatattagcagacgcagattccgatggactacacatagcaacattattatgtgctttatttttaagacatttcaaacctttagttagtgatggacgtatttatattgccatgcccccattgtatagagttgattgtggcaaagaggttttatatgctctcgatgaaaaacaaaaggaacaaatagttagtgaattcaaaagtaaaaagggtaaaccaaagattaatattcagagatttaagggcttaggagaaatgaatccatctcaattaagagaaactgtcatggatccagaaacaagacaattagtcagactatctatatcttcaacagacaatgccaatgcgatgatggacttacttttatcaaaaaagaatgctccagcaagaaaagaatggctagaaaaaaagggatcacttgtaaggatctaac

SEQ ID NO: 295542 - DNA, 1691 bp, Unknown
  Bacterial polypeptide expressing nucleotide sequence isolated from the Sargasso Sea
tggttctattgatggcgatcctgctgcggcgatgagatatactgagtcaagacttggaaaaatttctcaatatttaatagatgatatagaaaaaaatacagtttcttttaaaagtaattatgatgaaacagaattagaaccagttgtacttcctgctcaatatccaaatttattagtaaatggtgcagggggtattgctgtaggtatggcaacaagtatacctccgcataatttaggagaagtaattgatggaactttagcattaattaaaaataaagacattaaagtaaatgaattaatgaagcatatacctggtcctgattttccaactgggggagtaattataggaaaagatattattaaacaaggttacaaaattggaaggggatcatttaaaattagaggagaaataaatgtagaaaatttaaaaaatggtaaagatagattggtgattacttctattccttatcaaataaataaatctaatctgaatgaacgtattgctgaattagtaagagaaaaaaaaattgaaggaattagtgatattagagatgagtctaatagagaaggtataagagttgctatagatctaagaagaaacgttgaaccagaaacagttaaaagacaactttacaaatatacctctgtggaaagctcttttggatttaattcattagcaatcgtagaaaataaacccaaaacttgtagtttaaaagattttttagaaaattttattaaatttagggaagacgttgtaattaaaaagactaaatatgatttaaagaaagctgaagatagagttcatattttgattggtttatcagtaagtgtagaaaatattgataaagttataaaaataattaaatcttccaaaaatcccgaggaagctaaaaattcactattaaaaataaaatggaagattaataaatctttaaaacttattaaattagttaatagtaaaaattcaaaaacttcttatttattatctgaaaatcaagttatgtctatattggaattaagactacaaaaacttacagctttaggtattaatgaaattgaaattgaaattaaaaagctatcagaattaattgttaattataaaaaaataattaattcaaaaaatgaattattaaaagtcataagcaatgatttaaaattaattaaggaaaaattttctgaacctaggcgtacgaagataatagatgctgtattgaattataatatcgaagaaacaattcaaaaagagtctgtaattataactatcactctacagggctatattaaaagaggtgcattaagtaatgttaaacagcaaaaaagaggtggaaagggaaaaactggaattaaaacaagagatgaagattctgttgtacaaacactttctgttaacactcatacatcagtattatttttttcgacagaaggtttgtcttataaaattaaagcatggaaaataccagaaggatctccatcatcaaaaggtaagtctttatttaatattttacctttaaaaaatcatcagtctgtaagctcaataatgccatttccagatgacaatgttgatacaaaaaacatgcatattatatttgctacaagtaaaggaaaaattagaaaaaataaccttgatgattttacatcaattaatgcatctggaaaaatagcaatgaaactagatgatggagataaaatta

SEQ ID NO: 295543 - DNA, 1046 bp, Unknown
  Bacterial polypeptide expressing nucleotide sequence isolated from the Sargasso Sea
agaaaaggcacaaagagcaaaaatgtactcttctgttgagattggatctctaattacagcattgggatgcggcattcacgatgaattcgatatggaaaaccttagataccataaaattattatcatgactgacgctgacgttgatgggtcccatatcaggacactcttattaactttcttctatagggagcttcaagaccttatcaacggcggctacttatatattgcacaaccacccttgtataaactaaaaaaaggcaagaaagaggaatatgttctaactgacgatgagctaaacaatttaatacttagcaatgctgttaagggtacggaggtcagggctaaaaataagaaaaaaggaattgagggagacgggctcttaaacaccattcttgactattctaattcattatctgtgattgaaaaaattgagaaacaggcaggaactatcgcggcaaaagcaatttcgcttcataaaccaatcaccaaaacagaagctaacaataaaaagaagctagagacatgggttaagggtctatcaagaacagcatcaaagatagcaaaagagagaggctataaagcatctgtaagcatagactatgacgacgacggaataggttacataaacacagaagaagaaatcggtggagtaatccatcacggcaagattgccaattcttttttaagatctaacgattacaaagtttttggccgggtacaaaaagcacaaaaaacattctcaggccctgtggtcatagataacggaactgaaattacagaatatgccaacattgaggattgccttaaccaaattgttaacgcctctaaaagaggccttaatgttcagcgctacaaggggcttggcgagatgaatccagaccaactttgggaaacaacgcttgacccaaccacaagatctttgttgcaagttaaggcggacgacgatgcaggcctgacatttgaaacccttatgggagacgaagtaccaccaagaagggagtttatcgaagaaaatgcattaaatgccggcaatgttgatgtttaag

SEQ ID NO: 295544 - DNA, 1339 bp, Unknown
  Bacterial polypeptide expressing nucleotide sequence isolated from the Sargasso Sea
agtaacctttttaggggatgacgctcgcgaaggattgacttgtgttttatctgtaaaggtaccggacccaaagttctcgtcgcaaacaaaagataagttagtttcgtcagaagtgagaccagttatagaagggttagtttatgaaaagttatcggattggtttgaagagcaccctgcagactcaaaattgattttaaataaaataattgaagcagccattgcgagagaggcagctagaaaagctagagagttaactcgccgtaaatcggcgatggatatcgcaaacctacctggaaaattagcagattgccaagaaagagatcctagtaaaactgagttgtttttggttgaaggagacagtgcgggtggtagtgcgaagcaaggtaggtctcgttataatcaggcagtgttaccgttgagagggaaaatccttaatgtagagcgagccagagatgatcggatgctttcaagtcaagaaattggtaccttgataacggcattgggtacaggcatcggacgcgatgagttcgatatagaaaagttgcgttatcataagataatcataatgacagatgctgacgtggatggtgcgcatattagaacgcttttactgactttcttctttagaaaaatgcgacaacttgtggacggagggtttctatatatagctcaaccacctttatataaagtttctcgagggaaatctgaagtttatcttaaagatgaacaagcgctggagcgttatttaattcaaatggggctcgaaaatgccacattggaaaagcagggcggaactgtaatcgccggtagtgagttggaaaatgtattagaacaggctcgcaaaataagaattactttaaattcttttccagggaaatatacaagatctgttttagagcaggcagcaatttgcggggttttcattcctggagcgatggaggaaaatcctgcaggaatagcaaaaaaattggctgaaagactggatagttgctcacctgagtttgaacgaggttggaaggttgaactgaccgatggtaacgacgtgaaattacaccgtatcattagaggagtacaggaagtaaaaactttagagaatgaagtttttagatcgcctgaggctgaaaagcttaatgaaatgctcagccaaaatatagatatttataacgagccttcaaagataaggactaaaacgagagaagtatttataaattcaccaacagaactttttgaagcgattttggctgatggtgaaaaaggattaactcttcagaggtataagggtcatggtgaaatgaatcctgatcagttgtgggaaaccaccctcgatcccgatgccagg

SEQ ID NO: 295545 - DNA, 374 bp, Unknown
  Bacterial polypeptide expressing nucleotide sequence isolated from the Sargasso Sea
tatgcctaaatcaaaaaaaaataccaatacaaaaaattacgattcatcaaacattaaggtcttaaaaggattagacgctgtccgaaaaagacctggtatgtacattggtgatacagatgacggcacaggcctgcaccacatggtttttgaggtcgttgacaactcagttgacgaggcattggcgggtttttgtacacatatagaggtaattattcatgaggatgactctataactgtgaaagataacgggagaggcatacctgttgataaacacaaaacagagaaaacttctgctgcagaggtgattatgactgtgttacatgctggcggtaagtttgacgatgattcatacaaggtttctggaggcttacacg

SEQ ID NO: 295546 - DNA, 2431 bp, Unknown
  Bacterial polypeptide expressing nucleotide sequence isolated from the Sargasso Sea
attttatatgccatgttagaaggtggttatgattggtctaaaccttacagaaaatctgcaagagttgttggagatgtaatgggtaactatcatcctcatggagattctgcaatatatgactctatggtaagaatggctcaagatttttctatgagagttaaacttgttgatgggcagggtaattttggttctgtggatggagatccacctgctgccatgaggtacaccgagtcaagattaagcaaggcctctgagcttctgcttagtgatattgataaagagacagtaagttttaaccctaattatgatgatactcaatttgaaccttcagttttgccagctgaatttccaaacattttagttaatggtgcaggtggtattgcagttggaatggctacaaatattcctccacataatccagttgaagtggttaacgcttgcaaagctcttttggaaaatgaagaactaacggttgatgaattacttgaaattattcaaggacccgattttcctacagcaggtcttattatggggagaacaggcataagggatgcatatttgtcaggcaaaggaagtataattatgcgttctagagccgagataaatatatcatctaaggatagagaaagtattattgtctctgagataccttatcaggttaacaaggcacaattgttagaaaaaataggtgaattaataaaagataaaactattgaaggtatatcagatatcagagatgagtctgatagaaaaggaatgagaattgtaattgaaattaaaaaggattctcaagcagatatagtgttaaatcaattatggaaacataccagacttcaaactagttttcctataaacatgctcgctttggataatggtcaacctaggcaaatgggcttaaaggatatattaatatcttttattaattttcgtaaagaagtggttgtaaaaagaaccaaatttcttttaaataaagcaagaaatagggctcatatattagcaggtttattagtcgctttatccagtatagatgaaataattcaaattataagatcatctaaggaccctgaggtagcaaagcaaaaattatgtgagaacctttggccagcttcagatgttgaagaccttattaaaattataagtgatcctgtttataaagtgattgatcaaaagtataaactctctgaattacaagcaaaatcgattttagagttaaggttacaaagattaacaggcttagaagttgaaaaaataaaagaagaaatagagactttagcagaagatattaaagagtatttgttaattttatcagatgatttgaaattaaaaaatgtattattgtctcaatttgacttagtaattaaaaaattattttctgaaagaaaaactgaaatatctgatagtttaattgatcaagaagacgaagacttaatccaaaaagaggatatggttgttacggttagtcatcgcggatatataaaaagagttgctctttcaacgtatcgtgcacaaaggaggggtggtaaaggaagagctggtatgaaaattagagatgaagatatggtaacttctctctttgtaaccgacactcatacaccaatattatttttcacttcatctggtatggtttatcaattaaaatgctataagttaccagaggcagccccacaagctcttggaaaggcaatggtaaatattttacctttatctcaagacgaaaaaattcaaacagttatgccaatgccatcgaacaaagataaatggaacgacttacaaataatttttgctacaaaaaatggaaatgtcagaagaaatcaacttagcgactttattaacattaggcaaaatggtaaaattgctatgaaattacacaataatgacgaattagtatcagttttaccttgcgataaagatgataatatatttattgccactagacttggtaaagcaataagattcgatattaatgatgtaagaatatttgtaggaagggactcatcaggagttaggggaattaaacttaaacctgatgactttgtagtttcaatgtctttaattccaaaagatgaagaaaaatatgttctttctgtaacagagaatggttttggtaaaagaactctaattgatgactatagaaggactaatagaggtggtcagggtgttgcgaatattgaatgttcagacagaaatggtcctgttgtctcatcatacattgtttcttcattagatcagataatgctagtaacaaatgcaggtaaacttataagaatgaaaatacatgaaaatgaaaacaactctatacgtgtcactggtagaaaaacacaaggggtaaagttatttgacgttgacgaagatgaaaaggttatgtcagttgcattgcttttagaaagtgatgatgaaaatgaagaagaaaatgaaattaataaaaattaat

SEQ ID NO: 295547 - DNA, 2521 bp, Unknown
  Bacterial polypeptide expressing nucleotide sequence isolated from the Sargasso Sea
atgagttcgtcatacctatcttacgctatgagtgttatagtaagtagggcactacctgatatcagagatggattaaaaccggttcatagaaggattatttatgccatgcacaaaggcggatttgattggtcaaagcaatttagaaaatcagcaagaattgttggagatgtaattggtaaatatcatccacatggagatcaagcagtttatgatgctctagttagaatggttcaagaattttcaatgagcttaccattagttgatggccaaggtaattttggatctatcgatggagatccaccagcagcaatgaggtatactgaaactaaacttgctaaggtttcacaatttttaattgatgacatagaaaaaaatactgtttcattcaagagtaattatgatgaaacagagcaagaaccagttgtattgcctgctcaatatccaaatcttcttgttaatggtgctggaggaattgctgtaggaatggcaacaagcataccaccccacaatttaggtgaggttgttgatggaactttagctttaattaaaaataaagatattaaaattaatgaattaatgaaacatatcccaggcccagattttccaacaggaggattaattattggtaaggatataattaaacaaggctataaaactggaagaggctcttttaaaataagaggggaaatctctgttgaaaatctaaaaaatggaaaagatagacttgtagtctcatcaataccttaccaaattaacaaatccaatttaaacgagagaattgcagaactagtaagagataaaaaaattgagggtataagtgatattagagatgagtctaatagcgaaggtataagagtatcaatcgatcttagaagaaatgttgaaccagaaactgttaagagacaattatataagtatacctcaatagagtcatcctttggctttaattcattagcaattgttgatcaaaagcctaagacctgcaatctcaaagattttttagaaagttttttaaaatttagagaagatgtagttataaaaagaactaaatttgatcttaaaaaagcagaggagagagttcatattttattaggattatctgtcagcgttgaaaatatcgataaagttattaaaattatcagatcctcaaaaaatcctgaagaagcaaaaaattcacttttaaaaacaacttggaaaataaaccaagcatcaaaacttattaaattggttgatagtaaaaattacaaaggaaagtatgttttatccaaagatcaagttatatcaatattggaactaagacttcaaaaattaactgctatcggaattaacgaaatagaaatagaaatcaaaaaattagctgaagagatttctaaatataaaaagattataaattctaaaaatgaattgttaagagtaataagcaacgatcttcagacaattaaagataaattttcagtgcctagaagaacaaaaattatagatgctgtcttaaattatgatatcgaagaaacaattcaaaaagagtcagtaataataacaataacacttcagggatatattaaaagaggagccctaagtggagtgaaacagcaaaaaagaggtggaaaaggaaaaacaggaattaaaacaagagaagaagactcagttgttcaaacattatctgtagatacgcatacatcattattatttttttctacagagggtttagcttataaagtaaaagcttggaagatacctgaaggatccgcttcatctaaaggtaaatcactctttaatattttacccttaaaaaatcatcaatctataagttcgattatgccttttccagatgaagacgttgataaaaaaaatatgcatataatattcgcaactagcaaggggaaaataagaaagaataatttagaggatttttcatcaattaatgcttctggtaaaattgcaatgaaattagactctgatgataaaattgttggtgtaaaaatatgcacagatgatcaagatataatgctaaatacaaaattcggtaaatgtattaggtttgaatctaaaaaactaagagttttcaagggaagatcttctaaaggtataagaggtattaatctttcagaaaaggatacaattgtttcattatctataattgataaagacgatattaaaaaaaataaaagtaaaactaaagatgaaaaatctgaggttaaagcaaaagaaaaatttatcttatcaatcacagaaaatggttatggcaaaagaacatctcattacgattttagagttacaaatcgaggaggtaaggggataatcggtattgtgaattccccaagaaacggtaatgtctcatcatccttccctgtgtttgagggtgatcaaatattaatttcaacaaataaaggtagagttataagaactgctgtgaaggaaataagaattgccggaagaaacacacagggagtaagaattataaaattaactggcgatgaaaaggttgtctcatcaattaaattagacgataatttggtttaat

SEQ ID NO: 295548 - DNA, 1623 bp, Unknown
  Bacterial polypeptide expressing nucleotide sequence isolated from the Sargasso Sea
gtcttacaagagaaaacattggtattggttttgcaaacaccataaggcaaaaagatgggggaacacacttagctggttttaggggcgcgctcacaagaacaataaatacttatatagacaaagaaattgcaaaggctgatatatctgtttctggagaagactgtagagagggcatgacagctataatttctgttaagcacccagaccccaagttttcatcacaaaccaaagataagctggtctcttctgaggttaaaggcgtagtcgaatcagtagttaacaaacaccttaaggagtttttaatagaaaaccccaacgaagcaaaaattataatcagcaaaatagttgactctgctgcagcacgagaagctgcaagaaaggctagagaaatgacacgtagaaagggagctcttgatattgctggattgccaggaaagcttgcagattgtcaggaaaaagacccagccttaagcgagctattcatagttgagggagattctgcaggtggatcagcaaaacaagggagagacagaaaaacacaagcaattcttcctttaaagggaaagatacttaatgttgaaaaagcacaaagagccaagatgtattcatctgcagagataggcacacttatcaccgcactgggttgtggaatacatgacgaatttgacttagaaaaactcagataccataaaataatcataatgactgatgccgatgttgatggttctcatattagaactctgttgctcacattcttttacagagagcttgaagagttaataaaaggcggctatttatacattgcccaacctcccttgtataaacttaaaaaaggaaaaaaagaggagtatgtccttactgatgaggagctaaccaatctaataataagtaatgctgttaagggcatgttggtaaggcccaaatcaaagaaaaaaggtttagaaggggacggtctattaaatacagtccttgattacgctcaatcagaaaacatcatagaaagactatctaagcaaacaggatctattgcagcattagcaatgtcattacacaaaccaattacaaaaacagaggcaaataataagaaaaaactagaaacatggattaaggggctatcgaggaccgcagctaaaattgctaaagacaagggttatagagctatagtttctatcaattacgacgatgacggcatagcttaccttaatacagaagaagaaatagggggcgtgaaacattttggaaagattactagcgcatttctaaagtctaatgactacaaagtatttgatcgagttcaaaaatcaagaaaacaatttactggcaaagttctaattgagaatggcgaggacccaagagaatatgagaacattgattcctgcctatcggatatacttttatcctccaaaagaggtcttaatgttcagagatataaggggctcggggaaatgaacccagatcaattatgggaaacaacgcttgatcctaacaatagattattactacaggtcaaggcagatgacgacgcggggctaacatttgaaacactgatgggcgatgaggtgccccctagaagggagtttatagaagataacgctctaaatgtagctaatatagatatataat

SEQ ID NO: 295549 - DNA, 1158 bp, Unknown
  Bacterial polypeptide expressing nucleotide sequence isolated from the Sargasso Sea
aatgccaaaaaatttagaaaaaactaaaaatcaatcatacggagcagactcaataagagtattaaaagggttagatgcagttagaaaaagacctggaatgtatattggagacaccgacgatggatctggtcttcatcacatggttttcgaagtcgtagacaatgctatggacgaggcattagcaggttattgtaaaaatatatatataacaattaataaagacaatacagttaccgttgaagatgacggaagaggcatacctgtagatactcataaaggagaaaaaaaatcagccgctgaagttattatgacacaactgcatgcaggtggaaaatttgatcatgattcttacaaagtatcgggtggtcttcatggagtaggagtctcagtagtaaatgcactatctgaaaagttagaactaaatatttttagagataaaaaagagtattctattatttttaaagatggaaacgcagttaagcctcttaaagaaattggaaattcaaaaaaaaatggtacaagaataactttcttaccatcaaaaaatattttttcttcaattaaatttagctcttcaattttacaaaaaagaatgagagaacttgcttttttaaataaaggtataaacgtcactctgatagataacacttcagctaaatctaaagaatttgtgaacaaatatgatggcgggatacttgaatttgttaaatatattaatcaaaaaaaacctatcttggttaataaaaatgaaaaagtagtttttaaaaaacctatatttattacagctcaaaaaaatgatgtaattgttgactgttctttagaatggaatgctagttattccgaggatgttttagctttcactaataatatacaccaaaaagatggtggaactcatttgttgggctttagaagtgctctaactagggtaatcaacaaatattcttctgaaaaaaatactaataaaaaaaataaaattactttatctggagatgacatcaaggaaggtttaacagctgtactgtctataaaaatgcaggatccaaaattttcttctcaaactaaagataaacttgtttcgtcagaaataaggcttatagttgaaagtattattgctgataaaatttctacatggttcgatcaaaatccaagtgtagcaag

SEQ ID NO: 295550 - DNA, 2530 bp, Unknown
  Bacterial polypeptide expressing nucleotide sequence isolated from the Sargasso Sea
catgacagataaaatttctcagatcaacttagaagatgaaatgaagaaatcctatctggattatgcaatgagtgtcataattggaagagcattgcctgatgtcagagatggattaaaaccagtacatagaagggtactctatgccatgaaagtacttgggaacgaccatacaaaaccttataaaaaatcagcaagaattgtgggtgatgtaataggtaaatatcatccccacggcgacagtgctgtatatgaaactattgtaagaatggctcaagatttttctcttcgatataccctcgttgatggccaaggaaattttggttcaatcgatggtgatcgagcagctgctatgcgatatacagaagtcagaatgcagaaaatcactcaggaactacttgctgacatcgataaagatacagttgagttcattcctaattacgatgaatctgaatgggagccatcggtcatgccaacaagattgcctaatcttttaataaacggttctgcaggaattgcagtgggtatggctactaatattcctccacataatcttaaagagattatagacggttgtttatttatcttagataacgatgaagccactatcgatgatcttataaagcttataccagctcctgatttcccaacagctgctactatccatggtattgatggtattaaacaagcctatgaaacagggagaggtaaggtttatgtaagagcgaaaacttcaattgaggaaaatggtgatcgcgaaacaatcatcatttcagagcttccatatcaagtcaataaagcacgtttaattgaaaaaatcgctgagctagttagagacaaaaaattagaaggtatttctgaaattcgagatgaatcagataaagatggtcttagagttgctatagaccttaaaagaggaacggtttcggatgttcttttgaataacctatataaacaaacagttctggagagcacgttttctatcaatatggttgctttatcaaatggtcaaccaaaattaatgaatcttaaaagcatgctggatgctttccttggtcatagacgtgatgtggttactaagagaacaatttatcagctcaatcgttccatcaatagggcgcatatacttgaaggtcaaacaatagctctcacaaatattgacgaaatgatcgcaatcatcaaaaaatcaaaaacgccagctgatgctcagaaagctttggtctcaaaattatggaaggtaggaaaagtcaaagagatgattaaaaaagccgggaatgtttctacagtgcctaaacatcttataaatatcgaaaagtttggcatagaaaaaggcggctatcgtttgtcttcagaacaagccaaagctattcttgatttaaaactcaatcgattaacagggctcgaacaagaaagtatttttaatgaatactctgagctacttgaggatattaagcgattcaccttaattctctcgaatcctgatgagctgaaatctgtcattagaactgaacttattgaaacacaggaaacatatgctgatgaacgaaggacggagatcgttgaattctactcagatcttaccgatgaagatcttatacctgaagaagatcttattgttaccttatcaaaagagggttatgcaaaaactcagccgctcgacacctatcaagcacagaatcgtggcggaacaggtaagcgtgcggcctccctcaaagatgaagactttgtatcaaaattatttgtggcaaatacacatgatactttgttgtgtttctctagttatggaaaagtttattggataaaagtttatcgacttcctagaggaggaagaaacgcaaaaggtcgaccaattgtaaatctattaccacttgaaaaagacgaaagaatacaagctgttcttcctgtcaaagaatttaatgatgatcaatttatattcatggcaactgagtcaggtagtgttaagaaaacgaaactatctgcttactcacgacctatgagatcaggtattaaagcaataaagcttagagaaggtgaccgagtagttaatgctgaaatcactgatggatcgaaggaaatcatgcttttttcaaattctggcaaatcaatccgtttcaaggaatctgatgcaagaccaatgggtagagtttcacagggtgttagaggaatgagaatcgaaaaagatcaaaaaataatttctctcgttgtaattgaagagggaaatattcttgtcgctactgagaatggctatggtaaacaaaccttaaaagatgaattctcgatccagaaaagaggcggtaaaggtgttattgccatccaaacatcaaaaagaaatggaaacctcattggagcaaatcaagtttgtactggagatgaagtaatgtttatcagtacatccggaaatcttatacggacaagaacagacgatatatccgttattgggagaaatacacaaggcgtaaggcttattagactatccgaagatgacaaattattggctatggaaaaagtcatcagcgaagatgatgaagaataa

SEQ ID NO: 295551 - DNA, 1130 bp, Unknown
  Bacterial polypeptide expressing nucleotide sequence isolated from the Sargasso Sea
aatggattttgctaaagaaattcttcctgtaaatattgaggacgaactaaaacaatcatatctaagctatgcaatgagcgtgattcatggaagggcacttcctgatgttagagatggtttaaaacccgttcatagaaggatcctttatgcgatgcatgatttaaaaaataattataataagccttataaaaaatcagccagagttgttggcgatgttattggtaaatatcatcctcatggagacactgcagcatatgatgcaattgttaggatggctcaagatttctcaatgagatataccttaatacaaggtcagggtaattttggctctatagatggcgatcctccagcagctatgaggtatacagaagttagaatgcagaaaatctctgacgagattctggcagatttagaaaaagaaactgtagcattttcagaaaattatgatggctccgaacaaatgcctgatgtaatgccaaccaaaataccaaatcttttaattaatggatcgtcaggaatagctgtgggcatggctacaaatgttcctccgcataatcttactgaagtcattaatggttctttaaagctgcttgagaatccaaaactatctattgatcagataattgattcagttagcggccctgatttcccaactgggggaactattgatggaaaaatgggtatctatgaggcatataaaactggaagaggaataatttatgtcagatctaaatcaaaagtagaggaaagcaaaactggaaagaaatcccttgttatctatgaaatacctttcatggtaaataaagctagaacccttgaaaaaattgcagaacttgtaaaagagaaaaagattgatggaattagtgaaattagagatgaaagcgacaaagatgggttaagaatagttatcgacgtaaagaagggagagtccgttgaggttttagaaaataatctttttgcgcaaactcagcttgaacaatcatttggaataaactttaccgtcttagttgatggtcaaccaagagtacttaatctaaaagagattcttcaggaattcttgaaacatagaaaagatgttgttttaaaaagaacaaaattcgagcttaggaaggctaaggaaagaggtcata

SEQ ID NO: 295552 - DNA, 1107 bp, Unknown
  Bacterial polypeptide expressing nucleotide sequence isolated from the Sargasso Sea
aatggcaaaaaaaaataataaagccaaatatgattcttccaacattcaagttctaaaaggtttagaggcagtcaaaaaaagaccaggtatgtacattggggatactgatgatggttctggtttacatcatatggtttttgaagttcttgacaactgtattgatgaggcaatggcaggacactgttcagaaatttttgtgaaaattaataaagatgaatctgttacggttgaagataatggaagaggaattcctgttgacgttcacaaaaaagaaggagtatctgctgctcaattaattttaactacccttcactctggaggaaaatttgatgacaactcatataaggtttcgggagggcttcatggcgtaggtgtatcagttgtaaacgctctttcaaaaaaactaatcttagaagtgcatcgagatggcggcgaatatttccaagaatataatgaaggcaagccaaaagcaaaattaaaaaaagttaaaaaatctgaaacaacaggaacaaaaattaccttttacccttcaaataaaatatttacttcaacaaattttgatattgaaaaaatacataaaaggatacaggagctctcatttttaaatgccggagtttcaatcacagtagaagataaaagaagtggcaaatctaagaaatttaaaaacaatggtgggctgtcaagttatgttaaatatttaagaggaaggaagcaggaagtttctgaagtctttgaatgttcagcaacagaaaatgatgttggtgtagaaatagcaatgcagtggacagattcatattcagaaaacgtactatgttatacaaataatattcctcaaaaagatggaggaactcatttagctggttttaggggtagtctaactagagtgttaaagtctttcattaaaaaagaaaatgctaaaaaaacaccaaccgaccttcttggagaggatgttagagagggtttgatggctattatttcagtaaaagtgcctgatcccaaattttcttcacaaacaaaagaaaaattagtctcatcagaggtaaaaggtgtagttagttctgtgtttagtaaatattttaacgattttcttttagaaaacccaaaaaa

SEQ ID NO: 295553 - DNA, 385 bp, Unknown
  Bacterial polypeptide expressing nucleotide sequence isolated from the Sargasso Sea
tatgagcaaaaattcaaattatcaagctgactcaataaaagtattaaaaggacttgaggcagtccgtaaaagacccgggatgtacattggtgatactgatgatggaaccggtttgcatcacatggtctatgaagtggttgacaattctatagatgaagctcttgccggctattgtaaaaatattaatgtagatataaattctgataatagcattaccgttcacgatgatggaagaggaattcctgttgacactcataagagtgaaaaaaaatctgcagcagaagttattatgactcaacttcatgcaggaggaaaatttgaccatgattcttataaagtttcagggggattacatggtgtaggagtttctgtagttaatgcactt

SEQ ID NO: 295554 - DNA, 1206 bp, Unknown
  Bacterial polypeptide expressing nucleotide sequence isolated from the Sargasso Sea
gatgagttcatcatatttatcttatgcgatgagcgttataataagtagagctctacctgatattagagacggtttaaaacctgttcacagaagaattatatatgctatgcataaaggtggttttgattggtccaaacaatttagaaaatctgcaagaatagttggtgatgttatcggtaaataccatcctcatggggatcaagctgtatatgatgctcttgttagaatggtacaagatttttcaatgagcttacctttaattgatggacagggtaattttggatctatcgatggagatccaccagcagctatgaggtacactgaaacaagacttgcaaaaattgcacaatttttaattgatgatattgaaaaaaatactgtagcattcaaaagcaattatgatgaaacagaatttgaaccagaagttttaccagcacaatacccaaatttacttgttaatggtgctgggggaattgctgtagggatggcaacaagcataccaccacataaccttggtgaggtggtagatgcaactttagcattgattaaaaataaagatattaagcttaatgaacttattaaacacattccaggcccagattttccaacaggaggaatcattattggtaaagatataattaagcaaggatataaatcaggaagaggctcatttaaaattagaggagacattaaaattgaacaaatcaaaagtggaagagaaagattagtaattacctcaattccatatcaagttaataaatccgtattgaatgagagaattgcagaattagttagagaaaaaaaaattgaaggaataagagatatacgtgatgaatctaatagagaaggtatcagggtagcaatagatttaaaatcaggcgttgaaccagaaacaattaaaagacaactttataaatatacatcagttgaaagttcttttggttttaatactttagctattgttgatagcaaacctaagacttgcaacttaaaagattttttagaaaattttttaagttttagagaagatgttgttataaaaaaaacaaaatttgatcttaaaaaagcagaggatcgtgttcatattttagttggcctgtcagtaagtgttgaaaatatagataaggttataaaaactatcagacaatctaaaaatcctgatgaagcaaaaaattcacttttaaaatcaaaatggaaaataataga

SEQ ID NO: 295555 - DNA, 1966 bp, Unknown
  Bacterial polypeptide expressing nucleotide sequence isolated from the Sargasso Sea
atgtcagattttgccaaagaaatactcccaataagcattgaagatgagctgaaacaatcttatctgagctacgcaatgagtgtaattcatggcagagccctgcctgatgtcagagatggcttgaaacctgttcatcgtcgcatactctttgccatgcatgacctaaaaaactactacaacagaccctacaaaaaatctgccagagtcgtaggcgatgtgattggtaaatatcatcctcatggtgatagtgcagtctatgacgccatggtcagaatggctcaagatttttctatgagatacatgttggtagaaggacaaggaaatttcggctcaattgatggcgatccacctgctgcaatgagatataccgaagtacggatgtcaaaaattactgatcaacttttggcggacatagaaaaagatactgtcaacttttcacctaattatgatggatcagagcaaattcccgatgtccttccaaccagagttccaactctattagtgaatggttcatctggtattgcagttggaatggcaactaatatacctccgcataatcttactgaggttattaatggatctcttgcactcctagaaaatcccaagactagtattgatcagctgacgcaatcgatttcaggacccgattttccaacaggaggaattattgatggaaagatgggcatctatgaagcttataacactggcagaggaattatttatgtcagagccaaaacttcagttgaagaagataaatcaggcaatcaatcactggtaatcaatgagataccttatatggttaacaaagcacgcatgctagaaaagattgctgaacttgttaaggataaaaagatcgatggcataagagaaattagagatgagtctgataaagatggcctcagagttgtaattgatgttaagaaaggagaatcagtcgatgtccttgagaacaatctttatgctcaaactcaattggagcaatcatttggcatcaattttactgttcttgtaaacggacaaccaaaagttctaaatttaaaggaaatccttcaggagtttattaagcatagaaaagatgtcgttaccaaaagaacaaaatttgaactaaagaaagccaaagacagaggccatattgtagaaggcctgatggtagcaattgctaatattgatgcaatcattactatcatcaaaaaatctaaggacccaaagattgctgctgccgagctatgcaaaaaaacatggaaagctggtgcaattgaggccattcttaagaaagtaggcaaagatgcatgcaagccaaagggacttcctgctgacttaggccttaagggcaaaaattacaaactttcacccgaccaagctaaatcaattcttgagctgaggctcgggaggttaaccggacttgagcaagacaatttatcatctgaatttaatgaattaattgagaagattcaaaaattacaagaaatcctagatgacaaaaatgtgcttcaaggagttgttcgtgatgagctcaatgaaatcaaagaaagttttggcgatgaaaggaaaacagatattaacgatgcaagacaagatatatcaaatgaagatttgattcctgaggagacaagagtgttaactctttcaagaagtggctatgctaaaacccagcctcttactgagtacagggaacagagaaggggaggtatgggcaaggctgcagcttcagtgaaagaggaagaccttattcaaaatctatatgtgcttagctcgcactcgcagttattatgcttcacaactttaggaaaagtttactggctgaaggtttatgaaattcctgttgccagtagaacttcaaaaggtagaccgctggtaaatatgctcaaccttgatgatgatgaaactgttactcaaattttaccggttgaaggttttgctgaagataagtatgtctttatggcaaccagaaacggtacagtgaaaa

SEQ ID NO: 295556 - DNA, 741 bp, Unknown
  Bacterial polypeptide expressing nucleotide sequence isolated from the Sargasso Sea
tatgtcaaaaaattctgaagaaaaaaaacaatactccgccggtaatattcaagttcttgaaggcttagaagctgtaagaaaaagacctgcaatgtacattggagatgtaggtaataaaggtcttcatcatttaatatgggaagttgttgacaattcaattgatgaggctttggctggccattgtgatttaataacagttgagataaatgaagataactcaattactgttaaagataatgggagaggtattccaactggaatgcatccaaaagaaaaaaaatcagctctagaagtagtaatgacagttctacatgctggaggaaagtttgataaggatacatataaagtctccggggggcttcacggagtgggtgtttcatgtgtaaatgctttatctgaaagtttaactgcaactgtgcatagagaggggaaggtatttgaacagacttataagagagggattccagttcatgatgtcaaagaagttggtaaaacaacggatcgaggtactatagttacattctcacctgataaagaaatttttaccacgtatgagtataagtatgatactgttgcttctagattgagagagttatcattcttgaatgcaggaattaaaattgaattaaaagataagagagatttagatgataataatgaacctaaatcagaagttttttattctgaaggtggtttaacagaatttgtcaattatttggagggatcaagagaaaaattaat

SEQ ID NO: 295557 - DNA, 1771 bp, Unknown
  Bacterial polypeptide expressing nucleotide sequence isolated from the Sargasso Sea
tggcataatttcttatgtggaacatttaaattcaaataaaaaaacagttaataataagccaatttttgtttcgggtaaaaaagatgacactattgttgagatatcaatacaatataatgaaggttattctgaaactatctattcatatgttaacaatataaatacaattgaaggtggaactcatttgagtgggttcagaagtgccttgaccagatcgattaataagtatgctaaggatcaaaatttattaaaaaatcagaatgttcaaataacaggagatgacactagagaaggtttaacagctgttgttagcataaaagttccagagcctaaatttgaaggacaaactaaaacgaagttaggaaattctgaaaccgctggaatagttgaatccttattgaatgattccttaggagatttttttgaaaagaatcctgcacaagcaaaaaaaattgtaaataaatctcttgatgcagcgaaagctagggaagccgcgaaaaaagctagagatttaacaagaagaaagagtgctttggatattggatctcttccaggaaaacttgctgattgccaagaaaaagatccggataaatgtgagctttttattgtagagggagaatcagctggaggttctgcaaaacaaggtagagatagaaaaacacaggcagtgttaccattaaagggaaaagttataaatgtacaaaaggcaagactcgataaagttttaagtaatgatgaaattggcactttaattactgcaatgggacttggtgccccaaaagtagcagctgatcaagatgaggatattgatatttcaaaattaaggtatggaaaaataattctcatgactgatgctgatattgatggctcacacattagaactttattgttaactttttactataatcattataaagaattattaagaaagaagaagctgtatattgctcagcctccattatttaaagttaaaagaggaaacaaagaaacatatcttcaggatgagctagctttagataattttttattagaaaattcaataaatgaaattttaagcgatgatacttttaagactatgaaattaacaagagataaacttcttaataatatttctcattttataagatacaaaaacttagttgaaaacttaagtaggtcaaatattgacttgcgcattttagagattttaattccaattctttctcaaggccatagttttggtgataaaaagtttatttctatcttagataacgatatcaagaaaaaacaatcagaaacatctgaaaaaattaattatcagtttgattctaaagataatgcttcttttgttattcaagacaagggtagggagtccaattctcttattacaaaagatattgttgagtccgcattgtttacaagatgtttgcaagagtattcagaaagtgttgatggattaacattccctataaatttgaaaaccaaaaatgatgatgaaacaaattgtttaacattggatgatttacatacaatcttattagatattggaaaaaaagggttttcagtgcaacgatataagggattaggtgaaatgaatcccgatcaactttgggagacaactcttgatcctgaaacaagagttcttagagaggttaacatagcagatatcgaagatttagataaagatggaaaagaaagtcttttatttgaagagttaatgggtgatcaggttgaacctagaaaacgaattatagaagaaaatgcattatatgtaactaatttagatatttaa

SEQ ID NO: 295558 - DNA, 763 bp, Unknown
  Bacterial polypeptide expressing nucleotide sequence isolated from the Sargasso Sea
gcaagaaaagcaagagaaatgacaaggagaaagggagttcttgaaatagctggattgcctggaaagttagcggattgtcaagaaaaagaccctagcttgtcagagatatatatagttgagggtgattctgctggtggttcagcaaaacagggaagaaacagaaaaaatcaggcaatattgccacttaaaggtaagataataaatgttgaaaaagccagaattgataaagttttgggctcccaagaagttggcacacttataaaagccctaggttgtggaattggtaaagaggattttgatatagataatctaagatatcatcgaataattattatgacagatgctgatgttgatggttctcatataagaacccttctgctaacctttttctacagacaaatgtatgaaatagtagaaaagggccatgtttatattgctttgccgcccctatataagataactaaaggtaaagaatttatatatgcctctgatgagaaagaaaaagatgatgccatcaaaaaattctcaaaaaatggtaatagaggtttagaagttcaaagatataaaggattaggtgagatgaatcctgaacagttgtggacaaccacaatggatcccataaacagaagaatgatgagagtagatattaaagacatacaggatgcaaatgagtcatttgaagtgcttatgggtgacgacgttgaaccaagaagagaatttatagatgcaaatgctctttctgttaaagagcttgatatttaat

SEQ ID NO: 295559 - DNA, 2095 bp, Unknown
  Bacterial polypeptide expressing nucleotide sequence isolated from the Sargasso Sea
atgaataaagaatattcatctgactctatcaaggtattaaaaggactagaagctgtaagaaaaaggcctggaatgtatataggcgatacagatgacggatcaggtctgcatcaaatgatttatgaggtgttagataattcgatagatgaagcgttagctggtttctgcaacaatatagaagtggttttaaattcagatggaacagtaaccataagtgacaatggaagaggaatacctgtagacttacataagacagaaaaaattccagcagcacaactaataatgacagaattgcatgcaggcggcaaatttgatcaaaatagctataaagtttctggtggtctgcatggtgttggtgtttcggtcgttaatgctttgtccgaaactttaatattagagataaatagagatggtaaagtttacaatttagaatttagtaacggtacagtaacaaaaaaattaaatgtcattggcacctctcaagaaatagaaaaaaattattacactggaactaaaattacttttttacctacaaaaagtatttttaaaaatattgattttaattttaaagttatagaaaaaagactaagggaacttgcatttttaaatacaggagtaagtatagatttaatcgataaaaggcagtctcaagatattaaaattaattttaaatatgaaggaggtattaaggagtatgtaaattttattaatactggcaaaaatgtaattcataataaccctatttcttttaatggtgagaaaaataatatctcaattgaatgtgctttgcagtggactgatagttatcatgaaaatactatttgttttactaataatattgttcaaagagatggcggtactcatcttgcaggttttagaggcgcattaactagatcaattgttaactatataaataaaaatactaaaaattctggtagcattacaggagatgatgcaagagaaggtcttacatgtattatctcagtcaaattaccagatcctaaattttcaagtcaaactaaagataagcttgtatcatcagaggtaagacctgtcgttgaatcaataagtttagataaaattgagcaatggattgaggaaaacccaagtcaaattaaaaaagttatagataaaataattgaagcttcaaatgctagagaagcagctagaaaggctagggagctaacgagaagaaaaactggtctagaaaatacatcacttcctggaaaattagctgattgtcaggaaaagaatccagaattatctgaactatttatagtagagggtgattctgcagggggatctgcaaaacagggaagagatagaaaaaatcaagcaattttacctcttagggggaaaattttaaatgtagaaagagcaaatgaaaaacaagttctgaccagtaatgagattggagcattaataacggctattggtgctggtgttgggaatccaactgatgacataaatcaaaataaattagagggtaaatttgatctttcaaaaatgagataccataagataatcattatgactgatgctgatgttgatggcagccatatcagaaccctacttttaacatttttttatcgacatatgaaaccaattattgattcaggtcgattgtatattgcacaaccacctttgtatcgcatcaagaaaggcaactccactgtttataaaaaagatgaaaatgatctagaagaatatcttattgaagaaggtatcaaaaatactacttttaccaatactataaatgaacaaatagcaggtcaagaattaaaaaaaattatatacttatcaaaaaaaacaaaaaatttagtaattcctttaatgagaaaaatagacaatagtagaattattgaacacgctgcaattgttagagctttagataaaagaaatttagaaaattcaaaaattggtactgaaatatctaaatatttacaacaaagactgaatctgatttcaaatatttctgaaaaaaattggaaagtttcattcttagataaatccttatatattaaaagaacaattagaggcttcactgaaaaatttactatagatgaaaattttttagttacccccagaagctaaa

SEQ ID NO: 295560 - DNA, 1183 bp, Unknown
  Bacterial polypeptide expressing nucleotide sequence isolated from the Sargasso Sea
aatgagtgaggaaaaaagatctaataaaatctccaatgactatggtgctgatcagatacaggttttagagggtttagaacctgttcgtaaacgaccaggaatgtatattggttctactggtccaagaggacttcaccatctagtgtatgaagtcgtagataattctgtagatgaagccctagctggtcattgtgatcatattgagatagttcttaaaaaagatggatcagctttgatttcagataatggcaggggtattcctacagacatacatccaagaacaggtaaaagtgctttggaaactgttcttactgttcttcatgcaggggggaaatttggaagtggtggatataaggtttctggtggattacatggcgtcggaatatctgttgttaatgctctaagtgagtgggtgaatgttactgttttaagagatggtaatgagttcaatcaaagatttgagaaaggcattgcaaaaggtgaattgaaatcccaaaaacaacaaaataaaccattaaaaaaagggacaacaatttgttttaagccagatacatcaatatttactgatggtattgaatttgattatgctcttttatcctcaagattaagagaattagcttatcttaatgggggcgtcaaaattatctttagagatgagaggcaaaatttatccgatggttctttcaaagaagaaatttacttatatgatggtggcattaaagaatatgttgaatacattaataaagaaaaggaatctattcattctgaagttatttatgtcgattcccaaaaagataatgtatatgtagaagcagctctacaatggtgttcggatgtttattcagataacatactaggatttgcaaataatatcagaactatagatggaggaacacatatagatggtttaaaaacagtcttgactagaacttttaatgccatcgcgaaaaaaagaggtaaaagaaaagaagttgataaaaatttgtcaggagaaaatattagagaaggtttgacggtcgtattatctgtaaaagttccagagccagaatttgaaggtcagacaaagacaaaattaggaaatactgaagtaagaggcattgttgattcgcttataggagaatcattaataaagtatatggaatttaatcctaatatttttgatttaattctagaaaaagcaatt

SEQ ID NO: 295561 - DNA, 1148 bp, Unknown
  Bacterial polypeptide expressing nucleotide sequence isolated from the Sargasso Sea
aatgccagcaaagaaaaaagcagcaaaaacaaagagccccaaaaccccaaagaaagaaccaaaacaatcagcaaaaaaagcttcctctaaatctgtaaatactgctactaaaaagaaaaaagaagattcgtacgattcctcaagtataacggtattaaagggtcttgaagccgtcaaaaaaaggccagggatgtatattggagatacagacgatggcacaggcctccaccatatggtctatgaagtggttgataattcaatagatgaagctttggctggccattgtgacgaaataacggtaaaaattctttcagatgatagcgtggtggttactgataacggtagaggaattcccacggataagcacgaagagggagtctctgccgcagaagtaattatgaccaagttacatgcaggaggaaagtttgacgacaattcatataaagtttcaggaggcttgcatggtgttggagtctctgttgttaatgctctttctgaagaattaaagctgactatccataggggcggcaaaacgcatgaacagacctatgcggatggaaagccaacaagcaagcttaaagttactggtaagaccgagaaaacaggcacagaggtcatgttcgttccttccgttacaactttttcgaatatactttttgattacgaagtcttggaggcaagacttagagagttgtcgtttttaaactcaggtttaaaaataattcttgaagacgaaagaacgtctaagaaaaaagaatttattcacaaaggtggattagcggaatttgttgcatttttaaataaaaaaagaaccaccgtaaattcaatttttcattttgtacaagaatccaaagatggaattactattgaagtttctttgcaatggaacgatggctatcaagaaaacatacaatgctatacaaataatataaaacaaagagacggaggcactcaccttgtagggtttagaacagcgttaacaagaactttgaacaactacatggacagggaggggatgaataataaggaaaaggtgtccacatcaggagacgatgcgagagaaggtttggtggctattgtttctgtaaaagttccagatcctaaattttcttcacaaacaaaagataagttagtctcttcagaagtca

SEQ ID NO: 295562 - DNA, 1094 bp, Unknown
  Bacterial polypeptide expressing nucleotide sequence isolated from the Sargasso Sea
ggaaaattaaaagtaacaggaaaaacagacaaaacaggaacagaggtaaccttcgtcccttcgcccactaccttttccgatatcgtttttcagtatgacgtcttggaaactaagctaagagaactgtcatatttaaatgccggtttaaaaattgtcttgattgacgaaagaagctcgaagaaaaaagagttttttcataaaggtgggctcgctgagttcgttacttttttgaacactaaacgcacaacagtaaattcagtattccactttgtgaaagaagctgctgaaggaataactatagaagtctctcttcaatggaatgacggttaccaggaaaatattcaatgctataccaataatattaagcaaagagatggaggaacacatttagttggttttagaactgcccttaccagaacacttaacaactacatggagaaggagggcatgaacaaagaaaaagttgcaacttcaggggatgatgcacgagaagggcttgttgccgtcgtctctgtaaaagttccagatcctaaattctcatctcaaacaaaagacaaactagtttcctcggaagtaagaccggcagtcgagcaggaaacttacaaagcattaactgaatacttattagaaaatcctgcggaagctaaacttatagcaactaaaataatcgaagcagctagagctagagaagccgctcgtaaggcaagagagctcactcgcagaaaaggagttttcgaaggcggagggcttcccggaaaattatcagattgccaagaaaaagatccttctaaaagcgaaatatatttagtagagggtgaatcagcaggaggttcagccaagcagggtagagataggcatttccaagcaattcttcctctcaaaggaaaaattttaaatgttgaaaaagccagactagataaagttttatcttcagaagaaattatcatcttaatttctgcattaggttgcggtataaaaggagaagattggcaagaagataaactacgttatcatagaataataataatgaccgatgctgacgtagatggatcgcacattcgaacacttctcttaactttattttataggcagat

SEQ ID NO: 295563 - DNA, 1969 bp, Unknown
  Bacterial polypeptide expressing nucleotide sequence isolated from the Sargasso Sea
tatgagcgcagaaaacaaaaagcaatatagcgcagaaagcattaaagtactggaagggctcgaagctgtaagaaaaagacctgcgatgtatataggcgatgttggaaaaaggggtttacatcaccttgtttatgaagtggtagacaactcaattgatgaggcgttggcaggttactgcactaaggttgttgtgaccttcaacccagacgggtctgttaccgttgacgataacggccgtggaattccggttgatatgcataaagaagaaaaaaagccggcagtagaggttgtaatgaccgtcttacacgcaggcggaaagtttgacaaagggtcttataaggtctctgggggtcttcatggcgttggagtttcggttgtaaatgcactatcagagtggatgtgggttgaggtaaagcgagatggaaaaatacaccgacaggattacaagatcggcgaaccacaaaacaagcttaagactacgggcactgcaaagaaaacgggcacaaaggtttgtttttatccagatagctcaatcttcaaggttattgattttgaatacgacataatagctgagagattaagagagcttgcttatttaaatagcggtcttgaaatagttttaaaagacgaaaggacagaagagggagaatcaaactctttcaaatttaaaggaggattaagtgattttgttaagtacctggacgaacataacaaccctctacataacaaggtaattactgtaaaaaatgatactggcgatgttccagtcgacgttgctctaaggtatagcaactcttataatgataatatacttacctttgtgaataatataaatacaatagaggggggtactcacctatcagggtttcgctctgctttaacaagggcaatgaacaaccacgcgtcaaagaacaatcttattaaagcgaaaaagaatgaaaaaatatctttaaccggggaagactttcgtgaggggctgacagcaatcataagcgttaaggttgccgagccccagtttgaaggccaaacaaaaacaaaactgggaaatggagatatcaagggaatcgtagacaagattgtttatgagggtattttagactttcttgagcaaaacccatcaattggaaggcgcgttatagaaaaagcccttcttgccgcaagaagtagaagcgcagctcgaaaagcgagagagcttattagaagaaaaagcgcattagggggttcttctcttccgggaaaattggcggactgctcaaacagagaccctaacttttgcgaactttatcttgtagagggagactctgctggaggttcggcaaagcaaggtcgagacagaaaaacacaagcaattctacccctaaggggtaaagttattaactctgaaaaggctaggatagacaaacttctttcaaacaatgaagtacaatcaataattacagcccttggtacgggttttggtggatctcttgatgaggacggggaaaggtctgcgggtgattttgacattgaaaaattaagataccacaaaatcataataatgaccgatgctgatgtagatggttcccacattcgaactcttttgttaacctttttctatagaaaaatgaaagagataattgacggtggctatctatatcttgcgctaccacctctttatcgagtatctcagggaaaaaaagaatattatgcatatgatgacaacgaaagagacctgatgatagagagaatgcaaaaagagaacaagaacacaaaggtttctatacagcgttacaaagggcttggagaaatgaatccaggtcaattgtgggagaccacaatggacccagaaaccagaactttaatgcaggttacagtagaaagcgcagctgaagcagcggagacctttcaaaacctaatgggaagcgatgtggaagcgcgtcgaacatttatagagaaaaacgcaaagttcgtagtaaaccttgatatttaa

SEQ ID NO: 295564 - DNA, 1581 bp, Unknown
  Bacterial polypeptide expressing nucleotide sequence isolated from the Sargasso Sea
aatggttgattttaatagagacaacacattgccaagggatattgttgatgaaatgaaagaaagctatctcaattattcgatgtctgtgatcgtctcaagagcgctgcccgatgttagagatgggcttaaaccagttcacagaagaatactttatggaatgagtgagcttgggtctagctggaacaggccttataaaaaatccgcaagaattgttggggatgttctgggaaaatatcacccccacggagacagctcagtatatgatgcgttagttcgaatggcgcaagacttttccatgagatatgagcttgttgatgggcaagggaactttggctccattgatggagacaatgccgcagcaatgaggtacacagagtctcgaatgacaaagctctctagtgagatgttaaaagacctagataaagacaccgttgactggaccccaaattttgatgaaaccctaaaagagccagctgttttaccatcctccgtcccgacgcttttgatcaacggctctgagggtattgctgttggtatggcaacaaagattccacctcacaatctggtagagcttgttaatgggatagttgcattaatagataaggaagacataacaactgatgaactaatgcaacatataaaagggccggacttccctaccgcaggtcttattttgggtatggatggcctaaaagaagcttatgagactggccgtggaaaaataaaaatgcgagcacgcgcccatattgaaacaagtaaaaaaggtaaagacagcatagtaataactgaggtcgcatatcaaaccaacaaagcaaacctagttgaaaaaatagcagacctggttcgtgataaaaaaattgaaggaattacagaccttagagacgaatcagacaaagatgggataagggtagtaattgaaacaaaaagagacgcagttccagaggtcatactaaaccagctgtacaagcatactcaactacaggacacttttggaattatcttgcttgccttagtggaaggcgttcctcaaataatgagtctaaaaacggttttacaacactttgttgatttccgacaccgggttgttgttaggcgaacagagttcgagcttagagaagcagaagcacgcgctcatatacttgaaggtttaaagattgcgttagacaatatagatgaggtgatctcaattattaggggtagcaaagatcccgttatggcaaaagaggggctgatgaatggttttaatttatcagagattcaatcacaggcgatattagacatgagactacaaaggcttaccagccttgaggttgataaggttgtaaaagaatataaagagctgataaagcacatcgcacaccttaaaggaattttggaaagcaagagtcagaggatggacataataaaaacagagcttatcgaaattcgtgaccaatacggggatgaaaggcggacagagattgttcctgtagattctgacttctcaatggaggacatgatagctgaagaagaagttgttcttactattacccacccagggatatataaaacgcacagctttggaatacctacagaacacaa

SEQ ID NO: 295565 - DNA, 1415 bp, Unknown
  Bacterial polypeptide expressing nucleotide sequence isolated from the Sargasso Sea
tagtagggcgataccagatttaagggacggattaaagcccgtgcatcgtcgaattttgtatgcaatgcacgagacaggcaacacccatgaaaaatcatatcgaaagtctgcgaggcctgtaggcgatgttatgggtaaatatcacccgcacggcgacagtgcaatttatgatgctttggtcagaatggctcagccgttttccatgtctttgcccttgctagacgggcaaggaaattttggttctatggatggggataatcctgcggccatgaggtatacagaagtgcgaatggataaacctgcagccttcctattaagtgacatagataaagacaccgttaactttcaggacaattatgatggaaaggatcgagaaccctcagtcctcccggcccgctttccgaatatgttggttaatggagcgggaggaattgctgttgggatggcaacaaatattcctccgcacaatcttggtgaggttgttgatgcaacactagctctaatacaagctcctgatttgagctcggaagatttaatacagtatgtgcctggtccagatttcccaactggcgggatgatgttgggtcgatcaggcgctcgcaaggcctatattgagggtcgaggtagcgttataattcgtgctaaaactaaaattgaagagcttagaaaagatcgatatgccattataattgaagaaatcccatatcaagttaacaaatcttctatgatagaaaagattgctgagcaggtgcgcgataaaaaagtagaaggaatttcgcatgtacaagatgagagtgacaggaatggtgtaagggttgttgtcgaattaaaaagagatgcaactgctgaggttgttttaaatcaactctatcgatttactcccatgcaaacctcttttggctgtaacatgttagctttaaatgggggcagaccagagcaattaacactgcgttcatttttaacgaactttatcgacttcagagaaattgttgtcgctcgaagaacagctttcgaattgcggaaagcccgtgaacgctcacatattctttgtggtctcgctgtagcagttaccaatgttgatgaagtggttgcaactatacgttcatcttctgatgccaccgaagctcgtgaaaaactaatgcagcgacgttggccggctggatcaattgctgaatacataaaacttattgatgacccaacccatacaataaataaagatgacacctataacctttctgaaactcaagcgagagcaatattagaattaaggttacaacgcctaacacaaattggcgtaaaagaggtcacagaagaattaaaaacgctttcagtaaaaatcaaagaatacttagggattttgggttctcgtgagaaaatcatggaaatcattaggaatgaattgaaagaggtaaaag

SEQ ID NO: 295566 - DNA, 883 bp, Unknown
  Bacterial polypeptide expressing nucleotide sequence isolated from the Sargasso Sea
agtcgaaacgcttattaatgactactttatggactttttgcttgcaaacaagccacaagctaaagagattcttggcaaggttctcgaagccgcatatgcaagagaagctgcaagaaaagcaaaagaaatgacaagaagaaaaggtcttctggatataggggggctgcctggcaagctagcagattgccaagaaaaagacccagcgctatcagaattatttttggttgagggagactcggctggaggatcagcaaaacagggcagggacagaagctttcaggccatattgcctcttaaaggaaaaattataaacgtacaaaaagcacgcctagacaaagtcttatcttctaatgagattggaacccttataacagctttagggacaggcattggcattgacgagttttcactagaaaaacttagataccatagagtcataataatgacagacgcagacgtagatgggtcccacattagaacactcttacttactttcttttacaatcagatgtttgatctgttagaaaaaggacatatttatttggccttacctcctctttacaaaattaaaaagggcgggaaaacacattacgcaaaagatgaggaagaaaaagacgcaattcttaaagagcttagaaaagaagcaacagaaggctctaggccccctgagatacagagatataaagggctaggagaaatgaaccctgaacagctgtgggagacaacatttgaccctaaacacagaaggcttgtgcaaattactttagatgaggcaagagaactcgttgatgatatctttgaaacattaatgggcgatcaggtgcagccaagaagagagtttattgatgataatgctcttagagcagagaatatagacttttaa

SEQ ID NO: 295567 - DNA, 946 bp, Unknown
  Bacterial polypeptide expressing nucleotide sequence isolated from the Sargasso Sea
atgacaaataaaaatacatatcaagctgattccattaaggttttgaagggtcttgaggcggttagaaaaagaccaggaatgtatataggagatacagatgatggcactggtttacatcatatggtttatgaagttgttgataactctattgatgaagctttagctggctactgtaaaaatattaatgtaaaaattaattttgatggaacaataacagttagtgatgatgggagaggagttcctgtagatattcataaaggtgaaaaaaaatctgctgctgaagtaattatgacacaacttcatgctggaggaaaatttgatcatgattcttataaagtatctggaggattacacggagtaggtgtttcagttgtaaatgcattgtcagaaaaattacaattagaaataaatagagatgaaaaaaaatattttgttgaatttcaaaatggtgaagctaaagcacctttaaaagtaattggaaaatcaaaacaaactggtacgcaaattacttttttgccatcaaaagaaattttttcatcaataaaatttagtccaaatattttaattaaaaggatgagagaattagcatttttaaataaaggaattaaaattatttttatagatggaagtcagaagaaagaaaaaacttttgaattcaaatttgatggtggagttcttgaatttgtgaattttttagatgaaaaaagagaaaaattacaaaataaaaatggaaacgatttatttaaaaaaccaatttatatagaaggtaagaaaaataatatagagctagaatgttctttgaaatggaatgcaggctatggagaagatattttcccatatacaaataatatatatcaaaaagatggaggaactcatttactgggtttcagaagtgcattgacaagagtaattaataaatatgcaaatgaacataattgtaaagaaa

SEQ ID NO: 295568 - DNA, 1571 bp, Unknown
  Bacterial polypeptide expressing nucleotide sequence isolated from the Sargasso Sea
aatggaaaataaatctaattataaagcagagtctattaaagttttaaaaggtctagaagctgttagaaaaagaccaggaatgtatataggtgataccgatgacggaaccggtttacaccatatgatttatgaagttgtagataattcaatagatgaggcattagctggatattgtaaaaaaatacaagttgatgttaattccaacggatcagttacagtcaaagatgatggaagaggaatacctgtagatttccataaaggcgaaaaaaaatctgctgcagaagttataatgacccagttacatgcaggaggaaaatttgatcatgattcatataaagtctccggaggattgcatggagttggagtatctgttgtaaatgctttatcagaaaagctagagcttacaatagaaagagaaggaaaaaaatattttattgagttcttaaacggtaaagcaaataaacctttaaagcctttaggtaaatcaaaaaatactggaactgaaataacttttacaccttcaaaagaagtattttcactgacaaaatttaatttaaatacaattcaaaaaagaatgagagagttagcatttttaaataagggtataaaaattattgttaatgactttactcaaaaaaaatctaaaacttctgagtttagatttgaaggtggtataattgaatttgtagaatatttatatgaaaaaagagaaacattaaaaaataaaaacggaaatgaattattcaaaaaacctatatttattgagggaaaaaaaagtaatactgaaatagagtgttcatttaaatggaacttaacttattctgaagatgtatatccttatacaaacaatatttatcaaaaagatggtggaacccatattttaggttttagaagtgctttgactcgagtaatcaataaatatgcaaatgagcataacatgttgaaaaaaaatcgagtttccatttcaggagatgatataaaagaaggtctaacatgtgttttatcgattaaagttcctgatccaaagttttcttcacaaactaaagataaattagtttcatcagaagtaagaaatattgtagaaacaattattaatgagaaattatccatatggtttgatcagaacccatcaataactaaaattgttcttttaaaaataatccaggcagccgtagcgagagatgtagctagaaaagcgagagaaagtgttagaagaaaaggagcattagagttaactgggttaccaggaaaactagcagattgtcaaaattctaaacaagatggcacagaattatttatagtggagggagattcagcgggaggatcagcaaaacaaggtagaaatagagaatatcaagcagttctgcctttacgtggaaaaattttaaatacctatacagataataatggtaataaaaaaaatggaaatggtaatgacttaagaacaaaagccttatctaaaatgatatcttccaacgaaattgtaacattaataaatgccttgggattagatccaaaaaatgaagaattagatttaaaagatctaagatatggtaaaattataattatga

SEQ ID NO: 295569 - DNA, 1193 bp, Unknown
  Bacterial polypeptide expressing nucleotide sequence isolated from the Sargasso Sea
ttttgagtgttctgcaacagaaaatgaggttggagttgaaatttctatgcaatggacagattcttattcagaaaatgtactatgttatacaaataatatacctcagaaagacggaggcactcacctagcaggttttagaggcagtttaaccagggttttaaagacatttataaaaaaagaaaatgctaaaaaaacacctacagacttattgggggaggatgttagagaagggttaattgcaataatatctgtaaaagtcccagaccctaagttttcctctcaaactaaagaaaaacttgtatcttctgaggttgagagtgtagtaagtgctgtatttaataaatactttaatgaatttcttctagaaaacccaaaagatgctatgagtatcatctcaaaggtgtcagaagcagccttagcaagagaggcagctagaaaagcaagagaaatgacaagaagaaagggtgttttagaaatagcaggacttccaggaaaattagcagattgccaagaaaaagatcccaaactatcagaaatatatatagtagagggagattcagccggaggatcagctaaacagggaagaaatcgcaaaaatcaagccattcttcctctaaaaggaaaaattttgaatgttgaaaaagcaagaatagataaagtcttaggttctcaagaggtaggaactctaataaaagctctaggatgtggtattggtgaagaagattttgatataaataaccttagataccatagaattataataatgaccgatgccgatgtagatggttctcatataagaaccttattgctaaccttcttttatagacaaatgtatgaaatagtggataaaggacatatttatatagcattaccacctttatacaaaattaccaaaggcaaagaatttatttatgcatcagatgaaaaacaaaaagatgatgcaatcaagacattatctaaatcaggaacaagaggtttagaagtccaaagatataaaggcttaggtgagatgaacccagaacaattatggactacaactatggatccagataacagaagaatgatgagggttgatatcaaagatgttcaagatgctaatgattcatttgagattcttatgggagatgatgtagaacctagaagagaatttatcgataaaaatgctttaacagtaaaagagcttgatatctaat

SEQ ID NO: 295570 - DNA, 1207 bp, Unknown
  Bacterial polypeptide expressing nucleotide sequence isolated from the Sargasso Sea
tcaatataatgaatctttcattgataacacattgtcatttacaaattgtataagaactgcagatggaggaacacacgtaactggatttaggtctgcattgacaagagttataaatgattatggtaaaaaacaaggattttttaaggaagacattcaatctttgtccggagaagatgttagggaaggcctaatgtgtgttgtttctgtaaaagtcaaagatcctcaatttgaaggacaaacaaaaggtagattagggaacccagaggttaaaggtgctgtggaacaaactataggtaaaagacttagtgagtttatagaagacaatccagaagatgcaaagagaattataaacaaatctatgacctcggctagagcaagagaagctgcaaagaaggcacgagacctaattataagaaaaaatgctttagacggagggtctctacctggaaaattggcagattgctctgaaaaagacccttcaagatctgaactatatattgtggagggagattctgctggaggatccgctaaacaaggtagagacagaaacttccaagcaattttacctttgagaggtaaaatattaaatgttgaaaaagctcggccagaaaagatgctaaaccatgaagaaatagttgctttgataacagcaataggaactgggcttggtgaagactttaatcatgaaaagttgcgttatcaccgcgtaataataatgacagatgctgatgttgatggagctcatataagaacattattgcttactttctttttcagaaacatgcctgaacttattggtaatggaaatctatatatagcacagcccccgttatataaagtctctagaggcagaaccagtaaatggatttactctgatggagatctaaataaatggatttctgaaaaaatttataataatttttcaataattcattctgaaaataaaaaagaaataaagggagcggcaataggaaagtttatctctgatgtgaaatcttttgctgagtcaaaagaaattgcaaaaatattaaatgttgaagaagatgaattcttcaaacttgcttctaaaagtaatgactatattttagatactccaaaagtaagtgaagaaaacattcaaccagatttatttgaaacaactgtatctgatgaagaagttacagaagaggtaattcaagaggttagtgaaacaatttctgtgaacagc

SEQ ID NO: 295571 - DNA, 1614 bp, Unknown
  Bacterial polypeptide expressing nucleotide sequence isolated from the Sargasso Sea
aatgtctaaaaattctaaatcaaaattaaataattcttatggtgcggactcaataaaggttctcaaaggcttagacgctgttaggaaaagacctggaatgtatattggagatacagacgatggctctggcttacatcatatggtttttgaggtaatagacaactcgatagatgaagctttagctggttattgtaaaagtatagtagtttctataaattctaacagtacagttacagtagaagatgatggaagaggaattcctgtagatatacataaaggggaaaaaatgtctgctgcagaggtaattatgacacaattacatgcgggaggaaagtttgatcatgattcttacaaggtttcaggaggcctccacggggttggtgtttcagttgtaaatgcattatcagaaaaacttcaattaaacatttatagagatggaaaggaatttgagattgagtttaaagatggaaattctttaaaacctttaaagcaagttggaaagactaaaaaaaaaggcactaaaattacttttttgccttcaaaagagatattttcgtcaataaaatttagctcatcgatacttgagaaacggataagagaactagcatttttaaacaaaggtatttcaatcacattaatagataacactttgaaaaaatccagagaatacgttcataaatatgatggcggaataactgaatttgtaaaacacattaataataaaaaaccaattttagtaaataaaaatgagaaagaagtctttaaaaaacctgtatatgttacttcaactaaaaataatgtaatcgttgaatgttcatttgaatggaatgctggatattctgaagaagtattaccgtttactaataatataccacaaaaagatggtggaactcacttactaggatttagaagtgcattaactagagtaataaataaatatttcagcgaaagaaatactaaaaaaaataaaattagtttatcaggtgaagacattaaagagggcctgacagcagtgctatcaatcaagatgcccgacccaaagttttcttctcaaactaaagataaactagtttcttcggaaattagaaatatcgtcgaaaatattattggagaaaaagtttccacttggtttgatcaaaacccttctgtggcaaaaactgtcttagagaaaataacacaggctgcaatggccagggacgtcgcaagaaaagctagggacagtgttaggcgaaaaggtacttttgaattatctgggcttccaggtaaactcgcagactgccaaatccaaaaaagagagggaaccgaattatttatagttgagggagactctgcaggtggttcagctaaacaaggtagggtgagagagtatcaagcagtattacctttaagaggaaaaattttaaatacatatgtaaatggtaaaaaaaatggagaagatcaatctaccaaagctctttcaaaaatgatgtcttcaagtgagatcgtaacattaataaatgctttaggaacaggatcaaaagatttcaatatcgaaaatttaaggtacgataaaattgtaattatgaccgatgcagatgttgacggatcacatattaggactttacttttaacttt

SEQ ID NO: 295572 - DNA, 2419 bp, Unknown
  Bacterial polypeptide expressing nucleotide sequence isolated from the Sargasso Sea
atgcctaaatcaaaaaaaaataccaacacaaaaaattacgattcatccaatattaaggtcttaaaaggattagacgctgtccgaaaaagacctggtatgtacattggtgatactgatgacggcacaggacttcaccacatggtttttgaggtcgttgacaattctgttgatgaggctttggcaggtttttgttcacacatagaggtaatcattcatgaggatgactctataactgtaaaagacaacggacgaggcatacctgttgataaacataaaaccgaaaagacctccgcagctgaggtcatcatgaccgtattgcatgctggaggtaagtttgatgatgattcatacaaggtttctggaggcttacatggtgtcggggtttcagtggtaaatgctttgtcagaaacgttaaacctaagaatacataaaaacggacatacttatgagcaagactatgtacatggtgttccgcaaaaaccgcttaaaaaaggttctaaaacagacaggagtgggacaacagtaaccttcaagccaagcgctaaaacatttactaataccacctacagttttgatattttatctaaaaggttaagagagctttcattcttaaactcggggctaagcattaaacttactgatacaaggtctggaaaagaagaagagttttactttgagggtgggatcagtgcatttgtatctcatctaaacaaagttcaaagccccgtacatgagtctgtcatcaatttcagcaagacaattgacgatataaccgtagacatcgccttacaatggaatgagtcttacagagaaaacatgtattgttttgcaaacaccataaggcaaaaagatggtggaacgcacttagctggctttaggggcgcgctcacaagaacaataaatacatatatagacaaggaaattgcaaaggccgatatatctgtttctggagaagactgcagagagggcatgacagctataatttctgttaaacatcctgatcccaagttttcatcacaaaccaaagacaagctggtctcttctgaggttaaaggggtagtcgaatcagtggttaataaacaccttaaggagttcttaatagaaaaccccaacgaagcaaaaattataatcagcaaaatagttgactctgctgcagcaagagaagctgcaagaaaggcaagagaaatgacccgcagaaagggagcgcttgatattgcaggattgccaggaaagcttgcagattgtcaggaaaaagacccagccttaagcgagttattcatagttgagggagattctgcaggtggatcagcaaaacaagggagggacagaaaaacacaagcaatccttcctttaaagggaaagatccttaatgttgaaaaagctcaaagagccaagatgtattcatctgctgagataggcacccttatcaccgcactgggttgtggaatacatgacgaatttgacctagaaaaactcagataccataaaattatcataatgactgatgccgatgttgatggctcacatattagaaccctgttgctcacattcttttacagagagcttgaagagttaataaaaggcggttatttatacattgcacaacctcccttgtataaacttaaaaaaggaaaaaaagaagagtatgtccttactgatgacgagctaaccaatctaataataagtaatgctgttaagggcatgttggtaagacccaaatcaaagaaaaaaggtttagaaggggatgggctcttaaatacagtccttgattatgcccaatcagtaaacaccatagaaagactatctaagcaaacagggtctattgctgcaatagcaatgtcattacacaaaccaatcacaaaaacagaagcaaataataagaaaaaactagaaacatggatcaaagggctatccaggacagcagctaaaattgctaaagacaagggctacaaagcttctgtttctattaattacgacgacgacggcatagcataccttaatacagaagaagaaataggtggcgtgaaacattttggaaaaattactagcgcttttctaaaatctaatgactacaaattatttgatagggttcaaaaatctagaaaacaatttactggtaaagttctaattgagaatggcgaggacccaagagaatatgagaacattgattcctgcctatcagatatccttttatcctctaaaagagggcttaatgttcagagatataaggggcttggggaaatgaatccagatcaattatgggaaacaacacttgatcctaacaacagattgttactacaggttaaggcagatgacgacgcgggattaacatttgaaaccctgatgggggatgaggtacctcctagaagggagtttatagaagataacgctcttaatgctgctaatattgatatataaa

SEQ ID NO: 295573 - DNA, 1127 bp, Unknown
  Bacterial polypeptide expressing nucleotide sequence isolated from the Sargasso Sea
aatgacaaaaaatacatcaaaaaaaacatatcaagctgactcaattaaagttcttaaaggtttagaagcggtaagaaaaagaccaggaatgtatataggcgacacagatgatggaacaggtttacatcatatggtatatgaagttgttgataattcaattgatgaagctttagcaggttattgtaaaaatattcaagttgatattaattcagatgggactgttacagtcaaagatgatggaagaggcattccaacagatattcataaaggtgaaaagaaatcagctgcggaggtaataatgacacaattacatgctggtggaaaatttgaccatgattcttataaagtttcaggaggcttgcatggagtgggagtttctgttgtaaatgcactttcagaaaaacttgaactttttattgaaagagatggaaaaaaacattttgttgaatttaaaaatggtaatgcagtcaaatctctaaaagttattggaaagtcaaataacactggaacacaaataaagtttttaccttctaaagatattttttctacagtaaaatttagttttaatactatccaaaaaagaatgagagaacttgcttttttaaataagggtataaaaatttcaattaacgacttaactcaaaaaaaaattaaatccacagaatttaaatttgaaggaggtattgcagaatttgtagactatttagatgaaaaaagagaaaaattaaaaaacagaaatgataatgaattatttaagaaaccaatatttatacaaggatcaaaaaatgatttaaatatggaatgttctttaaaatggaacgcaggatattctgaagatatttatccgtatacaaacaacatttttcaaaaagatggtggtactcacctactaggttttagaagtgcattaacaagagttataaataaatatgccaatgaacaaaatttactaaagaaaaataaactatcaatctcaggagatgatataaaagagggattaacatgcgtgttatcaataaaaattcctgatcctaaattttcatcccaaacaaaagataaactagtatcgtctgaagtaagaaatattattgaaacaataacaaatgaaaaattgtcagtatggtttg

SEQ ID NO: 295574 - DNA, 1393 bp, Unknown
  Bacterial polypeptide expressing nucleotide sequence isolated from the Sargasso Sea
aggtggtaaatttgatcatgattcttacaaagtttcaggaggtctccatggagtaggagtttcagttgtgaatgcactatctgagaaattggaacttgtaatagagagagatggaaaaaaatattttatagaattcaaagatggcaataccataaagactttaagtgtcatatctaaatcaaaaagcactggtacatcaatcaagttctatccatcaaagcaaattttctcatctactaattttagttttaatgtaattcaaaaaagaatgagagagttagctttccttaataaaggaatttctattatgctgactgattttactcaaaaaaaagagaagaaattggaatttaaatatgatggtggaattttagagtttgttgaatttttagatgaaaaaagagaaaaattaaaaaataaaaatgataatgatttatttaaaaagccaatttttattgaaggtaacaaaaataatcttgatatagagtgctctctaaaatggaacgctggatatggagaagatgtgtatccttatactaataatatatttcaaaaagatggaggcactcatcttttaggttttagaagcgctctaacaagagtaattaataaatatgctaatgaacaaaatctgttaaaaaaaaataaggtttctttatctggtgatgatattaaggagggtttaacatgtgttttatcaattaaaattccagatccaaaattttcatctcaaacaaaagataaattagtttcatctgaggttagaaatgtagttgaaacaatcataagtgaaaaattatctatttggtttgatcaaaatccctcaatatcaaaaattattttaacaaaaattattcaggctgcagttgctagagatgttgcaaggaaggcaagagagagtgttagaagaaaaggtgccctagaattaactgggttaccaggtaaacttgcagattgccaaaattcaaaacaggatggaacagaattatttattgtagagggtgactctgctggtggatctgcaaaacaaggaagaaatagagaaatccaagcagtattaccactaaggggtaaaattttaaatacttatacagagcataatggttcaaaaaaaaatggaaattctaatgatttgagaacaaaaacactttcaaaaatgatttcatcaaatgaaatcttaactttaattaatgccctgggtcttgatccaaaagatgaaaatatagatttaaaagacctaagatatggaaaaattattatcatgacagacgcagatgtagatggatcacacatcagagcattactacttactttctttaacaacaaaccatttaataaattaatagaggaaggctacgtatatttagcacaacctccattatttaaaatcaat

SEQ ID NO: 295575 - DNA, 1346 bp, Unknown
  Bacterial polypeptide expressing nucleotide sequence isolated from the Sargasso Sea
agtattagttggaggcacaactatcaactttgaaattgataaagaattaataaaagataaaacccctaacaaaaaaagtttcttttataaaaaaggaattgaagattattttcaattagaatacgcaaacaactctaaattatttgaaaaaaattttttattaaaatcaaaaattaaagataatgaaaattttgaaactttaatttcatttaatacaaatgaaaattcaagtttaatgtcatattgtaacactattgaaacaccagatggcggctctcatgaaaatggtattcgtaatggaattctaaaagctataaaactttatggccaaaaaaatcaattctcaaaaatcagtaatatcaatcacagtgatatttttgattactctaacgttattatttcaatctttataaatgatccaagttttgaaggtcaaactaaaaagagaataataatgccaaatttacaaaaagaaattgaaacaaaaacacaacaagaatttttattatggttaaatgctaataagaaaaattcaaaaatacttttagataatttaattgaaagagctcttcaaagaactgatttatcaaaaattaaagagttagatagaaaaagtattaaagaaagaaatcgtcttccaggtaaactagtagattgttcgagtaaatcaataaaagattctgaaatatttattgttgaaggcgacagtgctggaggttctgctaagcaagcaagaaatagagaatttcaagcaatacttcctttaagggggaaaatattaaatgtttataatgttgggctatctaaaattgctgataacaatgaaatacaaaatcttattcaatctttaggttgtggtattggaaaaaactttgaaatttcaaaacttcgatatgagaaaataattttaatgactgatgcggacgtagatggttcacatattgcaactctacttattacttttttttataaatatatgaaaagtttaattgatgaaaataaactatatctagcaatgcctcctttatttaaaatttataacaaaaataaatctttttacgcatatgatgaaaaagagaaagataaattaattgaaaaagaatttaagtctgacaattataacattacaagatttaaaggtttgggtgaaatgccagctgatcaattgaaagagactacaatggatcaaaacaaaagaaatctaatattgattaactctgaaaaagctaagaaagatatgaagaataccgaaagtttattcgaaaccttaatgggaaaacaagcagagttacgttttaaatttattcaaaataatgctaacttcattaaaaatttagacgtctaat

SEQ ID NO: 295576 - DNA, 1668 bp, Unknown
  Bacterial polypeptide expressing nucleotide sequence isolated from the Sargasso Sea
tatggcagataaaatcacagcagtacctatagaacttgcaatgaaacaatcatacattgactacgctatgagtgtagttattgggcgagctcttccagatattagagatggcctcaaaccagttcatagaagggtactatttgctatgaatactatgggaaaccattacaacaagccatataaaaaatctgcaagaatagtaggtgatgttataggtaaatatcatccacatggcgacacagcagtttacgatacaatagtaaggatggcacaagatttttcaatgcgttacatgttagtcgatgggcaaggaaattttggttctgttgatggggatgcacctgctgcaatgagatatacagaaataagaatgtcaaaaatctcacatgaattattatctgatattgacaaacaaaccgtgaattttagacctaattatgatgagacagaacaagaaccagaagttttaccaacaagagtgccaaatcttttagtgaatggctcttcaggaattgctgttgggatggcaactaatattccaccgcataatttgagcgaagtaattgacagtattatttatttaattaatgaaaatcctcaagctacagtagatgacttaatgaaaattgttcctgggccagactttcctactgcaggaatcattttaaataatgaaaatgatgaaaacggaattaaatcagcttacgaatctggcaaaggaaaagttacaatgcaggcaagaacagaggttgaggtaaataaaaaaaataaaaaagagcaaattattgttactgaacttccttaccaagttaataaggcaagacttattgaaaaaatagcagagctagtcagagataaaaaaattgaaggcatatcagaattgagagacgaatctgataaagaggggatgcgtattgtaatagaattaaagaaaggtgagaacctgccggtaattcttaataacttatatacgcaaacacaaatgaggacatcgttttcaataaatatggtagctttagtagaaggtaagccccagcctgttaatttaaagcaaatattaaactcttttatatcacacagaatagatgttgttactagaagaactttatttgaacttaataaagcaaaggaaaagttacatattttagaaggattaacaatagctttatcgaatatagataaagttattaaactgattaagtcagctgagaatgttgcggaagcaaaaaataaattaatgaatgaaaaatgggaattaggatttttaaaaaaaattaataaagtaaagtctactgtaaaaaatattaactcaatttcttctgataagggtcaaattaatggaaaatatttaatgacaagtgtgcaagcccaatctattttagatatgcgccttcaaaaattaactaatctagagcaagaaaaaatatttaacgaatataaagagttgattaataaaattgacgagcttcaaaatattctagatagcaaaaaattaatgatgagtttgattgttaaagaacttaaagagattaaagcaagttatggggatgagaggaggtctgtttttgaaaaatttaaaaatttttctaaaagcgatcttactaagcaagaggatttagtcgttactctttctcatgtaggttatgttaaagcccagcctttaagtat

SEQ ID NO: 295577 - DNA, 2398 bp, Unknown
  Bacterial polypeptide expressing nucleotide sequence isolated from the Sargasso Sea
aatggaaaattccccagaacagttaaacggcggttacgacgaatctaatattacggtgctggaaggactcgaagcagtaaggcttcgtccaggcatgtacattggaggtgtcgacagtgccgcgttgcatcatcttgtttttgaaattgttgataacagtgtcgacgaagcccttgccggctattgcaatgaagtccgtgtcagcattggtaaggacaacagcatcactgtggaagacaatggacgtggtattcctgttggaacccatgaagatgaaggggtttccgccctcgagttgatcatgactcgactccatgcgggaggtaaattcgattcctcaaattacaaagtctccggaggattgaacggtgtcggtgcttctgtcgtgaatgctctctcatcccgatgtatcgtcgaggttgaaagagatggtttcaaatggcagcaaaactatcaggaaggaaaaccggatggtgatttaaaacagctaaatccaagccaaaataatggtacacggaccattttctgggccgacaccaccatcttcgacgaaattgatttccactttgaaattctctcccaacgactaagagaactggcattcctgaatcatggactgaaaatcattctccatgatgatcgcaccgataaaacacaggaattccactatgaggggggattggcaaccttcattgaacatctgaaccagaataaaacagttctccatgaacatcctgtcagttttcagggagaatctgaggggatcgaaatggaagttgccttccagtacaacgatacctacaacgagcgaatctactcttttgtgaataatatcaataccgctgagggtggaagtcacctgacgggattcaaaggcgccctgacccgaactttgaataattatatggtgaccaataaaatctcgaacgataacgatgaaaaccttaccggtgaagatgttcgggaaggtatggctgcggttatcagtgtcagggtcattgatccccaattcgaatcgcagaaaaaaatcaaactgaccaacgttgaggtgaaaggcaaagtggaaagcctggtgaatgaacacctcaacaattttctggaagaaaaccctgcggttgccaaaaagattgttgccaaatcacttgatgcccagagagcacgcattgcggcgaggaaagcaagggaactaacccgacgtaaaaacgttttggaggtaagctctcttcctggaaaactggcggattgtcaggaatccgatcccgcattgagtgaaatattcctggtggagggtgactctgcgggaggctcagccaaacaggggcgtgaccgaaaaaaccaggccattcttccgctaaagggaaagatcctgaatgtggaaaaagctcggtttgacaaaatgctttccaatgatgaaatcagaaccctgatcactgcactgggaacaggaatcggcagggaagattttgacatcaccaaaactcgatatcacaagatcattgttatgactgatgccgatgttgacggaagtcatattctgacgttgatccttaccttcttttatcggcagatgcctgaaatcatcgaaaacggatatctctacattgcacagcctccgctatataaaatcaagaaagggcgagaggagcattatctccgggacgataaggaaatgtctgaaaccttgatccggatgggaagcaagaagcttaaactcaacggtacgatacgggaactggtagaggacgaactattcggaaccgtcatggatatcaaaaaatatcgcgatctatttgatcggatgagttccaatctacagctttaccgtctcattcaattgatggttcagcatgaggttgaattggaacatgccggtgccgaacacatccttgaaaaactccagcccttggttcagcaaattcctgaatttttcatcgaaagagataccgaaacagggaaaataaagatcctcctcaaggatgaggaattggaattttcctggaatcagctcgaaaatcttagactgaacgactacatgatgcttttgcaggttcatcgaaacctgatccaggttttaggagatcagggaagttggcatcttgaagaacccgacaaggacatcagtcatacctgcaaatcatggtacgaagttcaggaatatgttaccaattacgggaagaatgggatctatctgcagcgttacaaaggactcggtgaaatgaacccggatcaactttgggaaaccacattggatcctgaaacgcgaaccctgaaacaggtgaccatcgaagacttggtggaatcagacggaatgtttaccgtgctgatgggagaccatgtagagccgcgccggaacttcatcgaagaaaacgcacttcgggtaaaaaacctcgacatctga

SEQ ID NO: 295578 - DNA, 538 bp, Unknown
  Bacterial polypeptide expressing nucleotide sequence isolated from the Sargasso Sea
atgagtaaaaataattatggcgcagataaaatatccgttttaaaaggattagaggctgtaagaaaaagaccggctatgtatattggagatgttggtaagagagggtatcaccatctagttagtgaggttgtagataacagtatcgatgaagctttagctggtttttgtacttctatcattgtaaccataaaaaatgacgggtttatttctattgaagacaacggaagaggaattccagtagaaattcataaaaccgaaggaaaaccagccctagaggttgttatgactgtattacatgccggaggtaagttcgataaaaacacctataaggtttctggcggactacacggtgttggagtatctgtggttaatgctctttcagaaagcttggttgcagaagtccacagagatggttttcattataaacaggaatataaaataggtcagcctactactgaggttgaaaaaattggtaaaagcgataaaacaggaactattgtttcgtttaaaccggatgagacagttttttctcactaaa

SEQ ID NO: 295579 - DNA, 1888 bp, Unknown
  Bacterial polypeptide expressing nucleotide sequence isolated from the Sargasso Sea
atgactaatcaatacacctctgacgccattgaagttcttaacggacttgacccagttaaacgccgtccaggtatgtataccgataccagccgacctaaccatttaggccaagaggtcatagataacagtgtcgatgaagccttagctggccatgccactaaaatcgaagttgtgctccacacagataactcgctggaagtcactgacgatggtcgtggtatgccagtggatattcatcccgaagaaggtattcctggggtcgagctgatcctgactaaactgcatgccggcggtaaattttctaataaaaattatcaattctccggtggtttgcatggtgtagggatttcagtcgttaacgccctgtctcgcagagttgaagtcactgtgcgccgagatggccaagtgtatgatatggctttcgaaaatggctttaaagtcgaagatttacgagtcagtggtacctgcggtcggcgcaataccggtactcgagtacatttttggcctgatgcgagttattttgattcggcgaatttctccaattccaaacttatttatttactgcgtgccaaagcagtattgtgccccggtcttagaattaaattcactaataagcacactaacgaagtgcatgagtggtactacgagagtggcttaaccgattatcttaagacggcggtaggcgataatatcatgctgccggaagagccttttatcggtagttttaaggggcaaattgaggcggcagattgggctattacctggttgccagagggcggggagtcgatcaacgaaagttatgtcaacttgatcccaacgccattgggtggcacccatgtgaatggctttcgccaaggtttgttggagtcgatgcgtgagttttgtgagtttcgtaatctcatcccccgcgggattaagctctctcctgaggatatttgggatcgcgcagccttcattctgtcagtgaaaatgcaagacccgcagtttgcgggacaaaccaaagagaagctttcgagccgtcaaagctcagcctttgtttcaggtatcgtgcgtgatgcattttcgctttggttaaattcgaataccgaattagccgagtcattggctgaaatgtgtattaataacgcgcaaaaacgcttaaaagcagccaaaaaagtcgcccgtaaaaaagtcacatcaggtcccgcattaccgggtaaattgaccgattgtagtggccaagatccaatgcgcggcgaactcttccttgtggaaggggattctgcgggaggcagtgctaaacaggctagagaccgtgagtttcaagctattatgccgctacgtggtaaaatcttaaatacgtgggaagtggatgcatctcaggtattagcgtcgcaggaagtacatgatatttcggtggcaattggttgtgatcccgatagcaatgatatttctgagttaaggtatggcaaaatctgcattctcgccgacgccgattccgatggattgcatattgcgactttactctgtgcactgtttctgaaacattaccgagtgttggttgagcaggggcatgtttatatcgccatgccgccactgttccgtatcgatataggtaaagatgtttattacgctttagatgaggctgaaaaagaaggtattctcgatcgtatcagcgctgagaataaaaaaggtaaagttcaagtaacacgctttaaaggtctgggtgaaatgaatccactgcaattgcgtgaaacgacaatggaccctaatactcgccgtttagtgcagttaactattgatgatgcggaagaaactgattctcttatggatatgctgttagctaagaagcgttcacccgatcgtaaaaactggctcgaagataagggtgacatggcggtactttaat

SEQ ID NO: 295580 - DNA, 1450 bp, Unknown
  Bacterial polypeptide expressing nucleotide sequence isolated from the Sargasso Sea
acctcggtttgcttcaagcccgacatggagatcttcaccgtcggaatcagctttgattacgccaccctctccgggcgcctgcgtgaattggcctacctcaatggtggggtcagaattgtctttcgagatgagcggcctgaggcggctggtgaagacggtgagccccatgaagagacctacttctatgaaggcggcattcgtgaatacgtcaattacatgaatgcggagaaggatccccttcatcccgacatcatttacgtcaatgctgagaaagacggcgttcaagttgaggcggcgcttcagtggtgcgtcgacgcttattccgacagcatccttggttttgcaaataacattcgcaccgttgatggcggtacccatattgaaggcctgaaaacagttctgactcgcacgctcaatacctttgcccgcaagcggggtaagcgaaaagacaacgatggaaatttggctggcgaaaacattcgcgaaggcctaaccgccgtgctctcggtgaaagtccccgatccggagtttgaaggtcagacaaaaacgaagcttggcaatacggaagtacggggcatcgtcgacactgtcgtcggtgaagcgctgagtgaatacctcgaattcaatccccaggtcattgatctgatcctggagaaggcgattcaagcctttaacgcagcggaagctgcacgccgggcccgtgaattggtgcgccgcaagagcgtgctggaaagttcaacgcttcctggcaaattggccgattgcagttcccgcgatccagccgaatcagagatctacattgttgagggtgactccgctggtggctcagccaaacagggccgcgatcgccggaatcaagccatccttccactgcgcggaaagattctcaatattgagaaaactgatgatgccaagatctacaaaaacactgagattcaggctctcattacggcccttggtttagggattaaaggtgaagaatttgatgtcagcaatcttcgttatcaccgtatcgtcatcatgaccgatgctgatgtggatggagcccatatccgtaccctgattctcaccttcttctaccgctatcaacgagagctggttgagggtggctttatctacattgcttgcccgcctctttacaaagttgagcgcggtaaaaatcacacttattgctacaacgagcaagatctcaaaacaaccttggatggattcggcgaaaaggcgaattacaccatccagcgcttcaagggtttgggcgagatgatgccccagcagttgtgggaaacgaccatggatccctcaacgcgcacgatgaaacgggttgaaattgaagatgccgctgaggctgatcgcatcttcacgatcttgatgggcgacaaggtggcaccacgccgcgaattcattgaaacccacagcgctgagctcaacctggctgacttggacatctgat

SEQ ID NO: 295581 - DNA, 1013 bp, Unknown
  Bacterial polypeptide expressing nucleotide sequence isolated from the Sargasso Sea
taaattagtttcatcagaaattagacatattgttgaaaatataattaatgataaaatttccatttggtcggatcaaaatccttctacaattagaaatgttcttgaaaaaattactcaagcagcagtggcgagagatgttgcaagaaaagctagggataacattagaagaaaaggaagttttgaaataacaggtttgccaggaaaacttgcagactgccaaatatcaaaaaaagaaggtacagagctttacattgttgagggagactcagcgggaggttctgcaaaacaaggaagaaatagagaatttcaagctgttttacctttgcgaggtaaaatacttaacacttatgttggtacaaacggaaaaaacagaggaaatagtaatgaacaagaaaccaaagccttatcaaagatgatgtcctctagtgagatagtaactttaataaatgcccttggcactggctcaaaagattttaatcttgacaacttaagatacgaaaaaatagtaataatgacagacgctgacgttgatggttcacatatacgaacactacttttaactttttttaataactatccttttaatcagttaatagaaaatggaaatttatatttagctcaacctccactttttaaaataacaaaaaacaacaaaagttattatatgaaagatgaaaaagacttagaaaaatttattattaaaaatttaaataataaagaaaaaaaaggaaaattaagttctaaggaattgagcaagattatggatcaagaaaaacaaaaactttcaatacaaagatttaaaggattaggagagatgaacccagaagaactatggcagacaactttaaatcccgataatagaaacttacttaaagttcaatactcaaatggtactaaagaaaaatctaaagaagatcaaaaaattataagtattttaatgggtgatgaagttgcgccaagacgagagtttattactagtaacgcattggacgtagctaatttagatatctaaa

SEQ ID NO: 295582 - DNA, 1210 bp, Unknown
  Bacterial polypeptide expressing nucleotide sequence isolated from the Sargasso Sea
atgccaaaaacaaaaaaaagcactaacaaaaaaaagtacgactcttctaatataaaagtcttgaaaggccttgatgctgttcgaaaaagaccaggcatgtatattggcgacacagacgatggaacaggcctgcaccatatggtgtacgaagttgttgataattccgtcgatgaagcgctagcagggcattgttcagaaatatctgtaataatccaccaagatgactctataaccgttaaagacaacgggagaggcgtgccagttgacaaacacaaagaggaaaataaatctgctgctgaagttattatgacagttcttcatgccggcggtaagtttgatgacgactcttataaggtttctggcggactccatggtgttggggtctcagttgtaaatgctctttctcagaccttaagtttacgaatccataaaaatggaaacatatacgaacaagattatgctcatggagtgccaaaaaaagcacttaagaaaggcgctaagactgagagaacaggaactaccatatcgtttcagcctagtaaaaagactttttcaaacacatcattcagttatgaaacgctctctaaaagactgagagaaatgtcttttctaaatccaggactaaccattaatctcaatgacgaaagaacaaacaagacagactcttattgttatgagggaggcttaaaagactttgttcgccaccttaataaacctcaaaagccaacgcatcaaagcattgcatatatcaacaagaaatccaaaaaagacggagatattgaggtagaggttgccatacaatggaatgaatcatacagagaaaatacattttgttttgcaaacacaattcgacagaaagacggagggacccatcttgctggatttaggggcgcattaacaaggacaatcaacacctatatcgataaggaaattccaaaaaatgatacatccgtaacgggagatgattgtcgagaagggatgacggcaatcatctctgttaaacacccggacccgaagttttcatctcaaaccaaagataagctggtttcttccgaggttaagggtgtcgttgaatctgcagttaataaacacctcaaggaattcttagaggaaaaccccatagaggcaaaaataatagttggaaaaatattagacgcggctcgcgctagggaagcagcaagaaaagccagagaaagactagaaaaaaagg

SEQ ID NO: 295583 - DNA, 2059 bp, Unknown
  Bacterial polypeptide expressing nucleotide sequence isolated from the Sargasso Sea
atgacaaaaaacaatactaatacttatcaagcagactccattaaagttttaaaaggtctcgaagcagtaagaaaaaggcctggtatgtatattggtgatacagatgatggaactggcttgcatcatatggtctatgaagtagtagataactctattgatgaggcattagcaggtcattgtaaaaaaattgaagtaagtataaattctgatggttcaattacagttgaagatgatggtagaggaataccagtggactttcataaagaggaaaaaaaatcagcagcagaagtcataatgacacaacttcatgctggtggaaaatttgatcacgattcctataaagtttctggaggtctacatggtgttggagtttcagtagtcaatgctctttcgcaaaaattagaattatatgttgaaagagatggaaaaaaatattttgtcgagtttataaatggtgaaactaaaataccactaaaagtaacaggtaagtctaagaatactggtacaaagattaattttttaccttccaaagatatcttctcatctacaaaatttagtttttcaattattcaaaaaagaatgcgtgaattagcttttttaaataaaggaattaaaatcatacttaatgacctaacacaaaaaaaaataaaaacccaagaatttaaatttgaaggtggtataattgagtttgttgaatttttagatgaaaaaagagaaaaattaaaaaataagaatgataatgatttgtttagaaaacctatttatatcgagggaataaaaagtaatattaatgttcaatgttcattaaaatggaatgcaggatataatgaggacgtgttcccttatactaataatatttatcaaaaagatggaggaactcatcttttaggatttagaagtgcattgacaagagttgtaaataaatatgcatcagagcaaaatttattaaaaaaaagtaaagttttactgtctggagatgacattaaagaaggtttgacatgtgttctttctgtaaaaatcccagatcctaaattttcttctcaaacaaaagacaaattagtttcctcagaggtaagaaatattgttgagggtatagttaatgaaaaattgtcaatttggtttgaccaaaacccatctatttcaaaaataattttaacgaaaataattcaggctgctgtagcaagagatgttgccaaaagagcaagagaaaatgttagaagaaaaggggctttagagctaactggactacctggaaaattggcagattgtcaaaactctaaacaagaaggcacagaattatttattgttgagggagattcagctggagggtcagctaaacagggaagaaatagagagtatcaagcagtattaccattgaggggaaaaattttaaatacatatacagagataaatgggtctaaaaaaaatggaaatcaaaatgacctaagaacaaaatcattgtcaaagatgatttcttcaaatgaaattgttacattgataaatgctctcggattagatcctaaaacagaggaaatagacttacaggatttaagatatggaaaaattataatcatgacagatgcagatgttgacggttcacatattagagcgttacttttaacttttttcaacaatgttccttttaataaattaatagaaaaaggtcatgtttatttagctcaaccgcctctttttaaaattaataaaggttcgaaaggtatttacataaaagatgaaaaagacctcgaaaattatataattaagaattctaaggatataaaaaaagttaagaagaattctaaagaatttgataaaattattcaattagaaaaatcaaaactaaacattcaacgatttaaaggtctaggagaaatgaatcctgaagaattatggaatactactttaaatccagagacaagaaatttacttcaagttcaatattcaaaaaatcttcaaaaagatcaaaaccttatacaaacattaatgggtaacgatgttgcttctagaaaagactttattgtagataatgctataaatgttgttaatttagatatttaat

SEQ ID NO: 295584 - DNA, 898 bp, Unknown
  Bacterial polypeptide expressing nucleotide sequence isolated from the Sargasso Sea
atgtctgatattttagattccgataactcaggattaagcgaagataacgaccgaattattcagactgacctaagaaatgagatgtctcgttcataccttgagtatgcaatgagcgttatagttggtcgtgctcttccagatgcaagagatggattgaaacctgttcacagaagaattctttatgcaatgtatgaacttggtttgactagcggtagaccatacagaaaatgtgcaagagttgtaggagaagtacttggtaaataccacccgcatggcgatactgctgtttatgatgctttggttaggatggcccaggatttctcaatgaggatgccactcatagatggccatggaaactttggttctgttgataacgaccctccagcagcaatgagatatacagaatctcgtttacagtctcttacagatgagagtttattagaggatattgaatctgaaactgtagattttgccgataattttgacggttctcagcaagagccaactgttttacctgctaggatacctcaactacttctaaatggatcatctggaatagcagtaggaatggcaactaatattccacctcataacttaggcgaattaattaatggtcttaaatcaataatcaaaaacccttcaattgaagatagtgaactttttgaaataataaagggtcctgattttcccacaggtggtcaaatcttaggcagagacggtataagagaaactttcaaaacaggaagggggtcaataaccatgagaggggtagcaaatattgagcaaattaaatccattggtagagcagagaaagatgcagtaataatttcagagcttccattttcaaccaataaagctgcattaatagaaagaattgctgacttggttaatgaaaaaa

SEQ ID NO: 295585 - DNA, 766 bp, Unknown
  Bacterial polypeptide expressing nucleotide sequence isolated from the Sargasso Sea
atgagtgatttcgctaaggaaattatatctgtaaacattgaagatgaacttaaacaatcatatttaagttatgcacttagtgttatacatggaagagcacttccagatattcgtgatggtttaaaaccagttcatagacgaattttatttgcaatgtacgatttaaagaatttctataataggccatataaaaaatctgcaagagttgttggtgacgttattggtaaatatcatcctcatggtgattctgctgtttatgatgccatggtaagaatggcacaagatttctcaatgagatatccaattgttgagggtcaaggtaactttggttcaattgatggagatccacctgctgcaatgagatatacagaagtacggatgtccaaaataactgatcaaatgcttggtgatatcgagaaagaaacagtctcattctcaccaaattatgatggtagtgaagatataccagatgtattacctactaaaataccaaacttactagtaaatggctcttcaggaattgctgtgggaatggctacaaatattcctccacataatcttaaagaagttttgaatgggtgtatcaatttaattaagaatccgaaaatatctattgatgatttaattaaagatatatcaggtccagattttccaacagggggaactattgatggcaaggctggtatttatgaggcatataaaactggaagaggaataattcacacaagatcaaacacatcagttgaagaagacaaatctggaaaac

SEQ ID NO: 295586 - DNA, 2422 bp, Unknown
  Bacterial polypeptide expressing nucleotide sequence isolated from the Sargasso Sea
atgcctaagcaaaacaattacgattcatctaacatcaaggtcttaaaaggcctggaagctgtacaaaaaagaccaggcatgtacataggagatacggatgatggcagcggcttgcatcaaatggtatacgaagttatggataactccatagatgaagcgcttgccggccattgctctaatatcacagtaacagttcatgaggataatgctgttacagtcgtggataacggcaggggaataccggttgacgaacacccaactgaaaaaaaatcagccgcagaggttattatgactgttttacatgccggcggtaaattcgatgataattcatacaaggtatctggaggattacatggtgttggtgtttcggtagtcaatgcattgtcagagacattagagcttactatctataaaaatggcaaagaatactatcaagaatataaggacagcaagccattatcaaagattaaggaactaggaaatacgcaattgagtggtaccaaaataacattcagacctagtaaaaagtatttctcacttactaattttaattcagatgttctgaagaagagatttaaagagctagcttttttgaattctggtattgaaattaaatttatagatgaaaataaatcaatatcacaaacatttagatatgagggcggcattattgaatatgttaaagaacttactaaaaagaaaactccgattcaagagaagattataaacatatcatcttctaagaagaatatctcagtcgaacttgccctaatgtggtctaacaattaccaggaagaagttttatgtttcacaaataatattccacaaaaggatggtggtacacacctatctggctttaaaacatcactaacaaggactcttaattcgataatcttaaaaaataatcccaaagataaaattgatataacaggagaggacactcgagagggaataaccgcaattatttctgtgaagatgccagaccctaaattttcatcacagactaaagacaaattagtatcttctgaagttaaaggcatagttgagactcttgtcagttcaaaacttaaagaatatctagatgagaatcccaaggatctaaagtcaatcactgctaagatatatcaagctgcaaaggcaagagaagaggcgcgaaaagcaaaagaactaattaggaggaaagatccattaagtattggcaatctacctggcaaacttgctgattgtcaagaaaaagaccctactaaatgtgagctttttatagttgagggtgactcagctggtggatcagctaaacaagctagagatagaaaaacgcaagccatacttccgcttaaaggcaagatattaaatactgagagagcgcaagatcataaggttctttcatcatctgaaatttctactcttattactgctttaggatgtggtgttggcgacgattgctctttagatgaaaatagcaaatcgattaagaatctaagatatggtaaaattgttattatgacagatgctgatgttgatggagcacacatcagaactttactcttaactttctttcatactaaacttcgtttacttgttgacaatggaaatgtctatattgcacagccacctctttataaaataaaaaaaggtaaaacccaaaaatattttttagatgacaaagaactgaacgattttatttatcaagacatatccaatacattttcagtatcgtatggtaaaactaaattagaacgtgagagtgttaaacaacttttattatcttactctaaattattgtcaatagtagaaagtttctcggccaaccgtgatccagacttcattcttaatcttgcatttactgataaattatcaagtgagagctttaaaaacaaaaagttacttacaaagtggttgtctgattatgaaatgcttctaaattcgaccactccaattaatgtttcatactcattttctctacaagaatccgataaatctggtgaatatagtttcagaattacaaagactttaaatggtgtactttctaatctaccttctattgataagagattctttagttcggatgcttatcttgaaatatccgctctcaagctaaatgattatcatgacaatgttttctcttatgctaagaatgattccgaccaaagcaattcagatttggcaatatctcagctatacgaagctcttgttactagttctcgtaactctataagcattcagagatacaaggggttgggcgagatgaatccctctcaacttgaagaaacaactatgaatgtcaagtctaggtcgcttctcaaagtattgccattagatgagggcaacaccattgtttctgatctgatgggtgatgatgttgagcctcgtagacaactaattaaaagtgaaggacgttctgttaaatatcttgatgtatgat

SEQ ID NO: 295587 - DNA, 1803 bp, Unknown
  Bacterial polypeptide expressing nucleotide sequence isolated from the Sargasso Sea
aatagttggagacgtaatgggtaagtaccatcctcatggggatagttcagtttatgatacaatggtcagaatggctcaagaatggagcttaagatataacctcgttgatggtcaaggtaattttggttctgttgatggtgatagcccagcagctatgagatacaccgaggcgagaatgcaaaaaatatctgaggagttattatcagatattgataaagagactgttgactttcaattaaattttgatgatacgataatggagcctacagtattacccactagagtacctgccttaatagtaaatggtgcatctgggattgctgtaggtatggctactaatatgccacctcacaacctatctgaagttattgatggtataatgcaatatatagataataacgacattaccattgatgagcttataaagtatgttaaagcaccagattttccaactggtggaactatatatggttatgatggtgtcaaagaagcatttcatactgggaagggaagagttgtcatgagaggcaaggctattatagaaaatgtaaatgatagagaatgtatcatagtttctgaaattccatatcaggtaaataaggcagacatgattaaaaaaactgctgacctagtcaatgacggtaaaattgaaggaatatctacaataagggacgagtctgatagaaaaggtatgagaattgtttatgttcttaaaagagatgcaattccaaacatagttcttaataaactttataaatacacacctttgcagtcctcatttagtgtaaataatgtagctcttgtaaatggaagaccggaacttcttaatcttaaagacttaattcaccattttgttgaacatagacatgatgtagttgttaaaagaacaaattttgaactaaaaaaagctgagcaaagagctcatatacttgagggacttatcatagctagtgataatatagacgatgtgatcgatctgattaaaaaatcttcaaatgctgatgaggcaagacaaaaacttgaaaaaaagtataaactttctgagactcaagctaaggctataattgaaatgaggttgagacaactcactggacttgaacaaaataaattaagagaagagtatgacgatctacagaaaacaattaaaggatataaagaccttttagatagtaagacaaaaagaatgaacttaatcaaagaggagcttgctgatatcaaagaaaaatatggtgatgaaagaagatcagaaatcgaatatgctggtggtgattttagggttgaggatataattcccaatgaaaaagttgtaattacaatatctcatgcaggatacattaagagaactcctctaactgaatataaaactcaaaacagaggtggagtgggacagaaagcctctaaaacaagagatgaagactttcttgaagacttatttgttggtacaaatcaccaatatatgctattctttactcaaaaaggtaaatgtttttggatgagagtctttgaaattccagaagggtctaaaaattccaagggaagagctattcagaatcttattaatatagaacaagatgatagagttaaagccttcatatgtacacaagatctaaaagatgaagaatacgtcaacaatcattatgtaataatggcaacaaaaatgggtcaagttaaaaagacatcccttgagcaatattcaaggcctagatctaatggtattaatgcaataaccgtaaaagatggtgatgaattattggaagcaaaacttacaaatggtaatagtcaaataatgcttgccgttaaatc

SEQ ID NO: 295588 - DNA, 1422 bp, Unknown
  Bacterial polypeptide expressing nucleotide sequence isolated from the Sargasso Sea
tttgatagaaaatgagatgaaagcctcatatctcgactatgccatgagcgttatagtgagtagagctattcccgatttaagagatggactaaaacctgttcacagaagaattttgtatgcgatgaacgaaacgggtaatacgcatgacaagccctataggaagtcagctaggccagttggcgatgtaatgggtaaatatcatccccatggcgatagcgccatttatgactctttagttcgaatggcacaagatttttcaatgtctctgccactactcgacggacaaggcaattttggctccatggatggcgactcagccgctgcaatgcgatacacagaagtgagaatgcaaaaagcagcgactgcacttcttgcagatatagaccgcgataccgtcgactttcaagataattacgatgggaaggataaagaacctacagtgctaccttctaggtttcctaatatgctagtgaacggtgcgggaggtattgccgtgggcatggcgacaaacattcctcctcacaatctaggggaagtcatcgacgggacgatcagcttaattaataatcctgagacaacaattgatgagcttgttgaattaataccaggtccagattttccaactggtgggctaatcttagggaaatcaggctcccgaaaagcttacacagagggaagaggctccgttattattcgatccaaaacgaaaattgaagagataagaaaagatagatgggccattgtggtaaatcaaattccttatcaagtcaacaaggcgaacatgattgaaaaaatagctgagcttgcaagagataagaggatagaaggcatagcccacgtgcaagatgagtctgatcggctaggtataagagtagtgattgaactaaaaagggatgctacgccggaggtagtattaaatcagctgtacaaatatacaccgctgcaaaccagttttggatgcaatatgttagcattaaatagtggaaaacctgagcaattaaacctgaaggaatttttgaattattttgttttatttcgagaagaagttgttgcgagaagaacaaaatttgatttgattaaagcacgtgatagaagccatgttctatgtggtttggctgtagccgtttcaaatgtagatgagattgtaaacactataaaaacatcttctgatccacttgaagccaaggaaaagctaacttcgcgcagttggcccgcccaaggtatcgaagagtacttaaatctgatagatgatccccgccatacacttaataaaacggacggtacttataatttatcgcaatctcaagctaaggctatacttgaactgaggctccaaagattaactgctttaggagttaaagaggtaaccggcgaactaagtgaattagctacgaaaataaaggagtatttagctatactctc

SEQ ID NO: 295589 - DNA, 1255 bp, Unknown
  Bacterial polypeptide expressing nucleotide sequence isolated from the Sargasso Sea
tatgataaatactccttcttatggtgctgactctataaaagttcttaagggacttgatgctgtaagaaaaaggccaggcatgtatattggtgatacagatgacggttcaggcttacaccacatggtttttgaagttatagataactctatagacgaggctttagcaggtcattgtaataatattaatattactattaactctaataatactgtcacagtagaggacgacggtagaggtataccagtagatatgcataaaggagagaaaatgtccgcagcagaagtaataatgacacaattacacgccggaggaaaatttgaccatgattcttataaagtttcgggtgggttgcatggagttggtgtttcagttgtaaatgctctttcagaagagttaaaattgaatattttcagagaaggaaatgagtatgaaattaaatttgaaaatggaaacacgattaaaccactaaaaaagattggtaaaacaaaaaaaagtggaaccaaaatcacttttttaccctcaaaaaaaattttttcctctataaaatttagcacaaccattcttgaaaaaagaataagagaactggcatttttaaacaagggaattgcagtaaagctagttgataacacatccaaaaaacctaaagaattcttacataaatacgatggtggtattttagaatttgtaaaacatatcaataataaaaaaccaattttagttaataagaatgaaaaagaagtattcaaaaaacctgtttatgttactgctactaagaacaatgtagttgttgagtgctcttttgagtggaacgcaggatattctgaagaggttttaccatttacaaacaatattccgcaaaaagatggaggcactcatcttttaggttttagaagcgcacttacaagagttattaataaatataccgccgataaaaataataaaaaaaataaaattaatttatctggtgaggatataaaagaaggcttaacagccgtgctgtcaatcaagatgccagatccaaaattttcatcacaaacaaaagataaattagtttcctcagaaatcagaaatattgtggaacacataataagtgaaaaagtttcaacatggtttgatcaaaatccctctattgcaaaaactgttttagaaaaaattactcaagcggctatggcaagagatgtagctagaaaagccagagacaaagtaagacgaaaaggaacatttgaattatcaggactcccaggcaaactagca

SEQ ID NO: 295590 - DNA, 526 bp, Unknown
  Bacterial polypeptide expressing nucleotide sequence isolated from the Sargasso Sea
atgagttcatcttatctttcttacgctatgagcgtaattgtaagtcgagcattaccagacataagagatggtttaaaaccagttcatcgaagaattatttatgcaatgcataaaggtggctttgattggagcaaacaatacagaaaatctgcaagaatagttggtgatgtaattggtaaatatcatcctcatggtgatcaggctgtttacgatgctttggttagaatggttcaagatttctcaatgagtttaccattaatagacggtcaaggaaattttggctctgttgatggtgatcctcctgctgcaatgagatacacagaaactagattagcaaaaatttctcaaaatttaatagaagatatagataaagacactgtagaatttaaaagtaactatgatgagactgagagagaacctgaggttttaccagcccaatatccgaatttattagtaaatggtgctggaggtattgctgttggaatggcaactagtattcctcctcataatttatcagaagttataa

SEQ ID NO: 295591 - DNA, 701 bp, Unknown
  Bacterial polypeptide expressing nucleotide sequence isolated from the Sargasso Sea
aaaattagcggattgtcaagaaaaagacccatcactttctgagatatatatagttgagggtgattctgctgggggatctgctaaacaaggcagaaacagaaaaaatcaagcaattcttcctcttaaaggcaagataatcaatgtagaaaaagcaaggattgataaagttcttggttcagcagaggtaggtacattaataaaggcattaggctgtggaataggagaagaagactttgacataaataatttaaggtaccatagaataataataatgaccgacgcagacgtggatggctctcatataagaactctgttattaacattcttttataggcagatgtatgaaatagttgataatggacacatatatattgctttgccgcctttatataagataactaaaggcaaagaatttatatacgcatctgatgaaaaagaaaaagacgctgcaataaaaagtttatcaaaaaatggtacaagaggattagaggttcaaagatacaaaggattgggagaaatgaacccagagcaactatggacaaccactatggatcctacaaatagaaggatgatgcgtgtagatattaaagatgttcaggatgcgaatgaatcatttgaagttctaatgggcgatgatgttgaaccaagaagggaatttattgatgcaaatgctctttcagtaaaagagctggacatttaat

SEQ ID NO: 295592 - DNA, 982 bp, Unknown
  Bacterial polypeptide expressing nucleotide sequence isolated from the Sargasso Sea
atgccgaaaaaacaaaataaaaaagaatcttacgactcatcaaacatacaagttctaaaagggcttgaagctgttaaaaaaagaccaggaatgtatataggtgatactgatgacggctcagggcttcatcatatggttttcgaggttgttgataattgtattgatgaagcaatggcaggacattgctcagaaatagttgtttcaattaataaaaatgggtcaataactgttaaagataatggtagaggaattcctgttgatacacacaaaaaagaaaaagtacctgcagcagaacttattatgacaacccttcactctggtggaaagtttgatgataacagctataaagtttcaggtggcctacatggtgtgggtgtgtctgttgtaaatgctctttctgaggaattaacacttaaaatttgcagagatggcgggcagtatgaacaaaaatacgcaaacggtaaagctcaaaccaaactcaaaaaagttaaaacctcaaaagaaacagggacagagatcacatttaagccatctaaggaaatattctcgttcgttaactttgatatagataaaataaataaaagagttcaggagttatcttttcttaatgcaggtgtgaatattcttgttgaagataaaaaaacaggcaaatctaaaaagttctcaaatagtggaggcctatctagctatgttaagtttttaaaaggaagaaaacaaaacatatccgaaatatttcactgtgaaggagagcaagatgggcttagtgttgaaatagcgcttcagtggaatgatgcatactcagaaaacgttctttgttacacaaacaacatacctcaaaaagacggcggaacacatctttcaggatttcgatcaagtttaacaagagtgatgaaaacatttatcagaaaggaagaattaaataagaaatcacctgttgagttacttggtgaagatgttagagagggggttaacagcaaatagt

SEQ ID NO: 295593 - DNA, 1451 bp, Unknown
  Bacterial polypeptide expressing nucleotide sequence isolated from the Sargasso Sea
aaaagggaaggtgtcaaaaaaaacaggaacaaaaataaattttttacccgatcctaaaatttttgacgaaacacagctttttgagtacaacatcgtttctgaaagacttagacagactgcctttcttaataaaggattaaagataaaccttacggacaacagagtaaagccagcaacaaaggaaaattttcactacaaaggcggtcttgttgatttcgttgattatttaaacgagggcttcgaagttcttcatgaaaaaacaatttcattttcagatcaaagcaaagactcagaaattgaagtagccatgcagtggaaaacagaagacgacataaacattaaaagttttgcaaacaacatacacacacttgaaggaggaactcacgaggaaggccttagaacagcagtaacaaaagccattaacgactttgctaaatcaagaaaccttcattctgatatttcattaaccggtgacgacataagagaaggtattacaggagtggtttctgtaagggtcaaagaacctcagtttgaaggccagactaaaacaaaattaggaaacaccgaaatgaaatcaagagttcaagttttagttaatcaagaatttcctaaatggttgtcaaaaaacacaaaagaaggaagggcaatcgtagagaggtgtgctcttgccgccaaagcaagaatgagtgcaaaaaaagcaagagagcttactaaaagaaaaagcatactcgaaacttctgggcttccaggcaagttggcagactgttcatcaacagacccctctgaaagcgaattgtttattgtagaaggagattcagctgctggaccagcaaaacaggcaagagattcaaaaacccaggcaatacttcctataagaggaaaaataataaacgttcagaaagttacagaaaatagagcattacaaaatgaagaaatcagctcattaattaaagcaataggaacaggaataaatactgaatacaaaggagaagagtcaagatacgacaaaatcatacttttaacagacgcagacgtagacggcgcacacatcagaacactattgttaaccttctttttcaaatttatgccgggtcttataaaggaaggaaaagtttggatttcagagcccccgctttatagggcaaagtcatcaggatcaataaactaccttaaagacgacgaggatctcgaagcatttaaaaaagaaaataaaaatcgaaaatttgatataagcaggttcaaaggtcttggtgaaatgaacgctggagagctttgggacacagcaatgaacccagagtcacgcacattaatcaaagtaagcattgctgatggcaaagcggctgaagcaaaagcagcaaatatgtttgaagttttaatgggcaacgacgtgacaaaaagaaaaacctttatagaagaaaatgcaaaatatgtaaggttcctggacgtttaat

SEQ ID NO: 295594 - DNA, 1374 bp, Unknown
  Bacterial polypeptide expressing nucleotide sequence isolated from the Sargasso Sea
gttgattttaccccaaactttgatgacagcctagaagaaccaagcgtacttccaacacaaattccaaacctgctaatgaatggatcagagggaattgcagtaggaatggcaacaaaaatacctccgcataatataaacgaattaatcagcggtttggttgcattattacaaaacccgaacataaccattgaagagctaattgaaaaccatattaagggaccagattttccaaccgcaggatttataatgggtagcgatggaataaacagcgcataccaaacaggccgcggaagaattgttatgcgcggaaaagctcaaattgaagaaaatgacaaaggaaaacaaagaattataataacagaattaccgtatcaagttaacaaggcaaatcttgtagaaaaaatagcagacctagtaagagaaaagaaactggatggaatttcagatctaagagatgaatctgataaagatggaaatagaatagttattgaatgtaaaagagatgcaatagctgaaattattcttaacaacctatataaatttactcaactgcaagatacgtttggcgtgataatgttagccctcgtaaatggcgttcctaaaattatgaacatcaaacaagtattgggacactttttagactttaggcgagaagttatcattaaaaggacaacctttgaattgttagaggcggaacaaagagcacacatccttgaaggtctcaaaaaagcccttgaagatatagacaacatcattcagataattaggggctcttcaaacccagaggcagcaaaagaatctctaatttcatcatatgagtttagcgataagcaagcaaaagcaatattggatatgcgtcttcaaaaactcacctcgcttgagattgataagattgttcaagagtataacgacctacaggttttaattaaagaattaaaccatattttagaaagccatgaaaaacaaagcgaaattatagaaagtgagcttgcagaagtattaaacaaacatggagatgaaagaaggacagaaataataccatttagtggagaattaagccttgaggatatgatagcagatgaagagatgatagtaaccataacacataatggatatataaagcgccttcctgctgatacttggaaaacacaaaggaggggaggcaaaggcatgaagggtgcaaaaacaaaagatgacgattttgttgaacacctatttacagcctcaacccacaatactatgttgtttttcacagaccaaggaaaatgccactggttaaaagttcaccaaattccacaagcaagcagaacctcgcaaggaagggctattgttaatttaattggatgtgaaacaggtgaaaaagttagcgccttt

SEQ ID NO: 295595 - DNA, 798 bp, Unknown
  Bacterial polypeptide expressing nucleotide sequence isolated from the Sargasso Sea
aatggataagaaaaacttcacttccatctcacttcaagaagaaatgcaacgttcttatttggagtatgcaatgagcgtaatagttggacgtgctttgcctgatgcaagagacggtcttaaacctgtacaaagaagaatcatatttgcaatgtacgaattgggtttaacacctgataaaccatttaggaagtgtgcaagagttgttggagatgtgcttgggaaataccatcctcacggtgatcaagcggtttatgatgcattagtaaagctagtacaaaatttttcaactaaatatcctactcttgacggtcatggaaattttgggtctgtagataatgatccacctgcagcaatgagatatactgagaccagattagctccaatagctcataaaggatttcttgaagaaattggatcagaaacagtaaacttttcaaataactttgacggttctcaaaaagaaccagatgttcttccagcccaacttccatttttattattgaacggctcatcaggcattgctgttggcatggcaacaaacattccgcctcacaacctaggagaaattgtagatggtttagttgccttagttaaaaataaagatattagtgataaaaaactctctaacattatccaaggacctgattttcctacaggcggagaattaatttatagtcgtgcagtagaagaactttatcaaactggaaaaggatctataacgataagaggcgttgtaaatacggaagaggtgaatttaggcaaagggaaacataaaaaaaatgcaataataattacgga

SEQ ID NO: 295596 - DNA, 1249 bp, Unknown
  Bacterial polypeptide expressing nucleotide sequence isolated from the Sargasso Sea
aatgactaaggaaaaattcacttctatatcgttgcaggaagaaatgcaacgttcctatttagaatacgcaatgagcgtaataataggacgtgctttacctgatgcgagagatggactgaaaccagttcaaagaagaattcttttcgcaatgcatgaactaggacttactccagatagaccattcagaaaatgtgccagagttgtgggcgatgtactaggtaaatatcatcctcatggagatcaagcagtctacgaggcactggttagattagttcaagatttttctacaaaatatccaactcttgatggtcatgggaattttggatctgttgataatgacccgccagctgcaatgagatatacagaaacacgattggcaccaatagctcatgaatgtttccttcaagagattggatctgaaacagtaagttactcaaataattttgacggttcacaacaagaaccagacatattgccggcacaattaccctttttgttattaaatggttcctcaggaatcgctgttggtatggcaacgaatatccccccgcacaatcttggagaaatagttgatggtttaattgctctcataaacgataaagaaataagcgacttgagattgtcgaaaattatattaggacctgattttccgactggaggagaattaatttgcaatagtgcaatgaatgaagtttacctacgagggaaaggctcagtaacagttaggggagtaattaaaaatgaagagattaatttagggaaaggaaggcataaaaaaaatgcgcttataatttcagaactaccttatcaaataagtaaagcaggatggatcgaaaagcttgcagaattggtgaatctaggaaaaattgatgggatttctgatattagagatgagagtgatagagacgggatgaggatagttattgaattaaaaaaagattcaaactctaaaattgtggtatcaaatttattcaaaaaaacagctttacaatctaattttggtgcaatatttttagctttagttaacggtaaacctgttcaacttacactaagaaaatatctaaattattttctaggatttagagaagaaacaattagaaaaagaacaaaatattttttaagaattgcatcagaaaaatttgcaatactagaaggattttcaatagcaactaaaaatataaaagatattattgaggttattcaaagctcagaaaatgcaactgaagcaaaatcaatattaatagtcaaa

SEQ ID NO: 295597 - DNA, 1078 bp, Unknown
  Bacterial polypeptide expressing nucleotide sequence isolated from the Sargasso Sea
ggtttttgaggtcgttgacaactctgttgatgaggctttggcaggtttttgtacacacatagaggtaatcattcatgaggatgactctataactgtaaaagacaacgggcggggcatacctgtagataaacataaaacagaaaagacttctgcagccgaggtcatcatgaccgtattgcatgctggaggtaagttcgatgatgattcatacaaggtttctggaggcttacacggtgtcggggtttcagtggtaaatgctttgtcagaaacgttaaacctaagaatacataaaaatggaaatacttatgagcaagactatgttcatggtgttccccaaaaaccgcttaaaaaagggtctaaaacaaacagaagcggaacaacagtaaccttcaagccaagcgctaaaacatttactaataccacctacagctttgatattttatctaaaagattaagagagctttcattcttaaactcgggactaagcattaaacttactgatacaaggtctggaaaagaagaagagttttactttgaaggcgggatcagtgcatttgtatctcatctaaacaaagttcaaagccccgtacatgagtctgtcatcaatttcagcaagacaattgacgatataaccgtagacatcgccttacaatggaatgagtcttacagagaaaacatgtattgttttgcaaacaccataaggcaaaaagatggtggaacgcacttagctggctttaggggcgcgctcacaagaacaataaatacatatatagacaaggaaattgcaaaggccgatatatctgtttctggagaagactgcagagagggcatgacagctataatttctgttaaacatcctgatcccaagttttcatcacaaaccaaagacaagctggtctcttctgaggttaaaggggtagtcgaatcagtggttaataaacaccttaaggagttcttaatagaaaaccccaacgaagcaaaaattataatcagcaaaatagttgagtctgctgcagcaagagaagctgccagaaaggcaagagaaatgacccgtagaaagggagcgcttgatattgca

SEQ ID NO: 295598 - DNA, 1663 bp, Unknown
  Bacterial polypeptide expressing nucleotide sequence isolated from the Sargasso Sea
aatgagtaaaaataactacggtgcagataaaatttctgtattaaaaggtctagaagctgttagaaaaagaccagccatgtatattggtgacgtaggaaaaagaggatatcaccatttggtcagtgaggttgttgataatagtattgatgaagctctggcaggcttttgtacgtctataatagttactataaaaaatgatggttttatatctattgaagataacggaagaggaattcctgttgaaatccataaaacagaaggaaaaccagcgcttgaagtggtcatgacagtattacatgccggaggtaaatttgataaaaatacatataaagtatctgggggtttacatggtgttggtgtttctgttgtaaacgctctttcagaaaccctgatagccgaagttcatagggatgggttttattataagcaagaatataaaataggagaacctacaacagaggtagaaaaaattggaaaaagcgacaaaacaggaacaattatttcatttaaacccgaccaatctgttttttctcataaaggctttgaagaagaaataataaaaggaagacttaaagagttggcttatttaaataaaaacctttcaattaaattaataaatgaacccgaagaaactgaaacggaatattgttttcctggaggattatctgattttgttaaatatttagacggaaacgaagatcttattcatgacgaagttatttctgttacaaaagaagacatagaggttccagtagatttagctttaagatatagcacaaactataatagcaatattttttcttttgtaaacaatattaacacaattgaagggggaacacacctttctggttttagatctgcccttacaagagcattaaacagttatgccaataaaaatgacctaattaaaacaaaaaagaatgaaaagttttctctttctggagatgacttcagagaaggattaactgttgttatttctgtaaaagttcaagaacctcaatttgaaggacaaacaaaaaccaagctcggaaatggtgaagttaagggaatggtagataatgttgtatacgatggaatacaggcatttcttgaacaaaatccaaaggttggaaaaagaataattgaaaaggcagcagaggctgcaagagcaagaattgctgctaaaaaagcgagagaattagtcagaaaaaaatctggactaggttcaacaaccctgccaggaaaattagcagattgttcaaataaagaccccctacaatgtgaactttttcttgttgagggggattctgctggaggtacagcaaagcaaggcagagacagaagaacacaagctatattgccccttagagggaaggtaattaactcagaaaaagcaagagaagacaagcttttagcaaacaacgaaattcagtctattataacggcgcttggatgtggttttggtgaagacgaagacgacccaaacagctttaaccctgaaaaattaagatatcataaaatagttattatgacagacgctgatgttgatggtagccacattagaacgcttttgttaacattcttttggagaaaaatgaaaagcttggtacagggaggctttttatatatggcaatgccaccattatataaaagaagcagggtaaaaaagaaagatatgcatata

SEQ ID NO: 295599 - DNA, 976 bp, Unknown
  Bacterial polypeptide expressing nucleotide sequence isolated from the Sargasso Sea
aatggccaaaaaatcacaagaagccaaatatgactcaagcaacatccaagttttaaaaggtttagaagcggtaaaaaaaagaccaggaatgtacattggtgacactgatgacgggtccggattacatcatatggtttttgaagttttggataactgcatcgatgaggcaatggcaggatattgttctgacattaaagtaataattaataagaacggatcagtaacaattgaagataatggtagagggataccagtagatgttcataaaaaagagggcgtatctgcagctcaattgataatgacaactttacactcaggcggtaaatttgacgataactcttataaagtttcaggtggattgcatggtgttggcgtttcagttgttaatgctctttcaaaaaaactaaccctagaggttcatagagacggtggagaatattttcaagagtactcagatggaaagcctaaagcaaaattaaaaaaagtaaaaaaatcagacaagactggaacaaaaataaccttcttcccttctgagaaaatattcacatcgattgattttgaggttgatagaatttacaaaagaattcaagaactgtcatttttgaatgccggagtttcaattaatgttgaagataaaaaatcaggcaagtcaaaaaaatttaaaaataatggagggctatccagttacgtcactcacctaagaggaagaaagcaaacagtctctgatatttttgaatgttcagcaactgataatgatgttggagttgagatcgctatgcaatggacagattcttatactgaaaatgttttgtgctatacaaataatattcctcaaaaagatggtggaacacatttagctggatttagaggaagtcttacaagggtgctgaaatcttttattaaaaaagagaatgctaaaaaaactcctacagatttgcttggagaagatgttcgtgagggtttaatagcaataata

SEQ ID NO: 295600 - DNA, 976 bp, Unknown
  Bacterial polypeptide expressing nucleotide sequence isolated from the Sargasso Sea
atgagtgattttgcaaaggaaattatatctgtaaatattgaagatgagcttaagcaatcatacttaagttatgctttaagcgttatacatggtagggcattacctgatataagagatggactaaaacctgttcacagaagaattctatatgctatgtatgatcttaaaaattattacaacagaccatacaaaaaatctgcaagagttgttggagatgtcattggtaaatatcatccacatggtgactcagcagtttatgatgctatggtaaggatggctcaagatttttccatgagatatccaattgttgagggtcaaggtaattttggatctattgatggcgatcctccagcagcgatgagatacacagaagtacgtatggcaaagattaccgatcaaatgttaaaagacattgaaaaagagacagtttcatactcacctaattacgatggtagtgaagatatcccggatgtattacctacaaaaataccaaatttattggtaaatggttcatctggaattgctgttggtatggctactaatattccccctcataatattactgaagttctaaatggctgcattaatttaattaacaatccaaaggtatcgattgatgaattgataaaagatatttcagggcctgattttcccactggaggaactattgatggaaaagcaggaatatatgaggcttataaaactggaagaggaataattcatattcgttcaaacacatcaattgaagaggataagtctgggaaacagtctttaattattaacgagattccttttatggttaataaggctagaatgttggaaaaaattgctgaacttgtaaaagaaaaaaagattgagggcattactgaaattagagatgagtctgacaaagatggattgcgggtagttattgaagtaagaaaaggagactcagttgaggtattagaaataatttgtttgcgcaaacacaattaga

SEQ ID NO: 295601 - DNA, 1921 bp, Unknown
  Bacterial polypeptide expressing nucleotide sequence isolated from the Sargasso Sea
aatggcaaaaaaatctaaagaagccaaatacgactcaagtaacattcaagttctaaaaggtttagaagcggtaaaaaaaagaccaggtatgtacataggagatacagatgatgggtctggattacatcacatggtttttgaggttttagataattgtattgatgaagcaatggcgggttattgttcggacattaatgtcataattaataaaaatggttctgtaacaattgaagataacggaagaggaatacctgttgatgttcataaaaaagaaggagtgtctgctgcacaattaataatgaccacccttcactctggtggtaaatttgatgataactcttataaagtttcgggggggcttcatggtgttggtgtttctgttgtaaatgctttatcaaagaaactaactttagaagttcatagagatggtggtgagtatttccaagaatacgcagatggaaaaccaaaagcaaaattaaaaaaagttaagacgtctaaaaagactggaacaaaaattactttcttcccttctgaaaaaatttttgcgtctgtagattttgaagttgaaagaatttataaaaggattcaagagttatcatttttaaatgctggtgtaggtattaatgttgaagataaaaaaactggcaagtttaaaaaatttaaaaacacaggcggcctttcaagttacgttacacatttaaaaggaaggaaacagatagtttccgaaatatttgaatgttcagcaacagaaaatgatgtgggagttgaaatcgcaatgcagtggacagactcatatagcgagaacgttctttgttatacaaacaatattccccaaaaagatggagggactcatttggcaggtttcagaggaagcttaacaagagtactgaaagcatttataaaaaaagaaaatgcaaaaaagacaccaactgatttgttgggagaagacgtaagagaaggtttaattgcaataatttctgtaaaagtgccagatcctaagttttcatcacaaacaaaggaaaaacttgtctcatcagaggtagaaagtgtcgtaagtacaatttttagtaagtattttaatgaattccttctagaaaacccgaaagacgcaatgtgtattgttgggaaggtgtctgaagcagctttagcaagagaagctgcaagaaaagctagagaaatgaccaggagaaagggtgtgcttgagattgctggattgcctggaaagcttgcagattgtcaagaaaaagatccaacactatctgaaatatatatagttgagggtgattcggctggaggatcagcaaaacaaggaagaaatagaaaaaatcaagcaattcttcctttaaaaggtaaaattattaacgttgagaaagcaagaattgataaagtcttaggttcagctgaagttggcacacttattaaagctcttggttgcggtattggcaaggaagattttgatattgataatttaagataccatagaataataataatgacagacgcagatgttgatggatctcatattaggacacttcttttaacattcttttacaggcaaatgtatgaaattgtagaaaaagggcacgtttacatcgccttaccacctctatataaaattactaaaggtaaggagtttgtttatgcttccgatgaatctgcaaaagatgatgctattaaaaaactttcaaaaaatggcaatagaggcctagaagttcaaagatacaaaggtttgggtgaaatgaatccagagcaactttggacaacaaccatggatcctattaatagaagaatgatgagggttgacatcaaggatgtacaggatgctaacgaatcatttgaaatgctgatgggtgatgatgttgagccaagaagagagtttatagacgctaatgctttatctgtaaaagagttagatatttaa

SEQ ID NO: 295602 - DNA, 1639 bp, Unknown
  Bacterial polypeptide expressing nucleotide sequence isolated from the Sargasso Sea
catggcaaaaaaaactaagaaaaaaaagactgtaaaaaagaaaagtctcaaaacaaaaccaataaaaaaaactaattcgacttatacagctaaggatattgaagtactagagggcttggaaccagtccgcaaaaggcctgggatgtatattggtggaacagacataatagcaatgcatcacttggtgagtgaagtgttagacaactcaatggatgaagttgtagccggtcatgctgataaagtagatgtaaaacttattgataatttaacaattgaaatctctgataatggaagaggaataccagtcgacaagcatcctaaatttaagttgcctgcagcagaggtaataatgacaaccctgcattctgggggaaaattttcaaatagtaattacaaaacatcgggtgggcttcatggtgtaggagtttcagttgtaaatgccctgtcaaagaagttatctttagaaattgctagggataaaaaagtttatactcaaaattattcacaaggtttctcaaaaaataatctaaaaacaatcaagaaagggtctataaagaaaggaactaaaatcatattctcacctgatccagaaatatttggagatgatataaattttgactcatcgataatttataatatggctaaagcgaaagcctatctaatccctgatgttgtgataaattggacatgtccaaaatcattaacaaaaaaaaatgtacctacctctgataaacttcattattctgacggaataaaagattaccttgaaacattatctcaacctcatgaaccaatctttgatgaggctttttatttcaaaagtgacttagataaagatgagagctcaatagaaggtattattaactggtatgatgctatagagccaatcgcggaatcttactgcaatactataaaaacacatcaaggtggaactcatgaaaatggatttaaatcagcggtatttaaagcttttaaagaattttctaagttaaaatatgagcgtaaatcatcacaaatcaatcaagaagatctgtttggatcttcaggttcaattctttctatcttcattgaaaatccagaatttcaaggtcaaaccaaagaaaagttatcaagtgtggaagcgggtagaaaaatagaaagtaagattaagcagctatttgaacaatggttaaacactaaaactaagtctgctgaaaacttattcctgtatgcatttaaccgttctcagatcagactacaaaacaagtctgatcaaataatcgatcgaaatattaagagaaagaaaattactcttcctggaaaacttgctgactgctcaattgacggaaacaaaggaacagaaatatttttagttgaaggtgattcagctggaggttctgctaaacaagctagagatagacaaaatcaggctatacttcctctgagaggaaaaatattaaatgtaattagtgctgctcgtgacaaggttaatgcaaatcaagaaattattgatctagttcaagctcttggatgcaagcgaggagaaaaatattcaccaaaagatatacgatatgaaaaggttatcattatgaccgatgcagatgtcgatggggctcacattgcgacacttttaatggcctttttttatagtgaatttcca

SEQ ID NO: 295603 - DNA, 811 bp, Unknown
  Bacterial polypeptide expressing nucleotide sequence isolated from the Sargasso Sea
catgagtattatttcaaaagtatcagaagcagctttagcaagagaagcagcaagaaaggccagggaaatgaccagaagaaaaggtgtattagaaattgctggacttcctggtaaattagctgattgtcaggaaaaagatccaaaattatcagaaatatatattgttgagggtgattcagctggaggatctgcaaaacaaggaagaaataggaagaatcaagctattttgcctttgaagggaaagattctaaatgtagagaaagcaagaattgacaaagttttgggatctcaagaggttggaactctcattaaagcattaggatgtggtattggagaggaagactttgacataaacaatttaagatatcacagaattataataatgacagatgctgatgtggatggctcacatataagaactttgttgctaacgttcttttatagacaaatgtatgagatagtagataaaggccacatttatatagctttaccccctttatataaaattacaaaaggtaaagagtacatttatgcctcagatgagaaacagaaagatgaagcaattaaattattatcaaaatcaggatccagaggtttggaggttcagaggtataaaggtttaggcgagatgaatcctgagcagttatggaccacaaccatggatccggaaaatagacgaatgatgagagttgatattaaagatgtacaagatgcgaatgagtcttttgaaatactcatgggggatgatgtggagcccagaagagaatttattgataaaaatgcattaactataaaagagctcgatatttaa

SEQ ID NO: 295604 - DNA, 449 bp, Unknown
  Bacterial polypeptide expressing nucleotide sequence isolated from the Sargasso Sea
aatgaaaagaataattaagaatgatattaatgaaattctaaaaagtagatatctctcatatgcagtatctactataatatcaaggtccctacctgatttaagagatggcttaaaaccagttcatagaagaataatttattctatgtatttactgaaattatttaataattcaccttttaaaaaatcagcacgaattgttggtgatgttatgggtaaatttcatcctcatggtgatcaagcgatctatcagagcttagtaagaatggctcaggatttttcttcaagacttactctgattgaaggacagggtaattttggaaatattgatggcgataatgcagctgctatgagatatactgaagcaagactagaggaaataactgaattatttttcgacggtatagaggaagattctattacttttgttgagaattatgacagtcaaaacc

SEQ ID NO: 295605 - DNA, 709 bp, Unknown
  Bacterial polypeptide expressing nucleotide sequence isolated from the Sargasso Sea
atgagctcgtcttatttgtcttatgcaatgagtgttattgttagtcgtgcattacctgatgtaagagatggattaaaaccagttcacagaagaattctttatgcaatgtacaagggtggttatgattggtctaaacaatttagaaaatcagcaaggatagtcggggatgtaattggtaaatatcaccctcatggtgaccaatcagtatatgatgctttagttagaatggtacaagatttttcaatgagtttacctttggttcaaggtcagggtaattttggatctattgatggcgatcctgcggctgctatgaggtataccgaaacaagattatcaaaagtttcacaatttttaattgatgatatcgaaaaaaatacgattagttttaaaagtaattacgatgaaacagagaaagaacctagcgtattacctgcacaatttccaaatttattagtcaatggtgctggaggtatagctgttgggatggcaactagtattcctccgcataatcttggtgagataattgatggtacattagccttaatagataacaaagatattaaaataaaagaattaatgaaacatattcctggaccagactttccaactggaggagtaataatcggtaaagatataattaaacaaggttacaacaatggaagaggctcatttaaaataagaggtgaagtatcagttgaaagcttaaaga

SEQ ID NO: 295606 - DNA, 1017 bp, Unknown
  Bacterial polypeptide expressing nucleotide sequence isolated from the Sargasso Sea
gatgctcgtgatggccttaagcctgttcatagaagaatcttatatgcaatgcatgaagatggttatgaccataataaacaatatagaaaatctgcaagggttgttggttcagttataggtaaatatcatcctcacggtgatcaaagtatttatgatgccttagttcgaatggcccaacctttttcacttcatctacctttagttgatggacaaggaaacttcggttctgttgatggtgatccacctgccgcaatgcgttacacagaagtaaggatggaaaaaattgctcaccacttactcaatgacattgatcaagatacagttgattttcaagaaaattatgacaattcagagagtgagcctattgttttaccagctgaatttccgaatttacttgttaatggagctggtgggatagcggttggtatggctacaaatatcccgcctcataatctttcagaggttactgacgcttgtattctactcatagataaacctgaaaccgatataaatgaactatgtgaaattataccaggtccagactttcctaccggcggtttaatacttggtaaaagaggtgctaagagcgcatatacaactggaaaaggatctgtagtgattagggccaaagtagaggtagaagaaataagaaaagacagggaagctctaatagttacggaaataccttatcaattaaataaagttttattaattgaaaaaattgcagaattagtaagaaataaatcaatagagggaatatctgatttaagagatgagagcgatcggcacggtatgcgaatagtaatcgaactaaagagagattctgttgctgatgtaattttgaatcaactatataaatttactcaacttcaatcatcatttggagctaatcttgttgctttagataggggctctccaaaagttatgaatcttaaagaaatgcttacctgttttattgattttagagaagaggttgtaacaagaaggcttaaatttaaactaaataaagcaagagat

SEQ ID NO: 295607 - DNA, 487 bp, Unknown
  Bacterial polypeptide expressing nucleotide sequence isolated from the Sargasso Sea
tatggataaaaatcaaattactgaaaaaaatattaagcctattgtaatgtatgatgagattagctcatcatatctatcatacgcaatgagcgtaattattagtagagcattaccagatgttcgtgatggacttaaaccagttcacagaagaattttatatgcaatgcataaaggtggctacgattggaacaaacactttagaaaatcatctagaattgttggtgatgtaatgggtaaatatcacccgcacggtgatcaagcaatatatgatgctttagtaagaatggttcaagatttttctatgagtttgccattgattgatggtcaaggaaattttggatctatagatggagataaagcagcagctatgaggtataccgaaacaaaactttcaaaagtaactcagtttttgattgatgatatagaaaaaaatactgttaattttaaaagtaattatgatgaaacagaaaaagaacctgaagtttta

SEQ ID NO: 295608 - DNA, 2425 bp, Unknown
  Bacterial polypeptide expressing nucleotide sequence isolated from the Sargasso Sea
catgactgaaacgaacaattcgcaacccgataacagctacggcgcctcctcgattcagatcctcgaaggtctggaggcggtgcgcaagcggccggggatgtacatcggggatacgtcagacgggaccggtttgcatcacctcgtattcgaagtgctggacaactccatcgacgaagcgttggcggggcattgcaacgatatccaggtgatcattcacgcggacaactcgatctcgatcaccgacaacggccgcggtgtgccgaccggcctgaagatggacgacaagcacgatccgaagcgcagcgccgctgaaatcgtgatgaccgagttgcacgccggcggcaagtttgaccagaacagctacaaggtgtccggcgggctgcacggcgtgggcgtctcgtgcgtgaacgcgctctcggcgtggctgcgcctgacgattcgccgcgacggcaagaagcacttcatggaattccaccgtggcgtgccgcagaaccgcgtgatcgaagagatcgacggcgtggccgtctcgccgattcagttgatcggcgaaaccgaaaaccgcggcaccgaagtgcacttcctggctgacgagacgattttcggcaatgtcgaatatcactacgacattctggccaagcggattcgcgaactgtcgttcctgaataacggcgtgcgaatcaagctgaccgaccagcgcacgggcaaggaagaagatttcgcgttcgtgggcggcgtgaagggttttgttgagtacatcaacaagaacaaggccgtgctgcacccgaacattttccacgtcagcggcgagaaagacggcgtgggcgtggaagtggcgatgcagtggaacgacagctacaacgaaaacgtgctgtgctttacgaacaacattccgcagcgcgacggcggcacccacctgaccgggttgcgtgcggcgatgacgcgcgtgttgaacaagtacatcaacgatcacgaagtcgcgaagaaagcgaaggtcgagacgtccggcgacgacatgcgcgaagggctctcgtgcgtgctgtcggtgaaggtgccggagccgaagttcagcgcgcagaccaaggacaagctggtgtcgtcggaagtgcgcgcgccggtggaggatgtggtcgcgaaggcgctcgaggaattcctgctggaaacgccgaacgacgcgaagatcatttgcagcaagattgtcgatgcggcgcgggcgcgcgatgcggctcgcaaggcgcgtgaaatgacgcgtcgtaagggcgtgctggatggcgtggggctgcctgggaagctggcggattgccaggagaaggacccggcgaagtcggaaatttatatcgtcgagggcgactcggcaggcggctcggcgaagcaggggcgcgaccggaagtttcaggcgatcttgccgctgcgcggcaaggtgctcaacgtggagaaggcgcgctatgacaagctgctttcttcggagcagattgtgacgctgattacggcgctgggttgcgggatcggcaaggaagactacaacctcgacaagctgcgttatcaccgcatcatcatcatgaccgatgctgacgtggacggcgcgcacatccgtacgctgctgctgacgttcttctatcgtcagatgccggacatgatcgagcgtgggtatatctatatcgcgcagccgccgctgttcaagatcaaggcgggtaaggatgagcggtatctgaaggatgaggctgaggttaatgctcacattctgaagttggcgttgcaggggtcggagttgttggcttctgagggtgctacgccgattactggggatgcgttgggtgagttggctcgggcttatttgttggctcaagctgtggtgaaccgactgagccggttgtatgacgctggggcgcttgaggctgtgatggatggggttgttattgacctctccagtgaggaagcggctgaggcgtcggcggcggctcttgaggcgaagctgcgggatgatgcgttgaagcctgaggttaccgttacgacgatgtatgacccggtgagagagttgcgctcgctgaagattgctcggacgcatcacggtaatcagaagatttctgtgctggatcaggattttcaactcactgctgattatcaacagctggtcaataccgctaatacgtttaaggggttgattgggcccggggctgtcattaaacgtggcgagcgcagtatggccgttaccgacttcaagagcgctatgaagtggttgctggctgatgctgaacgcaatatctcgaagcagcgctataagggtctcggtgagatgaaccctgggcagctttgggagacgacgatggatccgactgtgcgtcgtcttcttcgtgtgcagattgaggatgctattgcggctgacggcatctttacgacgctcatgggagatgatgggagccgcggcggg

SEQ ID NO: 295609 - DNA, 301 bp, Unknown
  Bacterial polypeptide expressing nucleotide sequence isolated from the Sargasso Sea
aatggatcaattcgccaaagagactctgccaatctccctagaggaggaaatgcgccgttcgtatctcgattacgcgatgagcgtgatcgtggggcgtgcgcttcccgatgtccgcgatggcctgaagccggtacaccggcgcgtgctgtacgcgatgcacgaactgaacaacgactggaaccgggcttacaagaagtcggcgcgtattgtcggcgacgtcatcggtaaatatcacccgcacggcgacacggctgtatacgacacgattgtccggatggcgcaggacttctcgctgcgttac

SEQ ID NO: 295610 - DNA, 1936 bp, Unknown
  Bacterial polypeptide expressing nucleotide sequence isolated from the Sargasso Sea
atgacaacagataaaaatcaaaattattctgcagatagtattcaggccttagaaggcatggaacatgttagaaaaagaccatcaatgtatataggtgatgtaggcgttagaggattacatcatttagtttacgaagttgtagataactcaatcgatgaggctatggctggtcattgtaataaaattggagttataattaacgaggataactcaatatcagttgaagacgatggcagagggatacctgttgggattcaccaaaaagaaggtgtttccgcattagaagtagtaatgaccaaaattggtgctggtggtaaatttgataaggattcttataaagtttctggtggattacatggtgtaggtgtttcagtagtaaatgccttatctgatcatctaacagcagtcgtgtatagagatggtaagatatggcagcaagaatatgaaagagggaaaacactgtatccagtaaaagaaactggaaaaactgataaaacaggaactctagtaactttcaaaccagatctttcaattttcaaagacgttgagaagtataattatgaaacattagccaatagaatgagagaattatcctacctaaataaggggataaatatttctcttactgataagcgaaaaaaggtagatggggagtttataacagaaagctttcactcagaacacggtctgaaggaatttatcacatttttagatgaaaatagagaaccgttaatacctgaagtcatttcaatcgagggtgaaaaaaataatgttccagttgagattgcaatggtttataattcttcatttaatgaaaatattcattcctatgtcaataatatcaatacacatgaaggtggaacacacttatctggttttagaagaggtttaacatctacattgaagaaatatgctgattcatcaggtttactagacaagataaaatttgagatttcaggtgatgattttagagagggattaactgcgataatttcagttaaggttgctgaacctcagtttgagggtcaaacaaaaactaaattaggaaacaaagaggtttcctcagcagtttcgcaagcagtttccgaaatgctacaaaattatttggaagagcatcctaatgaggctaaaattatcgtagataaagttgttttagctgcccaagccagacacgctgctagaaaagctcgtgaaatggtgcaaagaaaaactgtgatgggtggtggtggtctgcctggaaaactttctgattgttctgagcaagacccttcactgtgtgaaattttcttagttgagggtgattctgcaggtggaacagcaaagcaaggaagagatagaaattttcaagcaattctacctctaagaggaaaaattttaaatgttgaaaaagcaatgcaacacaaggttttcgaaaaccaggaaattattaatatttatactgcattaggtgtaactgtaggaacggaagaagacagtaaagctcttaaccttgaaaagttaagataccacaagattgtcatcatgtgtgatgctgatgtagatggaagccatatttcaacactaattcttacatttttcttcagatacatgaaggaattaattgaaaatggacatgtttacatcgcaactccaccactatatttagtaaaaaaggcttcaaaaaaagaatatgcttggtctgatgaggcaagggataaacttattgaggaatttggaaccggcagctctgttcagcgatataaaggtttaggtgaaatgaatgccattcaattatgggaaactacaatgaatcctgattcaagaacttttagaaaggttactattgatacacctgttgaagctgatcgagttttcaccatgttaatgggtgatgaagttccaccaagaagagattttattgaaagaaatgctacttacgctaatattgatgcttaat

SEQ ID NO: 295611 - DNA, 1037 bp, Unknown
  Bacterial polypeptide expressing nucleotide sequence isolated from the Sargasso Sea
aactgctgccacaatccatggtatagatggaattaaacaagcttatgaaactggaagagggcgtgttcatgttagagcaaaaacctcgattgaagaaaatggagaccgtgaatctatcgttgtttctgagcttccatatcaggttaataaagccagattaattgaaaagattgctgaactggtcagagataagaaaatagaaggcatctcagaaattcgagatgaatctgataaagatggactaagggttgtaattgatctcaagagaggaacagtttctgatgtgcttttaaataatttgtataagcaaacgctcttagaaagcacattctctatcaatatggtcgctctgtctaatggacagccgaaactaatgaatcttaaaggaatgcttgatgcattcctctcacataggcgtgatgtggtaaccaaaagaaccatctatgagctgaatcgatctattaacagagctcacatattagagggccagacaattgctttgacaaatatcgatgaaatgattgccatcattaagaaatctaaaacgcctgcagaagctcaaaaagcattggtttctaaattatggaaagtaggaaaagtcaaagacatgctgaagaaagctggaaatgtttccaccattcctaaacaccttttgaatattgaaaactttggtatcgaaaaaagtaaatatcgactttcttcggagcaggccaaagccattcttgatttaaaacttaatcgcttaaccgggcttgaacaggaaagtatttttaacgaatattctgacttacttgaggatatcaagcgattcactatgattctctctaatccagatgagctgacatctgttattagagaagaactaattgaaacacaggaaacatatggtgatgaaagaagaacagaaattgttgaattctattcagatctgactgatgaagatcttatacctgaagaagatctcatcgtgacattatcaaaagcaggttatgcaaaaacacagccacttgacacttaccaagctcagaatcgaggtg

SEQ ID NO: 295612 - DNA, 2395 bp, Unknown
  Bacterial polypeptide expressing nucleotide sequence isolated from the Sargasso Sea
aatggctaaaaaaagtgtaaataacaaccacaaaggctctgaagattacagcgctgaagatataacggtgatggaaggcttagaagccgttagaaaaagacctggtatgtatattggaacaacaggtttagaaggggtccaacatctaattcatgaaattgttgataatggagtagacgaagctatggcaggatttgcttcaaaaattacagtaatactgaataaagataaatctgttactgtggttgatgatggaagaggtatacctgtggatatacacaaaaaaacaggaatttcagcggttgaaactgtgatgactacacttcatgccggcggaaaatttggagggaagggttatcaagtgtctggggggctacatggtgtaggggcttcagtagtaaatgctctttcttcatggttaaaggttgaagtcagacgagataaaaaagtatggaaccagtcttatattaagggtaagcccgaaggtccattagaaagcaggcctcaaactgaagaagacttaaagggaaccggaacatctgtaacttggttaccagaccaagagatttttcctgacattgattactcttatgaagccattaccacgcgattcagagaaatggcatatttgaatcaaggtttgaatatccaatttatatctgattatcatgaaagcttgtggccgcacaatcaagtcgcatttaagtttgagggaggagttcaaagctttgtaagaaatctaaataaaaaaagatcatctattcatgaaaatattatgtacgcgaatgaagttattgaagacattgtagtagaaacggcaattcaatataatgaatcgtttattgacaacactctatcttttgctaactgtataagaacagcagatggaggaacgcatgttacaggatttagatctgcgttaactagagttattaatgattacggtaaaaaacaaggattttttaaggaagagattcagtctctatcaggagaagatgttagagaaggattaatgtgtgtagtttctgtaaaagtaaaagaccctcagtttgaaggacaaacaaaaggaaggcttggaaatcctgaggtcaaaggagctgtagaacaaataatcggtagacgattaagtgagtttatagaagataatcctgaagatgcaaaaaaaatattaaataaatcactaacatctgcaagagcaagagaggctgctaaaaaagcaagagatttaattataagaaagaatgctcttgacggaggctctctaccaggaaaattagcagattgttcggaaaaagatccaagcaaatcagaactatatattgttgagggagattcagctggtggttctgcaaaacaaggtagagacagaaacttccaagcaatcttacctttaaggggtaaaattctgaacgtagaaaaagctaggccagaaaaaatgttgctacatgaagaaattgtagccttaattacagctatcggcacaggtttaggagaggattttaaccacgagaagcttagataccatagaatcataattatgacggatgctgacgttgatggagcacatataagaacattactgcttactttcttttatagaaatatgcctgaattaataggtgctggaaatctatatatcgctcagcctcctttatacaaagtttctagaggaagaagcggaaaatggatttattctgataatgacttaaataaatggatatctgaaaaaatatataacaatttttcaatatctcatactgaaggaaaaaaagatataaaaggagcttcaataggaaactttatatctaatataaaatcttttagtgaatcaaatgatatagctagaattttaaatttgagtgatgaggagtttttaagtttagcatctaaaaatattgatagctttgaaaataaagaaatagaacaagaagatgaaaatattcagccagatttatttgattctggactaattgaaaatgaagaggaaataaaaaaaatcaatgaatctatgactataaataatcatccttcaattattaaggctcagaagatttatcctgaaataaaagaatttttaaaaggtacattttctatcaaaaaaaatgatgaaattatcgaggaaaacttgaactggaatgaagtaatttcagcattagaaaataatgctgataaatcaggatttaatatacaaaggtataaaggtttaggagaaatgaatccagaacagctatgggataccactatggaccctgaaaacagagtaatgctgagggtttcggctgatgatgcaatttctgctgatgatatatttagaacgctaatgggtgatgatgttgagccaagaagagatttcattaaaacaaatgcgctagaagtaaaaaacttagatatttaa

SEQ ID NO: 295613 - DNA, 1168 bp, Unknown
  Bacterial polypeptide expressing nucleotide sequence isolated from the Sargasso Sea
aggttatcgaaagtctgcccgtcccgttggcgacgttatgggtaagttccaccctcatggagatagtgcgatttatgacgcacttgtccggatggcccaacctttttctatgtctcttccgctattagacggacaaggtaattttggatcaatggacggagataatcctgccgcaatgcgatatacagaagttcgcatggataaacccgcaagttttctactcgcagacattgaaaaagatactgttgattttcaagataattatgacggaaaagatagagagccaacggttttaccagcccgatacccaaatatgttggttaatggagctgggggaatcgcggttgggatggctaccaatattccaccacacaatcttggtgaagtgatcaacgctacattggctttgattgaaaacccagacttaactagtgaaaaccttgtagagtttgtacctgcccccgattttccaacaggaggcataattcttggcagaactggcgcacggaaagcttacactgaaggtcgtggcagtgtcttaatacgggcaaaaactaaaatagaggaaatcaaaaaggaccgttatgcaataattgtggatgagatcccgtaccaagtcaataaagcgtcaatgattgaaaaaatagctgaacaggttagggaaaagaagattgaaggggtttcccatgtacaagatgaaagcgatcgaaatggtgtgcgtgtcgttattgaactaaagcgtgatgctacgcccgatgtagtattaaatcagttatttagatttacgcccctgcaaacatcctttggttgcaatatgctagctctcaatggcggccgcccagaacaactcacgctacgaacatttctaacgaattttatcgcatttcgtgaggaggtagttgctcgaaggactgcatttgaattgaggaaggcccgagagcgaagccatattctttgtgggctggcagttacggtttctaatgttgacgaaatagttgcaactataagagcgtcatccgacgcatcagaagcgcgtgaaaagttaatgcaacgaagttggccagctaacgaaattcgagaatatattgcattgattgatgatccaacacacaaaataaatgatgatggaacctataatttatcagaagctcaagtcagagctatttag

SEQ ID NO: 295614 - DNA, 1960 bp, Unknown
  Bacterial polypeptide expressing nucleotide sequence isolated from the Sargasso Sea
accaccacacaacctatcagaaataattgatgggcttatagctttaattgatgatgagtctatcgaaaccgaaaacctaatgaaccacatcaaaggaccagattttccaacagctggtctaattttaggtatggatggtttaaaagaagcgtactccacaggtagaggaaaaattaaaatgagagcacgcgcacacattgaaaccaataaaaaaggtagaaacagtattgttgttacagaggttccctaccaaacaaacaaagcgtcgttagtggaaaaaatagcagacctagtccgcgataaaaaggttgttgggataagcgacctaagagatgagtcagataaggatggtatccgtgttgttattgaaaccaaaagggatgctgttcctgaggttattttaaaccagctttataaacacacacaactacaagatacttttggaattattttattagcactggttgatggaattccaaaaataatgccccttaaaacagtattaaaccattttattgaatttcgccatgaggttgttgttaagcgcacagagtttgagcttaaagaagctgaagccagagctcacatcttagagggtttaaaaattgcactggataatattgatgatgtaatcaaaataatccgcggtagtaaagacccggcacaagcaaaagaaggcctgatgaatggttttaacttatctgagctccaatcacaagcaatcctagatatgaggttgcaaaaattaaccggcttagaggttgataaggttgtagcggaatacaaagaattgatccagattatttcaaacttaaaaagcattttggaaaacaaatctaagcgtatggaaataatcaaaacagagctattagaaattaaagatttatatggtgatgaaagacgcacagagattgtacctgttgacactgatttttcaatggaagatatgatagctgaagaagaggttgttttaaccataactcaccaaggttatataaaaaggaccgccctaaacacctacagatcccaaagaaggggtggtcgaggtgtgcaaggagcaatgagcaaggatgaggattttgttgaacatttgtttatcgcaaacacacacaactatatgctgttctttactgataccggtaagtgctattggttaaaagtctatgatatacctcaagctggaagagcgtcacgcggaagagctattgtaaacctaattgggtgtaaccctgaagaaaaggttgaggcgtttgtaagcgtcaaagattttgatgatgaccattatatagttatggctacacaaaatggaataattaaaaaaaccgttttatcagcatacggtaaaccgagaaaaggtggtatatatgcaatcgaaatacgtgatggtgataaacttatacaagctagagtttctaatggtgaaaacgatattttattaggaacacatgaaggtaaatcaatacgtttctcagagggtgatgttagggcaagcggtagaaaaactatgggtgttaaaggtatttcgttaagctcagacattgattatgttgtgggtatgttacttgtaaaacgcgaaggaaccatacttgttgcaaccgaaaaaggatatggaaagagaactgaggtgctccaataccgcacacaaacacgagcaggcaaaggtgtgcttaccatgagatgtacagataaaaccggtaaaatggtaaacattatggaggttgttgattcggacgacttgatagtaattacagattcaggtgtgttgatgcggcaacctgtaaaagctataagagcaataggtagggtcacacaaggcgttaggttggttaagctcgacgatggaactaatatatcatcaatcacccgcgttataagtgaagacactgcgacacaaaaagaagaagacaaacaaatatctatagatacaccggaaagtgaaacacccccaacacaagactaa

SEQ ID NO: 295615 - DNA, 2539 bp, Unknown
  Bacterial polypeptide expressing nucleotide sequence isolated from the Sargasso Sea
atgtcagattttgcaaaagaaattcttccagttaatattgaggatgaactaaaacaatcttatctaagttatgccatgagcgtaatccatggcagggcactaccagatgttcgcgatggcttaaaacctgttcatagaagaatactttatgcgatgcatgatcttaaaaacaattacaacaaaccatataaaaaatctgcaagggttgttggagatgtaattggtaaatatcatccccatggagactccgctgcatatgatgcgattgttagaatggctcaagatttttcaatgagatatacgctcatagagggtcaaggaaacttcggttcaatagacggagaccccccagctgctatgagatatacagaagttaggatgcaaaaaatttccgatgagattcttgctgatttagaaaaagaaactgtctctttttcagaaaattatgatggctctgagcaaatgcctgatgttatgccaaccaaaattccaaatcttttaattaatggatcatctggaatagcagtaggtatggcaacaaacgttccaccacacaatctcactgaagtgataaatggttctttaaagctgcttgagaatccaaaactatctattgatcagatcattgattcaataagcggccctgattttccaaccggggggaccattgatggaaaaatgggcatctatgaggcatataaaactggaagaggaataatttatgttcgatctaaatcaaaggtagaggagagcaaaactggaaagaaatctctagttatctatgaaataccttacatggttaataaagcaagaactctcgagaagatagcagagctcgttaaagagaaaaaacttgatggtataagtgaaataagagacgaaagcgacaaagatgggctaagaatagttatcgatgtcaagaaaggggagtctgttgaagtattagaaaacaatctttttgctcagactcaacttgagcagtcatttggaataaactttactgtcttggtcgatggacaaccaaaggtcctcaatttaaaagaaattcttcaagaatttttaaagcatagaaaagatgttgtattaaaaagaacaaaatttgagcttagaaaagctaaagagagaggtcatattgttgaaggcctgatggttgccatcgcaaatattgacgaaattataaaaattattaagaaatccaaagatccaaagattgcagcgcaggagctaatcaaaaagaaatggaaagcaggtccagtagaagcaatcctgaagaaggttggaaaagatgcatgtaagccaaagggtgtagcaaagggtgttggattaacaggtaaatcttataaactttctaatgatcaagcaaaagctattcttgaattaaggcttggaagactgacagggcttgagcaagacaatctatcaagcgaatttaattctttgattgaaaagattacttcacttcaagaaatcattgatgataaaggcgttcttcaaaaagtaatagaagatgagcttaaagaaataaaagaaacttacggggatgatagaagaacagacataaatgacaccagacaagatatttcaaatgaagatttaataccagaggaaataagagtactaacaatatcaaggacaggatatgcaaaaactcaaccacttgaggaatatagagagcaaagaagagggggccagggaaaagctgctgcctcagttaaagaagaagatgttattcaaaatctttatgtattaagtagtcattcacaaatgctttgttttacaacaaaggggaaggtttattggctgaaggtttatgaagttcctgttgcaagcagaacatcaaaaggaaggcctcttgtgaacatgcttaatttagatgatgacgaaaaggtcagcgacattttacctgttgatgagttttcagaggatagatatgttttcatggcaaccaaaaagggaacaactaaaaaaacacaattaagcttttttgcaaaaaaatataaatcaggtatcaaagcaattaatttagatactgatgatgaacttattggttcagcaattacaaatggagatgatgaaatacttttggcttcctcagcaggaaagctaataagattttcagagaagaaagtaagacctatgggtagaacagctagaggcgtaagaggaatgcgtatcaaaaaagatcaaaaaattatttctttaatggttgcagataatgaaaaagagattctatgtgtttctgaaaatgggtttggtaaaaagacaccagttgatgattttccaacacataatcgaggaggccagggtgtaatttctattaaaactagtgaaaggaacgggctcatggttgcatcaactctcgttgataataatgacggaataatgcttataagcgataaaggcacaatgatcagaacctctgctgaacaaataccaacaattagcagaaatactcaaggtgtaaaaataattactccaaaagagggtgagaaaatccttgaatgtgtaaggatagatcctgaagatgaggaagaatgag

SEQ ID NO: 295616 - DNA, 1216 bp, Unknown
  Bacterial polypeptide expressing nucleotide sequence isolated from the Sargasso Sea
cctattataagtagtataattaaaatggaaggtgaaaagaatggtataccagttgaagttgccatggtttataattcttccttttcagaaaatcttcattcatatgttaataatattgatactcatgaaggaggtactcacttaacaggatttaggagaggcttaactaatacattaaaaaagtatgctgattcatcaggtttaactgataaactcaaatttgatatatcaagtgatgactttagagaaggcttaactgctgtaatctcagttaaggttgcagagccacaatttgaaggtcaaacaaagacaaagctagggaatagagaagttagttcagctgtatcacagtctgtctctcaaatgcttgaggactatcttgaagagaatccagatgactctaaaattattgttcagaaaataatattggctgctcaagctagaactgctgcaagtaaagcaagagaaatgattcagcgtaagactgttatgtcaggcggtgggcttccaggtaaattatcagactgttctgagactgatccttcaaagtgtgaagtgtttttagtcgagggtgattctgcagggggaacagctaaacaaggaagagatagagtttttcaggcaatacttcctctaaggggtaaaatattaaatgtagagaaagcacaacaacacagagtctttgagaacgaggaaataagaaatatatatactgcacttggagtttctgttggaacagaagaggacagcaaagctcttaatttagaaaaattgagatatcataaaataattgttatgtgtgatgctgatgttgatggaagtcatatttcaactttgatcttaacattcttttttaattacatgagggaactagttgagcgaggtaatatttatattgcaactcctcctttgtatcttgtcaaaaaaggcagtaaaaaagtttatgcatggaatgatgaagaaagagataatattgccaaagatttaggctcaggagtttcaatacaaagatataagggtcttggtgaaatgaatgcagaccaactatgggatactacaatgaatcctgaatcaagaaccttgagacaaataacgcttaataatgacaatgcaaaagaggctcaggaatggtttgcaacattaatgggcgatgaagttcctccaagaagaaaattcattgaggataatgcgatatatgctaaaatagatgtttaaa

SEQ ID NO: 295617 - DNA, 2548 bp, Unknown
  Bacterial polypeptide expressing nucleotide sequence isolated from the Sargasso Sea
tatgggcgaaataactgcaaaagagattgttccaatagatatagaaaaggagctgaaacaatcctatttagattacgcaatgagtgtaatagtaggcagagccttgcctgatgcaagagatggtcttaaacctgttcatagacgtgctttatacgctatgcatgtattaaataatgattatggaagacctcataagaagtctgcaagaattgttggtgacatcattggtaaataccaccctcatggagatagcgctgcttatgaaaccattgtcaggatggctcaatggtggtcattaagatatccattggtagatggacaaggaaattttggctcgatggacggggatggacctgctgctcagagatatacagaagttcgtatggcaaaaatctcacaagaactattagctgatcttgataaagaaactgtaaattttgttgagaattatgacggcactgagacaatgcctgaagttcttcccactaaagtacctaacatgttagttaatggttcagcaggaatagctgtaggaatggcgacaaatatggccccgcataatttaaatgaaacgctcttagcttgtctcgcctttatagataatccagatatttctaccgctgaattaatggagtttttgccaggaccagattttcctactggtggaattatcaatggtaaagcaggaatagtaagcgcctatgagagcggaaaaggaagagtaaaaataagagctaagactcattttgaggatgaggaaaaggataaagcaaagatagtaatcacagagatgccttatcaagttaataaatctaagttaattgaaaaaattgctgaactatctagagataagaaattagaaggaattagagatataagagatgaatctgataaagacggagtaagagttgttattgatcttaagtctggacatattcctgatgttttattgaataatctatttgctcaaactcaaatgcaaactgtattcggaatcaataacgtagcattggttgaaggagagccaaagcttttgaatttaaaagcaatgctctctgttttttttaatcatagaaaggaagtagtttctagaagaaccttcttcgatttaagaaaagccaaagaaagaggccatgtcctagaaggattaaccatagcgctagccaatattgatgccatgattgatttaataaaaaaatcaaaagaaggctcagaagcaaaacaaaagcttttatcaaaaaaatggaagcctggaaaagttatttctatgctaaagaaagctggcccagatgcttgtaagctagaaggctctgacgatactttgggattatcaggtaaaagttatcaattgtcagaagtgcaagctcaagcaatattagacatgaggcttcagagattaactggattagagcaagacagactaataggtgaatatgaagagatcattgaacgaatatcttatttgcttggcatactaaatgactctaaaaagttaattgaggtagtcactgatgaattaaaagagatacaggaaaattataaagatgagagaagaactgaaattcaagattcctctgctgacttaagtgctgaagacttaattactccagaggatagagttgtaactatatctcacgagggatacgcaaaaactcagccgttggaagaatatagagctcaaagaagaggaggaacagggaaaacagcagcttcagtaaaagatgaagattttgtagaacaacttcttgttgcaaacactcacacaactttactttgcttttcaaatctagggcaggtttattggctgaaagtatatgagataccttctgccggtcgtgctgctaaaggaagacctttagttaatcttatacaactcagtgaaggagagcgaataacaagtatggttccagttgaagaatatgacgataatcattatgtcctaatggctacgaaaactgggactgtcaaaaaaactgtattgactgaattttctaaccaaagaaaaggtggcaaaagagcaattactttgcaagatggagatgagttagtaggtacaacggttaccgatggaagtaagtttgtaatgttggtttctaatgctggaaaagcagctcatttttctgaaacggaagtcagatctatgggtagaacagcaaaaggtgttagaggcataaagctagataaggatcaatatgttatttctttaatcatccccgaagaggatgcttctatttttacggtaagtgaaaatggttatggtaaaagatcaaaatcaatagatttcagaaaaacacgaaggggagctaaaggagtgatagccatgcaggtttctgaaaggaatggccaacttataggtgctgcacaagtcacagatgatgatgaagttatgcttatatctaacaagggaatgttagttagaacaaaagtttctgaagtgaatgtgataggcagaaatactcaaggcgtcactgttattaggcttaaagatttagagaaattaataagcatcgcacctataagtgaagaattcattggggacgatgagtag

SEQ ID NO: 295618 - DNA, 2515 bp, Unknown
  Bacterial polypeptide expressing nucleotide sequence isolated from the Sargasso Sea
aatgagttcatcatatttatcttacgccatgagcgtaataattagtagggcattacccgacataagagatggacttaaacctgttcacagaagaattttatatgcaatgcacaaaggtggttttgattggacaaaacaatttagaaaatctgcaagaattgttggagacgtaattggtaaataccatccgcatggtgatcaagctgtatatgatgctttagtaagaatggttcaagatttttcaatgagtgttccgttaattgatggtcagggcaattttggttcaatagatggagacccacctgcagcaatgaggtatacagaaaccaaacttgcaaaaatttctcaatttttgattgatgatatagaaaaaaataccgtttcgtttaaaagtaactacgacgaaactgagcaagaacctacagtgttgccagcccaatatcctaatcttttggtaaatggagctggaggtatcgctgttggtatggcaactagtataccaccacataatcttggtgaaataattgatggaactttagctcttattaaaaataaagatattaaagttaaagagttaatgaagcatatacctggccctgattttccaactggtggagttattattggtaaagatattattcgagaaggatacaaaactggcagaggttcttttaaaattaggggtgaaataaatgtagaaaatcttaaaaatggtaaagatagattagtaattacttcaataccttaccaagtgaacaaatctaacttaaatgaaaaaattgcagaattagttagagataaaaagattgagggtataagtgacattagagatgaatctaatagagaaggtataagagttgctatcgatttaagaagaagcgttgagcccgagacaataaaaagacaactttataaatatacatccattgaaacttcattcggttttaattcattagcaattgttgataacaaacctaaaacatgttcattaaaagattttttagagaactttttaaaatttagagaagatgtagttattaaaaaaacaaaatacgatttaaaaaaagctgaagaccgtgtccatgtgttacttggtttatccgttagtgtagaaaacattgataaagtaataaaaattattagatcttcaaaaaatccggaagaagcaaaaaatactcttataaaaacaaaatggaaaataacaaaatctgcaaaattaattaaattagttgatagtaaaaattataaaggatcttacaacttatctgaaactcaggttacatcaatattagaacttagattacaaaaattaacagctcttggaattaacgaaattgaagaagaaataaaaaaattatctgaattgattatgaagtataaaaaaataataaattctaaaagcgaactattaaaagtaattagtaatgagttatctcaaattaaagagaaattttcatctccgagaagaacgcagataatagatgctgttttaaactataatattgaagaaactattcaaaaagagtctgtaataattacaattactttacaaggatacattaaaagaggtgccttaagtaatgtcaaacaacagaaaagaggtggaaagggtaaaacagggattaaaacaagagacgaagattctgtagtacaaacattatcagtaaatacacacacatctgttctatttttctctactgaaggattggcttacaaagttaaagcttggaaaattccagagggatcagctgcatcaaaaggtaagtctttatttaatattcttcctctaaaaaatcatcaatcaattagttcaattatgccatttccagacagcgacgttgatacaaaagacatgcatatcatttttgcaacaagtgaaggtaaaattagaaagaataatcttgaagattttacctcaattaatgcttcgggtaaaattgcaatgaagcttgatggtaatgataaaattattggtgttaaaatctgtagagatgatcaggatataattttaagtactaaattaggaaaatgtataaggtttgaatcgaaaaaacttagagttttcaaaggtagatcttcaaaaggtataagaggtatcaatttagcagaaaatgatactattgtatctctgtctattattgatcatgactcaaataagaaagcaaaaactaaagaccaaaaatcagaaattaaagctaaagaaaaattcattttgtctattacagagaatggttatggtaagagaacatctcattatgattatagagttacaaatagaggtggaaagggaattattggtattgtcaattcacaaagaaacgggaatgtttcttcatcatttccagtttttcaaggagatcaaatattaatttcaacaaataaaggtagagtgataagaacagctgttaaagaaataagaatagctggtcgtaatactcaaggtgtcagaataattaaactgactggtgatgaaaaagtagtttctgctattaaattagatgataatcttatttaa

SEQ ID NO: 295619 - DNA, 1999 bp, Unknown
  Bacterial polypeptide expressing nucleotide sequence isolated from the Sargasso Sea
tatgagaaagaaatcaaaaaaaaataaatcaattaaaaagaagagttcatccaaaaagacagtaaaaaattcaaactcatcttacaccgcaaaagatattgaagtccttgaaggcttagaaccggttagaaagcgacctggaatgtacattggaggtacagatattatggcaatgcatcaccttgtaagcgaggtacttgataattcaatggatgaagttgttgcaggttttgcaaataaggtagaaattaagcttgtttcccaggacacgattgaaatctctgataatgggcgaggtattcctgttgataagcatccaaaatttaaaatacctgcagttgaagtcattatgacaacactacattctgggggcaagttttcaaaaaataattacaaaacttctggcggtttgcatggcgttggaatttctgttgtaaacgcgctatctaaaaaacttactcttgaaattgcaagagataaaaaatattttgtacaaacttatagtcaaggttctcctaaaaataaattaaaagcatccgcaaaaggtcctcttaaaaagggtacaaaaatagtattttcaccggacccagaaatttttggcaaagaaatagaatttgatgcttcaattatatataatatggcaaaagctaaagcctatcttataccagatgttgaaattcattggtcatgcagtaaggcaaccgccaaaaaaaatattccattatcagataaactacattactccgatggaattaaagattatttaaataatctttgtacgcccaatgaccctatttttgaagatccattttatttcaacaccgagatagatgttgatagtggtaaaattgagggaattataaattggtttgatgtgatggaacctataaatgaatcttattgtaacactattaaaaccccattgggcggtactcatgaaagcggtttcaagtcaggaatttataaggcatttaaagatttttcaaaaattaaatacgaaaagaaatcatctcaaattaatcaagaagatctctttggttcatctggatcaatcttatctgcttttatagaaaaccctgagtttcaaggtcagacaaaagaaaagttatcaagtatagagcctggtcgtaaaattgaaatgaaagcacgacaactatttgaacaatggcttacaaaaaaaactaggtctgcagaagaattatttcaatacgcatttaatcgatcacagttaagactgcaaagcaagtcaaatctaatcatagaaaaaaatataaaaagaaaaaaaacaactttaccaggcaaacttgctgattgttcaattgatggaaataaaggaactgaaatttttcttgttgaaggagactcggctggtggatcggcaaaacaagctagagatcgccaaacacaggccattttacctttaaggggtaagattttaaatgtgatcagtgctggaagagataaaataaatgcaaaccaagaaattactgatttaatgcaagctattggatgtaagcgaggagataaatttaatagcaaagatattagatacgaaaaaattataattatgacagatgctgatgttgacggtgctcatatatccaccttattgatggcattcttctataaagaatttccaaaactaattgatgaaggacatctgtacttatccgtgcctcctttatacaaaatatctaaaggagctaaaacgtattacgcagtaaatgataagcataaagatgaaataataaaaaaagaatttaaaaattcagacgttaccattaatagatttaaaggattaggtgagatgatgcctgctcaattgaaagagacaactatgtcgcaggaaaatagaaccttattaaaagttcaaattgcatcaaaagacaaaaagaaaactcataaatctgtagattctttaatgggcaaaaaacctgagttgagatttaagtttattgtcgaaaactcaaaaaaaatagcagctgagagtattctctaa

SEQ ID NO: 295620 - DNA, 1441 bp, Unknown
  Bacterial polypeptide expressing nucleotide sequence isolated from the Sargasso Sea
tttaagggtaaggcaaaaacaaaagtaaaaatagaaaaatgtaataaaaatcttagaggcactgaaattaagtttattccagacaaagaaatttttgaaagtatattattttctcctaaaaaactatactcctttattaaaatgaaagctgttttagtaaaagatactaaaattaattttaatataaacaaagaattaatcaaagataaaactccagataaagaagagtttttatacgtaaagggaattgcagactttatgcaatcaaattttaagcaaagaaaaaaaataacaaataaagatttttatgtatctatgactttcaataccaatgaaaaatgtgaaatttatatatcctttaatgcattagaacaatcttctttaatgtctttttgtaataccattgaaactccagatggtggttctcatgagcatgctcttaaaaattctttcatgaaggcaattaaaatttttagtattaaaaatcaattaactaaatatcaaaatataaatatcaatgacatatttgattatactgataccttgatttctatttttattaattctccaagtttcgaaggacaaacaaaaaaaagaattacaatgccaaaattacaaaaacaattagaggaattattgcaaaaccaaattttgctgtggttaaatagcaataaaagagaatcattaaaaattatagaaattttaattgagcgtgctttattaagaacagatttatcaaagataaaaaaattagatagaaagtctataaaagaaaaaaataggttgcctggaaaattagtagattgtactagcaacacaatacagaataccgaactctttatagttgaaggagatagtgctggagggtctgcaaaacaagcaagatttagatctactcaggccattctacctcttaaaggaaaaattttaaatgtttatagcgtttcattatcaaaaattgcagataataatgaaattcaaaatcttgttcattctcttggttgtggactaggaaaaaactttcaattatctaaattaagatatgaaaaaattattttgatgactgatgcagatgttgatggatctcatatagctactttattaattacctttttttacaaatatatgagaaaaattattgaagaaggaaaactttatttagcaatgcctccattatataaaatttcttataaccaagagaatttttttgcttataatgaaaaagataaagacaaaatacttaatgataataagggatcgccacaacttacacgttttaagggattgggagagatgccagctaatcaattaaaagatacaacaatggatcctgaaaaaagatctttaatacaattaaaattaactgatggtattaaatatactaaaaaaactgaaaaactgtttgaggcattaatggggaaaaaagcagagaaaagattaa

SEQ ID NO: 295621 - DNA, 2566 bp, Unknown
  Bacterial polypeptide expressing nucleotide sequence isolated from the Sargasso Sea
aattctaatacaaaaaacgatccatattctttaggtagtataaaaattcaagaagaaatgcgtaattcctacctcgattacgcaatgagtgtaatagttagtcgtgcaatcccagaccttagagatggacttaagcctgtacatagaagaattctttatgcaatgcatgaaactggtaatacccctgataagccctacaggaagtctgctagaccagtaggtgatgtaatgggaaaataccatccacatggagatagtgctatatatgatgctttagtcagaatggcacagtctttttcaatgggtgaagtactaatagatggtcaaggaaactttgggtctatagatggggactcagccgctgcaatgcgttatacggaagtgaagttatcaaacataacagaaaatatactttcagatattgataaagatactgtagtttttcaagataattatgatggtaaagatcttgaaccaagtgttttaccagctcagtttccaaatttatttttaaatggagctggtggtattgctgttggaatggctacaaatattccccctcacaatttaaaagagctaattgaggcaacaaaaaaaataatttttgatcctaaatgcacacttgaagatttaatagaaattgtacctggaccagattttccaactggtgggattatacttggttttggaggagctagaaaagcttatgccgagggaaaaggctcagtattaattagagctaaaacatcaattgaaacaattaggcaggatagatcagctattgtggtttctgagataccatatcaagttaataaatcaaaccttatagaaaagattgcagatttagcaaaaaataaaaagattgaaggaatttcccatatacaggatgagtctgatcgttttggcattcgcatagttatagagctaaaaagagatgctactgctgatgtagttctcaatcaattgtatagattcacacctcttcaaactagttttggatgtaatttacttgctttgaacaaaggtaagcctgagcaactaaacctcaaaatgtatttagaagagtttatagagtttcgggttgaaattgttacaaaaagaactgaatttgatcttaaaaaaaatagagatagaagtcaccttttatgcggtttggccgtggcagttacaaatattgataaagttgttagccttataagaaattctagagatggatctgaagcaaaaaacaaattaatggaaacaagatggccatctaaacaaataactgcttatttagaattaattgatgatccctctcataaaattaacgatgatggaacttataatcttacagagaaccaagctagagcaattttagatttaagattacaaagattaacagcattaggaattaaagaaattactgaagaattaattcaactctcagagaatattaaattatatttagaaattcttagctccagaaaaaaaatacttggtatagtaaccgaagaactttctttgatttcagaaaaatacggaagggaaagaagatcagaaatcattgagtttgagggagatacagaagatgaagatttaatagaaaaggatgatatggttgttagtgtaacagctggagggtatatcaaaagaacttcactctcagaatacagagctcaaaatcgtggtggtaaaggattacagggaatgaatccaaaagatgaagatgtagttacaaatttatttgtagctaacactcatactccacttctattcttttcaacagatggaatagtttataaaattaaaacttggcgcttaccaataggaggtagaaatgcaagaggaaaagcaattataaacattcttcccataaattctggcaaatcagtagctgctattatgccagtagacgctccagaagaaacttgggatgatttgcaaatcttttttgcaacatcaactggtagcgtacgtcgcaacgcactttctgattttacaaaagtacaatcaaatggaaaaattgcaatgaaacttccagagaatactaatcttattggagtaagaatatgctcagataatgatgatgtattattgaattcctcaaaaggaaaagcaataagatttgctgtgtctgatgttagagtttttaaaggaagagattcaactggagttagaggaataaaacttgccaagaatgattttgtagtttctatggctgtaattagacatgtaaatgtaagttcagaagaacgatatgcttactttaaaatgcgtagagcaataactggtgaagaaagtttagaagaaactgacttcgataataatgaagaaatgattagtatttcaaaagataggtatgcagaattgtctgctgcagaagagtggatacttactttaacatcatctggatatggaaaaaggtcgtcagctcttgagtttagagtctctggaagaggaggacaaggtataactgctgcaaacctattaagaagagaagacacaatagttgcagcattcccggtagatgatgatgatcaaattatgttaatgacctctacaggcaaggcaataaggtgccctg

SEQ ID NO: 295622 - DNA, 736 bp, Unknown
  Bacterial polypeptide expressing nucleotide sequence isolated from the Sargasso Sea
acgggttgagagaaaaaaaacatttaaaggaccggcattgcctggaaaattatctgattgcaatagtgaagatttaaataagacagagttatttttagttgagggtgattcggccggaggttctgcaaaacaagctagagaaagatcatttcaagcaataatgcctttaagaggcaagatattaaatacctgggagctagaaagtgaagaaataataaaatcacaagaaataaaaaatctctccacagctattggagttttgcctggcaataatgatctttcaggacttcgttatggaaagatatgtattttagctgatgctgattcagatggtttgcatatagctacattattatgcgctttatttttaagacattataaaagtctcgtaaaagacggtagaatttttatagccatgccaccactttatagaatagattgtggtaaagcagttttatatgcattagatgaaaaacaaaaagatgatgttgtaaaagaatttaggagcaaaaaaggaaaaccaaagattaatattcagagatttaagggtcttggagaaatgaacccatcacaactgcgagaaacagtgatggatcctaatacaagacaattagtaagactgtcagtgtcagcaactgataacgctaatgcaatgatggatctgcttttatcaaagaagaatgcaccagcaagaaaagagtggcttgagaagaaaggttcgttagtgaggatttaa

SEQ ID NO: 295623 - DNA, 2719 bp, Unknown
  Bacterial polypeptide expressing nucleotide sequence isolated from the Sargasso Sea
atgtcagatacaactgacgaagatccaattgatagcaaggatatctctaatactaatttagatcaggaaatgcgtcagtcatatctagattacgcaatgagcgttatagtatctagagccttaccagatgcccgcgatggtttaaaaccagttcacagaagaattctttatgcaatgcatgaagatgggtatgattacaataagcaatatagaaaatctgcaagagttgttggttcagttattggtaaataccatccccacggtgatcaaagtatctatgatgcccttgtaagaatggctcaacctttttcgcttcatctaccattggttgatggacaagggaattttggctctgtcgatggcgatccaccagctgcaatgagatatacagaagtaaggatggaaaaaattgctcatcaccttcttaatgacatcaatttagatacagtagattttcaagaaaactatgataactctgaaagtgagcctattgttctgcctgctgaatttccaaatctacttgtaaatggtgctggtggaattgctgtaggtatggctacaaatattcctcctcataatttaaacgaaattacagaagcatgtatgtttataattgataatcctaagactgatgatcaagaaatggatcaaagattatgtgaaattgtcccaggtcctgattttccaactggaggaataattttaggaaaaagtggcgctagaagcgcttatacaactggcaggggttcggtggtaattagagctaaagtagaaattgaggaaatacgcaaggatagagaggcgctaattgttacagaaataccatatcagttaaataaggtgctactaatacaaaaaattgctgatttagtaagaaataaaacaattgaaggtatatctgatttaagggatgaaagtgatcgccatggaatgagaatagttatagaactaaaacgtgactcagttgcagaagtaattttaaatcaactttataaatttactcaacttcaaacttcttttggcgcaaatatggttgctttagataaaggaactcctaagccaatgaagttaagagaaatgcttacttgctttattgattttagagaagaagttgtaacgcgaagattaaaatttaaattaaacaaggctagagatagagcccatctattggttggcctagctattgcagtttcaaatatagatgaaattataaaacttatcagatcttctaaatcacctgctgaggcaagagaggatttaatggatcgtgaatggcccgccaaagatgttaaatcactaataaaactaattgatgatcctaggcatggtattactgctaagggcaattgttcatttactgaagaacaggccagagcaattttagaattaagacttcaaagattaactgctatgggtattgacgaaatcaaatcagaattagatgacttaaaaggaacaatagaagacttactatctactctgggtgataaaggtaaaatttatgacatcattaaagatgagctaacttatgttaaagataactttgccgttgaaagaagaacagaaatccttggggaattggatgatgttgaagatgaagatttaataaagaaagaagatatggctgttactgttaccagatcaggctatatcaagcgtgtacctttatcaacttatagagctcaaaatagaggcggtaaaggtagagcaggcatgcaaacaaaagatgatgattttgtgagacatatttttatttctaatactcatcaaccaattttatttttttcatcgaaaggaatggtttacagattaaagacatggaaattaccactttctagccctcaagcaaaaggaaaggccatggttaatcttcttccgttggatgaagacgaaagaataacaacagtaatgtctttacctgaaaatcaagatgaatgggaaaatttatatgtaatatttgcaacttcctctggtggcataagaagaaattcattagcagatttttggcgtattaataaaaatggtaaaattgccatgaagttagattctaaagaaagaattatttctgttcaaacatgcacagaagataacgacatacttttagcaagcaagaaaggccaaagtattaggttcaatgtagataaagttagagtatttgcatctagatcttctacaggtgtaagaggtattagattatcaaaaaatgacagtgttgttggtatggcggtattaaacagagtaaaagcatcaaatgatgagctaagggcttatctaaagatgtcatctatgatgcgtaaagcgacaacagatgatagcaatgatgatgatgatctggactttgaaggaaatgatatagagctttcaacagaaaggtattcagaattagctgcaagtgaagaaataattctaaccgttgcgtctaatgggcaaggaaaaagatcttctgcatatgagtatagaactacaaatagaggtgggaagggtgttataggaattaaaatgactaaatcacatggtgatttggttgcctcctttgtagttgatgaaaatgatcaaattatgcttatagataatagtggaaaattaattagatgtcctattacagatataagaataatgggaagaacaactcaaggtgtgaaaatatttaatatagacaaaaatgcacatgttgttagtgtagaaagaattttcgaaagcgagggagaggaagaatgaa

SEQ ID NO: 295624 - DNA, 2227 bp, Unknown
  Bacterial polypeptide expressing nucleotide sequence isolated from the Sargasso Sea
caatgaggacgcttctgttactgtaaaagacgatggacgcggtattcctgtcgacatccataaagctgagaataagtctgcagcagaagtaataatgactacactacatgcaggcgggaagtttgatgatgactcctacaaagtatcgggtggtcttcacggtgttggtgtatcagtagtcaatgcattatcagaaaaactctcattaacaatacataaggatggttttaaatatcaacaagactacaaagacagctctccaataaaaccattaaaaaaatgtggtacttcaaatgaaaccggatctgtaattcaatttcttccgagtaaaaagtactttcgagacctaaattataaagaagaaacaataaaaagaagattaaaagagctagcatttttaaattcaggaatatctgttcattttagcaatgatattaccggcaaaaagattaagtacttttatgagggtggtcttaaagaatacataaatgaaattctacaaaacaagaaagacattcataacgacctgatatatttgccacctacaacgaaaggcggaaattcaattgagatatctatgaaatggactacctcatactctgaacagataatgtgctatacgaataatatatttcagaaagatggcggtactcacctcagcggtttcagatcagctttgactaggacgatcaataactattctttaaaaaacaatggaaaacaaaagtatgaaatatcgggtgatgactgtcgtgagggtctagtagcgatcatctctattaaaatgtcagatcctaagttttcttctcagaccaaagacaagcttgtttcatcagaaataaaaagtttaacagagactacactcgcttctaaactctccgaattcttagaggaatctcctaaagatgcaaaactaattattggtaagatccagcaagcagctatggctcgggaggaggcaaggaaggctaaagatctaatcaggagaaaagatccattaggtatcgctaatctgccgggtaaactagcagactgccaagagaaagatagggaaaaatgcgaactatttattgttgagggagattctgctggtggttctgctaaacaagctagagacaggaagacacaagctattctccccctaaaaggaaaaatccttaatacagaaaaatctcaagattataagttattatcatcatcggaagttggatcgcttatatctgctctcggctgcggatttaatcatgaatcagaaggcgattttgatattaataatcttcgttatggcaagataattatcatgacagatgcggacgttgacggtgctcatataagaactttactgcttactttacttgctagaaaaatgaagcccctatttgatcaaggcagaatatacatcgcacagcctcctctatacaagattaaaaaaggaaaaactgaaaagtatattgctaatgactttgatctgaatagatttcttactgcttctttttttgatagcaataatcttttttctgacaacaaacctgtgcccatcactgattctcaatcaatacttcttaattattcaatgattgataatattcttaaaaaagtcagtaaatctaaagataagtatattcttaaatcaatggcatttataaatcccattaatgcagatgatacataccagaacggcaacctagacgctatatctgaatatattaaatctttatgtaagctagttaatataatatctcctattaattttagttatgatcttgccttaaacgaattagacgataattcatacgaaattataatctcaaaaaaggtcaatggagtgcctgatacatcagtttctcctataaacaaaaaatttttttcatctaaaacatatcatagccttataaaactaaatctataccaattcagtaacaagccgatcttgcttaagtctgataactctaaagcttcttttgactatcttcatcaattatgtgatcacgtatttacatccgcgagaaaagctatttctttgcagaggtataaaggactcggtgagatgaatccttcacaactggctgaaactacaatgaacccagaaaccaggtctttactacaggtattgcaaatagatgacgatgattatgtaatatttgaaacgttaatgggtgatgatgtcgaaaaaagaagagactttatagtatcctcagctaatgctgtcgaaaacgttgacgtttga

SEQ ID NO: 295625 - DNA, 1308 bp, Unknown
  Bacterial polypeptide expressing nucleotide sequence isolated from the Sargasso Sea
tttggccaactcaaaatataccgctgagtcaattgaggtcttatcgggtcttgagcccgttagaaaaagacctggtatgtataccaacaccaccagtccgaatcaccttgtcatggaagttgtagacaacagcgttgatgaagcaatagctggtcatgcaaaggagatatcagtttgtctaaataaagataattccgttacggtagaagacgatggaagaggtatgccagttgacatgcatcctgaagaaaaagtaccaggcgttgaactaatcttttcaagactacatgctggagctaaattttctaataaagaatacactttttcgggaggcctccatggagttggagtctcagttgtaaatgctttatctactcacttaaaagcagaaataaaaagagacggttcaaaatttgcaatagaatttgcagacagtttaaagaaaaaagacttaaaaaaaattgatgcagtgggacaacgcaatactggtacgaagatctttttcaaacccgatcctgttttttttgacactgaaaaaatttcttctaaacaactttccaatgctttgagagcgaaagcggttttatgttcaggtcttacaataaaatacaaagatgaaatttctaaaaccaaagaagaatggtgttatgtagatggtctaggagactatttaataaacgaattaggagatggtttattcgttccagaaaaacccattattggcgaacatcaagacgaagaatcaggcttatcttgggcattaatgtgggagagaggcgataaagaaaaaatttcagaaagctatgtgaacttaattccaacttcgcaaggaggaactcatgtctctggaatgaaaagtggaatgacagaagctttaaaagaattttgtgactatagaaaattaattcccagaggagtaaaaatcacatcagacgatgtctggaaaaattgtaactttgtattgtctgccaagctcaaagatcctcaatttagtggccaaaccaaagagaaattgtcttcgaaagaatttcaaaacattgcttcttcgatttcaaaagatagtttagccatttggttgaatcaacacactgaagctgcagaggaaatagccttcatttcaattgaaaatgctcaggcacgagtaaaagctagtcaaaaagtcgaaagaaaaaagattaccaaaggcattacgttgccaggaaaattatctgattgtgtttctggagaaatatctgaaacagaactatttttagtggagggagagtcggcgggaggctcagctaaacaggcaagaaatagacagttcaa

SEQ ID NO: 295626 - DNA, 766 bp, Unknown
  Bacterial polypeptide expressing nucleotide sequence isolated from the Sargasso Sea
atgcaaaagacagaagtaaaaaataattcaaattataaaccaatttttgttcatcaagaaatgagctcatcttatctatcgtacgctatgagcgtaatagttagtagagcccttcctgatgtaagagatggtttaaaaccagttcatagaagaattatttatgcaatgtacaaaggaggttatgattggggaaaacctttccgtaaatcagcaagaatagtcggtgatgtaattggtaaatatcacccacatggtgatcaagccgtatatgatgctttagttaggttagttcaagatttttccatgagtcttccattaattgatgggcagggtaattttgggtcaatagacggggatcctcctgcagctatgagatatacagaaacaaaactttcaaaagtttctcaattccttacagaaggattggaaaaaaatactgtagattttagaaacaattatgatgagacagaaagagagccaactgttcttccgtcacaatatcctaatctattagttaatggagcaggaggtattgcagtaggaatggcaacaagtattccaccacataacttaggtgagattatagatggaactattagctacatcaaaaataacgatattactattggtcaattaatgaaacatattccaggcccagattttccaaccgggggtttaattatcggaagagatataattaaacaaggttataacaaaggtagaggatcatttaaaattagaggagaaattggagaagaaagttaaa

SEQ ID NO: 295627 - DNA, 2090 bp, Unknown
  Bacterial polypeptide expressing nucleotide sequence isolated from the Sargasso Sea
gtctcagttgttaatgcattattcggaaaaattagatctatcgataaagagggatggtaaagaacatgctatgtcttttcaaaatggtgaaacggttaaaactttgaaagccattaaagattgtaaagatgaaaccggaacagaaattactttttatccatctaagtcagtttttacaatgactgaatttagtcgtagaactttagaagcaagattgagagaaatggcttttctgaattcaggtatatcaatacatttggaagataaaaggaaagatgagccttgggctaagacaatgtcttatgaaggtggcttagaagaatttgtcaaacatattgaccagacaagaaagtctctaatggatttgcctatcagtttttctggtaaaaaagatgaaattgaagttgatgtttcaatgtggtggaatgatagttattatgaaactgtaaattgctttacaaataatattcctcaaaaagatggaggcactcatttggctggtctcagatcagcattgacaagagttgtaaattcttatgcgcaagatacaggtttaacaaaaaaagaaaatgttcaacttgtaggtgaagatattagagaaggctttacatgtgttttatctgtaaaagtagctgatcctaaattttctagtcaaaccaaagataaattagtttcctcagaagtaagacctgttgttgagagtttaataaatgatctattatcaaattggtttgaagagcatccagcagaggccaaaatcattgtcggaaaagtagtcgaagctgctgctgctagggaagccgctagaaaggctcgagacctaacaagaagaaagggtgctctcgatgtttcgtcactacctggaaaattagctgattgccaagaaaaagatccagaaaaatgtgaaatctttattgttgagggtgaatcagctggcggttcggcaaaacaaggtagagataggtctacacaagcaattcttcccctaaaaggaaaaattatcaattgcgaaaaggcaagattatctaaggttctttcatccaatgagattgcaactctaattacagccctaggtgggggtataggtaattcttctaatgaaaacgatgaggatgatgaaagttttaaaactgataagttaagatataaaaaagtaataataatgacggatgcagatgttgatggtgctcatattaaaacactgcttttaacttttttttatagacaaatgagacctttgattacagatggttgcttgtatatagcgcagcctcctctatataaagctaagaaaggtaattctgaaacatatttaaaagatgatgatgacttggaaaattatctcattgattcaggaataaatgactcttcttttatccttaataatggtgaggttttggcttctaatgatttaattgaactagtcaataaaagtagaaattttaaaaagttaattaattctttacctaaaaaatacaatcaaggatttgttgagactgtatcaattagcggcgcttttaaacaaccaataaaaatttccgacaagtctttactggaaatatcaaacagattgacaaaaaaatatagtgatattgatgccgattggaatgctagttatgacgctgaaaatggcttgatggtttctagggaagtaagaggtgtgagtgagagtatgacaattggtcaaggtttatttaattcttcggattcaagaaggcttgagaaaatttctgatgagataaaacaattttttccttacatgaatgaagaagcgtcaaatatttttgaaagagatggaagaagttatattgttaatggacctattgatttaatagaatctatattcatcgagggtagaaaaggattacaaattcaacgttataaaggtttaggtgaaatgaatgccgaacaactttgggatacaactttggaccctgattctaggagacttttaagagttaaaattgattctggtgttgataatagtggtatatttgctgatttaatgggcgacgaagttataaaaagaagagaatttatccaagacagtattgagtcaggggatttggttgcaaatttagatatttaaa

SEQ ID NO: 295628 - DNA, 1614 bp, Unknown
  Bacterial polypeptide expressing nucleotide sequence isolated from the Sargasso Sea
tatggttactgataatttaggagaaatcagaaaagttaatatacaagatgagatgaaaagttcttatcttgactatgcaatgagtgtgatagtttctagggctttaccagatgttagagatggattgaagcctgttcagagaagagttttgtacgcgatgcatgatcaaggtatgagacctaattcctcatataaaaaaagtgctaggctagttggagaagttctgggtaaatatcatcctcatggagatagttcggtttatgcagcacaagttaggatggctcaacctttttcaatgagatacactctagtggatggtcaaggtaactacggtagtgttgatggtgatcctgctgctgctatgagatatacagagtgtaaactttctccaattactgaatctttattaggcgatatagagaaagaaactattgattgggtagataactttgaccaatctctcaaagaaccttcggttttgcctgctattttaccaaatcttttagttaatggagcttctggtattgctgtaggtatggctactaatattcctcctcataatttaagtgaaatatgtgatggaattgcgcttgttatagataacccacagtctaatgttgatgatttgatgaaagtcgtaaaaggcccagattttcctacgggtgcagaaatttggggtctatctggtataagagaagcttttgcaactggaagaggtagagttgtggttcaggcaaagcatatgattgaggatgttaagaaacaagatcgtcaaagagtagtttttactgaaatcccttatcaagtcaacaaagcatcactaataatgaaaattgctgagatgattaaaactaagaaacttgaaggagtttccgaagttagagatgaatctgatagaaaaggtatgagaattgtacttgaattaagaagaggaacttctccaagtctaattcttaataacttgtataagcaaactcaacttagatcttcattctcagtaaatatgatagctcttgttgatggtacgcctcaaatattgaaccttaagcaaacaatcaatcattacatttcattcagagaagaggtgattagaaggcgagctgagtatgacttaagaagagcaaaggctaggcttcatgtattagaaggtttaaggattgctattcaaaatcttgatagagtaatagagttgattagggcatctgaagatgtggaagctgctagaaattctttgatgcaagaatttaatttgactgaaattcaatctcaagcaatattagatatgcaattgagaagacttgcagcactagagattgagaaaattgagaatgaatataaagaattaactgaactggttgctgatttagaagacttactgtcaaatcagtctaggattttgagtgtgataaaaacagaaacacttcagttgaagagaaaatatggtgaggacagaaggactattatcaatgaaactgaccttaaggagtggaaaagagaagatatggaacctcatcaagaggttgtaattactctttctaaaggtgggtatgtaaaaagaatattatcaagtacttacagagctcaacacagaggtggaaaaggtgttaaaggcca

SEQ ID NO: 295629 - DNA, 1519 bp, Unknown
  Bacterial polypeptide expressing nucleotide sequence isolated from the Sargasso Sea
aatggattttgctaaagaaattcttcctgtaaatattgaggacgaactaaaacaatcatacctaagctatgcaatgagtgtcattcatggaagggcacttcctgatgtcagagatggcttaaaacccgttcatagaaggattctttatgcgatgcatgatttgaaaaataattacaataagccttataaaaagtcagcaagagttgttggtgatgttattggtaaatatcatcctcatggagacactgcagcatatgatgcaattgttaggatggctcaagatttctcaatgagatatacccttatacagggtcagggcaacttcggctctatagatggagatcctccagcagctatgaggtatacagaagtcagaatgcagaaaatctccgatgaaattctggcagatttagaaaaagaaacggtttcattctcagaaaattatgatggctctgaacaaatgcctgatgtaatgccaaccaaaataccaaaccttttaattaatggatcttcaggaatagctgtgggtatggctaccaatgttcctccgcataatcttaccgaagtaataaatggttcattaaagcttcttgagaatccaaaactatccattgatcagatcattgattcaattagcggccctgatttcccaactgggggaactattgatggaaaaatgggtatctatgaagcatataaaacaggaagaggaataatttatgtcagatctaaatcaaaagtagaggaaagcaaaactggaaagaaatctcttgttatctatgaaatacctttcatggtaaacaaagctagaacccttgagaaaattgcagaacttgtcaaagaaaaaaagattgatggaattagtgaaattcgagatgaaagcgataaagatgggctaagaatagttatcgatgtaaagaagggagagtccgttgaggttttagaaaataatctttttgcacaaactcagcttgaacaatcatttggaataaatttcactgttttagttgatggtcaaccaagagtacttaatttaaaagagattcttcaagaattcttaaaacatagaaaagatgttgtattaaaaagaacaaaattcgagcttagaaaggctaaagaaagaggccatattgttgaaggattgatggttgctatcgctaacattgatgaaatcataaagattattaaaaaatctaaagatccaaagatagcagctcaggagttagttaaaaagaaatggaaagctggtcctgtagaagcaattcttaaaaaagttggaaaagatgcatgcaagccaaagggtgtagcaaagggtgttgggctaacaggaaaatcttataaactttctaatgatcaagcaaaagctattcttgaattaaggcttggtagactaacagggcttgaacaagacaatctatcaagcgaatttaattcttttattgaaaagattacttcgcttcaagaaattattgatgacaaaggtgtccttcaaaaggtaaatagagatgagcttaatgaa

SEQ ID NO: 295630 - DNA, 2476 bp, Unknown
  Bacterial polypeptide expressing nucleotide sequence isolated from the Sargasso Sea
catgagtgaacagcacaattcgcaacccgataacagcagctacggcgcctcgtcgatccagatcctcgaaggtctggaagcggtgcgcaagcgccccgggatgtacatcggcgacacgtcggacggcaccggtctgcaccacctcgtgttcgaggtgctcgacaactcgatcgacgaagcgctggccgggtactgcaacgacatccacgtgacgattcacgccgacaactcgatttccgtgaccgacaacggccgcgggattccgaccgacgtgaagatgaacgacaagcacgagccgaagcgcagcgccgcggaaatcgtgatgaccgagctgcacgccggcggcaagttcgaccagaacagctataaggtgtcgggcggcctgcacggcgtgggtgtgtcgtgcgtgaacgcgctgtcgagctggctgcgcctcacggtgcgccgtgacggcaagaagcggttcatggagttccaccgcggtgtcgcgcaggatcgcgtgctcgaggtggtggatggtgtcgaagtgtcgccgatgctcgtgactggcgataccgagaaccgcggcaccgaagtgcacttcatggccgatccgacgattttcggtacggtcgagtatcactacgacatcctcgcgaagcggatgcgcgagctttcgttcctgaacaacggtgtgcggattcgcctcaccgatctgcgttcgggcaaggaagacgatttcgcgttcgccggcggtgtgaagggcttcgtggagtacatcaacaagacgaagaccaacctgcacccgaccgtgttcttcgccaatggcgagaaggatggcgtgggcgtcgaagtcgcgatgcagtggaacgacagctacaacgagaacgtgctgtgcttcacgaacaacattccgcagcgcgacggcggcacgcacctgaccggcctgcgggccgcgatgacgcgcgtcatcaacaagtacatcaccgacaacgaaatcgcgaagaaggcgaaggtcgagacgaccggcgacgacatgcgcgaagggctgtcgtgcgtgctctccgtgaaggtgccggagccgaagttcagctcgcagacgaaggacaagctggtttcttccgaggttcgtgcgccggttgaagaagttgtggcgaaggcgctggaagagttcctgctggaaacgccgatcgacgcgaagatcatctgcgggaagatcgttgaagcggctcgtgcgcgtgatgctgcgcggaaggcgcgtgagatgacgcgccgtaagggcgtgctcgacggcgtcggcctgcccggcaagctcgcggactgccaggagaaagacccggcgaagtgcgaaatctacatcgtcgagggtgactcggcaggtgggtcggccaagcaagggcgtgaccggaagttccaggcgatcctgccgctgcgcggcaaggtgctgaacgtcgagaaggcacgctacgacaagctgctgtcgtcggaacagatcgtcacgctcgtgacggcgctcggctgcgggatcggcaaagaggattacaacctcgacaagctccgctatcaccgcatcatcatcatgaccgacgcggacgtcgacggtgcgcacatccggacgctgctgctcacgttcctctatcgtcagatgccggacatgatcgagcgcgggtacgtgtatatcgcgcagccgccgctttacaagatcaaggcgggcaaggacgaacggtatctgaaggatgacgtggagctcaacgcgcatatgctgcggttggcgctgcaagggtcggagctggtgccgggtgagaatgcggctgcgatttccggcgatgcgcttggggaactggcgcggtcgtatctgctgtcgcagagcgtgatcgagcggttgagccggttgtatgacccggccgcgctggaagcggtcatggacggcgtggtgatcgatctttccaacgaagagtcgaccgaggcttcggcgaaggcgctgcacgctgcgttgcatgatgaagcgctgaagaacgaagtgcgggttgtgccttcgtatgacccggttcgcgaacagcgggcgctgcatgtcgagcggacgcatcacggcaacgtgcgcgtttcggtcatcgaccaggaattccagcacacggcggattatcaacagctcgtgaccaccgcgaatacgttcaaggggcttattggggaaggcgcggtcatcaagcgcggtgagcgcagcatggccgtggcggacttcaagagcgcgatgaagtggctgctggcggatgctgaacgcaacgtctccaaacaacgctataaggggctcggcgagatgaaccccgagcagctgtgggaaacgacgatggatccggctgtccggcgactgctgcgtgtgcagatcgaagacgcgattgcggcggatgggatctttactaccctcatgggggatgatgtcgagccgcggcgggcgtttattgagtcgaatgcattgcgggcggggaatattgatgtctaa

SEQ ID NO: 295631 - DNA, 1255 bp, Unknown
  Bacterial polypeptide expressing nucleotide sequence isolated from the Sargasso Sea
ggaactgataaatcagctatgcatcatttagttttagaaattctagataatagtatggacgaagtgatttctagttttgctaataaaattgaagtaaatttattaaataagaacactattaaaattgctgataatggaagaggaatacctattgacaaacatcctaaatttccaagcaaatctgctttagaaatcataatgacaactttacacgctggaggaaagttttctgaaaaaaattatcaaacatctggtggactgcatggtgttggagcttcagttgttaatgcactatctgaaaaattaattgtagaagtaattagagataaaaaattatttaaacaagaatttgaacgaggtataccgaccactaatcttgaatttattactgatactcatagagtaaatggaacaagtataactttttcaccagaccaacagatttttggagaaatgtgttatttttctccagattacctctataacatgataaaaaataaggcttatctttccccaaaagttaaaattttgtggaaatgtgataaaatacttttagaaaaattttcaaccattccctctgaaaaaacactttattttgaaaaaggtatcaagcaattattgattgacaaaattgaaaataaagatttgcttattggtgaaatatttcatgaaaatatttcacttgatggtgaaaaaattgagtgtgctatcacttggtttgatgagaatgaaacatattttttaaactctttctgtaatacaatattaacaagtcatggaggaactcatgtacaaggttttaagaatgctatcatcaaagccatacgaaactatgctgaaatatctggattcaaaaaatataacgaaattttaatagatgatattttaaaaagcataggttcaataatatcagtttttataaaaaatccccaatttcaaggacaaacaaaagaaaaactagttaatattgaagtcactaagttaattgaaaactctcttaaagatagatttgaaagttggttggcaaataatccaactttgtcttcaactataattgaaaaaataatcgaaaatctcgatgaaagaaaaattaaaaaattagaaaaagaaacctcaaagaaaaaaacttccaaaaaaaatagactacctggtaagttagctgattgctcttcaaaaaaagtagaatctaatgaactatttatagttgaaggagatagtgctggaggttcagcaaaacaagcaagaaatagaataa

SEQ ID NO: 295632 - DNA, 511 bp, Unknown
  Bacterial polypeptide expressing nucleotide sequence isolated from the Sargasso Sea
atgggtgaaattgctgctaaggaaatcgttcctgtagacataggaaaagagctcaaacaatcttatcttgattacgctatgagcgtaattgtaggcagagccttgcctgatgcaagagatggattaaaacctgtccatcgcagagtcctctatgcaatgcacgtcttgaataatgatttcggtagaccgcacaagaagtcagccagaatagttggagatgtgattggcaaatatcatcctcacggagacagtgcagcttacgaaactattgtaagaatggctcaatggtggtctctgagatatcccttagtagacggacaaggaaatttcggatctatggatggagatggaccagccgcacaaagatatacagaagtaagaatggccagaatatctcaggagttattggcagatcttgaaaaggaaacagtaaactatgtggaaaattacgatggcactgaaatgatgccagaagttttacccactaagattccaaatatgctcgtgaatg

SEQ ID NO: 295633 - DNA, 1320 bp, Unknown
  Bacterial polypeptide expressing nucleotide sequence isolated from the Sargasso Sea
aaaactgaagctgagtcttatgattcctccagcattacggtcttgaaaggattagaggcagtcaagaaaagaccaggtatgtacattggagatactgatgatggaaccggtttacatcatatggtttatgagatagttgataattctattgatgaggcattagctggtcattgtgatgaaataactgtaaaaatattgtcagatgattgcgtctctgtctctgacaatggaagaggcataccaactgatatgcacgaggaaggcatgtctgcagcggaggttatcatgacgaagctgcatgcgggtggaaagtttgatgacaattcctataaggtctcaggaggtttgcatggagttggtgtctcggttgttaatgctttatctgaggacttaaaactaactatttatagaggcggcaaaatacatgaacaagaatataaagatggtgctccaaaaggaaaactaaaggtaacgggaaaaactgataaaacaggaactgaagttacgtttgttccatcgcctactactttttcagatattatttttcagtatgatgtattagaaacaaaacttagagagctatcctacctcaatgctggccttaaaatcatcttagttgacgagagaaactctaagaaaaaagaattttttcacaaaggcggcttagcagaattcgtatcatttttgaatacaaaaagaacaactgttaattctgtatttcattttgtaaaagaagcatcagacggcataaccatcgaagtatcccttcagtggaatgatggttaccaagaaaacattcaatgttatacaaataacattaaacaaagagacggtggaacccacttggtaggtttcaggacagccttaacgaggacattgaacaactacatggaaaaagaggggatgaacaaagagaaggtgtctacctcaggtgatgatgccagagagggcttagttgctgttgtttctgttaaagtcccagatccaaagttttcctcgcaaaccaaagataagttagtctcttccgaggtaagaccagtagttgagcaagaaacttataaagccttaacggaatatctgttggagaatcctggagaggcaaagctaatcgctacaaaaataatcgaagcggctagagctagagaggctgctagaaaagcaagagaactgactaggaggaaaggtgtatttgagggtggtggtcttcctggaaaactttctgattgccaagaaaaagatcctgcaaaaagtgagatctatttggttgagggagaatcagcaggaggttctgcaaagcaaggacgtgatagacattttcaa

SEQ ID NO: 295634 - DNA, 1987 bp, Unknown
  Bacterial polypeptide expressing nucleotide sequence isolated from the Sargasso Sea
tatgaacgatctttttgacaaaacgaagaaaaaacaaaaaaaaagtgaatactcggctaaggatattgaagttctcgagggtttggagcccgttcgaagacgtcccggaatgtatatcggtggctctgatgaggctgcaatgcaacatctagttgccgaattactcgacaatgccatggatgaggctgttgcaggggaagcaaatcgtattgaaatacatttagaagcctctgacacgatctcaattagtgataatggccgcggaataccggttggaccgcacccgaaatataagacaaaatctgccctagaagtaatcatgacaagccttcactctggtggtaagtttggggggcaagcatacaagatatctggtgggctccatggggtagggttatcagttgtaaatgcgttatcccaaagcttgaaaattgaagtaatcagagatggtaaattatggtctcaaaactataccaaagggaaacctacaaccaaactcaaagagtgtggacctaaacacaaacgcaagggaacaagcataacttttacaccagactttgatatctttcccaaagatgcacgttttagaccacaacaattatataaaatggctcgatccaaggcctatctgtttaaaggaattgaagttcgttggacttgcaatccaactttacttaaaaaacgtgataccacgccagaaaaggataaattgcattttcccggggggttgttggattatctagcaaataaaatggaggcttttgcaccattaaacgtaacacctttttatgggcaagcgccaattaacggatcagatggaaatatggaatgggcagtttcgtggtcaagtgatagcgaaggttttatagagtcattttgtaatacagtacccactccccttggcggaacacacgaagttggcctaaggaatgctcttacaaagggtctaagaggttacggggctctggtaaataataaacaagcagcaaaaatttcttctgaagatgtagtaggcagtgcatctattgttttgtcggtcttcgtagaagacccacagtttcaagggcagactaaagaaaaactgacttctcccgaagtcgcaaaacagattgaaactactatttccgattattttgaccactggttatcaggagacccaaatacggcaaaaattcttctagaggaagttctagatagatgtcttaaccgaatacagaaacgaagtgaaaaaaatcttaaaaggcaaagtaatacacggaaacttagactgcccggcaaattatccgattgttcccaacgaaagcaagaaggtactgaaatatttatagttgaaggagatagtgctgggggctcggccaagcaggcaagagatagattaacccaagcagtccttcccttaagaggaaaaatattaaatgtcgcaagttctacaaaagataaaatgtatgctaatcaagaaataaaggacctaatagaagcactgggttgttatgacggaaatacctttaatcaagataatttacgttatgaaaaagtaatcataatgactgatgccgatgttgatggtgctcatattgcttctctcattttaacattcttcctaaaaattattccggagttaattgagcagggcaacttgtatcttgctcaaccacccttgtataggatcagtaaggggaaaaatacctattatgcaatggatgaaaaagataaggacaagatattaaaaaaacattttaaagatgatacaggtttagaaataagcaggtttaaaggtctaggagaaatgccaccaagtcaattgaaggaaactgcaatgaacaaaaccacgcggcaacttcttcgtgtaatactgcccaaaggtaggggcaaccataatgaagcatccaaattagtagataatttaatgggtaaaaagcctgaatttcgactagcttttattcaagagaaagcaggaaatttagagcaaaatatgattgatttataa

SEQ ID NO: 295635 - DNA, 1783 bp, Unknown
  Bacterial polypeptide expressing nucleotide sequence isolated from the Sargasso Sea
atgaataaaatattaaatgaaaatattgataagattttaggtcagaaatacttatcttatgctatttcaactattgtatctagatcgttgcccgatgtgagggatggtttaaaaccagtgcacagaagaataatatattcaatgtaccaattaaagctttttaataattcaacttataaaaaatcagcaagaattgttggggatgtaatgggaaagtttcatcctcacggtgatcaggcaatatacgacagcttggttagaatggctcaggatttttccacaagaattacattagtcgatggtcagggcaattttggtaatattgatggtgataatcctgcagcaatgcgatacaccgaggcaagattacaagattatacaaattacttttttgatggtatcgaagaaaattctgtagattttaaagataattacgatggtcaaaatttagaacctgtggttctaccatctcaacttcctaatattctaattaatggagctatgggaatagctgtgggaatggccactaatattcctcctcataatattgttgaattaattgatgcaataaaattaataataaaaaaagataaagcttttctaactgaaattttaaaaattattaatggaccagatcttcccacaggtggtgaaataattttagacagtaatgaaaaaaaacaaatttataagaatggcaagggctcgttcaatattaatgctaaataccaaatagaagaattaaaaaatggtttgtatcaaatcattattactgaaattccatatcaagttaataaagttaagataatcgagcaacttgctaataacatcaataataaaaaattacccttggatgatgttgttgatgagtctgatgaaaatattagaatagtcttaaaaccaaagaccagaaatattgatgcagaaaaattaataagcttatgttttaaattaactgacttatctactaagtactcttgtaattttaatgtattaattgatggtatagaacccaaacaaattggaattattgaaatactatctaattttttagaacatcgaaaaattaccattaaaagaaaatccaaatttaatatagaaaaaattaaaaagagactagaaattcttaagggttatcaaattgtctttaaaaatttaaattctataataaaaataataagaactaaggataatcccaaaaaagaattaataaaaaaatataaattatctgatttacaatgtgagtcaattttaagtatgcgtttaggatctctaagaaagattgatgaaaaaaatattaaagatgaaatccaaaaattaaatgaagagttaaaatatctcaataaattaataaaagataaaaaaacattagataaatttatactaagtgaattagatcttataaagagtgatttaaatactgatataaaggagagaaaatctttaatttcatcagaacaaaataatgatattgatattagtattgatgaatttaaagaagttgaaaaatttaccgttatcattaataaagattttcagctcaagagaattaaagagataactgatgaaaaggaaattgaaaaaataaaaaaagaaaatctattttcagttaatttaaattcaaatcaaaaaatacttttatttgtttcttctggtaaagtttacactatagatccaaatattctaccaggtggaaatagtaatcctaaatcatttatttattttgttgaaagtatgcctaaagataagattgctggaaactttcatctaccaatgaagagct

SEQ ID NO: 295636 - DNA, 700 bp, Unknown
  Bacterial polypeptide expressing nucleotide sequence isolated from the Sargasso Sea
taccgacgatggaagcggactgcatcatatggtttatgaggtcgtagacaacggtatagatgaggctttggctaagcatgcagattatgttcatgtaaaaattcatgctgatagcagtgtttctgttcgagataatggacgagggataccagtggacattcacgaagaagagggggtttctgcagctgaagttattatgacccaactccacgcaggtggaaaatttgatagtaattcctataaagtatccggaggtttgcatggcgttggagtatcagttgttaatgcgctatcggtttggctcgaactacgaatttggcgcgatggaagcgaatattttgctaaatttgcaaatggagaaacaactgagcacttaaaaaaaataaaagatgttgccgaggagcgtggtactgaggttaggtttttagcttctactgagactttttctaatctggactattcttttgaagttcttgaaaaacgtcttcgtgagttagccttccttaactctggtgtaaaaattattcttgaagatgaaagacccactgaagtcttgcgttcagaactggtctacgagggtggcgtaaaggaatttgtaaagtatctagatcgatcaaaaacctctttgatcccggagcctatatttattacgggtgaaaaggatgaaattaggtatcgaagtagcaatgtggtggaatga

SEQ ID NO: 295637 - DNA, 2413 bp, Unknown
  Bacterial polypeptide expressing nucleotide sequence isolated from the Sargasso Sea
atgagtgaaaatacttacgactcctcgaatatcaaggtactgaagggcctggatgcggtccgcaagcgcccggggatgtatatcggcgatacggatgatggctcgggtctgcaccacatggtgttcgaggtcgtcgacaactctattgacgaggctctggccggctactgctccgatattcaggtcaagatccattccgacggctccgtctccgtccgtgacaacggtcgtggtattccagtcgatatccacccggaagagggtcgctccgctgccgaagtcatcatgaccgtgctgcacgcgggcggcaagttcgacgacaactcctacaaggtctccggcggcctgcacggcgtcggcgtctccgtggtaaacgccctctctgacaagctgctgctgaccatccgtcgcaacggccatgtctacgagcagacctatcacctgggtgagccgcaggcaccgctcaagcagattggcgatagcaccggcaccgggaccgaagtccgcttctggccgagcccgaccatcttcagcgataccctgttccactacgagatcctggccaagcgtctgcgcgagctctccttcctcaactccggcgtctccatccgcctgctggatgagcgtgacggccgcgaggcgcacttctgctacgaaggcggcatcaaggcgttcgtcgaatacctgaaccagaacaaaaccccgatccacccgaaggtgttccacttcaccaccgagcaggacggcatcggcgtcgaagtggcgatgcagtggaacgacgcctatcaggaaggggtttactgcttcaccaacaacattccgcagcgcgatggtggtacccacctggtgggcttccgtaccgcactgacccgtactctgaactcctacatggacaaggaagactacagcaagaaggccaagtctgccgccagtggcgacgacgtgcgtgaaggtctgattgccgttatctccgtcaaggtgcctgaccctaagttctcctcccagaccaaggacaagctggtctcttccgaagtgaagaccgcggtcgaacaggcgatgggtgagaagctggccgacttcctgctggaaaacccgggcgatgccaagatcgtggtcaacaagatcatcgatgcggcccgtgcccgtgaggcggcccgcaaggcccgcgaactgacccgccgcaaaggcgcgctggatatcgccggtctgcccggcaagctggctgactgtcaggaaaaagaccccgctctctccgaactctacatagtggaaggggactctgctggcggttccgccaagcagggtcgcaaccggaagaaccaggccatcctgccgctcaagggcaagatcctgaacgtggagaaggcccgtttcgacaagatgatctcttcccaggaggtgggcaccctgatcaccgcactgggctgtggcatcggtcgtgacgagtacaacccggacaagctgcgttatcacaacatcatcatcatgaccgatgcggacgtcgatggtgcgcacattcgtaccctgctgctgaccttcttctatcgtcagatgccggaaatcatcgagcgtggctacgtctacatcgcccagccgccgctctacaaggtgaagaagggcaagcaggaacagtatctgaaagacgaagatgcgctgctgcagtaccagaccgccatggcgctggacggtgcgaccctgcacgtcaacgagtctgccccggccatcggtggcgaggcgctggagcgtctggtcaaccagcaccgctcggtgactcacctgatcacccgcatgtctcgtcgtgcgccggaagccgtactgacccagctgatctatcagccggagctgaacgaagcgctgttgagcagcgagagcgatctgctggcctggtgccagagcatggaagccgtgctcaacgagagcaaccacggcatccagtaccagatgcaggtacgccacgacgaagagcgccgtctgttcgtgccgcacgccgtggtacgccagcatggggtcgaccgcgaatacccgcttagctacgacttcctgcaatcctccgagtaccgtcagctggtctcgctgggcaaggagatcgccaacctgatcgaggaaggcggttacatcaagcgtggcgagaaggtgaagccggtcgccagcttcgtcgaagcggtcgagtggctgatgggcgaaggcaagcgtggcatctacatccagcgctataaagggctgggcgagatgaacccggaccagctgtgggaaaccaccatggatccggaagcccgtcgcatgctgcgcgtcaccatcgacgacgccgtcggtgccgaccagctcttctccaccctgatgggtgatgcggttgagccgcgtcgtgacttcatcgagaccaacgccctgcgcgtggccaacctcgacgtctaat

SEQ ID NO: 295638 - DNA, 1225 bp, Unknown
  Bacterial polypeptide expressing nucleotide sequence isolated from the Sargasso Sea
aatgacaaaaaataattcaaacaattaccaagctgactcaataaaagttctaaaaggtttagaagcagtaagaaaaagaccaggtatgtatatcggtgacaccgatgatgggaccggattacatcatatggtttacgaagttgtagataattccattgatgaggctctagcaggtttttgcaaaaaaattgaaataagtataaacgatgataactctgtaacagtgattgacgacggcagaggaattcctgttgatattcataagggtgaaaaaaaatcagctgccgaagttataatgacccaacttcatgctggtggtaaatttgatcataattcttataaagtttctggaggactacacggagtaggtgtttcagttgttaatgctctttctgagagattaaaacttacaattaatagagataataaaaaatattacatagaatttaaagatggagacgctaaaacttctttaaaacaagttggaaaatcaaaaactagtggaactgaaattaattttgttccatccaaagatatattttcatccattaaatttagtttttctattttagaaaaaaggatgagagagttagcttttttaaataagggcataaaaatagttttaagtgatttaagacaaaaaaaaccaaaaacattagagttcaaatttgaaggaggtatcagtgaatttgtgcaattcattgatgagaaaaaagaaagtttaaaaaacaaaaatgaaaatgatctttttaaaaaaccaatttacattgaaggtttaaaaaataatattgatgttcaatgctcccttaagtggaatgcagggtatagtgaagatgtattaccttatactaataacatttatcaaaaagatggaggaacacatctccttggatttcgaagtgcattaacaagagtagtaaataaatatgcaaatgaacaaaacttgttaaaaaaaaataaagtttctttatcaggagatgacgttaaagaaggattgacttcagttctttctatcaaaattcctgaccctaaattttcgtctcaaacaaaagataaattagtctcatcagaagttagaaatattgttgaaactatcattaatgagaagctgtctatttggtttgatcaaaatccatcgatttcaaaaattatcttaactaaaattatccaagccgctgtagccagagatgtagccagaaaggcaagagaaaatgtaaagaagaaa

SEQ ID NO: 295639 - DNA, 1345 bp, Unknown
  Bacterial polypeptide expressing nucleotide sequence isolated from the Sargasso Sea
ttagcaggtttcagaggtgcattaactagaagtattgtaaactacattaataaatctaataaaacatctgctaatattacaggtgacgatgcaagagagggattaacatgtataatttcagtaaagttacctgacccgaaattttcaagtcaaacaaaagataaactagtttcatctgaagtacgtccagtagttgagtctgtaagtttagataaacttgaacaatggattgaagaaaatcctagtgaaataaagaaggttgttgataaaattgttgaagcttctaatgctagagaagctgcacgtaaagcacgagaattaacaagacgaaaaacaggtttagagaattcagctctacctggtaaacttgcagattgccaggaaaaaaatcctgagttttcagaattatttatagttgaaggagactcagctggtggatctgcaaaacaaggaagagatagaaaaaatcaagctattttacctttaagaggtaaaattcttaatgttgaaagagcaaatcaaaaacaaatccttacaagtaatgagattggagtattaataacagcaattggagctggggtaggaaatcctacaggaaatgaaaatacagataaaatagagggtaaatttgatttaaataaaatgagatatcacaaaattattataatgacagatgcagatgtagatggaagccatataagaactttgctgttaacctttttttatagacatatgcgccctattatcgaaagtggaagactttatattgcacaaccaccattatttagatcaaaaaaaggaaactcaattcaatatataaaagatgaaaatgagatggaaaaacatcttattgaggaaggtgtaaaaaaacttatttatgaaattccaaaaaataaaaatgaaattaatcaaatatctggtcaacaattaattaaattattaaatttatgtaaaactattcaaaaattagttgatagactaacaagaagaattgagagtaaattagttattgagcaagcagcagtaattgctgccttaaaaaaagattcttataatcaaaatgaacttgtaaaagaaattgcaaaatatttagaacttagattaaatacaatcgactcagaccagtggaaagtaaaatttagtaattttgcattgaatattattcacattcatagaggtgtagagaaaaaatatattattaatagtgattttcttaattctcctgaaacaaaatcattaaatgagtttagaaaacctctaatggaaaattttggtctattaaaaaatggctcagcaggtattcttaaaaatggtgatttagaatttaaaattaatgaccagtgat

SEQ ID NO: 295640 - DNA, 1715 bp, Unknown
  Bacterial polypeptide expressing nucleotide sequence isolated from the Sargasso Sea
aatgagctcttcatatctttcttatgctatgagtgtaatagttagtagggctttacccgatgttagagacggcttaaaacctgttcatcgtagaattatttatgctatgtataaaggtggttatgattggggcaaaccgtttcgaaagtctgcaagaatagttggtgacgtaattggtaaatatcatccacatggtgatcaagccgtatatgatgctttagttaggttagttcaagatttttccatgagtcttccattaattgatggacagggtaattttgggtcaatagacggtgatcctcctgcagctatgagatatacagagacaaaactttcaaaagtttctcagtttcttactgaaggattagaaaaaaatacagtagattttagaaacaattatgacgagacagaaagagagccgactgttcttccatcgcaatatcctaatcttttggttaacggagcaggaggtatcgctgttggaatggcgacaagtattccccctcataatttgggagaaattattgatggtactattggatatataaaaaataacgacattacaattggtcagttgatgaaacatattcctggtccagattttccaacaggaggtttaataattggaagagatataatcaaacaaggttataacaaaggtagaggttcatttaaaataagaggagaaattgaagaggaaagtttaaaaaatggcaaaacaagacttgttataaaatctataccttaccaaataaacaaatctgttttaaacgagagaattgctgatctatcacgacaaaaaaaaattgaaggtgtaagtgatattagagatgagtctaatcgagacggtataagagtagtaatagatttaagaagaggtgtagaagcagaaacgataagaagacaactttataaattaacgagtgtagagtcttcatttggttttaatactttagctattgttgatggaaaaccaaaaatacttaatctaaaggaattcatttcacaatttgtttcttttagagaaaaaactgtacttagaagtattaagtttgatcttaaaaaaacagaggatagagcacatatattaattggtattgctactgctgttgagagtattgatgcaataatcaaaattattaaaaattcaaaagataccgaaacagcaaagaaaaatttattaaataaaaaatggccaattaaaaaaagttctaaactagtttctatgatcgaaaaaaaacaaaatttatctaaatatcaattaagtgaaacacaagttaattcaattttagaattgagactccaaaaattaactgctttcggaataaatgaaattgaaactgaaattaagaaattatctgaacttataatttactacaataaaatcataaaatcaaaaaaagaacttttaaatttgataatcaaagaattagaagaaattaaaaataaattttcaattaaacgcagaacaaaaataattgatacagttttaaattataatattgaagaaactattcaaaaagaggcagttgtaatcaacattacaaatcagggatatattaaaagaggatcattatcatcggttaaaacacagaaaaggggaggaaaaggaaaaacaggtataacaacaagggaagaagactttgtagttagaattttaactggaaattctcacagtcaagttttatttttttcatcacaaggtttagcttata

SEQ ID NO: 295641 - DNA, 1129 bp, Unknown
  Bacterial polypeptide expressing nucleotide sequence isolated from the Sargasso Sea
ctgatttcaatgcatgatgagatgagttcatcttatctatcatatgcgatgagtgtcatcgttagtagagctcttccagatgttagagatggtctaaaacctgttcatagaagaatattatatgcaatgtataaagggggctatgattggtctaaacaatttagaaaatctgcacgaatagttggagatgtaattggtaaatatcatccacatggtgatcaatcagtttatgatgctcttgttcgaatggttcaggatttttcaatgagcttacctctagttgatggtcagggaaattttggatctatagatggtgacccagcagcagctatgagatacacagaaactagattgtcaaaagtttcacaatttttaattgatgacattgaaaaaaatacaattgattttaaaagcaattatgatgaaacagaaaaagaaccatctgtattaccagcacagtttccaaatttattggtaaatggagcggggggtatagccgttggtatggccacaagcattccacctcataatttaggagaaattattgatggtacattagctttaattgataacaatgatttaaagattaaagatttaatgaagcatattcctggacctgattttcctacaggtggcataattattggtaaagatattataaaacagggttacaacaaaggtagaggttcttttaaaattagaggtgaaatatcaaacgaaacacttaaaaatggtagagataggttagttataaattctattccttaccaagttaataaatctgtattaaatgaaagaatagcacaattagtaagggaaaaaaaaattgagggtataagagacatacgagatgagtccaatagagaaggtataagagtttcaatagatttaaggaccggcgttgaacctgagactgttaaaagacaattatataaaaatactcaaatagaaagttcatttgggtttaatacacttgcaattgtagatggcaagccaaagacttgtaatcttaaagaatttttagagaattttttagaatttagagaagatgttgtacttaagaaaactaaatttgatctcaacaaagcagaagatagggcacatatcttaattggtctatctgtatcgg

SEQ ID NO: 295642 - DNA, 2266 bp, Unknown
  Bacterial polypeptide expressing nucleotide sequence isolated from the Sargasso Sea
cttcctttaattgatggtcaaggaaattttggatcaatagatggagatccacctgcagcaatgagatatacagaaacaaaacttgcaaaaatttcacagtttttaatagatgatatagataaaaatacagtttcatttaaaagtaattacgacgaaactgagcaagaacctacagtattgccagctcaatatcctaatcttttggtaaatggagctggaggtatcgctgttggtatggcaactagtataccaccacataatcttggtgaaataattgatggaactttagcgcttataaaaaataaagacatcaaaattaaagagttaatgaagcatatacctggccctgattttccaacaggaggagtgattattggtaaagatattattcgagaaggatacaaaacaggcagaggttcttttaaaattagaggtgaaataaatgttgaaaatctaaaaaatggtaaagacagattagtaattacctcaataccttatcaagtcaacaaatctaacttaaatgaaaaaattgcagaactagttagagacaaaaaaatagagggaataagtgacataagagatgaatctaacagagaaggtataagagttgctatagatttaagaagaagcgttgaaccagagacaatcaaaagacaactttataaatatacctccattgaaacttcatttggttttaattcattagcaatagtcgataacaaacccaaaacatgttcattaaaagattttttagataactttttaaaatttagagaagatgtagttattaaaaaaaccaaatacgatttaaaaaaagctgaagaccgtgttcatgttctgcttggtttatctgttagtgtagaaaatattgataaagtaattaaaattatcagatcttcaaaaaatccagaggaagcaaaaaatactcttataaaaactaaatggaaaataacaaaatctgcaaaattaattaaattagttgatagtaaaaattataaaggatcatacaatttatctgaaactcaagttacatcaatactagagcttagattacaaaaattaactgcccttggaattaatgaaattgaagaagaaataaaaaaattatctgaattgattacaaggtataaaaaaataataaattccaaaagtgaactattaaaagtaataagtaatgagttatctcaaattaaagagaaattctcatctccaagaagaacgcagattatagatgctgttttaaactataatattgaagaaactattcaaaaagaatctgtaataataacaattactttacaaggatacattaaaagaggtgccttaagtaatgttaaacaacagaaaagaggtggaaaaggtaaaacagggattaaaacaagagatgaagactctgtagtacaaacattatcagtaaatacacacacatctgttctatttttctctacagaaggattagcttacaaagttaaagcttggaaaattccagagggttcagctgcctcaaaaggtaaatctttatttaatattcttcctttaaaaaatcatcaatcaattagttcaattatgccatttccagatagcgatgttgatactaaagatatgcatatcatttttgcaactagtaatggaaaaattagaaagaataatcttgaagattttacttcaattaatacttcaggtaaaattgcaatgaagcttgacggtaatgataaaattattggtgttaaaatttgtagagatgatcaggatataattttaagcactaaattaggaaaatgcattaggtttgaatcgaaaaaacttagagtttttaaaggtagatcatcaaaaggtataagaggtatcaatttagcagaaaatgatactatcgtatctctgtctattattgatcatgactcaaataagaaagcaaaaaataaagaccaaaaatcagagattaaagctaaagaaaaattcatattatcaatcacagaaaatggttacggtaagagaacatctcattatgattatagagttacaaatagaggaggaaagggaattattggtattgtcaattcacaaagaaacgggaatgtttcttcatcctttcctgtttttgaaggagatcaaatattaatttctacaaataaaggtagagtaataagaacagctgttaaagaaataagaatagctggtcgtaatacgcaaggtgttagaataattaaactgactggggatgaaaaagtagtttctgctattaaattagatgataatcttatctaat

SEQ ID NO: 295643 - DNA, 1176 bp, Unknown
  Bacterial polypeptide expressing nucleotide sequence isolated from the Sargasso Sea
tgttctgatatttgaggtcattataaataaagatggctctgtcacagttgcagataatggcagaggaattccggttgatgttcacaagaaggagggggtatcggcagcgcaattaataatgactacacttcactcaggtggtaaatttgatgataatagttataaagtttcaggaggtcttcatggcgtcggggtatctgttgtaaatgccctctctaaaaaattgaccttagaagttcatcgtgatggcggtgaatattatcaagaatataatgagggaaaacctaaagccaaattaaaaaaaataaaaaaatctagcaagacaggaacaataattactttctttccatcaaaggaaatttttacatctacaaagtttgaaattgaaaaaatttataagaggattcaagagctatcatttttgaatgcaggtgtttcaattaatgttgaagacaaaaaaacaggcaaatctaaaaaatttaaaaataatggagggctttcaagttatgtaacccatttaaaaggaagaaaacaagctctttcagatattttcgagtgttctgctaccgaaaatgaggttggagttgaaatttctatgcaatggacagactcttattctgagaatgtattatgttataccaataatatacctcaaaaagatggtggaactcacttagctggctttaggggcagcttaactagggtattaaagacatttataaaaaaagaaaatgctaaaaaaacacctacagacctattgggagaagatgttagagagggtttaattgcaataatatctgtaaaagtaccagacccaaagttttcttctcaaactaaagaaaaacttgtatcttctgaagttgagggtgttgtaagtactgtatttaataaatactttaatgaatttcttctagaaaatccaaaagatgctatgagcatcatttcaaaggtatcagaagctgccttagcaagagaggcagctagaaaagcaagagaaatgacaagaagaaagggtgttttagaaatagcgggacttcctggtaaattggcagactgtcaagaaaaagaccctaaactttcagaaatatatatagtagagggggactcagctggtggatcagcaaaacagggtagaaatcgtaaaaatcaggccatccttccacttaaaggaaaaat

SEQ ID NO: 295644 - DNA, 451 bp, Unknown
  Bacterial polypeptide expressing nucleotide sequence isolated from the Sargasso Sea
attggatactaagatttatcccaacattgatataactgatgaattagaaaaaagttacttagactatgccatgagtgtcatagtctcgagagctttacccgatgttcgtgatggacttaaacctgtgcacagacgaatattatattctatgtatgagtcctcttatcatcataacaaaccttataaaaaatcagcaagaatagttggagatgttatgggtaaatatcatcctcatggtgactcagctatttatgagtcaatggtaagaatggcacaagattttacaatgcgtttacctttaattgatggtcaaggaaattatggttcaatggatggagatcctgcagcagctatgcgttataccgaggcaagattagataaaatatcatcttttatgctagaagagttagagtatgaaacagttccactaagagctaattatgatgaaaca

SEQ ID NO: 295645 - DNA, 676 bp, Unknown
  Bacterial polypeptide expressing nucleotide sequence isolated from the Sargasso Sea
tatggcagaaggagaaaaaattattaagatcaatattgaagaagagatgaaatctgcttacattgactactctatgtcggtgattgtaagccgtgctttgcccgatgtgagagatggtttaaaacctgtacacaggcgaatattgtttggaatgcaggaattgggtgtactatcttccaggccctataagaaatctgcgcgtatcgtcggggaagtattgggtaagtatcaccctcatggagatactgcagtttatgacacgatggtgagaatggcacaaccatggtccttgcgttacatgttggtagatggacaaggaaactttggttcagttgatggtgatagtcctgcagccatgcgttacactgaagctagacttcgtaaaatttcggaggagatgcttgcagacatcgataaagagacggttgactttcgattgaattttgatgattccctgcaagagcctactgtcttgccaacaaggataccccaattgcttgttaatggaacctcgggaattgctgtgggtatggccaccaatatggcaccacacaatttatctgaagtaattgacggcaccattgcttacatagacaataggagtatagaaattcctgaattgatgaaatacatcaaagctcctgattttcctactggaggcatcatttacggatag

SEQ ID NO: 295646 - DNA, 337 bp, Unknown
  Bacterial polypeptide expressing nucleotide sequence isolated from the Sargasso Sea
atggaaaaaaacactctagaaaataacaaatcgtttaagcctatttttgtccaagatgaaatgagttcatcttatctatcttacgcgatgagtgttatagtgagtagagcattacctgatgttagagatggtttaaaaccagttcataggagaataatatatgctatgtataaaggtggttacgattggtcaaaaccttttcgtaaatccgctagaatagttggtgatgtaataggtaaatatcatccacatggagatcaatccgtctatgatgctttagttagattagttcaagatttttcaatgagcgtaccattaatatctggcccaaggtaat

SEQ ID NO: 295647 - DNA, 826 bp, Unknown
  Bacterial polypeptide expressing nucleotide sequence isolated from the Sargasso Sea
atgacaaaaaataaaacaaataactaccaagcagactctataaaagttttaaaaggtcttgaagctgtaagaaaaagacctggaatgtatattggtgacaccgacgatggaactggtctacatcacatggtatatgaagttgttgataactctatagatgaagctcttgcaggtcattgtaagaaaattgaggtgagtataaattctgatggctcagttacagtggaagatgacggtagaggaataccggttgatattcataaagaagaaaaaaaatcagctgcagaagttataatgacccagcttcacgctggaggaaaatttgatcatgactcatacaaagtatcaggaggcttacatggagttggtgtttcagttgttaatgctctttcagaaaaattacatttatatattgagagagatggaaaaaaacactttattgagtttattaatggcgaagctaaaagtcctttaaaaataattggaaagtcaaagaatacaggtacaaaaattaattttttgccttcgaaagatgttttttcatctacaaagtttagtttagctattattcaaaaaagaatgcgggaactagcttttttaaataagggaataaaaattatattaaacgatttaactcaaaaaaaaataaagtctttagaatttaaatttgagggtggaataaatgaatttgtcgaatatcttgacgaaaaaagagaaaaattaaaaaataaaaatgaaaatgatttatttagaagaccaatttacatctcggcgagcgtcttcggccgcagcgcctcggcgagcgggcggcgcggctcgacttgaa

SEQ ID NO: 295648 - DNA, 1006 bp, Unknown
  Bacterial polypeptide expressing nucleotide sequence isolated from the Sargasso Sea
aatgcgtcaatcttatctagattatgcgatgagcgttatagtttctagggctcttcctgatgctcgtgatggccttaagcctgttcatagaagaatcttatatgcaatgcatgaggatggctatgaccataataaacaatatagaaaatctgcaagggttgttggttcagttataggtaaatatcatcctcacggtgatcaaagtatttatgatgctttagttcgaatggcccaacctttttcacttcatctacctttagttgatggacaaggaaacttcggttctgttgatggtgacccacctgccgcaatgcgttacacagaagtaaggatggaaaaaattgctcatcacttactcaatgatattgatcaagatacagttgattttcaagaaaattatgacaactcagagagcgagcctattgttttaccagctgaatttccgaatttacttgttaatggagctggtgggatagcggttggtatggctacaaatatcccgcctcataatctttcagaggttactgacgcttgtattctactcatagataaacctgagaccgatataaatgaactatgtgaaattataccaggtccagactttcctaccggcggtttaatacttggtaaaagcggtgctaagagcgcatatacaactggaaaagggtctgtagtgattagggccaaagtagaggtagaagaaataagaaaagacagggaagctctaatagttacggaaataccttatcaattaaataaagttttattaattgaaaaaattgcagaattagtaagaaataaatcaatagagggaatatctgatttaagagatgagagcgatcggcacggtatgcgaatagttatcgaactaaagagagattctgttgctgatgtaattttgaatcagctatataaatttactccactttcatcatcatttggagctaatcttgttgctttagatagaggttctccaaaagttatgaatcttaaagaaatgcttacc

SEQ ID NO: 295649 - DNA, 1129 bp, Unknown
  Bacterial polypeptide expressing nucleotide sequence isolated from the Sargasso Sea
aatggcaaaaaaatctaataaagccaaatacgattcatccaatattcaagtcttaaaaggtttagaagcggtaaaaaaaagaccgggtatgtatataggagataccgatgatgggtctgggttgcatcatatggtttttgaggttcttgataactgtattgatgaagcaatggcgggacattgttccgacatcaaagttataattaataaagatggatcagtcacagtaactgataatggaagagggattccggttgacgtccacaaaaaagaaggagtatcagcagctcaattaattatgaccacccttcactcaggaggaaaatttgatgacaatagctacaaggtttctggaggtcttcatggtgtaggagtctcggttgtaaatgccctttcaaaaaaattaaccttagaagttcatcgtgatggtggagaatattttcaggaatacagcgaaggtaagccaaaagcaaaattaaaaaaaataaaaaagtcagataagacaggaactataataaccttccatccatcaaataaaatttttacttcaacagaatttgatatagaaaaaatttataaaagaattcaagagttgtcatttttaaatgctggtgtgtcaattaatgttgaggacaagagaacaggcaaatctcgtaaatttaaaaataatggagggctctctagttatgtaactcacctaagaggaagaaaacaaattgtttctgatatctttgagtgctcagctgaagaaaatgaagttggtgttgagatcgcaatgcaatggacagattcatactcagaaaatgtattatgttacaccaataatataccccaaaaagatggtggcacccatttggctggctttagaggtagcctaacaagggttttaaagtcatttattaagaaagaaaatgctaaaaagacacccacagaccttctaggagaagatgtaagggaggggctaatagcaataatatctgtaaaagtaccagatcctaaattttcatcacaaacaaaagaaaaacttgtttcatctgaggttgagggcgttgttagtactatttttaataaatatttcaatgaatttcttttagaaaaccccaaaagacgcaatgagcatcatttctaa

SEQ ID NO: 295650 - DNA, 1948 bp, Unknown
  Bacterial polypeptide expressing nucleotide sequence isolated from the Sargasso Sea
atgtcaaaaaatacttcaaaaaatcaatattccgcagatagtattcaagcccttgaggggatggagcatgtcaggaaaagaccctctatgtatattggagatgttgggtcaagaggtcttcaccatttagtctatgaggtcgttgataactctatcgatgaagccatggctggctattgttcatcgattaaaattgaaataaataaagacactagtttaaccgttgaggatgatggtagaggtattcctgtaggaatgcataaaaaagaaggggtttctgcattagaggttgtaatgacaaagattggggcaggaggtaaatttgataaagattcatataaagtatcaggtggacttcatggtgtcggtgtctcttgtgttaatgctctatctgaatcattaactgcaagagtttttagagatggaaaagaatatgagcaaacttacagtaagggtaaacctaattcttctgttaaggaggttggaaaatcagataagagaggaactctcgtaacttttactccagataaagaaatatttaaagaggttactgattttgattatgatattttatcaaatagaatgagagaactttcttttttaaataaaggacttaccatttcaattacagataatagaaaaaaaggcaaagatggaaaacctttatctgaaacctttcattcaaaagagggtctaagcgagttcataaaatatttagacgagtcaagagagcctattattaatgatatcattaagatggaaggtgagaaaaacagtataccagttgaggttgcaatgatttataattcttcattctctgaaaatcttcactcatatgttaacaatataaatactcacgagggtggaactcatttatcaggttttagaagaggtctaactaatacattaaaaaaatatgcagattcatctggacttactgataaacttaaatttgatatttcaggagatgattttagagaaggattaacagcggttatatctgttaaagtagctgagcctcaatttgagggtcaaacaaaaactaagcttggtaacagagaggtgagtgctgctgtttctcaggctgtatctgaaatgcttgaaaactacctagaggagaatccaaatgattctaaaataattgttcagaaagtaatacttgctgctcaagcaaggcatgctgctagacaggcaagggagatgattcaaagaaagactgttatgacaggaggaggtctacctgggaaattatctgattgttctgaaactgatccgctaaagtgtgaggtttttcttgttgagggtgactctgcaggaggaacggctaagcagggtagggatagggtctttcaagcaattcttccattaagaggtaagattctgaatgttgaaaaagctcaacaacatagggtatttgaaaatgaagaaattagaaatatatataccgctcttggagtttcaattggtactgaagaagatagtaaagctttaaatcttgaaaaattgaggtataataaaattattatcatgtgtgatgctgacgtagatggtagtcatatttcaacactaattttaactttcttctttagatatatgagagaacttgttgaaggaggtaatgtatatattgctactccaccattatatttagttaaaaaagggaataaaaaaacatatgcatggaatgacaaagaaagagataatcttgctaaagaatttggctcgggtgtttctattcaaagatacaaaggtcttggtgaaatgaatgcagaccaattatgggacacaactatgaatccagaaactagaacactcagacaaatttctctaaactttgataattctcaagaagctgaaaggtggttttctactttaatgggtgatgatgtccctccaagaagaaaatttatagaagaaaatgcagtttatgcaaaaattgatgcttaat

SEQ ID NO: 295651 - DNA, 1406 bp, Unknown
  Bacterial polypeptide expressing nucleotide sequence isolated from the Sargasso Sea
aatgacaaaaaaaaattcaaatacttaccaagccgactccattaaggtgttaaagggtcttgaagctgtaagaaaaagacctggcatgtacataggcgatacagaagatggaacaggtcttcatcatatggtctatgaagttgtagacaactctattgatgaggctctagctggttattgtaagaatatagaagtttcaattaatgaagatggtacagttactgtaaaggatgatgggagaggtatacctgtagatattcataaaggagaaaataaatcagcagcagaggtaataatgacacaattacatgctggaggaaaatttgatcacgattcctataaagtttcaggaggacttcacggagttggagtatctgtcgtaaatgcactttcagaaaaacttgaattaaatattgagagagatggcaaaaaatattttttggagtttaataatggtaaggcgaaattttctttaaaaaacattggaaaatcaaaaaatagtggtactcaaattaaatttcttccatctaaagaaatattttcatcaataaaatttagctttagcgtattacaaaaaaaaatgagagagttagcttttttaaacaaaggcataaaaattttattaaatgattttacaaataaaaaaggtaagacccttgaatttaaatatgacggaggtatcacagaatttgttgaatttttagatgaaaatagagaaaaattaaaaaacaaaaatgataacgatttatttagaaaaccaatttttttagagggtaaaaaaagtgatatcaatatcgagtgtgcgcttaaatggaatgcaacctatgccgaggacgtatttccatatacaaataatatctaccagaaagacgggggaacacatttattaggatttagaagtgcacttacaagagtaattaataaatatgcaacagaacaaaatttactaaaaaaaaataaagtaaatttgtctggagatgatgtaaaagagggattaacttgtgtattatcaattaaggtacctgatcctaaattctcttcacaaacaaaagataaacttgtatcatcagaagttagaaatattgtagagaacatagttaatgaaaagctttcaatatggtttgatcaaaatccctctgtatcgaaagtaatattaaccaaaataatacaagctgctgtagcaagagatgttgcaagaaaagcaagagaaaatgtaagaagaaaaggtgctcttgagttaacaggacttccaggtaagttagcagactgtcagaattctaaacaagatggaacagagctatttatagtagagggggactcagcaggaggatcggcaaaacaaggcagaaaccgtgaatatcaggctgttttacccttaagaggaaaaattttgaatacttttactg

SEQ ID NO: 295652 - DNA, 916 bp, Unknown
  Bacterial polypeptide expressing nucleotide sequence isolated from the Sargasso Sea
atgcaggaaaatcaaaatgtagaaatcacggattacgatgaatctaatattacagtgctgcaaggacttgaagcagttcgcttgcgaccgggtatgtatattggaggtgtcgataataccgcattacatcatctggtctttgaagtagtagataacagcgttgatgaagctttagccggtttctgtaatgaaattcatgttgtaatcaattctgatggtagtatttcagtggaggataatggtaggggaataccagtaggaattcacgaagaagaaggtattcctgcagtagaattgattctgacccgcctacatgccggcggtaaatttgataacagtaactacaaggtttccggtggattgaatggcgtcggagcgtctgtagtgaatgctctttcaaacaagatgattgcagaaattcaccgcgaaggatttttatggaaacaggaatatcgaaagggcaatactgcaagccagctgcagcagattgaagacagtagaaaaacgggaactaacattacattctggcccgacgatacaatttttgatcaagtagaattcaattacgaaatattagctcacaggttaagagaactggcttttttgaacagaggcatcacgatttcaataagggataaccgcaatgagcgatttcaggaatttaaatatgacggtggaatttcttctttcatcaggcatatcaacgaaaacaaaaatgtgcttcatgaagaaccggtttatttttccggaaaatcagaagatgtggaaattgaagtagctttccagtacaacgacagctacactgagcgaatatactcttttgttaatactatcaatacaatagatggagggacacaccttacgggcttcaagggagctcttacccgaactctcaataattatatgacctcaaata

SEQ ID NO: 295653 - DNA, 2079 bp, Unknown
  Bacterial polypeptide expressing nucleotide sequence isolated from the Sargasso Sea
tctttgcaatgtatcaattacgattaaataacaattctggattaaaaaaatcagcacgaattgttggtgatgttataggtaaatatcatcctcacggtgaccaatcagtttatgaagctcttgtaaggctcgcgcaagaattttcaacacgttaccctttggtggatggacaaggaaattttggtaatattgatggtgataacgctgccgcaatgagatatacggaggcacgcctgacatcgctggctgaaataatgctaaaagatatatctgaagatacgattgatttaatcaaaacttatgatggagtagagcaagaacctatagtgttgcccgccgcttttccaaatcttctcgcaaatggaagtactggaattgctgttggaatggcaactaatataccgcctcacaatataggagaactttttgcagctcttttaaaatttttaaaaaaaccaaacttaagtaataatgacttaattaaaattatccctggtccagatttcccaacaggagggaacattattgatagcaaagcttcactgaaagaagcttattcaaaaggcaaaggaacaatcagattgagagcaaactggaaagaagaaagcttaggtcgcggtcaatatcaaattgtcgttaatgagattccttaccaagttaataaatcgaaaattatcgaaaaaatatcagaaatgattgataataaaaaaattaattacctggaaactatccaggatgaatcaactgaggatataaggattgttttaattccaaaaaacagaacatttaagcctaatgttgtgatggaagatttatttaaaaatactgacctcgaaatacgatattcaattaatttaaacgctataagtagtaaacttgagcctaaaatttttagcttaaaagactcattgctatcatttttaaatcatcgttacgatgttcttaaaagaaggtcgaaattcaggcttttaaaagctaaaaatagaattgagattctaaaaggttttttgatcgtttttgcatatttaaatcaagtcataaaaattataagaacagaggataatcctgaaaaaaaattgatgcaaaaatttaaaattaaccaaaggcaagctgaggcaattttagcaatgagattaagacagttaaaaaagttagaagagaagcagattaaagatgagcataaggagttattagctacaaaaaaagaattagaacttattcttcgttcaaaaactaaacaaacttcattgttagaaactgaatttagagagaatctaaaaatttttgagagtattaagggatgtgtagatcgtagaacaattattaataatgatttcaaggttgtcgaatatcaagttgaacaatttgaaacaaaagagccagtttcagttatattatcaaaaaatggatggattaaatcaattaaaggtcatcaagataactacgataatataaaatataaagaaggtgataataaaaaattcgttattttatgtaaaaataatgacaggttattgcttttttcttctctaggaaaattttatacaattaactgttctaaaattaatacaggaagaggatttggagatccaataagtttaatgattgataaaaatgataatgaagaaattatttttgttaaaacatatgagactgataaagaatatctaataacaagctcatcaggaaaggggttctttgtaaatactaacgatttaatggcatctactaaatctggaaaaaaagtgatgaatttgaaagataatgatcgtgctgtatcttgttatgaaaaaaaaggtgacctaatcggggtttttagtggtgaaaaaaaatcaattaaacttcttattattgataacttagatattccacatatgcaaaaaggtcgtggagttattctacaaaaatttaaaaacggcaaaacgctcttttcaatttgcttagactccaatgaagacatacttgataaaaataataaagttctgttatctacaaaagaaatgaaaaaatggttaggtaaaagagcacaagcaggtaagattgaacctaagaatttacatttaaaaattttagattaat

SEQ ID NO: 295654 - DNA, 1009 bp, Unknown
  Bacterial polypeptide expressing nucleotide sequence isolated from the Sargasso Sea
catggagagatatttggctaaatatgattcatcaagcataaaggtactagaaggcttagaagcggtaagaaaaaggcctggaatgtatattggagatacggacgatggtaccggacttcaccatatggtttttgaggtagttgacaactccatagatgaagcgttggcaggccactgtgatgtgatatctgtcacagttaacaatgataattcggttactgtgtctgacaatggcaggggcatcccagttgatattcataaaaagactaaaaaatctgctgccgaagttgttatgactgttcttcacgctggaggaaaatttgatgacaactcctacaaggtttccggaggtctgcacggcgttggtgtgtcagttgtgaatgcgctctcagaggcattaaaattaacaatttacagagatggcaatgaacactcacaaagctactccatgggcgttccagaagcccctttgaaaaaaggcgaaaaaacaaaaaaaacaggcacacaagtaacctttttgcccagcaagaagattttttcaaaaacggagttttcttttgcaattttatcaaaaaggctaagagagcttgcttttcttaattccggcataaaaatcaacctggaaagcgaaatagaagggaagaaagaaacatttttttatgaagggggcatccaggcatttgttcagaaactaaacgaaaaaaaagaaattattaataagaacattgtttattcaaaaggcggcaaaaataatatagaagtagaggtagccattcagtggaattcttcatataacgaaaacgtatacccttatacgaataatattccacaaggagacggaggaacacacatgtctggctttagaaccggccttaccagagctctgaacagctatattgagcaagaaaatctttctaaaaaacacaaggtcaccttttcgggagaggatgcaagagagggacttaccgcaatcatttcaataaaaatgcacgatccaaaaatttcttcg

SEQ ID NO: 295655 - DNA, 1252 bp, Unknown
  Bacterial polypeptide expressing nucleotide sequence isolated from the Sargasso Sea
tgatgagtctttggcaggattttgtaataatatatctgttttattgaattctgatggcacaataactgttgaagataatggcagaggtattccagtagatattcataaatctgaaggcgttcctgcagctcaattaattatgactgaattacatgctgggggtaagtttgatcaaaatagttataaagtttcaggtggtttacatggagttggagtgtctgttgttaatgctctttcagaaaaattagaattggagattaatagagatgggaaaattttttttatggattttgttaacggagttgtaaattcttctattaaagaaatagggaaatcaaaaactaatcaagataataagtttataactggtactaaaattacctttttaccttcttcaaaaattttttctaatattaattttaactttaacactatagaaaatagattaagagaacttgcttttctaaatactggtgtaaaaattaatctaattgataatagatctgctaaagaaaaaattattgaatttaaatatgatggtggaataaatgaatatgttaaatatttaaataaaagcaaaacaccaattcacggagagccgatatattttacatctgaaaagaataatattgcagttgaatgctctttacaatggacggatagttatcatgaaaatacactttgttttacaaataatatcacacaaagggatggtggaactcatttagcaggtttcagaggggccctgactagaagtatagtaagttatattaattcaaaacataaaagtaattctaacgttagtggagatgatgctagagagggcttaacatgtgtgatatctgtaaagctccctgatccaaagttttctagtcaaacaaaagataaactagtttcttctgaagttagagctgtggttgaatcaattgcactttcaaaattagaacagtggatggaagaaaatccaaatgaaataaaaaaaattatagataaagttattgaagcctctaatgcaagagaggccgcaagaaaagctagagaattaacaagacgtaaaacaggtctggaaagttcatctttacctggtaagttagccgattgtcaggaaagaaatgctgaatttgcagaaatatttattgtagagggagattcagcaggaggatcagcaaaacaaggcagggatagaaaaaatcaagctatactgcctttaagaggtaaaatacttaatgttgaaagagctaatgcaaaacaa

SEQ ID NO: 295656 - DNA, 1192 bp, Unknown
  Bacterial polypeptide expressing nucleotide sequence isolated from the Sargasso Sea
atgacaaataaaaacacatatcaagcagactctattaaagtacttaaaggcttagaggcggtaaggaagaggcctggtatgtatattggtgataccgatgatggaactggtttacatcatatggtatatgaagtcgtcgataactcaattgatgaagctctagcggggttttgtaaaaatataaatgttaaattaaattctgatggaactgtaactgttaatgatgatggtcgtgggatccctacagatattcataagggagaaaaaaaatctgctgcagaggtaataatgacccaacttcatgctggtggaaaatttgatcatgattcttataaagtctcaggagggcttcatggtgtaggagtttctgttgttaatgctctttcagaaaaattattattagaaataaatagagatggaaaaaaatattctattgaattccataatggtgaagcaaaagcacctcttaaaatttcaggtaaatcaaaacaaacaggaactcaaataacctttttaccctcgaaagaagttttctcatcaataaaattcagtgcaaatattttaattaaaagaatgagagaattagcttttttgaacaaaggtataaaaataacatttattgataatagtcaaaaaaaagaaaaaatcttagaatttaaatatgatggaggtctaattgaatttgtagattatttggatgaaaaaagagaaaaattgctaaataaaaatgggaacgatctatttagaaaaccaatttatattgaaggcaaaaaaaataatgttgaattagagtgttcattaaaatggaatgcaggctattctgaagatatctttccttatacaaataatatctatcaaaaagatggaggaacacatttattaggctttagaagtgcattaacaagaataataaataagtatgcaaatgaaaataatcttttaaaaaaaaataaattaactatttctggggacgatatcaaagaaggtttaacatgtgttctatcaacaaaaattcctgatcctaaattttcttctcaaacaaaagacaaattagtttcatcagaagtaagaatgattgtcgaaacattgataaatgaaaagttgtcgatatggttcgatcaaaatccttcagtagccaagatagttttagttaaagtaatacaagccgcgatggccagagatgtagccagaa

SEQ ID NO: 295657 - DNA, 499 bp, Unknown
  Bacterial polypeptide expressing nucleotide sequence isolated from the Sargasso Sea
atgagtgattttgctaaagaaataatatctgtaaacatcgaagatgaacttaaacagtcatatttaagctatgctctcagcgtcatacacggtagagcacttcctgacataagggatggcctcaaaccagtccatagaagaatattatatgcaatgtatgatcttaaaaatttctacaacaggccatataaaaaatcggcaagagttgtaggagatgttataggaaaataccatccccatggtgactcagctgtttatgatgctatggttagaatggctcaagatttttcaatgcgatatccaattgtagagggtcaaggaaattttggttcaattgatggcgatcctccagcagcaatgagatacaccgaagtgcgtatggccaaaattgctgatcaaatgcttggagatattgaaaaagacacagtttcgtattcacctaattatgatggtagcgaaaatattccagatgttttgcctactaaaattcctaatttgc

SEQ ID NO: 295658 - DNA, 919 bp, Unknown
  Bacterial polypeptide expressing nucleotide sequence isolated from the Sargasso Sea
aatgcctaaaaaacaaaataaaaaaggatcttacaactcatcaaatatacaagttcttaaagggcttgaggcagttaaaaaaagaccaggaatgtatataggtgataccgatgatggctcaggacttcatcacatggtttttgaggttgtagataattgtatagatgaggcaatggcaggccactgctcagaaatagttgtttcaattaataaaaacgggtcaataaccattaaagataatggaagaggaatacctgtagatactcataaaaaggaaaaggtgcccgcagcagaacttataatgacaacccttcactccggcggaaaatttgatgataacagttataaagtttctggaggtcttcatggtgtgggtgtttccgttgttaatgctctttctgaagaattaacacttaaaatttgcagagacggagggcagtatgagcaaaaatatgcaaatggtaaagctcaaacaaaactaaaaaaaattaaaacctcaaaagaaacaggaaccgagattacatttaaaccatctaaggaaatattttcgtttgttaactttgatatagataagataaataaaagagttcaagaactatctttccttaacgcaggtgtaaatattcttgttgaagataaaaaaactggtaaatccaaaaagttttcaaatagtggcggcctatctagttacgttaagtttttaaaaggaagaaaacaaaatatatctgaaatatttcactgcgaaggagagcaagatgggctcagtgttgaaatagcacttcagtggaatgatgcatactcagaaaacgttctttgttacacaaacaacatacctcaaaaagacggcggaacacatctttcaggatttcgatcaagtttaacaagagtaatgaaaacatttatcagaaaggaagaataa

SEQ ID NO: 295659 - DNA, 1201 bp, Unknown
  Bacterial polypeptide expressing nucleotide sequence isolated from the Sargasso Sea
aatgagtgactttgctaaagaaataatatctgtcaacatcgaagatgagcttaaacagtcatatttaagctatgctcttagcgtcatacatggtagagcacttcctgatataagggatggcctcaaaccagtccatagaagaatattatatgctatgtatgatcttaaaaatttctataacaggccatataaaaaatcggcaagagttgtaggagatgttataggaaaataccatccacatggtgactcagctgtttatgatgctatggttagaatggctcaagatttttcaatgagatatccaattgtagagggtcaaggaaattttggttcaattgatggcgatccaccagcagcaatgagatataccgaagtgcgtatggccaagattgctgatcaaatgcttggagatattgaaaaagatacagtttcgtattcacctaattatgatggtagcgaaaatattcctgatgttttacctactaaaattcctaatttgcttatcaatggctcatcaggtattgcagttggtatggcaacaaacatacctccacataatttgacagaagttttaaacggctgtgtaaatcttatcaataatccaaaaatatctattgatgaacttataaaagatatatctggacctgattttccaacaggcggaacaattgatggaaaagccggtatttacgaagcttataaaactggaagaggaattattcatataagatcaaatacttctattgaagaagataaatctggtaagcagtctctaataataaatgaaattcctttcatggtgaataaggccaaaatgcttgagaaaattgcagagcttgtaaaagaaaaaaagatagatggcataactgagataagagatgagtcagataaggatggcttaagagttgttatagaagttcgaaaaggagattcagttgatgtacttgaaaataatctatttgcacagactcaactagaacagtcctttggtataaatttcacagttcttgcagacgggcagccaaaggaagttaatctaaaagaaatgcttcaagcatttgttaaacacagaaaagatgtaattataaaaagaacaaaatatgatctaaacaaggcaaaagatagaggacatgttgtagaaggattaatggtagcgatagccaatatcgatgaaatcatctcaattatcaaaaagtctaaa

SEQ ID NO: 295660 - DNA, 466 bp, Unknown
  Bacterial polypeptide expressing nucleotide sequence isolated from the Sargasso Sea
tgatattgataacttaagataccatagaataataataatgactgatgcagatgttgatggatctcatattaggacactgctcttaacatttttttacaggcaaatgtacgaaattgtagaaaaagggcatgtttacattgccttaccacctttatataaaattactaaaggtaaggagtttgtttatgcttctgatgaatctgaaaaagatgatgctattaaaaaactctcaaaaaatggcactagaggtctagaagttcaaaggtataaaggtttgggtgagatgaatcctgagcaactttggacaacaaccatggaccctattaatagaaggatgatgagggtcgacatcaaggatgtacaggatgctaacgaatcatttgaaatacttatgggtgatgatgttgagccaagaagagagtttatagacgctaatgctttatcagtaaaagagttagatatttaa

SEQ ID NO: 295661 - DNA, 887 bp, Unknown
  Bacterial polypeptide expressing nucleotide sequence isolated from the Sargasso Sea
aatgagtaataattacggtgcagataaaatatcagtcttaaaaggactagaagctgttaggaaaagacccgctatgtatattggcgatgttggtaaaagaggatttcaccatctagttagtgaggtagtcgataatagtattgatgaggcgctggcaggtttttgtagttttataattgtaacgataaaaaatgatggttttatttccattgaagataatggtagaggtattcctgtagaaattcataaaacagaaggaaaaccagcattagaagtagtaatgacggtgctacatgcgggtggtaaatttgataaaaacacttataaggtttctggtggattacatggtgttggtgtgtctgtagtaaacgctctttctgagagtttaattgctgaagttcacagagacggtttttattataaacaggaatataaaataggacaaccaacaacagaggtagaaaaaattggtaaaagtaacaaaactggaaccattatttcatttaaacccgatgaatctgttttttcacataaaggttttgaagaagaggttataaaaggaagacttaaagaattagcatatttaaataaaaacctatcaataaaattaattaatgaacccaaagaaacagaaacagaatattgttttccaggaggtttgtcagattttgttaagtatttagacggcaatgaagaccttattcatgatgaggttattgtagtaagcaaggatgatatagaagttcctgtggatctggctcttagatatagcacaaactataatagtaatattttttcttttgtaaacaatattaacacaatagaaggtggtacccacttatctggttttagatcagctcttactagagcactaaacagctatgcta

SEQ ID NO: 295662 - DNA, 1651 bp, Unknown
  Bacterial polypeptide expressing nucleotide sequence isolated from the Sargasso Sea
tatgagcgaaatagctgctaaggaaattgtacctgttgatataggaaaagaacttaaacagtcttatctggactacgcaatgagcgtaatagttggcagggccttgccagatgctagagatggcttaaagccagttcatagaagggtcttatatgccatgcatgtccttaataatgacttcggtagaccacacaaaaaatcagcaagaatagttggtgacgtgattggtaagtaccatcctcatggtgacagcgctgcttatgaaacaattgtaagaatggcgcagtggtggtctttgagataccccctagttgatgggcaaggaaatttcggctcaatggatggagacggacctgctgctcaacgatatacagaagttcgaatggctagaatatctcaagagttattagctgatttagaaaaggaaacagttgattatgtagagaattatgacggcactgaaatgatgcctgaggtgcttcctacaaaaattcccaacatgcttgtaaatggttcagcgggtatagctgttggtatggccacaaatatggctccgcataacctaaatgaatctctctcagcttgtttggctttcatcgataatcccgaaataactgttcaggagttaatggagtacatcccaggtcctgattttccaacaggagcaataatcaatggtaaagcaggaatcgttagtgcttatgaaactggcaggggaagagtaataataagagcaaagactgagttcgaagatgaagaaaaagataaggctaagataattataactgagatgccttatcaagttgtaaaggcaagattgatagaaaaaattgctgagttatctagagacaagaaattagagggtattagagacattagagatgagtccgacaaagatggtgtaagagtagttatcgagctcaaatctggacagatccctgatgtggttctgaacaatctatatgctcaaacgcaaatgcaaactgtttttggaataaataatgttgcattaatagatggagagccaaaacttctaaacttgaaatctatactctcagttttctttaatcatagaaaagaagttgtatccagaagaacattttttgatttaagaaaggctaaagaaagaggtcatatcttggaaggtttgacaattgctctggctaacatagatgaaatgatcgaactgatcaaaaaatcaaaagaaggctctgaagctaaaaagaaattactgtctaaaaaatggaaaccaggaaaaattatagcaatgctagaaaaagctgggcccgatgcttgcaagattgatgtcacagatacatctgtagggttaattggtaaaacttatcaattatcagaacagcaggctcaagccattttagatatgaggcttcaaaggctcacaggtcttgagcaggataaattaattaaagagtatgaagagataattgaacacataacttacttacttgaaatattaggagattcagatcgtttaatcgaagttgtgaaagatgagctcaaggaagtgcaagaaaaatataaggatgatcgaagaactgagatacaagattctgcggctgacctaacagaagcagatcttattacacctgaagatagagttgtgactatatctcatgaaggatatgcaaaa

SEQ ID NO: 295663 - DNA, 325 bp, Unknown
  Bacterial polypeptide expressing nucleotide sequence isolated from the Sargasso Sea
atgcaaaagaccgaagtaaaaaataattcaaattataaaccaatttttgttcatcaagaaatgagctcatcatatctatcttatgctatgagcgtaatagtgagcagagcacttcctgatgttagagatggtcttaaacctgtacatagaagaattatttacgccatgtataaaggtggttatgattggagtaagccttttcgtaaatctgcaagaatagttggagatgttattggtaaataccacccacatggtgatcaggctgtttatgacgctttagttagattagttcaagattttttcaatgagtttgccgttaattgag

SEQ ID NO: 295664 - DNA, 2612 bp, Unknown
  Bacterial polypeptide expressing nucleotide sequence isolated from the Sargasso Sea
ttatgcaatgagtgtaattgtttcaagagctctacctgatgttagagatggacttaagcctgtgcaaagaagagtgctttatgcaatgcacgatcaagggatgaggcctaattcatcttataaaaaaagtgcgagactagttggagaggttttaggtaaatatcatcctcatggagactcttctgtttatgctgctcaagtaagaatggctcaacctttttccatgagacatacacttgtggatgggcaaggaaactatggtagtgttgatggagatcctgcagctgctatgagatataccgaatgtaaactttcacctattactgaaagccttctaggagatattgaaaaagaaactattgattgggtagataactttgatcaatctttacaagaaccatctgtattacctgctattttacctaatcttctagtcaatggggcttctggtattgcagttggcatggcaacaaatattgcgcctcataatcttagtgagatttgtgatggtataactcttgtgattgaaaatcctcaggctaatgtggatgatctaatgaaagttgtaaaggctcctgactttccaacaggtgcagagatatggggtctttcaggggtaagagatgcttttgcaactggaagaggaagagtagttgtacaggcgaaacatattattgaaaatgtaaaaaaacaagatagggaaagattggtttttactgaaataccttatcaggtaaataaagccacattggttatgaagatagctgaattgattaagggtaaaaaattagaaggcgtttcagaagttagagatgaatctgatagaaaaggtatgagaattgttcttgagctaaggaaaggggcatcttctagtcttattttgaataatctatataagcaaactcaacttagatcttctttctccgtaaatatgattgctttagttgatggtactcctcagatattgaatttgaagcaaactataaatcattatatttctttccgagaagaggttattagaagacgtgcagaatatgatctaaaaagagctaaggctaggctgcatgttttagaaggtctgagaatagcaattaaaaatctagataaagttatagaattaattcgagcttcagaagacgttgaaactgctcgtaacgctttgatcacagaatttgatttgagtgaaatccaagcacaagctatattagatatgcaattaagaagattagctgcattagaaatagaaaagattgagaacgaatttaaggaattatctgaacttgttgaagacttagaagatcttttgtcaaatcagaaaagaattttgagcgttattaaaacagaaacattgcaattaaaaagaaagtacggtgaagaaagaaggacaaaggtcaatgaaatggaccttaaggaatggaaaagagaagatatggaacctagtcttgatgttgttatcactctttcaaaaggtgggtatgtaaaaagaattttagaaactacatatagagctcagcatagaggaggtaagggtaaggtaggtcagaaaatgacaaaagatggtgatattgttccataccttcaggttgctaacacacatgatactttgttgttttttacagataaaggaagggtatttaaattaagggtatttgaattacctgctgatcaatctagaacctctaggggaacacctgtttcaaatataattaatttggctccaaacgaaaaagtcacagccatgttaactgttacaagtttgcttgaagatacatatttaataatgattacaaaggcaggtaaagtaaaaagaatgcacctacctctggtaagaaatataaacagagcggggctaaatacatttaagctttctaaggatgatgaattgatttcggtttctttagcagatgaaaatgaagacgtaacaataattactagagatggaatgtctattagattcccttcctcacaagttaggcctactcaaagaggagcgggaggaattagaggaatcaaaatgaagactgcacaagacgtagttgtttatagtggagttgtaaatgatgaagactccttattaattatagggcgaagaggaataggtaaaataagtgaatttagaaactacagaatccaaaatagaggtggatctggagtcttgactcttaaggtgactgataagacaggtaaagtggcaggaggagcagtagttactgaagaagtaattaatgctgcaaaagccataaaggatgaaaacaaaggcaaaacaaaaggaaagacagaagaaggatttttgttcttgttgacagataaggctcaaattataagaactaatttaggagaaataagacgaactggtagggttgctcaaggagttactattgtaaaaccaaatgctggagatgctataagtggactatttataaattatgttcaagataatagaaaagttagaaaaaccgttagtattgaggaaattgaaaaatcagaagaaatgggaaatgatgatttgaatgaatctatatctgaagaaaatatagaacaaattgaaaatgataatttgcaggactctaaatctgaggataaaattgaggaatcagacaaagaaagctaga

SEQ ID NO: 295665 - DNA, 1567 bp, Unknown
  Bacterial polypeptide expressing nucleotide sequence isolated from the Sargasso Sea
aatgacaaataaaaatacatatcaggcagactcaatcaaggtcttaaaaggtcttgaagcggttagaaaaagaccaggtatgtatattggagatacagatgatggaactggtttacatcatatggtctatgaagttgttgataactctatcgatgaggcattagcaggatattgtaaaaatattaatgtaaaaattaattctgatggaacaattactgtaaatgatgatggaagaggtattcctgttgatatccataaaggagaaaaaaaatcagcagcagaagtaattatgacccaacttcatgctggtggtaagtttgatcatgattcttataaagtttcaggtggattgcatggtgttggtgtttcagttgtcaatgcactttcagaaaaattgcagttagagatatttagagatggaaaaaaacactacatagattttcaaaatggtgaagctaaagctcctttaaaggtagtaggaaaagcaaagcaaactggtacacaaattacttttttaccatcaaaagaaattttttcttcaacgaaatttagtgcaaatattcttattaaaagaatgcgagaattagcatttttaaataaaggaattaaaataatatttactgatgcaagtcaaaagaaagagaaaacatccgagtttaaatttgatggcggtgttttagaatttgtagattttttagatgaaaaaagagaaaagttacaaaacaaaaatggaaatgatttatttagaaaaccaatatatattgaaggaaaaaaaaataatattgaattagagtgttcattgaaatggaatgcaggatacacggaagatatatttccatatacgaataatatttatcaaaaagatggtggaacccacttattgggatttagaagtgcactaactagagtggtaaataaatatgctaatgaaaataatttattaaagaaaaataaattagtaatttcaggagatgacatcaaagaaggtcttacctgtgtactttcaaccaaaattcctgacccaaaattttcatctcagacaaaagataaacttgtttcatcagaagtaaggatgattatagaaactttagtaaatgagaaattatcaatttggtttgaccaaaacccatcgattgcaaaaattattttagctaaagttattcaggcagcaatggcaagggatgttgctagaaaagcaagagaaaatgttagaagaaaaggagccctggaattaagtggtcttcctggaaaattagctgattgccaaataggtaaacaagaaggaacagaattatttattgttgagggtgactcagcaggtggttctgcaaaacaaggaagaaatagagcaaatcaagcagttttaccacttagaggtaaaattcttaatacttatgttgaagattttaatacaaagaaaaatggtaatggcaatgggtctgatcaaagaactaaggctttatccaaaatgatttcttcaaatgagatagttactttgattaatgcactaggtttagatccaaaagcacaagagatagatttaaaagatttgagatatggaaaataa

SEQ ID NO: 295666 - DNA, 1285 bp, Unknown
  Bacterial polypeptide expressing nucleotide sequence isolated from the Sargasso Sea
aatgacaaataataataccaatacttatcaagcagattctattaaagttttaaaaggtcttgaggcagtaagaaaaagacctggtatgtatattggtgacacagatgatggtactggtttacatcatatggtctatgaagttgtagataattctattgatgaggcattagcaggtcattgtaaaaaaattgaagtgagtataaattctgatgggtcaatcactgttcaagacgatggtcgaggtataccagttgactttcacaaagatgaaaaaaaatcagcggcagaagtcataatgacacaactacatgctggtggtaaattcgatcatgattcctataaagtttcaggaggtctacatggtgttggagtttctgtagtcaatgctctttcacaaaaattagaattatatgttgaaagagatggaaaaaaatattttgtagagtttcttaatggcgaaactaaaataccactaaaagtaacaggtaagtcaaagaatactggcacaaaaattaattttttaccctctaaagatattttctcatccacaaaatttagtttttcaattattcaaaaaagaatgcgtgaattagcttttttaaataaaggaattaaaatcatacttaatgacctaactcaaaaaaaaattaaaactcatgaatttaaatttgagggtggcataaatgagtttgttgaatttttagatgaaaaaagagaaaaattaaaaaataagaatgataatgatttgtttagaaagccaatttatatagagggaataaaaagtaatattgatgttcaatgttcattaaaatggaatgcaggatataacgaggatgtttacccttatactaataatatttatcagaaagatggaggaactcatcttttaggatttagaagtgcattaacaagagttgttaacaaatatgcatcagagcaaaatttattaaaaaaaagtaaggttttactatctggcgatgatgttaaagagggtttgacatgcgttctttctgtaaaaatcccagatcctaaattttcttcacagacaaaagacaaattagtttcctcagaagtaagaaatattgttgaaggtatagttaatgaaaaattgtcaatttggtttgaccaaaacccatctgtttctaaaataattttaactaaaataatccaagctgctgttgcaagagatgttgccaaaagagcaagagaaaacgttagaagaaaaggtgctttagagctcactggattacctggaaaactggcagattgtcaaaatcaaaacaag

SEQ ID NO: 295667 - DNA, 1217 bp, Unknown
  Bacterial polypeptide expressing nucleotide sequence isolated from the Sargasso Sea
tatgagtgaaaatcaagaagaaaataaagattattcagcaggtaatatacaagtacttgaaggactagaagctgtaagaaaaagaccagcaatgtatattggtgatgttagctctaaaggtttacatcatttggtatatgaggtagttgataactctatcgatgagtcattagccggtcattgtgatacaattcatgtttctatcaatgatggagaatcaattactgtacttgataacggtagagggattccaacagccatgcatcctaaagaaaaaaagtctgctttagaagtagtaatgacagtattacatgcgggtggtaaatttgataaagacacttataaagtttcaggaggattacatggtgtaggggtttcctgtgtgaatgctctttctgtggatttaaaagctactgtatacagggaaggacaaatctggcagcaagaatattcaaaaggaaagccgaaatacgatgtaaaagtagttggagaaacagaacaaagaggaacagaagttacttttcagccggatcctgaaatttttgatgaactggtttactcgtatgatgttttagctaaaagaatgcgtgaattggcctttctaaataaaggaataaccatttcactaactgataagagagaatctgccaaaaaagaagatgatggctcttttgtgacagaagttttttattcagaagctggtttaactgagtttgttcaatatattgatagtgcaagagaacaattaattcaagatgtaatctattttgaaggggaaaaaaatggaatcccagttgaagttgggatgtgttacaatacttcctactcagaaaatgtacactcttacgtaaataatattaatacctatgaaggaggtactcacttaactggatttagaaggggcttaacacgaacattaaaaagttttgcggaaaaatcaggacttctaactaaattaaagtttgatatcaattctgatgatttccgggaaggattaacagctattgtctctgttaaagttgcagaacctcaatttgaaggacaaactaaaaccaagttaggaaatagagaagtatcagctcctgtagatcaagctgtttcggaagcactttcaaattatttagaggaacatccttccgaagcaaaaactattgttgaaaaagtgatattggctgcacaagctcgccatgctgcaaccaaagctcgagaaatgggtc

SEQ ID NO: 295668 - DNA, 1309 bp, Unknown
  Bacterial polypeptide expressing nucleotide sequence isolated from the Sargasso Sea
attatgacacaacttcatgctgagggaaaattcgaccatgattcatataaagtatctggtggattacacggtgttggtgtttctgtggtaaatgctttatcagaaaaattaaaattagaaattaatagagatggtgaaaaatactttgtagaatttgaggatggcgatgctaaagcaccacttaaaaaaattggtaaatcaaaagatacaggtactcaaataacttttttaccttcaaaaaaaattttttcttcaataaaatttaatccgaatatactcattaaaagaatgagagaattagcatttttaaacaaaggcattaaaattatatttacagacctaactaacaaaaaagaaaaaaataatgttttcaaatttgatggtggtgttttggagtttgttgaatttttagatgaaaaaagagaaaaattacaaaataaaaatgggaatgaattatttaaaaaacctatttatatagagggtaaaaaagaaaatattgaaatagaatgttctcttaaatggaatgctacttactctgaggaagttcttccgtatactaataatatttatcaaaaagatggtggaacacatttactggggtttagaagtgctttaacaagggtaataaacaaatatgctaatgagcataatcttttaaaaaaaaataaatttacaatttcaggagacgacataaaagaaggtctttcatgtatactttcgacaaaaattcctgaccctaaattctcttctcaaacaaaagataagctagtttcttctgaagtgaggatgattgttgaaacaataattaatgaaaaattgtcaatatggtttgatcaaaatccttctattgcaaaaattattttagctaaggttatacaggctgctttagcaagagatgtagcaagaaaagctagagagaatgttagaagaaaaggagctttagaattaagtggtctacctggtaagcttgctgactgtcaaattggtaaacaagaaggaactgaattatttatagttgagggagattctgcaggtggttcagcaaaacaaggaagaaatagagctaaccaagctgttttaccattaagaggtaaaattttaaatacttacgttgatagtttaccaattaagaaaaatggaaatggtaaatccaatggtgatgatcaaagaacaaaagcattatctaaaatgatttcttctaatgagattgtaactttaattaacgcgctaggattagatcctaaagctcatgagattgaccttaaagatcttagatatggtaaaataataattatgacagatgccgatg

SEQ ID NO: 295669 - DNA, 1540 bp, Unknown
  Bacterial polypeptide expressing nucleotide sequence isolated from the Sargasso Sea
ttggccaagaatacatacgactcaaaagcaatagaagttctttctggattagatcctgttagaaaaagacccggtatgtatactgatacatcgtgtccaaatcacctcattcaagaagtactagataactcagttgatgaagctatatcaggccattgttcaaatataaaaattaaattacaaaaaaacggacttataaaagtcagcgacgatggcagaggtatgccagttgatattcacccagaacataaagttagcggagttgaattgattttatgtaaattacatgcaggagcaaagttttctggagaagagtataacttttctggaggacttcatggggttggcgtttctgtagtgaatgctttatcagaatctcttcaagttaatattaagagagatactaaagaatatgaaatgaaattcaaaaatggagataagcagaatgaattaaaagtagttggtgaagttggagcaagaaatagcggaaccaccattaaattcaaacctaattcaaaatattttgaatcagaggagataaaagtaaaagagttaaaacatttattaaaagctaaagcagttttatgtcctggacttactatccattttagtaatgaaagaaaagctgaaaaaataaaatggtactttgaagatgggttaaaaagttatcttgaggaggcctctgacggcttagatttaattcttgaagagtcaatactctcttcaaaagattcggattcacaagaggttgaatttgtagttaattggagtggcaggctaccaaagaataagcttgatgagacttatgttaacttaatcccaacctctcaaggaggatctcatttaaatggatttaaatcagggcttttagaagctctaaaagaattttgtgagtatagaagtttaatacctaaaggtcttaagttgaatgcagatgatgttctaaataatgcaatttttgtagtttcttctaaattacagaatccacagtttgcaggacaaactaaagaaagacttgattcaaaagaccatatgtcttttgttagtagttcgaccaaggacattttaagtatatggctaaatacacataccgaagaaggcgagcagatagcagaattagcaatagcttctgctcaggcaagagctaaggcttctaatacggttgagagaaaaaaaacatttaaaggaccggcattgcctggaaaattatctgattgcaatagcgaagatttaaataagacagagttatttttagttgagggtgattcggccggaggttctgcaaaacaagctagagaaagatcatttcaagcaataatgcctttaagaggcaagatattaaatacctgggagctagaaagtgaagaaataataaaatcacaagaaataaaaaatctctccacagctattggagttttgcctggcaacaatgatctttcaggacttcgttatggaaagatatgcattttagctgatgctgattcagatgggttgcatatagctacattattatgtgccttatttttaagacattataaaa

SEQ ID NO: 295670 - DNA, 958 bp, Unknown
  Bacterial polypeptide expressing nucleotide sequence isolated from the Sargasso Sea
atttggtttgatcaaaatccatcaattgcaaagattgttttggctaaagttattcaagctgcagtggcaagagatgtagcgagaaaagctagagaaaatgtcagaagaaaaggtgcccttgagttgagtggtttacctggaaaattagctgattgtcaaattggtaaacaagatggaactgagttgtttattgttgagggtgattcagcaggtgggtctgcaaagcaaggaagaaatagaacaaaccaagcagttttaccacttcgaggcaaaatacttaatacatatgtagaagattttaaagttaagaaaaatgggaatagtaatggaaatggttctgatcaaagaactaaagctttatcaaaaatgatttcttcaaatgaaatagttacattgattaatgcgttggggttagatcctaaagtagaggaaatagacccgaaagatataaggtatggtaaaatcataattatgactgacgccgatgttgacggttctcacattagagctttacttttgactttttttaataataaaccttttaataagttaatcgaagatggttatctatatctcgcgcaacctccattattcaaaataaataaagggtcaaagggaatttatataaaagatgaaaaggagctagaagattatattttaaataataataaagaattaaaaaaaataaaaaaaggttcaaaagaatactttaagagtattgatattgaaaaatctaaaatgaatattcaaaggtttaaaggtttaggggagatgaatcctgaggagttatggaacactacacttgatccagaaaccagaaatttacttaaagttcagtattcgaaggatccaaaaaaagaccaaggtttaattcataaacttatgggtaatgatgtttcattaaggaaagattatatatttgataatgcacttaatgtacaaaatcttgatatttaat

SEQ ID NO: 295671 - DNA, 1169 bp, Unknown
  Bacterial polypeptide expressing nucleotide sequence isolated from the Sargasso Sea
agatcccggtaagtctgaattatttatagttgagggtgactcagcaggcggatcagcgaagcaaggacgagatcgagactgtcaagctgttcttccactgagaggcaagatattgaatgttgaaagagctcgatttgatcggatgctatcatccaatgaaattggaacccttataacagcattaggaacaggcataggaaaagatgagttcgatatagagaaattgaaatatcataaaattattattatgacagatgctgatgtagatggcgcacatatcagaacgctgttattaacttttttttacaggtggatgcgcccgttaattgatggcggttacttatacattgctcaaccgcctctctataaggtaagcaaaaatagatccgaaagatatataaaagttgataaagagcttgaggaatacctgctagagtctgggctcgataatgcagtatacgtgagtggcacaggggcagaacacagcgcaaatgatctaaaagaaatacttaaaatatcaagtgtattaaatggaataattggacaaataagcagtaaatatccaaagtttataattgaagaatgtgcaattgctggcgcattagaccataaattatatgataatagcgaatatgccaaagagacagcaagctacatagcaaaacgactaaatagtagattcagaattgatcaatctgctaataattggacaggaaaagcaaacgaaacaaatgatttgatctttgaaagagaaaatcgcggagtaaatgagatttacacaattgataggcagtttatgcactcttccgatgcaattgctttaaatgagttatcatccaagcttcaggaaatttatttaaagcccgggcggctgaagctcaaagacagtgaaaagatagtccatactcccactgagctatttgagatggtccttgcaaatggaagaaaaggtgcttcaatccagaggtataaaggtctgggtgaaatgaaccctgatcaactttgggaaacaaccttagatcctgacatgaggactctactgcaagtaaaagtcaaagaggctgatgaagcaagtaatctatttaccaggctcatgggtgatgaggtcgaaccaagacgcgagtttatacaggaaaacgctttgagagtttctaatcttgatatttgat

SEQ ID NO: 295672 - DNA, 1921 bp, Unknown
  Bacterial polypeptide expressing nucleotide sequence isolated from the Sargasso Sea
atggccaaaaaatcttcggaagccaaatacgattctagtaacattcaagtcctcaaaggtttagaagcagtcaaaaaaagacctggcatgtatataggtgacacagatgatggttctggtttacatcacatggtttttgaagttttagacaattgtattgatgaggcaatggcaggacattgtacagacataaatgttgtcataaataaaaatggatctgttactgtaaaggataatggaagaggaatacctgttgatgttcataaaaaagaaggagtctctgcagcacaattaattttaacaacccttcattcgggtggaaaattcgatgacaattcttacaaggtttcaggtggattacatggagtaggagtttcagttgtgaatgctctttctaaaaaattaatcttggaagttcatagagatggaggtgaatattttcaggaatataatgaaggtaaaccaaaagcaaaattaaagaaggtaaaaaaatcagataaaactggaacaacaataaccttctttccctcagagaaaatttttacatcaatagattttgaaattgaaagaatctataaaaggattcaagaactgtcttttttgaatgcaggagtttcaataaatgttgaagacaagaaatcaggaaaatctaagaagtttaaaaataatggtggtttgtctagctacgtaacacacttaaaaggaagaaaacaggctgtttctgatatttttgagtgttctgctactgaaaatgaggttggggttgaaatagcactacaatggactgactcttatagtgaaaacgtgctttgttatacaaataacattcctcaaaaagatggtgggactcatctagcaggcttcagagggagcttaacgagggttctaaagtcttttattaaaaaagaaaatgctaaaaaaacaccaacagaccttcttggagaggatgtaagagagggtttaatagcaataatatctgttaaagtgccagatccaaagttttcatcacaaacaaaagaaaagcttgtatcatcagaggttgaaagtgttgtaagcacattattcagcaaatacttcaatgaatttcttcttgaaaaccctaaagatgctatgagtatagtatcaaaggtatcagaggcggcattagcaagagaagcagcaagaaaagcaagagaaatgactagaagaaaaggggttttagaaattgcaggattgccaggaaaactagcagattgccaagaaaaagatccaacactttcagaaatatatattgttgagggtgattctgctggaggctcagcaaaacagggtagaaatagaaaaaatcaagcaattctgcctttaaaaggtaagattattaatgttgaaaaagctagaattgataaagttttaggttctgccgaagtaggaacactaattaaagcccttggatgcggtattggtgaagaggactttgacattgataatttaaggtaccacaggataataataatgactgatgctgatgtagatggttcccatataagaactcttttattaacatttttctacagacaaatgtacgagatagtcgataaaggtcatatttatatagcattaccacctttatataaaattactaaaggaaaagagtttatatatgcttctgatgaagatgaaaaggatgcggctattaaaagcctctcaaagtcaggaacaagaggtttagaagttcaaagatacaagggtttgggagaaatgaatcctgaacaattgtggacaacgacaatggatccagctaatagaagaatgatgagagtagatatcaaagatgttcaagatgctaacgaatcatttgaagtcttaatgggcgatgatgttgagccaagaagagaatttattgatgctaacgccctttcagtgaaagaacttgatatttagt

SEQ ID NO: 295673 - DNA, 865 bp, Unknown
  Bacterial polypeptide expressing nucleotide sequence isolated from the Sargasso Sea
tatgaaagaattttgtgaaataaggaagcttctaccaaaaggcctaaaacttaatgcggatgatgtaattaataatgcaatttttgtcatttcctcaaaaatgcagaatcctcagtttgcaggacaaactaaagaaagattagattcaaaagaacatatgtcgtttgtaagcagctcaacaaaagatgtgctaagtatatggtttaacaagcatactgaagaaggagagaagattgcagaattggcaattatttctgctcaagctagagctaaagctgtaaatacagttgaaagaaagaaaacttttaaaggtccagctcttcctggcaagctttcagattgtaacagtgaagatttgaataagactgaattatttctcgttgaaggagactctgctggtggttctgcaaagcaagcaagagaaagatcttttcaagcaataatgcccttgagaggtaaaattttaaatacatgggacttagaaagtgatgagattattaaatctcaagagataaaaaatcttgcaactgcaattggtgttatgccaggaaattctgatatttcgtcattgagatatggaaagatatgcatattagcggatgcagactctgatgggcttcacatagcaacattattatgtgctttatttttaagacattttaaacctttagttaatgatggacgcatttatattgctatgcctccattgtatagaattgattgtggtaaagatgttttatatgctctggatgaaaaacaaaaggaacgaatagtaattgactttaaaagtaaaaaaggtaaaccaaaaataaacattcaaaggttcaagggcttaggagaaatgaatccatctcaattacgagaa

SEQ ID NO: 295674 - DNA, 1163 bp, Unknown
  Bacterial polypeptide expressing nucleotide sequence isolated from the Sargasso Sea
aatgcatgaagatggatatgactacaataaacaatacagaaaatctgcaagagttgttggttcggttattggtaaatatcatccacacggtgatcaaagtatctatgatgcacttgtaagaatggctcaacctttttcgcttcatttaccgttagttgatgggcaaggaaacttcggatctgtcgatggtgatccaccggctgcaatgaggtatacagaagtaagaatggaaaaaattgcacatcaccttcttaatgacataaatctagatacagtagattttcaagaaaactatgataattctgaaagtgaacctattgttctacctgctgaatttccaaatctacttgtaaatggtgctggcggaattgctgtgggcatggctacaaatattcctcctcataatttaaacgaaattacagaagcatgtatgtttatgattgataatcctgaaactaatgatcaggaaatggatcaaagattatgtgaaattgttccaggtcctgattttccaactggaggaataattctaggaaaaagcggtgccagaagtgcttatacaactggtagaggttcggtggtaatcagagctaaagtagaaattgaagaaatacgtaaggacagagaggcactaattgttacagaaataccatatcagttaaataaggtattactaatccaaaagattgctgatttagttagaaataaaacaattgaaggtatatctgatttaagggatgaaagcgatcgtcatggaatgcgtatagttatagaattaaagcgtgattcagttgcagaggtaatcttaaatcaactttataaatttacacaacttcaaacttcgtttggcgcaaacatggttgctttagataaaggaacccctaaatcaatgaagctaagggaaatgcttgcctgttttattgatttcagagaagaagttgtaacacgaagattaaaatttaaattaaacaaggctagagatagggctcatctcttggtcggtcttgctattgcagtttcaaatatagatgaaattataaaacttatcagatcctctaaatcacctgctgaggcacgagaggatttaatggaccgtgaatggcctgccaaagatgttaaatcgcttataaaactaattgacgatcctaggcatggtatacaac

SEQ ID NO: 295675 - DNA, 2434 bp, Unknown
  Bacterial polypeptide expressing nucleotide sequence isolated from the Sargasso Sea
aatggcaaaaaaagaaaacaaaaacaaagctagtaaaaaaacaaaagagaaagatgattatggagcagaatccattaaggttcttaagggtttagaggcagtaagaaaaagacctggaatgtatatcggagatactgatgatggcactggccttcatcatatggtttatgaggttgttgataattctgttgatgaggctttagctggtcattgtaaaatgatttcggttattttgaatgctgatgaatctgttactgttaaggatgatggtcgaggaataccaactgagatacataaagaagagggaatatctgcagcagaggttatcatgacacaattacatgctggaggtaaatttgaccaaaattcatataaggtttccggaggtcttcatggtgttggggtatcagttgttaatgcattgtcagaaaaattagatctaaaaattaagagaaatggaaaagaacatacaatgtcttttgcaaatggagaagcctcgaaagcccttaaggcagtaaaagattgtaaagatgaaacaggaacagaaattactttttatccatcaaaatcagtttttactatgacagagtttagtcgcagaactttagaaacaagattgagagaaatggcttttctaaattctggtatttccattcatttggaagatagaagaaaagatgaaccttggctcaaaactatgtcttatgaaggaggattagacgaatatgttagacatattgatcaaacaagaaaatctctaatggaagtcccaataagttttactggtaaaaaagatgaaatagaggttgatgtatcaatgtggtggaatgacagttattacgaaactgtaaattgttttacaaataatattcctcaaaaagatggtggtactcacttagctggattaaggtcagcattaacacgagtcgtaaattcatatgctcaagagtcaggcttaacaaaaaaagaaaatgttcaacttgttggagaagatattagagaaggtttcacatgcgttttatcagtaaaagttgctgaccccaaattttcaagtcaaacaaaagataaattggtatcatctgaggttaggcctgttgttgaaagtttaatcaatgatcttttatctaattggtttgaagagcatcccaacgaggccaagataattgttggaaaagtcgttgaagctgcgtctgctagagaggcagctagaaaagctagagatcttacaaggagaaaaggagctcttgatatttcatcattgccaggaaaactggcagactgtcaggaaaaagatccagaaaaatgtgaaatatttattgtagagggtgagtcagccgggggttctgcgaagcaaggtagagataggtcaacacaagcgattcttcctctaaaaggtaagattattaattgcgaaaaagcaagactatcaaaagttctttcttccaatgaaatagcaactttaattacagctttaggcggaggtattggtaactcttcaaatgaaagtgaccaagatgatgagagcttcaagactgataaactaagatataagaaagtaattataatgactgatgcggacgtagatggtgcccatatcaagacattacttttaactttcttctatagacaaatgagaccattaatcactgacggttgtttatatatagctcagccacctttatataaagcaaaaaaaggtaattcagaaacttatctaaaggatgatgacgatttagaaaactatctaatagatacaggtattatcgattcttcttttatattaaatacaggagaggttatagcttcaaacgatttaattgacttggtaaccaaaagtagaaattttaaaaaattaataaattctctacctaaaaaatataaccaaggatttgttgagacagtttctattagtagtgcttttaaacagcctatcaaaatctctgataaagttttagcagaaatatcaaataggctaacaaaaaaatatagtgatattgatgctgattggaaagctagttatgatgacaataatggtctaatggtttcaagggaagttaggggagttagtgaaaacatgagtattggcagaggtttatttgattctgcagactcaagaagacttgaaaaaatatctaatgatataaaacaattttttccatttgtagacaaggagtcttctaatatttttgaaagagatggaagaagctatataattaatgggccaattgatttgatagaatcaatctttatagagggaagaaaaggattacaaatacaacgttacaaaggtttaggcgaaatgaatgctgaacagctttgggacacaactttagatccagaatctagaagacttttacgtgtgaagattgattctggagttgataatagtggtatatttgccgatctgatgggagatgaagtgataaaaagaaga

SEQ ID NO: 295676 - DNA, 1232 bp, Unknown
  Bacterial polypeptide expressing nucleotide sequence isolated from the Sargasso Sea
aatgtcaggtgatacgtacgattcaggcagtattaaggtattaaaaggtttagaagcggttaaaaagaggccaggaatgtatatcggggataccgatgacggcactggacttcatcatatggtttttgaagtgcttgataactcaatagacgagggaatggctggcttctgtaagcagatagatgtagtaataggcaaagatgggtctgtatcagtttctgatgatggaagagggatacccgttgatatgcatgaagaaggtgtatcggcagctgaagttattatgacaacactgcactcaggaggtaaatttgatgaaaacagctataaagtctctggagggctacatggagttggtgtttcagttgtaaatgctcttagcagtaagttaattttagagattgaaagggatggagcaaaatacaaacaagaatactcagatggtgagcctaaaacaaagcttgaaaaagtaggaaaaagcgaaaaatcaggaacaaaagttacttttacaccctcaaaaaaaatatttacacagactaaatttgatgtagaggtactaaaaaagaggattagagagctttccttccttaacaagggaattgccattcatgttcttgatgaggcctcaggaactaagcttgagtttaagtcagacggaggactattagagtttgttaaacatctcacaggcaaaaaagaagtaattggcacacctttttatgcacaagcaaacatgaaaggaataggtgttgagattgccgctcaatggacaggaacatacagagaaaatgtacagtgcttcacaaacaacataccacaggttgatggaggcacgcatcttgctggctttaggggaggacttacaagagcaattaaaaactttattaaaaaagaagatttaatgcgcaaaaaagaagttgaaataacaggagaagacgttagagagggcatgatagcagtcatttctctaaaaatgcctgaccctaaattttcttcacaaacaaaggataagttggtttcatcagaagcaagaccagcagtcgaaacgcttattaatgactactttatggactttttgcttgcaaacaaaccacaagctaaagagattcttggcaaggttcttgaagctgcatatgcaagagaagctgcaagaaaagcaaaagaaatgacaagaagagaaggtcttctggatatagggggactgcctggcaagctagcagatgtcaagaaaa

SEQ ID NO: 295677 - DNA, 691 bp, Unknown
  Bacterial polypeptide expressing nucleotide sequence isolated from the Sargasso Sea
gatgagctcatcttatctatcgtatgcaatgagtgttatagtcagtagagcacttcctgatatacgagatggtttaaaaccagttcatagaagaattttgtacgcgatgtacaaaggtggatatgattggtcaaaacaatttagaaaatctgcaagaattgttggagatgttattggtaagtaccacccgcatggagatcagtcagtttatgatgctctagtgagaatggttcaggatttttcaatgagcctacctttagttgatggacaaggaaattttggatctattgatggcgatcctgctgctgcgatgagatatacagaaactagattatctaaggtttcacaatatttaatcgatgatatcgaaaagaatacaatttcattcaaaaataattacgatgaaacggagaaagaaccaacagttttaccagctcaatttcctaatttattagtaaatggtgcaggtgggattgcagttggaatggcaactagcataccaccacataacctaggtgaaataattaacggaacattagctttaattgaaaataaagatattaaaattaaagatcttatgaagcacatacctgggcctgattttccaactggaggagtaataattggaaaagatatgatcaaacaaggttataacaagggcagaggttcttttaaaattagaggtgaaatt

SEQ ID NO: 295678 - DNA, 1127 bp, Unknown
  Bacterial polypeptide expressing nucleotide sequence isolated from the Sargasso Sea
agttgatattaatggtgatggttcgattacagttgaggatgatggaagaggaatacccgtagatatacataaaggtgaaaaaaagtctgcagcagaagttattatgacacaattacatgctggaggaaaatttgatcatgactcttataaagtttctggtggacttcatggtgtaggagtttctgtagttaatgctctttctgaaaagttagaattatttatagaaagagatggaaaaaaacattttatagaatttaataatggtgatgctcaaaaccctcttaaagtaattggaaaagctaaaagcactggtacaaaaataaattttttgccttcaaaaaatattttttcatcgactaaatttagctttgctattttacaaaaaagaatgagagaattagcatttttaaataaaggaattcaaatttctctaaacgatttaactcaaaaaaaagcaaaaaatattatttttaaatttgatggaggtatattagaatttgttgaatatttagatcaaaatagagaaaaattaaaaaataaaaatgataatgatttattcaaaaaaccaatatatatagaaggcctaaaaaataatgtagatattcaatgttcattaaaatggaatgcgggatataatgaagatgtttatccttatactaataatatttatcagaaagatggaggtactcatttattaggttttagagctgcactaactcgagtaataaacaaatatgcttcagagcaaaatttacttaaaaaaagtaaagtttctctttctggagatgatgtaaaagaaggtttaacatgtgttttatcagtaaaaatccctgacccaaaattttcatctcaaactaaagataaattagtttcctctgaggttagaaatattgttgaaactatagtaagtgaaaagttatcaatatggtttgatcaaaatccttctgtatcaaaaataattttaacaaaaattattcaagcagctgttgcaagagatgttgctagaaaagctagagaaaatgtaagaagaaaaggtgctttagaacttacaggtttaccaggcaagttagcagattgtcaaaattctaagcaagaaggaactgaattatttattgtgagggagattc

SEQ ID NO: 295679 - DNA, 894 bp, Unknown
  Bacterial polypeptide expressing nucleotide sequence isolated from the Sargasso Sea
tggctagagatgttgctagaaaagcaagagaaaatgtaagaagaaaaggagcccttgaattgagtggtctacctggaaaattagctgactgtcaaattggcaaacaagaaggaaccgaattgtttattgtagagggagactcagctggtggatctgctaaacaaggaagaaatagggcaaatcaagcagttttaccccttagagggaaaatacttaatacttatgtagaagattttaatttgaaaaaaaatggtaacggtaatggaaatggttctgatcaaagaacaaaagctttgtctaaaatgatttcttcgaatgagatcgtcaccttgattaatgctttaggtttggatccaaaagcacaagagattgatttaaaagatttaagatatggaaagattattattatgacagatgctgatgtggacggttctcatataagagcccttcttctaactttttttaacaataagccatttaataagttaattgaaaatggtcacgtttatttagcgcaaccaccattatttaaaattaataaaggctcaaaaggaatttatataaaagacgaggaagaattagaaaaatatataacgactaataacaaggaaattaaaaaatttaagaaaggttctaaggagctttcaaaactaatagaaactgaaaaatctaaaatgagtatacaaagatttaagggtttaggagagatgaatccagaagagctttggagcacaactcttaatccagaaacgagaaatttacttcaggttcagtattcaaaaaactccaaaaaagaccaagaattgatacatactttaatgggtaatgatgtaacactaaggaaagattttattatttctaacgcaataaatgttcaaaatttagatatttaga

SEQ ID NO: 295680 - DNA, 619 bp, Unknown
  Bacterial polypeptide expressing nucleotide sequence isolated from the Sargasso Sea
aatgtcactacaaaataaaaattatcaagcagactccattaaagttctcaaaggtttagaggctgtaagaaaaagaccgggtatgtatataggtgataccgatgatggaactggtctccatcatatggtttatgaggttgtagataattcaattgatgaagctcttgcaggatattgtaaaaacataaaaattataattaatgctaattccagcataactgtaattgatgatggaagaggcattccagtagatgtccataaaactgaaaaaaaatcagcagcagaagtgattatgacacagctgcatgctggaggaaaatttgaccatgactcatataaagtatcaggaggtcttcatggtgttggagtttctgtagtaaatgctttatctgaaaaattaaagctagagatatttagagatggaaaaaaatattttatggaatttcaaaatggtgattcattagcgcctcttaaaaaaataggcagttcaaaagagacaggtaccaaaataacttttttcccatcaaaagaaattttttcatcagtaaaatttattcctaaaattattcaaaaaagaatgagagaacttgcatttttgaacaaaggtataaaaattacc

SEQ ID NO: 295681 - DNA, 1221 bp, Unknown
  Bacterial polypeptide expressing nucleotide sequence isolated from the Sargasso Sea
aaaccttaattgaagaaaatggagatcgagaatcaataatcatttctgaacttccttatcaggtgaataaagcacgtttgatagagaaaattgccgaactcgtcagagacaagaaattggaaggtatttctgaaattcgagatgaatctgacaaagatggtctcagggttgctatagatctcaaaagaggaacagtttcagatgttcttttgaataacttatacaaacaaacggtattggagagcacattctctatcaacatggttgctttatcaaatggtcagccacaattgatgaatcttaaaagcatgctcgatgctttccttggtcataggcgtgatgtagttaccaaaagaactatctatcaactcaatcggtccatcaacagagctcatattctcgaaggtcaaacaattgcactgacaaacattgacgaaatgattgccatcataaaaaaatctaagacaccagctgatgctcagagagcattggtgtcaaaagtatggaaggttggtaaagtcaaagagatgcttaagaaagcaggaaatgtttctacagtacccaagcatctaataaatatagaaacatttggtattgagaaacgaggctatcggttgtcttcagagcaagccaaagcaattcttgatttaaaacttaatcgattaactggcctcgaacaagaaagtatttttaatgaatattctgagctacttgaagatattaagcgattcactcttattctctctaatccagatgagttgaagtctgtcataaggaaagagcttattgaaacacaggaaacatatggcgacgaacgaaggacagaaatagttgaattctattcagacctcactgatgaagatcttattccagaagaagatctcattgttactttgtcaaaagagggttacgcaaaaactcaaccgctcgacgcctatcaagcacagaaccgcggtggaacaggtaagagagctgcatctctaaaagatgaggactttgtttcgaaattatttgtagcaaacactcatgacacattgttatgtttttctagttatggaaaagtttattggattaaagtttatcgacttccgagaggtgggagaaatgcaaaaggccgtccaatcgtaaatctcttaccactagaaaaagatgaaagaattcaggctgttcttccagtcaaagaattcaacgatgatgcaatttatctttatggtgactgag

SEQ ID NO: 295682 - DNA, 1755 bp, Unknown
  Bacterial polypeptide expressing nucleotide sequence isolated from the Sargasso Sea
tatgaaaaacacagaaaataataaatatcacgcagactccatcaaagtattaaaaggtcttgaagctgtaagaaaaagaccaggaatgtatataggagatacagatgatggaactggtttacatcacatggtttatgaagttgtagataattctattgatgaggctttagcaggatattgtaaaaatattgatgttgatattaatgatgatgggacagttagtgttaaagatgacggaagaggaattcctgtagatattcataaaacagaaaaaaaatctgcggcagaagtaataatgacccaattacatgctggtggaaaatttgatcatgattcttataaagtttccggtggattgcatggtgttggtgtttcagttgttaatgcattatcagagaaactaaaacttacagttgatagagatggaaaaaagtattttgttgagtttaaaaatggtgatgcaatcaaacctctaaaaataataggaaaatctaagtcaaatggaacagaaataaattttcttccatcaaaagaaattttttcctcaacaaaatttagctttaatatccttcaaaaaagattaagagaattagcatttcttaacaagggaattaaaatatccattatcgatcaatctcaaaaaaaaattaaaaaatctgaattcaaatttgaaggcggaattttagagtttgttgaatatttgtgtattaataaggaacaacttaaaaataaaaatgataaagatttatttaaaaaaccaatatttattgaaggtaaaaaagacaaacttgaagttgaatgttccttaaagtggagcgcaaactattctgaagatgtttatccttatacaaataatatttttcaaaaagatggtggaacccatttattaggatttcgaagtgcccttactcgagtaataaacaaatacgcaaatgagcaaaatctattaaaaaaaaataaattatctatatcaggagatgatattaaagaggggttaacttgtgttttgtctgttaaaataccagatccaaaattttcatcacagacaaaagataaattggtttcctcagaggtaagaaatgtagttgagtcaataattaatgaaaaattatcagtttggtttgatcaaaatccttcagtggcaaaaattattcttgctaaggtcgtccaagctgcgctggctagagatgtcgcaagaaaagctagagagaatgtaagaagaaagggagcgctagagctaacaggattgccaggtaaattagctgattgtcaaaattcgaaacaagaaggtacagaattatttatagtagaaggagactcagcgggtggatctgcaaaacagggtcgaaatagagaaaatcaagctgttcttccattaagaggtaaaattttaaatacttatactagcaataatggaactaaaaaaaacgggaacggaaatgacataaaaacaaaaacattggcaaaactaatttcttcaaatgaaatagttaccttaataaatgcactaggtttagatccaaaacaagaagaaattgagcttaaggatttaagatatggtaaaataattataatgactgatgctgatgtagatggctcacatatcagagctttattgttgactttctttaacaataaaccctttaataaattaattgaacaaggccatgtttttttagctcaaccaccattatacaaaattaacaaaggctcaaaaggcatatatataaaagatgataaagaattagaaaatta

SEQ ID NO: 295683 - DNA, 1411 bp, Unknown
  Bacterial polypeptide expressing nucleotide sequence isolated from the Sargasso Sea
aatgagtgaggacaaaagatctaatataatctcaagtgactatggtgccgaacagattcaggttttagaaggtttagagccggttcgtaagcgcccagggatgtatataggttctaccggtcctagaggtttacatcatttagtatatgaggttgttgataattcagttgatgaagcactagcaggacattgtgatcatatagaaatagttcttcaagcagatggatcagctttaatttctgataatggacgaggtattccaacagatattcatccaaggactggaaaaagtgccttagagactgtacttactgttcttcacgcgggaggtaaattcggaagtggcggttataaagtttcaggcggcttacatggagtaggaatctctgtagtaaatgctttaagtgaatgggttaatgtcactgtttacagagatggcaatgaatttaatcaaagatttgaaaaaggtatatctaaaggtgatttacaaactaaaaagcaaactttaaaaccttttagaaaaggaacaagtatttgttttaaaccagataaaacgattttttctggtggaattgaattcgaatatactcttctttcatctaggttaagagaactagcctatcttaatggtggtgtaaaaattgtttttagggatgagagaaatcaattgtcagatggatctttcaaagaggaaatttatctatatcaaggaggcattaaagagtatgttcaatacatgaacgcagaaaaagagtctattcatcctgagataatttatgtcgactcgcagaaagaaaatgtttatgttgaagcagctatgcaatggtgttcagatgtatattcagataatattttaggttttgctaataatattagaactattgatggaggtacccatattgaaggattaaagacagttttaacaagaacattcaataatcttgcaaaaaagagaggtaaaagaaaagatattgaaaaaaatttaggtggcgaaaatataagagagggattgacagtagtcttatctgttaaagtgccagatcccgaatttgagggacaaacaaaaacaaaattaggaaatactgaagttcgaggaatcgttgattctcttattggagatgctctcacaaagtatatggaattcaatcctggaattttagacttgattcttgaaaaagcaattcaatcatttaatgcagcagaagcggcaagaagggctagggaattagtcagaagaaaaagtgttcttgaaagttcaactttgcctggtaaattagctgattgcagttctagagatccctcagtatctgaaatttatatcgttgagggagattctgctggaggctctgcaaaacaaggaagagatagaaattttcaggcaatattgcctctcagaggtaaaattctcaat

SEQ ID NO: 295684 - DNA, 559 bp, Unknown
  Bacterial polypeptide expressing nucleotide sequence isolated from the Sargasso Sea
aatgacaaataaaaacacatatcaggcagactctattaaagttttaaagggcttagaggcagtaagaaaaagaccagggatgtatattggtgacacagatgatggcactggacttcaccacatggtctatgaagttgtagataattctattgatgaagctttagcaggtcattgtaaaaatataaatgttagtataaattctgatggaacagtaacggttagtgatgatggtaggggaatacctgtagatattcataaaactgaaaaaaaatcagcagcagaagttattatgacccagcttcatgcaggaggaaaatttgaccacgattcatataaagtatcaggcgggttacatggggttggtgtttcagttgtaaatgcactatctaaaaaattgcaactagagattaatagagataataaaaaatattttatagaatttgaagatggtgaggcaaaagcaccgttaaaagcaattggaaaatcaaagcaatctggtaccaaaattacttttttaccttatacagaaattttttctacagttaaatttagtgcctaa

SEQ ID NO: 295685 - DNA, 1080 bp, Unknown
  Bacterial polypeptide expressing nucleotide sequence isolated from the Sargasso Sea
aataattcaataacagtcgaagacgatggaagaggcatacctgttgatatgcacaaaggggaaaaaaagtcagcagcagaagttataatgacacaattacatgctggtggtaagtttgatcaaaattcctacaaagtatctggaggcttgcatggagttggtgtttcagtagttaatgccttgtctcaaaaactagatttaactgtttatagagatggaaaagaatattttttatcttttgagaatggaaaaacaaaaaattctttaaagtttataaaaaaaacaacaaaatcaggtacaaaaattaatttttttccttcaaaagaaattttttcatcaactaaatttagtacatcaattttacaaaaaaaaatgagagaattagcttttttaaataagggtttaaaaatcttattgattgatgaaacaggtactaaaaataaatcttacgaaaataaatatgatggaggaatacaagaattcgtatcatttatagatcaaaaaaaatcatcactaataaacaaaaatgataaatcaatctttaaaaaaccgatttatattaagggagaaaaaaaagaggtaattgttgaatgttcacttcagtggaactcaggtttttctgaggatgttttggcgtttactaataatattcatcaaaaggatggcggaacacacttacttggttttcgaagcgcattaacaagaattataaataaatatgcttctgaaaaaaaccttaataaaagaaataaggtaactataggtggtgaagatattaaagaaggattgacagctgttttatcaattaaaatgccagatccaaaattttcatctcaaactaaagataaattagtctcttccgaaataagaaacattgttgagactatagttagtgaaaaagtaacaacttggtttgaccagaatccttcagtaataagatctatactagataaggttttgcaagctgctcttgccagagatctagctagaaaagctagagatagcgtaagaagaaaaggtactttagaattatcgggccttcctggaaaacttgctgattgtcaaatttccaaaatggaa

SEQ ID NO: 295686 - DNA, 355 bp, Unknown
  Bacterial polypeptide expressing nucleotide sequence isolated from the Sargasso Sea
atgagttcgtcttatctctcttatgcaatgagtgtaatagtaagcagagcgcttccagatatacgagatggtttaaaaccagttcatagaagaattttatatgcaatgtataaaggaggctatgattggtctaaacaatttagaaaatctgccagaatagttggagatgtaataggtaaatatcatccacacggtgatcaatcagtttatgatgctttagtaagaatggtgcaagatttttcaatgagtttacctttggtggaaggacaaggaaacttcggatcaatagatggagatcccgctgctgcgatgagatatactgaaaccagactctcaaaagtttctcagtattgat

SEQ ID NO: 295687 - DNA, 2065 bp, Unknown
  Bacterial polypeptide expressing nucleotide sequence isolated from the Sargasso Sea
cgggctcatggcgtgggggtctcagtggtcaatgcgctttctgaagagcttgaactgattatatctagagaaggcttcagccatcatcagacttataaaaacggcgaccctgtatcagcgctagagaagggggctcccacagaaaaaacggggacagaagtgcgctttttgcccagcaccgatgtttttaaacgtgtcgagtatcattacgatattctggccaagagactacaagagctatctttcttgaactcgggcatttctatcgagctcgtcgatgagagagacggaaaaaccgaatgttttcaatataaaggcgggatcagtgcgtttgtggcgcacctcaacagaaacacaacgccaattcacagctcaattatcgatataagatatgaaaaaaagggagttagtctggagctcgcaatgcagtggaacgaaacctatcaagagggaatatattgttttactaacaacattccccaaaaagatggcggcacccatctatcaggcttcagggcagctctaactagaagcctaaatcaatacatggaaaaacaaggggttacctcaaaaaacaaaataaacattactggagaagacgcgagagaggggttaacagcagtattgtcgctgaaggttccagacccaaagttttcgtcacaaaccaaagacaaacttgtttcaagtgaggttaagcccgttgtagagtcgtcagtaatggaaaaacttcaagagtttttgctagaaaaaccgaccgaggcaaaggcgctttgtggaaaaattatcgaagcggcaagcgcgagagaagccgcaagaaaagcacgtgagctaaccagaaggaaaacagcactagatgtcgccggacttcccggaaagcttgctgattgtcaggaaaaagaccccgcacagtctgagcttttcctggttgagggagattcagctggcggatcagcaaaacaggggcgcgacaggcgcacccaagcaattcttccgcttaagggtaaaatattaaatgttgaaaaagcacgagttgacaagattctctcttcggcagaaataagcacacttataaaggccttgggctgtggttttggcaaagaggaatttaatattgagaaactcaggtatcataaaattataataatgacagacgcagatgttgatggcgcccacatacgaacccttttattgactttcttttatagaaaaatgccagatcttgttactcaggggcatatttatattgcagacccgcctttgtataaagtgaaaaagggaaaacaagagcgatacttaaaagacgatgcatcaatggaagcttattttcaagagctagcgcttgagaaaagcgaactattcgttgaagaaggggaaaaaccaatatcgggaaataagcttaaggaattaataaggctttatgtatcaatgaatcatgcaggacaaagattatcaaaacggcacaacccttttattgtagaggcaattagggaaatgccagcaataacgactgaggacacaaaggagcccgcagtaatcaagaactggtttggcgagcttaccggcctcttaaatagcaacgcttctggtatacagtatgaattcgagatgctcccaatgaaagaagatggctcctatggtggggaaattaagtttattagtaatggcgaaaaccaaaacgagccgtttcatccagagtttttttcatcagaagattacaagaggctgtcggctctagggacagaacttatgttgggagaaacagcatatatacaaaggggagagcgtaagcaagcggttactaacccaaagtcggcttttgattggttgttaaaagaagttgaacacggactttctatacaaagatataaagggcttggcgaaatgaatccagagcaactttttgagacaacaatggatattgaaaatcgaaatttatcatcagtaacaattaaagaagccaaagacgcagatgagatgttccgtgatttgatgggagatgatgtcgagccgcgaagagttttgatagaaaaatatgctcatactgtagaaaacatagatatttaga

SEQ ID NO: 295688 - DNA, 421 bp, Unknown
  Bacterial polypeptide expressing nucleotide sequence isolated from the Sargasso Sea
atgcaaaaagacgaaatttctaaaaaccaaaatataaaatctgtttcaatgtatgatgaaatgagttcatcatatttatcgtatgcaatgagtgtaataataagtcgagctcttccagatgtaagagatggattaaaaccagtacatagaagaataatttatgctatgcataagggaggctttgattggacaaaacaatttaggaaatctgcaagaatagtaggagatgttatcggtaaatatcatccgcatggtgatcaggcagtttatgatgctttagttagaatggttcaaaatttttcgatgagccttcctcttatagatggtcaaggaaatttcggatctattgatggagatcctccagcggcgatgaggtatacagaaactaaattagccaaagtttctcagtttttaattgatg

SEQ ID NO: 295689 - DNA, 519 bp, Unknown
  Bacterial polypeptide expressing nucleotide sequence isolated from the Sargasso Sea
aatgcctaagcaaaacaattacgattcatctaacatcaaggtcttaaaaggcctggaagcagtacaaaaaagaccaggtatgtacataggagacacggatgatggaagtggcctgcatcaaatggtatacgaagtcatggataactccatagacgaagcacttgccggccactgctctagtattacagtcacagttcatgaggataatgctgttacagttgaggataacggcaggggaataccggttgacgaacacccaactgaaaaaaaatcagctgcggaagttattatgactgttttacatgccggtggtaaattcgacgataattcatacaaggtatctggaggattacatggtgttggtgtttctgtagtcaatgcattgtcagagacattagagcttactatctataaaaatggtaaagaatactatcaagagtacaaggacagtaagccattatcaaaaatcaacgaactaggaaatacggaattgagtggaactaaaataacattcagacc

SEQ ID NO: 295690 - DNA, 904 bp, Unknown
  Bacterial polypeptide expressing nucleotide sequence isolated from the Sargasso Sea
aatgacaaaaaataattcaaataattatcaagctgactccataaaagtcctaaaaggtttagaagctgtaagaaaaagaccaggtatgtatatcggtgacaccgatgatgggactggattacatcatatggtttacgaagttgtagataattctatcgatgaagctctagctggtttttgtaaaaaaattgaaataagtataaacgatgataactctgtaacagtgattgatgacggcagaggaattcctgttgatattcacaagggtgaaaaaaaatcagctgcagaagttataatgacccaacttcatgctggtggtaaatttgaccataattcttataaagtttctggaggactacacggagtaggtgtttcagtcgttaatgctctttctgagagattaaaacttacaattaatagagataataaaaaattttatatagaatttaaagatggagacgctaaaacttctttaaaacaagttggaaaatcaaaaaccagtggaactgaaattaattttgttccatcgaaagatatattttcatctattaaatttagtttttctatattagaaaaaagaatgagagaattggcctttttaaataagggcataaaaatagttttaagtgatttaagacaaaaaaagccaaaaacattagaatttaaatttgatggaggtattacggaatttgtacaattcattgatgaaaaaaaagaaagtttaaaaaacaaaaatgaaaatgacctttttaaaaaacctatatacattgaaggtttaaaaaataatattgatgttcaatgctcccttaagtggaatgcggggtatagtgaagatgtattgccttatactaataatatttatcaaaaagacggaggaacacatcttcttggatttagaagtgca

SEQ ID NO: 295691 - DNA, 952 bp, Unknown
  Bacterial polypeptide expressing nucleotide sequence isolated from the Sargasso Sea
agctaattatgatgacacaactcaagaaccaacagttcttccttcacaatttccaaatcttttagttaatggagcatctggaatagcagttgggatggcaacaaatattgcacctcataatttaggtgaagttattgatgctaccttatatttaattactaatcctcagtgtgacaccaaagacttgcaaaaatatgtttttggaccagattttccaactggtggtcaaataataggtaaaaaaggtatcatcgaaacttatcaaactggtaaaggtagctgcgtagttaggtcaaaaacaagtatagaaaattttaaaaaagacagagaagcaataattttgcatgaaataccttatcaagtaaataaatccaagttattggaaagaattgctgagatagtaaaaaatggaacagtagagggtatatctgatttaagagatgagtcagatagaaatggagtgagagttgtaattgaattaaaaagagatgttgattcaaatataattctaaatcagctttataaacatactttaattcaaactacatttaattccaatatgcttgcacttaataaaggcaagccagaacaaatgaatttaaaggaaattcttagctcctttctagaattcagagaagaagttattattaagagaacattatttgatttaaataaagcaagagacaaagcgcatattttagttggcttggttgttgccaatgataacattgatgaaattattgatttaattaaaaaatcaaaagatacaaaagaagcaagagataaattgatcaagaaaaaatggaaattaagtaaagataacattaattttataaatcttgttgaagataatacatatcaattaaacaaaaatatgtttaatctaactgagactcaggcaaaagctattttagaattaagacttcaaaaattgactgctttgggaacgtga

SEQ ID NO: 295692 - DNA, 617 bp, Unknown
  Bacterial polypeptide expressing nucleotide sequence isolated from the Sargasso Sea
tctggccaagttcagacactttacagatacgctttaccactacgatattcttgctaaacgtcttcgtgaactatcatttttgaactctggtgtgtctattcgcttgaaagacgaacgcgatggaaaagaagaccacttcatgtacgaaggtggtatcaaagcgttcgttgagtacctaaatgaaaagaaaacacctgttcaccagaaagtgtttcattttagcagtgaacaagaagacggtattgcagtagaagtagcaatgcaatggaacgatagcttccaagaaaacgtgttctgtttcaccaacaatattcctcagcgcgacggcggtactcacttggcgggcttccgtggagcgttgacgcgtacattgaataactacatggaaaaggaaggcctgaacaaaaaggctaaaacgaatgccagtggtgacgacgcgcgtgaaggtctaaccgcggttatttccgttaaagtaccagatccaaaattcagctcacagactaaagataagcttgtatcttctgaagttcgtccagctgttgaatcggcaatgaatgaaaagctagcagagttcttattagaaaaccctgcagaaagtaaaatcattgcgggtaaaa

SEQ ID NO: 295693 - DNA, 595 bp, Unknown
  Bacterial polypeptide expressing nucleotide sequence isolated from the Sargasso Sea
tatgtcagcagagaacaactacgactcgtccagtattaaagtacttaaaggattagatgccgtaagaaagcgtcctggtatgtatatcggtgatactgatgatggtaccggattacaccacatggttttcgaggtggtcgataactctatcgatgaagcacttgctggacattgttctgagattactgtgctcattcacagcgatggctcagtatctgtgtctgacgatggacgtggtataccaaccgaattgcacccagaagagggtgtgtctgcagctgaagttattatgacggttcttcacgccggcggtaagttcgacgataactcttataaagtatcgggcgggttgcacggtgtaggtgtatcagtagtaaacgcactttcaagccgactgaagcttcgtattcgtcgcggtggtaaagcgcatgaacaagaatatcatcatggtgttccacaggcgccactagcggtaacaggcgatacagacaaaacgggaactatgatccgtttctggccaagttcagacactttacagatacgctttaccactacgatattcttgctaaacgtcttcgtgaactatcatttttga

SEQ ID NO: 295694 - DNA, 617 bp, Unknown
  Bacterial polypeptide expressing nucleotide sequence isolated from the Sargasso Sea
aatgacaaatcctcaaaaaaataattcgaatagagaatataaagcagattctattaaagtcttaaaaggactggatgctgttagaaaaagaccaggaatgtatattggagatacagacgatggttctggattgcatcatatggtttttgaggttgtagataattcaatagatgaagccattgtggggtattgtaaaaatattacagttaccttgcacaaaaatcgatctgtcacagttgaggatgatggaagaggaattccaactgatctgcacaaaggtgaaaaaaaatctgctgctgaggttataatgacacaattacacgctggaggaaaatttgatcaaaattcatataaagtatctggaggactgcatggtgttggtgtctcagtagttaatgcactatctgaaaaacttgaattgacgatatttagggatgaaaaagaacactttatttctttcgaaaatggaaagacagtaaacccaataaaatttttaaaaaaaacaaaaaaatctggcaccaaaattaattttttgccttctgaggatgttttttcatctataaaattcagttcaacaattttacaaaaaaaaatgagagaattggcctttttaaata

SEQ ID NO: 295695 - DNA, 705 bp, Unknown
  Bacterial polypeptide expressing nucleotide sequence isolated from the Sargasso Sea
tatggtcaaaaaaaatacatataaagcaaaagatattgaagttttagaaggtcttgagccagttagaaaaaggccaggaatgtatataggtaatactaatgaagaaggtttgcatcatttagttaacgaagttttggataatagcattgatgaagtagtatcaggtcatgctacagaaatttcatttatttataaaaaagatggatggataataattaaagataatggaaggggcatacctatagattttcatccaaaatttaaaaataaaagagctgttgaaatcgtaatgacaacgttacatgctggaggtaaatttaatactaatgcatacaaaacttcaggtggacttcatggtgttggtatttcagttgtcaatgcactaagcgaatcacttaaggtaaaaatatttaataatgggaaaatatactcacaaaattatagtaagggtaaagttaaatcaaaaattaaaattgaaaagtgttcaaaaaaattaaaggggactgaaatttcttttattccagacaaaggtatctttgaaattatttcttttaatcctggtagattatatcaatttataaaaatgaaggctgttttagtaaaatcaacttccgttatttttaatattgataaggaattaataaaagactccacaccttcaaaagaaatatttttttataaaaaaggaattgaagaatttataga

SEQ ID NO: 295696 - DNA, 1300 bp, Unknown
  Bacterial polypeptide expressing nucleotide sequence isolated from the Sargasso Sea
ttgaagataaaaaaaacaggtaaatctaaaaagttctcaaatagcggcggcctatctagctatgtaaaatttttaaaaggaaggaagcagaatatatctgaaatatttcactgcgaaggtgagcaggatggggtaagtgttgaaatagcccttcagtggaatgatgcatactcagaaaatgttctttgttatacaaacaacattcctcaaaaagatggaggaacccatctctcaggattccgatcaagcctaacaagggttatgaaatcctttataaaaaaggaagagctaaataaaaaatcacctgttgagctactaggtgaagatgttagagaaggcctaaccgcaatagtgtctgtgaaaataccagaccctaaattttcatcacaaacaaaagaaaaacttgtttcttcagaagtggagagtgttgtcagtaatgtttttaataaaaattttaatgattaccttttagagaatccaaaggaggcaatgtcaatcttaacaaaaatatctgaagcagctctcgcaagggaagcagcaagaaaagctagagaaatgacaaggcggaaaggtgttttagaggttgcaggtttgccaggcaaacttgcagattgccaagaaaaagatccagcgctatcagaaatttatatcgtagagggcgattccgctggtggatcagctaaacaaggaagaaatagacaaaaccaagcaatacttccccttaaaggaaaaatcttaaatgttgaaaaagctagattagataaagttttatcttcgcaagaaataggaacacttgtaacagctttaggttgcggcatcggagctgatgagtttgacgctgataagttaagatatcacagaataatcatcatgacagatgctgatgttgacggttcccacataagaaccttgcttttaacatttttcttcaggcaaatgtttgaaattctaaatagagggcatgtttacattgcactaccgcctctatacaaagtttcaaaaggtaaaactattaaatatgcagcctcagaaaaagaaaaggatattgcacttaaagagctgtctaaaaatggcactaggggaattgagatacaaagatataaaggtttaggtgaaatgaatccagatcaactctggacaacaacaatggacccacaaaacagacgaatgatgagagttcgtattgacgacgcaaatgaagcaaataattcttttgaagttctaatgggtgatcaggttgagcctaggagagaatttattgatgaaaacgctctttcagtcgcaaacttagatatttaga

SEQ ID NO: 295697 - DNA, 1015 bp, Unknown
  Bacterial polypeptide expressing nucleotide sequence isolated from the Sargasso Sea
gttagaaagagacctggaatgtatattggagatacatatgatggctctggcttgcatcatatggtttatgaagttgttgataactctatcgatgaagctctagcaggttactgtaaaagtatagaaatagaaattaataccgacggaacaattacagtaaaagatgatggaagaggaattcctgttgatatacataaaggagaaaaaaaatcagcagccgaagttataatgactcaacttcatgccggtggaaaatttgatcatgactcatataaagtttcaggtggtctccacggcgtaggtgtttcagtagttaatgccttatcagaaaaattggaattagagattagcagagatggaaaaaaatattttattgaattcaaaaatggtaatgcaaaagcaccattaaaagttttaggtaaatcaaaaaactccggaactaaaataacttttttaccatccaaagaaattttttcatcaataaaatttagtagcaatatacttcaaaaaagaatgcgtgaacttgcctttttgaataaaggagtaatgatttctatagatgatttaaataaaaaaaaagaaaataaaatagaatataaatttgatggtggtatccttgaatttgtaaattttttagatcaaaaaagagaaaaacttcaaaataaaaatggaaacgatttatttaaaaaacctatttttattgaaggaaaaaaaaataatactgaaatcgaatgttccttgcaatggaatgctggttattcagaggatgtttattcttatacaaataatatataccaaaaagatggaggaactcatttacttggatttagaagcgctttaacaagagtaataaataaatatgctagtgaacacaatttattaaagaaaaataaattaaatatttcaggcgacgacataaaagaagggttgacctgtgtactttcattaaaaatggcagatccaaaattttcttctcaaactaaagataagctagtatcatcagaagtaaggatga

SEQ ID NO: 295698 - DNA, 1942 bp, Unknown
  Bacterial polypeptide expressing nucleotide sequence isolated from the Sargasso Sea
atgaataaaacaaagaaatatgatgcttcttcaatagaagttcttgaaggcctagaaccagttaggagaaggcctggaatgtatattggaggaacagacaactcttcaatgcatcacttattctcggaagttattgataatgctatggatgaagcagttgcaaattttgcatcatttatagaagtaaaggttaaaaaagataatattataactgtttatgataatggaagaggtatacctattgacccacaccctaattttccaaataaatctgctttagaggtaataatgacaactctacatgcaggtggtaaatttagtaataaagtttatcaaacatctggtggtctacatggcgttggtatcagcgtagttaatgcgctttcagaatttgtagatgttgaaatttatagagacaaaaaaatatataatcagaaattttcaaaggggcaccctacttcaaaactaaaggagttaaaaaagaaaactaatagaaaaggaacaaaagttagttttaagcctgatcctgaaatatttggactagataattattttaattgcaaaaaattatatgattttagtaaatctaaagcttatctttttgctggcgttgagattagatggttctgtgaaggtgaaatctcaaaaaaagaaaatattcctgaaaatgatgtatttaaattttcgaatggccttattgatttagtagaaaatgaagttgatgaaaagatgtccttactaactgagatcttttcaggaaatagggaaagagacaaaaataatctatctttcgaatgggcaattaattggtctttaggcaataatacattcttaaattcttactgcaataccgtcccaacacctcagggagggactcatgagcttggattaaaaggtggactcttaaaggcaataaaatcacatggagaaagaacaggagataaagttgcgcaaaaaattaattctgatgatttaagtaaaaatcttataggtgcgatatcagtttttcttcccgatcctaaatttcaaggacaaacaaaagacaaactttcaaataaatcaatccaaaaggttatcgaaaatgccataaaggatagatttgaaactcttttgtctaactcacctcagcaaactgagtcattattacaatatttatattcaataactgaagaaagattaaagaaaaaacaagataaagaaacctctaggaaaagtgcaattaggaaattaagacttcctggcaaactagctgattgttctcaaggaaatagcgaaggtactgaattatttatcgtagaaggtgatagtgccggaggatctgcaaaacaagcaagagatagaaggtttcaagctattctaccacttagagggaaagttctaaatgtagctaattctactaaatccaaaataagagataatcaacaaatatctgatcttatacaagcactgggttgtggatctggagatctttataatgaaaacggcttaagatatgaaaaaataattataatgaccgatgctgatgtggatggtgcacatattgcatcattattaatcactttctttcatgaagaaatccctgaaataatcgatcaaggaaagttattcttggctttacctccgctttacaagatttcacaggggaagaaagttttttatgccaaagatgatcatgatagagatgaaatgattaaaaagcatctcgatgaaacaaaaaaaattgaaataaatagatttaagggtttaggtgaaatgatgcctgctcaactaaaagaaacgactatgttacctggtaacagaacattattaagaatagttaatcccgaagatagaaaaaaagtatcaaaaacagttgtaactaatttaatgggcaataagcctgaattaaggtttgaattcattagagaaaaggctaatctatacgataatattagaaattaat

SEQ ID NO: 295699 - DNA, 1343 bp, Unknown
  Bacterial polypeptide expressing nucleotide sequence isolated from the Sargasso Sea
tatggctgaaaatcaagaaatacgctttgaaaaagagatgcgtaactcatatctgagttatgctatgagcgtgattgtcggaagagcactaccagatgttagagatggtctaaagccggtacatcgccgagtgcttttttcaatgcatgaattaaataattcatggaataaatcatataaaaaatctgcaagaatcgtaggtgacgtaataggtaaatatcatccgcatggtgatacagcagtatatgatacgattgtgagattagctcaaccattttcaatgagacatccattggttgacggtcaggggaactttggatctgtggacggtgactcgcccgcagctatgagatacaccgaagttaggatgtctaaattatcacatgaacttctccaagatattgatagggatacagtagacttttctgccaattatgatggatcagaaaatgaaccaacagtacttccaactcgtattcccaatctattagtaaatggttctacaggtatagcagttggaatggctacaaatatacctcctcataatcttattgaaataattgattcaactatatgtatgattgacaatccaacattaattaatagagagaatcttgatgatttgatttctaaaagtaatttacaagggcctgattttccaactcatggagaaattaaaaacgatggaggaataagaaaagcacttgagactggtagaggttcattcaaaatccgtgctaagcatattatagaaaaaaaagacaatgataaaacatcaattgtctttaaagaacttccttatcaggtcaataaatctaaattgattgaaaatatagctcaacttgtaagggataaaaaaatatctggaattagtaatctaagagatgaatcagatagagaaggaatgaggttagttatagaattgaaaaggggagaacagcatcaggttgtactaagttctctatataaacacactaatgcgcaaatttcatattctgttaatatggtatgtcttgtccaaggtgagccaaagactttaggcatacaagagattctcaatgaatttattaaacaccgcagagaagttattacccgaaggacactttttgatttacataaatctaaaaataaggctaacacacttgaaggcctaggtattgcattaataaacgttgataaaataatcgaattaataaaaatatctaaaactattcaagaggctaaaaataatcttgttcaaaaagaatgggaaattggaaatatagaaaaatacctaggagttattactaaggaaactaaagacttttttccatcagatgataactacggattaaagggaaaaa

SEQ ID NO: 295700 - DNA, 772 bp, Unknown
  Bacterial polypeptide expressing nucleotide sequence isolated from the Sargasso Sea
catgccgggcgtcggctcaaggcaggcaagaagatcgagcgcaagcgcattacccagggggcctgccctgccgggcaagctggcggactgcgtcgggcaggacagcaagcgctcggagctgtttctggtggaaggtgattccgccggcggtagcgcaaagcaggcgcgagacaaggagtttcaggccatcatgccgctgcgcggcaagattctgaatacctgggaagtggaatccagtgaggtgctgggctcgcaggaagtgcacgacattgcggttgccatcggggttgatccgggcgcggccagtctcgagcaactgcgctatggcaagatctgtatcctcgccgacgcggactcggacggcctgcacatcgcgacgttgctgtgtgccttgttcgtccgtcatttccgcccgctggttgaagccggtcatgtttttgtggccatgccgccgctctatcgtatcgacatcggcaaggatgtttactacgcactggatgatgccgaaaagcagggcatcctcgaccgtatcgaagccgagggcaagcgcggcaagattcaggttacgcgcttcaagggcctgggcgaaatgaaccccttgcagctgcgcgaaaccaccatggcgccggaaacccgccgactggtgcagctgaccgtcgatgagacgcaggatacagagcagttgatggacatgctgttggccaaaaagcgctcctccgaccgtaaggtctggctcgagagtaagggcaatctggctgaggtgctgctttga

SEQ ID NO: 295701 - DNA, 2677 bp, Unknown
  Bacterial polypeptide expressing nucleotide sequence isolated from the Sargasso Sea
ctgaaaacgcctaaagagcaatcaattatacccatactaattgatacagaaatgcagaattcatatctggattatgcaatgagtgtgattgtcagcagggcattacctgatgttagagacggactaaagcctgttcatcgcagaatattatatgccatgcatgagtcaggctatgaatggaataaacaacacaggaaaagtgcaagagtagtgggagacgtaatcggtaagtatcaccctcacggagatcaagcagtctacgatgcacttgtaagactagctcaggatttttctatgagcgctacacttattgatggtcagggcaacttcggctcaatggacggagataaagcagcggcaatgcgttacacagaagtgcgcatggcaaagatctcaagttttcttttagaagatattgaaaaaaatacagtagagttcaggcctaattatgatgagacagagagtgagccaacagttctacctgcaaagtatccaaatttattagttaatggagctgggggtatagctgtaggtatggctacaaatatcctgcctcataatttaggagaggttgttgaagcttgtaaggcatttttagaagacgatcaaatttcctttgaaaaaataaatcaaatcattaaggggccagactttccaactggtggaaagataataggaaccagtggcattaaagcttctcaatctacaggaaggggttccatcgtagttcaagccaagtcgatgattgaagagtttaaaaatgaccgtgaagctattatttttactgaaattccttatcaagttaacaaatcagtcttattagaaaaaatagctgaattagtacgagataaaaaaatagaaggtattagtgatttgagagatgagtcagatcgccaaggtgtccgagttgttgttgaattaaaaaaaggtgtcatcgctcaggttatacttaataaactttataagtttacttcattacagagttcttatggggttaattcattagccttaacaaacggtaagccaaaactaatgaacataaaagagttcattcaccattttgtacactttaggaaagacattatttcaaataggacaagatatgatttatctaaagcaagagatcgcgctcacactttaatcgggcttgcaatagcagtagcaaatgttgatagcataatagacataataaaatcctcaaaagatccaaatgaagcaaagacgtctttactgaaaacaaaatggaagacaaaagatataatcgatctactcaaaattgtagatgatcctaggcaggtgaaaaatgataaagaggtttatctcactgaggagcaagctaaagcaatcttagaattaaggcttcaacgccttacggcactaggaaaagatgagataaaagttgaattatcagaattatcaaaaaaaattggctatttcttatctgtactcaaagataacagcgtattgaaaaaggtaattaatgacgaattagattcaattaaagaacagtttgatgttccacgtcgtacagaaataaatgaaggcgaagtatccgaaatcgatcaagaagatttagttcaacgaagcgatatggtcgtaagtgtgactaactctggctacataaaaagagtcccattaaatatgtacagagcccagaaaagaggcggtaagggtagagctggcatgaagactaacgatgaagactttgtgactcaagtttttacagcaagcactcatgacaatatgctcttttttacttctagtggaatagcattcaagctcaaaacttggaaaataccagaatcttctcctcaagcaaaaggcaaagcaattgtaaatctattgaaccttaaagaaaaagataggctttcaagtatcctggtcttgccagaaatgaaaatggacgaagaaagtgattttctagtcttcgctacagcagacggtagtattagaaaaaacagtctagaagattttaaacgcatacaagcaaatggtaaaattgcgatgaagcttgctggcgacaatagcatagttggagtaaaactatgtaccaatgatgatgatatacttcttacaacaaaatatggaaaatgcattaggacacctgttacaaaacttagaactacaaaaagtaggacatcaacgggtgtaagaggtattaagttagtcaagggagatgaaattatttctatttcagttatttcgcacacagatacgacttcaggtgagtccaaagcttttttgaaaatgcgttctaaagaaaaagataatgacgatcatatcgatagtgacgacagtgagagtgatgtttctgaagcggaagtaaagttaagcaatgaacgatacgatgaaatgaaggctaaagaacagtttatattaacgctcacagaaaacggttttggaaaacgctcttcttcatatcaatttagaatatcgaacaggggcggatcaggtattatgtgtatcgctacatctgatagaaacggaaatgtcctggcatcgttccctgtcaacgatgacgatgacgtgatgctaattactaaatctggacaagttattcgctgtcctgttaaagacgttagggtagcaggaagaaatacgcagggcgttagcatatttaaaactaatgataatgaaaaagttgtttcagcatcgagagttgaaatagataattaat

SEQ ID NO: 295702 - DNA, 477 bp, Unknown
  Bacterial polypeptide expressing nucleotide sequence isolated from the Sargasso Sea
gatgaaattaggtatcgaagtagcaatgtggtggaatgatagttaccacgaaaatgtcctcccttttacaaataatattcctcaaagagatgggggagctcatactgcaggtttccgaggggcacttactaggacaatcaatagttatgcacaagcaagcggtattgcaaaaaaagaaaaggtaaactttactggtgacgacgcgcgagaaggtttaacatgcgtgttgtctgtgaaagttccagatccaaagttttcaagccaaactaaggataagttagtaagctctgaggtaagaccagcagtagaaagcttgatgaatgaaaaattaggtgaatggtttgaagaaaatcccaacgaagcaaaacttatagttggaaagattattgaagcagctcttgctcgagaagctgcaagaaaagcacgagaactaactcgtaggaaaacagctttagatgtaaactatcttgcaggaaa

SEQ ID NO: 295703 - DNA, 238 bp, Unknown
  Bacterial polypeptide expressing nucleotide sequence isolated from the Sargasso Sea
atggttgatataaacagagataataccctcccaagagatattgtagatgaaatgagagagagttatttaaactactctatgtctgtaatcgtgtcaagggctctcccagatgttcgagatggtttaaaacctgtacataggcgaattttatatggaatgagtgagctgggttcatcttggaatcgtccatataaaaaatcagcaagaattgtcggtgatgttttaggtaaatatcacc

SEQ ID NO: 295704 - DNA, 1114 bp, Unknown
  Bacterial polypeptide expressing nucleotide sequence isolated from the Sargasso Sea
tttgttacacaaacaacatacctcaaaaagacggcggaacacatctttcaggatttcgatcaagtttaacaagagtaatgaaaacatttatcagaaaggaagaataaataagaaatcgcctgttgagttacttggtgaagatgttagagaaggcttaacagcaatagtttcagtgaaaatacctgatcctaaattctcatcacaaacaaaagaaaaacttgtttcctcagaggttgagagtgttgttagcaacgtttttaataagaattttaatgaataccttttagaaaatccgaaggaagcaatgtcaattttaacaaaaatatctgaagcagctttagctagggaggcagcaagaaaagctagagaaatgacaagaaggaaaggggttttagaggttgcaggtctgccaggaaaattagcagattgccaagaaaaagaccctgcactctcggagatatatatcgttgagggtgattccgcaggtggatcagctaaacaaggaagaaatagacaaaatcaagcaatattacctttaaagggaaaaattttgaatgttgaaaaagctagattagataaagttttatcttcccaagaaataggaacgcttgtaacagctttaggttgtggaattggaacagatgagttcgacgctgataaattaagataccacagaataattataatgactgatgctgatgttgatggctcccacataagaactttgcttttaacattcttctttaggcaaatgttcgaaattttaaatagaggacatgtttatattgcattaccccccttatacaaagtttcaaaaggaaaaaatattaaatatgcagcttcagaaaaggaaaaggatattgctttaaaagaattatccaaaacaggtaatagaggaattgaaatacaaagatataaaggtttaggtgaaatgaatccagatcaactctggactacaacaatggatcctcaaaatagaagaatgatgagggttcgaattgacgatgccaatgaagctaataactctttcgaggttttaatgggtgaccaagttgagcctagaagagagtttattgatgaaaacgccctttctgttgcaaatttagatatttag

SEQ ID NO: 295705 - DNA, 1565 bp, Unknown
  Bacterial polypeptide expressing nucleotide sequence isolated from the Sargasso Sea
ggagagaaagtcagcgcggtggaggtgatcctcacgcggctgcatgccgggggaaaattttctgacaagtcctatacctactcgggtggtttgcatggtgtgggggtatccgttgtcaacgcgctctccaagaaacttgaggtgagtgtcaagcgcggcggtcaggagtaccagatgacctttcgcgatggcgtaccgatcgccccgctcaaggctgtacgcaagatcggcgcacgcaactccggaaccatggtgcagttctggcccgacccggtgttttttgattccccgggcatttctgttgcgcgactgaagcgtcttttgcgggcgaaggccgtgttatgtcccgggcttcggattgatttcaaggacgaggactccaaggacaataacgaaacctgggagtacgaggacggcctgtcggactacctctcatcccaagtcgatgccgcggaaagggtgcccgatccgcctttcgtgggccacattgcccagcaggaacagcagttggattgggcgataagttggcttgaagatgatggagaggtcttcgccgagagttacgtcaacctcattcctacgcctcagggaggcagtcatgtcagcgggtttcgcaccggattaacagacgccgtccgggaattttgcgactaccgcaatctgcttccccgaggcgtgaagctgtctcccgaggatgtgtggcagcgctgtgcgtttgttttatcgctgcgcatgaaggatcctcaattcagtgggcaaacgaaagatcgcctgtcgtcgcgggaagcagcatccttgaccgcggcggcagtcaaggatgctttcagcttgtggttgaatcaaaatgcagccgaaggggagcgtattgcggccctcgccatcagcagtgcgcagtcacggcttcgtacggcccgccaggtagagcgtaaaaaggcggctaccggtccgacgttgccgggcaaactcgccgattgtgcgagccaggatcttgagcatactgaactcttcctcgtagagggcgactccgcggggggttccgccaagcaggcgcgggacaaggactatcaggcgatcctgcctttgcgggggaaaattctgaatacctgggaggttgagtccgccgaggtcctcgcgtcgcaatcggtgcatgacatcgccgtcgcgctgggcgtagaccccggcactggagattgttcgggtctgcgttatggacgtgtctgcattctggccgatgcggattcggatggcgctcatattgccactttgttgtgcgcgcttttcgttcgtcatttccgtccattggtcgacgcaggccgggtctgtgtttcaatgccgccgctgtatcgtattgatgtgggcaagcatgtgttttatgcgcttgatgatacggaaaaggatgccattctcgacagaatcaaaaaggacaaactgaggggcacggttaacgtccagcgctttaaggggctgggtgagatgaatccggcgcaattgcgtgaaaccactatggatccggattcaaggcgcttgatcgagcttaccctggatcagggaaaaaagacggacgc

SEQ ID NO: 295706 - DNA, 1652 bp, Unknown
  Bacterial polypeptide expressing nucleotide sequence isolated from the Sargasso Sea
tacaattgatagagatggaaaaaaatattatatagaatttaaaaatggtgattcaattaaaccattaaaattagttggaaagtcaaaatttaatggaacagaaataaatttccttccttcaaaagaaattttttcttcaacaaaatttagctttaatatacttcaaaaaagattgagagagcttgcatttcttaataaaggtataaaaataaaaattaacgattattcacaaaaaaaaactaaatctatagagtttaaatttgatggaggaattttagagtttattgatcatttgtgcctaaataaagagcaacttaaaaataaaaatgataaggatttatttaaaaaaccaatatttatcgaaggcaaaaaagataaacttgaaatcgaatgttctttaaaatggaacgcaaattatgctgaagatgtatatccttatacaaataatatttttcagaaggatggtggaacacacttattaggtttcagaagtgcattaacccgtgtaataaataaatatgcaaatgagcaaaatttattaaaaaaaaataagctatctatatcaggagatgatatcaaggaaggtttaacttgtgtattgtcagtaaaaatacctgatccaaaattctcatctcagacaaaggacaaattagtatcatctgaagttagaaatgttgttgaatcaataattaatgaaaaattatctgtttggtttgatcaaaatccatcagtggctaaggtgatacttgcaaagattgtgcaagcagcattagctagagatgttgcgagaaaagctagggaaaatgtaagaagaaaaggagcattagaattaactgggttaccaggtaaattagcagattgtcaaaattcaaagcaggaaggcacagagctatttatcgtagagggagattcagccggaggttcagccaaacaaggtcgtaacagagagtatcaagccgtacttccactaaggggtaaaattttaaatacttataccagcaataatggaaataaaaaaaatggtaatggaaatgatcttaaaacaaaaacactggcgaaactaatatcttcaaatgaaatagtaacattaataaatgcacttggattagatcctaaggatgaagaaatcgattcaaaagatttaagatatggtaaaataataataatgacagatgccgatgttgatggctctcatataagagctcttctattaactttttttaataataaaccatttaataaactaatagagcaaggacatatctttttagcacagcctcctttatataaaataaataagggatctaaaagtatttatataaaagatgatcaagaattagaaaattatattttaaaaaactcaaaagaaattacaaaagttaaaaaaggttcaaaggaatatgaaaaaaaattacaagaagaaaaatcaaaaataagtatacaaagatttaaaggattaggagaaatgaatccagatgagttgtggaatacaactttaaatcctgagactagaaatttattaaaggttgaatattcaaaagatattaaaaaagatagtgatttaattcatacactaatgggaaatgacgtttctcttagaaaggattttattgtagataatgcaataaatgtttcaaacttagatatttaaa

SEQ ID NO: 295707 - DNA, 754 bp, Unknown
  Bacterial polypeptide expressing nucleotide sequence isolated from the Sargasso Sea
gttgagggagactcagcaggtgggtcagctaaacaagggagaaatagagaatatcaagcagtattacctttaagaggaaaaatattaaatacatttactgaaataaatggaagtaaaaaaaatggcaaccaaaatgaccttagaacaaaatcattatcaaaaatgatttcatctaacgaaatagttacactaattaatgctcttggactagatccaaaaacagaagaaatagatttagaagatttgaggtatgggaaaattataattatgactgacgcagatgtagacggttctcatattagagctttacttttgaccttttttaataatattccatttaataaattaatcgaaaaaggtcatgtatatttagctcaaccacctctttttaagataaacaaagggtcaaaaggtatttatatcaaagatgagaaagatcttgaaaattatataattaataattctaaagaactaaagaaaattaagaaaaattcaaaagaatttgaaaaaattattcaacaagaaaaatctaaactaaatattcaaagatttaaaggtttaggagaaatgaatcctgaagaattatggaatacaacacttaacccggaaactagaaatcttcttcaagttcagtactcaaagaatctacaaaaagatcaaaacctaatacaaaccttgatgggtaatgatgtggcatctagaaaagattttattgtagataatgcaataaatgtcgttaatttagatatttaat

SEQ ID NO: 295708 - DNA, 1087 bp, Unknown
  Bacterial polypeptide expressing nucleotide sequence isolated from the Sargasso Sea
atggaaaaagaaaaattaatccccataaaaattgaagatgaaatgaaatcagcctacattgattattcgatgtcggttattgtttcaagagctttaccagatgttagggatggtcttaagccggttcataggagagttctttttggtatgaatgaaatgggtgtaagatcttcttctgcttataaaaagtctgcaagaattgtgggagatgttatgggtaaatatcatcctcatggagatagttctgtttatgacactatggttagaatggcccaagaatggtcacttagatatattctagttgatggacaaggtaactttggttctgtcgatggagatagtccagctgcaatgaggtataccgaagcaagaatgcaaaaaatatctgaagaacttttatcagatattgataaagaaactgtagactttcaattaaactttgatgatacgattttggagcctactgttcttccaacgagagttccagctttactaataaatggtgcatcaggtatagctgtaggtatggctactaacatgccccctcataatttgtctgaggttattgatggtattatacagtatatagacaataatgatatatctattgacgaacttattcaatacgtcaaagcgccagattttccaactggtggaacaatttatggttatgatggcgtaaaagaagcatttcatactggtaaaggtagaatagtcatgaggggtaaagcaattattgagaatgttaatgacagagaatgtataattgtttctgagattccatatctggtaaataaagctgaaatgataagaaaaacagctgaactaataaatgatggaaaaattgaaggaatctcaactatcagagatgaatcagatagaaaaggtatgagaattgtatatgtccttaaaagagatgcaattccgaatatagttctgaataaattgtataaattcactccgttacagtcttctttcagtgttaataatgttgctctagttgatggtagacctcagcttttaaacttaaaggatttaattcatcattttgtaaatcataggcatgatgtagtggtcaaaagaacaa

SEQ ID NO: 295709 - DNA, 1279 bp, Unknown
  Bacterial polypeptide expressing nucleotide sequence isolated from the Sargasso Sea
aaattaacattagaagttcatcgtgatggtggagaatattttcaagagtacaacgaaggcaagccaaaagcaaaattaaaaaaaataaaaaaatcagacaagacaggaacaataataaccttccacccatctaataaaattttcacttcaacagaatttgatatagaaaaaattcataagagaattcaagagttgtcatttttaaatgctggtgtgtcaattaatgttgaggacaagagaacaggtaaatctcgtaaatttaaaaacaatggaggactctctagttatgtaacccacctaagaggaagaaaacaaattgtttctgatatctttgagtgctcggctgaagaaaatgaagttggtgttgagatcgcaatgcaatggacagattcatactcagaaaatgtattatgttacaccaataatataccccaaaaagatggtggcacccatttagctggctttagaggtagcctaacaagggttttaaagtcttttattaagaaagaaaacgctaaaaagtcacccacagaccttcttggagaggatgtaagggaggggctaatagcaataatatctgtaaaagttccagatcctaaattttcatcacaaacaaaagaaaagcttgtttcatctgaggttgagggcgttgttagcaccatttttaataaatatttcaatgaatttcttttagaaaacccaaaagacgcaatgagcatcatttctaaagtatctgaagcagcgttagctagggaggcagcaagaaaagcaagagaaatgactagaagaaagggtgttcttgaaattgccggtcttccaggaaaattagctgattgccaagaaaaagacccagcacagtccgaaatatacattgttgagggtgattcagctggcggctctgcaaaacaaggcaggaatagaaaaaatcaagcaattttacctctaaaaggaaagattctaaatgttgaaaaagcgagaatagataaggttttaggatctcaagaggtaggaacccttataaaagcacttggttgtggtattggggaagaagactttgatataaataacttaagatatcacagaattataataatgacagacgcagacgttgatgggtctcatataagaaccttgttattaacatttttctatagacagatgtatgagatagttgataaaggacatatttatatagcgcttccccctctatataaaattactaaaggaaaagagtttttatatgcttctgatgaaaaagaaaaagataaagcgataaaat

SEQ ID NO: 295710 - DNA, 1772 bp, Unknown
  Bacterial polypeptide expressing nucleotide sequence isolated from the Sargasso Sea
cgcgtagcagaacagcaattaacagacattgacttagacacagtcgattttaaccttaattttgatgattcaatccaagagcctcaagtgttgcctaccaggctaccgacattattaataaatggtgcgtctggtatcgcagtcggaatggcaactagcatgcctcctcataacctatccgaaatatgtgaagcgataaactacgtgattaacaatcccacttgtacaagtgatgaactactgcaaatcgtgccaggtcctgactttccaactgctggaatcataaaaggtagatctggaatagtagatacttacaccactggacggggccggatcgttatggaagcagctactgatattgaggagacccgtaatggtagacagcgaatcatagtgactgaattaccataccaggtcaataaatctagcttggttgagaaaatagcccaactcgttagagacaagaggatacagggtatatctgatatccgagatgagtctgaccgtaaaggaatgcgcatcgtaatcgaactcagaagagatgcacaaccgaatataacccttaacaacctatatagacacacgcaactaagggactctttcaattcgaatatgctggcattggtaaacgggcaacctcaggtattacccctaaaaaggatgattgaactattcattcaacacaggcagcaaatcatccgacgtagatctgaatttctattgcaaaaagcaaaagatagagatcatgttgttcaaggtttgctattagcgttggatcgaatggatgaaataattgcaattatcaggggctcggatgatgtgacctctgcccgtgaaaatctgatgtcaactttaacgctttctgaaattcaagctcaagcaattctagacatgcaattacgccgactagccgcccttgaacggcaaagattagaaaaagaacacgaagaattattagctgaaatcaaagaactagaagaattattaggtgacgaatccaaaattcttgaacaagttaaggtagaaacagacgaaataaacaaacagtttggaaatcctcgtagaaccgtaatccacgatgcagaagtgacaaagcaaacagatgcagatttaatccctcatagcgatgtagtcattactctaagcaaacggggatacataaaaagagtccctgcagatacataccgtacacaacacagaggcgggaaaggtgtccgagggatgtctacacgagatgatgatgaattaatggaaatatatataacagacactcatgatcatatacttctctttaccaaccgcggtcgtgtgtatcctttaagagcattcgatataagcgaagacacttctaggactactagaggcacccaaattataaacttagtaccactagaaagaggagaaaccgtacaaactatcctccctgtaaaagatccaaaagaagactatctaatggtcctggtaactaaacagggtcaagttaaagcgttgagagctggagaattagtcaacattcgcgcaagaggattaattgctatgaacctcaaatctgacgatgaacttgtgggggtccaacaagtcgaagaatccgacgacattataatggtgtcacaaaacggacaagccatgcggttctcaatgtctaacttaagcccacgaagacgaggcgcaggtggagtaagaggtatgagactcttatctaaagatcaagttatatccgtagggaagatcacagaagacagcaaactattgatagtaagttcaggtggcta

SEQ ID NO: 295711 - DNA, 1702 bp, Unknown
  Bacterial polypeptide expressing nucleotide sequence isolated from the Sargasso Sea
atgagtgaaacgatcataccttccgatatcgtcgatgaaatgcgtgattcctatatggaatacgctatgagtgtaattgtaggcagggccctgcccgatgtgcgggacggtttgaaaccggttcatcgcagggtgcttttttcgatgaatgagcagggaaatgattttaacaaacccttccgcaagtcagcacgagtggtcggagatgtgatcggtaaataccatcctcatggagactctgcggcttatgacaccattgtccgcatgacccaggcattttcgatgcgatatcagttggtggatggccagggtaactttggatcggttgatggagattcacccgccgcaatgcgttataccgaagttcggatgaaacggatggcccaggacctgatgatcgacctggacaaggacaccgtcgattttcaaccgaactatgacgattcccaggaagagccaattgtcctgccaacacgggtgccgaatctgttggccaacggatccaccggtattgccgtcggaatggccagcaacattcctccccataatctgacggagttgatgaatgccttcttgtattacattgagcatcgtcatcaggcagatattgcatcattgatggaactcattcctggaccggacttcccgacgggtggaacgatcgttggtaaacagggcatctacgaggcctacactactggacggggggtgatccggatccgtgccaaaacccatactgaaacctccaaggacggaagagagtctctgatcatcaccgaactccctttcatggtcaacaaggccatgctccttgaaaaaatcgcagaactggtccgtcaaaaaaagatcgatggtatttccgacctgcgggatgaatcggatcgaaagggaatgcgtgtttatatccagatcaaacgcggagacaacccagatgtggtcctgagtaatctttataagcacacatcgatgcaaaccagttttgggatcaacatgctggctatagtcgaccgtcagccaaagattctggcgcttccgcaagtcttggaatttttccttcagcatcggattgaagttgtaacccgacggacgcgttatgaattgcagcaggcggaaaaccgcatgcatctgctggaaggcttaatgaccgcattagcaaaccttgatgatgtactggaaatcatccgggcagccgaaagtggagccgtcgcagaaaatgttctcaaagaacgcttcggtctgacctctaagcagggcaaagcaattcttgatatgcggcttcagcgtctaaccggattggaacaggaaaaaatccgtgacgaacataaaacagtgggtgaggccattgcggattataaggacattcttgcaacaccggaaagggtcatcagcatcatccgtgaagagtctgaggaaatccgtgaccgatacggagatgaaagacggaccgagatcattgagggggatcattccatcatgatcgaggaattaatcaatgaagagaacatggtggtgaccatcacccattccggttacatcaaacgaagttctgtcagtgattaccgtcttcagagacgtggtggtaaaggtcggctgggaatgtcaacaaaggacgaggatttcgtcgaaacaatgtttgtggcctcgacccatgattatctgctgtttttcaccgaccggggtcagattttccgcaagaaggtct

SEQ ID NO: 295712 - DNA, 1603 bp, Unknown
  Bacterial polypeptide expressing nucleotide sequence isolated from the Sargasso Sea
tgtttctgtggttatgctctttctgaatggctctgggttgaggtgaaaagggatggtaaggtatacaaacaagactataaaataggtgagccacaagccgacttaaaagcaaccggatcggcaaaaaaaacaggcaccagggtttgtttttaccctgataataaaatatttaaaaccatcacttttgaatatgatattataagcgaaaggcttcgggagttggcatatctaaacaagggcatagaaattcacctaaaagatgagcgcgacgaagaagggagaaatgatgtttttaaatttaaaggcggtttgagcgattttgtaaaatatttagatgagaacaacaacccccttcacaataaagtgattacagtaaataaagatacaaacgatgttccggtggaggttgcgatgcgttatggtaacacttataatgataatattttaacatttgtaaacaacattaacaccattgagggtggtacccacctgtcgggttttaggtccgctcttactagggctatgaacaaccatgcttcaaaaaacaaccttattaaatctaaaaagaatgaaaaaataaacctcacaggtgaggattttagagagggtttaaccgctattattagcgttaaagttgctgaaccccagtttgaaggacaaacaaaaacaaaacttggcaatggggatgttaagggtattgttgataaaatagtttacgagggtattttagattttttagaacaaaacccctctattggaagaagggtgattgaaaaagccttgttagctgcacgcagtaggtctgctgcaagaaaagcccgcgaactaataagaagaaaaagcgcactgggtggatcatcgctgccaggcaaactctctgattgttctaataaagacccggtgttttgtgagctataccttgttgagggagactctgcgggtggttcagccaaacaaggcagggatagaagaacacaagcaatactacccctccgcggtaaggttattaattcagaaaaagcaagggttgataaattactttctaacaacgaagtgcaatcaatgattactgcgcttggcgctggatttggggggtctgaggatgaatcaggtgaaaagtcagctggagactttgactctgaaaaacttcgttatcacaaaataattattatgacagatgcggatgttgatggttcgcacattagaacactactactaactttcttttatagaaaaatgaaagaagttattgatgggggttatttatatctagcccttcccccattatatagagtttctcagggtaaaaaagaatcttatgcatatgatgataatgaaagagatttattaattgagcgtatgcaaaaagacaataaaaataccaaagttagcattcaaagatataaaggccttggtgaaatgaacccagggcaattatgggaaacaactatggacccagaaaaaagaaccttaatgaaggtaacggttgaaagcgcagcagaggccgctgaaacctttcaaaacttaatgggtagcgatgttgaggcgagacgtagttttattgagcgcaacgcaaaatttgttgttaacctagatgtataaa

SEQ ID NO: 295713 - DNA, 1816 bp, Unknown
  Bacterial polypeptide expressing nucleotide sequence isolated from the Sargasso Sea
attttaaagaaaaggctcagagagctgtcgtatctaaattcgggtattgagatttctttaacagatgagagaaactctaaatcagaaatttttaaatccaccggtggtttgattgagtttgttgaatttaaaaataaaaataaatctccgctaaataaaaccttcagattcattaaagaacaatccgacggaatttccattgaagttgcattgcagtggaatgattcttatcaagaaaacattcaatgtttcacaaacaacattcctcaaaaagatggtggaagtcatttgattggatttaggactgcactgacccgaactattaataatttcattgaaaaagaaagcttggctaaaaacgaaacagtccagacttccggtgaggacgtaagagaagggctaacggcaataatttctgcaaaattacctgatccaaaattttcttcccaaactaaagacaaacttgtttcttctgaaattcaaccggttgtagaaaaagaaacttataaacacttaaccgattatctacttgaaaatcctacggatgcaaagtcaatagctacaaaaattattgatgcagctagagcaagagaagctgcgagaaaagccagagaaatgactcgaagaaagggggttctggatggtttgggtttgcccgggaagctttccgattgtcaagaaaaggatccatcagtaagtgaactatatttggttgagggagaatcggcaggagggtcggcaaagcagggcaggaaccgacaaaatcaagcgatattgcctttgaaaggaaaaatattaaatgtagaaaaagctagaattgataaagttttgggctccgatgaaatagttactttgattactgctttgggttgcggaatcaaggaagaatttaatttagaaaaacttagataccactcaataattgtaatgacagatgcagatgtagacggctctcacataagaacacttttacttactttcttttacagacaaatgccagagttgattgaagctggacatatatttattgctcagccacctttgtataaagtttcaaaaggtaagaaagacgtttatcttaaagacgatccagctttaaatgattatctgttagaaaaaatttcggaaagttatgaattaaatctgaccaaaacagtaaaaatgaaatcacaagattttacagatcttttaaaagcgtttaagaatttcgatgaacttacgacaataccagatttgaacatctcgtttgattttttgatgacattattgaaagtaaaaccttttcccaaaagtggatcacaaaaagaagttaaatcctggataactgcttttaataaaatttctgattcaagcagccttaatctagatgaaaaagttaaaaacttggtttcttcgagaaacgagtttggtaactcagtgatcgatttaattccatttagtttttttaaatcaaaaaaatacaagttaattttagatttccaagagagatcaaaaaaaataaaaccaggaataagttcaattcaaaaaaatgaagatgtggaaattatcgatgatttattttttacttttaaatctttgatggaagaagttagaaggggctcaaacatccaacgttacaaaggcttaggagaaatgaatccagatcagttatgggaaactacaatgaatccggtcggcaggagattggttcaggtgaaaattgatgatgccgatgaggccagcgatctctttgagcaattaatgggagataatgtagaaaccaggagagaatttattgaagccaatgtcaatctcgtaagtaatatagatttttaga

SEQ ID NO: 295714 - DNA, 1716 bp, Unknown
  Bacterial polypeptide expressing nucleotide sequence isolated from the Sargasso Sea
ataaaggtgggatatgattggagtaaacctttcagaaagtcatcaagaatagttggagatgtaattggtaaatatcatccgcatggagatcaagcagtttacgatgctttggtgagattagtacaagaattttcaatgagtttacctcttatacaaggtcaaggaaattttggatcaatcgatggtgatccacctgcagcaatgagatatacagaaacaaaactttctaaagttgcacaatttttaacagacggtatagaaaaaaatacaattgattatcgaaacaattatgacgatacagagaaagaaccagttgttcttccatcacattatccaaatttattagttaatggcgccgggggaatagctgttggaatggctacgagtattcctcctcataatttaggcgaagttattaatggaacaatagattttattaaaaataaagatataacgatatctcaactaatgaagcacattcctggaccagatttccctacaggagggattataattggcaaagatataattaaacaaggatataacaaaggaagaggttcatttaaaattagaggtgaaataggcgaagagtcattaaaaaatggtaaaacgcgtttaataataaaatcaataccatatcaagtaaacaaatctatcttaaatgaaaaaattgcagatctttcaagggagaaaaaaatagaaggtgtaagtgacattagagacgagtctaatcgagatggaattagagttgttatagatttaagaaggggagttgaacccgaaacaattaaaagacaattatataaacttacctcaattgagtcttctttcggttttaacactttagcaattgttgatggtagaccaaaagttttgaatctaaaagaatttatttctgaatttgtagatttcagggaaaagactgtaattagaagaataaaatttgatttaaaaaaaactgaagaaagagcacatattcttattggtattgctacagcagttgaaaatattgatgcaataataaaaattattaaatcatcaaaggatactgaaactgctaaaaaaaatcttcttaataaaaaatggactgttaaaaaaagttcaaagctaatatcattaatagaaaaaaaacaatctatttccaaatatcaactaagcaatcaacaagtcgactcaattttagaattaaaattacaaaaattaactgcttttggaataacagaaattgaaactgaaattaaaaaactttcagagcagataatttattttaataaattattaaaatcaaaaaaagaattatttaacttgattattaacgagctagaagaaataaagtcgaaattttcagtaaaaagacgaactaaaattattgatgcagtgcttaattataatattgaagaaactatccaaaaagagtctgttgttataaatattaccaatcaaggttatattaaaaggggatcccttgccgcagttaaaacacagaaaaggggtggaaaagggaaaacgggaattacaacgagagacgaagactttgttgtaagaattctatctggaaattcacatagtcaagtattgtttttttcttcacaaggattggcgtacaaactaaaagcatggaaaatacctaaaggaagtctaaattcaaaaggtaaatcattatttaatttactgcctttaaaaacaaatcagtcaataacctcaacaatgttacta

SEQ ID NO: 295715 - DNA, 1132 bp, Unknown
  Bacterial polypeptide expressing nucleotide sequence isolated from the Sargasso Sea
aaatgttcaatgtttcacaaataacattccccaggtagatggtgggacacatatggctggttttcgaggcggacttactagagcgataaaaacatttattaaaaaagaagacatgatgaagaaaaaagatattgaacttactggtgaagatgtaagagaggggatgatggcagtaatttccttaaaaatgccagacccaaaattctcatctcaaactaaagataagctagtttcatcagaagctagaccagctgtagaaaccttaataaatgattactttatggatttcttgttagcaaacaaacaacaagcaaaagaaattctggggaaaatacttgaggcagcatatgcaagggaagctgctagaaaagctaaagaaatgacaagaaggaagggaattttagatcttggtgggcttccaggcaaattggcagattgccaagagaaggatcctgaaaagtctgaaatatttctcgttgagggagattcagctggcggttctgctaaacaaggtagagatagaagctttcaagcaatacttcctttaaaaggaaaaataatcaatgttcaaaaacaacgcctagataaagtactcgcatcaaatgaaattggcacactaataactgctttgggaactgggatagggcatgatgaatttgatagtgaaaagcttagataccatagaattatttttatgatggatgctgatgttgatggttctcatatcagaacactattgcttaccttttttaataggcacatgcgggatttgatattaaagggacatgtttatatggcgcttcctcctttatataaaattaaaaagggcggcaagactcactatgctaaagacgaagaagaaaaagatgagattttaaaagacataagaaaggatgataatgaaaacgcaagatctcctgaaatacagagatataaaggacttggggagatgaacccagaacaactatgggaaacaacatttgatccaacaaatagaagactagttcaaatcacgattgatgatgtaggagaaactgacgacatttttgaaactttaatgggtgatgaagttaagcctagaagggagttcattgatgagaatgccttacgagcagaaaatgttgacgtttaa

SEQ ID NO: 295716 - DNA, 1384 bp, Unknown
  Bacterial polypeptide expressing nucleotide sequence isolated from the Sargasso Sea
aatactcaaaaaaaggaaaaatcaattggttttaaatatgatggaggaattcttgaatttgttgaatttttagatgaaaaaagagaaaaattaaaaaataaaaataataacgaattgtttaaaaaaccaatatttattgatggaaaaaaacaaaatttagatattgaatgttcattaaaatggaatgcaagttatagtgaagatatttatgcttatacgaataatatattccaaaaagatggtggtacacatttattaggttttagaagtgccttgaccagagttgttaataaatatgcagctgaacagaatctacttaagaaaaataaactatcaatttcaggagatgatataaaagaaggattgacatgtgttctatcaataaaaataccagatccaaaattttcatcacaaacaaaggataaacttgtttcttcagaagtaaggaatgcagtagagactattataaatgaaaaactatctgtttggtttgaccaaaatccatcagttataaaaattgtacttgccaaaatagttcaagcagctttggctagagatgttgcaaggaaggccagagagaatgttagaaggaaaggcgctcttgaattaactggtcttccaggtaagcttgcagattgtcaaatatcaactcaagaaggaaccgagttatttattgtagagggagactcggcaggcgggtcagcaaaacaaggaagaaacagagaataccaggctgttttaccgctaagaggtaaaattttaaatacttacactgatagtaatggacataaaaaaaatggaaaagaaaatgaaattaaaacgaaagctttatcaaaattaatctcttcaaacgaaatagtaacattaattaatgctttaggattagacccaaaaattgaaaaaatagaattaaaagatttacgttatggtaaaattattattatgacagatgctgacgttgatggctctcatattagagcgttattactaactttttttaataataaaccatttaatcaactaatagaaaatgggcacatttttcttgctcaaccaccactgtttaagattaacaaaggatctaaaggaatttacatcaaagatgaaaaggaacttgaaaattatattttgaataacaataaagaaataaagaaattaaaaaaaggatccaaagaatatgaaattaaaatctcagaagaaaagtcaaagttaaatttacaaagatttaaaggattaggggaaatgaatcctgatgaactatggaatactactcttaatccagaaacaagaaatttattaaaagtagaatattcaaaaaatataaaaaaagaccatgatttaattcatacattaatgggcaatgatgggcctcaaggaaagactt

SEQ ID NO: 295717 - DNA, 668 bp, Unknown
  Bacterial polypeptide expressing nucleotide sequence isolated from the Sargasso Sea
tgcaggcgggtcagctaagcaaggccgagacagaaaaattcaagcaattcttccactttggggtaaggttataaactcagaaaaagcaagaatagacaaactactttcaaataatgaagtacagtccattataacagcactgggaacaggttttggaggatctgttgatgaggatggtgaaaggtcagcaggagactttgatattgaaaaattaagatatcataaaatcataataatgacagatgcagatgttgacggttcccacataagaacacttttactaacctttttctataggaaaatgaaagaaattattgatggtggatatctatacctcgccctacctccactatatagagtttcgcaaggcaaaaaagaatattatgcttatgatgacaacgaaagagatctaatgatagagagaatgcaaaaagaaaacaaaaacaccaaggttggcttacaaaggtataaaggccttggggaaatgaatcccgggcaattgtgggagaccacaatggacccagaaaccagaaccctgatgcaggtgactgtcgagagcgcagctgaagctgctgaaacctttcaaaacctgatgggtagcgatgtcgaagcaagaagaacttttattgaaaaaaatgcaaaatttgtcgtaaacctcgacgtataaa

SEQ ID NO: 295718 - DNA, 1783 bp, Unknown
  Bacterial polypeptide expressing nucleotide sequence isolated from the Sargasso Sea
ggtcattgtgaccaaatagctatcactttgaatagcgatggatcagttactgtggaagataatggtagagggatacccacagaaattcatcctgaagaaaaaatctcagcagcagaagtgataatgacccaacttcatgcaggtggaaagtttgatcaggactcatataaggtgtcgggaggcctacatggagtaggtgtttcagtagttaatgcattgtcttctaaacttcacctcaatatatacagagatcaaaaagagcattttattgaatttaataatggagaggccttaagtcctcttagtataacaaataaaaatataaaaaaaaatggcactaaattaacattttacccagataaaaacattttttcagacactgaatttgactcaaaaattttaaaacaaagatttagagagatggctttcttaaactctaagataactataattttttatgatagtcggaatgcagataaaaaagaaagtaaatttcattacgaggggggtattggtgagttcgttaaataccttgataaatcaaagaaatcactgattgaaaaaccaataagtatagaggggtacaagaacaatattcagtttagttgctctctttggtggaatgatagttattatgagcaaattctcacctttactaataatataagacaaaaagatggcggcactcatttatcaggtttcagagcagcacttacgagagttgttaataattatttagatggtagtaaattttcaaagaaacaatccattagtccaaatagtgatgatattagggagggattaacctcagttttatctgttaaagttcaagatccaaagttttcttcacaaacaaaagacaagcttgtttcttccgaagtaaggccggtggtagagaatttagtcaatgaaaaattgtctgactggtttgaacgacatccaaatatagcaaaagaaattttcctaaaaattcaaaaagctgctgaggcaagagaagcagcaagaaaagctagagaacttacaagaagaaaatctgcacttgaaataacaaacttaccaggaaaactggctgactgtcaggaaaaagatccatcactttcagaaatatttattgtcgagggagattctgctggtggttcagctaaacagggtagagatagaaagtttcaggcaatcttaccattaagaggtaagatacttaatacttggaaatcgagaacagataaaatcctaggctcacaagaaataggaactctaattacagcgcttggaacaggtatagggcctaatgaatttaattctgataagttaagataccataaagttataataatgactgatgctgatgtagatgggtcgcacataagaacacttctgctgactttcttttttaaggaaatgagaggacttattgaaaatggtaatctatatattgcaagaccacctttatttaaaattaaacgaggcaaggaagaactttatataagtgatgaggaaaatctacaaaaatctctaataaaatacggagtcgatgatgcaatctttaagactgcactaggaaatcaattaaaagaagaggagttagtaaaaactcttaataaaattacagaagtcatcgagatttatagtaaggttcctgatagatatgataaaaaagttttagagcaaatcgctatatctggatgtctggatgtcaataagtttttaggttcaaaagaaaaaacaaaagacgctattaattatatttcaaaaaggattaatataagtaggccagattacgaca

SEQ ID NO: 295719 - DNA, 1289 bp, Unknown
  Bacterial polypeptide expressing nucleotide sequence isolated from the Sargasso Sea
taaaaaagaaagtatagaaatagaatgttctttgaaatggaatggtagctatagtgaagatatatattcttttacaaataacatttttcagaaagatggaggtactcaccttttaggatttagaagctctcttacaagagtcattaataaatatgcaacagaaaacaatcttattaaaaaaaacaaggtttcaatttctggagatgatattaaagaaggtttaacttgcgttttatcaattaaaattcctgatccaaaattttcttctcaaacaaaagataaactagtatcctccgaagttaggcccgttgttgaaaacattgttaatgaaaaattatctatttggtttgatcaaaatccttcaatagctaaaattattttagctaaaataattcaagcagctgtcgcaagagatgttgcaagaaaagcaagagaaaatgtaagaagaaaaggagctcttgaattaagtggtttgcctggaaaattagcagattgccaaatatcaaaacaagaaggaactgagttgttcatagttgagggagattccgcgggtggttcagctaaacaaggaagaaacagagagtatcaagccgtgctacctttaagaggaaaaattttaaatacatatgtagaaacaaaaaatggacataacaaaaatggaaatggaactgaagcaaaaaccaaatctttatcaaaaatgatttcttcaaatgaaattgttactttaattaatgcattaggattggatcccaaagtagaagagattgatttaaaagacttaagatatagtaaaataattattatgacagacgcagatgttgatggatctcatattagagctttattattaactttttttaacaataaacctttcaataagctcatagagaatggacatatatatcttgctcagccacccttgtataaaataaacaaaggatcaaaagcaacttatataaaagacgataaacaactagaaaattatattttaaaaaattctaaagatcttgccaaactaaaaaaaggatcaaaagattttgtaaaaatttttgaaattgaaaaatctaaattaaatatacagagatttaaaggcttaggggaaatgaatccagaagaattatggagcacaaccctaaatcctgaaacaagaaatttgctacaagtagaatattctaagaatatcaaaaaagatcaagaaatcctgcatacccttatgggaaatgatgttgcggcaagaaaagattttattatagaaaatgcaattaatgttttaaatttagacatttaaa

SEQ ID NO: 295720 - DNA, 1228 bp, Unknown
  Bacterial polypeptide expressing nucleotide sequence isolated from the Sargasso Sea
ggagttttcaattaatgttgaagataaaaaatcaggcaagtcaaaaaaattcaaaaataatggaggactatccagttacgtcactcacttaagaggaagaaagcaaacagtctctgatatttttgaatgttcagcaactgataatgatgttggtgttgagatcgctatgcaatggacagactcttatactgaaaatgttttgtgctacacaaataatatacctcaaaaagatggcggaacacatttagctggatttagaggaagtcttacaagggtgctgaaatcttttattaaaaaagagaatgcaaaaaaaactcctacagatttgcttggagaagatgttcgtgaaggtttaatagcaataatatctgtaaaagtgcctgatcctaagttttcatcgcaaaccaaagaaaaactagtgtcttcagaggttgagggagttgttagcaccatatttagtaagtattttaatgaatttttgcttgaaaaccctaaagatgccatgagtattgttagcaaagtatctgaggctgcccttgctagagaggcagcaagaaaagcaagagaaatgacaaggagaaagggagttcttgaaatagctggattgcctggaaagttagcggattgtcaagaaaaagaccctagcttgtcagagatatatatagttgagggtgattctgctggtggttcagcaaaacaaggaagaaacagaaaaaatcaggcaatattgccacttaaaggtaagataataaatgttgaaaaagccagaattgataaagttttgggttcccaagaagttggcacacttataaaagccttaggttgtggaattggtaaagaggattttgatatagataatctaagatatcatcgaataattattatgacagatgctgatgttgatggttctcatataagaactcttctgctaacctttttttacagacaaatgtatgaaatagtagaaaagggccatgtttatattgctttgccgcccctatataagataactaaaggtaaagaatttatatatgcctctgatgagaaagaaaaagatgatgccattaaaaaattctcaaaaaatggtaatagaggtatagaagttcaaagatataaaggattaggtgagatgaaccctgaacagttgtggacaaccacaatggatcccataaacagaagaatgatgagagtagatattaaagacatacaggatgcaaatgagtcattg

SEQ ID NO: 295721 - DNA, 1102 bp, Unknown
  Bacterial polypeptide expressing nucleotide sequence isolated from the Sargasso Sea
tttgatattttatctaaaagattaagagagctttcattcttaaactcggggctaagcattaagcttgctgatacaaggtctggaaaagaagaagagttttactttgaaggcgggatcagtgcatttgtatctcatctaaacaaagttcaaagtcccgtacatgagtctgtcatcaatttcagcaagacaattaatgatataaccgtagacatcgccatacagtggaatgagtcttacagagaaaacatgtactgttttgcaaacacaataaggcaaaaagacggtggaacgcacttagctggttttaggggcgctctaacaagaacaataaatacatatattgacaaagaaattgtaaaggccgacacatctgtttctggagaagactgcagagagggtatgacagctataatttctgttaaacacccagatcccaagttttcatcacaaaccaaagataagctggtctcttcagaggttaaaggcgtagttgaatcagtagttaataaacaccttaaggagtttttaatagaaaaccccaacgaagcaaaaattataattaacaaaatagttgactccgccgcagcacgagaagctgcaagaaaggcaagagaaatgacccgtagaaagggggctcttgatatagcaggattgccaggaaagcttgcagattgtcaggaaaaagacccagccttaagcgagctattcattgttgagggtgattctgcaggtggatcagcaaaacaagggagggacagaaaaacacaagcaatccttcctttaaagggaaagatccttaatgttgagaaagcacaaagagccaagatgtattcatctgctgagataggaacccttatcactgcactgggctgtggaatacatgacgaatttgacctagaaaaactcagataccataaaataatcatcatgactgacgctgatgttgatggctctcatattagaactctgttacttacatttttttacagagagcttgaagatctaataaaaggtggttatttatacatcgctcaacctcccctttataaacttaaaaaaaggaaaaaaaagaggagtatgtcctttaccgatgaaggactaa

SEQ ID NO: 295722 - DNA, 1195 bp, Unknown
  Bacterial polypeptide expressing nucleotide sequence isolated from the Sargasso Sea
agtcgagggtgactctgcagggggctctgctaaacaaggtcgagatagagtaactcaagctatacttccacttagaggtaaaatattaaacgtgattaaggctaatcctcataaaatattagaaaataatgaaatttctgctcttatcactgcaattggtgctggatatggaaatccaccaaaggacaaagaatataaccaatctgattattttaaccctgactcaatgcgttatcacaagattgttattatgacagatgccgatgtcgacggtagtcatattagaacgttattactcacatttttttatcaatttatgagagatatcataaccactggacggttgtatattgctcaacctcctctttataaggttaaaaaaggaaatgcggaaaattatttattagatgataaggaacttacaaagtttttacttttaaataataaagacgatcttgactttaacatttacaataaaaagaaaaaaatccaactaaaagaggagcagttaaatgaattaattgatttagcctctcgagcaaactctgcttatcaaaatttagatcttacatatttagacacacaattctttgatcaaatcattaatactggattatttttcttggattttcctccaaacaaaattgaaaagtctcaatttaaaacttttctctccaatttgaatcaggtttataaatcacaaaatattaaatttacatttcaaagtatgattagtaatgaacttgtttttttacaagagaaagagggctataataaaattataaaagttcccttagataaattactacatttaagagagttcatttctatagaaaatttaaacctttataacaaaatgggtttttcaagatctactgatgcttattttgggatatctaagctatcatcaaaagaaaactttaattgcaatggacttgttgaattttttaatactctctttgagatgagtaaaaaaggtcaatcaataagtcgatacaagggcttaggtgaaatgaaccctgagcaattatgggagacaactttagatcgaacaaatagaaagttgcttcaggttaaacttgaagatcaaattaatgctgaaagacaactcatcatgcttatgggagatgatgtgactgatagaaaaagttttattcaagaaaattcagtcaaagtagcaaacttagatatttag

SEQ ID NO: 295723 - DNA, 1138 bp, Unknown
  Bacterial polypeptide expressing nucleotide sequence isolated from the Sargasso Sea
tgtggagggagactcagcgggtggatctgcaaaacagggaagagatagaaagtttcaggcaatattgcctctcagaggcaagattcttaatacttggaagtctagaacagataaaattttaggatcacaagaaataggtactctgataactgcactcggaacaggcataggaccgaatgaatttgattctgacaaattgagatatcataaagtaattattatgacggatgctgatgttgacggctctcacattagaacacttttactaacattcttttttaaggaaatgagaggactgattgagaatggcaacctatatatagcaaggccacctttatttaaaataaaaagaggaaaagaagaactgtacataagtgatgaaaataatcttcaaagatctctaataaaatatggtgctgaggacgtaacatttaaaaccgctcaaggtaggaatttaaatgaaaaaaatttggtagatattttaaataaaatttctgaagttattgaaatttataataaagtgcctgatagatatgataaaaaagttttagagcaaattgccattgcaggatgtctagacataaataaatttattgagtcaaaagagaagactaaagaagcaatcaattatatcactaaaagagttaatgtcagtcgacctgattatgatagaggttggaaaggcgagtattcgaaagaaaaaggatttatatttaggcgtgagttaagaggtttaagagataatataattattgataataagcttcttaaatctcaaataatacagaatcttaattctagttacgcagatctctatcaattatttgaaatgcctggtgaattattaattaaaaatgagacaacaaaggtttattcaccgtctcaacttttaggaataattttagacattggtaaaaagggcttatcaatgcagagatataagggtttgggagaaatgaatcctgatcaactttgggaaaccactcttgacccacaaaatagatcattgatacaggttaaaattgacgatgaagagtcaacaaagggtgtatttgaagatctaatgggtgagaatgttctgccgcgcaaggaatttatcgaaagtagagctgataaagtagttaacctagacatctag

SEQ ID NO: 295724 - DNA, 1861 bp, Unknown
  Bacterial polypeptide expressing nucleotide sequence isolated from the Sargasso Sea
ttttcgcttcatcttccgttagttgatgggcagggaaacttcggatctgtcgatggcgatccaccggctgcaatgaggtatacagaagtaaggatggaaaaaattgcacatcaccttctcaatgacatcaatctagatacagtagattttcaggaaaactatgataattctgaaagtgaacctattgttctacctgccgaatttccaaatctacttgtaaatggtgctggcggaattgctgtaggtatggctacaaatattccccctcataatttaaacgaaattacagaagcatgtatgtttatgattgataatcctgaaactaatgatcaggaaatggatcaaagattatgtgaaattgttccaggtcctgattttccaacaggaggaataattctaggaaaaaacggtgctagaagcgcttatacaactggtagaggttcagtggtaattagagctaaagtagaaattgaagaaatacgtaaggacagagaggcactaattgttacagaaataccatatcagttaaataaggtattactaatccaaaagattgctgatttagttagaagcaaaacaattgaaggtatatctgatttaagagatgaaagcgatcgtcatggaatgcgtatagttatagaactaaagcgtgactcagttgcagaggtaattttaaatcaactttataaatttactcaacttcaaacttcttttggcgcaaacatggttgctttagataaaggaactcctaaatcaatgaaactaagggaaatgcttacctgttttattgattttagagaagaagttgtaacacgaagattaaaatttaaattaaacaaagctagagatagagctcatcttttggttggtcttgctattgcagtttcaaatatagatgaaattataaaacttatcagatcttctaaatcacctgctgaggcaagagaggatttaatggaccgtgaatggcctgccaaagatgttaaatcacttataaaactaattgatgatccaaggcatggtattacagctaagggtaattgttcatttactgaagaacaggctagagcaattttagaattaagacttcaaagattaactgcaatgggtattgacgaaatcaaatcagaattagatgagttaaaaggaacaatagaagatttactatcaactcttggtgataagagaaaaatttatgacatcattaaagatgaattaacttatgttaaagacaactttgccgttgaaagaagaacagaaatccttggagaattagatgatgttgaagatgaagatttaataaagaaagaagatatggctgttactgttaccagatcaggctatatcaagcgcgtacctttatcaacttatcgagcccaaaataggggcggtaaaggtagggcaggaatgcaaacaaaagatgatgactttgtaaggcatatttttatttctaatactcatcaaccaattttattcttctcgtcaaaaggaatggtttacagattaaagacatggaaattaccactttctagccctcaagcaaaaggaaaggcaatggttaatcttcttccattggatgaagacgagagaataacaacagtaatgtctctgccggaaaatcaagatgagtgggaaaatctatatgtaatattcgctacttcctctggtggcataagaagaaattcattagcagatttttggcgtattaataaaaatggtaaaattgccatgaagttagactctaaagaaagaattatttctgttcaaacatgtacagaagataacgacatacttttagcaagtaagaaaggccaaagcattaggtttaatgtagataaagttagagtatttgcatctagat

SEQ ID NO: 295725 - DNA, 1120 bp, Unknown
  Bacterial polypeptide expressing nucleotide sequence isolated from the Sargasso Sea
aaacaaaaagaaagctagtaaaaaaacaaaagagaaaaaggattatggtgcagagtccattaaggttcttaagggtttagaggcagtaagaaaaagacctggaatgtatattggcgatactgatgatggcactggccttcatcatatggtttatgaggttgttgataattctgttgacgaggctttagctggtcattgtaaaatgatttcggttattttgaatgctgatgaatcagtcactgttaaggatgatggtcgaggaatacctactgagatacataaggaagagggtatttctgctgcagaggttatcatgacacaattacatgcaggaggtaaatttgaccaaaattcatataaggtttccggaggtcttcatggtgttggggtatcagttgtcaatgcattatcagaaaaattagatctaacaattaaaagaaatggaaaagaacatgcaatgtcttttgcaaatggagaagcctcgaaagcccttaaggcagtaaaagattgtaaagatgaaacaggaacagaaattactttttatccatcaaaatcagtttttactatgacagaatttagtcgcagaactttagaaacaagattgagagaaatggcttttttaaattctggtatttccattcatttggaagataaaagaaaagatgaaccttgggtcaaaactatgtcttatgaaggaggattagaggaatatgttaggcatattgatcaaacaagaaaatctctaatggaagtcccaataagttttactggtaaaaaagatgaaatagaggttgatgtatcaatgtggtggaatgacagttattacgaaactgtaaattgttttacaaataatattcctcaaaaagacggcggcactcacttagccggattaaggtcagcattaacacgagtcgtaaattcatatgctcaagaatcaggcttaacaaaaaaagaaaatgttcaacttgttggagaagatattagagaaggtttcacatgcgttttatcagtaaaagttgccgacccaaaattttcaagtcaaacaaaagataaattggtatcatctgaggttaggcctgttgttgaaagtttaattaatgatcttttatctaattggttt

SEQ ID NO: 295726 - DNA, 886 bp, Unknown
  Bacterial polypeptide expressing nucleotide sequence isolated from the Sargasso Sea
aagagaactcagttcgagagctgtttcaggttttgttacaggcctcattaaagatgctttcacgctttggttgaatcaacatcctgaagcaggagatcaaattgtcgcaagggcaattgagaacgctcaaaaaagagccaagaagaatataaaggtaaaacgaaagaaggccacaggcggaccaacattgcctggcaaactcgcagactgtacgagcgacgagcctgatctttgtgaattatttatagttgaaggtgattctgctggtggatctgcaaagcaagccagagatagagtctttcaagcaattcttccacttcgaggaaaaattcttaatagttgggaagtcgatgagagcaatctactttcttctcaagaaatcagcaatatctctcaggcactaggtgttgagcctggggccgatgagcttggtaatcttagataccataaaatttgtatacttgcagatgctgattcggatggactccatatcgcaacattgatttgcgccctgtttttgaaacattttagaaaattggtcgaaaatggtcatgtctatgtatcaatgccacctttgtatcgaatcgatgttggaaaagaggtgcattatgcgcttgatgagactgagaaggattcgattttaaaggcattagaaaaaaagaagccaaatacgaaaacaaccgttactcgctttaaaggtctgggtgaaatgagtccagttcaattgagagaaacaaccatgcttcaagattctaggaggcttgtgaagctgaccattgataatgcatcatatacagaagagcttatggataaattgatggcaaaaaaacgctatacagatcgaaaagaatggcttgaagaaaagggcaatctggcagagatataa

SEQ ID NO: 295727 - DNA, 1003 bp, Unknown
  Bacterial polypeptide expressing nucleotide sequence isolated from the Sargasso Sea
aataaaaattatagcgcagaaaacataaaagtattagaggggctagaggcggttagaaagcgccccgctatgtatattggtgatgttggaaagcgcggattacaccaccttgtttatgaggttgttgataattcaatcgatgaagcgctagcaggttattgtacaaaagtggcagtggtttttaataaagatggatcggtaacagtggaggataatgggcgcggaattccagttgatattcacaaagaagaaaaaaaaccagcggttgaggttgttatgacggtgcttcatgctggtgggaagtttgataaagggtcttataaggtttcaggggggttgcacggcgttggtgtttctgtagttaatgctctttctgagtggctctgggttgaggtgaaaagagatggtaaggtatacaaacaagactataaaataggtgagccacaagccgacttaaaagcaactggatcggcaaaaaaaacaggcaccaaggtttgtttttaccctgataataaaatatttaaaaccatcacttttgaatatgatattataagcgaaaggcttcgggagttggcatatctaaacaaaggtatagaaattcacctaaaagatgagcgcgacgaagaagggagaaatgatgtttttaaatttaaaggtggtctgagcgattttgttaaatatttagacgagaataacaacccccttcacaataaagtgattacagtaaataaagacacaaacgatgttccagtggaggttgcgatgcgctatggtaacacctataatgataatattttaacattcgtaaacaacattaacaccattgagggtggtacccacctgtcgggttttaggtctgctcttactagggccatgaacaaccatgcttcaaaaaataaccttattaaatctaaaaagaatgaaaaaataaacctcacaggtgaggattttagagagggtttaaccgctattattagcgttaaggttgctgaacctcagtttg

SEQ ID NO: 295728 - DNA, 1042 bp, Unknown
  Bacterial polypeptide expressing nucleotide sequence isolated from the Sargasso Sea
tcctaaattttcatctcaaactaaagataagcttgtatcttcagaggtgcgaatgatagttgaaaatatcgttaacgaaaaactttctatatggtttgatcaaaatccaaatattgctaaaattattttagcaaagattattcaagctgcgctagcccgagatgttgctcgaaaagcaagagaaagcgttagaaggaaaggtgctcttgaattaagtggacttcctggaaaattagccgattgtcaaattggtaaacaagagggaacggaactatttattgtagagggagactcagctggtggatcagcaaaacaaggcagaaacagagctaatcaagctgtactgcctttgagaggaaaaatcctcaatacatacgtagatgcaaacgatggtaagaaaaatggcaatagtaataatggttcagatcatagaacaaaagctttatcaaaaatgatttcgtcaaatgaaattttgacattgataaatgctttaggattagatccaaaatctcaagaaatagatttaaaagatctaagatatggtaaagttataattatgacggatgcagatgttgacggatcacacataagagctttattattaaccttttttaataacaaaccatttaataaacttattgaaaatgggcatgtttatttagcacagccaccattatttaaaattaataaaggatctaaaggaatttatatcaaagacgaaaaagagcttgaacaatatattattaataacagtaaagattttaaaaaaatcaaaaagggatcaaaagaatttgatagatttatggagtctgaaaagtcgaaattaaacattcaaagatttaaaggtttgggagaaatgaatccagaggaattatggagtacaacattaaatccagatacaagaaacttattgcaagttcagtactcaaaagatttaaaaaaagatcaagtcttgattcatacacttatgggaaatgatgtttctttaaggaaagactttatagtatctaacgcaataaatgtacaaaatttagatgtttaa

SEQ ID NO: 295729 - DNA, 694 bp, Unknown
  Bacterial polypeptide expressing nucleotide sequence isolated from the Sargasso Sea
ttatctgattgttcagagcaagatccagctttatgtgaaattttcttggttgagggtgactctgctggtggtactgcaaagcaaggtagggatagaaattttcaggcaattcttccactaagaggaaaaattttaaatgttgaaaaagcaatgcaacataaagtttttgaaaatcaagaaattatcaatatttatacagctcttggagtaacagttggtactgaggaggatagtaaagctttgaatcttgaaaagttaagatatcacaagattgttataatgtgtgatgcagatgttgatggaagtcatatttccactttaatcttaacatttttctttcgatatatgagagaattaattgaaagtggacatgtttacatagctacccctccattatatctggttaaaaaagcttctaaaaaggaatatgcttggtctgatcatgatagagataagcttatggaagattttggaactggaagctctgttcaaaggtataagggattgggtgaaatgaatgcaattcagctttgggaaacaacaatgaatccagattctagaacttttagaaaggtaacaatagataatgctggagaagcagacagagtattttcaatgttgatgggggatgaggttcctccaagaagagattttattgaaagaaatgctacttacgccaatatcgatgcttaat

SEQ ID NO: 295730 - DNA, 538 bp, Unknown
  Bacterial polypeptide expressing nucleotide sequence isolated from the Sargasso Sea
ataagttttatcttcccagaaataggaacgcttgtaacagctttaggttgtggaattggaacagatgagttcgacgctgataaattaagataccacagaataattataatgactgatgctgatgttgatggctcccacataagaactttgcttttaacattcttcttcaggcaaatgtttgaaatactaaatagaggacatgtttatattgcattaccgcccttatacaaagtttcaaaaggaaaaaatattaaatatgcagcttcagaaaaggaaaaggatgttgctttaaaagaattatctaaaacaggtaataggggaattgaaatacaaagatataaaggtttgggtgaaatgaatccggatcaactctggactacaacaatggatcctcaaaatagaagaatgatgagggttcgaattgacgatgccaatgaggctaataactctttcgaggttctaatgggtgaccaagttgagcccagaagagagtttattgatgaaaacgccctttctgttgcaaatttagatatttagt

SEQ ID NO: 295731 - DNA, 987 bp, Unknown
  Bacterial polypeptide expressing nucleotide sequence isolated from the Sargasso Sea
tacttggtgaagatgttagagagggattaacagcaatagtttcagtgaaaatacctgatcctaaattctcatcacaaacaaaagaaaaactcgtttcctcagaggttgagagtgttgttagcaatgtttttaataagaattttaatgaataccttttagaaaaccctaaggaagcaatgtcaattttaacaaaaatatctgaagctgctttagctagggaggcagcaagaaaagctagagaaatgactagaaggaaaggggttttagaggtcgcaggtttaccaggaaaattagcagattgccaagaaaaagaccctgcgctgtcagagatatatatcgttgagggtgattctgcaggtggatcagctaaacaaggaagaaatagacaaaatcaagcaatacttcctctaaaagggaaaattttgaatgttgaaaaagctagattagataaagttttatcttcccaagaaataggaacgcttgtaacagctttaggttgtggaattggaacagatgagttcgatgctgataaattaagatatcacagaataattataatgactgatgctgatgttgacggctcccacataagaactttgcttttaacattcttctttaggcaaatgttcgaaatactaaatagaggacatgtttatattgcattaccgcccttatacaaagtttcaaaaggaaaaaatattaaatatgcagcttcagaaaaggaaaaggatgttgctttaaaagaattatctaaaacaggcaataggggaattgaaatacaaagatataaaggtttgggtgaaatgaatccggaccaactctggactacaacaatggatcctcaaaatagaagaatgatgagggttcgaattgacgatgccaatgaggctaataactctttcgaggttctaatgggtgaccaagttgagcccagaagagagtttattgatgaaaacgccctttctgttgcaaatttagatatttagt

SEQ ID NO: 295732 - DNA, 1140 bp, Unknown
  Bacterial polypeptide expressing nucleotide sequence isolated from the Sargasso Sea
agtggaaaaacgaagatgatgtgaacattaagagctttgctaacaacatacatacacttgagggaggcactcacgaagaaggcttaagaacggcgataacaaaagcgattaatgactttgcaaaatcaagaaatcttcactccgatatttcattaactggtgacgacattagagaaggaatcaccggagtgatttccgttagggtaaaagagccccaatttgaaggccagacaaaaaccaagcttggaaatacagaaatgaagtcaaaagtacaggttttagtcaataaagagctgccaaaatggttgtccaagaacacaaaagaaggaagagcaattgtggaaaggtgcgccgttgcagcaaaagcaagaatgagcgctaaaaaagcaagggaacttacaaaaagaaagagtattttagaaacagcagggcttccaggtaagcttgcagactgttcgtctacagatccaattgaaagtgaattatttatagttgaaggagactctgctgcgggaccagcaaaacaggcaagggagtcaaaaacacaggcaatattaccaataagaggaaaaattattaatgtacaaaaagttacagaaaacagagcacttcagaatgaagaaataagctcgcttataaaagcaataggtacaggaataaaagacgaatataaaggagatgaatcaaggtacggcaagataatatttttaacagacgctgatgttgacggagcccacataagaacacttttattaacgtttttctttaaattcatgccaggactaataaaagaaggcaaggtatggattgctgaacccccactttatagagcaaaatcctctggttcaataaactaccttaaagacgacaaatcgttagaagaatttaaaaaagaaaacaaaaataaaaaattcgacataagtagattcaaaggtcttggggagatgaatgcaggagaactatgggacaccgcgatgaacccagatacgagaagtttaataaaagttagtattgccgacggaaaggcagcagaagccaaagccgcaaacatgtttgaagttcttatgggaaatgatgttgcaaagagaaaaacattcattgaacaaaacgcaaaagacgtaagatttttggacgtataat

SEQ ID NO: 295733 - DNA, 973 bp, Unknown
  Bacterial polypeptide expressing nucleotide sequence isolated from the Sargasso Sea
atggaaaaaaacgaaattccaaaaataaataataatattaaaccaatctcaatgtatgatgagatgagctcatcatatctgtcttacgctatgagtgttatagtgagtagggcattaccagatgtcagagatgggttaaaacctgttcacagaagaattatatatgcaatgcataaaggtggatttgattggtctaaacaatttagaaaatctgcaagaattgtaggagatgtaattggtaaatatcatccgcatggcgatcaagcagtttatgatgctctagttagaatggttcaagaattttcaatgagcttacccttagtagatggacaaggtaattttggttctatagatggagaccctcctgcagctatgagatacacagaaacaaaacttgcaaaagtttcgcagtttctaattgatgatatagaaaaaaataccgtgtcctttaaaagtaattacgatgaaacagaacaagaacctgttgtattacctgctcaatatccaaatcttttagttaatggtgctggtggaattgctgttggaatggcgacaagtataccacctcataatttaggtgaggttatagatgggactttagctttaatcaaaaataaagatattaaaataaatgaattaatgaaacacattcctggcccagattttccaactggtggattgattattggaaaagatataattaaacagggttacaaaacaggaagaggatcttttaaaattcgtggagagatttcagtcgagaatttaaaaaatggaaaagatagacttgtagtttcatcaataccttaccaaataaacaaatctaatttaaatgagagaattgcagaattagttagagacaaaaaaattgagggaataagtgatattagagatgagtcgaatagcgaaggtataagagtgtcaattgatcttagaagaaatgttgagcctgaaactgttaaaagacaattgt

SEQ ID NO: 295734 - DNA, 1135 bp, Unknown
  Bacterial polypeptide expressing nucleotide sequence isolated from the Sargasso Sea
ggaaccaataaatttaattggattgatagactctaaaaaaggaacaattagagctaatcattatcatcctcaacaggaacaaaaatgccttttcacaaagggacaaattatagaaatttttcaagatattcttaatccaaatgcacctaaaattacgcaagtagttaatgagggtcagctttcaattattaaaccaaatgttgcacatacaatggtttttacaaaagatacaacatttttaaaccttgtaaggggtgaaagagatcatgaaaattacggaatttctcacacaattagacattggtttgtagatgaaaaagaaagagacatgttaatgagctgttataaatttgattgtagatcgtgtggagaaacaaaactcaagagagttgtttcattaggatatcagccattagctaataatttactcaaaaagaaaaacgaaaaaacagaactttacccattagaaatgaattactgtccatcatgtcataactgccaactatcgatttcagttgaccccaaaaaaatgttttcaaattatctttatacctcatcaacttcaaaggtatttagagatcattttgataaagcagctaaaaaatatatcaaagaattcaatctaaattcaaaaaaatcttacataattgatgttggaagtaatgatggggtagccttaaaacctttcaaagatttaggttttaaacatcttttaggaattgaaccagctaaaaatttagctaaattagcaaataaaaatgacatcaaaactttcaatggttttttagataaaaaaaatttaaaaaagataaaaaaaggtgcggatttagttttagcatctaatgtttttgctcattccgattcccttaaagaaatggcggaatgtatgaaaaaattattaaataaaaatggtactattattatagaagttcaatacttactaaatactcttaaagacttaactttcgataatatttatcatgaacattataattactggtctttaacatctttagtgaatttctttaatcaattaaatttgaatatttataaggctgaaagagttaaaactcacggtggatctattagaatttatttaaaaaataaaaatgtaaaagttgaaaaaagtgttaaa

SEQ ID NO: 295735 - DNA, 109 bp, Unknown
  Bacterial polypeptide expressing nucleotide sequence isolated from the Sargasso Sea
ggttatgcttttggtatgggtgtagaaagattggcaatgctgaaatatggcatcaaagacattcgatctttttatgaaaatgattttaatttcttaaaccagttctaaa

SEQ ID NO: 295736 - DNA, 814 bp, Unknown
  Bacterial polypeptide expressing nucleotide sequence isolated from the Sargasso Sea
ttgaatccatcttcttcaaataaaaagaaagttcaacagttaacatccattttaaagaggagtggtggaaatgttgcttctaagtcaccaactaaggcagttattccaaaagtttcagatatcccagttattagtccagtaaaatacgcgaatgacatctataatattgctgaagcttttgagctaagttcaagaaacttggctaaggcaactaattttctgggtgaaaaagaaaaaaagaaaatagaaagaatttctcttaaacgcactccaacgacatctgatttagagcaagcagctagatcagagcctaatgatttcagaaaacagattgacttatctaggaactatgagtcaaatggtcgttttgaagaggcaaaggaaatatatttaaaattggcagcacaacattcaaataatgcagatgctcactttcatcttggctctttttatgcccgatttggtcaaatgactaaagcccgtcattctttcgatgaagcacttgatgtgcaacctaatcatagagctactattgaagctatgtctactttatttggagaaaataagttgagctctatgtctgatgatatattaactaagtctgcggaaaaggatccaaatggacctgcaaagcaaatgcaaagagtcagaaaaaacttggttgatcttaattttgagaatgccgcaaaattagcacaagggggtcaggatatgttccctgcgcatggtggttttatttatctaaaaggaaaagcgtttgaaggtttaaataatttggacaaagctaaagcaagctaccaagaatctattaaaa

SEQ ID NO: 295737 - DNA, 981 bp, Unknown
  Bacterial polypeptide expressing nucleotide sequence isolated from the Sargasso Sea
aaagctgaagccatctcttcatacgacgcattacttgccaaacctggcgcaacgggcactgaagttttcgatcaagccaaagtcgacaatcctgatttgtcagacgaccttcgtgttcataagccctacattgatgccatcacatacgactcaccatttgcgacacatgcccgcatgcgtcgtgtaccagaggtgattgattgttggttcgactctggagcaatgccttttgctcagtggggctggccacacacaggtgctgaagaatttgagtcacaatggcccgccgattttatctcggaagccatcgatcagactcgcgggtggttttatagccaacttgctatcagcactctactttttggacctgaatcaacaactgacgctgcgtcgacacacgctgcagcagcaatgccacccaaagactatccacacccgtttcgcaattgcatcgttctcggacatatgctcggcgaagacggtggcaaaatgtccaaaagcaagcggaactacaaagagccttccgagatcctggatcgatatggtgcagatgcacttcgctggtactttttcgctgggcagccgccatggaatagcattcgctacagcgaacaagctattcgtgaaagtgtcccggagtttcttctgcggctctggaatgtctatagcttctttatcatttacgccaacatcgacggcttcaatccagccaccgatgtggaggatcccggccagcttgaccatgcgaatctcgcaagcggcaacggctttcgcccggcacacgaacgaagcgaactcgaccgttggatgttagctgaactgcacgcaaccgagcagaagatggtcgacgcgcttgacacgtatgaccattacgttgctgccggagcactttccaatctcgtcgatgcagtcagcaactggtttgtgcgaagaagccgagacaggttttgggctgccgggaaagcagatacatccgctcat

SEQ ID NO: 295738 - DNA, 602 bp, Unknown
  Bacterial polypeptide expressing nucleotide sequence isolated from the Sargasso Sea
aatgaatgacgaagaaataaaaagtgagattagaaaatttgcactacaaaatgcagtagaacatgaaggtcaaacaagagacaaaacaattctagcaaagattatgggaaatgttccagagttaagacaaaaagcaaaagagataggtccaataattactgaagttgtttcagaaattaatcaaattccattacaggaacaacaaaaggagattaaagaaaaatatccagagttattggaagtcaaaaaagagaaaccacaaaaggagagtttacttccagcattaaaaaatactgaaggaaaagaaataatcacaagatttcctcctgcaccaaatggctatccacacattggtcatgcaaaagccgctgtaatcagtgaagagtatgcaaagatgcatggtggaaaactaattttacgatttgaggatacaaatcctggaactgaacgattagaatattatgctgcaattaaagttggaatggattggcttggaataaagtatgatagtgtcgaacacgtctcagataatttagatattctttacaaaaaagcagaccaaattataaaatcaaatgatgcgtatgtttgtacatgtagtc

SEQ ID NO: 295739 - DNA, 1000 bp, Unknown
  Bacterial polypeptide expressing nucleotide sequence isolated from the Sargasso Sea
gcataatagtggtgctgcaccaatagcatcattagatgaagctacatacaaagaaaaaatcccagcaccgttctttacagaaggtatcgatcaaacaagaggatgggcatatacacttttgattgaaaatgtgatttacaataacgcatcagtttcaccgtacaaatcatttctgtttcaaggacatgtgttagatgaaaacggaaacaagatgagtaagagtaaaggaaatgtacttgaggcaaaagagcttttagaaaaatatccagtagatcttgttcgattttattttatgtggaaagcaagtccaattgagccgttaaactttagcactaaagaattaatgtcaagaccttatcaagtcataagtacattatatcatttacatacattttacaaacaaaacagtgagtatgataaattcaatgtagaagaatcaactattgaatgggcaaagaaaaatgatttactaacacctccagacgtatggttactatcaaaacttcaaagaatgatcgaaagaactactgaaacaaatgattcatgccgatttcatgaatctgcaaaatcaattgaagactttttgataaattctctaagccaaatttacattccaataattaaatcagaattatgggatgaagatgattcaaaaaaagatagacgctttacaatatatgcaattcttgctaaaactttgaaaacaatcaacatattgattcatccatttgcaccatttacatcacaatatctgtacaaatccatattttctgagaaagaaaatattttacttgaatcatggccaaaggtagattcatcattaattgatgaaaaagttgaaacatcatttgatttactcaaagaaacagtttcagttacatctgctgcaagaatgaaaggcaagctaaaacgaagatggccattaaaccaagctatgatttgtttaaacaaaaggagaaaaacaagttttagaatcattatcagaacttgtaaagtcaca

SEQ ID NO: 295740 - DNA, 1012 bp, Unknown
  Bacterial polypeptide expressing nucleotide sequence isolated from the Sargasso Sea
tgtaaacgtgccgtcgcacccgacggcacgtttacagacgaattccccatgatgaccggtcgctttgtcaaggagtgtgaccgtgatctgactcgtgacattcgcagtcgcggcctgcttgttcaccaagagcagtatctgcatgactatccattctgttggcgggctgataacgatccgctgattcaatatccgagagcgagctggtttattcgcactagcgaattccgagatgaaatgctcgccaataacagccagatcaactggatgcccgaacacattaaggaagggcgttttggcaatttcctcaagaacaacgtcgactgggcgttatccagagaacgctactggggaacaccccttcctatctgggtctgcgaagaaactgggaaagctgaagccatctcttcatacaacgcactgcttgcccaacctggcgcaacgggcactgaggttttcgatcaagccaaagtcgataaccctgatttgtcggaagaccttcgcgtccataaaccctacattgatgccatcacatatgactcaccatttgcagcagatgcccgtatgcgccgtgtaccagaggtgattgattgttggttcgactctggagcaatgccttttgcccagtggggttggccacacacaggtgcagaagaatttcagtcgcaatggcccgctgattttatctctgaagccatcgatcagacgcgcggctggttttatagccagcttgccatcagcactctcctttttggacctgaatcaacgactgatgctgcatcgacaaacgccacaacagcgatgccacccaatgactacccacaccctttccgaaattgtatcgttctcgggcatatgcttggcgaggacggtggcaaaatgtccaaaagcaagcggaactacaaagagccgtccgagatcctggatcggtatggagcagatgcactccgctggtattttttcgccggccagcctccatggaatagcatccgctacagcgaacaagctattc

SEQ ID NO: 295741 - DNA, 946 bp, Unknown
  Bacterial polypeptide expressing nucleotide sequence isolated from the Sargasso Sea
tatgaaagatgcattaaagcttattaaaagaggtgcagacgagattctgacagaagctgatttaaaaaagaaatttgaatcaggcaaacaattagtcataaaagcaggatttgacccaactgctccagatcttcattttggacatacagttttattaaataaacttagacattttcaagacttaggtcacaaagtcatttttttaattggtgattttacaggccggattggagatccatctggaattaataagacaaggccgatactagatgccaaagatttagttgagaatgcaaaaacatatgagaaacaagtttataaaatccttaaaaaagatctaactgaaattaaatttaattctgaatggtgcgataaattaggtgccgatgggttgattgggcttgcatcaaaatataatgttgcacgcatgcttgaaagagatgattttaataaaagattcacatcaaataaaagcattgctatccatgagtttttatatcctttagttcagggttatgactcagttgctttggaggtagatgtagaatgcggtggaactgatcaaaaatttaatcttctggtaggtagagaacttcaaagggactatggacaagaaccacaagtggtaataactgtgcctatattagaagggctagatggcgtaaagaagatgtcaaaatcattagataactatatcgctattgatgaagatccagatgatatgtttggaaagattatgtcaatttctgatgaattaatgtggcgctggtttgaattattaagttttatccctgaagaagaaatagcaaaattaaaaacggagatggattctggtaaaaatccacgcgatattaaatttgttttagctgaagaattagtagacagatttcataatgaaggcgacggtaagaaatgcaaggataccttcttgaagagatttcaaaaa

SEQ ID NO: 295742 - DNA, 944 bp, Unknown
  Bacterial polypeptide expressing nucleotide sequence isolated from the Sargasso Sea
atttgttgttgatggtaaaggtttaaaaatgtcaaaatcacttggaaatattatttcgcctgaggatattttaaaaaaatatggagctgacatattaagagtatgggtggcagcatccgattatgctgaagatctaagaatagattattcaattttagaacaacatgcagagtcttacagaaaagttagaaacacttttagatatattctaggtaatttaaatgacaaatttgaaaaaatagattttgacaaaattaatattaaagacttcccagaacttgagcagtacatgctacataaaatttataacttaagtattatttttgaaaaaaactttgaaaaatataattttcatacaatttataaggaacttttaaatttttgtaattctgatttatctgctttttattttgatataagaaaagacactttatattgtgactccctagatagtaataaaagaatttcaacaatcaaatttttaaatattgttatcgaaatattattgaaatggtttgcaccggtactatcttttactacagaagaaattttttcgcttttaaaaattaatgaagaaggaagtgtacacttagaaaagtttccaataataccttctagctggaataatgaagatttgaataacaaatggactgaactagtaaaaattagagataaatgtaatagcagcattgaacttaaaagagtatcaaaggaaatcggctcaagtttggaagcaacattaaaaatacatttaaacgaaaaattaattaaactgtcttcaggaacagatttttctgagctatgtattacatcaggtgcaaaagtagataaaattaacaatgatagttcagatgaaattattgttatgacagataaagcagaaggaaaaaaatgtaatgtttgttggaaaatttataaagataaatgtgacagacatggagctt

SEQ ID NO: 295743 - DNA, 169 bp, Unknown
  Bacterial polypeptide expressing nucleotide sequence isolated from the Sargasso Sea
aaccaagtttcaaggttatgcatttggaatgggaattgatagacttgcaatgttaaaatatggaattaatgacttaagagcattcttcgattgtgattatagatggttaaatcactttggatttgatcctttagatgtaccttcgaattacagaggattaagtagatga

SEQ ID NO: 295744 - DNA, 805 bp, Unknown
  Bacterial polypeptide expressing nucleotide sequence isolated from the Sargasso Sea
tttgggaaaagatattcttgtgactcactgtgtctattggacgacgatgcttctagcccttgagataccgctgcccaagcattttattgtcactggttggtggctaaaaaacaaagaaaaaatgtccaaaagcatcgggaatgtggtggatcccttggacctcacagagcgctacggtgtcgacgtgattcggtactttttgatgcgagaaatgtcgcttgggcaagactctagctatagcgaagaattggttcttgaacggaacaacaaggaacttgccaatgacctcggtaattctttgagccgagtttcaagccttcttgagaaaaactatgaaggccggttgcccaagttgatgtcgatgactcctggggacgaaagagtgtggtcggatgttgaagcgatggtgatggctgcccagggtctcttgtcggagtttcggaccaaggatcttgtggaggcggtgttggctcaggtgaggcagttgaacaagtacattacggatgaagccccttataaaattatgaaagttgaccgtgaacgggctggtcatattctgcatgtcgcccttgaagggcttcgtgtgtgctgttgtcttttatcaccccttatgccagaaaaaatgtcggttgctatgaaatctctcggaatcgataaaattgagaaggcgcatctcggcatcggttttctaaaagaaggcaatcccgtgacaaagatcagtgggctattccctcggtacgagcttagtgaggagacaaaggtcgagagcgaagcagcctctgataaacgccggagccgaaatcct

SEQ ID NO: 295745 - DNA, 432 bp, Unknown
  Bacterial polypeptide expressing nucleotide sequence isolated from the Sargasso Sea
atgttgtacctgggctagatggcagaaaaatgagtaagtcatatggtaacgtaattcctctattagaaaacgaaaagagtctaaaaaaatctataatgaaaattgttacaaattcccttgaacctggcgtcccaaaagaaacagagaattgtactatttataatttatataaaaattttgcagacaaaccagatattagtgcctttgaaacttcttataaagaaggaatatcatggggtgaagcgaaagagaaactatttcaggttataaatgctgaacttatgcccataagatcaaaatatctagaactcgaaaaagatactgactatattaatgatcttttaagcgatggtgcaaagaaggcaaggtctcttgctaaaatcaaaattttagaaattaaagaagttaccggcataactaaaattacttaat

SEQ ID NO: 295746 - DNA, 906 bp, Unknown
  Bacterial polypeptide expressing nucleotide sequence isolated from the Sargasso Sea
gatttgtttctgcaatccgactggccctttgcatgttggacactgcagaggtgcaatactaggtgatgtaatttcaaatatattaaaatttaataataatattgttaagaaagagtattacgtaaatgactatggtaatcagatttcccatttcaactattctgtttatttacggattagagaaaaattatataatgagaattttccattagataatcctgatctatatccaggtgattatttaatagatatagcaagcaatattataaaaaataataaaaacgttaattttgaaaattttaatgatattgaagatcatttaaaaaaactttcaattaatgaatctttaaagctaattaaaaaaaacttaagtgaccttggtattaatcatgacaactttgtaagcgaaacaaatattgttaatgataaagaggttgaaaaagtagttgaaaaactaaaaaaatctaagcatgtatatactggtaaaattaatgctcccgaaggtgaagataaaaaaaactggacagaaagagatcaattattatttagatcaacagattttggtgatgataaagatagggctttacaaaaaagtgatttaacttggacatactttgcaagtgacgttgcttatcacaatacaaaaattaatagaaattttgataaattaattaatattttaggtgctgatcacgctggatatattaaaagaatttcctcagtcgttgaagcaatctctggtgaaaaaaataaattatcatgcaaagtaagtcagctggttaaattaataaaagatggaaaacccttcaaaatgtcaaagagaaaaggagattatataacggttgaagatcttgtcaaagaagtaggcaaggatgcaactcgttttattatgcttagcaggagcaa

SEQ ID NO: 295747 - DNA, 343 bp, Unknown
  Bacterial polypeptide expressing nucleotide sequence isolated from the Sargasso Sea
aaataaaaaaataaaaaagaatgaaaatcttaatttatctttagaaaaaaatattgatattctaaacaatatttctaaacataactcattaagaccaaagctaacgattggttttgcggcagaaacaaacgatatagttaataattcattaaagaaattagaagaaaaaaactgtgattggattatagcaaatgatgtatcagataattcaattggatttaattcagatgaaaatcaaatttcaattttttataaagataaaaaaaatgaaaatttaaaaaagatgagtaaatcattagtggcatcagaaattgttaatagggttatagaaaaattgaactag

SEQ ID NO: 295748 - DNA, 745 bp, Unknown
  Bacterial polypeptide expressing nucleotide sequence isolated from the Sargasso Sea
ttttgggtttcaagaatgattatggctggttatgaatttagagatgaaaagccctttaaaaatgtctatttcacaggaattgttagagataataaaagaaggaaaatgagtaaatcattgggtaattcaccagatgcattaaaattaatagatgactatggagctgacggtgtacgggttggactaatgctcagctcagctgcaggaaatgatttactttttgatgtaaatctttgcgatcaaggaaaatcattttcaaataaaatatggaattcgtttagattagttaatggctgggaaattggtgatcacgaccagcccgagtattgttcaaatgccattagctggtataatcacaaatttaatcatgttctaaatcagattaatgatcatttcagtaagtttagaattagtgatgctctaatgagtacatacaagctaatatgggatgacttttgctccgttctactagaaattattaaacctgaatatggcaaacctattgattcaaagactcacagagaaataattaagatttttgaaaacaaccttttaatattacatccttttatgccttttatttcagaagaaatttggcatttaattgctaaaagaaactctgacgaagctatagttatatcaaaatggccgaaatctaaaaacgatataaataatgaaataataaatgattttgaaactcttcaaaacataatttcaggaatcagaaatcttagaaaaaaacatc

SEQ ID NO: 295749 - DNA, 178 bp, Unknown
  Bacterial polypeptide expressing nucleotide sequence isolated from the Sargasso Sea
tatgaaaatttttaactcattaaagtcagaaaaggaagatttcattcctttgaaggaggaagaaataagcatatatgtttgtgggatgaccgtctatgatgattgtcacataggccatgctagaacttttttgagttttgattctatagttcgatatttgaggtttagagggtttaaa

SEQ ID NO: 295750 - DNA, 853 bp, Unknown
  Bacterial polypeptide expressing nucleotide sequence isolated from the Sargasso Sea
gggcacgaggtgatttttctgattggtgattttaccggaatgattggcgatcctacaggtaaaagcgccactcgtccgcctctcagtcgcgaggatgtactgcgtaacgctgacacctacaaagagcaggtgttcaagattcttgatgaaagtaagactcgggttgaattcaattccagctggatgaatacgatcggagcggccggcatgattaagctggcgggccaatatactgtagcgcgaatgctggagcgtgatgattttgacaagcgctataaaggtaatcagcccattgctatccatgaatttctctatccgttggtccaaggatatgactctgtggcgctggaggcggatgtggagctgggcggtacggatcagaagttcaacctgctaatgggtcggaccctgcaaaagacttacggccagtcgccgcaaatctgtctgaccatgccgattttggaagggttggacggcgttcagaagatgtcaaagtccttgggtaactatgtaggggttaatgatgctccgggtgaaatgtaccgtaagttgctctcacttccagacagtttgacttggcgctactatgagttgctcagtgcctgctcaaatgagcgcattgaggcgttgaaagctgaggccgttgctttggggtcacctcaggaggcgaagaaagcctttgcgctagaaatggtagaacgtttccatggtgtggaggccgctcaggcggcgcccaaatcggctggcaatcagattgcgctgggtcatattccggacaatgtgcctgaggtagaggtggatatcggtgagcaggagagtatccatattctcccgttacttcgagaggcagggc

SEQ ID NO: 295751 - DNA, 688 bp, Unknown
  Bacterial polypeptide expressing nucleotide sequence isolated from the Sargasso Sea
atgaagacagaaaacgaatattttgacgtcgtaatcgtgggctctggtttgtcggggatcggcgccgcttgccatctatccatacactgccccaatcatcgatatatcatcctagaggcgagagaatcaattggaggcacttgggatctattccgatacccaggcgtgagatctgacagtgacatgcataccttaggctatggcttcagaccatgggatggttcgaagaccattgctgatggttcatcaatccgagagtaccttttagaaacagccagtgaattcggtgtcgagcaatatgtaaggtataaccgaaaactaaagtgtgcagattggtcccgagaaaattcctgttggtacctagagatagagaacacagtaaacaaaaaaagtctgagggtatccactaacttcttgcatatgtgcgcagggtactatgactccgaagctgctcatcaaccagacttcccaagcatgaaacaattcaaaggcgtgttcatcaaccctcagttctggccagaaaaactggattatgcgggtaaaaaggttgttgtcattggatcaggcgccaccgctgttactattgttcctgcgatggccgaaacagcccagcacgtgacaatgcttcaacgatctcctggatattttctttcgtggccatcccaagatcaatttacgtcaatttgaa

SEQ ID NO: 295752 - DNA, 471 bp, Unknown
  Bacterial polypeptide expressing nucleotide sequence isolated from the Sargasso Sea
aatgaatgacgaagagataagaagcgagattagaaaatttgctttacaaaatgcagcagaacatgagggtcaaacaagagataaaacaattcttgcaaagattatgggaaacgtcccagaattaagacaaaaagcaaaagagattggtccaataattaccgagattgtttcagagattaatcagattccacttgaagaacaacaaaaagagatacaagaaaaatatccagaattattggaagtaaaaaaagataaacctgaaaaacaaagtctcttaccaccactaaaaaatacagaaggaaaagaaataatcacaagatttcctcctgcgccaaatggatatccccatataggtcatgcaaaagcagcggtaattagtgaagaatatgcaaagatgcatggcggtaaattgatcttaagatttgaagatacaaatccaggaacagaacgattagaatattatgcagcaat

SEQ ID NO: 295753 - DNA, 429 bp, Unknown
  Bacterial polypeptide expressing nucleotide sequence isolated from the Sargasso Sea
acacaaagtacattactggaacagatggtgaaaaaatgagtaaatcaaagaataacataatagatattttcgttgatgacaagacgttgagaaaacaaattatgaagattgagacacgtagcttatcagttgaagatccaaaaaacccacaagaatgtaatgtctttaagttatatgaagttatagcttctaggaatgaagtggaatcactaaaaaagcaatatttaaaggggggtattggatatggtacagttaaagaactcttatttgataaaattttaaatcgtttttcaaaaaacagaaaaaaatattttgagttattagaagataggcccgaattagaaaacctattatcagatggatccaagagagcaagagtacaagcccaaaaagttcttaaaagagttaggagtcgtattggtttttagc

SEQ ID NO: 295754 - DNA, 556 bp, Unknown
  Bacterial polypeptide expressing nucleotide sequence isolated from the Sargasso Sea
gatgctcaggttgttcctggttggaaaagaccagcttcaacatttagaaatcacccgaaatgttgctagtaggtttcataatgtttatggtgaaacttttgttctacctcaagaacatttacaagaagaggctaaactaattccaggaactgatggagagaaaatgagtaagagtaaaaataatgtcattgacatctttgcgtcagaaaaagaattaaagaagcagatacaatccattaaaacagactcaactgcaattgaagaacctaaagattggaaaaattgtaatctttttaaaatatatagccttattggaaatgttgatcaaatcaaaacgatgagggaaaattatgaaaacggaggttatggatatggacacgggaaaaaagatttgcttgaacttatactaaacaattattctgaagaaagacaaaaatacaaccattatatttccaaccccagtgaagtaaatgagattctaatgcatggagctacaaaagcaaaactttcagctgatgaagttcttacgagagttcgcaaaaaattaggttattga

SEQ ID NO: 295755 - DNA, 968 bp, Unknown
  Bacterial polypeptide expressing nucleotide sequence isolated from the Sargasso Sea
ccctaaagcaaatttagcttatttaaatggatgtcctactaatgctgctttaggatttgctaatagcttagatatagatgtaggtgagctagaaataaaaaacacggaaaagggtgattttgtatttggaaagaaaattgagaaaggactatcaacaaaaatttctttgtcttcgattatcccaaaattagtaaagagtcttcaaggtcctcgatttatgaaatgggggggcgggaacataaaattttcaagacctattaggtggattgcctctatttataatgatgaaattcttaattttgaatttgatgaatgtgatccaaaaatcaaaataagtaataaaacaaaaagtcataggctaatcaatgaagttttagaagttcagaatcccgatgatttttttgaattattgaaacgaaatagagtaatagctatacgaaaagaaagaaaagaaaaaattgaaagtttaataaatcaggcatctaaatctttaaatctgaaacctgacctttcagaaggattactaaatgaactaactgatttagttgaatggcctgacttaattattggcaaatttagtaatgaatttcttgatcttccggttgaagttctctcaacagtaatgaaaatacatcagcgatacgttcctcttttatttaaaaacgaaagtttttctaaattagatttaagctctgaaaaaaatattagtacaactttctgcgttatttcaaatggtcttgaagaatcaaataataatattgccaaaggtaatgagaaagtattaagggcaaggttttcagatgcaaagtttttcgtagaaagtgacaaaaaagttgcttcaatcgaaagaaatgaaaagcttaaatctgtttcatatttaaaaggacttggaaatatatttcagagggtagaaaggatagaggaagttactaaaaaaattcttaaatttttaaatgataagtcttaga

SEQ ID NO: 295756 - DNA, 763 bp, Unknown
  Bacterial polypeptide expressing nucleotide sequence isolated from the Sargasso Sea
tgggtcgcccggatggtgatgatgaccacgcacttcacgggcaaggtgccgttccacaccgtctacgtgcacggcctcgtgcgcgacgcggaaggccagaagatgtcgaagagcaagggcaacacgctcgacccgatcgacatcgtcgacggcatcgacctcgacacgctggtcgcgaagcgcacgacgggcctgatgaacccgaagcaggccgcgacgatcgagaagaagacgcgcaaggaattcccggacggcatcgccgcgttcggcaccgacgcgctgcgcttcacgatggcgtcgatggcaacgctcggccgcaacgtgaacttcgacctcgcacgctgcgaaggctatcgcaacttctgcaacaagctgtggaacgccacgcgcttcgtgctgatgaactgcgaaggccacgactgcggcagcgacaagccggaagtctgcggcgcgggcgattgcggcccgggcggctacctcgacttctcggcggccgaccgctggatcgtgtcgctgctgcagcgcacggaggccgacatcgcgaagggcttcgccgattaccgcttcgacaacatcgccagcagcatctacaagttcgtgtgggacgagtactgcgactggtatctcgaactcgcgaaggtgcagatccagaacggcacgccggaacagcagcgcgcgacgcgccgcacgctgctgcgcgtgctcgagacggtgctgcgcctcgcgcacccgatcatcccgttcatcaccgaagcgctctggc

SEQ ID NO: 295757 - DNA, 910 bp, Unknown
  Bacterial polypeptide expressing nucleotide sequence isolated from the Sargasso Sea
aattcaaaaaaaggaacaataagagccaatcattatcaccctcagcaagaacagaaatgcttgttcaccaaaggtcaaattattgaagtatatcaagatgtattaaatccaaaatctccgaaaattacaaaagtagttaatgaaggacaactttcaattataaaaccgaatgttgctcactcaatggtttttacaaaagatacaacttttttaaatttggtaagaggtgagagagaacatgaaaattatggtatcactcacactattaaacatgtttttgtagatgaaaaagaaaaaaatttacttttaagctgttacaaatttgaatgtagggtttgtggtaatacgaaattaaaaagggttgtttctcttggataccaaccactagccaacaatttactaaaaacgaaagaagaaaaatgtgatttatatccattagaagtcaactattgtgaaaattgtaaaaattgtcagctttcagtagcagtagatcctaaaaaaatgttcaacaattatttgtacacttcctcaacctctaagacgtttagagatcattttattaaagctgctaatgactacacaaagttgctcaaactaaaaccaaaaaaaacttacattatcgatgttggcagcaatgatggtattgccctaaagccctttaaagatttgggttttaaaaaaatcttgggtattgaacctgcaaaaaacttagccaagctggctaataaaaataagattaaaacatacaatggttttttaacaaaaaaaaatatcaaaaaaattaagaaaaatgctgatctaattttagcttcaaatgtttttgctcattctgatgatctcagggaaatggctcaatgcatgattgatcttttaagtaaaaatgggactattattattgaggtacaatatt

SEQ ID NO: 295758 - DNA, 700 bp, Unknown
  Bacterial polypeptide expressing nucleotide sequence isolated from the Sargasso Sea
gatgaaaacaaatataataattctgggcgcacatggcatgcttggatggcaaatagtaaatgaatttaaagataagaattacaaaataatttgtcaggttagaaacaaaaaaagcgaattatcactcaaaaaaaaattaaatttaaaaaaaaaaattaaatttatatattttgatgtagaaagagatcctattaatttattgttaaaatatatttctgtaaaagatataattattaattgtattggtaaaattaaaccctatatcggagataataataaagaccaaatatattcagcaattaaggttaatagtttatttccgattgaactatctaaatacattaaattaaaaaaaataaaattgtatcaaatagccacagattgcgtgtatgatgggaaggcaggtaattatgatgaaaattcaagacataatgcaattgatgtatatggcaaaacgaaaagcttaggagaagtaaaagttaataatttttataatattagagtttcaataattggaaaagaattaaatacgaaaaattcattagtagaatggtttatatcaaataaaaaaagtaagaaaatcttaggttttaatgatcatttatggaatggggtatctactaatgtatttgcgcatatcttatacaccattattaataaaaatattaaaataccttgccattttcatttaattcctaaa

SEQ ID NO: 295759 - DNA, 853 bp, Unknown
  Bacterial polypeptide expressing nucleotide sequence isolated from the Sargasso Sea
aatgaaaaataataaaaaaataattaatagtgcaaatagaacattggcacgagaactaagtagtataaaaaatttaaattctacatttaatttgaatttttgtagggcagttaatttaatttataatacaaaaggaaaagttgtaattactggtgttggaaaaagtgcgcatattggtaataaaatatctgcaactcttacttcaacggggacaccctcatattttgtgcatgcaactgaagcaagtcatggtgatttaggaagtataaaaagggatgattgtgtaatcgcaatctctaattcaggtgaaacatctgaacttaataatattattcaatttactaaaagatttaatattaaacttataagtataacgagtaattctaaaagtatattacataaaaatgctacgataggaattttatataagaaaccaatcgaagcttgtcctttgaatttagcacccactagctctacttctatgtccatgattattggagactgtattgcaatttcacttttagagttaagaggttttaaaagcaaacaatttaaaaatcttcatccaggaggtaatcttggtaaagatttaaaaaacttaagtgatgttatgcatacaggcaaaaaattaccattagcaatagtaaatgaaaaaatgtccaaatcattaattactatgacaaaaaaaagttttggatgcattggcgttattaataataaaaaacagatagtaggtataattactgatggtgacctgagaaggaaattgaattctaaattttttaataaaagtgcttctgaaataatgacgaaaaatccaacattagcaaataaaaatatgttgggtaggtga

SEQ ID NO: 295760 - DNA, 637 bp, Unknown
  Bacterial polypeptide expressing nucleotide sequence isolated from the Sargasso Sea
gaaataatggccaaatattgggttcataatggatatgttaatattgacgataaaaaaatgtctaagtctctaaaaaattttataacaatttctgatttattaaaaaaatttaatggtgagataataagactttttttgttacagactcattatagagctccactgaattataaatatgaacatttaaatgaatctaagacttccttatcaaggttatatagagcagttgaaggtttagaagttaacggtaacccagatgaagaaattctaaaatgtctaaaaaatgatttaaatactcccaaagctattgctagatcgcattatctggctgaaaacgcgaataaaggaagcaaagaagctggtcaattgttgaaaaactcttcaaaagtattaggtttacttgaaaacgatactgagggttggttcaagggaagcttagatgaaaactcattaaaattagtttctcaacagttgtctgttaaacaaatagagggttttattaagaaaagaatcattgccaagcaaaacaaaaattatgaattagctgataaaattagagatgatttattaaataaaggaattgtgctcgaggacaaactcaatgaaacaaatggagaagatcataaaaagttctaaa

SEQ ID NO: 295761 - DNA, 928 bp, Unknown
  Bacterial polypeptide expressing nucleotide sequence isolated from the Sargasso Sea
tatagttttaacttttgacgagattgttgatgctgaaactggaaatataacaataaagaaaacatcagataattctaccgttgaaacaattgatgttacaggtggtcaattaagcggatcaggctcagccgaaattaccttaaacccatcagtaacattagacagttcaacagaacattatgttttaatagatgctacagcttttgatgacgtatctggaaatagttatgctggaattagttcaacaacagctttgagttttacaacaggagacacaacaactccaaccctaacctcatcggtacctgctgataatgcaactggagttgcagttgattcaactattgttcttaattttagtgaaagtgttgatgctgaaagcggaaatatcactattaaaaaaacttcaggtaattcaacagttgaaacgattgacgtaacaggcggtcaggttacaggttcaggaacatctcaaataactgtcactccatcatcagactttgataacgatactgaatattacgttttaatagatgctacagcttttgatgatgcatctggaaatagttatgctggaattagttcaacaacagctttgagttttacaactgctctagaagatcccacaaatgacaaagatgtaattggtttgatggaagtccaaactgaagctccaaaaaaaattgttcaacacgtatcaacaccgatatataacaggcttaattggattagaggatataagtctggcaataaacaagatgcacaaaaaataaaatttaaatttttaaatcctaaaatatcaaagatagcaaatatagttccagaaacaattaattttaataaaattccaaaaagatctattgacgattggttgttttggagcgaaggaagtgtcagtgtaggaaaagtaggtgatacatcaaattca

SEQ ID NO: 295762 - DNA, 886 bp, Unknown
  Bacterial polypeptide expressing nucleotide sequence isolated from the Sargasso Sea
attgcgaataacatggatccaatgaatggtgccgacgcgaatatagatacggatggggatggcatgacggatggtgaagaggtattgaacggaacgaatgccaagtccgcggattcggatggcgacggaatcgaggacaaagaggaaatcttagcgggaaccgatccaaccaacgcggacagtgatggggatgggcaatcggatggtgccgaagcaatcgctggaacagatgcgaatgatgccgaggatagttttgtggatagtgatggggatggcttaagtgatgaggttgaggatcaattgggattggataagacggatgccactgatgccaatgcggacacggatggggatggcattagcaacaaggatgaagccgaagcgggcatggatccaaatagcaaagacagtgacaacgatggcattgatgatgcggtagagatcgcgaacaatatggacccaacggatggtgcggatgcgagtcaagacacggatggggatggcatgaccgatggggaagagatattgagaggcacgaatgctaaatccgcggatagtgatggggatgggattgcggataaagatgaagtcttggcgggaaccgatccaacgaatgcggatagtgatggtgatggtcaaagcgatggtgcagagaaagccgcgggaacggatgcaaacgatgccgaggataattttattgacacagacaatgatgggttaagtgatttatatgaagatttggtcggattgaataagaatgatgcaagtgatgcagatgcggacacggatggggatggcatatcgaataaagatgaagcggagtcagggacggatccaacgaatgctgatagtgataacgatggcattaatgatgcggtcgagatcg

SEQ ID NO: 295763 - DNA, 826 bp, Unknown
  Bacterial polypeptide expressing nucleotide sequence isolated from the Sargasso Sea
aaagatgaatgtcctgctgataaatgtgaaaaatgtggtaaaacagaatttatcggtgaagaaagaacatttgatacatggatggattcaagtgtgtcaccattattcattacaaaatttaatgtagataatgaatttttcaaaaaaacatatccaacaggaattagaccacaggcaaaagatattgtaagaacttggttgtactatacacttttacgatgtgaagaattaacaggcaaaaaaccatggtctgaagcatggatcatgggttatggattagatgaaaaaggaatgaagatgagtaaaagtaagggcaacgcattagatccattacctattattcaaaaatcaggtgctgacacttttcgattttggagtgcaagcgaaatcaatcacggttatgattttagatgttctgaacaaaaaattgaatcgacaaaaaaatttctaagcaaactatggaatgtatcaagatttctttctagttttccagtaattaattctgcaaatcttactaatactgacaaatggatactatctgagctagataaattaattttagaatgcaaagagggttactcccaatacaatttctttataccagcaattgcactaagagaattcacatggaatatttttgcggcacactatattgagatggtaaaagccagagcatatggaataggattcgaggatgacgaaagagatgctgcaatctacactttacacaaggttttatcaacagttctaaaacttttagcaccaattacaccatttattacagagcatctgtggcaaacactttattcagaaaatagtgttcaca

SEQ ID NO: 295764 - DNA, 599 bp, Unknown
  Bacterial polypeptide expressing nucleotide sequence isolated from the Sargasso Sea
aatgaatgacgaagagataagaagcgagattagaaaatttgctttacaaaatgcagtagagcatgatggtcaaacaagagataaaacaattcttgcaaagattatggggaacgttgcagaattaagacaaaaagcaaaagaaataggaccaataattaccgaaattgtttcagagataaatcagattccaattgatgaacaacaaaaagagatacaagaaaaatatcccgagttgttagaaattaagaaagagaaacctgaaaaacaaagtctcttaccaccactaaaaaatactgaaggaagagaaataattacaagatttcctcctgcaccaaatggttatccacacataggtcatgcaaaggcagcggtaatcagtgaagagtattcaaaaatgcacaatggtaaactcatcttaagatttgaagatacaaatccaggaacagaacgattagaatattatgcagcaattaaagttggaatggattggcttggaataaaatatgacagtgtcgaatacgtttcagatagtttagatgttctgtatcaaaaagcagatcagatcattaaatcaaatgacgcatatgtttgcacatgta

SEQ ID NO: 295765 - DNA, 814 bp, Unknown
  Bacterial polypeptide expressing nucleotide sequence isolated from the Sargasso Sea
ttaaaaactagaaattatgaagttgatagtaaagtacatattctatttgattatggtggtccaaatattggtaaagcattacatgtaggtcaccttcgaacattaaatataggtcgttccctatataaaattaataagtttgctggtaacaaggttacatccgatgttcacttcggggattggggtatgcctgtttcacagattatcgcatacctcatatataaagaaatagatgtaaatgcagttaattacgatgatcttgaaacaatttatccaagtgctgtaaagctttcaaaagaagatgaggaattcggtaagttgtgccaacatatttccaaagaattaaatttacaaaataatgaatattttgaaaaatggaagataatatacaaaatttctattgaccagattaaatccttgtttgtaaaacttcagcattcttttgatttattttatggtgaaagtgatgtaattaacgaaacaaacaaggtggtagaaaaagcaaaaaaagatggactggtaaaaatagatgacggtgcattgatatctacggaaaaaagcgatcccccaataataattacaaaagccgatgggtcttatctttatatgactacagatttaggaactgtttattttagagaatctcaaaatacttatgacaaatatgtttatgttgttgattcgagacaatcagagcatttttctcaattattcaaaactgttaaacattttaacttatcagaaaaagaatttaaccatattggttatggcacaaataacggaaaagatggaaaaccccttaaaacaagagaag

SEQ ID NO: 295766 - DNA, 796 bp, Unknown
  Bacterial polypeptide expressing nucleotide sequence isolated from the Sargasso Sea
ccattaaaaaatatagaaggaagagaaataattacaagatttcctcctgccccaaatggttatccacatattggtcatgcaaaagcagcggtaattagtgaagagtattcaaaaatgcataatggaaaacttatcttaagattcgaagatacaaatccaggaacagaacgattagaatattatgctgcaattaaggttggaatggattggcttggaataaaatatgatagtgttgaatatgtttcggatagtttagatgtactttatcaaaaagcagatcagatcattaaatcaaatgatgcatatgtttgtacatgtagtcaagataacatcagtaagaatagaagagagatgatagagtgtaattgtacaaaacaaagtgtagaagaaaatgaaaaattatggcacaagatgtttgatgagaaaggcttcaaagaaggacaagctctattgagatttagaggaaacatgcaatcagggaatacaaccatgcgtgaccctgcattattcaggattaatacaaaaagacatgcacgacaagagcaaaaatacaaggtttggccaacatatgattttgcaggcataatttttgacagtattagcaaagtctcacatgcaatgagatcaaaagagtttgaactcagaaaagagcttcatcataccatacttgacaaattaggaatggaaaaatctgaattcatcttttttggtagactggatttggagggaatgccagtatcaaaaagcgctctaaaaccacttattgaaaatggcaaggttccatggtatgacgacc

SEQ ID NO: 295767 - DNA, 799 bp, Unknown
  Bacterial polypeptide expressing nucleotide sequence isolated from the Sargasso Sea
attggaaaaaaaactaacaaattcaatccaaaacgattttttaaaaattacaggcgttaagatttcaaagatttatattaagaataaaattttaccagtttttagatatttagatgagtctaaaaaaaatatgtttttactttcaggttctcaaggtattggaaaaacaacttttatcaaaattttatataaaaattttaataaatattataaaaaaaaaatacttaccttaagtttagatgacttttattacagcaagaattatagaaaaaaactatctaagcttatacatcctttaatggctactagaggtgttccaggtacacacaatataaaacttttacttaaaataattaataattttgagaaaaacagataccctatagaaataccgatattcgataaattaaatgataatagaattaaaaaaaaaagaatcattaactataaacatgatattttaatactagaaggttggtgctgtggatctactccaattaaagattattatctatataaaaatataaataaattagaaaaagaatatgataaaaaatttgtatggagaaattactataataaacttttaaaaaatgattattcaaaaatttttaaaaaatttgatattttaatttattttaaaactcattcattttcttatgtaaaaaattggcgtttaaagcaagaaaatcaaatgaaaaaaaagatgagcaaatcaaaattaagcatgaataaaaaacaaataatatttttcatttctcattatgaaaaattaacaaaatggatgatgaaaaaatta

SEQ ID NO: 295768 - DNA, 538 bp, Unknown
  Bacterial polypeptide expressing nucleotide sequence isolated from the Sargasso Sea
atgattttagataaattaaataaaaaactagtcgaagttgttaaaaataaagcagccgaaaaaagtgtagagattagtgaagagatcttaaatcagatacattttgaaattaatgatgaagagagtcatggagattactctacaagttgtgccttaaaactagctaaaacatttagcatgaatcctagagaaatagcagaatctttggttgaacatttaactttgccatctattaagtcattagctgttgagggcgctggatttattaatgtcttcctaactagtaatgaaaaaagcctcttattgaaagaaatagtgagattagattcagagtggggcaaaaatgaaaaaaataaaggccaaatattagttgaatttgtatcatcaaacccgacaggaccactacatgttggtcatggaagaggggctgttcttggaatggccttatcaaacttattagaaaattcaggctaccaagtgacaaaagaatattatgtaaatgatgctggaagacagaatatctatacttacaagcagc

SEQ ID NO: 295769 - DNA, 602 bp, Unknown
  Bacterial polypeptide expressing nucleotide sequence isolated from the Sargasso Sea
tatgataaacattctattcgctgcagtcacagaaagatgggatcaatatcaagggccccttaaaaaggaactagatttattaggactcgaacacaaattatccgaaaaattagctccggcggaagtcgactacatcatttatgcacccaatagtacaatcaaagatttttcagtttttacaaatctgaaagccgttttaaatttatgggctggggtagaagatgttgttaagaatgaaactttaacagtaccattagcaagaatggttgatgaaggtctaactcgaggcatgaaagaatgggttttaggtcacgtaatgcgacatcatctagggcttgatctacatatttttgggcaggacggacaatggagagattggtccgcacccccactcgcaagcgaccggaatgtaactgttttgggcttgggggcacttggcgccgaatgtgcaaatgaattggcaaaagttggttttaaagttcgtggatggagtttaaataaaaaatcactctgtaatgtaacatgccaccatggttcagaagggctggaaaaatcactgtttggatctgaaatagttgttttgttgttaccatcccctgcgg

SEQ ID NO: 295770 - DNA, 502 bp, Unknown
  Bacterial polypeptide expressing nucleotide sequence isolated from the Sargasso Sea
agattttaaaacttctaatttttttaaaatccctgaaccactgataaaaaaaaatttttcaaggattatgagtcttaaagatggtacaaaaaaaatgagcaaatctgatccctctgaattaagtcgtattaatctaaacgatgacaaggattcaataataaataaaattaaaaaagcaaaaactgatcctttaccaattcctgatacaattgaagaactacaaaaaagaccagaagcagaaaatttattaggaatttattcaagcttaaataatcaaattttaaataaaacattagatgaatttagtggtaaaaatttttcagattttaaaaaaaagctttcagatttacttattgagaaaatttctcctgtttctcaaaaaatgaaagaaatacaaaaagataataactttattgatgatattttgaagcaaggagctgaaaaagcaaacaaaattgcctcaaaaaaagtcgatgagataaaaaaaattattggtttctga

SEQ ID NO: 295771 - DNA, 924 bp, Unknown
  Bacterial polypeptide expressing nucleotide sequence isolated from the Sargasso Sea
cattggtagctatagatatacaacacactccgggcctaaagcttcatttcctgcattctaaatcagacaaacataacgcgattccattagtcatgactcatggatggccaggaagcgttcaggaatttttaaaaataataccagttttgcaaaaaaactcagaggtaccaattgatattatttgccctgctcttccaggatttggattttctgacaaaccaaaagaagttggtatggattccaaacagattgctattttgcaacatgagctaattatggctctaggatataaaaaatatattgttcaaggtggtgactggggagctactgtaagtaaatggatggctgaactttatccagatcattgtattggcattcatcttaatatgattattgcttggccacctgctgataaagacccattagaaaatacctcacaagaagaacaaaaattaatggcaaattatgaaaaatataaagaacaaggagttggatactatgagatacaaaaaacaaagccacaaacacttggttatggtttaaatgactctccagttggactggctgcttggattgtagagaagttttatggttggtttgatggtgaagagaacaaattagttgtttcaaacgatgaagttctaggaatagtatctttatattggtttagtgaatcaataacttcatcaacaagattgtataaagaaaatggagacttaggtttttcttttgagaacataaagcaacctatggcaggtgcagtttttgaaagagactttattgcacctccaagagcatgggctgaagaaatctataatgtagttcaatggaattctcacaaaggcggacattttgcagccttagagcaacctgaatcactttctaaggatattatagaatttataaagaaactaaagatctaat

SEQ ID NO: 295772 - DNA, 604 bp, Unknown
  Bacterial polypeptide expressing nucleotide sequence isolated from the Sargasso Sea
tttagtaggtcgagatttacagagggaatacaatcaggtgccgcaagtaattattacattaccattattggaaggtacggatggtattgagaagatgtcaaaatcttatggcaatgacataagttttattgatttgcctcaagatatgtatggaaaatcaatgtcaattcctgataagatgatagagaaatattttattttagctgctgattccaatgaagatgagttaacagaaataagacaaaaattagataatcctaaaattaaccctcgagacgtcaaacgctctctagcatattcaattgtttcactttattacggagaagataaagcgacgaaagcagaggaacattttgaccaggtagttgtaggtaaaaataatccagatagtatggatgaatttattcttaaggatgatatgttattaattgatattttattaaataaagggttaacaaaaagtaaaggagaagcgcgacgtttaattacacagggcgcagtaagattggatggaaataaagttgaagatattaatatgattttgtgcagtggaaatcaggttattattaaagttggaaaaagaaagtttttaagtatcaagtga

SEQ ID NO: 295773 - DNA, 575 bp, Unknown
  Bacterial polypeptide expressing nucleotide sequence isolated from the Sargasso Sea
acaaaaacctcaatgtattttaacaatgccaattttagagggcaccgatggaattgaaaaaatgtcaaagtcttatggaaatgatataggaatatctgattctgcaaatgatatgtatggtaaaacattatctatcccagataatataatgctttcttggttcattttagcagctgatgttgataaaaattatttagatgaagtttcacaaaaacttgaggatggttcttataatcctatggagttgaaaagagaactcgctagaaaaatcgttgcgctttatcatgatgaaaatattgcaatagaggcggaaaatcattttaataaagtaacagtttcaaaaggggttccagatgacattgataattatcatctaaaagaagaagacctattagttaatataattgctgattctggccttttgaatagtaaaagtgaagcacgtagaatgatcaaacaatcagctgttaggattgatggtgagacagtaactgatattcaccataaaattacaactcctgattcatttatattaaaagttggaaagagaaaatttttgaaggttagtggttgaa

SEQ ID NO: 295774 - DNA, 534 bp, Unknown
  Bacterial polypeptide expressing nucleotide sequence isolated from the Sargasso Sea
gtgtgcaaaaaatgagtaagagcctcggcaatagtattggagtcttcgattccccaaatgaaatgcttgggaaaattatgtcgatttctgatgaattgatgtggcgctattatgaacttctaagccaaatatccacagatgatctcaatgctatgcaagaacaggcaaaatcaggagcgttaaatccaaagaactctaaaataaatttggccaaagaaatagttactctctaccattctccagagttagcagaagccgcttccgatgaatttgaaaatgtattcaagaaaaagaaccttcccgaaaatattccggtcgtaaaaggatggggaaaagaaacgcgtagcatttgtaatattctcaaagaaaataaactgaccgatagtacttcggcggcccgaagattaattcaacaaggatctgtaacagtcaatgggggaaaagtaatagatgtgaatcaggcgttttcaggggataaggcttacatgattaaagtggggaagaaaaggtttcttaaaatcgagcccgattagc

SEQ ID NO: 295775 - DNA, 646 bp, Unknown
  Bacterial polypeptide expressing nucleotide sequence isolated from the Sargasso Sea
gattagagatgagaatggacaaaagatgtcaaagtctaaaggaaatattattgacccaattgatctaatctatggcattgatcttgaagacctagtaaccaagaggacagcaaatctaatgcaggaaggtctagctgaaaaaattgaacgtaaaactcgtaaacagtttcctgatggtattgaatcatatggcaccgatgcattgcgcatgacatttttttctttagctacacatactagagatataagttttgaacttggaaggctcaaaggctataggaacttttgcaataaaatctggaatgcagctcggttcattaataattacccacatgaagcaaaagagtttgttgcaaaaaatgatgacgataaatggatagaagaagaattcaacaaagtttcagaacagataaagaaaaatattgaagaatatcgtttagacttcgcggtaaatgaaatctatgaattcttttggggtaaattctgcgacaaatacatagaagattgtaaaaaatctggagaaacctcaaacttgcacccaatgttaaaaaagattctgctgttgatgcacccttttgcaccttttattactgaagaggtaaatgaacttgtctttaaagatggttcattaatgaatagcaaatag

SEQ ID NO: 295776 - DNA, 779 bp, Unknown
  Bacterial polypeptide expressing nucleotide sequence isolated from the Sargasso Sea
aaccaaggtcggaaaatgtctaaaagcttaggcaattctattgatccattagatatcatagatacatatagttcagatgctttgcgtttttcattattaatgattactgcaacaggtcaggatgtatatattaacaatgaaaaatttgagattggtcgtaattttatgactaaattatggaatgcagcaagattcatggaaatgcattccgaatctttagatgttaaaaatatatcatgtgatgcatttcaattatcacctgatgatcagttcataatcgcaaagttaaataaaactattactgctgttgaaactcatttaaaaagatatcgttttaatgatgctacgttagcgctctatgatttcttttggcactgctattgtgatagatatgtagagtattcaaaaccattactttatcgaggtacagaaatggaaaagcagcgtacattagccgtaatgcatacggtttttaatacttcgctccgattgctgcatccatttatgccatttttaacagaagagttatggttaggtatgaactataatcatacagagaagatgataattaaagctgaatggccaaagccaatttttgttaataaaatagatttagatattgttaattatgtagagggtaagcacgacttaattagagtagggcgtattctacgttctgattataatttaactgtaaaacaagaagcttgctttgttatccgagcaaataatgaaaaagttttatcagatattaagtcggataaagagtctatcttaga

SEQ ID NO: 295777 - DNA, 885 bp, Unknown
  Bacterial polypeptide expressing nucleotide sequence isolated from the Sargasso Sea
agaaaatgtctaaatcaaaggggaatgttctggatccattggaactgaccgacgaatacggagcggattcgctccgcttcactttggcggcgatggcagcgcagggtcgtgatatcaaaatgtcgaccagccggattgaaggctttcggaattttaccacgaaaatctggaatgcctgtcgatttttgcaaatgaatgactgtgccaacgcagacagcattgatctttcttcagtcaaggcacctgtcaataaatggatcgtgtccgaatataataccgccattgcaaaaacttcagatgccatcgactcctatagatttaacgaggcggcagacgccttgtatcattttatctggcattgctattgtgattggtatgtcgaactgatcaaaccgagccttgttagtgatgacagcgcggtagcaaccgaaattaaggctacagctggcaccattttggaaggtacattgcgcatgcttcacccatttatgccgtatctgaccgaagagttgaatcaaaaaatcttccaaaacgatgacatgttaatagttgccaactggccgcaggcaacaacagacacagactttgatgcggtcaatgatatccagtttctgataagccttattaccgaaattcgttacattaggtctgaaatgaatgtaccactttcggcaaagccaatgttgcaggtcagagggatgaacgcggcacaagtcacggttttgaaatcgcaaaatgctgccctaatgagattggcgcgggtgtctggagtaaccgttgttgaccaattttctaaaggcacggcccgtggtagcgtcgacgggtctgatattggcctgacactttctgaaatcctagatttggaagctgaagcagcacgatgaa

SEQ ID NO: 295778 - DNA, 415 bp, Unknown
  Bacterial polypeptide expressing nucleotide sequence isolated from the Sargasso Sea
gatgaagcaattatcaaatttaattaaaaaacttgagaatgagctttatgacagaaatatgtctgaggaaatctctttaagaatttcaaataattcagattttgattttcaaattaatgatttagttaagtttcaaagtcacaatgatattgatcaaattaaaaattctttttataaaataattcaaaatgattcgtccgtaagaaactttgaaattagtgaaaattattttataaatatagaaattgatattcctaattttcttcataattttgaggaaattaaagaaaacataaaagtaccgaatccaaataccataatatttgactatggtggacccaatataggaaaaccacttcatgttggacatttaagatcactaaatattgggaagaagcttttatcaaataaataa

SEQ ID NO: 295779 - DNA, 892 bp, Unknown
  Bacterial polypeptide expressing nucleotide sequence isolated from the Sargasso Sea
agacttccagagattttaaaatttatcccatcaattaaaagtgttgtaattagtaactaccctggaaaaaagtttattaaaaataagaataaaaataaattcaaaaaaattaatttttttaaatggaataaattaatgcaaactaatgctgaaaaaattaattttaaaagatttgattttgaaacagagttagcaatattatattcaagtggcactactggaaaacccaaatgtatttgtcatagatctggtggtgttttaatccagcatatgaaggaacatcaattacattgtaatattaaagaaaatgataacgttttttattttaccacatgtggatggatgatgtggaattggttagttagttcattagcttctaaggcatccattgttttatttgacggatctcctatgtttaaatcacctgatttacttttgaaaatagcacaaagagaaaaaataactttatttggtataagtgcgaagtatatagatgctttaagaaagtttagaccaaaattaaattataagttcaaactaaataaattaagaacaatttgttcaactggttcacctctttcagaagaaagttttaaatatgtttataagcaaattaaaaaaaatgtacacttgtcgtctatttctggtggtactgacattgtgtcatgcttcgtattaggtaatttatatcagtcagtaaatataggagaaatacaaaacaaagggttggctttagatgtagatgtattaagtgataaaggaaagtctttaaaaaacattaaaggagagcttgtttgtaaaaatccatttccatcaatgcctttaaagttttggaatgataaaaatgatattaaattcaagaatgcttatttcaatagatttaaaaatatat

SEQ ID NO: 295780 - DNA, 916 bp, Unknown
  Bacterial polypeptide expressing nucleotide sequence isolated from the Sargasso Sea
aaaaagaaccctgcccaagcaagtaaatatgctaaaagaggaagcaccaaggcaaagaaaaaggattatagaggtgccctttctgactataaaaaagcatatcagctaaatccaacttccaactataagaaaagggtgcaacaactaacctcattggctaaaaaaagcggtgggaattcatccaaaaagccatcaaaaaaacaagtacaacaagcgtcatcttatgccaagaggggaaatgctaaagctaagaaaaaagattatgcaggagcgttaaaagactaccaaagagcatataaattgaatccatcctcatcaaataagaagagggtacaacaattaacttcattggctaaaaaaagtggtaatcgagtagcctcaaaatcaccaactagggctaaaacgcctagaatgtctgatatcccagtcataagtccagttaagtacgcgaatgaaatttataatataactgaggcttttgaattaagctcaagaaacctagcaagagccaccacttatcttgatgaaaaagaaaagaaaaaggtggaaaggatttatgttaagttagctccatcaacctctgatcttgagcaggctgctagattggatcctaatgactttcgtaaacagattgatttgtctagaaattatgagacgaatggtcgctttgaagatgctaaagagatttatctaaaattagctgcgcaaaatcctgataatgcagatgctcattttcatcttgggtccttctatgcaagatttggtcaaatgacaaaagcgaggcattcttttgatgaagctctagatgtccaacctagtcatcgagcaacaattaaaacaatggctactttatttaaaactaaagagtcaagatctatgtcagatgatatgttatcaaaatctgcagaaaaagatc

SEQ ID NO: 295781 - DNA, 885 bp, Unknown
  Bacterial polypeptide expressing nucleotide sequence isolated from the Sargasso Sea
catggccgcttttatgagagatgtaaattccaaattcaacactcaaattacggattatcatcaattatgggagtggtcagttgaaaatcacgaggacttctggaatcactggtggaattatgtaaatccgatagcaagtaagcagcccaaaagaactctcataaattctgatttgtttgaacgtagccggtggtttccagatgcggagctcaattttgcagaaaatctcttaagatttcgtgataacaagaaagcaattgtcttccgcgacgaagacggaaatcgaagttcactttcatacaatgaattgtacatagttgctggattagtggccgcagaatttaagaacttaggtatcggtaaaggagaccgagtagcagccatcttaccaaacataccagaagcagttatcgctatgttagcaacaacatggcttggagctgtttggtcaagctgctcacctgactttggaacagacggcattttggaacgattcaaacaaattgagccgaaattattgatctcctgtgatggttataaatttaagggtacaacctactcaattttagataaaaccgattcagtaagaaatcaactgaagtgcaaaaccgtcatggtgaactggctatctatcggcaagctgtcttccaccattgactggaaagagctaaccaacacaaaagcgctacccccgaaatttgaccaaattaacttcaacgatcctgtctatattctttactcttctggtacaactggtaaaccaaagtgtatcgcacatggggctggtggcacactcctacagcatctgaaggaacatcgcctgcataccgatatcacgcgtcaagatattcttttttatttcactacctgtggatggatgatgtg

SEQ ID NO: 295782 - DNA, 848 bp, Unknown
  Bacterial polypeptide expressing nucleotide sequence isolated from the Sargasso Sea
ataagagctttttatcaaatgcttaagtctggagaagtcgttagtggtggtggcacaatttctatgcaagttgttcgaggatacttattatctagggaacaaaaaatcgtcagaaaaataaaagaaatttatttagcatttgaactcgagagcgttgctacaaaagaagaaattctttctatatatttaaatacaatatttttagggaaccgttcatacggggtagaagcagctgcaaatcaatattttgcaaaatctatcaatgagttaactcttgctgaagcagctctaattgcttcttctgctcaacttccatccagaataaatccaattcgctctccagatcgagcgctagttcgacgaaattggattttaagtagaatgtttaagcttggctatattggcaaagcacaatatcttctcgcaaaggatgagccaattgttctgagtcagttgcaaacaaggttttctcttgatggacgatatattgcagaaatagctaggcaggcattgatagataggtatggattatctgtttataaagacggactttctgtatacacaaccatagattctaaattacaacaagcagctcttaaaagtatcgataaaaatttatatctctatgacaaaaggcatggttggagagagccagtcaatttatcaaacagaatacctgaaattgtttttacggagttgagaaatcaaaacaccgatattttgtacgaaacatccaatcttcaagatgagctgggtatgaatcaattatttatttctataatcagagattacttcgaaaattcaaaaaatctagataaacacataggtggaattgtaatagatgtcaa

SEQ ID NO: 295783 - DNA, 583 bp, Unknown
  Bacterial polypeptide expressing nucleotide sequence isolated from the Sargasso Sea
acataatggtcaagaaccacaatgtatcatcactactcccttgattgagggaacggatggagttgaaaaaatgtcaaaatcctacgggaacgatataggacttcatgatagccccgaagaaatgtatggcaagacattatccatatcagatgaaatgattgtgaagtggttaaccttagccgctgatgcggactcaaaaactattgaacatgctaagaagcaactagaggatccaaatgttaatccaatggaaattaaacgactccttgctcgtaaggttgtgtccctttttcatgatgatgagctagccgataaagcagaaaggcatttcaatgaggtggttgttggaaagggagtacctgatgatataccagtttattcgattacaaaggaagatttaattgtaaatatcatatttgattccggacttctaaaaagtaagggagaggcgagaagaatgatcaaacaaggtgccgtaaaattagatgaaaaaagagtagatgacatacaagcgactattcaaccggatggagaacaaattttgaaagtaggtaagaggcggtttctaaaggtccatggatga

SEQ ID NO: 295784 - DNA, 529 bp, Unknown
  Bacterial polypeptide expressing nucleotide sequence isolated from the Sargasso Sea
acacttttactagataaaccaggattccaacatgtttggattgacggattaggaatggatccttggggaagaaagatgtctaaatcattaggaaacggtattgatgctgattctgttctagaatgtggcgcaggtggccgtacaggttcttggaaagttaaaggtcctgaagggaagcaagtacatcttactgccaaaaaaattggttctgaatgctttagattatggaaggcatgtgatgcccaagtaggagatgattttcatatcaatcctgaagaaatagagtcaagatattttggcgtattatcaaaattattcaacgtagcacgattcgcttctcaatttgatgttccaaatgatctttctaatatccctgataatctaaatatagaagacaaatggatattgaatgaatttggtattatgctaactaatgtaaaagattcatgggaaaatattgacatctacaatgctacccagtctatcaaaacctttggaagcgggtatattggcaagtcattatcttgag

SEQ ID NO: 295785 - DNA, 881 bp, Unknown
  Bacterial polypeptide expressing nucleotide sequence isolated from the Sargasso Sea
ttatttgtcacaaaattcaacaaagatgatgaatttttcaaaaagacatatcctactggaattagacctcaagcaaaagatattgtccgaacttggttatattatacattattgcgatgtgagaaattaactgaacaaaaaccatggtctgaggcatggattatgggttatggattagacgaaaaaggaatgaaaatgagtaagagtaaaggtaatgcaattgatccattaccagtaattcaaaagtcaggcgcagatacattcagattttggagtgcaagcgaaatcaatcaaggatatgactttagatgttcagagcaaaaaatcgaatcaacaaaaaaattcctgagtaaattatggaatgtttcaagatttctttctagttttccaataattgaatcgggtagattaacagactcagacaaatggatattatctgaacttgataaattaatttccgtatgcaatgaaggatattcaaagtacaatttcttcgtaccagctacagcattaagagaattcacatggaatatttttgctgcacagtatattgaaatggcaaaagcaagagcttatggaattggattcgatgacgatgagagagatggtgcaatctttacattacataaagtactttcaacaattttgaaactattggctccaattacgccattcattacagagcatctatggcaaatactttattcaaaagatagtatccataaagagaaattaccagaattagaaaaagtagaagatatgacagatatgacacaatcaattgtggaatttaattccaaagtgtggaatgagaaaaaacagaataatctatctctgaaagattcaatcaaaatagaaattccagagaatttgaatcagtt

SEQ ID NO: 295786 - DNA, 595 bp, Unknown
  Bacterial polypeptide expressing nucleotide sequence isolated from the Sargasso Sea
ggatcctaatggctttgtaactttccataaaaagaaaatgtcaaaatctttaaataatataattattctgaatgacttgataaaaaaatttcgcggagaatctatacgattttcccttctctctgctcattataggcaacctttagattggaatgattcaactatgataaaatcagacaactctctaaacaacttatattcaattcttgcagataatattgatatagaaacaaaagaaacaaaagaaacaaatgttgagaaagctttgttaaatgaccttaacacaccagaggcaatagcttgtctctttaaaactgccaaggaccttcagaaagcaaaaaatactaatttaaaatctgaaatcaaaggcaccttagttagagaagcattttttctgggtatactacagcaagatccttcccaatggtttaaagatactaacataccaactctaaatgaaaatgaaataaaaattctaattgagaaaagagcattagcaagaaaaaacaaagatttcgatgaagctgatagaataagggaacagcttttgaataatggtattttaataaaggacaaaaaagaagagacaatttag

SEQ ID NO: 295787 - DNA, 685 bp, Unknown
  Bacterial polypeptide expressing nucleotide sequence isolated from the Sargasso Sea
gttagagatgaaaaaggccaaaaaatgtctaagtcaaagggtaatgtgatggatcctttagatttattagcaaaatatagtgcggattcattaaggttcacactttgtgcaatggccgcacaaggtagagatattaagttatccgaagaaagaattataggctatagaaatttttcaactaaagtaataaatgcatgtaaatttttgaatttaaatgactgctataactttaatgatttagatcttattgatgttaaattaccaattaatatttggatattgaataaacttattgatgtatatgataatgtagataaagccataactaattacaaatttaatgagtactctgatagtatttataaatttgtttggggagattattgtgattggtatttagaattcttaaaaccagtatttaagttaaaagcaccagaagatataaatgaagttaaatatgtatcctcatttataatgaagtcaattttgaagctattacatcccataaagccatatctaacagaagagttaaatttaaaattttttaatgatagtgaaatgcttatatcttcaagttggccaaaaaagttcaaattaaattatgttgatttatcaattgaattattaattgatattatcactgcattaagagcttatagagttaaaaataaagtttcatttaaaa

SEQ ID NO: 295788 - DNA, 772 bp, Unknown
  Bacterial polypeptide expressing nucleotide sequence isolated from the Sargasso Sea
aatttcagccactctaacatctactggcactccatcttattttatacatgctactgaagcaagtcatggtgatttaggtagtataaaaaaagatgattgtgttatagcaatctccaattcaggtgaaacatctgaacttaataattttattgaatttactaaaagatttaatattaaactcataagcatcacaagtaacccaaaaagtatactgcataaaaatgctaccgttggtattttatataaaaaaccaattgaagcctgtcccttaaatttggcgcccaccagctcaacatcaatgtctatgatcattggtgattgcatagcaatttctctattagagctaagaggttttaaaagcactcaatttaaaaatctgcatcctggaggtaatcttggtaaagatttaaaaaacttaaatgatattatgcatacagctaaagaattgcctttagcaaaattagatgaaaaaatgtccaaatcattaattactatgacaagaaaaagttttggatgtattggcgttattaataacaaaaaacaaatagtgggtataattactgatggtgacttaagaaggaacttaaattctaaattttttaacaaaagtgcttctgaaataatgacgaaaaatccaacattagcaaataaaaacatgttagtaggtgaagcaataaatttaatgaatagaaagaaaataactagtttatttgtctgtcataaaaaaattcctttgggaattgtccatattcatgatttattgagattgacg

SEQ ID NO: 295789 - DNA, 874 bp, Unknown
  Bacterial polypeptide expressing nucleotide sequence isolated from the Sargasso Sea
tctagattttttatgaaagctttgagggatatatatgatttggaagtgagtgagccatttaaagaattattcacgcaaggaatgatcactcacaagacatacaaaacattaaaaaatgaatgggttatgccaaaagacgttgtaatgaaagatggaaagctgatcaaagaaagcactaaagaaattattgaagaagggccatctgaaaagatgtccaaatcaaaaaagaacgttattgaacctgatgaaatacttgatggctacggaatcgatgctaccagaatatttatgatatctgactctccaccagatagagagcttgaatggacagatgaagggatccaaagttctaaaaatctaacacgtagaatagaaagatacttctctcaagagagcacttcacatgatttagaggttgagaaaaaaatagaaatatttgtatacaatattgaaaaaaatatattaggtttttctttgaacaaatgtgttgctgatatttacacgcttttcaattatttagaaagaagaaatgtctatcttcataaaaatgatttgagctataaaatacttacttgtttgtttcctatacttccaaatttgtcggcattaattagtaaaagtttatttaaaaaagaagaatttaatttatggcctaatttaaatgatgatcttttaaaacaagatgagatagtcttaccaattcaagtacagggtaaattagttactactattgacaccaaaaaaggatatttggaggaagatattttaaaatcaatctatcaattggataaaattaaaaataaaatagaaaataaaaagatatttaaggtaattaatgtacaggataaaattattaatattattattggttagc

SEQ ID NO: 295790 - DNA, 1015 bp, Unknown
  Bacterial polypeptide expressing nucleotide sequence isolated from the Sargasso Sea
gtaatggtttgtagctatggtgatcaaaatgatgtagcatgttttagagaattacaattagaagaagtgatgcaaataggtttggatggtcgaatgacagaagctgctggcgattatcaaggactaaaaccgaaacaggcaagaactaaaatcatcgaggatttagagaatgcaaacctagtagataaaattgaggaaatttcccatagaacgcccttgtcagagcgaagtaaaattcctattgagattgtaccaatggaagaatactatctaaaacaaaaagagtctattgaaaaaatgaagaaattaggctcagaaattgagttttatccaaatatgcataagcagattttgatgaattggttagaatcaatatctattgattggccaatttctagaagaagattctatggaacagaaataccaatatggtattgtaacgaatgttcagaaccatttgttccagaacccggaaaatattatagaccatggaaagattcctgtcctgcacaaaaatgtgaaaaatgcgggaatacaaaattcactggagaagacagaacctttgatacatggatggattctagtgtttcacctctgtttgttacaaaattcaacagagatgatgaatttttcaaaaaaacatatccgaccggaataagacctcaagcaaaagacattgttcgaacatggttgtactatacactacttcgatgtgaaaaactaactgaacaaaaaccatggtctgaagcatggattatgggttacggattagatgaaaaaggaatgaagatgagtaaaagtaaaggtaatgcaattgatccactaccagttattcaaaaatcaggtgctgatacttttagattttggagtgcaagtgaaattaatcaaggatatgattttagatgttcagaacaaaaaatagaatcaacaaagaaatttttgagtaaattatggaatgtttcaagatttctttcaagttttcctattatgaatcaggaaatgacagatcagacaa

SEQ ID NO: 295791 - DNA, 781 bp, Unknown
  Bacterial polypeptide expressing nucleotide sequence isolated from the Sargasso Sea
ttgtccagctcttatacagtagcgaggatgcttgagagggatgatttcacaaaacgatttaaagcagagattcccatatccattcatgagttcttatatcctttggcgcaggcacaggactcagtagagttaaaggcagatgtggaacttggaggaacagatcaaaaattcaatcttcttgtaggtagagatcttcagaaagataatgggcaagatccacagtgtattataactacaccattattagaaggtacagatggaattgagaaaatgtctaaatcatatggtaatgatattggcttacaggattccccggaagacatgtatggaaaaacattatctatctcagatgatatgatcttaaagtggtttacgcttgctgctgatcgtgatccatccgaagtagaagctgcttctaaaaggctaaatgacccaagtgtcaaccctatggaagtaaagcgtgagcttgctcgcaacgttgttcaactcttttttgacgaagaaacagctcaaaaagcagaagcgcatttcaatacggtggtagtaggtaaaggcataccagatgaaattccagtttatgaattggattctgaagatctgatcgttaatgtgatattttcctctggattactcaaaagtaaaggagaggcacgccgtatgataaaacaaggtgctgtcaggttagatgataaaaagatagatgatatgcaggcatccatttcacctggagatgaacagatattaaaagtagggaaaagacggttcttgaaggtcacttgat

SEQ ID NO: 295792 - DNA, 563 bp, Unknown
  Bacterial polypeptide expressing nucleotide sequence isolated from the Sargasso Sea
tatgaatactttaaaacccttagtccaaaaacttgaattaatattaaatgaatttaatatcgaagaagatatagatattaaaataacaaatattgatgatttcgactatcaaattaataacctggttaaatatcaaaaacataaaaaagtaaaagaaatagaaaaaaaagtaagttcggttttaagtgagtccaaaattattgaaagttgggaaataagtgatagatattttataaatataaaaatttcactttcagatttaataaattcgataaacccaatagataattacttaaaatcaaataagaaagaaaaaataataatagattatggcgggccaaatattggtaagcctttacatgtaggccacttacggtctttaaatattggtaggagtctttacaaaataaacaaatttgttggtaatgatgttgttagtgatatacatcttggggactgggggatgcaaatagctcaaatattaacattctgtcataatcaaaaaattgatatagatacactagatgctagaaaattgctaaaaatttatcctgaagcagcaa

SEQ ID NO: 295793 - DNA, 901 bp, Unknown
  Bacterial polypeptide expressing nucleotide sequence isolated from the Sargasso Sea
tacatggcataatagtggtgctgcaccaatagcatcattagatgaagctacatacaaagaaaaaatcccagcaccgttctttacagaaggtatcgatcaaacaagaggatgggcatatacacttttgattgaaaatgtaatttacaataacgcatcggtttcaccgtacaaatcatttctgtttcaaggacatgtattagatgaaaacggaaacaagatgagtaagagtaaaggaaatgtacttgaggcaaaagagcttttagaaaaatatccagtagatcttgttagattttattttatgtggaaagcaagtccaattgagccgttaaactttagcactaaagaattaatgtcaagaccttatcaggtgataagtacattatatcatttacatacattttacaaacaaaacagtgagtatgataaattcaatgtagaagaatcaactattgaatgggcaaagaaaaatgatttactaacaccgccagatgtatggttactatcaaaacttcaaagaatgatcgaaagaactactgaaacaaatgattcatgtagatttcatgaatctgcaaaatcaattgaagactttttgataaattctctaagccaaatttacattccaataattaaatcagaattatgggatgaagatgattcaaaacagaatagacgctttacaatctatgcaattcttgctaaaactttgaaaacaatcaatatattgattcatccatttgcaccatttacatcacaatatttgtacaaatccatattttctgagaaagaaaatattttacttgaatcatggccaaaggtggattcgtcattaattgatgaaaaaaaagaaacatcatttgatttactcaaagaaacagtttcagttacatctgctgcaagaaga

SEQ ID NO: 295794 - DNA, 490 bp, Unknown
  Bacterial polypeptide expressing nucleotide sequence isolated from the Sargasso Sea
tcgacatcaatgtccatgatcatcggtgattgcatagcaatttctcttttagagctaagaggttttaaaagtatgcaatttaaaagtctacatcctgcaggtaatcttggtaaagatttaaaaaacttaaacgaagttatgcatttaggaaaaaaattgcctttagcaaaattagatgaaaaaatgtccaaatcattaattactatgacaagaaaaagttttggatgtattggtgttgttaataataaaaaacagatagtgggtataattactgatggtgaccttagaaggaacttaaattcaaaattttttaataaaagtgcttctgaaataatgacgaaaaatccaacattagctaataaaactatgttggtaggtgaagcaataaatttaatgaatacaaagaaaataacaagtttatttatttgtgataaaaaaattcctttaggaattgtccatattcatgatttattgagattgacgagctagt

SEQ ID NO: 295795 - DNA, 812 bp, Unknown
  Bacterial polypeptide expressing nucleotide sequence isolated from the Sargasso Sea
gttgatagattcaaaaaaaggaacaatccgcgcaaaccattatcaccctcaacaagagcaaaaatgcttatttacaaaaggtcaaattattgaagtttttcaagatataattaatcctaattctcctaagatgacgcaggtcgttaatgaaggacaactttctattataaaacccaatgttgctcacacaatggtttttactaaagatacaacttttttaaatttagttagaggtgaaagagaccatgataattatggaataacccatacgattaaacatgtttttgttgatgaaaaagaaaaaaatttattacttaagtattacaaatttgactgcagatcatgcggcaatacaaatttaaaaagagtagtatcattaggatatcaaccattagcaaataatttactaaaaaaaattaatgaaaaatgtgacttatatcccttagaagtgaattattgtgaaaaatgccataactgccaactttcagttgccgtcgatcctaaaaaaatgttttctaattatctttatacatcttctacttctaaattatttagagatcattttgttaatgccgctcaaaaatatactaaagatctgaaattaaacaaaaaaaaatcatatataattgatattggaagtaatgacggtgtagcgcttaagccttttaaagatttaggatttaaacatctacttggcgtagaaccagccaaaaatttggctaagttagctaacaaaaataagataaaaacatttaatggttttttagataaaaatacccttaaaaaaattcggaagaatgccgatctaattt

SEQ ID NO: 295796 - DNA, 699 bp, Unknown
  Bacterial polypeptide expressing nucleotide sequence isolated from the Sargasso Sea
taatggctgcggacttgcctttgccaaaacgcatatatggacatggatggattttatcaggtgatgaaaaaatgtctaaatcaaaagataatatacttgatccattagaaattatcgaaaaatatggattagatgctcttagatattatctattaaaagaagtttcatttggtaacgatggtaatatttctcaagaaaaattagaaaattgtataaatagcgatttagcaaataattatggaaatctttgccaacgagttttggcattttgtgaaaaaaactgtggtcttaaagttccatctcacgaatttaataaagatgatttagatgtattaatgccttttgaaaatctaaataaactaagaaacttaattgataatcaaaaaataaacgaatatatgaattttcttatagaatcactatttgcttctaacaagtattttaatgatcaagaaccttggaaaaaaaaagataataaaataagattaaatacaattgtatatactgctttagaattaataagaaaaatttcaattttgttgaatcctgtgattcctgaaacttctttaaaagttttaaaaatttttagtattaatgaaaaaagcttaaattttgatagtctagccaatcatgaaaatttaaaagagggtatttccttaattaaaatgaatattttattcaaaaaaattgagaaatgat

SEQ ID NO: 295797 - DNA, 791 bp, Unknown
  Bacterial polypeptide expressing nucleotide sequence isolated from the Sargasso Sea
aaaaaccaaattttcaagatactagataaagacaaaaccagaatcgaattgaattcatcctggatgaataaagtaacgagcgctgaactcatagacatagcctctaaatacactgtggccagaatgcttgagcgcgatgacttcaagaaaagattcaaatctgagaatccaatatccatccatgaatttatctatccgcttgttcaaggatatgattctgttgccctagagtgtgatgtggagatgggaggtacagaccagaaatttaatctcttagttggaagacatcttcagcaactttatggtcaagaaccacaaacaataattacattgccacttttagaaggcttggatggtattaagaagatgtcgaaatctgcaaataattatgttgcattaaatgattctggcgatgatatgtttggaaagataatgtctgtttcagatgatttgatgtggagatattttgagcttgtgagttcaaagaatttaacagagataaaggatctaaaaaattccgtaaatgatggcgctaatccaagggatataaaatttctgctagcagaggaaattgttgagagattccataatcaatcaattgcaaaaaaagcaaaggaatctttcatgcagagatttcaaaaaggaggtatccccgaggaaatagatttgacagaagtatcgataaaagatattcaaaatgatgagggtgaaataaatcttccaaggcttttagcgcataccaatcttgtcaattcaatttcagaaggacatcgtgcaatcaaagcaggatc

SEQ ID NO: 295798 - DNA, 592 bp, Unknown
  Bacterial polypeptide expressing nucleotide sequence isolated from the Sargasso Sea
gttgagcggcgccgcctaccgggtggcgcaggccgcgtacgccgcctatgagcgcggcgactacaccggcgcggtcgagcgggcacgcgaggcgatccgccagcgccccgacgtcgtgtcgctgcgggtgctgctcgccaactcgctcgccgcgctgcgccgctatagcgaagcaagccgctcgctcggcgacgcgattgcgcagatcggccgcgatccggcactggtctcgcgtcgcaagcagatcgacgcgctgaacgtgtcgacccgcgcagtggcacgcgcgggccgccagcagccggccgatccggacgtgctgaccggcgccgcgttgacggccgcgcagcaggcctacaaagcgtacgcggcgaaggattttgcgggcaccgtcaagtacgcgaacgaggcgatctcgctgcgtcccgacctgctgcgtctgcggctgttgctgatcgacgcggcgagcgcggccggtcaggataccgaagcatggaacgctgatctcgacgcaagcaagcgcttcggcgacaccgacgaactgcgcttgaggcgcagcttcatcggcaaccgtctggcgccgaagtcgtccgct

SEQ ID NO: 295799 - DNA, 814 bp, Unknown
  Bacterial polypeptide expressing nucleotide sequence isolated from the Sargasso Sea
atggatgagctcgttttagttaatccgatttcttctgaattaactcatatgagaccttcagttattccaacattattagtcgctgcgcaaagaaatttaaatgttggtattgatactttatctttttttgaggttggcccaatttttaaaggtgacaaaccagaagatcaaataagtaccatatcaggcttaagattaggcagtaaagtcaaaaaggattggaaaaattcttcagaggactttgatttttacgacgtaaaattggacgttttaaaaacgctagaagctattggtgtcaaaacaaacaatctacaaaccaatgacaatacaccaagttacttccatcctggaagaagtgctgttttaaaaataggacaaaaacttatagctaatgtaggagaaatacatcctagtatttcagatttctatgattttgaaaagcctatcttagcttttgaaatattttatgaaaatataccaatgcctaaaaaagtaaaagtttcaaggcctatgttaaaaatgtcgcccttacaatcagttacaagagagtttgcatttgtaatagatgaaacaacacccgctgaaaaattagctgatatagcaaaatcgactaataaggatttgattagagaagttttaattattgacgtttataagggtgaaaatattccaaaaggtaaaaaatcaattgcaattaaaataattattcaaccaaatctagaaactttaaccgacgacgatctggaaaaaattagttcggatctgatcaatgtaattaatacaaaattatcaggatctctaagatctcaataat

SEQ ID NO: 295800 - DNA, 475 bp, Unknown
  Bacterial polypeptide expressing nucleotide sequence isolated from the Sargasso Sea
tgagggcgcggcgacgcgggtcatgagcttgcgcgatggttccaagaaaatgtcgaaatcagatccttctgatgcaagccgcatcaacctaactgatgatgcggacaccattgccaagaagatccgcaaggccaaaaccgaccccgaggccctgccctcagaagcaaaagggctggaagaacgccccgaggcgcgcaatctcgtgaatatctatgccgcgctctcgggtcagactgtggatcaggtgctggcggatgtgggcggcaagcagttctcggagttcaagccgatgctggccgatctggcggtagataaaatgtcgccgatcaccaccgaaatggcccggttgatggaaaatcaggacgagattgacaagatcctcgctcggggctcggaacgcgcacgtgagatcaccgcaccgatcctgcgcaagacctacgacatcgttggcatggttgccccggtcgaaatctga

SEQ ID NO: 295801 - DNA, 559 bp, Unknown
  Bacterial polypeptide expressing nucleotide sequence isolated from the Sargasso Sea
cacccagttcggcttgctgctgccgatcctggtgggtctggatggggtgcagaagatgagcaagagcctcggcaatgtggtggggctggaggaagatccgctgtcgatgtactccaagctggagaaggtcggcgatggggcgatcaacgactacgtgacgttgctgaccgacctgaatctggcgacgttgccggagaatccgcgcgagaagcagaaagccatggccctggcggtgaccgccagccgccatgggatggaggcagcgcagaaggcccaaggcgacgccgccaccctggtgggtggtgccggtgatgcggcggcggaggtgcctgaggcctcgctggcggaggtgaacttcccggccaaggccttctatctgttgagtgctgtggggatctgcgccagcagcagcgaggcacggcgtcagatcaagggcggtgcggtgcggctggagggggagaagatcggcgatcccaaccaggagttcgcctcggcggcggaactggagggcaaggtgctgcagctgggcaaaaaaaccttccgtcggctcaccgcttga

SEQ ID NO: 295802 - DNA, 976 bp, Unknown
  Bacterial polypeptide expressing nucleotide sequence isolated from the Sargasso Sea
ttattctcaagaaaagaaattattgaatctgcaattgagttaccagacggagaaaattttgaattacatagaccgtggattgataaaatcaaggtcaaatgcaaagagtgtagcggagtaatgcaaagagaagaatttgtgcttgatacatggcataatagtggtgctgcaccaatagcatcattagacgaagctacatacaaagaaaaaattccagcaccgttctttacagaaggtatcgatcaaacaagaggatgggcatatacacttttgattgaaaatgtaatttacaataacgcgtcaatttcaccgtacaaatcatttctgtttcaaggacatgtgttagatgaaaacggaaacaagatgagcaagagtaaaggaaatgtacttgaagcaaaagagcttttagaaaaatatccagtagatcttgttcgattttattttatgtggaaagcaagcccaattgagccgttaaactttagcactaaagaattaatgtcaagaccttatcaagtcataagtacattatatcatttacatacattttacaaacaaaacagtgagtatgataaattcaacgtagaagaatcaactattgaatgggcaaagaaaaatgatttactaacacctccagacgtatggttgttatcaaaacttcaaagaatgatcgaaaggactactgaaacaaatgattcatgtcgatttcatgaatctgcaaaatcaattgaagactttttgataaattctctaagccaaatttacatcccaataattaaatcagaattatgggatgaagatgattcaaaaaaagataggcgctttacaatctatgcaattcttgctaaaactttgaaaacaatcaacatattgattcatccatttgcaccatttacatcacaatatctgtacaaatccatgttttctgagaaagaaatattttactttgatcatggcccaaggtggattcatcattaat

SEQ ID NO: 295803 - DNA, 653 bp, Unknown
  Bacterial polypeptide expressing nucleotide sequence isolated from the Sargasso Sea
ttctgatgtgataaaaatcgctagttctactactgttgcaaggatgcttgagatggatgattttacaaaaagatacaatacagaaattccaatatcacttcacgaatttttatatccccttgctcaggcacaagactctgttgagcttatatcagatattgaacttggaggtacagatcagaagtttaatttactaatgggtagaaacctacagcgagacatcggtcaagagcctcaatgtattttaacaatgccaattttagagggaacagatggaatcgaaaaaatgtctaaatcttatggtaatgatattggaatttcagatagtgctaatgatatgtacggaaaaactttatctattcctgatgaagttatactatcgtggtatactttagctgttgatgttgaccaaagtcaactaaaagaagtagaagaaaaattaaaagatccttctacaaacccgatggatataaaaaggcagctcgcaaggcagattgttatatcatactatagtaaagaaaaagcaattgaagcggagaacaatttcaataatattactgtattaaaagggatacctgaagatatacaggaatataaactagaagaagaaatgcttttggttaatatcatacatgattctggtttgttgtcta

SEQ ID NO: 295804 - DNA, 664 bp, Unknown
  Bacterial polypeptide expressing nucleotide sequence isolated from the Sargasso Sea
aatgatctctaacttcaataatcattttgccaaattaataaaaggacctaaaattaataatagatttattcttggcctatctggtggaatagattctatggctttattacatctacttaaaaattttatagataacaataaaaatctcaagatagatttgataccaataattgttgatcataatctaagatttgaatctgaaaaagaggctaaagaagtaaagaaaatgtctaaaagcctaggttttaatgcgcagattaaaaaaatcactaaccccaaacctaatgggaatattcaaaactgggctaggaagcacagacgaaacttactatttcatgcatgcgtagaggcgtcagccaaccttattttagcacatcattttgacgaccaggctgagacattatttatgcgcttaattaaaaaatctggcctcgatggactttcaggaatgactgcagttagtacctggaacggtatttttatcttaagaccacttcttaataataacaaagatgaaataaaaaactacgtacaaagtagacatattaagtattttgaagatatttcaaattttaattttaaatttgaaagagtagagaccagatttttgcttgaaaatataaaaaaccaactgtggccaaatattacttatgatcttaattac

SEQ ID NO: 295805 - DNA, 133 bp, Unknown
  Bacterial polypeptide expressing nucleotide sequence isolated from the Sargasso Sea
catgaaaacccctagtaattttattaagaccttaatcgagaatgatatcagggaaggtaagaatgatgggcttgtgtacacaaggtttcctccagagccgagcggttatttgcatattggtcatgctaaagcg

SEQ ID NO: 295806 - DNA, 683 bp, Unknown
  Bacterial polypeptide expressing nucleotide sequence isolated from the Sargasso Sea
ctaaaggaagagtgcgataaatacaaaattgagtattttacctcaccttattgcctagatttcatagatgaattggaaaaatatgtaagtgcgtggaaggtgggttcaggtgatattacatttcacgactcaattgaaaagatgtctaaatcaaaaaaaccaattataatcgcaacaggggcatcaactgaacgtgaagttaaagatgcagtcgaaatagtaaagaaaaataacgatgatttaattttaatgcagtgcaatacaaattacactggttcgaatgataattttaaatatataaatctcaatgttttaaaaacatatgaaaaattatttccagatgttattttaggactttcagaccatacacctggtcacgcgacagtattgggctcagtagcaattggagcaagggttattgaaaaacattttacagataataatgatttagaagggccagatcacaagttttctctttcaccaaaagattggaaaataatggttgaaaaaacacgagaacttgagtcatcactaggaggtttctcaaaaattgtcgaggaaaatgagagagaaactgtagtaatacaaaggagaggaattagatctaaaaagttaataaaaaaaggggaaatagtaaaagaagagcacctcaattacttaagaccttgtgatgatgattgcct

SEQ ID NO: 295807 - DNA, 133 bp, Unknown
  Bacterial polypeptide expressing nucleotide sequence isolated from the Sargasso Sea
tattcatccaaattggaaaaaaactattcataaaaaaactggcaaaccagcaacaagagaaacagacactcttgatacttttgttgattcttcctggtattttttaagattttgttcacccaagaataaaaaa

SEQ ID NO: 295808 - DNA, 895 bp, Unknown
  Bacterial polypeptide expressing nucleotide sequence isolated from the Sargasso Sea
gatgtattctatacatagtagtggcttaattagtggacaaattattgacggtttgaatcaacttcccctttcacaggcgaatattattttaattgattcagaaatagggactacatcaagtgacaatggggaatttaatttgcatatatctgaagaaggttattattcaattctaatttcctatattggttatgaatctaagatattacacgacatttgggtccgacccaacgcacatgattttcaaaaggtgatattatacccctcagttataaaacttgagaatgtggttgttacaaaaaattattttcaaaagaaaagtttgaataattatagctcaataggattcaaaaatgatcaaataagaagagctcctggggctggtagtgaaataagtagaattttgaattcattacccagtgttgcaagtgttggagaaaatcgtcaagatattatggtgaggggtggagggccaggtgaaaatggatttttgatagataatattttcattccaaatatctcacattttaaccaaccagatggtagaacgaatggtccagtaggtttaattaatacagagctagttgaaaacttagagttttttagtaatggtttttcagctgaatatggtaacaaattgtcaagttttggagatattacttaccgagaaggaaataataaatcattcggaggaaacataggtgctggtttaggtggtgcaggaggtgttatagagggaccacttaataataataccacaataataagctcttttagaatgagttatttagatatgatttcagatgcaattaatgcgggcgggcttccaagttataatgattatcaaggtaaaataaattataagccaaatcaataccataatttcacatttttt

SEQ ID NO: 295809 - DNA, 973 bp, Unknown
  Bacterial polypeptide expressing nucleotide sequence isolated from the Sargasso Sea
gcgagagattggtctattagtagaaatagattttgggggactccaatacctgtatggaaaagtactgatccaaaatatccaagagttgatgtttatgggagctgggatgaaattgaaaaagactttggtgtcaggcctaaaaacctgcatagaccttttattgatgatctaataagaccaaaccctgatgatcctactggaaaaagtaaaatggtgagagtagaagaagtttttgattgttggtttgaatctggatctatgccttttgctcaagttcactatccttttgaaaataaagagtggtttgagtctcattttcctgctgactttattgttgaatatattgctcagactagaggctggttttatacattgatggtattatcaactgcattatttgaaaggccaccatttttaaatgccataggccatggtgttgtagtcgatgaaaatggctcaaagctctctaagagattaaataattatccagcccctgatgaagtgtggtcaaggtatggagcagatgcattgcgatggtttttagtatcttctccaattctgagaggtcagaatttagttatggaaagagatgggtcaggtattgattcttctcttaggcaggttattgtgccattatggaattctgtatattttttcactttatattgcaatttagaaaattataatccaagtattataaatgatgcagatttgccaatagataaatatatactttctaagacacatagagcttctgaagatgtaaaaaaatctttatctaattatgatattacgggtgcatgtaacttgatatctgaatttatagagacattaaataattggtatattaggaggtctagaaatagattttgggataaaacaactaataagaatgccagagatgcgtacgatacactttatacagtcttgaatatattgttaagattttctgcacccattgatacctttaatt

SEQ ID NO: 295810 - DNA, 473 bp, Unknown
  Bacterial polypeptide expressing nucleotide sequence isolated from the Sargasso Sea
aatgtatcaatttagaagcttgattgccaatttagaaaaagaattgaaaaaattggatattgatgaatcaatcgaattgcgtatttcgaatatacctaattttgactttcaaattaataatttagttaaatttcaaaacttagatgataagggggtaattaaaaaagccttctccaaaataatagaagctgatccatatattaaaaactttgagtttacagaaagttattttgtaaaccttgaatgcaaggtagaaaaatttatagattcttttgagaatattaaagataatataaaagacttaaaccctaagactataattttcgactacggtggaccgaacattggaaagccattgcatgttggtcatttgagatctttaaacattggtagaagcctttatgaaataaataaattagctggccacagtgtctttaatgatatacatttaggagattggggcatgccgattg

SEQ ID NO: 295811 - DNA, 967 bp, Unknown
  Bacterial polypeptide expressing nucleotide sequence isolated from the Sargasso Sea
gacggtcaaggccagaagatgtccaagtccaagggcaacgtgctcgacccgctggatatcgtcgatggcatcgacctcgaatccctggtagccaagcgtaccagcggcatgatgcagcccaagctggccgagaagatcgccaagcagacccgtgccgaattccccgacggcatcgccgcctacggcaccgacgccctgcgcttcaccaacctggcgctggcctccactggtcgcgacatcaagttcgacatgggccgcgtcgagggttaccgcaacttctgcaacaagctgtggaacgccgccaacttcgtcatcgagaacaccgatgacaaggacaccggcatcaatggtgaaccagtcgagctttcgccggtggatcgctggatcatctccgccctgcagcgcaccgaggctgacgtgacccgccacctcgacgccttccgcttcgacctggcggcgcaaaccctttacgagttcatctgggacgagtactgcgcctggtatctggagctggtcaagccggtgctgtgggacgagaacgcgcccatcgagcgccagcgcggcacccgccgcaccctggtgcgcgtgctggaagtgatcctgcgcctggcccacccgttcatgcctttcatcaccgaagaaatctggcagcgcatcaaggcccaggccggcgtgcagggcgaaaccctgatgctgcaaccctggccggtggccaatgagagtcgcattgacgccgccgcagaaggtgacatcgagtgggtcaagcaactgatgctcggcgtgcgccagatccgtggcgagatgaaaatctccatggccaagcgcatcgacatcatcgtcgccaacgccagtgccgaagacctgcgccgcctggccgacttcgagccgctgctgagcaagctggccaagctggagtcggtgcgcgtgctggctgccggtgaagaagcgccgagtccgctaccacctc

SEQ ID NO: 295812 - DNA, 629 bp, Unknown
  Bacterial polypeptide expressing nucleotide sequence isolated from the Sargasso Sea
ttctggaaagattccttttaaagatgtttatgttactggcctcataagagatgaaaatggacaaaaaatgtcaaagtccaaaggcaatattattgatcctattgatttaatatatggtatatctttagaagatcttcttgaaaagagaacatcaaatcttatgcaagaaggtttagcagaaaagattgctagaaaaaccaaaaaacaattcccaaatggtattgagtcttatggaacagatgctttacggatgacattttattctattgcaactaatgctaaggatataagttttgaaattgggagattaaaagggtttagaaatttttgtaccaaaatgtggaatgctgcaagatttattaatggctacgaaaacaaagggaataattttgaagctgaatctgaatctgataaatggatattaaaagaatttgaacagctaaaagccgatgtcgaggataatataaatcattacaggttagatttagctattaatcatgtatatgagtttttctggaataagttttgtgatgtttacattgaagaatgcaaaaaaactgaaaaaactgacaatcttcatccccttcttaaggaaatacttatttttattcatccttttgctccgttta

SEQ ID NO: 295813 - DNA, 748 bp, Unknown
  Bacterial polypeptide expressing nucleotide sequence isolated from the Sargasso Sea
aatgaaaaataataaaaaaataattaatagtgcaaatagaacgttatcaagagaattaagtagtattaagtatttaaaatctacttttaataataatttttgtaaggcagttagtttaatttataatacaaaaggaaaagttataattactggtgttggaaaaagtgcacacataggtaacaagatatctgcaactcttacatcaacaggaacgccttcatattttgttcatgcaactgaagcaagtcatggagatttaggaagtattaaaaaagatgattgtgtgatcgcaatttctaattcgggagaaacatccgagcttaataatattattcaatttactaaaagatttaatattaaacttataagcatcacaagtaattcaaaaagtatattgcataaaaatgccactgtaggtattttatataaaaaaccaattgaagcctgtcccttaaatttggcgcctactagctcgacatcaatgtctatgatcatcggtgattgcatagcaatttctctattagagctcagaggctttaaaagcacacaatttaaaagtctgcatccaggaggtaatcttggtaaagatttaaaaaacttaaatgatgttatgcatttaggaaaaaaattgccattggcaaaattagatgaaaaaatgtccaaatcattaattactatgacaagaaaaagttttggatgtattggcgttattaataacaaaaaacagatagttggtataattactgat

SEQ ID NO: 295814 - DNA, 310 bp, Unknown
  Bacterial polypeptide expressing nucleotide sequence isolated from the Sargasso Sea
atgttaaaatcacaaatccttgaaaaattagctgaaaatcataagaacttaacaatagaagatattgaaactctttttgatattttcattaaaaaaatgtctaaatctcttaataatgggcaaaacattgaaattagaggctttggaacttttagaagaaaaataaacaaagcaaaagaggttagaaacccaaaaactaacgaaaaaatatataaaaaccaaacttataaacttcattttaaaataggaaaaatattacataaaaagataaatggttatgataatcctaatataaaagatgaagtctaaa

SEQ ID NO: 295815 - DNA, 622 bp, Unknown
  Bacterial polypeptide expressing nucleotide sequence isolated from the Sargasso Sea
aatacaaaagcttgtacaagatagtgttttagcagttaatgattcgttaaatatatcctacgaagataaacctttaaacctaaaagaagattttaagattgttgcactgaaagatttagtcaaagaaaagctgggtctaccaagtcttgatactaaagatgaaatttttagtgcagccaaagacaacaaactaaaattacataagagttggggttggggcaaagtattattagaactatttgaagcatttgtagaaaaagatctatgggaacctaccttcgttaaagattacccatatgaagtatcaccgttatctagaaggaaagatgatgatgatgactatactgataggatggagctttttattgccgggagagagttttctaattttttctgtgagcttaatgacccacatgatcaggagcagagattcactgaccaagtagagcaaaagaaagcaggagatagtgaggcaatgttctttgatgatgactatataaatgctctccagcatggcatgccaccagctgtaggtgtaggaataggcattgatagactaattatgcttgctacggatagacgttcaattcgcgatgtagtttttttcccaactctcaaataa

SEQ ID NO: 295816 - DNA, 913 bp, Unknown
  Bacterial polypeptide expressing nucleotide sequence isolated from the Sargasso Sea
aaaagagcatacaaattaaatccgacttcaaattataaaaagagagttcaacaattaacctcacttgctaagaaacaaagcggcagtaaaaattcttcaaagagaacttcaagaaaaccttcaaaaaaacaaattgctcaagcttcagcttatagtaaacgcgggaattcaaaagcaaagaaaaaagattatgcaggagcgttaaaagattttcaaaaagctcttcaattaaattcatctgcttctaataagaaaaaggtacagcagttacaatcaattttgagaaaaagagggacaaatgttgcctcaaaccctacaaaagcaaaagttcctaaactatcagatattcctagaattagccctgtaaaatatgccaatgatatttataatatagctgaaggctttgagctgagttcaagaaatttagccaaagcaacaagttttattgataataaaacttcaaagaagattgaacgagcaacaatacgtcttactccatcaacatctgatttagaaaaagctgcaaagtcagaaccaaatgattttagaaaacaaattgatttagctcgtcactatgaagcaaatggcgaatttgaatacgctaaagaaatttatttgaaaatggcttcacagcattcattgaatgctaacgctcactttcatttaggctcattctactcaagatttggtcaaatgacaaaagcccgtaattcttttgatgaagcattagatgtacaaccaaatcatcgagcaacaattgaaatgatggcaactctttttggggatactgaaaatctttcattgtctgatgatattttatccaagtcatcaaaaaaagatcctaatggtccagcgcgtagaatgcaatctattagaaaaagtttagatgaaagaaatttgaatatgcagctaa

SEQ ID NO: 295817 - DNA, 893 bp, Unknown
  Bacterial polypeptide expressing nucleotide sequence isolated from the Sargasso Sea
ttcaaaaaaaggaactattagagctaaccattatcatccacaacaagaacaaaaatgtctttttacaaaaggacaaattattgaaatttttcaagatattattaatccaaactctccgaaaattacacaagttgtgaatgaaggacaattatcaattattaaaccaaacgttgcgcatactatggtttttacaaaggatacaacttttttaaatttggttagaggagaaagagaacataaaaattatggagtaacacatactataaaacatgtttttgttgatgaaaaagaaaaaaatatgttgctctcatgttataaatttgaatgcagatcttgtggtggaaacaaattaaaaagagtaatatctctaggatatcaacctctcgcaaataatttattgaaaaaaagagatgaggaatgtgaattataccctttagaaatgaattattgtgaaaattgtcataactgccaactttcagttgctgtagatccaaaaaaaatgttttctaactatttgtacacaacatcgacatcaatacctatggttaaacattttgatgatgccgcaaaaaaatatatcaaagaattaaagttaaatcctaaaaagtcatatgttattgatgttggcagcaatgatggagtgggtttaagaccatttaaggatttgaaatttaaaaaaattcttggaatagagcctgcaaaaaatttggcaaagttagcaaataaaaataaaataaaaacttttaatggttttttaactgaaaataaccttaaaaaaattaaaaaaaatgcagatttaatacttgcatcaaatgtatttgctcattctgacggattaaaagagatggccaagtgcatgcttgcacttgttagcaaaaaatggttcaaatagt

SEQ ID NO: 295818 - DNA, 835 bp, Unknown
  Bacterial polypeptide expressing nucleotide sequence isolated from the Sargasso Sea
tgttgtgtatttaaaaaaagacgaaaggttaacagaatatataaaaataaaagataaatactttaatcaacagaatgaaactggattaactaaagaagaaaaaataaattataagaaatttattagagagtatgaaggatataaaaatttatataacactagaaataatcaaaacataactgagatccgagaagtgataggcaaatatggagataatgctaaaatacatttaggcggcattccgatgatcgctaatgacatgatgagttatataaaaagtgatattgttgtttttggaataggagttttcgtatttatagttttaacactatggtttattttcagaaatttgaaatgggtgctaatgcctctgttaggatgtgcaacttcagtagtacttatggttggattattaggtataattggttggaaggtgactgtaatttcatcaaattttattgctcttatgcttattttaaacatggctatgaatatccatgtcactgttagatttttgcaattgaaaaaagagtttccccatctctcaaaaaacgaagctatatttgaaacaagtaaaaaaatgatgcttccaatcctttacactgttcttacaactatatgtgcttttctatctttagtttttagtggtattaaaccaattattgattttggatggatgatgacattgggtctaataatctctttttttgttacgtttttgttattaccctctttgataaatttgctttcgtctgacaatgaaattggtcttagagatacagaaaagtcttttattacttctgcattagggtcctttacaaaaaaaagtaaaatt

SEQ ID NO: 295819 - DNA, 721 bp, Unknown
  Bacterial polypeptide expressing nucleotide sequence isolated from the Sargasso Sea
ttaaccaaaatagtatttaattcatcatggatggataaaatgaatgctgcggatttgattcgattggcttcacacaatactgttgcacgtatgcttgagagagatgatttcgacaaaagatataaatctaaccaatctatttcaatacatgaatttctttatcctttgatacaaggatatgattcaattgcgctagatgctgatgttgaacttggtggaacagaccaaaaattcaacttacttgtagggcgtcaattacaggaagtgtatggaaagtctccacaggtggttattacaatgccaatactcgaaggattagatggtagtcaaaagatgtcaaaatcattaggtaattatattggaatagacgaacctgcaaaagaaatgtttggaaagattatgtcggtatccgacactttaatgtggcgctattttgaattattgagctttaaaaattttgatgaaatagttcgatacaaaaaacaaaccgagaccggagtaaatcctagagacataaaatttgagctggcagaagagattgttacgcgttttcatgattctaaatcagcaaaggatgcaaaaaatgattttattaaacgttttagtgataattcaatacctgatgttatagatgagatagaaatcagtgttagtagagacggaatagtttttgcgaatcttttaaaagaagcaaatttagtaagcagtacatcagatgcat

SEQ ID NO: 295820 - DNA, 670 bp, Unknown
  Bacterial polypeptide expressing nucleotide sequence isolated from the Sargasso Sea
ttaagatgtctacggttactgggcctcataagagatgaaaatggacaaaaaatgtcaaaatccaaaggcaatattattgatcctattgacttaatatatggtatctctctagaggatcttcttgaaaaaagaacctcaaatcttatgcaagaaggtttagcagaaaagattgccagaaaaactaaaaaacaattcccaaacggtattgagtcatatggaacagatgctttgaggatgacattttattctattgcaactaatgctaaggatataagttttgaaattggcaggttaaaagggtttagaaatttttgtaccaaaatgtggaatgctgcaagatttattaatggttatgagaacaaagggaataattttgaagctgaatctgaatctgataaatggatattaaaaggatttgaacagctaaaagctgatgttgaggataatgtaaatcattacaggttagatttagctattaatcatgtttatgagtttttctggaataagttttgtgatgtttacattgaagagtgcaaaaaaactggaaaaactgacaacctacatccccttcttaaggaaatacttatttttattcacccttttgcgccattcataactgaagaaattcattcaattatttttaaagcgtccttaattgataggaagtaaa

SEQ ID NO: 295821 - DNA, 604 bp, Unknown
  Bacterial polypeptide expressing nucleotide sequence isolated from the Sargasso Sea
aatgggtagaaatttgcagcgtgatattggtcaagagcctcaatgcattttaacaatgccaattttagagggaacagatggagtcgaaaaaatgtccaaatcttatggaaatgatattggactttcagatagtgctaatgacatgtacgggaaaactttatcgattcctgacaaaatcatactatcgtggtatacactagctgttgatgttgaccaaagccaattaaatgaaatagaaaaaaaactaaataatagctctacaaacccgatggacataaaaagaaatctagcaagaaagattgttgctttatactatgataaagaaaaagcaatggaagcggagaataattttaataatattactgtatcaaaaggaatacctgaagatatacaggaatataaactagaagaagaaacgctactggttaatatcattcacgattctggtttattaccaagcaaaagcgaggctagaagaatgataaaacagtcagcggttagaattgatggagatgtcattagtgacattaatttaaaacttacatctggagaaactagaattttaaaagtaggtaaaagaagatttcttaaaatcactaaataa

SEQ ID NO: 295822 - DNA, 687 bp, Unknown
  Bacterial polypeptide expressing nucleotide sequence isolated from the Sargasso Sea
ggtatgattctgcaattcttaaagtcgacgtcgaattaggtggtactgatcagaaatttaatctacttatgggcagggaggttcagaaacattatggattggagcaacaatcaattatgactttacctttacttgaaggtcttgatggagtgaaaaagatgtctaaatctttagaaaactatattgcaatagaagataaggctgatgatatgtttggaaaaattatgtctatatcagacgaattgatgtggagatattttgatctattaagttttaaagattcagcagaaatcaataacttaaaaaaagaccaaaaaaatggagaaaatccaagaaatattaaatttatcttagctcaagaaattgtagaaagatttcatggagaaaagaagtctaaatcagctttaaatgaatttctaaatcgatttcagaaaggaaatatacctacaaatattgaagatatttctttaacacttcgcaaagatgaattaaccctgtctagagtcttaaaggactccaaattgacctccagtacttccgaagccttaagaatgattaaacaaggagcagtcaaaatagatggcaaaaaagtattagattctgaccataaaattgctcttaatgaagagcaaatttatcaagttgggaagaaaaggtttaggcgaataaaaatagctaaaaaatagc

SEQ ID NO: 295823 - DNA, 697 bp, Unknown
  Bacterial polypeptide expressing nucleotide sequence isolated from the Sargasso Sea
tatgaatactgataattgtcttatttcaggcgaaacgatagactatgggccttgtgcatttatggacgagtataatcctgataaagttttctcttcaatagacaactttggtagatattctttttctaatcaatcgaaagttattatttggaacctggcccaactagccagcgctctattaatgcttcacgatgatgatcaaaatactttagaaatttttcaagaaattatcaatgaaacctctacatatttgtctaaagagtattacacacaatttgcctctaaattgggaattgtaacccctgacgaaaaagataaacggttagttgatgacctgctaacaattttagctggagaaaatgcagattttactaactttttctcaaaaattacaaatgacgagaagcctttcaaatttatgatgaaaaccgcatatctaacatgggaaaaaaaatggcaaaatcgtgtaaaaaacatacccgatgcaaagccaaccatgaggcaggcaaacccggtaattattccacgtaatcatattgtagaaaaagctattcagtctgctctttcaggtgactttgaacctttttatagtctaaatgaagcactacaaaaaccttatgattacaaagggcagtgcaattttctaaacgcgccgaacgaagacgaaaaggttactgctactttctgtggtacgtaa

SEQ ID NO: 295824 - DNA, 374 bp, Unknown
  Bacterial polypeptide expressing nucleotide sequence isolated from the Sargasso Sea
tgtttctgattttaaagtgaaaaattataaaagtacaaagattaaaaagaatgaagaatttaacttagagctagaaaaaaatattgatattttaaatcatatatcaaatcataattcattaagaccaaaaataacaattggttttgcagcagaaacaaacaacgtttcaataaatgcaaagaagaagttgaatgaaaaaaattgtgactgggtaattgcaaatgatgtctcagataaaactataggatttggatcagattttaataaaatttcaatattttacaaagataaacctgaagaaaattttgaaaagatgagtaaatcattagtcgctgaagaaatagtcaaaagagtaattcaacagattaattaac

SEQ ID NO: 295825 - DNA, 826 bp, Unknown
  Bacterial polypeptide expressing nucleotide sequence isolated from the Sargasso Sea
gccggagggcggctgggacaagttgttccatgacctccgagatgcggttgtcaagaatgacggagaggtcgaactcgctaggccggtgggtcaggtcctcatcgacgatggctcggtccgcggtgtttcccttccacgggtcggggcttcactgcaaaacgagatcttccacgacgaaatagtcagcgccccagtcgtcatttccactcttccggtctggaacgtgctcgacttgatatcagagcggcacctacccgactggtacgtcaaccagatacgtacgcttgcccaagaccgttggcgtgtctcatacgcccatctttcgatagctaccgccgagccgataccggtgcttgatcggcgggaaatcgcgacctggctgcatgcaccgcttagccggacaagcgggttcatgttcgagcagaccgctcttgatccttcggtcgcgcctgagggcaggcacctctacgtgatgggggccatgctgcacaagtacaaccgcgggcgcgacaaggagttcgtcaaacagaagtttgatgagtttgaggaggaggtcgagatcatgtggcccgggctcaaggacaacgttttcaagcgccgcacctacgttttcgaaccctcatttggagtcatccagaagccgggactggtaggcaagttccgaccccactggaaggccccgaatgttgacggcctctactttgcgagcgaaacgttccagtcccgtggcatcggtatcgacagagcggcccgtgcaggactgtcctgcgtggaggacattctgggtaagcgactctggccgctcgacaagggggggcgctactag

SEQ ID NO: 295826 - DNA, 300 bp, Unknown
  Bacterial polypeptide expressing nucleotide sequence isolated from the Sargasso Sea
tgccgggtgatctgatgaatagggagcagcatgttcctgatccggatacgatgtccggtgcattgatccgttatatcacccaaagtgatcccgagcattttcaaccgatgaatgccaatttcggattactggatcctccagagaaaaaaatgtcgaaatcccttcgaaaagcatggttttcagaaagggcgctcaagaccctgaaagactcgttacctgttgaaccaatgcaatcccctttcaacacttcacaagcagaacaacaaatatctgaaaaagcaggacaggatgccgcatgag

SEQ ID NO: 295827 - DNA, 269 bp, Unknown
  Bacterial polypeptide expressing nucleotide sequence isolated from the Sargasso Sea
gaattatttaaactttaatgaaccatttcaaaatttattttctcaaggcatgataaattttggtggttccaagatgtcgaaatcaaaaggtaatactgttgatcctgaatcatattttgcaactcatggagcagatgctctaagattatatattttatttatggcccctccaagtgatggggtagagtggaatgatgggggtattgagggtacaaaaagatttttgaacaaactatgggaaaatattgaaagattatcaaaattagaaa

SEQ ID NO: 295828 - DNA, 446 bp, Unknown
  Bacterial polypeptide expressing nucleotide sequence isolated from the Sargasso Sea
ttcaagaataatgagtcttaaagatggaaaaaagaaaatgagcaagtcagatccctctgatcaaagtaggataaacttgtctgatgacaaagatcaaatcgtaaacaaaataaaaaaagcaaaaactgacagcggagaattacctgaaaatggtgacgatctcatcaaaagaccagaaataaataatttgattggaatattttcaagtattcaagatcaagatttaaattcaacattaaatgaatttaaaggaaaaaaattttcagaatttaaagaaaaattagccgaagtattagttgaaaaaatttatccaatatcgagagaaataaataaacttctgaaagatgaaaaatacatagatcaaatattacttgaaggatcaataaaagcagaaaaaattgctaaaatgaaagtgaaagacattaaaaatcaaataggattttaaa

SEQ ID NO: 295829 - DNA, 850 bp, Unknown
  Bacterial polypeptide expressing nucleotide sequence isolated from the Sargasso Sea
tatggatcagcttaaagtagtatataattcagattggttggaaaaaatgagattttctgatgtgataaaagttgctagttctacaactgttgcgaggatgcttgagagagatgattttacaaaaagatacgattcagaaataccaatatcccttcatgaatttttatatccccttgctcaggcacaagactctgttcagcttatatcagatattgaacttggaggtacagatcagaaatttaatctgctaatgggcagaaatttgcagcgagatattggtcaagaacctcaatgcattttaacaatgccaattttagagggaacagatggaatcgaaaaaatgtctaaatcctatggaaatgatattggactttctgatagtgccaatgacatgtatggtaaaactttatctattcctgacgaaattatactatcgtggtatactctagctgttgatgttggccaaagtaaattaaaagagatagaagaaaaactaaatgaaccttctacaaaccctatgaatataaaaagacagctcgcaagacagattgttgcatcatactttgataaagaaaaagcaatggaagcggagaataatttcaataatattactgtatcaaaaggaataccagaagatatacaggaatataaacttaaagaagaaatgctactggttaatatcatatatgattccggtttgttaccgagtaaaagcgaggctagaagaatgataaagcagtcagcagtcagaattgatggagatgtcattcatgaaatcaatttaatacttatgcctggagatactagaatattaaaagttggaaaaagaagatttctcaaaatcatttaa

SEQ ID NO: 295830 - DNA, 268 bp, Unknown
  Bacterial polypeptide expressing nucleotide sequence isolated from the Sargasso Sea
cttgttagttatttctataccattgaattttgatttttcccattttccttgtcttgttgaaaaatcagccaaaggtatcatccttacaagagacattatcattgctatagtatgctcagcagtagtaactgcattaccaaatggagtattcattacaataacacctttttcggttgcagcatctttatctatattgtcagtccctatacctgctctaccgattatttttagtttttcagctttttctaaaagttcttttgttacgtga

SEQ ID NO: 295831 - DNA, 699 bp, Unknown
  Bacterial polypeptide expressing nucleotide sequence isolated from the Sargasso Sea
tgaatctgcaattgagttaccagacggagaaaattttgaattacatagaccgtggattgataaaattaagatcaaatgcaaagagtgtagtggagtaatgcaaagagaagaatttgtgcttgatacatggcataatagtggtgctgcaccaatagcatcattagacgaagctacatacaaagaaaaaattccagcaccgttctttacagaaggtatcgatcaaacaagaggatgggcatatacacttttgattgaaaatgtaatttacaataacgcatcagtttcaccatacaaatcatttctgtttcaaggacatgtgttagatgaaaacggaaacaagatgagtaagagtaaaggaaatgtacttgaggcaaaagaacttttagaaaaatatccagtagatcttgttcgattttattttatgtggaaagcaagtccaattgagccgttaaactttagcactaaagaattaatgtcaagaccttatcaggtgataagtacattatatcatttacatacattttacaaacaaaatagtgagtatgatagattcaatatagaagaatcaactattgaatgggcaaagaaaaatgatttactaacacctccagacgtatggttgttatcaaaacttcaaagaatgatcgaaagaactactgaaacaaatgattcatgccgatttcatgaatctgcaaaatc

SEQ ID NO: 295832 - DNA, 859 bp, Unknown
  Bacterial polypeptide expressing nucleotide sequence isolated from the Sargasso Sea
ataccattcaaaaacatatatattcatccgcttgttaaggatgaaaaaggagaaaaaatgtctaaatctaggggtaatgtaattgatcctattaaaatggctgaaatctatggctcggattcgttaagatttactctcgctaacctctcaactcagggaagagacataaagttatctaataaacttgttgagaatagtagaaacttcataacaaaaatctggaatgttgcaaggttttatgaatttaacaaattcgtgttagatgaaaagtataatttaaaaaaaaataaaattccattaaacaattggataattgttaggttaagtgaaacgaaaagaaaaattttaaaaaatttaagtgaatttaaatttaacttactactcaatgagctatatcattttgtgtggaatgatttttgtgatttatatcttgagttttgtaaaatttatttaaaggatgaaaaaaataaaaaagaaatttctaataattttagtcaagtcttcaaagaaattttgaacttattaaatcctattattccttttgtgacagaagaaatatcttctaaactaaaattttctaatagtagccttttttcagaaacttttgaaagcaatttatttgctaaaaatcaaatatcaaataaagaaataactgacatctataaattcattaagttaataaaagatataagagcagaattttcaggaaaaaacctcaataattcaagattacttatattttctaagaacaaagttccgtggattgatgataataaaaatttactttattcattatttaattttgacaaaatcaattataaaacatcttatcaagagtcaaagtttattataagctcca

SEQ ID NO: 295833 - DNA, 788 bp, Unknown
  Bacterial polypeptide expressing nucleotide sequence isolated from the Sargasso Sea
cgatttaattcagaatggtgtgagaagcttggcgctgatggcctaataaagcttgcatcaaaatataacgttgcaagaatgttagaaagagatgatttcaataaaagattttcatcaaataagacaatagctattcatgaatttttgtatccattagttcaaggatatgactcagttgctttagaggctgatgttgagtgcggcggaacagaccaaaaatttaatctcttagttggaagagaacttcaaagagattatgaacaagaacctcaagttgtaatcacagttcctattttagaaggccttgatggcgttaaaaagatgtcaaaatcattagataactacattgctattgatgaggagcctgatgagatgtttggaaagattatgtcaatttctgatgaattaatgtggcgttggtttgagctattaagctttatgcctgaagaagatattacgaagttaaaagatgaaatgaaaaaaggtaaaaatcctcgtgatataaaatttattttagctgaagagcttgttgacagatttcataaagaaggagaaggaaaaaaatccaaagagatatttttaaatagatttcaaaagggaaacatacccgatgagattgaatcagttaaaattgatataaaaaatgactctattctcttagttaatctattaaaagatacaaatatgatctctagtatttctgaaggcaataggctcattacacaaggcggtattaagataaactctgaaaaagttcaagaccctaagcttgaagtatcaaaaggttc

SEQ ID NO: 295834 - DNA, 688 bp, Unknown
  Bacterial polypeptide expressing nucleotide sequence isolated from the Sargasso Sea
aagggtcaaagctggatttgaccctacttcacctgatcttcacttagggcacacggttctattaaataagatgaaactatttcaagaattaggacatgaagtaatttttcttataggagattttaccgggttagttggagatccttctggcgtaaacgagactcgacctgttttgactgaggatcagataaaaaataatgcagaaacgtataaatctcaagtatttaagatattggacccaaaaaagactgaagttagatttaattctgaatggatgaataaagttcatccttctgaatttataaaacttctatcttcttacactgtagctagaatgctagaaagagatgattttgcaaaaagatataagtctcagcaacctatttcaattcatgaatttttatatccacttcttcaaggatatgattctgttgagctaaaagcagatatagaattgggaggaacggaccagaaatttaatttacttcttggaagagaggtccaaaaacattatggaatagaccaacaagcaatttttacagtcccactattagaaggccttgatggagtaaaaaaaatgtcaaaatcgcttaataattatgtagctcttgaggatgaaccagatcaaatgtttgggaaaattatgtctatttctgataagttaatgtggcgatatttttctttatta

SEQ ID NO: 295835 - DNA, 760 bp, Unknown
  Bacterial polypeptide expressing nucleotide sequence isolated from the Sargasso Sea
agaggttggttttatactttacatgctattgcaactatgtgttttgattctgtagcgtataaaaatgtagtaagtaatgggcttgtcttagataaaactggtcagaagatgagcaaaagtaaaggcaatgcaatcgatcctttcgatacactttcaaaatttggccctgatgctactcgttggtatatgatgagtaattctcaaccgtgggacaatctgaaattcgatttagacgggataaaggaagttcaaagaaaattttttggaactatttataacacgtaccaattttttgctttgtatgcgaatttagatggatttgattattcacaagaagagatagctttatccaaacgtccggaaattgatcgatggattctttccaaattaaatagcttaattaaatcagttgatcaagattatgaagattatgaaccgactaaggcttcaagagcaattcaagatttcgtttctgaacaactgtccaattggtatgtgagattatgtaggagacggttttggaaaggggaatacactgaagataagatttctgcctatcaaaccttatataggtgtttagaggtcgttgcacaattatcagcaccaatagctccatttttcatggataaattgtttaaagatttagatttggtttctggaagacataatgttgaatctgttcatttgtctgattttccagttgcgaattcttctgaaatagatattgatttggaggagagacatggaaattgctcaaaag

SEQ ID NO: 295836 - DNA, 700 bp, Unknown
  Bacterial polypeptide expressing nucleotide sequence isolated from the Sargasso Sea
ccacttttgcaggcaaaagactctgtagagcttaaagcggatgttgagcttggaggtacggatcaaaaattcaatttattattgggcaggaagcttcaagaagatcataaaatgaagccgcaaatttgtatcatgatgccaatattagaagggctagatggtgttaaaaaaatgtcgaaatctcttgataattatatttccataagtgatgaagcaaatgatatgtttggcaaagtgatgtctattagtgatgatttgatgtggaggtattatgaactattaagttttcaagatttagataaaatccactcatctcataaagcttgtaacaacgatgaaatgaatccaagagatctaaaaatagatctagcatatgaattagttgagcgcttccacggaaagaaaaaagcaaaggaagctaaagataatttcatcggaagatttcaaaacaaagatataacaaaagatattccagatgttgaaattgattcagaaggaacggaattaaaaataattgaccttatcactgttaaacttaaggctattgctagcacctctgatgtaagaagactggttaatcaaaatgcaattaaaattgatacaaaacctattgtagatatcaactatgattgcaataaacataaaaaatttctcctacaaattggcaaaaagaaagcttacaaaatttctttaaaataac

SEQ ID NO: 295837 - DNA, 370 bp, Unknown
  Bacterial polypeptide expressing nucleotide sequence isolated from the Sargasso Sea
tctgattttaaagtgaaaaattataagagtgcaaagattaaaaagaatgaggagttaaacttagagctagaaaaaaatattgatattttaaatcatatttctaatcataattcattaagaccaaaaataactattggttttgcggcagagacaaacaatgtttcaacaaatgcaaaggagaagttgaatgaaaaaaattgcgactggataatcgcaaatgatgtctcagatcaaactataggatttgaatcagattttaataaaatttcaatattttacaaagataaacctgaagaaaattttgaaaagatgagtaaatcattggtcgttgaagaaatagtcaaaagagtgatccaacagattaattaac

SEQ ID NO: 295838 - DNA, 460 bp, Unknown
  Bacterial polypeptide expressing nucleotide sequence isolated from the Sargasso Sea
aatttttagtgcagccaaagacaacaaactaaaattacataagagttggggttggggcaaagtattattagaactatttgaagcatttgtagaaaaagatctatgggaacctaccttcgttaaagattacccatatgaagtatcaccgttatctagaaggaaagatgatgatgatgactatactgataggatggagctttttattgccgggagagagttttctaattttttctgtgagcttaatgacccacatgatcaggagcagagattcactgaccaagtagagcaaaagaaagcaggagatagtgaggcaatgttctttgatgatgactatataaatgctctccagcatggcatgccaccagctgtaggtgtaggaataggcattgatagactaattatgcttgctacggatagacgttcaattcgcgatgtagtttttttcccaactctcaaataa

SEQ ID NO: 295839 - DNA, 648 bp, Unknown
  Bacterial polypeptide expressing nucleotide sequence isolated from the Sargasso Sea
tatggaacgcagcattcttaatacgtttcgcgcaatggatacatccgatggtgctggcgttaagctgaagcgcgcactgggatatacccctctcatgcgtttggacccgtttctgatgctcgatgcgttttcctccgacaatcccgacgattatattgccggctttccgccgcatccgcatcggggatttgaaacggtgacctatttggtggaaggccatatgcgtcaccgagatcacctaggaaacgaaggggatctcaaacagggtggcgtgcaatggatgaccgctggaagcggtattatccatgaagaaatgccacaacaggaaaacggtttgttacgcggttttcaactgtggattaacttgcccgcagcggaaaaaatgaagccggcaacgtatcgagatattgctgatacagagatgccgcggttggatctggccagtggtgggcagatcaaagccattgccggtgaagtgacgattgccgagcaaacgctcagtgctccgatgaaaggcggccaaaccaacccgttatatctagatgtggtactacgcccgagagaaaaccttaccgtgccactggcgcggggtcataacgcctttgtgtatctgttcgaaggtcgcatagaggtgagcggagagaccgt

SEQ ID NO: 295840 - DNA, 915 bp, Unknown
  Bacterial polypeptide expressing nucleotide sequence isolated from the Sargasso Sea
aggttcacaaattgaattctatcctaatatgcataaacagattttgatgaattggctggaatctatatcaattgattggccaatttctaggagaagattctatggtacagaaataccaatttggtattgtaaagagtgttcagaaccatttgttccagaaccaggtaactattatcgaccatggaaagattcctgtcctgctgaaaagtgtgaaaagtgtggcaatacagaattcattggggaggatagaacatttgacacatggatggattctagtgtttcaccattatttgttacaaaattcaacaaagatgatgaatttttcaaaaagacatatcctactggaattagaccacaagcaaaagatattgtccgaacttggttatactatacattattacgatgtgaaaaattaactgaacaaaaaccatggtctgaggcatggattatgggttatggattagacgaaaaaggaatgaaaatgagtaagagtaaaggtaatgcgattgatccattaccagtaattcaaaagtcaggtgcagatacattcagattttggagtgcaagtgaaatcaatcaagggtatgactttagatgttcagagcaaaaaattgaagcaacgaaaaagtttttgagtaaattatggaatgtttcaagatttctttctagttttccaataattgaatcaggcaaattaacagactcagacaaatggatattatctgaacttgataaattaatttctacatgtaacgaaggatattcaaaatataatttcttcataccagctacagcattaagagagttcacatggaatatttttgctgcacagtatattgaaatggcaaaagcaagagcttatggaattggatttgatgatgatgagagggatggtgcaatttttacattacacaa

SEQ ID NO: 295841 - DNA, 814 bp, Unknown
  Bacterial polypeptide expressing nucleotide sequence isolated from the Sargasso Sea
acttagatgtgaaaaactaacagaacaaaagccatggtctgaagcatggattatgggatacggtttagatgaaaagggaatgaagatgagtaaaagcaaaggtaatgcaattgatcctttaccagtaattcaaaaatcaggtgcagatacgtttaggttttggagtgctagtgaaattaatcaaggatatgactttagatgttcagaacaaaaaatagaatcaacaaagaaatttttgagtaaattatggaatgtttcaagatttctttcaagttttccaattattgaatcaggtaaattaacagattcggacaaatggatattatcagaacttgataagttaatttcagtatgtaatgaaggatattcaaaatataatttctttatacctgctacagcattaagagaatttacatggaatatttttgcagcacaatatattgaaatggcaaaagccagagcatatggaattgggtttgataacgatgaaagagatggtgcaatttttacacttcataaagttctttcaacaattttgaagctcttagcaccaatcacaccattcattacagagcatctttggctaacactttattcaaaaaatagtattcacaaagaacaattaccaaagatagaaaatgttgaagacatgacaaatatgacacaagcaattgtggagtttaactccaaagtatggaatgagaaaaagcagaataatttatctctaaaagattcaattagaatagaaattccagaaaatctaaatcaattcaaaaaagatttaatcgcaatgcataatttggaaactagttag

SEQ ID NO: 295842 - DNA, 553 bp, Unknown
  Bacterial polypeptide expressing nucleotide sequence isolated from the Sargasso Sea
ggagggacttgacggtgtcaagaaaatgtcaaaatccttagataattatatatctataagtgatgagcccaatgacatgtttggtaaagtaatgtcgattagtgacgatctgatgtggcgatactacgacttactaagttttaaaaattatgtggacatcgcatcagttaagcaaatgtgttcacaggataaatttaaccctagagatgccaagattgatttagcgcatgaattagtagagagatttcatggtcaggacaaggcagataaagctaaaagtaattttatttctaggtttcagaataaaaatataacagaagatatcccactgatagaacttgaaagtgatggagaactaagaataattgatttgataataaataacctgaaagtcgtaaaaagtacatctgaggtgagaagactaattagtcaaaatgctatcaagatcgattcaagaccaataaccactattgactatgattgcagtgtagattctgaatttctccttcaaattggcaagaaaaaagcctataaaatattattaaggtcataa

SEQ ID NO: 295843 - DNA, 618 bp, Unknown
  Bacterial polypeptide expressing nucleotide sequence isolated from the Sargasso Sea
tactccaggaaaaattgaactctgaacggcaacaaaatcttgaaaaaactagcaaaatagcagcattagaaaataccgcaaaacaaatttcgtctgaaaaattggtactccaggaagatttgaaatttgaaaagcaaaaaaatcttgaaaaagctagtaaattagcatccttagaaaaaatcatagaatcacagaacaaacaatttcttagaaaagagcgagaaactatggtgtactatcataagtgtcaaaaactggctaaaatgacaataaatttgacatctgaaaatagcaagcaaaaagaatcatttgagaaacaaattcaggccttgaaaattaaacatgaaaatgaaatcagaaatttgacatctgaaaaatctgagcaaaaagatatattaatgaaacagattgaggacttgaaaaatgtacacaaatacgatattgaaaatttgaaaaaagaaattttggaagaaaaagaaaaactatcaaagattttttcaatctcccagcctaatgtgaagatcaacccagatgattttcaatttcaaaatgaatccagtgttttattatctaatagtgagggaacaattacgatcaaggaagatataagtgaataat

SEQ ID NO: 295844 - DNA, 718 bp, Unknown
  Bacterial polypeptide expressing nucleotide sequence isolated from the Sargasso Sea
agcattgctatccatgaatttttatatcctttagttcagggttatgactctgttgctttagaggtagatgtagaatgcggtggaactgatcaaaaatttaatcttctggtaggtagagaacttcaaagggattatgggcaagaaccacaagtggtaataactgtccctatattagaaggactagatggcgtaaagaagatgtcaaaatcattagataactatatcgctattgatgaagattcagatgatatgtttggaaagattatgtcaatttctgatgagttaatgtggcgctggtttgaattattgagctttattcctgaagaagaaatagcaaaattaaaaactgagatggagtctggtagaaatccacgcgatattaaatttgtcttagctgaagaattggtagataggtttcataatgaaggcgacggtaaaaaatgcaaggatacctttctgaagagatttcaaaaaggtcaaatgccagatgatatagaaagtattcaggtagatatagaaggtgattctattcttttagtaaatcttcttaaagacaccaagatgattgcaagtgtatctgaaggtaataggttgattgagcaaggcggtattaaaatagattctgaaaaagttgaagatcaaaaattagaggttaacaaaggttcagagaatatctatcaagttggcaaaagaaaattcttaaaaattaaagtataga

SEQ ID NO: 295845 - DNA, 867 bp, Unknown
  Bacterial polypeptide expressing nucleotide sequence isolated from the Sargasso Sea
gaaaacatatttagatcaagcaaaatcgattttgaaaatggatgagcttaaggtggttcataattctgaatggttaggcacaatgagtttttcagatgttatcaaactctctagctctactacagtagccaggatgctagaaagagatgatttcaataaacgctatagctctgaggttcctatttctttacatgaatttttataccctcttgctcaagctcaagattcagttgagttagtttcagatattgaacttggtggtacagatcaaaagtttaatttgctaatgggacgtaatctccaaaaagatgtaggtcaaaaacctcaatgtattttaaccatgccgattttagaaggcaccgatggtgtggaaaaaatgtctaaatcctatggcaatgacattggtatcagcgattcagcaaatgaaatgtatggtaaaacgctatctattccagataatattatgccttcttggtttactttagccgtggatgctgaagatagttatgtagatgaaatttcaaaaaaacttgatagtaattccatcaaccctatggagttaaagagagaacttgccagaaaaatcgttgctatttattacgatgagaacaaagctctagaagcagaaaatcattttaatcaagtaacagtctcgaaaggcattcctgatgaaattgaggaatttaaattaaccgaagatgaacttttggttaatattattgctgactcaggactattaaaaagtagaagtgaagctcggaggatgatcaaacaatctgctgtgaaaattgatggtaaaacagtaagtgacattcaatataaagtttccttatcaacgtctttcattttaaaagtaggtaaacgaaa

SEQ ID NO: 295846 - DNA, 502 bp, Unknown
  Bacterial polypeptide expressing nucleotide sequence isolated from the Sargasso Sea
tttaagacagatttttttcctattcctgagccattaattttaggagaggctacaagagttatgagtctccgcgatgggtcaaaaaaaatgagtaaatcagatccttctgattattcgcgaatcatgttaactgatacagcagaaaatattatacaaaaaattaaaaaagccaaaacagatcctgaaccattaccgcaagataaaactggtttagaaaaaagaccagaagcagaaaacctaatctcgatttttgcttctttgcaagatacatccattgagagtgttattaaagattacgtgggtaaagaattttcaacctttaaaaaagatttagcagatttatccgtatctaaattagagccaattacgagtgaaatgaataaacttatgaatgatgtttcttacatcgattctattttaaaacagggtcaagataatgctattgcagtagcagaaccagttttacagaaaacaaaagaaattattggctttttaacataaa

SEQ ID NO: 295847 - DNA, 675 bp, Unknown
  Bacterial polypeptide expressing nucleotide sequence isolated from the Sargasso Sea
agattccttttaaagatgtctatgttactggcctcataagagatgaaaatgggcaaaaaatgtcaaagtccaaaggcaatattattgatcctattgacttaatatatggaatctctctagaagatcttcttgaaaaaagaacatcaaatcttatgcaagagggtttagcggaaaagattgctagaaaaaccaaaaaacaattcccaaatggtattgagtcatatggaacagatgctttgcggatgacattttattctattgcaactaatgctaaggatataagttttgaaattgggagattaaaagggtttagaaatttttgtaccaaaatgtggaatgctgcaagatttattaatggttatgaaaacaaagggaataattttgaagctgaatctaagtctgataaatggatattaaaagaatttgaacagctaaaaaccgatgtcgaggataatgtaaatcattacaggttagatttagctattaatcatgtttatgagtttttctggaataagttttgtgatgtttatattgaagaatgcaaaaaaactgaaaaaactgataatctgcatccccttcttaaggagatacttgtttttattcatccttttgctccgtttataactgaagaaattcattcaattatttttaaagcccctttaattaaaaggtagg

SEQ ID NO: 295848 - DNA, 514 bp, Unknown
  Bacterial polypeptide expressing nucleotide sequence isolated from the Sargasso Sea
acggtttaataatgattttaattctcctgattttttaaaagttccagaacctttaatacaaaaacatttttcaagaataatgagtctaaaagatggtacaaaaaaaatgagtaaatctgatccttcagatttaagcataataaatcttactgatgaaaaagatgaaataattaacaaaattaaaaaagcaaaaacagatactatgtctatgcccggatctggtgaaaatttatcaaaaagacccgaagttgaaaatttattaggtatttatgcaagcttatctagtcaagatttaaaggacacaataaaacaatttagtggaaaaaatttttcagaatttaaagaaaatctttcagaacttgttgttgaaaaaattaatcctatctcaaatgaaataaagaaactattagatgatgagacatatctatcaaatattctatttgaaggatttcaaaaagcagataaaatcgcttcaaaaaaaataaaattgatgaaagaaataataggtttttaa

SEQ ID NO: 295849 - DNA, 946 bp, Unknown
  Bacterial polypeptide expressing nucleotide sequence isolated from the Sargasso Sea
taatgaaagtaattttgtacctcctcgtaacaaacaatttttgttagattggatggaaaatattactattgattggccagttagccgtaggcgttggtatcatacagagattccagtttggtattcggaagatcgaaagaaaataatcaccccccctcacggaacttatgtccaaccttggaaagattcaccacctgaagattctattgtattggatcgtgaaactcgaaaggaattaggtaattatttagacatgaaatctgaattaggtaacttagaaggcgaagagaaagtcttcgatacttggatggattcatctaattctaatttgtatgtttcaggttatttatcagatcccgaattatttgaaagagcatttccaacaggtgtcaggccacagggaaaagaaattgttcgaacttggttgtattacacacttctaaaatcagctttactgctcgataaaccaggatttgcgaatatttggattgacggtctaggaatggatccttggggccgtaagatgtcgaaatctcttggaaatggaattgatgccgaatcagtattagaatgtggttttggaggaagaacaggttcctggaagattaaaggaccagaaggcaaacaagtaacattacaagctaagaaaataggttcagaatgctttaggttctggaaagccgcagatgctcaagttggagacgatttccaaataaatcctgaacaaattgaattaagatattttggagttcttacaaaaattttcaatgtgggccgtttcgcttcccagtttgattttgatggggatttagatacagtcccagaaaatttagagaatgaagataagtggattttagctgaattcacagaattattagagaaagcaaaagcaggttacacagggatggacatttacacagccgctcaaggaatcaaaactttcagc

SEQ ID NO: 295850 - DNA, 507 bp, Unknown
  Bacterial polypeptide expressing nucleotide sequence isolated from the Sargasso Sea
tggcgacttcaccggcatgattggtgatccaacaggtaaaaacgtaacgcgtaagccgttaacccgcgaagatgtgctggctaacgcacagacatacaaagagcaggtgtttaagattcttgatccggccaaaacccgtgtggcttttaactccgaatggatggaaaagttaggcgcggctggcatgatcaaactggcagcacgtcaaaccgtagccagaatgctggagcgtgacgactttaaaaagcgttatgccaataaccagtctattgctatacacgagtttttatacccgctggtacaaggctgggactccgttgctttagaagctgacatcgaaatgggcggcaccgatcagcgctttaacctgctgatgggtcgtgagctgcaaaaagacgaaggtcagcgcccacaaaccatcattatggtgcctttgcttgaaggcctggacggtgtgcaaaaaatgtccaagtccctgggcaactatattggtatcacggacacccc

SEQ ID NO: 295851 - DNA, 812 bp, Unknown
  Bacterial polypeptide expressing nucleotide sequence isolated from the Sargasso Sea
taatgcaactagtgttgcagttgattcaactattgttcttaattttaatgaaagtgttgatgctgaaagcggaaatatcactattaaaaaaacttcagacaattcaacagttgaaaccattgatgtaacaggcggtcaagtaacaggttcaggaacatctcaaataactgtcactccatcatcagactttgatgcctcaactgaatattatgttttaatagatgcaactgcatttgatgatagcgaaagcggttcatatgctggaataagttctacaacagctttaagttttaccaccgctaatgcagtacctacactaagttcatcagttccagcagataatgcaactagtgttgcagttgattcaactattgttcttaattttagtgaaagtgttgatgctgaaagcggaaatatcactattaaaaaaacttcaggtaattcaacagttgaaaccattgatgtaacaggcggtcaagtaacaggttcaggaacatctcaaataactgtcactccatcatcagattttgatagcgaaactgaatattacgttttaatagatgcaactgcatttgatgatagcgaaagcggttcatatgctggaataagttctacaacagctttaagttttacaacagaatcaaccgcctctgatccttttgaagataaaacagttgttgcattagttgaagcacaaacagaagctcctaaaagaattatacgagatgtaactacaccaatatttaatcgtttacagtggttgagaaattatagtgaagatcgagatttatttagtcagggaattaaattta

SEQ ID NO: 295852 - DNA, 679 bp, Unknown
  Bacterial polypeptide expressing nucleotide sequence isolated from the Sargasso Sea
cccttgctcagcaaagactctgttcagctagtatcagatattgaacttggagggacagatcaaaagtttaatctactaatgggtagaaatctgcagcgagatattggtcaagaacctcaatgtattttaacaatgccaattttagagggtacagatggaatcgaaaaaatgtctaaatcttatggaaatgatattggactttcagatagcgctaatgacatgtatggaaaaactttatctattcctgacgaaatcatactatcgtggtatacactagctgctgatgttgaccagaatcaattgaaagaggtagaagacaaactaaataagcgttctacaaacccgatggatataaaaagagagctagcaagagagattgttgcatcgtactatgataaagaaaaagcaatggaagcagaaactaattttaataatattactgtatcaaaagggatacctgaagatatacaggaatttaaattaaaagagaaaatgctattggttaatatcatttatgattccggtttgttatctagtaaaagcgaggttcgaagaatgataaaacagtctgctgttaaaatcgatggagaggttattaatgacattaatctagaactcgtgcctaaggatactagaatattaaaaattggtaaaagaagattcctcaaaatcacttaat

SEQ ID NO: 295853 - DNA, 834 bp, Unknown
  Bacterial polypeptide expressing nucleotide sequence isolated from the Sargasso Sea
caatagggacgtcgttttccaggcttctcgttatgggaaaggggaagcagactacctgaactgcccgctgaatgaacgccaatatgaaacctttgtcgcagaagtttcaagggcggagaaagtggaattacacagttttgaagatatccgtccttttgaaggttgtctgccgattgaagtcatggttgagcgaggaaaagacacactacgttacggaccaatgaaaccggtcggattggaacatccggaaaccggagaaaggttccatgctgtagttcaactgcgccaggaaaacactgcggcaagtctttataatctggttggttttcaaaccaagatgagttgggggttccagaaaaaagttttcagaatgatcccggggttagaaaatgccgagtttgtccgtctgggttccatccatcgtaacacattcattaatagtccaatggtgcttaccccaagactgcatctaaaaaaacaccctcgaattttcatggccggacagatcattggggttgaaggatatactgaatcgaccgctatggggctctgtgctgcaaagcaaatcgcaagtgatctgatgaatagggagcagcagattcctgatccggatacgatgtgcggtgctttgatccgttatatcacccaaagtgatcccgaacattttcaaccaatgaatgccaatttcggattactggatcctccagagaaaaaaatgtcgaaatcccttcgaaaagcatggttttcagaaagggcgctcaagaccctgaaagactcgttacctgttgaaccaatgcgatcccctttcaacacttcacaagcagaacaacaaac

SEQ ID NO: 295854 - DNA, 766 bp, Unknown
  Bacterial polypeptide expressing nucleotide sequence isolated from the Sargasso Sea
aatgaaaataatagaaactttattaaatgaccttaaagatgcattagaagagtttgatatcaaagaagatatagattttaaaatatcaaatatagaaggtttcgattaccagataaataacttagtaaaacatcagaaaaataaggatataagagaaaatattaaaaaatttgagaaaattttatctgataacaaaattgttgataatttcgaaataacaaaaaattactttataaatataagaattaatttagtttcctctgataagtttttcctagatgtaaccaacaatttaaaaaataaagatccaaaaaatattttaattgattacggtggtccgaatattggtaaaccactacatgtcggacatcttagatctctaaatattgggaggagtataaaagagttgaataagttagttggtaatcaagtaacaacagatatccatttaggagattggggaatgcccatcgcacaaattatcgcattttgtgaaaaagaaaatatagatataaaatcaataactgcagaaaaattaattgagatttacccaaagtcatcaaagctctattctgattcagaagattttaaaataattgcgcaagaaaaaaataagaaacttaatgatcttgataaaaaaattatagaagaatggaaatatatcagaaatatctcaatagattcaatgaagaaagtactcgatattcttaatcatgattttgacttatggctaggtgaaagtagcgttaatgaattaatagaaccc

SEQ ID NO: 295855 - DNA, 834 bp, Unknown
  Bacterial polypeptide expressing nucleotide sequence isolated from the Sargasso Sea
aaagcgtggatagccgaaccgaggggcgggacaccattcacaccgtgccaaaatcaatattgccagaagcttatattaacgaattcttacttgatgacagtaaagagtttgctggccttgttgaagaaatttctgatgaccatatggaagtgctcgacctcggttacgaacgcctcatgagtcgccatgcatggggtataacaccgaagaatataggtcaaggtatggcgctgcatgccttgctagaccctcatattgatatgtgtattctcaccgggcctgcaggcagtggtaaaacgcttttagccctagctgctgcgcttgagatggtggttgagcgcaatatgtatgacaaaattatcgttactcgtagtacccctgaaattgcagaatctattgggtttttaccagggacggaagaagagaaaatgctgccgtggctggccgctattaccgattcattagaagtgctgcacaagcatgatgaaaatacgaaaggctctatgaattacattatggagaaggcgaatattcagtataaatcggtgaattttatgcgtggtcgcagtattcaaaacgccatcgttattctagatgaatcgcaaaacttaacggcatcacagctaaaaaccatcattacccgctgtggtgagggtacaaagcttattgtggggggcaatttagcgcaaatagacagtaactaccttagcgctgtcacgtcaggcttaacgtatttagtcgagaaatttaaagacttctcaggtagcgccaccattaaccttgatggtgtggtacgaagccgtcttgcaagttttgctgaggaaaacctgtagc

SEQ ID NO: 295856 - DNA, 893 bp, Unknown
  Bacterial polypeptide expressing nucleotide sequence isolated from the Sargasso Sea
tctacttttagaagggttagttgattatgcagaagataagacgatagtaagaaaaggacctaaagccaattcagcttttttagatggatctcctactaatgcagctttaggatttgcgaatagtttaggtatagatgtaggagagctagaaataaaaaatacagaaaagggcgattttgtttttggaaagaaaattgagaagggacaatccacaaaaatttctttgtcttcaattgttcctaaagtaatgaagagtcttcaaggtccacgatttatgaaatggggggctggaaatacaaaattttcaagacctattaggtggattacttctatctacaatgatgatattcttgatttcgtatttgatgaatgtgatccaaatattcaaataagtaataaatcaaaaagtcatagactaatcaataaagttattgaagttcaaaatcctgataatttttttgaattaatgaatcaaaatagggtattagttgagcgtcaagaaagaaaagaaaaaattgaaagtcttataaataaggcctctaaattactaaatctgaagcctgacctttctaaaggattgcttgatgaactaactgatttagttgaatggcccgaattgattattggtaaatttagcgatgaatttcttaatctcccagttgaagttctttccacagtcatgaaaagtcatcagagatatgtgcctcttttattgaataatagtactttttcaaaactagatttaagctctgaaaaaaatattagtacaaattttttcgttatttcaaatggtcttgaagaatcaaataaaaacattgcgaagggtaatgagaaggttttgagggctaggttttcagatgcaaagttttttgtagaaagtgataaaaaagttg

SEQ ID NO: 295857 - DNA, 862 bp, Unknown
  Bacterial polypeptide expressing nucleotide sequence isolated from the Sargasso Sea
ggtgtagtaagagataatgcaggtcatcttgtttcattaaaatggtctatgaaaaatgtttataatatggatccaggagaagttttctgggcagcttcagatattggctgggttgtagggcattcctatattatatatgctccattatttcatgggtgttcatcagttttgtttgagggtaaaccagttggaacgccaaatgcaggaactttttggagaattataaatgagtataaagtaaaatcattctttactgcgcctactgctttaagagccgttaaaaaggaagataatgagggcaaatatataaatagagaaaagctcaaatcattagaaactttatttttagcaggagaaagagctgatccagatactgttttatggttagaaaataaattaaaaataccgattgttgaccattggtggcaaactgagacaggttggcctattgctgcaaatccaacaggtattgaattacttcaaattaaaaaaggatccccaacagtttctttgccggggtatgagatagatattttagatgatgatggaaaaaaactattaccaaatgagctaggatcaatatgtataaaattaccacttccaccgtcatgccttccaactctttgggatgctaatgataggtttatagaagcatatttatctaaatttccaggatattacgaaacaggtgatgcaggttatattgatgatgatgaatatatttttgttatgtcgagaacagatgatgttataaacactgcaggtcataggctttctacaggtgcaatggaagaagttatttcaaatcattcagacgttgctgagtgtgctgtagttggggttaaagacgaattaaaaggag

SEQ ID NO: 295858 - DNA, 418 bp, Unknown
  Bacterial polypeptide expressing nucleotide sequence isolated from the Sargasso Sea
attgggaagaaaatggataggaattgatgtagaaaaaaaatcttcagaattagtaatggaaagactttcagaagaaggaagattatttgataaatttataaatacacaagattttccagtcagaactgatgttgaacacttaaatatagaagataaagatgtaaaagaaaaattatattctgatcaaaaaggaaaatgtaatggatgtatagatgaactagatattagacattttgagattgatcatattatccctagagaaaaaaatggtggtgattattatgaaaatttacaattactttgtggaaactgcaacagagtcaaaggtaacagaccaatggcctatttgatgtggagaatttctgagaggaataagttgattaataagaaaattggtttttcaaaaagaacagattaa

SEQ ID NO: 295859 - DNA, 433 bp, Unknown
  Bacterial polypeptide expressing nucleotide sequence isolated from the Sargasso Sea
aatgtatctattaaaagatttaattagaaatttagaaaatgatttaagcaataaaggtgtatcggagtctattgttttacgaacatcgaatgtaacaaattttgattttcaaattaataatttagttaagctcgaaaaaagtagtgatatagaagatattgtaaaatcattttcaaaaatacttaatgatgacccaataattaagaattttgaatttacaaagaattactttataaaccttgaaattaatattcaaatgtatttaagtaatcatgaaaatttaattgaaaatattaaagcttctcatcaaaaatatataattcttgactatggaggaccaaatattgggaaacctttacatgtaggtcatctaagatcattaaatattggaagaagtctttataacataaataaactagctggaaataatgta

SEQ ID NO: 295860 - DNA, 855 bp, Unknown
  Bacterial polypeptide expressing nucleotide sequence isolated from the Sargasso Sea
tctgaacgcgccagaaaacccatatgcgatgggtcccgaaacaaatgaaaccgaccctagggaaaatgctttggagaatgtccaggtggtgcggtttgttcgagatattccctcgaaggatcgggatagatcgtatatcagactcccaagtttcgagacggttgagaaaaaccctgtctactatgctcacgcctcgagaatcctgcacgtcgagtccaatccaggtaatgcgcgacctttggttcagcgccatggagagatggagctttgggttaatccgccgccctatccattggaaacaaaagaattggatggagtctacgaattgccttatgcccggatgcctcatccagagtatggcgatcaaaagattcctgcctatgagatgatcagattttcagtctctatccagcgaggttgtttcggaggttgcacattttgttcaatcacggaacacgaggggcggatcatacagaatcgctcagaggcctcgattataagagaagtcgaagaaattcgagataatgtccccggattcacaggtgtaatctccgatcttggtggccctacagcgaacatgtatcgtttggcttgtaaatccaaagcaatcgagagcgcatgtaggaaaccgtcctgcgtttatcctgggatttgtcccaacctgaaaaccgaccacaagccgttaattgatctctaccaaaaaacccgagccttgcccggtattaagaaaattctgattgcatcgggtattcgctacgatcttgctgttgaatcgcccgaatatgtaaaggagttaacctcgcaccacgttggcgggtatctcaagattgctccagaagcactcagcgaaggacc

SEQ ID NO: 295861 - DNA, 817 bp, Unknown
  Bacterial polypeptide expressing nucleotide sequence isolated from the Sargasso Sea
attagtaagagacgataagggacagaaaatgtctaagtcaaaaggaaatgttttagatcctttagatttgtcagagaaatatggtgctgattccttacgatttactcttactgccatggcagctcaaggaagggatattaaattatcagaagagagggttgcaggctatagaaattttagcactaaaatttggaatgcttgtaaatttttagagtttaataattgtatttctgaattagataaagatattgctactaatgatctacaaattaataagtggataattaatctttataatgaattaaatgataaggttaaaaaatctatattagaatataaatttaacgatgctgcggatgcattatatcaatttatttggaaggactattgtgattggtatattgaatttattaaacctattttaaacaattctagtaacattgaaacattaaatgaaactaaaaacgtctctataaacataatgaaaaaagttttattaatgttgcatccaataatgccatatttgactgaagaaatatttgaaaaactttttcaatcttcacaattagcaatttcttcttcatggccacaaaagataaaaagtaataaatcattgaaaaatggaatagatttattaattaaattagtttctacgttaagatccataagagttgaaaaaaatattccatcaaaatctagacctataatttttcttaaaaatattgatctagaaaaaaagaagataattgatgaaaataaaaatctaattataaatctagcaaaattaaatgagataaaattttcttttacaaacgaa

SEQ ID NO: 295862 - DNA, 745 bp, Unknown
  Bacterial polypeptide expressing nucleotide sequence isolated from the Sargasso Sea
gcctcaaacgaaaaagtacattgggtccccgaacacattaaaaatggcaggatggggaactggcttgaaggtgctgtcgactgggcgatttcgagaaatcgtttctggggtactcctattccgatttggataaacgacgaaaccggtaagatgaaatgtattggttctcgtgccgaacttatgcaactcactggaacaatgctggatgaccttcacagagaacacgtcgaccctcttacatttaagcttaagggggaaacgggcacttatcgtcgtatcgatgaagtactagattgctggtttgagtcaggcgccatgccctatgcgcaactgcactatccatttgaaaaccaatccctttttgaactcgggttcccagctgaattcatcgcagaaggtctagaccaaacgcgcggatggttttatacgctaactgtcctgggaacagcgctttatggagttagtccattcaaaaatgtcattgtcaacggtattgtcatggccgaagacggaaaaaaaatgtctaagcggctacgcaactacacgccaccagatgaactcatggaaagttacggtgcagatgcactgagactatatctgatgaattcgggactggtccgcgccgaagaacaaagatttgtagatgagggcgtcaaagacatggtgcgacgagttctcttaccatggctaaatgccttcaagtttttccacacctatgctcagatcgacaactggcttcccggtg

SEQ ID NO: 295863 - DNA, 571 bp, Unknown
  Bacterial polypeptide expressing nucleotide sequence isolated from the Sargasso Sea
tatgtttgattcaacacatgttccagttggatcggatcaagttcaacatctagaaatgacaagagatattgctgctagatttaaccacttatataaaccaattttaactctaccagatcctattattcaggataaagaaaatgtagttcctggattagatggacgaaaaatgagcaaatcttatggaaatgttatacctcttttggaaagtgaaaagatattgaggaaatcagttatgaaaattgttacaaattctttggagcctggggagccaaaagattcatcagattgtactatttttagtttgtttaaaaattttgttgatgattcagagatgaaattaatacaaaaagcctataacgagggcattgcttggggtgaggccaaagaaatgctatttaattcaataaatgacgaacttgaacctatacgattaaaatttgaagaactcaaaggggacaatgattatattaatgatttattgagtgatggtgctaaaaaggcaagagacattgcaaaagataaaatttttcaaatcaaagaagctattggcataactaaaatatcttaa

SEQ ID NO: 295864 - DNA, 1576 bp, Unknown
  Bacterial polypeptide expressing nucleotide sequence isolated from the Sargasso Sea
actgttcggcggtgtcaacgcggcacaagccgccgatgttcccgcaggtaccaaactggctgatgttcagcagctggtaaaaggcaatggctccgagcctgccactctcgacccgcacaaaaccgaaggaacggttgaatccaatattctgcgtgacctgttcgaaggtctcgttgcctccggccccaaaggggaagtgcttcccgccatggccgagtcctgggaaaccaaggacaacaaacacttcgtgttccacctgcgcaaagatgccaagtggtccaacggggatcccgtgacagcccacgatttcgagttcgccttcaagcgggccgtggatcccaagacggcgtctccctactcctggtatctggagatcccgaccatcgtcaatgccagcgagatcatcgccggcaagaaagcggccgacaccctgggcgtgaaggcagtggacgactacaccttcgaggtacagctggagaaggcggtgccttacttcgtcagcatgctctcccacaccaccacctacccggtgccgaagaaggtgatcgagaagttcggtgacaagtggacccagcccggcaacatggtatccaacggtgcctatgtgctgaaggattgggtggtcaacgagcgcgtcgacgtcgagcgcaacccgaactactggaacaacgccaagaccgtcatcaacaaggtgacctatctgccgatccagtccaccaacgccgagctgaaccgctatctggccggcgaagtggatcttacctacaacatgcccatcgagcgcttcaagcagatgaagaaagagctgccgaacgaggtgaaggtgagcggctatgtgggtacctactactaccagtacaacttcaagcacaagccgtttgatgacgtgcgggtgcgtaccgccctctcttatgccatcgaccgcaacgtgatcgccgacaaggtgatgggcaagggggaaactccgggctacaccctggtgcctgatttcgtggacggcttcaagccggtggcgccggcctggtccaagctgacccaggcagagcgcgatgccaaggcgaaagagctgctgaccgaagccggtttcggcccgggcaaaccgctcaagttcgagctgctctacaacaccgacgacaaccacaagaaagtggcggttgccgtggcttccatgtggaagaagctgggcgtgcaggtgagcctggtcaaccaggagtggaaaacctacctggaaaccaagaagcagggtcagtttgatgtgggccgtgccggctggatcgccgactacaacgaagcctcttccatgctggatctgatgcagaccacgcacggcaacaacgacggcaaatactccaacccggcgtttgacaagctgatgaacgagtcgcgcaatcaggtggatgccgatgcccgcaacaagctctatgtgcaggctgaagagatcctggccaaggacatgccgatcgctcccatctatcagtacgtgacctcccgcatggtcaagtcctacgtgggcggctatccggccaacccgctggacaacctctacagcaaagacatgtacatcattgctcactga

SEQ ID NO: 295865 - DNA, 747 bp, Unknown
  Bacterial polypeptide expressing nucleotide sequence isolated from the Sargasso Sea
gaggtggaatagatttgaaatttcctcatcacgaatgtgaaattgctcaatctgaatctattaattctaaaagccctgtaaacttttggattcatacaaatatgatgactttgaacggaaaaaaaatgtcaaaatcgacagggaacaatatccttccaaaagatttgatttcaggtaacaacagcatttttcaaaatgtgttttctccatcagtaattaaattttacttttttcaagctcactacagaagtatcctagaccttactgaatcagccctgctttcatcagaaaagggctacaataaattaatggaaagtattgaattattggatagtttgaaagttagtggagaatctaactttaatttcaataagtggattaaagactgttataatgcaatgaatgatgatttcaacagtccaatactaatttcaaaattatttgaaatagtaaaactaataaattcagttaaaaatggaaccgaagaaatttcaaaaaaacaaaaagacttactgataaatcaccttaatatttttgttttcgaaatacttggactaactaaaccaaataatattaaaaataacagtgttttagccgaaaatactatcaaaatacttcttaaattaagagataaagctagaataaataaagattttgaaacagcagacctaattagaaatgaattaaatgatattggaattgaattagaagatactaaaaatgaatcatcctttaacattaaataaa

SEQ ID NO: 295866 - DNA, 1012 bp, Unknown
  Bacterial polypeptide expressing nucleotide sequence isolated from the Sargasso Sea
atgatcgataaaaataaaaaaagaatacttactggaattaggccaacaggagctttgcacctaggtcattatgttggagctttacataattggattgatcttcaagaggaatataactgttactttttaatagctgactaccaggctttaggtgaccacttcaatgatattgatctgattagaaaatctgtaattgaagttactattgattggttatctgtgggacttgatcctgcaaagtcttcatttgttatacagagctatgtaccagaatttgcagaattaacaatgcttctaagtttcataactccattagggatgcttgaaagaaaccctacattaaaaggagaacttgatagcttagaagttgaaaaaagaacagttggattttataactatccaatgagtcaagttgcggatatattactacctagagcacaacttgtccctgttggagacgatcaatctccacacgtagaaatgacaagagaaatagctagaaaatttaatagaatgtttggtgacgtttttcttgaaccagacacactaattggcaaggtacctaggctctctggaacagatggacaaggaaaaatgagtaaatctaaaggcaatgtgattatgcttagcgatgacgaaaaaacagtcaacaaaaaagtaagatctatgtacacagaccctaatagaataagagctgatatcccaggaaaagtcgaaggcaaccctgtttttgagtatcatgatgcatttaataaagacctagagcaagtgaaagattttaaagatagataccaaaaggggaacataggagatgttgaggtaaaaactgcacttgctaaatcaattaatgaatttttagaacctatcagagaaaaaagagtatattatgagaataatatttcgctagtagaagaatctttaaataacggcataaccaacattaaacctttggcttctcaaacaatagaattagttagagaaaagatgaaaatttctaagtatattagataat

SEQ ID NO: 295867 - DNA, 1579 bp, Unknown
  Bacterial polypeptide expressing nucleotide sequence isolated from the Sargasso Sea
gctgccgggcagtgccgccaccctgatcatcctgctgctctccctggggccgctggcggccctgttgtggcaggctggggcgctggcgccccgcaccctgctggccgacccctacctgcgccacgtgctgggcttcagcctctggcaggcactgctctccaccctgctcagtctcgggctggccattccggtggcccgcgcgctggcgcggcgccgtttcatcggccgccgtctactgctcaagctgttcggcctctcgctggtcttgccggtcatcatcgccatcttcggcatcgtcgcggtacacggcaagcagggctggttgccacagctactgcacgggctggggctcacccccggcaattacctttatggcctgctcggcatcctgctggcccacgtattcttcaacatgccgttggcggcgcgcctgttgctgcagagcatagagagcattcccgagtcttcctggcgcctcgccagccagctcggcatgcgctcctcccatattttccggctgctggagtggccgttgatccgggcccagctgccaggcctggccagcctcatcttcatgctctgcttcaccagcttcaccacagtgctggcgctagggggcggccccaaatccaccaccttggaggtggccgtctatcaggcgctgcgctttgacttcgatctcgccaccgccggcgggctggcactggtgcagctgatcctcaccgcgggtctgttgatgctgcaacacaagttgcagagcagcccggccagccggatcagcgcccgccgtccctgcctgcgcccggaccgccatcagccgggaaccggtctggtggacgccctcgccctcgggatcgggctggccgtgttcctgccccccttgctggccatcgtggtagcaggccttaaccccggcctgctgggtgcgctgacctcaagcaagttgtggctggccagcggccagtcgctgctgatcgctctggcggcaggcagcctggccaccctgctcggcagtgcgttgctgctcaccagccgtcacctgcgcgtgcgggatcgcaagcggcgagccgccgccctgtgggaggccagcggctcggtgatcctgatgatcccggcagtggtgctctccactggcctgttcatcctgttcatgccgttcgccgacgtgttcgccctcggcccctggctggtggtgctggtcaacgccctgatggcgctgccctatgtgctgcgaaccctctccgcccccatgcaattggtggtgcgccagtacgaccggctggccgacagcctgggagtgcgcggactgcatcgcctgcgactggtggagtggcccctgctgcgccgcccgctggcccaggcggccgcgctctcgatgatactgtcgctgggagatctcggcgccatcgccatgttcggcagccaggagctcaccaccctgccctggctgctctatcaacagcttggcagctaccggctgaccgaagcggctgctaccgccctgctgcttctgctgctctgtttctccctgttctggctgattgaacgtggcctgggaggcaagcatgcagagcattga

SEQ ID NO: 295868 - DNA, 1189 bp, Unknown
  Bacterial polypeptide expressing nucleotide sequence isolated from the Sargasso Sea
atgaaagatgcattaaagcttattaaaagaggcgcggacgagattctgacagaagctgatttaaaaaagaaatttgaatcaggtaaacaattagttataaaagcaggatttgacccaactgctccagatcttcattttggacatacagtattattaaataaacttagacactttcaagacttaggtcacaaagtcattttcttaattggtgattttacaggccggattggagacccttcgggaattaataaaacaaggccgatattagatgctaaggatttagttgagaatgcaaaaacatatgagaaacaagtctataaaattcttaaaaaagatttaactgaaattaaatttaattctgaatggtgcgataaattaggtgctgatgggttgattgggcttgcatcaaaatataatgttgcccgcatgcttgaaagagatgattttaataaaagattcacatcaaataaaagcatcgctatccatgaatttttatatcctttagttcagggttatgactcagttgctttggaggtagatgtagaatgcggtggaactgatcaaaaatttaatcttctggtaggcagagaacttcaaagggactatggacaagaaccacaagtggtaataactgtccctatattagaaggactagatggcgtaaagaagatgtccaaatcattagataactatattgctattgatgaaaacccagatgatatgtttggaaaaattatgtcaatttccgatgagttaatgtggcgttggtttgaattattaagttttataccagaagaagaaatagcaaaattaaaagctgaaatggagtctggtaagaatccgcgcgatattaaatttgttttagctgaagaattggtagatagatttcataatgaaggcgacggtaagaaatgcaaggataccttcttgaagagatttcaaaaaggtcaaatgccagatgatatagaaagcattcaggtagatatagaaggcgattctattcttttagtaaatcttcttaaagacgccaagatgattgcaagtgtatctgaaggcaataggttaattgagcaaggcggtattaaaatagattctgaaaaagttgaagatcaaaaatttgaggttaacaaaggttcagagaatatttatcaagttggcaaaagaaaattcttaaaaattaaagtataga

SEQ ID NO: 295869 - DNA, 3202 bp, Unknown
  Bacterial polypeptide expressing nucleotide sequence isolated from the Sargasso Sea
gatggaactcgtagaaaaatttgatatcaaacaaattgaaaaaaatgttcaaaatgatttgaaagataaagatatttcaaaattaattcaacaagatgacactaaaaaaaatgaaataatgtttattgaaggaccacctacaatgaacggaattccacatgcaggacatctaaggggaagagttttcaaagatttatggtatagatacaatgtactatcaggaaacaaagtcatttttaatgcaggatgggatacacaaggattacctgttgagttacaagctgaaaaagaattaggtatggaaaatggaaaaagtgatattagttcaacagaagatattgaaaaattagttgcagaatgtaagaatttagttcagaaataccatacgaaatgggtagaagttgataaattaattggaatgtcatttgaccaagataaagcatactggacgtacaaagatgaatttattgaaaaagaatggcaattaatgaaaaaagcatttgagaatggaataatgactgaaggttttagagttgttgcatactgtccaagctgtcaaacatcattaagtcattcagaagttaatcaaggatatgatatggtgaaagatccatcattatattacaaagtaaaacttgcagaagaagaaaaatttttgattgtatggactacaatgccatttacacttgtaacagatgcaatggtaggagttaatccaaaagaggaatatgttgaagttttagtagaaggtgaaacatgggttgtaggaaaaacacgcttagaagaattcatgacagaagtcaaaattgaggaatatgaaattaaaagaacatttttgggaagtgaaatggaaggtaaaaaatacatacatccattattagatgaaataccaaaacttgcagaaatttcaaaacaagataattatcatgtaactgttgcagaaaattttgtagatgttaatgcaggtagtgggctagttcatctatctccagcaaatggtgaagaagacaataacattgcaatgaaacgaaatgttacagttttctgtccaattgatgatgaagtaaaatttacagaagatgcaggaaaatatgcaggattatttgttagagatgcagatgagaaattagttcaatcggtaaaagatagaaatgcactagtaaaaattggtaaaattaagcacaaatatccattatgctggcgctgcaatcatggtttagtatggcttgcacgtagagaatatttttacatgcttgacaaacttggcgataaagcaatcaaagcagctgaagatgtagaatacttttttgatcaaccaaaaaatagatttttagaaattattaaagaaaaacatccatggtgtatttcacgagaaagatattggggatgtccaattccagtttggaaatgtaatgattgtgaaaacacagaacaattattctcaagaaaagaaattattgaatctgcaattgagttaccagacggagaaaattttgaattacatagaccgtggattgataaaattaaggtcaaatgcaaagagtgtagcggagtaatgcaaagagaagaatttgtgcttgatacatggcataatagtggtgctgcaccaatagcatcattagatgaagctacatacaaagaaaaaattccagcaccgttctttacagaaggtatcgatcaaacaagaggatgggcatatacacttttgattgaaaatgtaatttacaataacgcatcagtttcaccatacaaatcatttctgtttcaaggacatgtgttagatgaaaacggaaacaagatgagtaagagtaaaggaaatgtacttgaggcaaaagagcttttagaaaaatatccagtagatcttgttcgattttattttatgtggaaagcaagtccaattgagccgttaaactttagcactaaagaattaatgtcaagaccttatcaggtgataagtacattatatcatttacatacattttacaaacaaaacagtgagtatgataaattcaatgtagaagaatcaactattgaatgggcaaagaaaaatgatttactaacacctccagacgtatggttactatcaaaacttcaaagaatgatcgaaaggactactgaaacaaatgattcatgtcgatttcatgaatctgcaaaatcaattgaagactttttgataaattctctaagccaaatttacattccaataattaaatcagaattatgggatgaagatgattcaaaaaaagatagacgctttacaatctatgcaattcttgctaaaactttgaaaacaatcaacatattgattcatccatttgcaccatttacatcacaatatctgtacaaatccatattttctgagaaagaaaatattttacttgaatcatggccaaaggtggattcatcattaattgatgaaaaagttgaaacatcatttgatttactcaaagaaacagtttcagttacatctgctgcaagaatgaaaggcaagctaaaacgaagatggccattaaaccaagctatgatttgtttaaacaaaggagaaaaacaagttttagaatcattatcagaacttgtaaagtcacaaatgaatatacaaaattatgaaatttttgagattgataattctgaaggtatggaacaatatctggaattaaaagaaaaaggcttgccagttgtgcctaaaatagagttagagagaagcgcaataggacctaaagctaaacaagacatgggaaaattattgaaaatgttttcagaaacagatccagaatcaataatcaatgaattaaatgcaaatggtaaatacacattccaaatcggagaaaattcagttgtattagataaagaagatttcattgtagattttgaagttaatgaaaaatatcaatttgcaaaaagacagaatctaattgttgtaatttcattggaaagagataatgaaatgatgtcaaaaggattgattaaagatttggcaagaagaattcaaaccttaagaaaagagaaaggattcaatcctacagatattttggaaagagcatcaattttagaattagacgaagagtcgctaaatttgattaaagataagacagaagatattgcatttttagttagagtcaaaaatgtagattttacagaatcatgcaaaaactacaaagatgacgatattgacgggctaaaaataaggatcgcagtcgagtag

SEQ ID NO: 295870 - DNA, 1207 bp, Unknown
  Bacterial polypeptide expressing nucleotide sequence isolated from the Sargasso Sea
aatgaaatttttgcctgcagaaaagcaaatggagttgattcaaagaggtgcagaagaaattatacccaaagaagagcttcgcaaaaaaattgatagatctattaaaaataataagcccctaattgcaaaacttggctgtgatcccagtagaccagatttacacattggtcatagtgttgtgcttagaaaacttaaaaattttcaggacttaggtcaccaggcggtattagtaatcggggactttacagcaattataggagatccatcaggtagaaataagacaaggcctcagttgagccttgaagaagctagagaaaatgcaaaaacataccttgatcaggctaaaataatactcaatatggataagcttaaagtagtatataattcagattggttagaaaaaatgagattttctgatgtgataaaagtcgctagttctactactgttgcaaggatgcttgagagagatgattttacaaaaagatacgattcagaaattccaatatcccttcatgaatttttatatccccttgctcaggcacaagactctgttgagcttatatcagatattgaacttggaggtacagatcaaaagtttaatctactaatgggtagaaatttgcagcgagatattggtcaagaacctcaatgcattttaacaatgccaattttagagggaacagatggaatcgaaaaaatgtctaaatcttatggaaatgatattggactttctgatagtgctaatgacatgtacggtaaaactttatctattcctgacgaaattatactatcgtggtacactctagctgttgatgttgaccaaaataaattaaaagagatagaagaaaaactaaatgatccatctacaaacccgatgaatataaaaagagatctcgcaagacagattgttgcatcatactttgataaagaaaaagcaattgaagcggagaataatttcaataatattactgtatcaaaaggaataccagaaaatatacaggaatataaactaaaagaagaaatgctactggttaatatcatatatgattccggtttgttaccgagcaaaagcgaggctagaagaatgataaaacagtcagcggttagaattgatggagatgtcattcatgaaatcaatctagagcttatgcctggagatactagaatattaaaagttggaaaaagaagatttctcaaaatcatttaa

SEQ ID NO: 295871 - DNA, 1015 bp, Unknown
  Bacterial polypeptide expressing nucleotide sequence isolated from the Sargasso Sea
atgacccacccgacccgaccgaccatcctcaccggcgaccgcacgaccggcccgctgcacctcggccactacatcggctcgctgcgcgcccgcgtgcagatgcagcacgaagcgaagcagttcctgctgctcgccgacacgcaggcactgaccgacaacatgggccgccgccagcgcgtcaccgagaacgtgatcgaggtcgcactcgactatctcgcggtcggcatcgatccggcgatctcgacgatcgtcgtgcagtcgcaggtgcccgagctcgccgagctgtcgcaatacctgctgaacctcgtcacggtcgcgcgcctcgaacgcaatccgaccatcaaggaagagatccgcctgcgcggtttcgagcgcgacatcccggccggcttcctgacctacccggtgagccaggcggccgacatcaccgcgttcaaggcgacgcacgtgccggtcggcgacgatcaactgccgatgatcgagcagaccaacgaactcgtgcgccgcttcaacgcgaccgtcgagcagccggtgctggtcgaatgcgaggccgtgctgtcggcggtcacgcgactgccggggatcgacggcaaggcgaagatgagcaagtcgctcggcaacgcgatcacgctcggctcgacgccggacgagatcacgcaggccgtgaaggacatgtacacggacccgaaccacctgcgcgtgagcgaccccggccaggtcgagggcaacgtcgtgttcacgttcctcgatgcgttcgagcccgacgtgcagaaggtcgacgagttgaaggcccactaccgtcgcggcgggctcggcgacagcgtcgtcaagcgcgtgctgaacgagcggctgcaggcgctgatcgagccgatccgtgcgcgccgccgcgaattcgaggccgacaaggccgaagtgatggcgatcctgaagcgcggcacgctgcatgcacgggacgtggccggcgcgacgctcgccgaggtgaagggtgcgatggggttgacgtatttcgattgag

SEQ ID NO: 295872 - DNA, 1819 bp, Unknown
  Bacterial polypeptide expressing nucleotide sequence isolated from the Sargasso Sea
tctagaataaatccagttcgctctcctgatcgcgcattagtaagacgtaattggattttaagcagaatgtttaagcttggctatattggaaaagctcaatatcttcttgcaaaggatgagccaattactctaagtcagctgaaaacaaggttttctcttgatggacgctatattgcagaaatagctagacaggcactgattgataggtatggtttatctgtttataaagacggactttcagtttatacaactatagattctaaattacaacaagcagctcttgatagtattaataaaaatttatacctgtatgacaaaaggcatggttggagagagccagtcaatttatcaaacagaatacctgaaattatttttactgagttaagaaatcaaaacactgacattctctacgaaacatccaatcttcaagatgagctaggcatgaatcaattatttatttctattatcagagattactttgagaattcaaaaaatctagatagacacattggtggaatagtaatagatgttaaacctgagagaattatttacttaagcaactcatttaaattagagactttatcctggaatgataaatacaaatgggctaggcgcaaaattaatattgataaacttgggccagttccttcaaacttttacgacatactgcgttctggagattttatatatctaactaatattgatggcgaaaattaccttgatcaaattcctgaggcagaggctgcttttatttcagttaatccaaatgacggagctattaaaacctacataggaggattaaatttctcaaaaagtaactttgatagagttagacaatcatttcctcaagctggatccagctttaagcctttcatttacacttcagcatttgcaaatggtttacatgcctcagataaaattaatgacgcacctattgtttttgaagactcaaacttagagagtagttggcgtcccgaaaattatactggtaagttttatggcccgattagattaagagaagctttagtccaatcagtaaatttggtatctattaagttgctccgagaaatgggcatttctaatacccaagcttttttaactaggtttggttttgaaaaatctagattggcaccggatctttctttggcattgggatcatcgagtttttcaccagctgaaatggttagagcatattcaattttagctaattctgagaatcctaaagatccattttttattgataaaattttaaataggaaaggagatgttatctacaaacactcaaacgcctcacaggaaaaaaactctcaagattcagttgatgcatttccttggtttcaaactcagattgctgatgaagtaaaaccttttattcttttaccgccaattaataacctttcagatcctatagatccaagagttgcctttattactaaagatattcttcgtgaagctctttcaaggggaagtaatgcaagacaggttggagtactaaaaagagaagatattgccggaaagactggaactaccaataacgcaattagtacttggttttcagggtttcataataacttagctacaacagtttggattggaaccgatgatttttcctcactaggtgataatgagtttggttcgagtattgctcttcctgcttgggttgatttcatgaaaacagctttgctagatctaccaaatgaaacatggaaaactcctgaaggcctttcatatgttcggattgacagagagaccgggaagccagctgctcagacaagtaaaaatgcatatttcgaactttttttagatgcagaaaattaac

SEQ ID NO: 295873 - DNA, 1399 bp, Unknown
  Bacterial polypeptide expressing nucleotide sequence isolated from the Sargasso Sea
aatgagcaaaaaactttggcaaccttctctaattgtaaaaagaagttcaaatttatttgcttttgaaaattatatttcaaaaaaattaaaaataaaatttaacagaaattataaaaacttattaaattggagtatcaagaattctcctgagttttggagtaaattttgggattttagtaaaattaaaggaattaagagtaaaaaaaaatttagaaaatcaaaaacattttataaaaatatatttttaccaggtagtaaactaaattttggtgaaaatttattatcaaaaaataataaagaaaaagcagtaacttttattagtgaaaatggatttagagaagagagatcatggagacaattaaatttaaatactaataaagttttaaaatttttaaaaaaaataaatattaaaaaaggagacagagtagctgcttatatgccaaatactattgaaacggttgaagcattcattgctacaacttccctggggggtatttggtcttcttgtagtcctgattttggttctaaaggtgttatagaaagattttctcaaattaatccaaaagttttattcatcactgatcagtatttttataatggaaaaaaaatagatgttttaaaaagacttccagagattttaaaattaatcccatcaattaaaaatgttgtaattagtaattaccctggaaaaaaatttatcaaaaaaaaatttaaatttaaaaaaattaatttttttaaatggaatgaattaatgcaaactaatgctgaaaaaatttattttaaaagatttgattttgaaacagagttagcaatattatattcaagtggaactactggaaaacccaaatgtatttgtcatagatctggtggtgttttaatccagcatatgaaggaacatcaattacattgtaatattaaagaaaatgataatgttttttattttaccacttgtggatggatgatgtggaattggttagttagttcattagcttctaaggcatctattgttctgtttgatggatctccaatgtttaaatctgccgatttgcttttgaaaatagcacaaagagaaaaaataactttatttggaataagtgctaagtatgtagatgctttaagaaagtataaaccaaaattaaaatataaattcaaacttaataaactaagaacaatttgctcaaccgggtcacctctttcagaggaaagtttcaaatatgtttataagcatattaaaaaaaatgtacacttgtcatcaatttctggtggcactgacattgtttcatgcttcgtgttaggaaatttatatcagccagtaaatataggagaaatacaaaacaatggtttggctttagatgtagatgttctaagtgataaaggaaagtctttaaaaaatattaaa

SEQ ID NO: 295874 - DNA, 598 bp, Unknown
  Bacterial polypeptide expressing nucleotide sequence isolated from the Sargasso Sea
aaaagacgaaggtcagcggccgcaaactattattatggtgccattgctggaaggcctggacggtgtgcagaaaatgtccaaatctttgggcaactatattggtatcacagacacgccgggtgaaatgtttggcaaagtgatgtccatcagcgatgagctgatgtggcgttattacgatttgctgagtttccgtcctatcgctgatattgcggcactgaagcaacaagcggctgaaggtcgtaacccacgtgatatcaaaattgagttggctaaagaaattattgcccgtttccatgacgaggcggcagctgatgcggcagagcaggattttatccagcgttttcagaaaaacgccttgccggatgatattcctgaactgaccttgaccttaacatcagacagtatccagattgccaacttattaaaagaagcaggtctggttgaaagcacttcagaggctttgcgtatgattaagcaaggtgcggtcaagctcgatggtgaaactaaggtggaagacagcaaaatggaatttgccaaaggcagccatcacatcttccaggtcggtaaacgtaagtttgctaaagtcagtctggtctaa

SEQ ID NO: 295875 - DNA, 1176 bp, Unknown
  Bacterial polypeptide expressing nucleotide sequence isolated from the Sargasso Sea
ttgaaaagatttatgttaagttagctccatcaacatccgatctagagcaggcggctagattggatcctaatgattttcgtaaacagattgatttgtcaagaaattatgagtctaatggccgctttgaagatgcaaaagagatttatttaaaattagctgctcaaaatcctaataatgcggatgctcattttcatcttggttctttctatgcaagatttggtcaaatgacaaaagctagacattctttcgatgaagctttagatgttcagcctagccatcgagctacgattgaaacaatggctactttatttaaaactaaagagtcacgttcaatgtccaatgacatgttgtcaaaatctgctgaaaaagatccaaatggaccaggtgagcaaatgaaaaaagttagacaaaatttaaatgatcttaattatgataatgcagcaaaattggctcagggtggtcaaaacatgtttcccaatcaagttggttttatttatcttaaaggtagagcatttgaaggcttaggtaatttggataaagccaaggctacctatcaagaatctattaaaaaagacccaacccaccatgaatcttatgtagcattaggcaatctctactttaatcaaggtaaatatgtttatgcggcacttacctatggtgatgctattcgtattgatccatcagataaggattcacgctttaatcaaggattaagttatttcaaaggcagcgaatggggtagagccgcttcatcttgggaagatcttcttcattatgagcctcaaaaccaacaggtaaaaatcttgttgccacaagcttattatatcttagctgtagaatataaccgtataggtgaatcaaacttaggccaaactgcatttaggaaagctttgagcgttaataagaattctggagtatggctccctggatctatgagagttttaggtgattattatagagataagggaatgcaccgtgagtcactatcagcgtaccaagaggctattgagctaaaaccaaatgatgctaaaacttacttaggattagggatcacttattggagaatgaaggaaacaactttggccaaggctgcttgggcccgatcaatggaaatagatcctatcaacaatgattcacgtggttggcttttattagctggaaaaacttccagttaaa

SEQ ID NO: 295876 - DNA, 233 bp, Unknown
  Bacterial polypeptide expressing nucleotide sequence isolated from the Sargasso Sea
taggttcggttggtttatagaagcactttcatatggaacaccacaacatgcaggatttgctataggcatagacagattgattgctgaagtatataatcaaaattcaataagagatgtaataccatttcctaaaacacaatctggactagatccacttactgatgcgccttcatatatcaatgaaaatatattagaagaatataatttaaagtacattaacaaagatgaatagt

SEQ ID NO: 295877 - DNA, 596 bp, Unknown
  Bacterial polypeptide expressing nucleotide sequence isolated from the Sargasso Sea
gcaagagattacgggcaagagcctcagggttgtcatcacagtcccgattttagagggtcttgatggagttaagaaaatgtcaaaatctttggataactatattgctatagatgaagatcctgatgaaatgtttggaaagattatgtctatttctgatgatttaatgtggcgatggtttgatttactcagctttatgcccgaggaggatattgctaagttaaaacaagacaataaggatggtagaaatccaagggatataaaatttatattagctgaagagcttgtagatagattccatcaggagggcgatggcaaaaaatgcaaagaagaatttttaaatagatttcaaaaaggcaatatacctgatgaaatagaatcaatttctgtaaacttaactgaagataaaattttattagttaatcttttaaaaaacgctaatatgattgctagcgtttctgaaggtaatagactcataaaacaaggtggtattaaagtcaattctcaaaaagtagacgacctaaagttttttatatcatctggtactgaaaatatttatcaagtcggcaagagaaagttcttaaaaataaagacatagt

SEQ ID NO: 295878 - DNA, 1615 bp, Unknown
  Bacterial polypeptide expressing nucleotide sequence isolated from the Sargasso Sea
atgactctcgaacaaggcctgattttcgtcattctcgttgccagcatgggcttgttcatctggggccgctggcgccatgacgtggtagcgctgggcgcgctgttggcgtgcgtgatcgttggcctggtgcccgagcgcgaggcctttgcaggtttcggtcacccagcggtgatcaccgtcgcctgcgtactggtgctcagccatggtttgcagcgcacgggggcggtcagccgactggcccaacgactgctgcccagcggcgctggcgtactgctgtccatcgccgcactgaccggcctgggcgcgctgctctcggcattcatgaacaacgtcggcgccctcgccctgctgatgcccatcgccctgcagatttctgcacgcctggagctgccgccagggcgcgtgctgatgccgctggccttcggcaccatcctcggcggcatgaccacgctgatcggtacaccgccgaacctgatcgtctccagttttcgcgcccagcatggcagcggtcccttcgccatgttcgacttcagtccggtcggtgtcgccgtggcactggccggcgtgctgttcatcaccctgctcggctggcgtctggttcccaagcgcgaagtaggtaacgccgccagcttcgacaccggccattacctgaccgaggcgcgggtcaaggaaggtggcaaggcccagggcaagaccctgcgcgaaatcgagctgttgctcgacgaggccgacgcccaggtggtggccatggtgcgcaacaagctgcgcctgactgcgcccaacccgcggcgcgttctgcaggccgatgacgtactggtgattgaggcctacccgcaggagttgggcgaagtgctaggccagctggacctgttgctggaggccgagcgcgaagccaaggaggccgaacagaaagaggacaaggaaggtgaaaccgagaagaaagccaacaatgacgaagaccgcgccatgcaggaactgctggtcaaacccgactcttcgctgattggtcgttccgccagcagcacgcgtttgcgcagccgctattccatcaacctgctggctatctccagacagagccatcgctcgatcaaacgcctgcgctcgaccctgatccagagcggtgatgtgctgctgatgcagggcagcgccgaggatatcggcgagttcgccagcgactatgactgcgtgccgctggccgcacgcgcaatcaacattcccgatccgcagcaggccaacctcgcgctcggcatcatgctgctggccatcgcagccgccgccttcggcctgctctcggctgcgatcgccttcgccagcggcgtactggcctacatgctgctgcgtctggtgccgctgcgcgccgtctacgagtccatcgactggccagtgatcgtgttgctcggggctctgattccggtggccggtgcgatgtccgccacgggtgcagccgatctgctggcacgcctgctgatggagaacctggcgcaaggcaacgccatcatcaccctgaccctgttgctggtggtgaccatgaccctgtcggatttcatgaacaacgcggcgactgcagcggtgatgtgccccatcgcgctgagcgccgccagccagctcggcgtca

SEQ ID NO: 295879 - DNA, 807 bp, Unknown
  Bacterial polypeptide expressing nucleotide sequence isolated from the Sargasso Sea
ctcggcgccgacggcatgatcaactggcgtcgcgctacacggtggcgcgtattctcgagcgcgaagatttcaccaagcgcttccagggcggtgtgccgatctcgattcatgaattcctgtacccgctgatgcaaggctacgactcggtcgcgctcaatgcggatctggagctgggcggcaccgaccagaagttcaacctgctggtgggccgtgagctgcagaagcagtatggccaggagcagcagtgcatcttgacgatgcccttgctcgagggcctcgacggcgtcgagaagatgtcgaagtcgaagaacaactatatcggcatcagcgaaaagccgacggacatgttcggcaagctgatgagcatctccgacgtcctgatgtggcgttacttcgaactgctgtcgttccgtccgatggatgagatcgccggcttcaggaaagagatcgaagcgggccgcaatccgcgtgatttcaaggtgatgctcggccaggaaatcgtcgcgcgctttcactcgcaagccgacgccgagcgcgcgctcgaagacttcaaccatcgcgcgaagggcggcgtgccggacgacattccggcggtgacgctcgcgggcgcgccgctcgcgattggccagttgctcaagcaggcgaacctcgtgccgtccaccagcgaggcgctgcgcaacatcgagcagggcggcgtgaagatcgatggcgcgaccgtgtccgacaagggcttgaaggtcgaagccggcgagtacgtcgtgcaggtcggcaagcgccgttttgcgcgcgtcacgctgaccgcttgac

SEQ ID NO: 295880 - DNA, 926 bp, Unknown
  Bacterial polypeptide expressing nucleotide sequence isolated from the Sargasso Sea
ggattcagacagccttataaaaaatgcaaaaacttataaagaacaggtttttaaaattttaaaagaagatctgactgaagttaaatttaattccgaatggtgtgatcagcttggagcagatgggctaattaaacttgcttcaaaatataacgtagcaagaatgctagagagagacgactttaataaaagatttagttctaataaaagcatagcgatacatgaatttttgtatcctttagttcaaggctatgattcagtagcacttcaggctgatgttgagtgcggtggaacagatcaaaaatttaatttattagttggtagagaacttcaaagagattatgatcaagaccctcaagtggttataaccgttccaatactcgaaggtcttgatggcgaaaagaaaatgtcaaaatcgcttgataactatatagccatagatgaagagccaaatgagatgtttggaaaaattatgtcaatatcagatgacttgatgtggaggtggtttgagttattaagttttttacctgaagaagaaatatcaaaattaaaagatgaaatgaaagagggtaggaatcccagagatattaaatttattttggctgaggagcttgtagatagatttcataaaaaaggagatggaaaagattgtaaggaagatttcttagatagatttcaaaagggaaagctgcctgaagacatagaaacttttgagatagatatcaaaaatgaatctattcttttagttaatcttttaaaagatacagaaatgatttcaagtgtatctgaaggaaataggcttataaaacaaggcggcattaaaattaatcaagaaaaagttgtagatataaaacttgagatctcaaagggatctatgaatatttaccaagttggcaaaagaaaatttttaaaaattaaggttaaataat

SEQ ID NO: 295881 - DNA, 2140 bp, Unknown
  Bacterial polypeptide expressing nucleotide sequence isolated from the Sargasso Sea
gaagatacaaacatagcaatgaaacgtaaagtgacaattttttgtccaattgatgatcaagtaaaatttacagaagatgcaggaaaatatgcagggctgtttgtaagagatgcagatgaaaaattagtccaagatgtaaaagatagaaatgcgctagtaagaatcggtaaaattaaacacaaatatccattatgttggcgttgtaatcacggattaatttggcttgcacgaagagagtatttctacatgctagataaattaggcgataaagcaattaaagcagcagaagatgtagaatacttttttgatcaaccaaaaaacagattcttagagattatcaaagagaaacacccatggtgtatttctagagaaagattttgggggtgtccaattccagtttggaaatgtgacgaatgtggaaatatggaacaattgttttcaagaaaagaaattattgaatctgcaatagaactaccagatggagaaaactttgaattgcacagaccatggattgataagatcaaagtgaaatgtgaaaaatgtagtgcggtcatgtcaagagaagagtttgttctcgatacatggcataatagcggttcagcaccaattgcatcactagatgaagcaacatacaaagaaaaaattccagcaccattctttacagaaggaattgatcagacaagaggatgggcatacacactattaattgagaatgtaatatacaataacgctccagtttcgccttacaaatcatttttgtttcaaggacatgttcttgatgaaaatggaaataaaatgagtaaaagtaaaggtaatgttttagaagcaaaagagctattagaaaaatatcccgcagatcttgtgagattttattttatgtggaaatcaagtcccattgaaccattaaacttcagcactaaagaattaatgtcaagaccttaccaagtaatcagtacattatatcatttacatacattttacaaacaaaacagtgagtatgataattttagtttagaagaatcaacaattgaatgggccaagaaaaatgaattgctaacacctccagatgtatggttgttatcaaagcttcaaaggatgattgaaaatactaccaaatcaaacaattcgtgtagattccatgaatctgcaaaagccatagaagattttttgataaattctctcagtcagatatacattccaattacaaaatcagaattatgggacgaagatgattctaaaaaagacagacgttttacaatttatgcaattcttgcaaaaactttgaaaacaattgatgtacttatgcatccatttgcaccatttacaactcaatatctctatgaagcaattttttcagaaaaagagaatatcttacttgaatcatggccaaaagttgatacaacattaattgatgaaaaagtagaaacatcttttgatttattgaaagaaacagtttcagtaacatcagctgcaagaatgaaaggtaaattgaaaagaagatggccactcaatcaagcattaatctgcgtcagtaaagggcaaaaacaagttctagaatcactttcagaattggcaaagtcacagatgaatgttcagaattatgatatatttgaaattgaaaaatctgaaggaatagaacagtatctagaattaaaagaaaagggattaccagtaatacctaaaattgaattagaaagaagtgcaattggcccaaaggctaaacaagatatgggaaaattattaaaaatgttttcagaaacagagcctgaatcaataattaatgagttgaaagaaaaaaatttctacactttcaagattggggagaactcaattgtgctagaaaaggaagatttcatagttgatttcgaggtgaatgagaaatatcaatttgcaaaaagacagaatctgattgtcataatttcattagaaagagatgacgagatgatggctaaaggattgataaaagatctggcaagacgaatacagacattacgaaaagaaagaggtttcaatcccacagacattctaagtaaagcatcaattttagatcttgatcaggattcactagaattaatcaaagaaaaaacagaagaaattgcatttcttgtaagagtgaaaagtgtcgaatttacagattcct

SEQ ID NO: 295882 - DNA, 1151 bp, Unknown
  Bacterial polypeptide expressing nucleotide sequence isolated from the Sargasso Sea
aatgaatgacgaagaaataaaaagtgagattagaaaatttgcactacaaaatgcagtagaacatgaaggtcaaacaagagataaaacaattctagcaaagattatgggaaatgttccagagttaagacaaaaagcaaaagagataggtccaataattactgaagttgtttcagaaataaatcaaatttcattagaggaacaacaaaaagagattgaagaaaaatatccagagttattggaagtaaaaaaagagaaaccgcaaaaggagagtttacttccagcactaaaaaatactgaaggaaaagaaataatcacaagatttcctcctgcaccaaatggctatccacatattggtcatgcaaaagctgctgtaatcagtgaagaatatgcaaagatgcacggtggaaaactaattttacgatttgaggatacaaatcctggaacagaacgattagaatattatgctgcaattaaagttggaatggattggcttggaataaagtatgatagtgttgaacacgtctcagataatttagatattctttacaaaaaagcagaccagattataaaatcaaatgatgcgtatgtttgtacatgtagccaagacagtattagtaaagacagaagggaaatgattgaatgcagttgtacaaaacaaagtgtagaagaaaatgaaaaactatggcataaaatgcatgatgaaaaaggcttcaaagaaggacaagcattattgcgatttagaggaaatatgcaatctggaaatacaacaatgagagaccctgcgctattcagaattaacacaaagagacatgcaagacaggaacaaaaatacaaagtttggccaacatacgattttgcaggcataatttttgacagtattagcaaggtttcacatgctatgagatcaaaggagtttgaactaagaaaggaattgcatcatacaattttagataaattgggaatggagaaatcagagttcatcttttttggaagattggacttggaaggaatgccggtatcaaaaagtgctctaaaaccattaattgaaaatggcaaagttccatggtatgatgacccaagactacctacgttagaaggacttcgtagaagaggaatcagaccagaagcggtaaagaaatttgttctttcct

SEQ ID NO: 295883 - DNA, 506 bp, Unknown
  Bacterial polypeptide expressing nucleotide sequence isolated from the Sargasso Sea
tatgagttataaaatagaaaccaacacacttcatgtaggacatgaaactaaaaaaacagagggaactagagcagttccaatatatcagtcaacttcatatgagtttaaaaattctgatcatgcagctaaattattttctttagctgaaccgggttatatttatactaggttaaataatccaacaaatgatattttagaacaaagattagctagtctagaagggggaattggtgcagtatcaacagcatctggaacttctgcaatatcaactactcttttaatgttactaaaatcaggtgatcacattgtagcatctaacagtctttatggtggaacatataatatgttaagtaatacacttccgagacttggaatttcaactacttttgttgatccagatgatccaaataattttaagtctgcagtcaagaaaaatacaagggctttttatgctgagtcccttggaaatccaaaacttgatgttgtcgatttagagtcaatttcaa

SEQ ID NO: 295884 - DNA, 937 bp, Unknown
  Bacterial polypeptide expressing nucleotide sequence isolated from the Sargasso Sea
ctgtccgaatataaaactcaaaataggggaggtgttggtcaaaggggatcaacaacacgaagtgaagactttcttgagcatctttttgttggtactaatcatcaatatatgttattctttactcaaaaaggaaaatgcttttggatgagagtttatgaaataccagagggtagcaaaatttcaaagggaagagcaattcaaaatttaattaacattgagtcagatgacaaagtcaaagcctttatatgcacccaagatttaaaaaatgaagattatataaatgaccattttgtgattatgtgtaccaaaaaaggacaagtcaagaaaacatcacttgagcaatattctagacctcgatccaatggaataaatgcaattaccattaaggaagatgatgagctgcttgaagctaaattaactaacggaaactctcagattttgattgctgttaaatccggtaaatgtattaggttcgaagaaaataaaactaggccgatgggtagaaatgcgtcaggtgttagaggagtcagactaaaagatcaaaaagatgaggtagttggaatgatttctgtaaacgatatggacagtgatatattagttgtttctgaaaatggttatgggaaaagatcaaaattagaagattacaggattaccaacagaggaggtaagggtgtaaaaacaatttccatcacagaaaaaacaggaaacttagtatctttaaaaaatgtttcggatggagatgacttaatgataatcaataaatctggaatagcaattagaatggaagttaacactcttagagttatgggtagagcaactcaaggtgtgagattgattaatattaaagataatgattcaattgctgcagtagcaaaagttgttttagacgaccaagaggtaaccgatatcgaagaaattgatgttgttgaggactaat

SEQ ID NO: 295885 - DNA, 1322 bp, Unknown
  Bacterial polypeptide expressing nucleotide sequence isolated from the Sargasso Sea
gataatgcaactagtgttgcagttgattcaactattgttcttaattttaatgaaagtgttgatgctgaaagcggaaatatcactattaaaaaaacttcagacaattcaacagttgaaaccattgatgtaacaggcggtcaagtaacaggttcaggaacatctcaaataactgtcactccatcatcagactttgatgcctcaactgaatattatgttttaatagatgcaactgcatttgatgatagcgaaagcggttcatatgctggaataagttctacaacagctttaagttttaccaccgctaatgcagtacctacactaagttcatcagttccagcagataatgcaactagtgttgcagttgattcaactattgttcttaattttagtgaaagtgttgatgctgagagcggaaatatcactattaaaaaaacttcgggtaattcaacagttgaaaccattgatgtaacaggcggtcaagtaacaggttcgggaacatctcaaataactgtcactccatcatcagattttgatagcgaaactgaatattacgttttaatagatgctacagcttttgatgatagcgaaagcggctcgtatgctggaataagttctacaacagctttaagttttacaacaacagatacaaccgcctctgatccttttgaagataaaacagttgttgcattagttgaagctcaaacagatgtaccaaaaagaataatacaaaatgtatcaacaccaatatttaatcgtttacaatggttgagaaattataacgaagatagagaattatttagtcagggaattaaatttagattttctaatccaatacttgcttcaatttcaaaagtagttcctgtagctctcaccgatgatgaagaaatcgaagaggaagaaattgatactacctggtctttttggagcgaaggaagtgttagcattggtaaggttggagatacgactagttcacattcaaaggatataaatactactggtattacaattggactagataataaagtaagcgatagatatctttatgggtatacaatcagatatactaaagatgatgttgatgttggaactcctggaacttcattagatactaatgcttatagcctttcgacttatgcaagttttctgactggtgaaagtaaatttattgagggtatttttggttttagcaaacttgatttaaaaaatgtcagaaaaagtggcagcaatactttgtatggagatagagatgggactcaattatatggatccattaattactctactgttttaaatagaaataatctaaatatttcacctaatat

SEQ ID NO: 295886 - DNA, 1945 bp, Unknown
  Bacterial polypeptide expressing nucleotide sequence isolated from the Sargasso Sea
aatgaccaataaactttgggaagcatctttaaaagaaaaaaaaaattcaaatctttatgcttttgagaaactaatttcaaaaaaaactaaaaaaaaatttaatttaaattataaaacttttttaaattggactgttaaaaattcacctgaattttggaattatttctgggaattttcagaaattaaaggatcgaaaagcaaaaaaaaaataaaaaaatctaaaatatttcataaaaatttattcttaccaggtagcaagttaaattttggtgagaatttattatcgaaaaacaatgatgataaggcaatcacttttataagtgaaaatggctttagagaagaaaaatcttggagagaattaaatttaaatactggcaaaattgtaaagtttttaaaacaaataaaaataaaaaaaggagatagagttgcagcctatatgcccaatactattgagacagttgaagcgtttatagcagcaagtactataggaagcatttggtcatcatgtagtcctgattttggtataaaaggtgttgttgaaagattttctcaaattaatccaagaattttgtttattacagatcagtatttttataatgggaaaaaaattaatgtattagagagattatctgcaattttaaaatctattccatcaattaaaaatgttgtgattgttaattatcctggaaaaaaaaatgttactaatcatagtaaatataagaaaataaaattaattaaatggcgtgagataattcaaaatcaatttgaaaaaataaatttcaaaaagtatgattttgaaagtgagttggctattttatattcaagtggaacaactggaaaaccaaagtgtatttgtcataaaactggtggagttcttcttcaacataagaaagaacaccaattacactgtgatataaaagaaaatgacaatgtattctattttaccacttgtggttggatgatgtggaattggttggttagctcattagcttcaaaggcatcaatagtcctctttgatggttctccaatgtataaaacaagtgatttgcttttaaaaatagcacaaagagaaaaaattactttatttggaataagtgctaaatatattgatgctttaaggaaactagaacctaatcttaaatttaaatttaaacttcaaaaactaaaaacaatctgctcaacaggctctcctttatcaagtgaaggttttaaatatgtttataaaaatattaaaaagaaagttcatctttcatctatttcaggaggtacagatattgtatcgtgttttgttttaggaaatatataccagccagtaaatatcggtgaaatacagaattccggtttaggtttagatgttgacgtctttaatgatagaggaaaatctttaaaaaattctaaaggtgaacttgtttgtaaaaatccatttccatcaatgcctcttaaattttggaatgataaaaatgatgtaaaattcaaaaaagcttacttcaatagatatgaaaatacttggcatcatggtgattatgctgaaagaaaaaataatgacggctttattatacatggaagatctgatactacccttaatccaggaggtgtaagacttggtactgctgaaatatattctgaggttgaaaagtttaaagaaattaaagaagcactagtagttggtcaatcttgggataacgatataagaataattctttttcttgtaatgagtaatggatacccacttaatgatattttgcttagtagaataaaaactcaaataagaacaaatgcatcacctcgacatgtccctaaaaaagtaattgttgtaaaagatattccaagaactaaaagtggtaaaattgtagagttagcagttaaaagtaccatagaaggaaatattgttaaaaataaagaagctttagcaaacccagaggttttacaacaatacaaaaattga

SEQ ID NO: 295887 - DNA, 331 bp, Unknown
  Bacterial polypeptide expressing nucleotide sequence isolated from the Sargasso Sea
tgcttatggggctctggtgctgcaaagcaaatcaccagcgatctgatgaatagggatcagcaggttcctgattcggatacgatgtgcggtgctttgatccgttatatcacccaaagtgatcccgagcattttcaaccgatgaatgccaatttcggattactggatcctccagagaaaaaaatgtcgaaatctcttagaaaagcatggttttcagaaagggcgctcaagaccctgaaagactcgttacctgttaagccaatgcgatcccctttcaacacttcacaagcagaacaacaaatgtctgaaaaagctggacaggatgctgcatgag

SEQ ID NO: 295888 - DNA, 1207 bp, Unknown
  Bacterial polypeptide expressing nucleotide sequence isolated from the Sargasso Sea
aatgacttttattaatactgataaacagattgatatgattcaacaaggtgttgaagaaataatacctattgatgaactcaaacataaacttgatagaggtcaaaaaagtaataagcctttaactgtgaaattaggttgtgatccgagtcgaccagatttacatataggacatgctgttgtattaagaaaattacgtcaattccaagatctagggcacaaagcagtacttgtgattggagattttacagcaatgattggcgatccttctggtcgaaataaaactagacctcagcttactctggaagaagccaaaagtaatgcagagtcatatatagagcaggcaaaaattatacttgatattaattcattaaaaatttgtaataatgctcaatggttaaatactatgaattttagcgatgtggtagggttagccagtaaatatactgtagctagaatgatggaaagagatgattttgagaaaagatataaatctgagatcccaataactatacatgaatttttatatccattagcgcaagctatggattctgtacacctaaatgcagacattgagataggtggaacagatcaaaagtttaatttactagttggacgagatattcaacgtgaattcggacaagatccacaaatcatattaacagttcctttaatggaaggaactgatggtgttgaaaaaatgtctaaatcttatgataaccatattgggttaactgattcttatgatgaaatgtatggtaaaacattatctataccggataatatgatcgagaagtatttcttacttggggctaatgcggatgagaaaaaaatcaaggaaataaagaatagtcttaatgatgggaaaacaaatcctcgtgatattaaaagagagcttgctaggaaaattgttgcaatatatcactctgatgtgttagctaaaaaagctgaaacaaattttgataaaatttttattggcaaagaggttcctgataatatacctgaagtaaaattggataaagatgaacttttagtagatattattgcatcaaacaagcttgtttcaagtaagtctgaagcaagacgtttaatagatcaaggagcagtaaaaatcgatgatgaaaaatgtttagatcgtgatcaaataattaacaaaggtaaatcgatcattataaaagttggtaaacgtcgttttttaaaaattttgtag

SEQ ID NO: 295889 - DNA, 1606 bp, Unknown
  Bacterial polypeptide expressing nucleotide sequence isolated from the Sargasso Sea
tgccggaataagttcaccactgcattaagttttacatctactaatgctgtacctacattaagttcatcagtacctgcggataatgcaactgatattgcgcgcgatacaactattgttcttaattttagtgaaaatgttgatgctgaaagtggaaacatcaccataaaaaaaacatcagataattcaacggttgagacaattgatgtaactagcggccaaatttcaggttcagggtcatcacaaattacgattactgcatcatcaaactttgaaaatggaattgagtattacgttttaatagacgcaactgcatttgatgatactgatagtggttcatatgccggaataagttcaacgactgctttaaattttacaattgttgaattaatagaccctacgacagataaaaatgttataggattaattgaagcccaaaatacaattgctaaaaacacctttactgaatttaatgggaccgttagtgataggctaaagtatttaaggttaaatagaattaaagatgatttaagtaaaaacaatttaaagtttgattttggaaatgcaatactgacctcactcacaaatgatttacttgctaataatgataaaccaataattcccaggaattggtctacctggtcagaaggctcaataagtattactaaaattggtgataccagcacatcatctgaaaaggaaatagatagccaaggtattgcttttggatttgataaaaaaataaatgataatgatatttatggttttgctattcaatatggtcagagcgatactgatgtaggatctaatggaagtggtatcgatagcaaaaattataatatttcaatgtacagaacaagaccattagatgataataattttatcgaaggatcaatcggaattggaaaaattaaaagtgatattgagcgaaagtcaaattctaatacattaactgcttcaagagatggaaaccaaatatttggatcagttaattttggaaaaacaattgacaaaggaaactttaatttagttccagctttaagagtagatcttggatatacagaacttgagggataccaagaggttggaacggacgctctatcttatgatgatcaagaagtacaaagtgggcttttatctttaggatttggtgtaaacaatctagttaaattcgatgatagtacaataaaaccatttggcttaattgaatttggtttagatttttccgactcgtctgtaaccaaattaaattacgtatctgatacgagcacaacttatacctatacacaagatacaatatcagaatatatgttaacatctgaagttggttttagctacaactccaaagacaacctatcaataaacactagctacaggcgtatccaaggtgaaaaacatgaacatacagatacattatcatttggtttaaactttaaatcgaaacgtgaaacagaatatgcaatgcaatttggaggaactgaagatttatctgctggaattaatgttgcaaaaaatattaatggcttagatttcaatttcaaattggatcaagaatttaacgaaaatctcgataaaaatgctgaagtttcaatgaataaaaagttttaaa

SEQ ID NO: 295890 - DNA, 1732 bp, Unknown
  Bacterial polypeptide expressing nucleotide sequence isolated from the Sargasso Sea
actgatggaaccaaagtatttgtagttggaacaaaagatttcgatgatgaagttaatgaatatagtcttactactgcttttgacatttctactactcaatcaataactcgtagacttggaataggtactactgaactcggtgcacctatggcggatttacatccttatgggataacttttaacggtgatggaacaaaattatatatatctggaaatgaaaataacaaaatctttgagttagatcttggatcagcttttaatatttcaagcgcaacacaagttggcgaattagcaacaaacgtacatgccaacggagatcctacaccttgtggtcttacttttaacaatgatggaacaaaattatttttggcaggatttcataatcatagaattgtatattggtctttgagtactccctacgaagttgaaaccgctggaaaccctggtgcatttagcgtcacatctacagccaacaaaccaagagatgttgatttcaatagtgatggaacaaaaatgtatgttgtgagcggaaccggtgatcacatagcagcatttgatttagatagtgcttttgatctaagtggtaccgttacacatagaggcaattactctgtaaactcacaagacaaccaacctttcacagttgaattcagttcaaatggtttgaaaatgtttatgcaaggttacaacggtgatgatattcatgaatattctttaacaacagcttttgaaattatcaatactgttcctacactaagttcatcagttccggcagataatgcaactagtgttgcagttgattcaactattgttcttaattttagtgaaagtgttgatgctgaaagtggaaatatcactataaaaaaaacatcagataattctacagtggaaacaattagtgtaacaagtggacaagtatctggttcaggaacatctcaaattactgtcactccatcatcagactttgatggctcaactgaatattacgttttaatagatgcaactgcatttgatgatgtagatagtggggattatgctggaataagttctacaacagctttaagttttaccaccgctaatactgttcctacactaagttcatcagttccggcagataatgcaactagtgttgcagctgattcaactattgtccttaattttaatgaaagtgttgatgctgaaagcggaaacatcactattaaaaaaacttcagacaattcaacagttgaaaccattgatgtaactagcggtcaggttacaggttcaggaacatctcaaattactgtcactccatcatcagactttgatgcctcaactgaatattatgttttaatagatgcaactgcatttgatgatagcgaaagcggttcatatgctggaataagttctacaacagctttaagttttaccaccgctaatgcagtacctacactaagttcatcagttccagcagataatgcaactagcgttgcacttgattcaactattgttcttaattttagtgaaagtgttgatgctgaaagcggaaatatcactattaaaaaaacttcaggtaattcaacagttgaaactattgatgtaactagcggtcaagttacaggttcgggaacatctcaaataactgtcactccatcatcagactttgatagtggaaccgaatattacgttttaatagatgcaactgcttttgatgatgctgatagcggctcgtatgctggaataagttctacaa

SEQ ID NO: 295891 - DNA, 445 bp, Unknown
  Bacterial polypeptide expressing nucleotide sequence isolated from the Sargasso Sea
aatgagtttaattgatggttcaaaaaagatgagcaaaagtgatcctaatgagggcagtcgcattaacttattagatcctcctgaaataatcacaaaaaaaataaaaagagcaaaaagtgacagttctattggaattgaatataacaaccctgagagaccagaatctaaaaatcttttgatgatttattcaatattatctggtaaagaaatttctcaatgtgaaaatgaattttcagagactggatgggggacatttaaaaaattaattactgaacaacttattgaatcactagaacctattcagaaaaaatataaattactaattaatgatccctatcaattaaataaaatcctagatgaagggaaggaaaaagctgaagatttagcaaatcagactttaaaaagagttaaatcaaaattgggattctttgcaatggagaaataa

SEQ ID NO: 295892 - DNA, 797 bp, Unknown
  Bacterial polypeptide expressing nucleotide sequence isolated from the Sargasso Sea
aatgaatttattaaaaaatttaataagaaatttagaaaatgatttaagcaacaatggtgtatcggaatctattgttttaagaacatcaaatgtaccaaattatgattttcaaataaataatttagttaagttcgaaaagaggagtgatatagatgatattgaaaattctttttcaaaaatacttaatgatgatccgataataaagaattttgaatttactaaaaattattttataaatattgaaattaatattgaaatgtatttaagcaatcatgaaaatttaattaaaaatattaaatcttctcatcaaaaaaatataattcttgactatggaggaccaaatattggtaaacctttacatgtaggccatctaagatcattaaatattggaagaagcctttataacattaataaattggctggacataatgtagctaatgatattcatctaggcgattggggaatgccaatcgctcaaattatttgctttatcaatgaaaaaaatattaactttgaagatataaaaatagaagatctagaggaaatttatcctaaagcatcaaaactatatcaacaaaatgaggattttaaatctttggctcaaaatataaataaagaattaaacgaaaataaagctgatcttataaataaatggaaatttataaaagaagtttccataaaagcaataaaagaaactttgtcgttactcgatcataattttgatctttggatgggtgaaagtgatgtcaatagcttaattccagaaatgattgccaacttaaaagataatgaaaaaa

SEQ ID NO: 295893 - DNA, 202 bp, Unknown
  Bacterial polypeptide expressing nucleotide sequence isolated from the Sargasso Sea
aatgcaaagagagaagttgaatgaaaaaaattgtgactgggtaattgcaaatgatgtctcagatcaaactataggatttggatcagattttaataaaatttctatattttacaaagataaacctgaagaaaattttgaaaagatgagtaaatcattggtcgctgaagaaatagtcaaaagagtaattcaacagattaattaa

SEQ ID NO: 295894 - DNA, 2317 bp, Unknown
  Bacterial polypeptide expressing nucleotide sequence isolated from the Sargasso Sea
aatgaaaaataataagatatttaccagaaccgcagtggcaagggctgtcaccctgctactgagtggcacagcagtgttgccactttatgcacaggaagcacaacaagcacaggaaacaaaagcatcagaaacagctcctattgaagtgatcgctgtacgtggtgtgcgctcaagtttgcagcaggctgcagaaattaaacggaattctatgggggtggtcgacgccatctctgctgaagatataggtaagttcccggataccaacctggcagaatctctgcaacgtatatctggtgtatcgatcagccgcactaacggtgaaggttcagaagtcacagtacggggttttggtggtgacaataacatggtcacgctaaacggccgtactatgccagcagctaatacttatgcagcaggttcaggagctgatggcacaagccgtggcggtagcgcccgggcttttgacttctcaaatctggcctcagaaagtatcagtggtgttgaggtttataaaaccagtaaagcgaacgtagcgactggcggcataggcgccactttaaatatcaaaacagcacgtccactggaaaactctcaggacgtcgccagcataggtgtaaaagccgctcatgacactaccaacagagccggtgatgatgtgactcctgaggtttcaggtatttacagccatgcaactgacgatggtaaattcggtgtgagtgtgtcagccagtcaccaacaacgtgactcaggttacacaggcgccacagtgaacgactggcaggtggcttactgggatgatctggcagatgcggatcggttatggaacaacgcaaacactgtggtcaccaacggtcctagccagggtcaattgtacacccgtcctaacgatattcgttatgcgttttcagactcacaacgtgaacgcgataatgctcaattgacgctgcagtttaaacctaccgaaaaatttacagccacaggtgattacaccttcgctgaaaacaatattgttgagcacagaggtgaaattaccaactggatgcagacgggtagcaacactaaagaaattgaatttgataacaacattgttaaaactccaacttatattaaagaagagtatgcaagcgctgtagacgagggctatgagcaacaatggcgtgaacaaaccaacacgctgaaatctataggcctgaacttagagtacgactacagtgacgatctgacttttgtgtttgacgctcacgattcaaaaatgcacagccgcggcactggcccacgcaattcaggtgaattggctgtaggtttaggtgctcctatagtggaatcccgtgaatggttctggggtgcagatttacctacctatctgaacgtctataacgatgcagctcctggcaaaggcgctaatgcaaacggtatggtggatgctggtgacgtaggttcatctattgcccgcattcgtaacgctggccaggaaagtgatattcagcaatttaagctggatgctatttatgtggtagacaacggccgtttcgactttggtgttgagatgcgcaatatggaatcccgtactattcagactgccggcaataacattgctttaggtaactggaacgtagggaatccgggtgagtttggtgatttaatccaaccttttgacttaccaggcgagtttaatgattttaaaacattaccaggtggttatggttttattgccgacccgcgcgctttatatacagcagctttaggcctatatccaggtattccaacggcttctgaaacatccttgtctgctgacaatatagtgaaagaagacactatggctgcttacttccagatctctttgggtggtgaaatcggtaaaatgccatttgatgtattaactggcttacgttacgaagaaactgaatctgaatccagctcgctggtcagcagaaactatttccgctgggaagataataacgacatcgtcgcttatgtcgacagtactgtgccagcacagccatttaatgcagaaaacaagtacgactacctgttaccaagcttagactttactttgcatctgaatgacgacttaatcagccgtttctcctttagtaaaacaatagctcgtgcaggtttaggtagcttaggtgtatcggcttccaactttggtggtggtggtggttctacgctgttaggtgctcaacctacagccaacgcctctaacccagccttgttgccactggaatcctctaactacgatttatcattagagtggtactacgataatggcagctacatgtctgctggtttgtttcagaaagatgtagtgaacttt

SEQ ID NO: 295895 - DNA, 1918 bp, Unknown
  Bacterial polypeptide expressing nucleotide sequence isolated from the Sargasso Sea
gatggaactggtagaaaattttgatataaaacaaattgagaaaattgtaaaaaatgatttgaaagacaaagatatctcaaaaatgatcgaccaggatatagaaaaaaataatgagataatgtttatcgagggacctccaacaatgaatgggattcctcatgcaggacatctaagaggcagagttttcaaggatttatggtatagatacaacgtactatcaggaaacaaagttattttcaatgcaggatgggacacacaaggtctgccagtagaactccaagcagaaaaagagctaggaattgaaaatggtaaaagcgacattacatcgtctgaagatattgagaaattagtttctgagtgtaaaaatattgtaaaaaaatatcacacaaaatgggtagaagttgatgatctacttggaatgtcatttaatcaagaaaacgcgtattggacatacaaagatgaatttattgaaaaagaatgggagttgatgagaaaagcatttgaaaatgacataatgactgaggggtttagggtagttgcatattgtcctagttgtcagacatcactaagccattcagaagtaaatcagggttatgacatggtcaaggatccatcattatattacaaagtaaaacttgccgacgaagacaaatttttgattgtatggactacaatgccatttacattagttacagatgcaatggtaggattaaatccaaaagaagaatatgtcgaggcaaaagttgaggaggagacatggattgttggaaaaacaagattagaagaattcatgaatgaagtaaaaattgaagagtataagatagaaagaacatttttgggaacagagatggaaggtaagaaatacatccatccactattagatgaaattccaaaacttgcagaaattgcaaaacaggataactatcatgttgcagttgcagaagactttgtagatgtaaatgcaggaagcggattagtacacctttcacctgcaaatggagaagaagataacaacatagcaatgaaacgtaaggtcgaagttttttgcccaattgacgatcaagtaagatttactgaagacgcaggaaaatatgcaggattgtttgtaagagatgcagatgagaaattagttcatgatgtaaaagacagaaatgcattagtaagaattggaaaaattaaacacaaatacccattatgttggcgttgcaatcacggattagtatggcttgcacgcagagaatatttctatatgctagacaaattaggcgataaagcaattaaagcagcagaagatgtagaatacttttttgatcaaccaaaaaacagattcttagaaattatcaaagaaaaacatccatggtgtatttcaagagaaagattttggggatgtccaattccagtctggaaatgtgacgaatgtggaaatatggaaagattattttcaagaaaagaaattattgaatctgcaatagaattaccagacggagaaaactttgagttacatagaccatggattgataagatcaaagtgaaatgtaaagaatgtaatgcaataatgtcaagagaagaatttgttcttgatacatggcataacagcggttcagcgccaattgcatcattagatgaagcaacatacaaagaaaagattccagcgccattctttacagaaggaattgatcagacaagaggatgggcatacacactattaattgaaaatgtgatatacaataattctccagtttcaccttacaaatcatttttgtttcaaggacacgttctagatgaaaatggaaataaaatgagtaaaagtaaaggcaatgttttagaagcaaaagaattgttagaaaagtatcctgcagatcttgtaagattttattttatgtggaaatcaagtcccattgaaccattaaacttcagc

SEQ ID NO: 295896 - DNA, 793 bp, Unknown
  Bacterial polypeptide expressing nucleotide sequence isolated from the Sargasso Sea
atgatattagacaaactaaataaacaattaattgaaactgtacaaaaagtagcagaccaaaaaagtgtaagcattgataaaaaactattaaaccagatcaattttgagattagtgatgaagagagccatggcgattactcaacaagctgtgctctaaagctatctaaagcatttaatatgcagcctcgcgaaatagcgaaactattaactgaaggcttaagtttgccatttattgagtctacatctgtagaaggagctggttttattaatgtttttctgactagagaagaaaaaatccaagttttaaaggaagtggtaactcaagattcaaaatggggcaaaaatacaaaaaagcagggcaatgttttaattgaatttgtctcatctaaccctacaggaccattgcatgtggggcatggaaggggcgctgtactaggaatggccttatctaatctacttgaaaattcaggctatgaggttacaaaagaatattatgtaaatgatgctgggagacagatatctattctcactagcagcatacttataaaagcgcatataaataattttgatgtagaaggaatgtatgaaggtgattacatctatgaaattgcgcaagaattcataaaagagcatggaaagattgatattaatctggatttaaaggatttttctgatgatagagagaaaaaattggatcaaatctctgaatattttcaaaaaaaccacaaacaagcttgggatcaggcaaataatttttctgttagcgagattcttaacgtaataaaggaagaat

SEQ ID NO: 295897 - DNA, 2096 bp, Unknown
  Bacterial polypeptide expressing nucleotide sequence isolated from the Sargasso Sea
tatgccatcaactcatgttatttacgaaggtttagaaaaagtttctaaaaatatagaggaaaatgaaccagctaaaccaatgctctcatatggtaattcgaaatttattaatgaaaatcaattaaaacaatcaggtaaaaattatattattttaagattaggttctgtttacggctactctcacgataataccagaacagatattatggttaacttttttgccaaagcaacttctcaaaatagcactttaagattatttgctggaggaagacaaattaaaagcttagtacctttgattgatgttgctaggtgttttaagtttatggaagaaagagaagatatttcatctcaagtttttaatcttagtaaagacacgaaaactgtaaaagaagttgcgctaatctgcaaaactatcaacccaaaagtttctattatagaaacaaataatgaaataccaaatttaggtttttctctatctaataaaaaacttttaaatacaggatttaaatttctttacaatatcaatcaaagtcttagtgaaatgatatttaaatggtcgaagcaagatttaataaaagatcttgaattcgttaaaaatggagaaaacgaatatgtagatactagaggtaaaattagcaatcacgagttgacagaaccaattaatttaattggtttaattaactcaaaaaaaggaactattagagccaaccactatcaccctcaacaagaacaaaaatgtttattcacaaagggtcaaattatagaaatatataaagatattttaaatcctaattcaccaaaaataactcaagtggttaacgaaggacagttatcaataataaaacctaatgttgcgcatactatggtcttcacaaaggatactacatttttaaatttggtacgtggagaaagagagcatgacaactatggcatcactcatactattaaacacctattcgtagatgaagaagaaaagaatttattgttagaatgttataagtttgattgtagatcctgtggtaatacaaatttaaaaagagttgtatcacttggttatcaacctcttgcaaataatcttttaaaaaaagagaatgagaaatgtgaattatatccattagagatgaattattgtgatagatgtcataattgccaattatcagttgcagttaatccaaaaaaaatgttttctaattatttatacacttcttctacctctaaagtatttagagatcactttgtaaaagcctcgaaaaaatatattaaagattttaagttaaataaaaaaaaatcttatataattgatataggcagcaatgatggagttgcattaaaaccttttctagatcaaggctttaagaaaattcttggaattgagccagcgaaaaatttagctaaattggctaataaaaacaagattaaaactttcaacggttttttgaataaaaaaaatataaaaaatttaaaaaaaaatgcagatctaattctagcctcaaatgtttttgctcattcagataaactaaacgagatggctgaatgtatgtttaaactattaagtaaaaaaggaactatagttatagaggtacagtatttaatgaatactttaaaagaccttacttttgataacatttatcatgagcattataactattggtcacttacctctttagttaatttttttaaccgattaaacggaaaaatatttagatcagaaaaagtaaatactcatggaggctcaataagagtttatattaaaaaggataaaaaagtaaaagttgaacaatcagtaaaacaaatgctcaaagaagaagataaatttggaattaaaaattttggaacttataaagaatttggagaaaaagtttataaaatcagggaaaatgtaagaaaaaatattaaaaaactaaaaaataataataatataattattggctacggagctcctgcaaaagcgacaactgcactcaatttttttggaatttcaaaagaaattgattttatagtcgaagataataaattaaaacataacaaatttatacctggaatgaaaatacctgttaaagataaatctaaaattaaaaataagaaaaatacactag

SEQ ID NO: 295898 - DNA, 997 bp, Unknown
  Bacterial polypeptide expressing nucleotide sequence isolated from the Sargasso Sea
ttgggattccaagcactagaatcctcagaaggacgtatttggactagtcgcatacgtgacaatgttccatttatagctattacacttgtaattataatgttttggatcatcagtggggaacgcttcatgtcctatagaaattggacgttcattgcacagcaaacccccgtactgcttcttcttgcctatgcacagttattaatagtgactaccggatctattgatatctccgtaggctcaaatcttggttttagcgcctatatgtctgctttaggtatgatctggtttgggacaatggggtttatggttgggatttttgcagcaatcattgttggagttttcaatgggatcattttttcttttttcaaaatctcctccttcgttacaactcttgcaatgttgatcattgtgagagcggtcttagtcattgtctcagatggaagatctatctatgttacagaccagccaatggcaagcagtaatattacatctattgaagcaaagtggttgcttgacctaggccaattccctcacattctatacttctgtatagcagtcacaattttactttggatcgtatatgaaaaaacagtttttggtaaacaattgaaagctcttggtggtaacgagaaggttctccacttagcaggtatttcagttaactggttcaagattcaggtctttgcagcagctgggttcatggtaggattggcatcatttataaatctggcccgatctggagctgctaccgtccaagctggacaaatgcaagaacttgactccattgctgcagtggctttgggtggaactgttctgaccggaggatacggtagtgttgtaaaaacagttgtaggagccctcactcttactatcgttgctaatggtctaacaatcgccggtgtaactccttcatggagtaggatcgctcgggggttactgctgattgcagcaattgcgattacattaaaccggaagcagatcgatgttgtcaaatgag

SEQ ID NO: 295899 - DNA, 754 bp, Unknown
  Bacterial polypeptide expressing nucleotide sequence isolated from the Sargasso Sea
attgggtccagaaataggtgatatggcatgtggggaatttggcaaaggaaaaatgtctgaaccaaatgaaatattaaaacaaattgaagtacactttaaaaatacaaaaaataacaataaattaaaagctttggtaacagctggcccaacacgagaatttatagatcctgttagatttataagtaatagatctagtggaaaacaaggttatgaaattgctaaatcatttagagataatggttttgaaacaacacttatttcaggacagactgatttagatccattatctggattaaattttataaaagttgaaacagcacaagaaatgtttgatgaaactttagaaaatttacctgtagatgttgctgtattcactgctgcggtagcagattataaaattactaattttgaaaatacaaaaatcaaaaaaaaagaaaaatttaatttagcgctagaaaaaaatattgatatattagataaaatttctaaacataattcattaagacccaagttaacaattggttttgcagcagaaacaaataatttagttgaaaactcaatgaaaaaattagatgaaaaaaattgtgattggattatagctaatgatatttcagataattcaattggatttgactcagatgataatcagatttcaattttttataaagataaaaaaaatgaaaatttaaaaaaaatgagcaaatcattagtagcttcggaaatcgtaaatagagtaatagaaaaattgaattag

SEQ ID NO: 295900 - DNA, 1138 bp, Unknown
  Bacterial polypeptide expressing nucleotide sequence isolated from the Sargasso Sea
gaagatcttgaaagaaaactagagaggtcccgcacaaataacgagcctctcatagcaaagttaggttgtgacccaagcagacctgacctacatattggtcacggggtagtgctaagaaaattaagacatttccaagaccttggtcatacttctgtgctggtaataggtgattttacagcaatgatcggtgacccctctggtcgtaataagaccagaccacaacttactcttgatgaggccagatcgaatgcggagagctacgttgagcaagctaaagtaatacttgatataaatactcttataattaaatacaattcagattggcttagtcaaatgaattttaatgacgtggtaaagttagcgagctcatatacagtagcaagaatgcttgagagagatgattttaccaaacgtttcaaggcagagatacctatatctattcatgagttcttgtatcctttggcacaagcgcaagactcagtagaattaaaagcagatgttgaacttggtggtacagatcagaagtttaatctgcttgtcggaagagatctgcaaaaggataatgaccaagagccacagtgtattatcactacaccacttcttgagggcactgatggcattgaaaaaatgtctaaatcatatggtaatgatattggacttcaagacagtcctgaagatatgtatggtaaaacattatctatctccgatgatatgatcctaaaatggttcacgcttgcagcagattgtgattcttcagctgtaaaaacagcttcagataagcttaataatcccggtgtgaatcccatgatcgtaaagcgtgaacttgcgcgcaatgttgtacagcttttttacgataaacaaacggctgaaaaagcagaagcacatttcgataccgttgttgtaggcaaaggtataccagatgaaatgccagtctatgaattagactctgaggatcttattgttaatgtaatattttcttctggattacttaaaagtaaaggggaggctcgtcgaatgataaaacaaggtgctgtgaagctagatgataaaaagatcgatgatattcaggcatccatagttccagaaggtgaacagatattgaaagtaggaaaaagacgattcttaaaggttatttgat

SEQ ID NO: 295901 - DNA, 1267 bp, Unknown
  Bacterial polypeptide expressing nucleotide sequence isolated from the Sargasso Sea
atgagattaattttttttaaaataatttttttttttattttttttagttggattaatgtttcatactcagtagaagtacttggaacaggaacagcagctttaataggtggagatcttacagatcctgaagatgatggagtagatggcgcaaatacaaattggaattggacatcaataagtgctagtagtgaagaaaaatggaccagtgaaggttcatttaatgtatttgataacaaagtaggtgccaccaataataaatggtgttgtaacggaccaacccagtggatctctgttggattttcacaaccctatattttaagtcatttcaccataacttctggaaatgatgttacgggaagagatccagacatttggaaaatacagggttcaaatgacggagacaattggacagatatttttgtctacgataacaatggtgtatctccatggggtacaactcgtaatagagtgcttaaatatactggtgatggtgatgattttagtacaccgaatgcattttcttattttcgttattatgtaacttcaactggaagctcggctcatcaaataaatgaactagagtattttggaagtgctgatagtaccaatcctaccttaacctcatcggtacctactgataatgcaactggagttgctgaagatgcaaatataattttaaattttgacgagattgttgatgctgaaactggaaatataacaataaagaaaacatcagataattctaccgttgaaacaattgatgttacgggtggtcaattaagcggatcaggatcaactcaaattactttagatccatcagtaacattagacagttcaacagagcattatgttttaatagatgctacagcttttgatgacgtatctggaaatagttatgctggaattagttcaacaacagctttgagctttacaacaggagacacaacaggtccaactctaacctcatcggtacctgctgataatgcaactggagttgcagttgattcaactattgttcttaattttagtgaaagtgttgatgctgaaagcggaaatatcactattaaaaaaacttcaggtaattcaacagttgaaactattgatgtaacaggtggtcaggttacaggttcaggaacatctcaaataactgtcactccatcatcagactttgataacggtactgaatattacgttttaatagatgctacagcttttgatgacgcatctggaaatagttatgctggaattagttcaacaacagctttga

SEQ ID NO: 295902 - DNA, 2506 bp, Unknown
  Bacterial polypeptide expressing nucleotide sequence isolated from the Sargasso Sea
atgagattaattttttttaaaataatttttttttttattttttttagttggattaatgtttcatactcagtagaagtacttggaacaggaacagcagctttaataggtggagatcttacagatcctgaagatgatggagtagatggcgcaaatacaaattggaattggacatcaataagcgcaagtagtgaagaaaaatggaccagtgaaggttcatttaatgtatttgataacaaagtaggtgccaccaataataaatggtgttgtaacgggccaacccagtggatctctgttggattttcacaaccctatattttaagtcatttcactataacttctggaaatgatgttgcgggaagagatccagacatttggaaaatacagggttcaaatgacggagacaattggacagatatttttgtctatgataacaatggtgtatctccatggggaacagatcgtttagaagttctaaaatatactggtaacggagatgattttaatacaccgaatgcattttcttattttcgttattatgtaacttcaactgtaagcatgaatcatcaaataaatgaactagagtattttggaagtgctgatagtaccaatcctaccttaacctcatcggtacctgctgataatgcaactggagttgctgaagatgcaaatatagttttaaattttgacgagattgttgatgctgaaactggaaatataacaataaagaaaacatcagataattctaccgttgaaacaattgatgttacaggtggtcaattaagcggatcaggatcaactcaaattactttagatccatcagtaacattagacagttcaacagagcattatgttttaatagatgctacagcttttgatgacgtatctggaaatagttatgctggaattagttcaacaacagctttgagctttacaacaggagacacaacaggtccaactctaacctcatcggtacctgctgataatgcaactggagttgcagttgattcaactattgttcttaattttagtgaaagtgttgatgctgaaagcggaaatatcactattaaaaaaacttcaggtaattcaacagttgaaactattgatgtaacaggtggtcaggttacaggttcaggaacatctcaaataactgtcactccatcatcagactttgataacggtactgaatattacgttttaatagatgctacagcttttgatgacgcatctggaaatagttatgctggaattagttcaacaacagctttgagttttacgactgatctagaagatcccacaaatgacaaagatgtaattggtttgatagaagtccaaactgaagctccaaaaaaaatagttcagcatgtatcaacgccaatatataatagacttaattggattagagggtatgaatcaggagaaaatttaaacacacaaggaattaaatttaatttttcaaatccaaaacttgcacagcttgcggatttagttcctcaatccattaactttaataaaattccaaaaagatccaatgatgattggttgttttggagtgaaggaagtgtcagtgttggaaaagtaggtgatacaacaagttcttcatctaaagatgtacatactaacgctgttactttaggatgggatagaaaaattgatgacgaaacaattcatggatatacagttacttatacccaagatgatgttcaagttggtagctcaggaacgtcagtagatatagactcttatagtttttcaacctatgcaacatttcatagatctgagaatcaatacatagaggggattttaggtgccagtaaactagattttaaaaatattaggaaaagtggaagcaatacactaacaggaaatagaaatgggaaacaagtttttggatcaattcagtatataaatagtgtaaacggagataaaattgatatttctccaaacataagattagacttaagctctacgtcattatctcaatacagtgagataggaactaatgcactttactatgaaaaacaaacagtcgaaacagttggattatatagtggtttaactttcaataatgaaattttaaaaagtaattatattttgagaccttcggctggttttgaattaggattagatttaagtcctaattcagatgtttctttaaactatgtttcagatccaaacactaaatatactaaatcgattgatcaacatggtgaaaaaagcattaaaggaaaaataggctttgatgtacttcataacaatggtttatctttgatgactttttatgaacgaaatcaaggtgaaaacagtcatagtgatacattatattttttaacaggttatgtttcttcaaaagaagaagagtatgctatggcgctaaatgataaaaaagcatcaattgaatataaaagaaatgtaaatggttttgatatatcgtttgatacgggttatggtttattcagtgaatataaagattatgaagtaaacttaaagatcactagtatattttaaa

SEQ ID NO: 295903 - DNA, 1621 bp, Unknown
  Bacterial polypeptide expressing nucleotide sequence isolated from the Sargasso Sea
aaaatcttggagggaattaaatataaatacaggcaaaattgtaaagtttttgaagcaaattaaaattaaaaaaggagacagagttgtagcttatatgcctaatactatcgagacagttgaggcgtttatagcagcgagtactataggaagcatctggtcatcatgcagtcctgattttggtattaaaggtgttgttgaaagattttctcaaatcaatccaaaagttttgttcattacagaccagtatttttacaatggaaaaaaaattaatgtattagagagattatctgaaattttaaaatctattccatcaattaaaaatgttgtgatcgttaattatcctggaaaaaaatatgtcaccaataaaagtaaatataagaaaataaatttaattaaattgcgtgagattattaaaaatcaatctgaaaaaataaattttaaaaagtatgattttgaaagcgagttgactattttatattcaagtggaacaactggaaaaccaaaatgtatttgtcacagaactggtggagttcttcttcagcataagaaagaacatcaattacattgtgatataaaagaaaatgataatgtgttttattttaccacttgtggttggatgatgtggaattggttagtaagctcgttagcttcaaaggcatcaatagtactttttgatggttctccaatgtataaatcaagtgatttacttttaaaaatagcacaaaaagaaaaaattactctgtttggaattagtgctaaatatattgatgctctaagaaaattagaacctaatcttaaatttaaatataaacttcaaaaactaaaaacaatatgttcgacaggttctcctttatcaagtgaaggttttaaatatgtttataaaaatattaaaaagaaagttcatctctcatctatttcgggtggtacggatattgtatcgtgttttgttttaggaaatatatatcagccagtaaatattggtgaaatacaaaattctggtttaggtttagatgttgatgtctttaatgatagaggcaaatctttaaaaaattctaaaggtgaacttgtttgtaaaaatccatttccatcaatgcctcttaaattttggaatgataaaaatgatgtaaaatttaaaaaagcttacttcaataggtataaaaatacttggcatcatggtgattatgctgaaagaaaaaataccgatggttttattatacatggaagatctgacactacccttaatccaggaggtgtaagacttggtacagctgaaatatattctgaggttgaaaagtttaaagaaattaaagaagcactagtagttggtcaatcttgggataatgatataagaataattcttttcgttgtaacgagtagaagatacatacttaataattctttgcttaatagaataaaaactcaaataagaataaatgcatcgccaagacatgtccctagtaaagtaattgttgtaaaagatattcctagaactaaaagtggtaaaattgttgagcttgcagttaaaagcactatagaaggaagtgttgttaaaaataaagaagctttagcaaatccagaagttttaattcaatacaagaatttaaaagaactaaatcattaa

SEQ ID NO: 295904 - DNA, 1189 bp, Unknown
  Bacterial polypeptide expressing nucleotide sequence isolated from the Sargasso Sea
atggataatgcactaaagcatataaaaagaggttcagatgaaattcttactgaagatgatcttcaaaaaaaattagaatctggtaaacaacttgtagttaaggcaggatttgatccaactgcacccgatttacattttggccatactgttttgctaaataaacttcgtcactttcaagattttggacataaagttatatttctgattggcgactttacgggcagaattggagacccatctggtacaaataagacaagacctactttggattctaaagatttattagaaaatgctaaaacatatgaaaaacaagtctttaaaattctcaagaaagaccttacagaagttaaatttaattcagaatggtgtgatgatttaggagcagatggattaataaatcttgcatcaaaatataatgttgcaagaatgctcgaaagagatgacttcaacaaacgtttttcctcaaataaaagcattgcaattcatgaatttttataccctcttgttcagggctatgactcagtggcactaaaggttgatgtcgaatgcggaggtaccgatcaaaaatttaatcttcttgttggaagagagctccaaagagattatggacaagaacctcaggttgttattactgtcccaattttagagggtcttgatggagtcaagaagatgtcaaaatctctagataactatattgctatagacgaagctcctgatgaaatgtttggaaagattatgtctatttcagatgatttaatgtggcgatggtttgatttattaagttttatgccagaagaggatattactaagttgaaacaagaaatggaagacggcaaaaatcctagagatataaaatttgtattagctgaagaacttgtagatagatttcatcaagaaggcgatggtaaaaaatgcaaagaagaatttttaaatagatttcaaaaaggcaatatgcctgaagaaatagaatcaatttctgtaaacttaactgaagatcaaattttattagttaatcttctaaaaaatactaatatgattgctagcatatctgaaggcaatagattaattaaacaaggcggaattaaaattaattctgaaaaagtaattgatccaaagctttcaatatcgtctggtactgaaaatatttatcaaattggcaaaagaaaatttctaaagataaagacatagc

SEQ ID NO: 295905 - DNA, 1018 bp, Unknown
  Bacterial polypeptide expressing nucleotide sequence isolated from the Sargasso Sea
catgtcacatgcaaagcagtcggttatcctcactggcgaccgcacaaccggtccgctgcaccttggccactacatcggctcgctgcgctcgcgcgtgcagctccagcacgaagcgcagcagttcctcctgctagccgatgcgcaggccatgaccgacaacgtcggccggcaccagaaggtcacggaaaacgttatcgaggtggcgctcgactatctcgccgtcggtatcgaccctgccaaatcaaccatcgtcgtccagtcgcaggtgccggagctcgcggaactgactcagtacctgctcaatctcgtgacagtcgcgcgcctcgaacgcaacccgaccatcaaggcggaaatcgtgcttcgcggtttcgaacgggatattcccgcgggctttctgacctatccggtcagccaggccgccgacatcacggcattcaaggcgacacgcgtgcccgtcggcgacgatcagttgccgatgatcgaacaaaccaatgaactggtgcgccgtttcaacaacacggtcgatcggcaggtgctggtggagtgcgaagcagttctctcgcaggtggcgcggctacccggcatcgacggcagagccaagatgagcaagtcactgggtaacgccattgcgctgggtgcgagcccggatgaaatcacccgggccgtgaacgacatgtacaccgacccgaaccatctgcgcgtcagcgatccggggcaggttgaaggcaacgttgtgttcgcgttcctcgatgcgttcgagccggacgtaccgatggtcgacgaactgaaagcgcactaccgccgcggcggtcttggcgacagtgcggtcaagcgtctgctcaacgaccggctgcaggcgatgctcgcaccgatccgggagcgccgccgcgagttcgcaaccgaccgtgcggaggtgctgaacgttttgcggcgcgggacgatgcgtgcgcgggaggtggcaggcgcgacggtgtccgaggtgaaaagcgcgctcggcctgaactacttccaggactga

SEQ ID NO: 295906 - DNA, 387 bp, Unknown
  Bacterial polypeptide expressing nucleotide sequence isolated from the Sargasso Sea
aatgaatgacgaagaagtaaaaaatgaaattcgaaaatttgctttgcaaaatgctgtagaacatgacggtcaaacaagagacaaaacaattcttgcaaagattatggggaatgttccagaactaagacaaaaagctaaagagataggaccaatcattactgaaattgtttcagagataaatcaaattccaattgaagaacaacaaaaagagatacaagaaagatatcctgagttattagaagtaaaaaaggagaaacctgaaaaacaaagtctcttaccaccactaaaaaatacagaaggaaaagagataatcacaagatttcctccagcaccaaatggctatccacacatcggtcatgcaaaggcagcagtaatcagtgaggaata

SEQ ID NO: 295907 - DNA, 1471 bp, Unknown
  Bacterial polypeptide expressing nucleotide sequence isolated from the Sargasso Sea
tatgtcaaaaggtattacatcacaaagcgaaaactatgctgcatggtacacagatgtagttgttaaggctggtcttgcagattatggacccgtaaaaggaacaatggtaattaaaccctatggatttgctttatgggaattaattaaagactcattcgataaaatgattaaagatactggtcatgtaaatgcctacttccctttgtttatcccaaagtcttttctagcaaaagaagcagatcacatcgaggggtttgccaaagaatgcgcagtggtaactcatacccgcttaatgtctgaccaaaataaaggcataattgttgaccctgaatcaaggctagatgaggaggtaattgttaggcctacttcagaaacggtgatttggtcaatgtataaaaaatggattcaatcctatcgtgatctgccgctattaattaatcaatgggccaatgtggtacgctgggaaatgagaacaagactttttttgagaactacagaatttttgtggcaagaagggcatactgcgcacgagtcctatgaagaagctgaaaaagaaacgcttttaattttagaactttaccgtaagcttgctgaggattatctggctatgcctgtcctcacaggtcttaaatcagaatctgaaaaatttgcaggagcagataaaacttattgtatagaagcaatgatgaaagataagcgcgcattacaggcaggaacttctcataatttaggtcaaaattttgccaaagcatttgatgtgacctttcaatcaaaagataataaagaagaatttgtttatgctacaagctggggtgttagtacaaggcttgttggaggagtaattatgacccatggagatgaaaaggggttaagacttccccctaatattgccccccaccaagtagtccttgttcctatatttaaaaatgaagatgaaatgaatgccattaaggattatataaatcctgtattaaatgagctaagggaaagccgtattagagttcatgaagactggagaaaagaaagtccaggttttaaatttaacgaatgggaagttaaaggtgctcctttgcgattagaaattggtttgagagatattcaaaaaaacagcaccatggtttttcgaagggatactggagaaaagaacgaggtagataaaaacgatctggttaaacaaattccagagttgcttgataaaattcaatcatctttattcaatcaagcattaaaatttagaaaaaataatacccatactgtatcaagctacgatgaatttaaaaaaattatagaaaacaatgatggttttgtaagatgtggttgggatggagatatagaaactgaagaagctattaaaaatgaaacaaaagcaactattcgcgtgataccttttgatgaaaaacctaaaaacctcgtttgcatttattcagggaagccggcaatgcacgaagtaatttttgccaaagcttattga

SEQ ID NO: 295908 - DNA, 1720 bp, Unknown
  Bacterial polypeptide expressing nucleotide sequence isolated from the Sargasso Sea
atgaatgacgaagaaataaaaagtgagattagaaaatttgcactacaaaatgcagtagaacatgaaggtcaaacaagagacaaaacaattctagcaaagattatgggaaatgttccagagttaagacaaaaagcaaaagagataggtccaataattactgaagttgtttcagaaattaatcaaatttcattagaggagcaacaaaaggagattgaagaaaaatatccagagttattggaagtaaaaaaagagaaaccacaaaaggagagtttacttccagcattaaaaaatactgaaggaaaagaaataatcacaagatttcctcctgcaccaaatggctatccacacattggtcatgcaaaagccgctgtaatcagtgaagagtatgcaaagatgcatggtggaaaactaattttacgatttgaggatacaaatcctggaactgaacgattagagtattatgctgcaattaaagttggaatggattggcttggaataaagtatgatagtgtcgaacacgtctcagataatttagatattctttacaaaaaagcagaccaaattataaaatcaaatgatgcgtatgtttgtacatgtagtcaagacagtattagtaaagacagaagggaaatgattgaatgcagttgtacaaaacaaagtgtagaagaaaatgaaaaactatggcataagatgcatgatgaaaaaggcttcaaagaaggacaagcattattgcgatttaggggaaatatgcaatctggaaatacaacaatgagagatcctgcgctattcagaattaatacaaaaagacatgcaagacaggaacaaaaatacaaagtttggccaacatacgattttgcaggcataatttttgacagtattagcaaggtttcacatgctatgagatcaaaggagtttgaactaagaaaggagttgcatcatacaattttagataaattgggaatggagaaatcagagttcatcttttttggcagattggacttggaaggaatgcctgtatcaaaaagtgctctaaaaccattaattgaaaatggcaaagttccatggtatgatgacccaagattacctacgttagaaggacttcgtagaagaggaatcagaccagaagcggtaaagaaatttgttctttccttgggattaacaaaaaatgatacggtttcaccatttgcctcacttgaggcattcaacaagaaaataattgattctgaaagtattagacttcacatggttcgtaaaccaaaggagatgaaggtgacaaatcttccatcaaatgaattggaattaccaaatcaccctactattgacctaggaaaacgaacagttactgtaaatgattctgtaatgattgacggcgatgatgctaatgagttgaaaaaaggtgaatctatcagattacttggaattggaattttcaagattgtagaagatggttcaaatcttacagctgaatttatttcagaaaatgctgaaaatattgaaaaaaagatacaatgggttgcaggagaaccaataaaactcaaaattattgttcctgatcagttattttttggagagacattcaacgaagacagtcttaaagaaattgaaggatatgttgaacaagcatacttagaattaaaagacggtgacgaaatccaattcataagatttggatattgtagaaaagaatctacacaccaagtcatatttacacacaagtgag

SEQ ID NO: 295909 - DNA, 1780 bp, Unknown
  Bacterial polypeptide expressing nucleotide sequence isolated from the Sargasso Sea
aatgaatattttttactatgatattgctgttggattgccattaagacaatgttttacctataaatcaaaagaagtaatcaaaaaaggtaaaagggtaatagttccgtttggaagcaagtcaattgttggaatagttgtaaagaaaatagctaaacccaagtcactaaaaggcttaaaagaaataatctcaatagccgatgaacattcttgttttaacggatcaatatttgaagcaattacatgggcctcagattactatcatcatccaattggtgaggtatttttctctttcatgccaacgctcttaagaaaacaaaacgataaaattattatcgaccttgatgataatactgaatataagttaaatgaagaagacaagaaattaaaattaacaaaagaacaaaacattaatctatctaaacttaataaagttgaaaaatttagtccttcattaatatacggggttacagggtctggtaaaacagaaatatatcttcaactggctgaaaaatttattcttcaaaataaatcgattttgattctagtaccagaaattaatctgataccacaattagaaaaaagatttaaggatcgttttaatggtgatattggcgtatatcattccagacaaactccaaaccaaaggttaaaggtttggctgcgatcaaaatttggcggaataagaattgttataggaacaagatcatcagttttgatgccattaaaaaatttaggagcaatcattattgatgaggagcatgatcagtcatataagcaagctgaaggttttaagttttcaggaagagatttggctataaaaagagctcagatagaaaatataccggtttttttaggttctgctacaccatccctgcaaacccttaagcttgtaaaagagaaaaagttcaaaaagtttgatttattgagaagagtagatggcaaaaagccaccaaaattaattcctttggatattagtgactctcctctacttggaggaattgctattcaaactatgagtatcattgaagcagcaatcaataaaggagagcaagtattaatttttctaaatagaagaggttttgctccattatatgaatgtgataattgtggctgggttgcaaaatgttcatcatgcgaatcaaatttagtctttcataagtcaaaaaacagactaatttgtcataaatgtgaatccgtttatggggtaaataaaacatgtccagattgccattcaaatgaaataaacactcttggaaccggcactgaaagagttgaagaggtacttagaagtacatttaaaaaagtacctatcattagaatggattatgattcgacaagacttaagggatcaattgaagcaatttatgaaaaggctaacacaagcaaagaagcaatattggtgggaacacaaatgctatctaaagggcatgactttcctaaagtaacgctatgcgtaattcttaatgctgatggaggtttattaagcccagaaataaatgcaattgaaaaaatctcacaacaattaattcaggtttctggtagagcaggtagaaataataatcttgcaaaagtaattattcaaactaggtatcctaatgatgaaaatcttaaacaaattaaaactggagactataggctggtttctgagcaatgccttaaaacaaacaaggctttgaacatgcctccatactcaacagttgcaatattaagagcgacctcgcccagtccagaaagctgctacaaatttttagataaggcgaacaatctcttaaatgataaa

SEQ ID NO: 295910 - DNA, 842 bp, Unknown
  Bacterial polypeptide expressing nucleotide sequence isolated from the Sargasso Sea
ctggtttaaaaaaatgaaacctgatgaatttataagactctcatcgataatgactgtagcgagaatgcttgaaagagatgattttaaaaaaagatatgaaaataataagccgatttctttgcatgaatttttatatcctcttgttcagggattcgactcttatgcgctgaaagctgacattgaattaggagggactgatcaaaagtttaatcttcttgttgggagagaagttcagaaacattttggacaggatgagcaagtgattattaccgttcctttattagaaggattagatggcgtcaaaaagatgtctaaatctctcaataactacatagctttaaatgatgaacctaatgaaatgtttggaaaaattatgtccatatctgataatttgatgtggagatattttgacttactaagcttcagatccaataatgaaatagcttcatttagagacaaggttaaaaacggagagaatcctatgacctttaaaaagaaacttgccacagaaattgttgaaaggttctatgataaaaaatcatcagagaatgctgagatagcattcacaaatgtttttagtaacaagttagaacctagtgaagtccctatttttgaaataaatgaaacttcaagcatatcaatcgttgaacttctaactcatgaggatttaggtaatgaatttattcaaagtaagtcagagtgtcgaagattgataaaacaatcagggattaaaatgaacaataaaaaagttgaaaatcctgatcttttgataaatttgggagaagaaaattacttccaaataggtaaaagaaagcatctaaaaattaagctagtaagttaaa

SEQ ID NO: 295911 - DNA, 1006 bp, Unknown
  Bacterial polypeptide expressing nucleotide sequence isolated from the Sargasso Sea
aatgaatataaaaaacattaaatcagaatttccaatatttaaacaaaaaataaatggtaaacctttaatttatctggatagtgctaattcatctcaaaaacctaaagctgttataaatagaatgtcaaatttctatgaaactgagttttcaaacgtaggaagaagtgttcactcattagctgtaaaagcaaccaacagattcgaggagtctagagataaagttcaaaaatatttaaacgcaaaacacagagaagaaatcatttttactaaaagcgcaaccgagtcgatcaatctaatagcttcttcttttggagagaaattcataaaatctggagatgagattttgacaacagaattagaacatcattctaattacgttccttggcattttataaggcaaaaaaaaggtgcaaaaattaaattcgcgcctgtaaatgaccgaggagaagttgaaattgatgaaataaaaaaacttataaattctaaaacaaaaataatagctattactcatatatcaaatgtaactggagctataatgccaataaaaaaaattgttgatttagctaaagataaaaatattcctgttttagtagatggaactcaaggagctccacatttaaaaatagatattcaagaactagattgtgatttttatgcaatatcgtgtcataaaatgtatggtccgaatggattgggaattctttatgcaaaaaaaaaatggcttgatgaattgccaccttaccaaggcggcggagggatgataagtgaagtaatgaaagacaaagtctcttttgctgactcacctacaaaatttgaagcgggaactttacaaactgcagaagttgtagctttttctgaagcaataaattttattgaaaaattaggaattaaaaatattcaaaatcatgaaaatgaaattttggaatacggtattgaaaaattaaaaaaaaataactctgtaaatataattggagatccgaaagaaagaggttctgtaatgagttta

SEQ ID NO: 295912 - DNA, 616 bp, Unknown
  Bacterial polypeptide expressing nucleotide sequence isolated from the Sargasso Sea
ttgaagaatgggtttcaaacatccgcagcttgggcgtggatggacacggtgaagcaaatgcaaagcggcgcgtacatcgccgcgggcacgacgctcggcatagcctccgtgacgatgatgatttcgacgcagaacgtcatcgtgacgctgtacgccatcttttccattctcacgattctcgtgacgacgatcgccggcgtcgtctctatgggttggactctgggattccttgagggaatatgcttcgtcattttgatcggtctttcggtggattacgtcgttcacatcggtcacgcgtacgcgcacgcggcgcgtcacgagggcgtgaccagacgcgagtgcgcacgcgccgcgctcggcgtcatgggtttccccgttctcagcgccgcattcaccaccctatgcgcggcgctcgcgttgttgcaagcgacgattgaattcttcaccaagtttggaacgatcgtcgtgctgtcaagcattttctcatccatcgtcgcagtcgtgctgttcatcgcgcttttggccaccatcggaccaactgatggttggggcgacgtcacacgtctctgcggtcgcaagcgtcttctgagcgattccaagagcatctcatattgat

SEQ ID NO: 295913 - DNA, 2248 bp, Unknown
  Bacterial polypeptide expressing nucleotide sequence isolated from the Sargasso Sea
atatgtacgttcctcaactcattaaaaagtgacgtaaatttaccttatgatgctattgtcacaaactgtaatgctcccatgaaatctcaaggattagaaaaaatattgaagcttttaatcttatttcagattagtggaattttgtttggaaatgagagactgtatttaaaaaaagcaaatttgcttgaaagtagtttactagagggtaaaaatgtaaaacttatttcaggtgatgttgtttttaccaaaggtaatctgaatctttattgtcaagaaggccggcaatatgagattgatggtcttgcaatattgtataatgaggtgtcagctgttcaagaagatatgaaccttacttgtgatacaataaaattttattcaaaagatgatcaactactaagcgttggaaactcacatgtttgggatgatgactacgacctaatggctgataccatcattgtttttacaaatattgatagtggaatcgcaagcgggaacgtaactcttgttcaaaaaggacaaataataaatgcaaacagaatcgaatataagaaggataaaagtcaggatggtgtttcttataaagccattggcaatgtaatcattaaagattctactagagtagcgacttgtggattagccaaatacgatcgtgataatgagaggacaatattagagttagaacccgaaataaaagaaaataatagacttttagctggtacaaaaatcacattggcctatgaacgggaaaagttaaaaaaactgtatatccctaaaaatgcatatgcaataactccaataagaggatatcaagcatctttaattgactcaaaccaagtaggtgatagccttagatttaatgatgaaatggaagggacatctctcttagggttttttgaagatgggaaattggattccctaaggatagaagggatggctaaaactctctatcacatttttgaagactctatttatcaaggtaaaaataatgcttcaggagatacgatcgcgatatcattttatgataatgatttgagtacaatcaatataattggaggatcagaaggaaaatatataccagattcactttctgatggcaacgaatatccggtcacgtataaggcaagcagaataaagtatcatttgcaaaatgatgaatcagattttgatgggaatgttaacataaaacacgatgggaccagtttagatgcaggatttgttaatgtaaactggaaaacaaatatgcttaatgctctacctagaatgagtggtgatacattgagtgagttaattccccctcttattaaggaagctggaagagatcccatgacaggagacgcaatgacctacaaccttaaaaccaaaaaaggacgtgtatcaaaaggagaaacgaaagcagatgatggttattatactgggaaaagaattagaaatgaatcaagggaagcattcttcattgaaaactcaacctatactacctgcgatcatgatactgcacacttccactttgaatcgtcaaaaatgaaaataattcaaaatgatgttgttgttgctaaaccaataattcttcatatcggacaaattccaatttttggcataccattgggaatcttccctcacaaaggaggtcagcggcattcaggctggataatgccttcatatggtgataataaaaatagagggcaatatattcaagggcttggattttattgggcacctaatgattattgggattcaaaattcacattaggctttggagataaacaaggaaccacatttagaattaatactcagtatcgactacgatataaatttaatggaagtttgaatttttttaataggcagtatctaagcggcaccaataacataatggatttaacagaaagcagaaacaccagtactactcttagatggacacataaacaagagttaagaaataatcagtccttaaatgcaaacgtaacctattctactagcggagattataataaaagatacggactatcagaggctgaacggatggatcaaaaagcaatttcaaacataagttattctaagcgctggcctaaaacaaaaaattcgtttagcgctaattattattcaaatattgatttacttgttagtgacaaaacaaatcctctaagtaattattttatttccccaaatagggatggcactcagataaataccagtaataaaacattcccaaaattttcattccgacatggacaaagtaatcttttccctacca

SEQ ID NO: 295914 - DNA, 898 bp, Unknown
  Bacterial polypeptide expressing nucleotide sequence isolated from the Sargasso Sea
aatgagcaaagagaacctagaattactcactagagggactgaagaaattatccctgaagagagttttttggagcagataaaatcaaagagaaagttaagagttaaagcaggattcgaccctacctcgcctgatttacatttaggccatactgtacttttgaataagatgaaaatcttccaagatttaggtcatgaagtaatttttttgattggagattttactggtcttgttggagatccttcgggagtaaatgaaactcgcccagttttaactcaagaccagcttgataaaaatgcagagacttacaaagaacaggttttcaaaatcttagatcctaaaaaaacagaaatcagattcaattctgaatggatgaaacaagttgatccttctgaatttattaaaatgctttcgtcttatacggtcgcaagaatgttagagcgggatgatttctcaaaaagatataaatctcaacagccgatttctattcatgaatttttgtatcccattttgcaagggtttgattccgtaaaattggaagcggacattgaattgggtggaacagatcagaaatttaatttacttttaggtcgcgaagtccaaaaacactatggatgtaatcaacaatctattgtgactgttccacttcttgaaggattggatggtgttaagaagatgtctaaatctttaggaaattatgtagctttagaagatagccctgataatatgtttggaaaaattatgtctatttccgacgatttaatgtggcgatatttttctcttttgagttttaaatcatctgaagagatatctaatctgaaggaagagattaaagaaggagctaatccaagagatattaagtttttactggctgaagaaatagttgagagattcaataat

SEQ ID NO: 295915 - DNA, 637 bp, Unknown
  Bacterial polypeptide expressing nucleotide sequence isolated from the Sargasso Sea
atgacgctttcaaaaacctacgatccccattcatttgaatcagagatttacaaaagatgggaagaaaaaggtgtgttcagggcagacaacacctccaaggcacctgctttcaccatctccatgccccctccgaatgcaaccggacaactgcatgtgggacatgccgtgatgttggctttggaagacattctcattcgttggcatcgaatgaagggggatgaggcgctttggcttccggggaccgatcacgcagcgattgccacagaaaacgtggtcctgaatcaaatccgaaatgaggaaggtattcaggatccgagggaaactttggggagggaggaagtgctccgaagaattgctgcttatgttgagaattcacgggggacaatcaggaaccaagtgaaggcgatggggtccagttgcgactggtctcgggaacgctacaccatggatccgcagcttaatcgttgtgtgaatgaatcgtttgtcagaatgtacgaggaaggcttgatataccgtgggcctaggatcgtgaattgggatccgaaattgaaaaccaatgtttcagatgatgaagtcgaacgaaagaaaactcggtctcccttctatacttttcaatatggttccttttcagatcggg

SEQ ID NO: 295916 - DNA, 619 bp, Unknown
  Bacterial polypeptide expressing nucleotide sequence isolated from the Sargasso Sea
catgcagtttattggcctgcttttttattagctgcaaaattacctttaccaaaaaaaatttatggtcatggttggattttatctggtgaagaaaaaatgtcaaaatctaaaggaaatattttagatcctatagaaattattaatcaatatggtttagatccattaagatattatctaataaaagaagtttcttttggtaatgatggcaatatatcacaagagagattagaagattgcattaatagtgatctagctaataattttggaaatctttgtcaaagagtaacagcatttgcaataaagaactgcgatggaaaaatccctgaaaaagttcattttgaaaatgatgatttagaaattttagataaattcaaggataatttaaatcttattcgaaataaaattgatgctcaagatatcaacttttatatcaactttattgtaaatttattatttgaaacaaataaatatttcaatgatcaagaaccatggaataaaaaagaaaacattttaagattaaatacaattgtctatactaccttagaaattgttcggaaaataagtttcatgctatatccaattattccagagtcatctcttaatgcattaaagatatttt

SEQ ID NO: 295917 - DNA, 755 bp, Unknown
  Bacterial polypeptide expressing nucleotide sequence isolated from the Sargasso Sea
aaaagatatattaagatttcatgctatttattggccagctttcttgcttgctgcagatatagaacctccaaaaagagtatttggtcatggatggatactttctggtgatgaaaaaatgtctaaatccaaaggtaacattttagacccacttgagattatagaaaattatggtctagaccctttaagatactatttaatcaaggaagtttcatttggtaatgatggaaatatctcacaagaaaaattagagtcttgtattaacagtgatttagccaataattatggaaatttgtgtcaaagagttttggcattttgtgataagaatgctaatttggaagttcctgaagtagataatctaacagaggatgataagattattttagatcaatactctaaatattatgatgatttagtaaagtattcagataatcaagatgtaaattcatacataaattttattgttgagcagctattttcagcaaataagtattttaatgatcaagaaccttggaaaaaaaagaatgataaattaaggatgaatacaattatttatgtttctttggaattaataagaaaagtaaccatattactttatcctattataccatcatcatctctaaaagttttaggtatatttggtataaaagaagaaaaaattaattttgtaactataaaagaaaacaattatcttaaaaaaggtctcaaattgagtaaattagatatcttatttaaaaagattgaaaaaaatgattgat

SEQ ID NO: 295918 - DNA, 706 bp, Unknown
  Bacterial polypeptide expressing nucleotide sequence isolated from the Sargasso Sea
ggctgcagatatagaacccccaaaaagagtatttggtcatggatggatactttctggtgatgaaaaaatgtctaaatctaaaggtaacattttagacccacttgagattatagataaatatggcttagatcctttaagatattatttaattaaagaagtttcttttggtaatgatggaaatatctctcaagaaaaattagagtcgtgtattaatagtgatttagctaataattatggaaatttgtgtcaaagagttttggcgttttgtgataaaaatgccaactttgaagttcctgatactgttacctttacagatgatgataaactagctttagatcaatattctaaacattatgataatttaataaaatattcagataatcaggatgtaaatttgtatataaattttattgttgaacagttatttgcggcaaataagtatttcaatgatcaagagccatggaagaaaaagaacgacaagttaaggatgaatactattatttatgttgcattggagttaataagaaaggtaaccatattactatatccaataataccaagctcatctctcaaagtgttagaaatatttagtataaaggaagataaaattaattttgagacaattaaggataataattatttaaagaaaggtcataaattaattaaattagatatattattcaaaaagattgaaaaaaatgattga

SEQ ID NO: 295919 - DNA, 886 bp, Unknown
  Bacterial polypeptide expressing nucleotide sequence isolated from the Sargasso Sea
gatggatttatgggtgatcccgatgttatggatacttggggcgacatcatctatgtctccacagatcaacagccattgggcaacagatgagtctagacataaatctctttatcctgctgatttgcgtcctcaggcgcatgagattattcgaacttgggccttttatactatagctaaatcttatctacacgaagaccagattccatggcataacattgcaataagtggttgggttgtgaatcctgataaaactaaaatgagcaaatctaaaggtaatagtgtcacacctgaggatctaatcgaaaaatacggcgcagatgctttaagatattggtctgctagggcaagattgggtgttgatactatttttgatgaaagcgtttttaaagtaggcttaagattagttactaaattagtaaatgttagtaaatttgtagtgatgcaatttgagcaagcaggcttaaagttatcagatgttaaagatataaacttaacagatatagataaatcttggctcgctgggttttcagagttattaatatcttcaaaaaaagattttgctaattttaaatattcagaagttttacataatacagagcataaattttgggatttttgtgataattacgtagagcttgttaaaactagatcttatcagcagcatgatcaagatataggtaaatcagctttatttgctttatatacaagcttaagtattttaattagattatttgcaccatttatgccttttgttactgagcaagttagtggttggcttgatttatctagtaatattgctaataaaaaatataaccaaatagataatcaaaaagataaatcagtacatcttatgccatggccagataatagtgattttgggcttaaa

SEQ ID NO: 295920 - DNA, 676 bp, Unknown
  Bacterial polypeptide expressing nucleotide sequence isolated from the Sargasso Sea
tggacatggatggatattatctggagaagaaaaaatgtctaaatctaaaggaaatatactcgatccaatagagataattgaagaatatggtttagatcctttaagatactatttaataaaagaagtttcctttggcaatgatggaaatatatctcaagatagactagaagattgcattaatagtgatttagctaacaattacggtaatttatgtcagcgtgtaactgcatttacaataaaaaattgtgatggaaaaattccattagaagttaaatttattgatgaggatttattaatactaaataagtataaagataatttggataatattaggtctcaaattgacaatcaaaatattaatttttatatcgattatattgttagttcactttttgaagctaacaaatattttaatgatcaagaaccttggaaaaagaaagatgatataattagattaaatactattgtttacactacattagaaattgtgagaaaaataagttttttgttatatccaattattcctaaatcttctctaaaggcattaaagatttttgacattgaggaaaaagatataaaattagtaacagtttcaaataatgattatttaacaaaaggtaataatataaataaaatagatatactttttaaaaaaatagaaaaaaacaatgattga

SEQ ID NO: 295921 - DNA, 754 bp, Unknown
  Bacterial polypeptide expressing nucleotide sequence isolated from the Sargasso Sea
cctcgagcgcgaggatttcacgaagcgcttccagggcggcgtgccgatctcgatccacgaattcctgtacccgctgatgcagggctacgactcggtcgcgctgaacgccgacctcgagctcggcggcaccgaccagaagttcaacctgctggtcgggcgcgaactgcagaagcagtatggccaggaacagcagtgcattctcacgatgccgctgctcgaaggcctcgacggcgtcgagaagatgtcgaagtcgaagggcaactacgtcggcatcagcgagcatccgaacgacatgttcggcaagctgatgagcatctcggacacgctgatgtggcgttacttcgagctgctgtcgttccgcccgatggacgagatcgccggcttcaagcgcgagatcgaaggcggccgcaacccgcgcgacttcaaggtgctgctcgcgcaggaaatcgtcgcgcgcttccactcgcaggccgacgccgagcgtgcgctcgaggacttcaaccatcgcgcgaagggcggcgtgccggacgacatcccgtcggtcacgctcgcgggcgcgccgctcgcgatcggccagttgctgaagcaggccggcctcgtgccgtcgacgagcgaggcactgcgcaacatcgagcagggcggcgtgaagatcgatggcgcgaccgtctcggacaagggcctgaaggtcgaagccggcgaattcgtcgtgcaggtcggcaagcgccgcttcgcacgcgtcacgctgaccgcatga

SEQ ID NO: 295922 - DNA, 712 bp, Unknown
  Bacterial polypeptide expressing nucleotide sequence isolated from the Sargasso Sea
tatggctgctaatataaaattgccaagtaaagtttatggacatggatggattttatctggtgatgaaaagatgtcaaaatcaaaaggaaatatcttagatccattagagattattgaaaaatacggtctcgatccattaagatactatcttgtgaaagaagtatcttttggaaatgatggaaatatttcacaggaaaaacttgaagattgcatcaacagtgatttggctaataattatggaaatctttgtcaaagaacaattgcatttgcactaaaaaattgtgataaaaaaattccagaagaaattatttttaataaagaagatagaaaaattttagataattttagtaacaatcttgaaaaaattagatctgaaatagataagcaaaatatcaattattatatcaattttattgttaatggattatttgctgcgaataaatatttcaatgatcaagaaccatggaaaaaaaaagatgatcctataagattaaatacaattgtatatactactttagagataattagaaaattaagttttatgctatatccaataattccagagtcttcacttaaagctttaaaaatttttggaataaatgaaagtgagataaaattatcatcaatttctgatcataattttttaaaacctgcaagcaatattgattctatagatattctatttaaaaaaattgaaaaaaaagatgattga

SEQ ID NO: 295923 - DNA, 736 bp, Unknown
  Bacterial polypeptide expressing nucleotide sequence isolated from the Sargasso Sea
aaagatattttaagattccatgcaatttattggcctgcttttttgatggcagccaatattcctttgccaaaaagaatatatggacatggatggatactgtcagatgataaaaaaatgtctaaatctctaggaaatattttagatccaattgagattataaataattttggagttgatcaattaagatactatttatcaaaagaagtttctttaggaaatgacggaaatatttcccttaaaaatttgactgattgcattaataatgatttagcaaataattatggaaacctatgtcaaagagtatttgcttttataaataaaaactgtgactcaaaaatccctactttaaataaggtggaaaaagaagataaaaaattgaacgatgaaatcattaattcattatctgatttaagaaatttaattgataatcaagagcttaaccagtatcttaaaaaggtcataaatatttcgttcaatgcaaataaatattttaacgatcaaaaaccatggtcactaaaagaaaaaaatcctgaaagaatgaatacaatattatataccattttgaatcaaattagatctatcagtatattattaaatccgataatccctattgctacagaaaaagtcctatctactttatcgatcgaaatgacaagtataaatttagaatctttaaaaaatataaaaatattaaaaccaggaattaaattgaaaaagacagatattttatttaaaa

SEQ ID NO: 295924 - DNA, 880 bp, Unknown
  Bacterial polypeptide expressing nucleotide sequence isolated from the Sargasso Sea
taatgcaactggtattgcacttgactcaactattgttcttaattttaatgaaaatgttgacgttgaaagtggaaacatcaccattaaaaaaacagcagacaattcaacagttgaaactattgacgtaacgagcgaacaagtagaaggttcaggaacatctcaaataacggtcacaccagcatcggactttgatagcgcaactgaatattacgttttaatagatgcaactgcttttgatgatagcggtagcgcatcatacgctggaataacttctacaactgctttaagttttacaagtactaatccagtacccacattaagttcatcagtaccagcagacaatgcaactggtgttgcagttgattcaactatcgttcttaattttagtgaaaatgttgatgttgaaagtggaaacatcaccattaaaaaaacatcagataactcaacagttgaaactattgatgtaacgagcggacaagtaacaggttcaggaacatctcaaataacggtcacgccatcatcagactttgacactggaactgaatattacgttttaatagatgcaaccgcttttgacgatagtgatagtggttcatatgctggaataagttccacaactgctttaagttttacaagtactaacccagtacccacattaagttcgtcagtaccagcagacaatgcaactggtgttgcagttgattcaactatcgttcttaattttagtgaaaatgttgatgttgaaagtggaaatattaccataaaaaaaacatcagataattcaatatttgaaaccattgatgtaacgagcggacaagtaacagattcaggaacatctcaaataacgattactccatcatcggactttgatagcggaact

SEQ ID NO: 295925 - DNA, 835 bp, Unknown
  Bacterial polypeptide expressing nucleotide sequence isolated from the Sargasso Sea
tttggagtaccttttccccgtgtggtatccgttagatagtgaaggtgaaattttatatgataatcctatgtatgcaactcccaatcaacttcctgttgatccgttaacacaatgtcctgacggatataaagacgaccaacgtaaccagcccaatgggtttacaggagatccagatgtcatggacacatgggcgacgtcatcattaacaccgcaaattatgagtcattggggtgctgataataataggcatgagtctgtgtttcctatggatattcggccccagtcgcatgaaattattcgtacatgggcgttttacacgatagtaaaggcatggattcatgaagctaaaattccttggcatcatgttgttattagtggatgggtgttggatccagatcgaaaaaaaatgtcaaaatcaaaaggaaatgttgtaacgccagatcatttgttagatgagcattctgccgatgccatacgatactgggcatgtaaagcccgtttaggtgccgatacagcttttgatgatagtatttttgcgattggaaaaaaatgtattacaaaattatttaacgcatctaaatttgttttgatgcaggtcgaaggtgttgggatcgtgtctgtagatgatatttctgaacctgtagatcgtgactggatgcaacacgttaaccaatgtgtagaacgatcaacaaaggcctttgaacagtttgactacgctgctgcgttagaaagcacagagagtttattttgggtattttgtgatcattacattgagttggttaaaacacgagcctataaagaagaggatatagtaaaacgtaaatcagcctgtgct

SEQ ID NO: 295926 - DNA, 705 bp, Unknown
  Bacterial polypeptide expressing nucleotide sequence isolated from the Sargasso Sea
caaaattacctttaccaaaaagagtgtttggtcacggttggatattgtcagatgaaaaaaaaatgtcaaagtctttaggtaatattttagatccaatcgatataattaataattatggtgtcgatcaattaagatactatttagtaaaagaagtttcattaggtaatgatggatcaatatctatggataatttaaaaaattgcattaataatgatctagctaataattatggtaacctatgtcaaagagttttttcattcatcaaaaagaattgtgaaaataagataccatataattcaaatttgaacgaaaaagataaaaaactattaaataatctaaaagataatttacccaaactcattaatatgatgaacaaccaagaactgaatgaatacattaaaacggtagttaatttttcgtttgatgccaataagtattttaatgactccgaaccatgggctgttaaaaacacggatctaaaaagaatgaacgcaatattatttactatttcgcaacaaattaaaaatataagcattttactcagtccaataatacctaatgcatcaaccaaagttcttcatgctatgaatatagaagaaaaagatatatcaattgaaaaaattaaagatgataatatttttgaccataagaaaaatttaaaagatttaaacatattatttactaagattgattatgataattgat

SEQ ID NO: 295927 - DNA, 880 bp, Unknown
  Bacterial polypeptide expressing nucleotide sequence isolated from the Sargasso Sea
cttcgagcaggccgcgctcgtgctcgaccgcgacaagaccgaaatccgctacaacagcgaatggtcgatgccgctcggcgcggacgggatgatcaagctcgcgtcgcgctacacggttgcgcggatcctcgagcgcgaggatttcacgaagcgcttccagggcggcgtgccgatctcgatccacgaattcctgtacccgctgatgcagggctacgactcggtcgcgctgaacgccgacctcgagctcggcggcaccgaccagaagttcaacctgctggtcgggcgcgaactgcagaagcagtatggccaggaacagcagtgcattctcacgatgccgctgctcgaaggcctcgacggcgtcgagaagatgtcgaagtcgaagggcaactacgtcggcatcagcgagcatccgaacgacatgttcggcaagctgatgagcatctcggacacgctgatgtggcgttacttcgagctgctgtcgttccgcccgatggacgagatcgccggcttcaagcgcgagatcgaaggcggccgcaacccgcgcgacttcaaggtgctgctcgcgcaggaaatcgtcgcgcgcttccactcgcaggccgacgccgagcgtgcgctcgaggacttcaaccatcgcgcgaagggcggcgtgccggacgacatcccgtcggtcacgctcgcgggcgcgccgctcgcgatcggccagttgctgaagcaggccggcctcgtgccgtcgacgagcgaggcactgcgcaacatcgagcagggcggcgtgaagatcgatggcgcgaccgtctcggacaagggcctgaaggtcgaagccggcgaattcgtcgtgcaggtcggcaagcgccgcttcgcacgcgtcacgctgaccgcatga

SEQ ID NO: 295928 - DNA, 697 bp, Unknown
  Bacterial polypeptide expressing nucleotide sequence isolated from the Sargasso Sea
tgaattgcccaagaaagtttatgggcacggatggattttatctaatgaagaaaaaatgtctaaatctaagggaaatatattagatcctttaaaaataattgaggaatacggtttggacccattaagatattatctaataaaagaagtttcatttggaaatgatggtaacatttctcaagacagactcgagaattgtataaatagtgacctagcaaataattacggtaacttatgtcaaagagttattgcttttgtaataaaaaattgtgatggaaaaataccctcaaagattaaatttcaaccagacgatttagaaatactaaataagtataaagaaaacttagatattattagatctaaaattaacgaacaaaacataaatttttatatagattttattgtaaattcactttttgaagcgaacaaatattttaatgatcaagaaccatggaaaaaaaagagtgatttgactagattaaacactattgtgtatactactttagaaatagtaagaaaaatcacctttttactttatccaataattccagaaacatctttgagagcattaaaaatttttaatttatcagaaaaggatataaaatttaaaaccatccctaataatgaatttattattaaagggaatatgataaataagatagatatattaattaaaaaaatagaaaaaaaaaatgattga

SEQ ID NO: 295929 - DNA, 886 bp, Unknown
  Bacterial polypeptide expressing nucleotide sequence isolated from the Sargasso Sea
aaagataaagatattgagtttgagataagcgatgatattaatagagctcacttttcatcgagctctccattaaaacttgctaaattttttaaaacaaatccggtagagttagcaaaagatattagtgcaaaaataaatcataaagctatttcaaaatactccgtggaaggtgctggttttataaatatatttattaataaaaattacatcgctgatgaagttaaaaaagtactaaagtacaacgaagagtggggaaagaaaaaattaaaaaaagagagagttttagtagagtttgtttcctctaacccaactggacctcttcatattgggcatgcaagaggagctgttctgggaaatataatttcaaatttactcagcaatcaaggtcatgaagtgactaaagaatattacgttaatgatgctggcagacaaattaatattctcgctttgagcataatgcttgaaacttttcaaaataaaattaataaagaaggcttgtatcaaggcagctacattaaggatttagctaagaaatttatggaagctaaactggttgatgaaattaataatccattagataaattttctgatgatcctgatgaaagaattgaccaactcatctcacactataaaaaagattcaccaaaaacctggattcaaattagatatttttctgttaatgagatgatcaagctaataaagaatgacctattaagaatgggaattcttcatgatgaatggttttatgaaagctctcttggttcaattgaaaaaaaaggatctagtgttactaaagctttagatgaacttgttaagtcaaagaatacttttgagaaggatggcgccatatggtttgagggaacaaaatatggggatgataaagaca

SEQ ID NO: 295930 - DNA, 694 bp, Unknown
  Bacterial polypeptide expressing nucleotide sequence isolated from the Sargasso Sea
ctgtgcctaaaaaagttttttggacatggatggatactttctgatgataaaaaaatgtcaaaatctttaggaaatattttagatcctttagaaattatagataaatatggaattgatcaactacgatattacttagttaaagaagtttcccttggtaacgatggatcaatttcattagaaaatttgaaaaattgcattaataatgatttagctaataattatggaaatttatgccaaagagtattttctttcataaagaaaaactgtgataataaaataccaattaattctaaattaaacaaatctgataaaaaactattagataatttgaaaaatagtgtaccagaacttatatctttaatgaacaatcaagaattaaatgaatacataaaaaaagttgtaagcttttcttttgacgccaataagtattttaatgattcagaaccgtgggcagtaaaaaaaaaggacccagaaagaatgaatgcaatattatttactattgtagagcagataaaaaacattagtatattgctgaatcctataattcctaatgctacaaacaaagtacttaatatgattaatataccagttgaaaatataagaattgataaaattaaagatgaaaatattttaaataataaaaaggaattaggtaatttagaaatattatttactaaaattgaagatgataatt

SEQ ID NO: 295931 - DNA, 799 bp, Unknown
  Bacterial polypeptide expressing nucleotide sequence isolated from the Sargasso Sea
atggatggcgcatttgtagaaggcgttcatccagaattagatgggaaatacgtaaaagattgtgacgatatcatcatcaacaatttaacagactcaaataaattatatcgagaaaaaatgtatcttcacgattatccgcactgttggagaacaggccatcctttgctgtactatggaatggaatcttggtttgttaggatgaccgcagtaaaagaaaaattactagaattcaatgaccaagtagaatgggcacctgattgggtaggtgaaggaagatttggagagtggctaagaaatgtgaaagattgggctatttcacgagaacgtttctggggaactccactacctgtttggagaagtgaagatggagatatgaaatgtataggatctattgaagaattacaaaaagaagttgaaaaagcaaattcttcaggtatagaaaaccccgtatgtcccgatgatgttgatttacatagaccaatcgttgatgactttgtattaatttctgaaagtggttctgtaatgagaagagaaccttttgtaatggattgttggtttgattccggttgcgcattttttgcacagtggcattatccgtttgaaaatgaagataaaattactgacgcattcccaattgattacatatgtgaaggtgtagatcaaacaagaggatggttttacacactactagctgtaagcaccactgttttcgattcaatatgttataaacgctgtttaagtcttggattaatcttggataaagatggtaaaaaaatgtctaaatcaaaaggaaatgtag

SEQ ID NO: 295932 - DNA, 688 bp, Unknown
  Bacterial polypeptide expressing nucleotide sequence isolated from the Sargasso Sea
gcccccaaagagagtttttggtcatggctggatattatcaggagacgaaaaaatgtctaagtccaaaggaaatattttaaatccaatagaaattattgatgtgtatggaatagacgaaatgagatattatttaatgaaagaagtctcacatggaagcgacggaaatatttctataaaaagtcttaaaaattgtattaatagcgatctagctaataattatggtaatttatgccaaagagttttttcatttatcaaaaataattgcaataattcagttacaaaaaaaggagaatattcagagaatgataaaaaatttattagagaaacaaataatttaactaaaaatctaagagaattaataaataaccaaaatcttaataattatatgaaatctgtaataaacattagttttttaacaaataaatatataaatgatgaagagccctggaaattaaagaaaaataatttagataaaatgaatattatacttcaccttgctcttgaacaaatcgcaaaaatttcaattttattaaatcctattataccaaaatcaactaccaaagttcttgatgcattaaacatcaattctaaagaaagaaattattcttttttagatggttctaaaataattcctgataaaattagcatatcttctttaaatatattatttaaaaaaatagaccaatga

SEQ ID NO: 295933 - DNA, 787 bp, Unknown
  Bacterial polypeptide expressing nucleotide sequence isolated from the Sargasso Sea
tttttggccagcttctattcatttaataggaaaagatattttgagactttttgcagtatattggcctgcatttctactcgcagctaaaatagatcttcctaaaaaagtttatggtcatggctggatactttctggagacgaaaagatgtctaaatcgaaaggtaatattcttgatcccatagaaattattaataaatatggtctagactcattaagatattatcttataaaagaagtttcattcggtaatgatggaaatatttctcaagaacgtttagaggattgtattaacagtgacttggctaataattttggtaatctgtgtcaacgagtaaccgccttcgcaatcaaaaattgtgacagtaaaattccaaaacaaattgaatttaatgaagatgatcacaagatactaaataattataaagataatattgagttaattagagaaaaaattgataatcaagatatcaatttctatataaactttatcgttaattcattatttgaagccaataaatattttaacgatcaagaaccatggaataaaaaagaggatttattaagattaaatactattgtttttacaacattagaaattgttagaaaagttagttttttattgtatccaattattccagaaagctctattaaagcacttaaaatttttggcattaatgaaggtgacattaatttatcgtctatagaaaataatgtttttttatcaaaagttgataaaattaataaaatagatattctttttaaaaaaatagaaaaaaaagatgattga

SEQ ID NO: 295934 - DNA, 598 bp, Unknown
  Bacterial polypeptide expressing nucleotide sequence isolated from the Sargasso Sea
tttgcaaattatttggctacataacggctatgtaacttttaatagtgaaaaaatgtcaaaatctttagggaacatcgtaacaattgaaaaaatgcgaaaaaaaattaatggacaggttattagacttgccctattaagctcacattacaaacaacctttggattggaatgaaaacttaattgaggaaagtcaaagtaccctcgataagtggtatactcaatttgatgatactaaagaggatgtgttgaaccaagatttattaagaccacttttggaggatttgaataccccaggttatatagcaaatcttcattcactttatgataaagcatcaaagggagatagctcttcaaaaaaacttttcctttcaggatgtaaacttataggattattagaggaagatttaaatgaatggattaaatttaaaaaaataagatctaaaatagacgaaaagactatcgaaaataaaataaaagataggggtcaagctagaaaaaaaggggattttaaattagcagataatattagaaaagaactagagagtagcggagtaattattgaagacaaaggaaacaaaacaatttggaaatacaaatga

SEQ ID NO: 295935 - DNA, 720 bp, Unknown
  Bacterial polypeptide expressing nucleotide sequence isolated from the Sargasso Sea
cctttcttctggcagctaaaatagaattacccaataaaatttatagtcatggatggattttatcgaatgaagagaaaatgtcaaaatcaaaaggtaatattcttgatcctattgagataataaatcgatatggcctagatccattaagatattatctaattaaagaagtatcatttggtaatgatggaaacatttccgaagagaggcttgaaaattgtataaatagcgatctagctaataattatggaaatctgtgtcaaagagttatttcttttgctgaaaaaaattgtgacggaaagatacctaaagatattaaatttagtgaagaggataattttctccttgacaaatataagaaaaatttaaatttgattagagaaaaaatagataatcaagatttaaattattatattaattttattgtgaattcattatttgaaactaataagtattttaatgaccaggaaccttggaataaaaaagatgatatgaataggctaaataccatcgtatatacaactttagaaattataagaaaaataagtttcatgctatacccaataatacctgatagcgcactgaaagctcttaaaatatttgatattgatgagagtcaaataaagtttgactcaattcaaaatcacaattatttagttggtgaaaaaaagattaataagataggaatactttttaataaaattgataaaaaaaatgattgat

SEQ ID NO: 295936 - DNA, 656 bp, Unknown
  Bacterial polypeptide expressing nucleotide sequence isolated from the Sargasso Sea
aggtgatgagaaaatgtctaaatctaaaggcaatattttagatcctttacaaattattgatcaatatggcttagatcctttaagatattatttgataaaagaagtctcttttggaaatgatggaaatatatctcaagaaagattagaagattgtataaatagtgatttagctaataattacggtaatttatgtcaacgtgttactgcttttgcaataaaaaattgtgaaggaaaaataccaaaaaaaatcaaatttgaagaagatgatttaattattttaaataaatttaaagataatttagaaaatattagatcaaaaatagaccagcaaaatttaaatttttacattgagtatatagttaactcactttttgaagcaaataagtattttaatgatcaagagccatggaaaaagaaggataatattattagattgaacactatcgtttttacctctttagaaattattagaaaaataagttttttgctttatccaataatcccagattcctcattaaaggctttaaaaatatttaatcttaacgaaaaagatataaaattaaaggatatcactaaaaatgaatttttaattaaaggaaatgatataaataaaatagatatactttttaaaaaaatagaaaaaaataatgattgat

SEQ ID NO: 295937 - DNA, 439 bp, Unknown
  Bacterial polypeptide expressing nucleotide sequence isolated from the Sargasso Sea
tatcttacgatttcatgcaatttattggcctgcatttttgatggctgctaaacttcctttacctaaaagagtttatggtcacggatggatattatcggatgaaaaaaaaatgtctaaatctcttggaaatattctagatcctttagaaattataaatgaatatggaatagatcctttaagatattatttagttaaggaagtttccctaggaaacgatggaagcatttctttaaaaagtttacatgattgtattaataatgatttggcaaacaattatggaaatttatgccaaagagtattttcatttgttgaaaaaaattgtgattcaaaaattccaaattatacaaatctctcaaaagaagacgaaattattacaaaaaatctcataaagaaaattcctgatttacaaaatttaatgaataaacaagatttaaaccaa

SEQ ID NO: 295938 - DNA, 550 bp, Unknown
  Bacterial polypeptide expressing nucleotide sequence isolated from the Sargasso Sea
catgacactttcaaaaacttacgatccccattcatttgaatcagagatttacaaaagatgggaagacaaaggtgtgttcagggctgacaacacctctgaggcaactcctttcaccatctccatgcctcctccgaatgcaaccgggcaactgcatgtgggacatgccgtgatgttggctttagaagacattctcatccgctggcatcgtatgaagggggatgaggcgctttggcttccgggcactgatcacgcagcgattgccacagaaaacgttgtcctgaatcaactccgaaacgaggaaggcattcaggatccgagggaaactttggggagggaggaagtgctccgaagaattgctgcatatgttgaaaattcacgggggaccatcaggaaccaagtgaaggcgatggggtccagttgcgactggtctcgagaacgctacaccatggatccgcagctaaatcgttgtgtcaatgaatcgtttgtccgaatgtatgaggaaggcctgatataccgtgggccgaggatcgtgaattgggatccgaaatga

SEQ ID NO: 295939 - DNA, 751 bp, Unknown
  Bacterial polypeptide expressing nucleotide sequence isolated from the Sargasso Sea
cttgcagtttcaaccacagatttttgacagcatttgttacaatcgttgtttatctttgggccatatattagatagtgaaggaaagaaaatgagtaaatctagaggaaatgtcgtcaatccttgggatcatttcaataaagaaggaacagatgctatacgttggtacatgacgactcaaagtgcaccttggaatcctatgaattttgatccaaatggagttcgagaaacttatgctaagatgtttcttactttatggaatgttcatcgcttccacctagattatgcattattagatgagttcaatcccaacgataaatctggttttattccagttaaagaaagaagcccgttggatcggtggattctttcaagaattgctactgttgcccaggattatcataatcaatttgtatcgtgggatttccataaagcaggacgtgacttagaaaattttgtaataaatgatttgtcgaattggtatgtacgtcgttctaggcgtagattatgggatgaaggcgaaagtaaagacaaaagagcttgccaacatacgttgcatgaagtactttgtttggtcagtgagctcatggcaccagtttccccatttatgccagacagaatttatcatgatttaacaggaacctcagttcatttggcagattggccagtgggttcagacttagtaaagaggagcttgcctgaacaagatttagatttagaaactaaaatgtctatagtacgttctttaaccgaa

SEQ ID NO: 295940 - DNA, 688 bp, Unknown
  Bacterial polypeptide expressing nucleotide sequence isolated from the Sargasso Sea
aaaagagtttatggtcatggctggatactttcagatgaaaaaaaaatgtcaaaatctttaggaaacatacttgatccattagaaataattaaagactatggtgtagatcaacttagatattatttgataaaagaggtttcgttaggaaatgatggtagtatttcgctagaaaatctaaaaaattgtataaataatgatctagccaataattttggtaacctttgccaacgtgttttctctttcattgataaaaattgtgattccaaaattccatcccctgataaatttaatacaagagacaaagaattatctgacgaaattattaaaaaaatatctgatttaaaatatatgattgataatcaagaattaaattcctatattaaagaagttataaacttttcatttaattctaataaatattttaatgatttagaaccatggaaattaaagaagaccaataaagtaagaatgaatacagttctttattgtattttaaatcagattaaatctattagtattttactttatccgataattccttcttcaatagaaaaaatatttgatacattaaatttaaaaaaagaagaattaaatattgagcaaattaaaaacttaaatctgatagtacctggtaaaataattaaaaaaagtaatattctatttaaaaaaattgataatgataattgat

SEQ ID NO: 295941 - DNA, 847 bp, Unknown
  Bacterial polypeptide expressing nucleotide sequence isolated from the Sargasso Sea
agaacttctaactcgcggagcagaagagataatcccagaggaaagctttttagagcaaattaagtcgaaaaagactctaagagttaaagccgggttcgatccaacttctcctgatcttcatctaggacatacagtattactcaataagatgaaaatcttccaagacttggggcatgaggtgatattcttaattggcgattttacgggtttagttggagatccttcaggagtaaatgagacacgtccggtacttaccaaagagcaacttaataaaaatgctgaaacatataaaaagcaagtatttaagatcttagatccaaaaaaaacagagataaggttcaattctgagtggatgcaagaaatagatccttcagagtttattaagatgttgtcttcttacacagttgcaagaatgctcgaaagggatgatttttctaaaaggtataaatctcaacagcctatatcaatccatgaatttctatatccaattctccaaggttttgactctgtaaagcttgaagcggacatagagttaggaggaacagatcagaaatttaatttgttattgggtagagaagtccaaaaacattatgatcagaaacaacaatctattcttacggtacctcttttagagggacttgatggtgtaaagaaaatgtcaaaatctttaggaaattacattgcgctggaagatagccctgatgacatgtttggtaagctcatgtccatatcagatgatcttatgtggcgttacttttctttattaagctttaaatcagaccaagacataaatagtttcaaagatgaaatagaggatggggcaaatcctagagatattaaatttatt

SEQ ID NO: 295942 - DNA, 715 bp, Unknown
  Bacterial polypeptide expressing nucleotide sequence isolated from the Sargasso Sea
tattggccagcattcttattagctgcaaaaatagaaccaccaaaaagagtatacggacatggatggatactctctggtgatgaaaaaatgtcaaaatcaaaaggaaatattttagatccattagaaataataaatgtttatggtctagatccattaagatattatttacttaaggaagtttcttttggtaatgacggtaatatttcagaggaaaaattagaaaattgtattaatagtgatttagcaaataattttggaaacctatgtcaaagagtactttcttttgctgaaaaaaattgttcttctttgatacctgatcacaaatataatgatgaagatttagaaattttaaaaccattaaataatccagataaaataagatcatttatagataatcaggacataaaccaatatatgagttttattgttgatagattgtttgctgcaaacaaatattttaatgatcaggaaccttggaagaagaaagatgataaaataaggttaaatacaattgtttatactgcattagaattaattagaaaaataactatattgctttatccagtgataccagaaacatcgattaaggtgctaaatgtttttaatgaaaaagaatattcaattaatttagtatcacttaatgataatgaagttttaaagaaagatttaaaaatcaataaattaaaaattttatttaaaaaaatagaaaaatgat

SEQ ID NO: 295943 - DNA, 649 bp, Unknown
  Bacterial polypeptide expressing nucleotide sequence isolated from the Sargasso Sea
ggaaataatcctgcaaactattggattcatactaatatgcttacactcaacggaaaaaaaatgtcaaaatctctaggtaattcagtttttcctaatgagattttttatggaagtaataaagcattttctaaaaagtttagtccaatgacattaaaatttttcatgtatcaagcacattacagaaatactttagatatttctaatgatgcattacttgcagctgaaaaagggtttcagaaaataaaaaatcttaatgaagaaataagtacaatttatgaaagtaaaaaaaatgattttaatgctagcgcgtgggttaatgaatgctacgaggctttaaatgatgattttaattcacccaaattaattgccaaattatttgatttacataaaacagtctctgaaataaaaaataaaaccaaatcaattgattcaaaaaataaaaaaattttattaaagttttacaaaatattttatgcagaaattctaggacttgatgatgacagttcatcaaatgaaaaatttgatgaaattctagagctaatcttagaattaagagaaaaagaaaggttgagtaagaattatgataaatctgattatatcagagacaagttaaatgaattagggttaaaaattaatgataaaatatgag

SEQ ID NO: 295944 - DNA, 754 bp, Unknown
  Bacterial polypeptide expressing nucleotide sequence isolated from the Sargasso Sea
agagatgacttttcaaaacgttataaatctcaacaacctatatctttacatgaatttttgtacccaattttacaaggtttcgattctgtaaaagtcgaagctgatatagaacttggagggactgatcaaaagtttaatttactactgggtagagaagttcagaagcattatggtcaggaacagcaatcaattctcactgttcctcttttggaaggactagatggagtaaaaaagatgtctaaatctcttgggaattatattgctctagaggacagtccagatgatatgtttgggaaggtaatgtctatctccgatgacctgatgtggcgttacttttctctattgagttttaagtcttcagagcaaatatcagagtataaaagagatattgaagagggatccaatcctagggataccaagtttctactagcagaagagatagtagatagatttcatgaaggtttaggtaagaaatctaaagaaaattttataaatagattccaaaaaggaaatatctctcaagacttagaagaagttgttgtaactatagaatctgaatcagaacttttaactcgtatacttaaagaatctaacctcgtgaaaagtacatctgaagcccttagactgattaaacaaagtgctataaaagttaatgatgagaaggtttcagacactaagtttatgctaaaaaagggcacttctaatcttgtccttgtaggaaagaaaaaagctgcaaagattattattaattaat

SEQ ID NO: 295945 - DNA, 170 bp, Unknown
  Bacterial polypeptide expressing nucleotide sequence isolated from the Sargasso Sea
aacaaagtttcagggatacgcatttggtatcgggattgatagacttgctatgctgaaatacgggataaatgatttaagagctttttttgattgtgattatagatggttaaatcattttgggtttgaccctttagatgtacctacgaattatagaggtcttagtcgatgaa

SEQ ID NO: 295946 - DNA, 519 bp, Unknown
  Bacterial polypeptide expressing nucleotide sequence isolated from the Sargasso Sea
atgcagggctacgactcggtcgcgctgaacgccgacctcgagctcggcggcaccgaccagaagttcaacctgctggtcgggcgcgaactgcagaagcagtatggccaggaacagcagtgcattctcacgatgccgctgctcgaaggcctcgacggcgtcgagaagatgtcgaagtcgaagggcaactacgtcggcatcagcgagcatccgaacgacatgttcggcaagctgatgagcatctcggacacgctgatgtggcgttacttcgagctgctgtcgttccgcccgatggacgagatcgccggcttcaagcgcgagatcgaaggcggccgcaacccgcgcgacttcaaggtgctgctcgcgcaggaaatcgtcgcgcgcttccactcgcaggccgacgccgagcgtgcgctcgaggacttcaaccatcgcgcgaagggcggcgtgccggacgacatcccgtcggtcacgctcgcgggcgcgccgctcgcgatcggccagttgctgaagcaggccggc

SEQ ID NO: 295947 - DNA, 394 bp, Unknown
  Bacterial polypeptide expressing nucleotide sequence isolated from the Sargasso Sea
acaattacaaaagcatggatgcacgagataaaaattcctgggaaaaatgtgcaaataagtggctggttcctagatccagatcgaaaaaagatgagtaaatcaaaaggaaatgtggtaacaccagaccatctattagatgactattcgtcagacgcagtgaggtattggtcggcaaaagcaagattaggcgcagatactgcatttgatgaatcgattttcataataggaaagaaattagtaacaaaagtatttaatgcaagcaagtttgtgatgatgcaattaggagacaaaccagaccaaacccaccagctccaaagtatcacagtcccgatcgatttagggtatatgagtaagttaaaagaaatgttagaaaaagcaacccaagcgttgaaaa

SEQ ID NO: 295948 - DNA, 708 bp, Unknown
  Bacterial polypeptide expressing nucleotide sequence isolated from the Sargasso Sea
tagcagcaaatataccaccaccaaaaagaatttacggccatggttggatactttctggagaagaaaaaatgtccaaatcaaaaggaaatatattagatcctatagaaattataaatgtctatggattagactcactaagatattatttgttaaaagaagtttcatttggaaatgatggcaacatttctaaagataaattaatctcatgtattaatagtgatctcgctaataactttggaaatctttgtcaaagagttttaacttttactgaaaaaaatttagaattaaaaattccaacgatagatttgttggataaagatgatcttacaatattaaataatttttctgaaaattatgagaacttaattgattatattaataaacaaaatattaattcatacatgaattttatagtagaccaaatgtttatagctaataaatattttaacgatcaagaaccttggaaaaaaaaagatgatcttaaaagattaaaaagtattatatatacttccttagaactaataagaaaaatttctatacttttatatcctgtaattcctcaaagttctttaaaagcgctaagtatttttaaaattattgaagaagaaattaaaattgaaacaatcaaaaataataattttttaaagcctggtgcaggcatcaataaaattgatatattatttaataaagtaatttcagatgattgat

SEQ ID NO: 295949 - DNA, 533 bp, Unknown
  Bacterial polypeptide expressing nucleotide sequence isolated from the Sargasso Sea
tggtgttaagaagatgtccaaatctttaggaaattatatagctctggaagatagccctgatgatatgtttggaaaaatcatgtctatttccgacgatttaatgtggcgatatttttctcttttgagttttaaatcctctgaagagatatctaatctgaaagaagagattaaagaaggagctaatccaagagatattaagtttttactagctgaagaaatagttgaaagattcaataatggtgtgggtagcaaatcaaaagagaattttataaacagattccaaaaaggaaatatttcacaggagcttgacgaaataaattttgaaatctcagaaaattcagagcttttgactagagtcttaaaagaatcagagttactgaggagcacatctgatgccatcaggatgataaaacaaggtgcaattaaagttaatgatgaaagagtttcagatcctaaattcttattaaaaaaaggctcttcgaatctagtgttggtaggtaaaaagaaagctgcaagaattaatataaaataat

SEQ ID NO: 295950 - DNA, 616 bp, Unknown
  Bacterial polypeptide expressing nucleotide sequence isolated from the Sargasso Sea
aatgacctcaatagccaaaacctacgaacctaaagaatttgaaaaacaaatctcagaactttgggaatctgcgggtgccttcaaagctaacgcgttttcagaaaaacctactttcgccatttccatgcctccaccaaatgccacaggacaattacacgtaggtcatgcagtaatgcttgtgctggaagatatttttattcggtggcacagaatgatgggttacgaaactctttggcttcctggaactgatcatgccgcaattgctactgaaaatgtagttttgcaacagataaaagaacaggaaggaattgcagatcctcgttcagaactgggtagagatgaaattttaaaacgaattgcagattatgttaaaaattctcaaggaactatacgtagtcaggttaaagcaatggggtcaagctgtgattggagccgcgaacgctacacaatggatcatcaactgaaccgatgtgtaaatgaaacatttatgaggatgtacaaagataatttaatttatcgaggcccccgaattgtaaattgggaccccaatttaaagacaaatgtttcagatgatgaagtcgaaagaaaaagcactaaatcacctttttatacattt

SEQ ID NO: 295951 - DNA, 810 bp, Unknown
  Bacterial polypeptide expressing nucleotide sequence isolated from the Sargasso Sea
aaaaaaatggcttttagaaaaatcgagccaaattgactggcacccaagttttatgagtaaaagatttgaaaattggacagaaaatttaaatatggactggtgtattagtaggcaaagattttttggtgtaccatttcctgtctggtataaacttgatgaaaattctgaaccgaattacaacaaccctatattcccagatgtatctgaattgccaattgacccttctgaagatacacctaaagaatttgaagaaaatcaaagaggcgaaccaaacggatttattggtgaaaaagatgtgtttgatacatggtttacaagttcaatgacgcctcaaattggtggtaaatggggcacaagtgaagattttttcgataaaattttaccttatgatatcaggcctcaaagtcatgaaattataagaacttgggcattttatactgtagtgaaatcagttcttcatcataatgagattccttggaaaaatgtaattattagcggatgggttcttgaccctgatagaaaaaaaatgagtaaaagtaaaggtaatgttgttgttcctaatgatttaattgaagaatatagtgcagatgctgtgcgttattggtctgcaaatgcaagattaggagcagatactgccaatgatgagcaagtgttcaaagtaggtaaaaaattagtagtaaaaatatttaatgcaagtaaatatgtacttaacaattatcatgaagtagatattttggacaaatccaacataaaaaatcctttagacatttcaatagtcatcatattcaatagttatttacaaaaaatttc

SEQ ID NO: 295952 - DNA, 742 bp, Unknown
  Bacterial polypeptide expressing nucleotide sequence isolated from the Sargasso Sea
atttcatgcaatttattggcctgcttttttaatggcagcaaacttacccttacctaaaaaaatttatgggcatggttggattttatctggtgatgaaaaaatgtcgaaatcgaaaggaaatatcttagatccattggaaataattgatatatatggtttagatcccttaagatactatttaattaaagaggtatcttttggcaatgatggcaatatttcaaaaaaaagattagaagaatgtataaacagtgatttagcaaataattttggaaatttatgtcaaagagttgtggcttttgttgaaaaaaatcttaattcacaaataccaaatcaaattgattttaataaagatgatttaagaattttagataattttaagttaaatgtagaaaaaataagatcgtttatagacaatcataatattaattcatacatagattttattgttaaatctttatttgaggcaaataaatattttaatgatcaagaaccatggaaaaaaaagaataataagataagacttaatactataatttatacatctttagagataattagaaaaataagtataatgctttttcctattataccatcatcatcattaaaagctttgaaaatttttgatatatcagaaaaagatttatcatttgatacaattaaaaatcataattacttaaataataaaaaaaaaattaataatattggtatactatttaaaaagatagagaaaaaaaatgattga

SEQ ID NO: 295953 - DNA, 453 bp, Unknown
  Bacterial polypeptide expressing nucleotide sequence isolated from the Sargasso Sea
catgcaaaaactttctaaaaaatataacattactgaagctgaatctgaaatacaaagcaattggtcgaattacaaactatataaatgggatagtagcaaagcacgacaagataattacgtaatagatactcctccacctactgtttcaggtattttgcatatggggcatatattcagttacactcaaactgactttattgctagattcaaaagaatgcagggctataatgtattttacccaatgggctttgatgataacggcctacctactgagaggttagttgaaaaaataaagaaaatttcagcaacgaaaatgcctcgacaagaatttattgaacattgtaaagaggtcgtatctaacgccgaagaatcatttagagatttatttaaatctatgggcattagctatgattgggatcttgaatatcagactatctcagatactaccaagaa

SEQ ID NO: 295954 - DNA, 743 bp, Unknown
  Bacterial polypeptide expressing nucleotide sequence isolated from the Sargasso Sea
caaagatatattaagatttcatgcaatatattggccagcttttttattagctgcaaatattaaaccacctagaagagtttatggtcatggatggatattgtccggtgaagaaaaaatgtctaaatcaaagggaaatattttagatccattagaaatcatcaatacatatggcttggatccattaagatattacttgctgaaagaagtatcttttggaaacgatggtaacatttccgaagaaaagttagaaagttgcataaatagtgatttggcaaataattttggaaacttatgtcaaagagtgctttcgttcggtgaaaaaaattgttcatcaacaattacagactataaatttactaaagaagatttgataatcctagaatcattaactgatatagaaaaaataagagcttttattgatattcaagatattaatcaatatatgagttttattgttgatagactttttgcatcaaataaatattttaatgatcaggaaccctggaagaaaaaaaatgacaaattaagacttaatacaattgtttatacagctctagaattaataagaaaaataactatcctattatatcctgtaatgcctcaaacatcgatcaaagtattaaacatatttaatattaaagaggatcaaatagatttttcatctctaaaaaataatgaaattataaaaaaaggaattaaaattaataaattggatattttatttaaaaaaatactaaaatgat

SEQ ID NO: 295955 - DNA, 193 bp, Unknown
  Bacterial polypeptide expressing nucleotide sequence isolated from the Sargasso Sea
tttaaaaaatgttaaagttgatcctgctaaataccaaggatatgcatttggcataggcatagacaggttagctatgctaaaatacggtattaatgatttaagagctttctttgactgtgattatagatggttaaatcactttggatttgatccacttgatgtacccacaaattatagaggtctaagtcgatga

SEQ ID NO: 295956 - DNA, 775 bp, Unknown
  Bacterial polypeptide expressing nucleotide sequence isolated from the Sargasso Sea
aatgagcaaagagaacctagaattactcactagagggactgaagaaattattcctgaagagaactttttggagcagataaaatcaaagagaaagttaagagtgaaagcaggattcgaccctacctcgcctgatttacatttaggccatactgtacttttgaataagatgaaaatcttccaagatttaggtcatgaagtaatttttttgattggagatttcactggtcttgttggtgatccttcaggagtaaatgaaacacgcccagttctaactcaagaccagcttgataaaaatgcagagacttataaagaacaggttttcaaaatcttggatcctaataaaacagagatccgattcaattctgaatggatgaaccaagttgatccttctgaatttattaaaatgctttcgtcctatacagttgcaagaatgttagaacgggatgatttctcaaaaagatataaatctcaccagcctatttctattcatgaatttttgtatcctattttacaaggttttgattccgtaaaattagaagcagacgttgagttgggtggaacagatcagaaatttaatttacttttaggtcgcgaagtccaaaaatactatggatgtaatcaacaatccattatgactgttcctcttcttgaaggactagatggtgttaagaagatgtccaaatctttaggaaattatgtagctctggaagatagccctgatgatatgtttggaaaaatcatgtctatttccgacgatttaatgtggcgatatttt

SEQ ID NO: 295957 - DNA, 727 bp, Unknown
  Bacterial polypeptide expressing nucleotide sequence isolated from the Sargasso Sea
gagatttctgcggtatattggcctgcatttttaatggctgcaaatattactcctcctaaaagagtttatggtcatggatggatactttctggagaagaaaaaatgtcaaaatctaaaggaaatattttagatccattagaaattattaatatttacggtttagactcacttagatattatcttttgaaggaagtatcttttggcaatgatggaagcatctccgaagaaaaattagaaaactgtattaatagtgacctagcaaataattttggtaatttatgccaaagagtcttgtcttttgctgaaaaaaattgctcatcttttatacctgatcataaatttaataatgatgatttaattattttaaattcaattacagacatagataaaattagaagttttatcgataatcaagatataaatcgatatatgggttttattattgatcgcctttttgcatcaaataaatattttaatgatcaggaaccttggaaaaaaaaagatgacaaacaaagacttaatacaatagtttataccgccattgaactaattagaaaaattacaattcttttgtatccagttatgccacaaacaactgttaagatacttaattcattcaatatctatgaagacgaattaaatcttacatctttacaaaacaatgaaagtttaaaaaaaaatgataaaattaataaattagatattttatttaaaaaaatacaataat

SEQ ID NO: 295958 - DNA, 779 bp, Unknown
  Bacterial polypeptide expressing nucleotide sequence isolated from the Sargasso Sea
aatgctatcttcttataccgttgccaggatgttagaaagagatgacttttcaaaacgttataaatctcaacaacctatatcaatacatgaatttttgtacccaattttacaaggcttcgattctgtaaaactcgaagccgatatagaacttggagggactgatcagaagtttaatttactactgggtagagaagttcagaagcattatggtcaggaacaacaatcaattctgactgttcctcttctggaaggactagatggagtaaaaaagatgtctaaatctcttgggaattacattgctctagaggatagcccagatgatatgtttgggaaggtaatgtctatctccgatgacctgatgtggcgttacttttctctattaagttttaagtcttcagagcaaatatcagagtataaaagagacattgaagagggatccaatcctagggataccaagtttcttctagcagaagagatagtagatagatttcatgagggtttaggtaagaaatctaaagaaaattttataaatagattccagaaaggaaatatctctcaagacttagaagaagttgttgtaactatagaatctgaatcagaacttttaacacgtatacttaaagaatctaacctcctgaaaagtacgtctgaagcccttagattgattaaacaaagtgctataaaagttaatgatgagaaggtttcagacactaagtttatgctaaaaaagggcacttctaatcttgtccttgtaggaaagaaaaaagctgcaaaaatta

SEQ ID NO: 295959 - DNA, 533 bp, Unknown
  Bacterial polypeptide expressing nucleotide sequence isolated from the Sargasso Sea
gatgttagaacgtgatgattttgataaaagatttaagatagagaaaaaaccaattgctattcatgaatttttatacccattgctgcaagcaaaagattctgtagaacttaaggctgatgttgaattggggggcactgatcagaaattcaatctactacttggtagaaagttgcaagaggatcaccaaatcgatccgcaagtatgtattatgatgccaattttagagggattagatggagttaaaaaaatgtcgaagtctttgggtaattatatttcgattagtgacgaaccaaatgatatgtttggaaaagtaatgtctataagcgatgacttaatgtggagatactttgaattattaagtttcagagagcaagatgatattagcgccttgaaagataaatgtttgcagaacaaatcaaatcctagagatgcaaaaatagaattagctcatgagttgattacaagatttcatggacaaaaaaatgcagataaagcaaaagagaatttcatcaatagattccaaaataaaaata

SEQ ID NO: 295960 - DNA, 1129 bp, Unknown
  Bacterial polypeptide expressing nucleotide sequence isolated from the Sargasso Sea
gatgcaacttgctgttagaaatgaaattccttttgatacggtctatttacatggattagttagggatgccaaaggtaaaaagatgtccaagtccacaggtaatgttgtggatccaattgacattattgatgagtatggagccgacgctcttcgttttacaaatgcatcaatggcttcaattggtggtgttttaaaattagatactcaaaggattgctggctatagaaattttggtacaaaactttggaatgcagcgagatttgcgtcacttaatgaagcaaattttgggttatcagttccagctgcaaaagaaacagtaaatcgttggatagtaggtgaaactgtcaaaacgcttaatgaagtaaatattgcttttgatcaatttaggtttaacgatgctgcacaggctctatattcttttgtttggggtacggtttgcgactggtacgtggagctttcaaagcctcttttaaattctgatgaccctacgataaaaaatgaaactcggcaaacaatggggtgggttatagaccattgtctaatattgctgcatcctatcatgccttttatcactgaagaattgtgggagactctctcaaaaagaaacgagatgctagttcattgtgattggccagaatatgatagcgcactcattgatcatgcagcggatcaagaaatgaattgggttgtaaaccttatagagtctattcgctcagcccgagctcaattgagggtccccgctggattaaagatcccaatgattttcttggaaatggattccgaagctaaacaagcttgggaaaataatagtgaaatgatacagaagctcgcaagaataacagaacttacaagagctgacaaaataccgaaaggtagtattgcgatatcagccaaaggagctggttttgccttgccgcttgaggacattatagatgtagaggaagaaaagaaacgtcttagtaagtcgcttgataagcttcaaaaagaaatttcagctcttaaaggaagacttcaaaattcaaagttcatagaaagtgctccggaagaagtaattttagagacacaagaaaatttagttttgcgagaagaggaagaggccaatttgtcatctgcggcttcacaactgtaa

SEQ ID NO: 295961 - DNA, 703 bp, Unknown
  Bacterial polypeptide expressing nucleotide sequence isolated from the Sargasso Sea
aagataccgttacctagaaaagtctacggtcatggttggattttatctggtgaagagaaaatgtcaaaatcaaaagggaatattttagatccaatagaaataataaaagaatatggtttagatccattaagatattatctaataaaagaagtttcttttggtaatgatggaaatatttctcaagaaagattagaagactgtattaatagtgatttagcgaataattttggtaacctttgccaaagagtaacgacttttggaattaaaaattgtaatggtaaagttcctaataatactgaatttacagacgaagatattaaaattttagataattttaagataaatttaaatgtaatcagggaaaaaatagacaaacaagatattaatttttatataaattttattgtaaatgctatgtttgaagcaaacaaatattttaatgatcaagaaccatggaaaaaaaaagatgatttaaaaagattaaatactatagtttatacaacattagaaattataagaaaaattagttttatgttatatccaattatacctgattcatcattaaaagctttaaagatatttgatttaaatgaagaggatattaaattttcaactttagataatcataaatatttaaaacctgaaaataatataaatgaaataaaaatattattcaaaaaaattgaaaaaaaagatgattgat

SEQ ID NO: 295962 - DNA, 1243 bp, Unknown
  Bacterial polypeptide expressing nucleotide sequence isolated from the Sargasso Sea
gatgagcaccgaacccagttccaagcctgttttcccgatcaccgacgaagtccggcatgcgctcgccgtcacgaagcgcggcgtcgacgagctgctggtcgaggaagagttcgcgcagaagctcgcacgcagcgcggcgacgggcacgccgcttcgcatcaagctcggcctcgacccgaccgcgcctgacatccacatcggccatacggtcgtgctgaacaagatgcgtcagctgcaggatctcggccacacggtcatcttcctgatcggcgatttcacgtcgctgatcggcgatccgtcgggccgcaatgcgacgcgcccgccgctcacgcgcgagcagatcgaatcgaacgcgaagacctacttcgagcaggccgcgctcgtgctcgaccgcgacaagaccgaaatccgctacaacagcgaatggtcgatgccgctcggcgcggacgggatgatcaagctcgcgtcgcgctacacggttgcgcggatcctcgagcgcgaggatttcacgaagcgcttccagggcggcgtgccgatctcgatccacgaattcctgtacccgctgatgcagggctacgactcggtcgcgctgaacgccgacctcgagctcggcggcaccgaccagaagttcaacctgctggtcgggcgcgaactgcagaagcagtatggccaggaacagcagtgcattctcacgatgccgctgctcgaaggcctcgacggcgtcgagaagatgtcgaagtcgaagggcaactacgtcggcatcagcgagcatccgaacgacatgttcggcaagctgatgagcatctcggacacgctgatgtggcgttacttcgagctgctgtcgttccgcccgatggacgagatcgccggcttcaagcgcgagatcgaaggcggccgcaacccgcgcgacttcaaggtgctgctcgcgcaggaaatcgtcgcgcgcttccactcgcaggccgacgccgagcgtgcgctcgaggacttcaaccatcgcgcgaagggcggcgtgccggacgacatcccgtcggtcacgctcgcgggcgcgccgctcgcgatcggccagttgctgaagcaggccggcctcgtgccgtcgacgagcgaggcactgcgcaacatcgagcagggcggcgtgaagatcgatggcgcgaccgtctcggacaagggcctgaaggtcgaagccggcgaattcgtcgtgcaggtcggcaagcgccgcttcgcacgcgtcacgctgaccgcatga

SEQ ID NO: 295963 - DNA, 2308 bp, Unknown
  Bacterial polypeptide expressing nucleotide sequence isolated from the Sargasso Sea
atggatccaaagattacagaaaaagcatgggagccagaattagaagaagcgattttaaaaaaatgggatgatgagaagctttatgattttaaattacaagatgaaaattatacaatagatacgccaccaccatatccatcaggaagaccatggcatattggtgcagcatcacattatgcacaaatcgatatgattgcaagaacagcaagaatgaatggaaaaaatgtttactttccaataggtattgacagaaatggattacctgtagagctgtatacagaaaaaaaacacggtattagaatgcgagaaacagagagaggagagtttttgaatttatgtaaaaatgcactagatgatttagaagctgagatgatacaaatcatgaaaagtcttggattgagtggagattttaagaattattatagaacagattcagaagaatacagaaaatttactcaagagacattcattgatctttggaaaaaaggtgtcatttaccttgcaacacgaccaaataactatgattgggtttcaggtacaacaattgcagatgcagaaatagtatacgatgatcttccgacaaaacttgtctatatgaaattcatagtaaaagatgaacaaaaagaaataatcattgcaagtacaagaccagaattattatgtgcgtgtaagactgtcattgtaaatcctgatgatgaaagatattcaaatttaattgggaagaacttgatagttccattaacaaacaaagaagtaaagatcacaccacatcattctgcaaaaattgagtttggttcaggtgcagtaatggtttgtagttatggtgatcaaaatgatgtagcattgtttagagaattacaattagaagaagtgattgcgataggtttggatggtcgaatgacagaagctgcaggagactatcaaggactaaaaccaaaacaggcaagaactaaaatcatcgaggatttagaaaatgcaaacctagtagataaaattgaggaaatttcccatagaacgcccttgtcagagcgaagtaaaattcctattgagattgtaccaatggaagaatactatctaaaacaaaaagaatctattgaaaaaatgaagaaattaggctcagaaattgagttttatccaaatatgcataagcagattttgatgaattggttagaatcaatatctattgattggccaatttctagaagaagattctatggaacagaaataccaatatggtattgtaacgaatgttcagaaccatttgttccagaacctggaaaatattatagaccatggaaagattcctgtcctgcacaaaaatgtgaaaaatgtgggaatacaaaattcactggagaagacagaacctttgatacatggatggattctagtgtttcacctctgtttgttacaaaattcaacagagatgatgaatttttcaaaaaaacatatccgactggaataagacctcaagcaaaagatattgttcgaacatggttgtactatacactacttcgatgtgagaaactaactggagaaaaaccatggtctgaagcatggattatgggttacggattagatgaaaaaggaatgaagatgagtaaaagtaaaggtaatgcaattgatccactaccggtaattcaaaaatcaggtgctgacacttttagattttggagtgcaagtgaaattaatcaaggatatgattttagatgttcagaacaaaaaatagaatcaacaaagaaatttttgagtaaattatggaatgtttcaagatttctttcaagttttcctattattgaatcaggaaaattgacagattcagacaaatggatattatctgaacttgataagttaatttcagtatgtaatgaagggtattcaaaatataatttcttcataccagctacagcgttaagagaatttacatggaatatttttgcagcacaatatattgaaatggcaaaagctagagcatacggaattggatttgatgacgatgagagagatggcgctattttcacactgcacaaagttctttcaacaattttgaaactattagctccaattacaccattcattacagaacatctatggcaaacactttattcaaaaaatagcatacataaagaacaattaccaaaaatagaaaatattgaagatatgacaaatatgactcaagtaattgtggagtttaactccaaagtttggaatgagaaaaaacagaataatttatccctaaaagattctatcaaaatagatattccagaaaacctaaatcaattcaagaaagatttaatcgcaatgcataatt

SEQ ID NO: 295964 - DNA, 2071 bp, Unknown
  Bacterial polypeptide expressing nucleotide sequence isolated from the Sargasso Sea
tatggaaccaaagattacagaaaaagcatgggaaccaaaattagaggatgcgattttaaaaaaatgggatgatgacaagctttatgattttaaattacaagatgaaaattatacaatagacacaccaccaccatatccatcaggtagaccatggcatattggtgcagcatcacattattcacaaattgatatgattgcaagaacagcaagaatgaatggaaaaaatgtttactttccaataggtattgacagaaatggattacctgtagaattgtatacagaaaagaaacacaacatcagaatgcgagaaacagagagaggagaatttttgaacttatgtaaaggtgcattagatgatctagaagctgagatgatacaaatcatgaaaagtcttggattgagtggagattttaagaattattatagaacagattcagaagaatatagaaaatttactcaagaaacatttattgatctttggaaaaaaggtgtcatttatcttgcaacaagaccaaataattatgattgggtttcaggtacaacaattgcagatgcagagatagtatacgatgatcttccaacaaaacttgtttacatgaaattcattgttaaagatgaacaaaaagaaataatcattgcaagtactagacctgaattattatgtgcatgtaagacagtcattgtaaatcctgatgatgaaagatattcagatttgattggaaagaacttggtagttccattaacaaacaaagaagtaaaaataacaccacatcattctgcaaaaattgaatttggttcaggtgcagtaatggtttgtagttatggtgatcaaaatgatgtagcattatttcgagaattacaactagatgaagtaattgcaataggtttggatggacgaatgacagaagctgcaggtgattatcaaggacttaaaccaaaacaggcaagaaccaaaatcatcgaggatttagaaaatgcaaatctagtagaaaaaattgaagatatttcccatagaacacctttgtcagaacgtagtaaaattccaattgagattgtgccaatggaagaatattatcttaaacagaaagattctattgaaaaaatgaagaaattaggttcagaaatagaattctatccaaatatgcataagcaaattttgatgaattggttagagtcaatatctatcgattggccaatttctagaagaagattctatggaacagagataccaatatggtattgtgacaaatgttctgaaccatttgttccagaacctggaaaatattatagaccatggaaagattcctgtcctgcagaaaaatgcgagaaatgtggtaatacagaatttacgggagaagacagaacatttgacacatggatggattctagtgtttcacctctgtttgttacaaaatttaacagagatgatgaatttttcaaaaaaacatatcctacaggaataagacctcaagcaaaagatattgttcgaacatggttgtactacacattacttagatgtgaaaagctaacagaacaaaagccgtggtctgaagcatggatcatgggatacggtttagatgaaaagggaatgaagatgagtaaaagcaaaggtaatgcaattgatcctttaccagtaattcaaaaatcaggtgcagatacgtttaggttttggagtgctagtgaaattaatcaaggatatgactttagatgttcagaacaaaaaatagaatcaacaaagaaatttttgagtaaattatggaatgtttcaagatttctttcaagttttccaattattgaatcaggtaaattaacagattctgacaaatggatattatcagaacttgacaagttaatttcagtatgtaatgaaggatattcaaaatataatttcttcatacctgctacagcattaagagaatttacatggaatatttttgcagcacaatatattgaaatggcaaaagccagagcatatggaattgggtttgatgacgatgagagagagggtgcaatttttacacttcataaagttctttcaacaattttgaagctcttagcaccaatcacacca

SEQ ID NO: 295965 - DNA, 586 bp, Unknown
  Bacterial polypeptide expressing nucleotide sequence isolated from the Sargasso Sea
tcagattattgtaattattggtttcataatgggatcgtattagtagataagaaaaaaatgtcaaaatcattgggtaatgtcatatcagtctcagatatcctagaggtggaaaatcccattatagttagaattgctttgatgagtgcacattacagacagcctttgaattggacagaagatactatgaataactcacgcaacatctacgaaaagataacctcttctcttgaaattgaatcatctatgacaacagagagagatgataaatttattgatcttctttgcgacgatttgaatacacctaatgcactacagtatattagtaagcaggcacgagacgctaagagagatagtcgcgtattgccaaagctaagacataattgcggtcttttaggcattaaatctaacaaaattactatagacaagtctctagttgataaaattgaatctcttatctctctgagggaagctgccagaaaaaataaagattatatcgaggcagaccgattaagagatttactctcagatatgaacgttgctcttagtgatggctctgatggagtttcctggaaaattaaacagtaga

SEQ ID NO: 295966 - DNA, 649 bp, Unknown
  Bacterial polypeptide expressing nucleotide sequence isolated from the Sargasso Sea
aaaattggtgatctaaaatctttttcaaaatattggtttcataatggatttgttaatattgaaggtgaaaaaatgtcaaagtcattaggtaatattcgtctagttaatgatttagttaaagagtttaaaggagaggtattacgactaactcttatttctgctcattatagacaacccttaaactggacaagagaaattattaaacaaaatagcataatgttagatcgtttttatcgtaatttaaaagagcttgaagatatagatgcctatgcagataataatcaaattgaagacagagtaattgaaggtttgtttaatgatctaaatactccaaaggttattgctgaattaaatattttaagcaatcaaatagctagtgctgataaaaaaattaggagtaagataaaatataatttattagaggtaggaaaaataattggtattcttcaagagaaccctgataagtggttaggatataaaaattcaggaaatcttgatgaaactactatagaaaggttgataaaagaacgtaatgaagctagaggcaacaaaaattttgatttggctgacaaaattcgtaatgagcttaaagaaaaggggattgaaattgaagatacaaaagatggcacaatttggaaaagtccttaat

SEQ ID NO: 295967 - DNA, 2821 bp, Unknown
  Bacterial polypeptide expressing nucleotide sequence isolated from the Sargasso Sea
atgaaatttccctccatcaatgaacagatggatctgatcagaagaggtgtcgaagaaatactccctgaagaagatctagaaaagaagcttgagagatcacttaagaataatgagcccattatagcaaagctaggctgtgaccctagtaggcctgatcttcatattggccatggagtagtgttaagaaagttaaggcactttcaagatctgggtcatacttcagtattagtaattggcgattttacggcaatgatcggtgacccgtcaggtcgtaataaaaccaggccacagttatcccttgatgaagccagaaaaaatgcagagagctatgtggatcaagctaaagtaatacttgatataaatactctaagaataaaatataattcaaattggctaaataaaatgaatttcaatgacgtagtgaagttgtccagctcttatacagtagcgaggatgcttgagagggatgatttcacaaaacgatttaaagcagagattcccatatccattcatgagttcttatatcctttggcgcaggcacaggactcagtagagttaaaggcagatgtggaacttggaggaacagatcaaaaattcaatcttcttgtaggtagagatcttcagaaagataatgggcaagatccacagtgtattataaccacaccattattagaaggtacagatggaattgagaaaatgtctaaatcatatggtaatgatattggcttacaggattccccggaagacatgtatggaaaaacattatctatctcagatgatatgatcttaaagtggtttacgcttgctgctgatcgtgatccatccgaagtagaagctgcttctaaaaggctaaatgacccaagtgtcaaccctatggaagtaaagcgtgagcttgctcgcaacgttgttcaactcttttttgacgaagaaacagctcaaaaagcagaagcgcatttcaatacggtggtagtaggtaaaggcataccagatgaaattccagtttatgaattggattctgaagatctgatcgttaatgtgatattttcctctggattactcaaaagtaaaggagaggcacgccgtatgataaaacaaggtgctgtcaggttagatgataaaaagatagatgatatccaggcatacatttcacctggagatgaacagatattaaaagtagggaaaaagacggttcttgaaggtaacttaatgaaaaaaatatgcttggggctgacctgtgcagcagcccttaattttattacctgcacaatatccccacctggaccgccaaaacttgtggttttactggttatagatcagatgcgtccagaccttttaacaagattcgatgatctctacagaggtggatttcgctggctcatggaccatggtatctggttcacggatacccatcatgaacatagttacactgcgaccggtccaggacacacggctattggttttggtcagtatcctggtaaggtaggagcgatcggtaatagtttttatgatcgtaagttgaaaaagaacgtgaactgtgtagaagaccccaatgctaaaacggtcggtgcaacttttggggaagcccgctcctctgcaagatacaattcaaaggggttaggagattggcttaaagcaagttatccaagttcaaaggtcatatctatcggaggtaaggatagagccgcatgtctactaacaggaaaagaccccgatcaagcgatctattacaaccatatgggggcatttatttcttcagactattatgttgatcaattacctcaatgggcaacggattttaataagagattaaaaaatagttcatatggagattcattgtggcacaagtcattagatgatgatctttatttacaatatgcgagagaagaccacttttatggagaagaggataattatttaagtgaggattactctcccgtatttcctataggtatggatgatggaaaagatcccttaaccgtattgatgggtaagccttggttcgagcgtgagattcttgaattatctgccgaagccgtaaaaggggaatccttaggcttggataatattcctgatatattatcaatagggttttcggcaatggattggatgatacatagttatgggccatactcacaagaggtcatggatgcctgcataaaattggataggtatttaggtaattttattgattttttagatgtgcaagtaggattagaaaatattttatttgtattgaccgccgatcatggtggtctgccccttccagaatttttaattcaaaaaggtgaaaaagctggaaggatcaataagaaacacatgcaagaagctctgacatggatcgatgaagaatgcgaagagatgtttggtaataaactatatcatcgtgagggaggaaatttctacctaaacatagatcgaataaaaaaagctaatatcaaattagatcagatctatgatattgtagaaaaatacttgccagaggttgaaggaattgatggagtcgcaattaaggaaaggataatctctagttctaacaatgataaactgacaagaagaatgaagaatatgataaatgaagagttgacaccagaaatatttcctattgtatcgtcaggatatctatatagagggccttatggtacatcgcatggcagcccgtatgattatgatactcacgttcctctaatattttcacgtagtcaatttaaggataaaagagataattctccccgcgctacggttgatatcgcaccaaccattgctacatatcttaatgtggatgtacctgattattgcgatgggaaaggaatagacctctagc

SEQ ID NO: 295968 - DNA, 697 bp, Unknown
  Bacterial polypeptide expressing nucleotide sequence isolated from the Sargasso Sea
tgcagatatagaccccccaaaaagagtatttgccacggatggatactttcaggagatgaaaaaatgtctaaatctaaaggtaacattttagatccacttgagattatagataattatggcttagatcctttaagatattatttaattaaagaggtttcttttggtaatgacggaaatatctcacaagaaaaactagagtcttgtattaatagtgatttagccaataattatggaaatttgtgtcaaagagttttagcgttttgtgaaaagaatgcgaacttagaagttcctgccacagcagatctaacagaggaggataaaattattttaaatcaatacaccaaatattatgataatttaattatgtattcagataatcaagatgttaattcatatattaattttattgttgagcagttatttgcagcaaataagtattttaatgatcaagagccatggaagaaaaaaaatgacaaaataagaatgaatacaattatttatgttgcattggagctaataagaaaagtaactatattactttatccaataataccaaattcagcgctcaaagttttaggtttatttggtataaatgaggaaaaaattaattttgaaacgataaaagaaaataattatctaaaaaaaggtcttaaattgaataaattagatatattatttaaaaaaattgaaaaatgat

SEQ ID NO: 295969 - DNA, 550 bp, Unknown
  Bacterial polypeptide expressing nucleotide sequence isolated from the Sargasso Sea
gccagtgggtcaagatcaggttcagcatattgagatgacaagagatattgctcagcgctttaatcatcatcatggcgagatttttgtaataccagaaggtgttatagatcaagaatctgctgttttacctggtttggatggaagaaagatgagcaaaagttatggaaatattatccctcttttctgtgattcaaagacacttcgaaaacatgttatgaagatcaaaacaaattcattagagccaggtgagccgaaatcaagtgaagactgtttattgtttgatatttacaagagctttgcatcagattcacaaattagttcaatgaaaaaggatcttgaagatggaatatcttggggtgatgcaaagaatcaactttatgagctgcttgatgagcagctttctaattatagattgagatatgatgaattgattagtgatccatcttaccttgataaggtacttcaagatggagcagaaagggcaagagaggttgcacatactaatttaaatgagattaaaagcgtcaccggcctgggttcattaagctaa

SEQ ID NO: 295970 - DNA, 712 bp, Unknown
  Bacterial polypeptide expressing nucleotide sequence isolated from the Sargasso Sea
tttattagctgcaaatatccaacctccaaaaagagtatatggccatggttggattttatcaggagaggaaaaaatgtctaaatctaaaggtaatattttggatcctatagaaattataaatagttatggtttggatccactcagatattatttaataaaagaagtttcatttggtaacgatggaaatatttcaaaagataaacttgaaaattgcattaatagtgatttagctaacaattatggtaatttatgccaaagagtaacagcatttatcgaaaaaaatttaaattcatctataccaaaagattacgaattcaataaagacgataataatatactagatgtttacaaaaaaaattataagagtttaataaattacgttgatggtcaagatataaataattatgttaactttattcaagaacaactattttctgctaacaaatattttaacgaccaagaaccatggaaaaaaaaaggagatattaaaagattggggacaattttatatgtttcattggaattaattagaaaaatttcaatattactttatccaatcattccttctacatctttaaaagtacttaaaacttttaatattaatgaaaaagatataagtattaaagatattcaaaatcacgaaatattaaaaaaaaacactaatattaataaaatttcggttttatttaaaaagattgaaaaaaatgattga

SEQ ID NO: 295971 - DNA, 657 bp, Unknown
  Bacterial polypeptide expressing nucleotide sequence isolated from the Sargasso Sea
atggatggatactatcaggagatgaaaaaatgtctaaatcaaaaggaaatattttggatccattaaaaattataaatatttatggtttagattcgctaaggttttatcttttgaaagaagtatcttttggtaatgatggaaacatatcagaagagaaacttgaaaattgcattaatagtaatctagcaaataactttggcaatttatgtcaacgagttttatcctttgcggagaagaactgctcatcacttatcccaaaacataaatttaataatgatgatttagatattttaaattctatgacaagcttagacaaaattcgatcatttattgataatcaagatatcaatcagtatatgaattttgttgtagattgtttgtttgcatcaaataaatattttaatgatcaagaaccttggagaaaaaaagatgacaaattaagactttctagtattgtttatacagctattgaattaattagaaaagttacaattcttttatatccagttatacctcaaacgtcacttaaagtattaaattcttttaatattaaagaaaatgaaattaaattttcatcattgcaaaacaacgaatttttaaaagaagaaaacaaaattaataaattagatattttatttaaaaaaattgacaaatgat

SEQ ID NO: 295972 - DNA, 155 bp, Unknown
  Bacterial polypeptide expressing nucleotide sequence isolated from the Sargasso Sea
atatgcctttggcataggtatagaccgattagctatgcttaaatatggcattaatgatttaagagcgttttttgattgtgattacagatggttaaatcattttggttttgatccgcttgatgtcccttcaaattacagaggtttaagcagatgaa

SEQ ID NO: 295973 - DNA, 1219 bp, Unknown
  Bacterial polypeptide expressing nucleotide sequence isolated from the Sargasso Sea
attgattgggtgtataagcagacaaagattttttggagtccctataccaatttggtacaaactagattcaatggggaatcctatttttgatgagataatagttcctgaaaaagaagttctgccaatcgatccagaaattgattgccctaaaggatataacgaaattgatagaggtgcacctaatggatttatgggtgaaaaagatgtttttgacacttggtttacttcatcattaactcctcagattgttgcaaaatggggacaagaaaatgatgaaatgaaatctatgtttccaatggatatacgacctcaaagtcatgaaataatcagaacctgggctttttacacgatagtaaaatcattattacataataattccataccatggaaaaatgtaataatatcaggttggatattagatcctgatagaaaaaaaatgagtaaatctaaaggtaatgtaataactccaattgatacgatcgaacaatatggatctgacgccgtaagatactgggcatcatctgcaagactaggaactgatacaacttatgatgaaaatgtttttgtaattggaaataaactagttacaaaattgtataatgcagcaaaatttgtactatctcatgaatcttatcacactcatgaacttacagaattagattcgtcatttatgggagaattatctaaactagttgatacagttactgagcattacaacagatatcaattcgcccaaggattacaaattactgaagagtttttttggaatacttttacagataactatctagaattagttaaaaaaagagtatttaactcccaaggcgacgacaaagcttctgctgtatcgtgtttaagattaggattgtctgtaattttaagacttctttctcctgtaatgcctacaattactgatgaaatttggtcatggtgtttttctaaagaatataatactgtttcgattcatgaatctaaatggccaacagaggaagaatttagtaaatataaaaaatctaaatttcaaaattctctagaaattgctataaaagcaataaggtctgtaagacaatcaaaaacatctgagggaatcggtttaggaaaaccagttcaaaaaatgagaatttctactaattcaaaaaactttgaaatacttgaattaatatcaaatgactttagtaacgcttctaattgttttgattttgaaaaagaaaagaatata

SEQ ID NO: 295974 - DNA, 685 bp, Unknown
  Bacterial polypeptide expressing nucleotide sequence isolated from the Sargasso Sea
atgattattgaagaactaaatcaaaagttaagagaagcagtaaaaaagttcagtaaagaaaagggcttagatatcattcctaaagataaagatattgagtttgagataagcgatgatattaatagagctcacttttcatcaagctctccattaaaacttgctaaattttttaaaacaaatccggtagagttagcaaaagatattagtgaaaaaataaatcataaagctatttcaaaatcctccgtggaaggtgctggttttataaatatatttattaataaaaattacatatctgatgaagttgaaaaagtactaaagtacaacgaagagtggggaaagaaaaaattaaaaaaagagagagttttagtggagtttgtttcctctaatccgactggacctcttcatattgggcatgcaagaggggctgttctgggaaatataatttcgaatttacttagcaatcaaggctacgaagtgactaaagaatattacgttaacgatgctggtcgacaaattaatattttagctctgagcataatgcttgaaactttccaaaataacataaataaagagggcttgtatcaaggtgactacattaaagatttagctaagaaatttatggcagcaaaattggttaatgaagttaataatcctctagaaaaattttctgatgatcctgatgaaa

SEQ ID NO: 295975 - DNA, 835 bp, Unknown
  Bacterial polypeptide expressing nucleotide sequence isolated from the Sargasso Sea
cattctgaatggatgaaccaagttgatccttctgaatttattaaaatgctttcgtcctatacagtcgcaagaatgttagagcgggatgatttttcaaaaagatacaaatctcaaaagccgatttctattcatgaatttttgtatcctattttacaaggatttgattccgtaaaattagaagcagacgttgaattgggtggaacagatcagaaatttaatttacttttaggtcgcgaagtccaaaaccactatggttgtaatcaacaatccattatgactgttcctcttcttgaaggattagatggtgttaagaagatgtctaaatctttaggaaattatgtagctttggaagatagccctgatgatatgtttggaaaaattatgtccatttccgacgatttaatgtggcgatatttttctcttttgagttttaaatcctccgaagagatatctaatctgaaagaagagattaaagaaggagctaatccaagagatattaagtttttactagctgaagaaatagttgaaagattcaataacggtcagggcagtaaatcaaaagagaattttataaacagatttcaaaaaggaaatatttcccaggaacttgacgaaataaattttgaaatctcggaaaattcagagcttttaactagagttttaaaagaattagaattactaaagagcacctctgatgccattagaatgataaaacaaggtgcaattaaagttaatgatgaaagagtttcagatcctaaattcttattgaaaaaaggctcttcgaatctggtgttggtaggtaaaaagaaagttgcaagaattaatataaaataat

SEQ ID NO: 295976 - DNA, 538 bp, Unknown
  Bacterial polypeptide expressing nucleotide sequence isolated from the Sargasso Sea
atgaataaatttttaaaagaatttaaagatagagggtatttttaccaatgcacaaatgagaaagagctttcagatttaatagataaagaaaaaatcaaaggctatattggttttgattgtacagctgaaagtctgcatgtaggtagtttgcttcaaataatgtgtttaagactaatgcaaaaacatggtcacagacccattgtattgattggaggtggaacaactagaattggtgacccttcgggtaaagataaaactagaaaaattttaactgaggaagaaatagaaaaaaatataaaaaatattgaagaaatattaaaaaaatttttagacaataaagatcaaaaaacaaaacccatatttgtaaataattattcttggcttaaagaattaaattatatttctttcttaagagatattggaaagcattttacaataaataaaatgcttacttttgaaagtgttaaaagtagattagatagagaacaatctctaagttacatggaatttaattatatgatttttacaagcttatgat

SEQ ID NO: 295977 - DNA, 283 bp, Unknown
  Bacterial polypeptide expressing nucleotide sequence isolated from the Sargasso Sea
tttgagctttcttgagacctttgaaaaacgcggttttttcaaacagaccacacactctgaagaattaaaaaaacgtgtcgaatcaggccggatttgtgcctacatcgggttcgacccgaccgcggattcactccatgtcggacacctcatccctctgatgggactggcccacctgcagaaagacgggcaacgggtgatcgcccttatgggtggaggaactgcaatgatcggggatcccagcggcaaaacagaaatgcgaatgatgctcacagaaaagccagtt

SEQ ID NO: 295978 - DNA, 1004 bp, Unknown
  Bacterial polypeptide expressing nucleotide sequence isolated from the Sargasso Sea
aatatctggatacatagggtttgatataaccagtgatagtctgcatgttggaagcttaattcaattaatgcttcttcactggcttgatttttatgagcataaatcaatttgcttaattggtggaggtacaacattaattggtgatccttcaggtaaagacgaaacaagaaaaatattaagtaaagaagaaatcaataaaaatataaatagtattaaacaaatatttagtagatttgtaaattttaataaagatgcattaataataaataattatgattggctttctaaattaaattatatagattttctaagagagtttggatcaaaaattacattaaacagaatgttaacttttgattctgtaagaagtagattagatcgtgaacaaccattaacaatattagaatttaattatatgcttttacaagcatatgattttgtttatctaaataaaaactataattgtattttacaaatgggaggatcagatcagtggggtaatattttaagtggagttgatttaattcgtaaaattaataataaagatgcatatggcattacctctccattgataacaaatagtgatggatcaaagatgggcaaaacagcaagtggtgcaatatggttaaataaaaataaaatatctagtttggatttttttcaattttggagaaacattaatgataatgatgtgtctaaattcttatatttatttactaaactgccaatcaatgaaattgttaagctatcggctttaagaaatcaggaaataaatgaagcaaagaaaatattagcttatgaggttactaaaattgttagaggtaaagatgatgctgatgaggctttagaaattgcagataatactttcaattcgaaaattattgatgaaaggttaccaaatatttcccaaaaagaattagatataaaaaatgaaaattttacaattttagatgctatagaaaagctaaatttagttaaaagcagaagtgagataaaagattaat

SEQ ID NO: 295979 - DNA, 862 bp, Unknown
  Bacterial polypeptide expressing nucleotide sequence isolated from the Sargasso Sea
aatgatcggagacccttctggaaaaaataaaaccagaccagctttagatgagtccgagataaaagaaaatgcaaagtcatataaaaaacaagttttcaagattctagatccaaagttgactgatgtaagattcaattctgaatggagcaacaaacttggtgcagaaggaattataaagcttgcatctcaatacaacttagcaagaatgcttgagcgtgatgatttcaataaaagatataagtctaatcaaacaatagctcttcatgaattcttgtatcctttgattcaagcaaatgattctattgcgcttaaagcagatatagagcttggcggcactgatcaaaaatttaaccttcttgttggcagggaacttcaaagggcatatggccaagagcctcaaatagtaatcacagttccaattcttgaagggttagatggaaagaataaaatgtctaaatctctagaaaattatgtaggcattgatgagtcaccaagcgagatgtttgggaaaattatgtctatctcagatgagcttatgtggagatggtatgagttattaagcttcaaatctattgatgaaataaatgccctcaaatcagaccaagctaatggaaaaaatccaagggatataaaaatagatttagcaaaagaacttatttcccgcttccatgatgatcaatcagccaatcttgccgagtcaaactttataaatcagtttcaaaaaaagaatatcccagatgatatagaagaattgtcttttactatatcagagagctcaattcccttagtcaatcttttaaaagattgtggaatgaccagcagcacatctgaggcaatgagaatgattaagcaaggagctgta

SEQ ID NO: 295980 - DNA, 415 bp, Unknown
  Bacterial polypeptide expressing nucleotide sequence isolated from the Sargasso Sea
tatgaaagaatttcttgaattaataaagcgaggcatcgatgaagtcttaactgaagacgaccttgtttcaaaacttaaatctaaaaaacaactaactgttaaagttggatttgacccaactgcacccgatcttcatcttggtcatactgtgatcttaaataagatgaggcacttccaagacctcggtcataaggtagtttttttaattggagattttactggaagaataggggacccatctggcaaaaacaaaacacgtccatcacttgataaagaggaacttgaaaaaaatgataaaacttactctgatcaagtatttaaaatcttaaataaagatttaacagatatcagatttaactctgagtggtgtgaagatctgggtgccgatggaattattgggcttgcatcaaaatat

SEQ ID NO: 295981 - DNA, 565 bp, Unknown
  Bacterial polypeptide expressing nucleotide sequence isolated from the Sargasso Sea
atgatccatactggtctagtgggtaatactgaaagaaaagaaatccttgaagatttaactacaagagggcttttccaagacagcacagatcaaaccgcgctcaaagagcgtttaaatgaagggccaattactctctattgtggttttgatccgacagccgacagtctccatctcggacatctagtgcctcttttaacattgagacgtttccaagacgcggggcatcgtccaattgcattagcagggggtgccactggaatggtaggtgatccaagtgggagatctgaagaaagaaatttgttagaccaaaaggaacttagttccaatgttgaatctgtagccgcccaattagaggcctttctaagttttgatgctgagtcgaagaaaaaaggtacagcagctttactcgtggataaccgagaatggacagttgaattaaatgttcttgattttttaagagatgtggggaagcacgtcacagtagggacaatgctttcgaaagaatcagttaaaacacgattatcaagtgaacaaggactttcctttacggaattcagttacatgc

SEQ ID NO: 295982 - DNA, 709 bp, Unknown
  Bacterial polypeptide expressing nucleotide sequence isolated from the Sargasso Sea
tttgcaagcttatgattttttagagttaaataaaaaagagaattgttccttacaaataggaggttctgatcaatggggaaacattgtcaatggaacagagcttataaaaagatattctagtaaacaagcttatggtttaactacccctctcattacattatcctcaggaacaaaaatgggaaaaactgagtcaggtgctatttggctagatgaaaaattattatcatcatatgactattggcaattttggagaaatattgatgacagagatgtaataaaatttttaaaaatgttcacagatttaaatattgaagaaattgataaaatgaaagatgaagacattaataaacttaaaattaagctagctaacgagacaactactatgcttcatggtttaaaagctgctaaaagttcagaacaagctgcaagagaggctttctcaggaacttctcttggttcaaatttaccctcaattaaagttaagaaaactgatattgaaaataaaatgagtattatagatctagtgattttatctaaattagaaaattcaaagagtgaaatcagacgtcttattaaaggaaatgcaattaaactgaatgatgaaattatatctcaagaaaatctgatcatatcttatcaattattcagaaaaaattatttaaaactttctgtaggaaaaaaaagacatttaaaaattgagttaagttaa

SEQ ID NO: 295983 - DNA, 895 bp, Unknown
  Bacterial polypeptide expressing nucleotide sequence isolated from the Sargasso Sea
tatgtcaaaaaataaagtatctggatacataggcttcgatatcacaagtgacagtttacatgttggaagtttaattcaactgatgctacttcactggcttgattattatgatcatcaatctattgccttagttggaggaggaacaacgctaataggagatccttcaggaaaagatcaaacaagaaagataattagtaaaaatgaaattgataataatataaataatattaaaagtacttttagtaaatttatcaacttagaaaaaaacgccttaataattaataactacgactggctttcaaatctaaattatatagattttcttagagagtttggatcaaaaattacattaaacaaaatgcttacttttgaatctgtgaaaagtagattggaacgggagcaaccactaactattttagaatttaattatatgcttcttcaagcatatgatttttgttatttgaataaaaaccacaattgtattttgcaaatgggaggctcagatcagtggggcaatatattgagtggggtagatttaattaaaaaaataaataaaaagaatgcctttggcattacgtcgccccttattactaatagtgatggcactaaaatgggtaaaacagctgatggagctgtttggctaaataaagaaaaaatatctagcttagatttttatcaattttggagaaatacaagtgacagtgatgtatcaaaatttttatatttatttacaaaaattcctttaagtgaaatcaaaaaactttcttcacttaaaaatcaagaaataaatgaagcaaaaaaaatactagcttatgaggtaacaaaaattgtaagaggtaaaaatgatgcagacgaagcattagacattgccaataatacatttaattccaatatt

SEQ ID NO: 295984 - DNA, 467 bp, Unknown
  Bacterial polypeptide expressing nucleotide sequence isolated from the Sargasso Sea
tatgaataaatttttacaagaattccatgatagaggctactattatcagtgtactgataacaatgagctaagtaaaattttagatagtaaaaaaataagagcctatataggttttgattgtacagctgaaagtcttcatgttggaagtttactacaaataatgtgcttaagattacttcaaaaacatggtcaccagccaattgttttgcttggaggtggaaccactagaataggtgacccttctggaaaagataaaactagacaattattagatgagaaaaatattgaaaaaaatatcaaaaatattgaaaaaatattaaaaatatttttaactactgacaataaaaatacatctccaatatttgttaacaactttgaatggcttaaagatttaaattatatttcttttttaagagatattggaaaatactttacaataaataaaatgttaagttttgatagtgtga

SEQ ID NO: 295985 - DNA, 445 bp, Unknown
  Bacterial polypeptide expressing nucleotide sequence isolated from the Sargasso Sea
atgaaagaatctcttgaattaataaagcgaggcatcgatgaagtcttaactgaagacgaccttgtttcaaaacttaaatctaaaaaacaactaactgttaaagttggatttgacccaactgcacccgatcttcatcttggtcatactgtgatcttaaataagatgaggcacttccaagacctcggtcataaggtagtttttttaattggagattttactggaagaataggggacccatctggcaaaaacaaaacacgtccatcacttgataaagaggaacttgaaaaaaatgctaaaacttactctgatcaagtatttaaaatcttaaataaagatttaacagatatcagatttaactctgagtggtgtgaagatctgggtgccgatggaattattgggcttgcatcaaaatataatttaggtcgtatgcttgaaagagatgatt

SEQ ID NO: 295986 - DNA, 822 bp, Unknown
  Bacterial polypeptide expressing nucleotide sequence isolated from the Sargasso Sea
tgctggcccgcgaatcggtgcgccagcggctggcccgcccggatcagggcatctccttcaccgagttctcctacgccctgctgcaatcccaggacttcgcggtgctcaaccagcgcctcggctgcactctgcagatcggcggcaacgaccagtggggcaacatcaccagcggcatggatctcacccgccgcctccatcaggcccaggtctatggcatgacgttgccgctcatcaccaaggcggacggcaccaagttcggcaagaccgaagggggggcaatctggctcgacccggcgctcacctcgccttacgccttctaccagttctggctcggtacggcggatgaggatgtctaccgcttcctgcgctactacagctttatggggctgaccgagattgaggcgctggaggcggaggatgcgaagcggcaggggcgcaagctggcccagcaggtgctggccgacgagctgaccgaactggtgcacggcaagggggcgctggcggcggtgcagcgcatcagcgaactgctgttcagcggcgaggtggcccgccttggcgagagcgatctggcccagctggcgcaggatggcatgccgggctggcgtatcgagggggaaaccagcctggtgaccctgctggtggagagcggtctggccaactccaagcgcatcgcccgcgagctgctggcggctggcgccatcagcctaaatggcgagatccgccgggatgagccactgacgacggctgaccggctgttcggccgctatctgctgctgcgccggggcaaaaagcagtaccggctggtgacgtggctggggtgag

SEQ ID NO: 295987 - DNA, 823 bp, Unknown
  Bacterial polypeptide expressing nucleotide sequence isolated from the Sargasso Sea
aatgtcatttaaaccaaatagtgaactattaacgatactgattgagcgcggtttcgttcaaaaccttacaaatcaagagcaattagattacattctaaatcgtgaaaagatcgctagctacattggatacgatgccacagcggaaagtcttcatgtcgggcacctcgtaaacataatgatgttacggtggacacaaaaatgtggtcacactccaatcacgctaatgggtggaggcacgacaaaagttggggacccttcttttcgttcagcagatagaccccttttaagtgagaacaagataataaataatattaatagcttaaataaaatttttgataagtacctcgattatgagaatgtagacaataaagctataatggtaaataattcagattggcttgaaaacctaaattatttaaattttctgcgtgatataggtcgacattttagtgttaatagaatgcttacatttgagtcaataaaatcaagaattgatcgcgagcagtcacttagctttctcgaatttaactacatgattcttcaagcttatgattttctagagcttcataagagatttggctgtatcttgcaaatgggcgggtcagaccaatggggaaacatagttaacggtatcgacttgacccgacgagtgattgacaaatctgtttacggtctcacctgcccccttttgacaacatcttccggattaaaaatgggcaaaacgcaaaatggtgctgtctggttaaacgcaaatttaacatcaccatatgaattttggcaattctggcgaaataccgaggacggagacgttgtaaaatttttg

SEQ ID NO: 295988 - DNA, 340 bp, Unknown
  Bacterial polypeptide expressing nucleotide sequence isolated from the Sargasso Sea
tttgagctttcttgagaccttcgaagaacgcggttttttcaaacagaccacacaccctgaagaattaaaaagtcgtgtcgaatctggccggatttgtgcctatatcgggttcgacccgaccgcggattcactccatgtcggacacctcatccctctgatgggactcgcccacctgcagagagacgggcaacgggtgatcgccctgatgggtggaggaactgcaatgatcggggatcccagcggcaaaacagaaatgcggaagatgctcacagaaaagcagttggaggataatgtcgggaagatcaaacctcagatggagcgtttcctgaatttcagtgga

SEQ ID NO: 295989 - DNA, 761 bp, Unknown
  Bacterial polypeptide expressing nucleotide sequence isolated from the Sargasso Sea
aatgatcggagatccctctggtaaatctgatgaaagaaatttacttgataagaaggtcttagattacaatgaaaaaaaattaactaaacaatttgaaaaatttttagattttaaatcaaaaaaacctaacaaagccattttagttaataattataactggatgaaaaaattctccataatagacttttccagagatattggtaagcatattacagttaattacatgatggctaaagaatcggttaagaaaagaatttcaaaagatacaactcaaggaatgtcctttactgaatttacttatcaacttattcaaggctatgattttctccatttatataaagaaatgaactgtatgttacaaatgggaggaagcgatcaatggggaaatataactacaggaaccgagttgattagaagaaaagaaaacaagaaggtctttgctatgacttgccctttaattaaaaaatcagatggatcaaaatttggtaagtcagaggagggtaatatttggctggataaagaaaaaacatctgtttataagttctatcagtattggttaaatatatctgatgaagatgcagttaattacatcaaagtttttacatttcttaacaagcaagaagttgaagatctaattgatgaacaccaaaaagataaatcaagaagacttcttcaaaacaagattgcagactctatcacatcaatggttcatagtgaaaatgatttagaaaatgcagttaaagcatctaaagtcctttttt

SEQ ID NO: 295990 - DNA, 867 bp, Unknown
  Bacterial polypeptide expressing nucleotide sequence isolated from the Sargasso Sea
tggcttcttcactgggttagatcattatgatcataaatcaattgctctagttggtggaggtactactcttataggtgatccttcaggaaaagatcagactagaaaaatactaagtaaagaagaaatagataaaaatattaataatatagaagttacttttagaagatttatcaatctagaaaaaaaatctgtaataatcaataattatgaatggctttcaaatctaaactatatagattttctaagggagtttggctcaaaaattacattaaacagaatgcttacttttgattctatcaaaaatcgactggatcgggagcaaccgttaacaatattggaatttaattatatgttattacaggcttatgatttttattatttaaataaataccataattgtattttgcaaatgggaggatcagaccaatggggaaacattttaagcggagtagagttaatcagaaaagttaataaaaaagatgcatttggtattacctcgccactaatcactaatagtgatggctcaaaaatgggtaaaacagctaaaggagcaatttggcttaatagagataaaatatcaagtttagatttcttccaattttggagaaatataaatgataacaatgtatcaaggtttcttcatttatttacaaagctacccttaagtgaaataaaaaaactatccttgcttaaaaatcaagaaataaatgaggctaaaaagatactagcatatgaagttactaaaatagttagaggaaaagaagatgctgatgaagcttctgaaattgcaaacaacgtatttaattcaaatattattgataaaagattgcctaatatttctcaaaaaaaaatgaatttggtaaatga

SEQ ID NO: 295991 - DNA, 738 bp, Unknown
  Bacterial polypeptide expressing nucleotide sequence isolated from the Sargasso Sea
cagcaaaccgttgcccgtatgatggaacgtgatgactttaagaagcgctatgcttcgggtcagtcgattgctatccacgaatttatgtatccacttttacagggttatgactcagtagccctgaaggctgacgttgaactaggcggaaccgaccagaagttcaacctgttaatgggccgtgagttacagaaagccgaaggccaaaagccacaagccgtgatcatgatgccactgcttgaaggtttagacggcgtgaagaaaatgtctaaatcggcgcacaactacattggtgtgagtgagcccgccaatgaaatgtttggcaagatcatgtcgatttctgacgaattaatgtggcgctactttgagttgctgtcattccgtcctttggccgagattgaacagttcaaacaagatattgccaacggtgctaacccccgtgatactaagattgcgcttgcgaaggaaatcattgcgcgcttccacgaccaagcggcggccgagagtgcccatcaagcctttatcgaccgtttccaaaagggcgctatcccagatgatatccctgaggttgaattagcggcgggtgaaggcttagcgattgctaacttacttaaagatgccgacttagtggggtcgacttccgatgcgatgcgtatgatcaagcaaggcgcggtgaagatggacggtgagaaggttgacgatagccgtatgaccttaagcgctggcacggttgccgtattc

SEQ ID NO: 295992 - DNA, 657 bp, Unknown
  Bacterial polypeptide expressing nucleotide sequence isolated from the Sargasso Sea
tacaaataggtggctcagatcaatggggaaatatagtgaatggtgtcgaattaataaaaaggcattcttctaaagaagtttatggattaacaacacctttaataactttagcatctggagcaaaaatgggcaagactgaaggtggcgctatatggttagataaaaatttactatcaccatacgattattggcaattttggagaaatgtggatgatagagatttagttaaatttttaaaatcatttacagatatatcgccaagagaaattgaattgaaaaagaatgaaaatattaatgatttaaaaatacttttagctaacgaggcaacttctatgcttcatggagatttagaggcaaaaaaatgttatgagcaagcaaaaaaaattttttctgataattcatctgatgagggtttgcctgtaattaaattaagtaaaaataatttaaaaagtaaaaatttgtcagatttaatattagaaacaaaattagagagttcaaagagtgaaattaaaagattaattaaaaataatggcattaaaatcaataattttaaaataaaagaagatctaaaagtttctaaaattgatttgaataaaaaaaatttttttaaactttcaattggtaaaaaaaaacattttaaaatagagattaattaga

SEQ ID NO: 295993 - DNA, 795 bp, Unknown
  Bacterial polypeptide expressing nucleotide sequence isolated from the Sargasso Sea
ataaaatgttaagttttgatagtgtaaggttaagattagatagagaacaatcgttaagttatatggaattcaattatatgatcttgcaagcttatgattttcttgaattaaataaaacaaagaattgtttaatgcaaattggtggctcagatcagtggggaaatattattaatggagtagagcttattaaaagatattctaataaaaaagtttttggattaacaactcctttaattacactagcatcgggagctaaaatgggtaaaactgaaaaaggtgcagtatggttagaaaaaaatcttttatctccatatgattattggcagttttggagaaatacagatgatagagatgttttaaaatttcttaaaatgttcacagatcttaagttagaaaaaatcgatgaaatcaaaagccaaaatattaataatctaaaaataattttagcaaatgaagctactgcaatgctacacggaaatgctgcagcaaaaaaagctgaacaaactgcaaaaaacacatttgatgaaaagttagttggagatgacttgccatttgtaaaaatagataaagaaaaaattaaaaaaggaattaatattgtagatctggttatatcttcaaatcttttaaaatcaaaaagtgaagtcagaagagcgataaataatagaggtatcaaagttaataatgagacaatagaaaatgataaagaaaatatttcaataaaaaatttcaataatgaaaattacttaaaattatctcacggaaaaaaaaatcacataataattaagataatttaat

SEQ ID NO: 295994 - DNA, 466 bp, Unknown
  Bacterial polypeptide expressing nucleotide sequence isolated from the Sargasso Sea
atgaataaatttttaaaagaatttaaagatagagggtatttctaccaatgcacaaatgaaaatgatttatctaaattattagataaagaaaaaatcaaaggttatataggttttgattgtacagcagtaagtctccatgttggaagcttgctccaaataatgtgtttaagattaatgcaaaaacatggtcatagaccaattgtattgattggaggaggaacaactagaataggagatccttcaggtaaagataaaacaagaaaaatcttaagtgaagaagaaatagaaaaaaatatcaataatattgaaaaaatattaaaaaattatttagaaaataatgatccaaaaactaaacctatatttgtaaataattattcttggcttaaaggtttaaattatatttcttttttaagagatattggcaaacattttacaataaataaaatgcttacttttgaaagtataa

SEQ ID NO: 295995 - DNA, 148 bp, Unknown
  Bacterial polypeptide expressing nucleotide sequence isolated from the Sargasso Sea
aatagagacaactgcatacttcaaataggtggatcagatcagtggggtaatattgtaaatggcgttgagttaataagaagagcaagtggtaaggaagcttttggactaactacgcctttattgaataatgctaatggagacaaaatgg

SEQ ID NO: 295996 - DNA, 736 bp, Unknown
  Bacterial polypeptide expressing nucleotide sequence isolated from the Sargasso Sea
tatggaatttaattatatgattttacaagcatatgatttttatgaattgtttaaaaacaatgaatgcatcttgcaaattggtgggtcggatcaatggggtaatattgtgaatggagtggaccttataagaagaaaattaaaaaaagaggcttttggtgtaacctctccattaattactttagcatcaggtgcaaaaatgggaaaaacagaaaaaggtgctatctggttaaatgaagaagaattatcttcttatgattattggcaattttggagaaatactgatgatcgtgatgtaaaaagatttattaaattctttacagaaatcgaattggatgaagcagaaaatttatttaaaaaagaaaaaaatattaataatttaaaaattttattagctaatgaagctacaaagattcttcacggtgaagtatcagcaaaaaaagctgcacaagcagctaaaaatgtttttgaaaagggcgcattagcttcaggtttacctgaaataaatataaaaaaagataaaattaaaaaaggagtaaatattttagatctaattgctgacaataaaatcttatcgtcaaagagtgaaactagaagagtaattgcaaacaaaggtttaaaattaaacgataaagtaatatatgatgaaaaaaaagtacttaaattaaatgattttgaaaaagatattttgaaactttcttacggaaaaaaaaagcactacataattaagattatttag

SEQ ID NO: 295997 - DNA, 835 bp, Unknown
  Bacterial polypeptide expressing nucleotide sequence isolated from the Sargasso Sea
tattgattttttaagagatgtaggaaaacactttactattaacaagatgctaacgttcgatagtgtaaagcttcgattagagagagaacaatctttaagttatatggaatttaattatatgattttacaagcttacgatttttatcagctttttaaaaaatataattgcattttacaaatgggtggctctgatcaatggggaaatattgttaatggagtagaattgataagaagaatcttaaaaaaagactcatttggacttacaactcctttgataactttatcatcaggggctaaaatgggtaaaacagaaaaaggtgcagtatggttagataaaaagatgttttcaccttatgattattggcaattttggagaaatacagctgatgaagatgtaaataaatttttaaaatactttacagaaatagaaataaataaattatcaaatataataaatagcgagaaagatataaataaattaaaaattctgttagcgaatgaagcaacaaagatattgcacggagaaaaagctgcaaaagagtctgaaataactgcaaaagaaacttttcagggaactggggtaagtaaaaatttaccacaaataaatttatctcattctgaccttgaaaaaggaataaatattcttgatcttctttacttaaataaaattgtttcatcaaaaagtgatgcaagaagagcgattaaaggtaatggtattaaaattaatgataaattgattatagatgaaaaaaaaattatcaataaaaatgacttggaaaacaataatttcattaaagtttcttatggaaagaaaaaacatttcttaataaaaagt

SEQ ID NO: 295998 - DNA, 823 bp, Unknown
  Bacterial polypeptide expressing nucleotide sequence isolated from the Sargasso Sea
aaaacaaataaaggcttacataggatttgattgtactgctcctagtttgcatgtaggaagtttgatgcaaattatggtcctaagacttcttcaaaaatctgggcatcagcctattgttttacttgggggaggtactacattaattggtgatccttctggcaaagattcgacaaggcgggtcttaaaacagaaagaaataaatacaaatatcataagtataaaaaaaatttttgataatcttttaaaaacaaaaaataaaaaattaaaacatatttttgttaacaattttgattggctcggcaaattaaaatatattgaatttttaagggaaatcggaaaacattttacagtaaataaaatgctttcatttgacagcgtaaaacttagattggataggcaacaatctcttagttatatggaatttaattatatgattttacaagcgtatgatttttataaactttttgaaaaacataattgtattttacaaatgggtggttcagatcaatggggaaacatagttaatggtgtcgaattgattagaagggtgctaaaaaaagactcgttcggtcttacaacccctttgattacattagcttcgggagctaaaatgggaaaaactgaaaaaggtgctgtatggttagataaaaaattattttctccttacgattactggcagttttggagaaatactgcagatcaagatgtaaaaaagttccttatgtactttacagaaattaattgtgatgtattagaaaaaaaaattgaaagtgaaagagatataaataaacttaaaatattactagctaatgaagcaacaaaa

SEQ ID NO: 295999 - DNA, 829 bp, Unknown
  Bacterial polypeptide expressing nucleotide sequence isolated from the Sargasso Sea
tatgaaaaacacctttttatcagaaatgaattcaagaggtttcctaaatcagtgtactgatttggagggattagaaaaaatttcaaaccaaaaaagcattaaggcttatattgggtttgacactactgccccaagtctccatgtgggtagtttaatgcaaattatgattttaagacttctgcaaaaatatggtcatcaacctattgttttgttaggtggtggaacaacattaataggagatccatctgggaaggactcgactagaaaaattttaaaagaaaaagaaataaaaaataatattaaaagtattaaaaaagtttttgaaaaacttcttttttctaaaaataaaagaacaaaggtaatttttgttaataattatgattggcttgaaaaacttaaatatattgattttttgagagaaattggaaaacattttacaattaacaaaatgcttacttttgatagtgtaaaacaaagattagatagagagcagtctctgagttatatggagttcaattatatgattttacaagcatatgatttttaccagctatttaaaaaacatgattgtattttacagctaggtggttctgatcaatggggtaatatagttaatggtgtagatctaattagaagagttttacaaaaaagtgcctttggtctgaccacaccacttataacattatcttcgggtgcaaaaatgggcaaaactgaaaagggagctgtgtggctagataaaaaaatgttttctccatacgactattggcaattttggagaaatactgctgatgaggatgtagaaaaatttttaatgtatttgcagaaggcg

SEQ ID NO: 296000 - DNA, 427 bp, Unknown
  Bacterial polypeptide expressing nucleotide sequence isolated from the Sargasso Sea
aatgcaaaaaaattttgtagaggaacttaagtggcggggcttacttcacgatcttacaccagaaacggaaaagtttctcttagaaaaacccactaaaggatatattggctttgacccaactgccaattcaatgcatattggaagtttggtgcaaattataattttaatccactttcaaaatgctggccattcacctataattttgcttggtggagctacaggaatgattggagatccttcaggaaaatccgaggaacgtaatttgttggatcaagaaatacttgagaaaaattgtaactctattcggaagcagtttgaaaaatttctagattttagaaaaaatattgaaaatcctgccacattagtaaacaattacaattggatgaaatcttacagtttaattgatttttctagagaaataggaaaa

SEQ ID NO: 296001 - DNA, 742 bp, Unknown
  Bacterial polypeptide expressing nucleotide sequence isolated from the Sargasso Sea
aaatgtttttaaaatattgttaaaaacaaataatccaaaattaaaacctatttttgtaaataattataaatggttaagaaagttaaattatattaaatttttaagagaaataggaaagcactttactattaataaaatgttaagctttgatagtgtcaaattacgtttagaaagagaacaatctttgagctatatggaatttaattatatgattttgcaagcatatgactttcttgagcttaataagaataaaaattgcttaatgcaaataggaggttctgatcagtggggtaatattgtaaacggtgttgagctaattaaaaggcaaactggaaatcaagtctatggtttaaccactcctttaataactttggcttcaggaacaaaaatgggtaaaactgaaaaaggagcaatttggctagatagaaaaatgttgtcttcatatgattactggcaattttggagaaacaccgatgatagagatgtaattaaatttttaaaaatgtttacaaatatttctcttattgaaattgaaaaggtaaaaaataataatattaatgaacttaaaattttacttgcaaacaaagcaactgctatgcttcatggtgaaaaagaagcaaacaatgccgaaaagcttgcaaaatctacttttaaagaaaattctactggcgaaaatttacctaatattaaaatagatgcagatatattaagtaataatattgtagaagttatatcttgcgtt

SEQ ID NO: 296002 - DNA, 502 bp, Unknown
  Bacterial polypeptide expressing nucleotide sequence isolated from the Sargasso Sea
atgaataaatttttaaaagaatttaaagataaagggtatttctaccaatgcacaagcgaagagaaattatctaaattgctagataaagaaaaaatcaaagcttacatcggatttgattgtactgccgaaagtcttcatgttggaagcctacttcaaataatgtgtttaagattaatgcaaaagcatggtcatagacctattgtattaataggtggtggtacaactagaattggagatccatctggtaaagataaaacaagaaaaatccttaccgaaagtgaaatagaaaaaaatattaaaaatattgaaaaaatattaaaaaattatttagataacaatgatccaaaaacaaaacctatttttgtaaacaactattcttggcttaaaggattaaattatatttccttcttaagagatattggcaaacattttacaataaataaaatgctaacttttgaaagtgtaaaaacaagattggatagagaacaatctttaagttaca

SEQ ID NO: 296003 - DNA, 791 bp, Unknown
  Bacterial polypeptide expressing nucleotide sequence isolated from the Sargasso Sea
taggatgttaacgtttgacagtgtaaaattaaggttagatagagaacaatcgttaagttatatggaatttaattatatgattttacaagcatatgattttttagaattaaataaaaaagagagttgtgttttgcaaattggtggttctgatcagtggggaaatattttaaatggtgtagaacttattaaaagatactctaataatcaaacttttggtttaactactccacttattactatagctacaggtgcaaaaatgggtaagacagaaaatggtgcagtttggttagatgaaaaatttttatcagcttatgattattggcaattttggagaaatattgatgatagagatgtgattaaatttttaaaaatgtttactgatcttgatattagccagatagaaaaattgaaaaaaaataatataaatgaattaaaaatattgcttgcaaataaaaccacctctttgcttcatggcgaaaaggcagcaaagaactcagaacaagcagctaaagaggcattttctggaaattcacttggttcaaatttaccttctgtaactattttgtcagaaaatattaataaaaaaattaatcttttagatcttatttatctatctaaattagaaaattctaaaagtgagattagaagacttataaaaggaaatgcaataaaaattaatgataatactatatctgatgaaaaatttattattgatcacaatctatttaaagaaaattacctcaagctttctataggaaaaaaaagacacattaaagttaagattaattaat

SEQ ID NO: 296004 - DNA, 856 bp, Unknown
  Bacterial polypeptide expressing nucleotide sequence isolated from the Sargasso Sea
gaaaaattaaaatatattgaatttttaagagatgtgggaaagcatttcacaatcaataaaatgctaacttttgatagcgttaagcttagattagaaagggaacaatctctgagttacatggagtttaactacatgattttgcaagcatatgatttctatcaactttttaaaaaatacggatgtattttacaaatgggaggttcagatcagtggggcaatatagttaatggcgttgaattaattaggagaattttgaaaaaggagtcatttgggcttacatctcctctaataactttgtcatcgggtgctaaaatgggaaaaactgaaaaaggtgcggtatggttagataataaattattttctccttacgattattggcaattttggagaaataccgctgatgaagatgttgaaaaatttttaaaatattttacggaaattgatacagatgatttaattaaaaaaattagtaatgagagagatataaataaattaaaaatattgttagcgaatgaagctacctctattttacatggtgcaaaagctgctaaagagagtgctgaaactgcgatagaaacttttgttcagggaggtatggggaaaaatataccagaaaaaaaaatttcaaaaaaaataattttgcaaggaattaacattatagaattaatttttcaaaatggtttggttgtttctaaaagtgaaggtagaagaatattaaaaaataacggtataagagttaatgataaaattatttctgatgataaaaaaataataaatatggaagatgttttagacagtaagaaaataaaattgtcagtcggaaaaaaaaatcatcttaaaatatccattatttagc

SEQ ID NO: 296005 - DNA, 896 bp, Unknown
  Bacterial polypeptide expressing nucleotide sequence isolated from the Sargasso Sea
taatagtattaaaaaagtttttaatagagttttaaatacaaaagataaaaaaacgaagcctatctttgtaaacaacgatgattggcttactaaattaaattatattgattttttaagaaatgttggaaaacattttacaattaacaaaatgctaacttacgatagtgtaaaattaagacttcaacgagaacagtctcttagctacatggagtttaattatatgattttacaggcctttgatttttataaactttacaaaaataaaaattgtattttacaaattggtggatccgaccagtggggcaatatagttaatggagtagatttaattagaagaattttaaataaagaagcattcggtttaaccacgcctttgattacattagcctcaggtgcaaaaatgggaaaaactgaaagtggtgcaatatggttgaacgaagatttattttcatcttacgaatattggcaattttggagaaacactgatgatcgcgatgtaaaaaagtttttaaatttttttactgacataaaaaatagtgaaatagagaaaatgtttcgcgaagaaaaaaatataaataaattgaaagtaattttagcaaacgaggctactaaaatacttcatggagagaagtcctctaaaaaggctgaggcgacagcaaaagaaacttttgaaggaagtggtgtcagcaaaaacctgccagaaatcataatagacttagatgagataaaattaggaataaatattttagatttacttacaaaaagcaatattatgcaatcaaaaagtgaggtaagaagggcaattttaaataaaggtataaagattaataacaaaacgataagtaacgaaaaattagttattaacctgaatgattttaatcagaaaggtttgtaaa

SEQ ID NO: 296006 - DNA, 459 bp, Unknown
  Bacterial polypeptide expressing nucleotide sequence isolated from the Sargasso Sea
tatgaataaatttttgaaagaatttaaagatagaggttttttctaccaatgcacaagtgaagatgaactatctaaaaaattagataaagaaaagataaaaggttatataggttttgattgtacggctgaaagcttacatgtaggtagtttattgcaaattatgtgtttacgactacttcaaaaaaatggacatcgaccaatagttttgcttggtggaggaaccacaagaattggggatccatctggtaaagacaaaactagaaaaatattaagtgaagaagagattgaaaaaaatattaaaaatatcaaaaatattttaaaaaaatttttagataacgatgatctaaatacaaaaccaatctttgtaaataattatacttggcttaaagacttaaattatatttcttttttaagagatataggaaaacatttcacaataaatagaatgttaacatttga

SEQ ID NO: 296007 - DNA, 895 bp, Unknown
  Bacterial polypeptide expressing nucleotide sequence isolated from the Sargasso Sea
agatgcgacaatttcaagaccttgggccataaagtcatcttcttgattggtgattttactggaaaaattggagacccaagcgggaaaaataaaactagaccgccactttcagataatgagatacaaaaaaatgctaatacttataaagatcaagttttcaaagtactggatgccaaaaaaactgtagttgattttaattctcgatggggagataagttaacggctgccgatatgatcaaaattgcctctcaatcaacagtagcaagaatgcttgaaagagatgatttttcaaaaagatataaaagtaatcaaccaatttcaattcatgaattcctttaccccttaatgcaaggtcaagattctgttgagcttgaggttgatgttgaactgggaggaacagatcaaaaatttaatttgcttgtaggaagagacttgcaaaggaatattggtcaggagccccagtgcattattatgcttcctttgttggaaggacttgatggagtaaaaaaaatgtcaaagtcagaaaataactatattggtataacagaatctgcagatgaaatttttggaaaaacaatgtcaattccagatgagattatgattaaatggtttaatcttctgagcatgaaaactcctgctgaagtaagtaaattggaaaagaagctagagggtggatcaaatccaagagatattaaaattgaacttgcgatggaattagcatctcgatatacggacgaaaataaagcaaacgaggcgcgggaaaacttcattaaaaagttttcaagcaaagagttgccaagtaatattgaattaatcacattaagtttctcagaaattccttttcttccaaatcttctaaaagatataggctttactaaaagcacctcagaaggta

SEQ ID NO: 296008 - DNA, 319 bp, Unknown
  Bacterial polypeptide expressing nucleotide sequence isolated from the Sargasso Sea
tgccttaggctattacaaaaacatggacataggccaattgttcttttaggtggaggaacaacaagaataggagatccatctggaaaagaagaaactagaaaaatattatctgaaaaacagatagagagtaacattaataatataaaaaaaatatttaaaatttttcttcaaacaaaaaatccaaaattaaaacctatatttgttaataattataaatggttaagtaaacttaattatataaattttttaagagacataggtaagcattttacaatcaataaaatgttaacatttgacagtgtaaaattaagattagaaa

SEQ ID NO: 296009 - DNA, 868 bp, Unknown
  Bacterial polypeptide expressing nucleotide sequence isolated from the Sargasso Sea
gatacagaaataaaaagtcttgatgaaattttatctaaaaataaaatatgtggttatattggctttgacataactagtaatagtttacatgttggaagcttaattcaattgatgctacttcactggttagatttttatggacataaatcgattgctttagttggaggtggaactactctaataggtgatccttctggtaaagatcaaactaggcaaatattaacaaaaaaacaaattgataaaaatattgaaaatatagaagaaacattcaagagatttatcaatatcaacaaaaattctttgattataaataattatgattggctatcaaacctaaattatattgattttttaagagaatttggttcaaaaattactttaaacagaatgcttactttcgagtcaataaaaggtaggttagatcgagagcaaccattaactattttagaatttaactatatgcttttacaagcttatgacttttattatttaaataaaaactataattgcgttttacaaatgggcggatctgatcaatggggaaatatattaagtggagtagatcttataagaaaaataaataaaacagatgcatttggaattacatcgccattaataactaataacgatggatcaaaaatgggtaaaacagctaatggtgctgtatggcttaataaagataaaatatcatgtttagatttttttcagttttggaggaatgtagaggacaatgatgtgccaaaatttttaaaattgtttacgaaactacctctctctgaaattaaaaaactttctttacttaaggataaagaaataaatgaagcaaaaaaagtacttgcatatgaagttactaaaattgtgagaggta

SEQ ID NO: 296010 - DNA, 565 bp, Unknown
  Bacterial polypeptide expressing nucleotide sequence isolated from the Sargasso Sea
atgaataaatttttaaaagaatttaaagacagaggctacttttatcaatgtactgatgaaaatgagttatcttctttattagataaaaaaaagattaaagcctacattggttttgattgtacagctgaaagtctacatgttggcagtcttctacaaattatgtgtttacgaatgctccaaaaacatggacaccaaccaattgtattgttaggtggaggaaccacaagaattggagacccatctggtaaagataaaacacgaaaaattttaagtgaagatgaaattgaaaaaaattctaaaaatattgagacaattttaaaaaaatttttagatacaaatgataaaaatgtaaaaccaatatttgttaataactatgagtggctcaaagatttaaattatatctcttttttaagagatattggaaaacattttacaataaataaaatgttaacatttgaaagtgtaaaaacaaggttggatagagaacaatctctgagttacatggagtttaattatatgattttacaggcttaccattttttagaacttaataaaaaagaaaatt

SEQ ID NO: 296011 - DNA, 712 bp, Unknown
  Bacterial polypeptide expressing nucleotide sequence isolated from the Sargasso Sea
ttgcaagcatatgattttttagaattaaataaaaaagaaaattgtactttacaaattggaggctccgaccaatggggaaacatagttaatggaactgaacttataaaaaggcattcaaataaacaagcttatggcttaactacccctctaataactttagcttcaggagctaaaatgggaaaaacagaaactggagctatatggttggacaaaaaattattagcaccttatgattactggcagttttggagaaacatcgatgataaagatgttataaagtttttaaaaatttttacggatttaaaaattgatgaaataaataatataaaaaatgaaaatattaacaaattaaaaattatattagcaaatgaaactacatcaatgttgcatggaaaagaagcagctttatctgcagaaaaaactgcaaagaaaacttttgaagaaaattcattaggagaaaatttaccttcagttgatattcaattaagtagtaaaaataatattataaatatagttgatttaattattttatcaaaaattgaaaaatcaaaaagtgaaattagaagacttattaaaggtaaaggtatcaaaataaataatgaaattattagtgatgaaaaatttctgatacaaaaaaaattatttggtaaagatagttttttaaaattgtcaattggtaagaaaaaacacgtaaagattaatttatcctaat

SEQ ID NO: 296012 - DNA, 429 bp, Unknown
  Bacterial polypeptide expressing nucleotide sequence isolated from the Sargasso Sea
tatgaataaatttttgaaagaatttaaagatagaggttttttctaccaatgtactaatgagaatctcttatctgagctactagataaaaaaaaaataaaagcttatatcgggttcgattgtacagctgaaagcctgcatgtaggaagtttgttgcaaataatgtgtttaaaattattgcaagatcatggacatcagccaattgtcctgcttggtgggggtaccacgagaataggtgatccatctggaaaagataaaactcgaaaaattctttctgaaaaagaaattaaaaaaaactcaaaaaatatagaaaaaattttaaaaaattttttagatacaaaaaatacaaagactaagcctgtatttgtaaataattttgcttggctcaagaaactaaattacatatcttttttaagggatataggtaagca

SEQ ID NO: 296013 - DNA, 688 bp, Unknown
  Bacterial polypeptide expressing nucleotide sequence isolated from the Sargasso Sea
aatgacaactttaaaatcagaatttttgcatactatttcagaacgtggatttattcatcaaactaccgatgaaaggaaactagatagtattttggccagtgacaagataactggtgcttatacagggtttgattgcacagccgactccctccatatcggtcacttgatgccaattatgacattgcgctggtaccaacgttgcggccacaagccaataactttaatgggtggaggcactactaaagttggagacccttccggcaaagataagacgcgtaaaatcctagatgaagcaactattcaaaataacatcgaagggataaaaggcacgtttgaaaagtttctaaaattcggagaaaagcccaatgacgctcaaatggttaataatgcagattggctagacgagttagaatacatcccatttttgagacagtttggaaagcatttttccgtaaatcgtatgctatcctttgactcggtgagattgcggcttgaacgggagcagcctctgagctttctcgaatttaactatatgatccttcaggcttatgacttcttggagctatcacgccgtgcagattgcattttacaaattggaggatctgaccagtggggaaatattgttaatggtatagagctcgctcgaagaagtgacggcacctctctattcggcctaacaaccccataa

SEQ ID NO: 296014 - DNA, 748 bp, Unknown
  Bacterial polypeptide expressing nucleotide sequence isolated from the Sargasso Sea
tatgattttacaggcatatgatttttatgaacttaataaatctaataagtgtgatcttcaaattggtggatcagatcaatggggtaatattgtaaatggagtagatcttattaaaagggtttccggaaatcatgtttatggtttaactacaccactcataactttagcatctggtgctaaaatgggaaaaactgaaaaaggcgcagtatggcttaataaggatatgctatcgccatatgattattggcaattttggagaaatacagatgatagagatgtattaaggtttttaaaaatgttcactgatttatctttagaagaaatagatgataaaaaaaataaaaatattaatgaattaaaaattttattagcaaataatgtaacagcaatgctgcatggagaaaaggaagcgaaaaaatctgagaatcttgcaaaaaatacttttaaagaaaattcgacaggtgaagatctacctgggataaaaattgcaaatgatattttgtcaaagagtatcgttgagataatttcatatattaatcaaaatatttcaaaatctgaaataagaagattgattaaatcaaatgcaatcaaaataaataacaaaaatatacaggatgaaaaatttattattgaaaaaaatttgttcttagacaagggaatttgtaaagttatctatcggaaagaaaaaacacttcaaaataataaattagttacctttaattttttttcaagtgtccttgttataaat

SEQ ID NO: 296015 - DNA, 707 bp, Unknown
  Bacterial polypeptide expressing nucleotide sequence isolated from the Sargasso Sea
ttatgacttttatcagttatttaagaaaaataattgtattttacaaattggaggttcagatcaatggggaaatatagttaatggagttgatttaataagaaggatgcttcataaaaactcttttggtctcacgacacctttaatcactttagcttcaggtgcaaaaatgggtaaaacagaaaaaggggcaatttggctaaatgaaaatttattttcatcttatgattattggcaattttggagaaattccgatgatcgggatgtagaaaaatttttaaattattttacagaaatagatactagtgaaattaaaaatatcataaaaaatgaaaaaaatataaataatttaaaaatattattggcaaacgaagcgacaaaaattcttcatggagaaaaagcagccaaaaaagcagagcaaactgcaaaaaaaacttttgagggaggtgggctaggagaagatcttcctgagattaatgtgagtgaaaaggaaataaataaaggtgttgcttttttagaatttttatctaacaaaaaaattacatcgtcaaaaagcgaagctagaagagcaattgcaaatagaggttttaaaattaacgataaagtaatagttgatgaaaaaaaaaatttaaatttagaagattttaaaaataagactcttaaattatcttttggtaaaaaaaaacattacattataaaaattatttaga

SEQ ID NO: 296016 - DNA, 818 bp, Unknown
  Bacterial polypeptide expressing nucleotide sequence isolated from the Sargasso Sea
ctaaattatgtcaacttcctcagagattatggcaaacatttttcaattaataaaatgttaagctttgatagtgttaaaattagacttgatagagaacagtcgcttaattttgttgaatttaattatatgatatttcaagcttatgatttctttgaattaaataatagagacaactgcatccttcaaataggtggatcagatcaatggggtaatattgttaatggcgttgagttaataagaagagcaagtggtaaggaaacttttggattaacaacgcctttattgactaatgctaatggagataaaatgggtaaaacagtagacggagccgtatggcttaatgaagacatgttatctgcatatgattattggcagttttggagaaatacagatgacagagacgttataaggtttttaaaactatttactgatctagacaaaaaagaaattgatactatagaaaaagaaaatgcagataatataaatgaaaccaaaataatattagccaacgaagccacggctatgcttcatggtcttgatgaggcaaaaaaatctcaagaaaccgctaaagatatttttactaataataatctagatgcagatttaccaaccataaaacttaaatcggaagaattaaataaagaagtcgtactttctgatcttattttaagaatgaactttgcttcttcaaaatctgccagcaggaaacttattcgaggcaatgcagtaaaaattgataaaaaactcataaaagatgaacatttttcaattaacacattactaagcgatagctcaagtggaattgtcataagtgttgg

SEQ ID NO: 296017 - DNA, 304 bp, Unknown
  Bacterial polypeptide expressing nucleotide sequence isolated from the Sargasso Sea
tttgagctttcttgagaacttcgaagaacgcggttttttcaaacagaccacacaccctgaagaattaaaaagtcgtatcgaatcaggccggatatgtgcctacatcgggttcgacccgacagcggattcactccatgtcggacacctcatccctctgatgggactcgcccacctgcagagggacgggcaacgggtgatcgccctgatgggtggaggaaccgcaatgatcggggatcccagcggcaaaacagaaatgcggaagatgctcacagaaaagcagttggaggataatgtcgggaaaatc

SEQ ID NO: 296018 - DNA, 472 bp, Unknown
  Bacterial polypeptide expressing nucleotide sequence isolated from the Sargasso Sea
atgaataaatttttaaaagaatttaaagaaagaggatatttttatcaatgtactagtgaaaatgaattgtcgaacatcttagataaagaaaaagttaaaggttatattggttttgactgtacagccgagagccttcatgttggaagtttgcttcaaataatgtgtttaagattaatgcagaaacatggacaccgaccaattgtattaattggtggaggcacaactagaataggtgatccttcaggtaaagataaaactagaaaaatcttaaacgatagtgaaattacaaaaaatattaaaaatattgagaaaatattaaagagttacttagacaataatgatcctaaaacaaaacctttgtttgtaaataactatacatggctaaaaggattaaattatatctcttttttaagagatataggaaaatattttacgattaataaaatgctaacttttgatagtataaaaacta

SEQ ID NO: 296019 - DNA, 604 bp, Unknown
  Bacterial polypeptide expressing nucleotide sequence isolated from the Sargasso Sea
atgaataaatttttaaatgaatttatagatagaggttttttttatcaatgcactaataaagacgaattatcgaatattttagataaaaaaaaaattaatgcatatattgggtttgatagtactgcgccaagtttacatgttggtagtttgttacaaataatgtgtttaaggctattacaaagacacggacataggcctattgttttgctaggagggggaactacaagaatcggagacccttctggtaaagagaaaactagaaaaatattatctgaggaagaaattgaaaggaatataaaaaatattaaaaaagtttttaatatatttttaaaaaccgataatccaagtttaaaaccaatttacgttaataattttgaatggctaggtaaacttaattacataagctttttaagagaggtaggaaaacattttacaataaataaaatgttgagctttgatagtgtcaaactaagattagaaagagagcagtctttaagttatatggaatttaattatatgattttacaagcctatgattttttagaattaaataaaaaaaaaaagtgcttgttacaaattggaggttcagatcaatggggtaata

SEQ ID NO: 296020 - DNA, 880 bp, Unknown
  Bacterial polypeptide expressing nucleotide sequence isolated from the Sargasso Sea
aaagaagagactaggaaaattttgtctgaaaaacaaattgaaaataatataaaaaatattcaaaatgtatttaaaatatttttaaaaacaaataatccaaaattaaaaccaatttttgtaaataattataaatggttgggaaaactaaattatattaaatttttaagagaaattggaagacattttactattaataaaatgttaagctttgatagtgtaaaattacgtttagaaagagaacaatctctaagttatatggaatttaactatatgattttacaagcatatgattttcttgagctcaataaaagtaaaaattgtttgatgcaaattggtggatctgatcagtggggaaatattgttaatggagttgaattaataaaaagatattctggaaatcaagtttatggtttaacaactcctttaataacactagcatcaggtgctaaaatgggaaaaacagaaaaaggtgctgtttggttagataaaaaaatattatctccctatgattactggcaattttggagaaatactgatgatagagatgttattaattttttaaaaatatttactgatttgcccttaaatgaaattgaaaaaattaaggaaaataatattaataatttaaaaattttactagcaaataaaactacagaaatgttgcacggaaaaaaagcggctaaggagtctgaaaaattggctacatctacttttatagaagattcttcaggggaaagtttgccgagtgtaaaaattcaaaatgacatattaaataaaaatataattgaattaataacatatgtagcaaaacaattttctaaaagcgaaataagaagactaattaaatcaaatggtattaaaataaacaatcaattagtaa

SEQ ID NO: 296021 - DNA, 768 bp, Unknown
  Bacterial polypeptide expressing nucleotide sequence isolated from the Sargasso Sea
aatgctaagttttgatagtgttaaactgagattggagagagagcaatctttaagctacatggaatttaactatatgatactgcaagcatatgattttttagaacttaacaaaactaaaaattgtttaatgcaaattggtggttctgatcaatggggtaatatcgtaaatggtgtagagttagtaaaaagatattcaagtaagcaagtttacggtttaacaacgccattaattactttggcatctggagcaaaaatggggaaaactgaaaagggagctgtttggttagacaaaaaacttttgtcatcttatgactactggcaattttggagaaatacggatgatagagatgttgttaaatttttgaagatgtttacagataaggaggtttctgaagttgaaagtattaaagataaaaacatcaatgatttaaaaactcttttagcaaatgaagctactacccttttacatggtaaagcagctgcagtaaaagcttcagagacagcaaaaaaaacatttgcgggtggctcaggagatgagttaccagtaattaaaattaaaaaaaatcaaattaataatggtttaaatataattgatctctctatcaaaactaatttgtttagttcaaaaagtgagattagaagaacaataaaaaattctggtttaaaaataaataactctacagttgctgatgaaaatttagcaattaatttatctgactttgaagatgacattttaaaactttctcatggtaagaaaaatcacatttt

SEQ ID NO: 296022 - DNA, 600 bp, Unknown
  Bacterial polypeptide expressing nucleotide sequence isolated from the Sargasso Sea
tatgaaagaatctcttgaattaataaagcgaggcatcgatgaggtcttaactgaagacgaccttatttcaaaacttaaatctaaaaaacaactaactgttaaagttggatttgacccaactgcacccgatcttcatcttggccacactgtgatcttaaataagatgaggcacttccaagacctcggtcataaggtagtttttttaatcggagattttactggaagaataggggacccatctggcaaaaacaaaacacgtccatcacttgataaagaggagcttgaaaaaaatgctaaaacttactctgatcaagtatttaaaatcttaaataaagatttaacagatatcagatttaactctgagtggtgtgaagatctgggtgccgatggaattattgggcttgcatcaaaatataatttaggccgtatgcttgaaagagatgatttttcgaaacgctacaaagcaaatcaacaaattgccattcacgagtttttatatcctttaattcaggcttatgactcaatcgctttaaatgctgatgtggaaatgggcgggactgaccaaaaatttaatcttcttgtgggaagagagctgcaaag

SEQ ID NO: 296023 - DNA, 797 bp, Unknown
  Bacterial polypeptide expressing nucleotide sequence isolated from the Sargasso Sea
ttttacaatcaataaaatgttaacatttgatagtgtaaaattaagactggaaagagaacaatcattaagctacatggaatttaattatatgattctacaagcatatgatttttatgagcttaataaatcaaacaagtgtagcttacaaattggtgggtcagatcaatggggcaatattgtaaatggagttgagcttattaaaagagagtctggaaatcatgtatatggtttaactacaccacttataactttggcatcaggcgctaaaatgggtaaaactgaaaaaggagcaatatggcttaacaaagatatgctatcaccatatgattattggcaattttggagaaacacagatgatcgtgatgtattaaagtttttaaaaatgttcactgatttatctttagatagattaaataatttaaaagacaaaaatataaatgaattaaaaattttactcgccaataatgcaacagaaatgcttcatggaaaaaaagaagctgaaaagtctgcaaaacttgctcaaaatacttttaaagaaaactcttcaggtgaaaatcttccaggaattaaagtcaaaaatgacattctatcaaaaaatattatagagctgatttcatttgttagtaaagatatttcaaaatctgaaataagaagattgattaaatcaaatgctattaaaatagacaataaaaatattctggatgaaaaatatattgttgatcctatcttgttctccgacaaaggttttgtaaagttatctataggaaagaagaagcatattaaaattacagtttaat

SEQ ID NO: 296024 - DNA, 718 bp, Unknown
  Bacterial polypeptide expressing nucleotide sequence isolated from the Sargasso Sea
tatgatacttcaagcatacgattttttagaactaaataaaaataaaaattgtattatgcagataggtggttctgatcagtggggtaatataattaatggtgttgaacttataaaaagatattctggtaaacagtcttttggcttaacaactcctttaataactttagcttctggtgcaaaaatgggtaaaactgaaagtggagcagtatggctagacaaatcattgttgtctccatatgattattggcagttttggagaaatacagatgacagagatgtaattaaatttttaaaaatgtttactgatctaagtttaaaaaaaattgaaaatattaaaaataataatattaatgaattaaaaattttattagcaaatgaagcaaccacaatgttacatggaaagtcatctgctgaaaaagcagaacaaacggctaaaaaaacttttggatctggttctattggggatgatttgcccacaatcaaaatagataaaaaagaattagaaaatggcttgaatattattgatcttgtgattgtgtcaaatctattagcttcaaaaagtgaggtaagaagaataattaaaaataaaggaataaaaattaataatcaaacaattgaggatcaaaatttacaggtatcattaaagaattttaacaaccaaaatctcttaaaattatcacttgggaaaaaaaaacatgtcataatcaaaataaactaa

SEQ ID NO: 296025 - DNA, 514 bp, Unknown
  Bacterial polypeptide expressing nucleotide sequence isolated from the Sargasso Sea
atgaataaatttttaaaagaatttaaagatagaggatatttctatcaatgtacaagtgaagctgacttatctaatttattagataaagaaaaaattaaagcttacataggatttgattgcactgctgaaagtttacatgttggtagcttgttacaaatcatgtgtttgaggttgttacaaaaaaatggacaccaaccaattgtattattgggaggtggaacaacaagaataggtgatccctcaggaaaagataaaacaagaaaaattttagatgaaagtgaaattgaaaaaaatatcaaaaatatccaaaatattttaaaaaaatttctagataatgatgatctaaaaactaaaccaatttatgtcaataattatacctggcttaaagatttaaattatatttcttttttaagagatattggaaaacattttaccattaatagaatgcttacatttgatagtgtaaagctaagatggaaagagaacagtcacttagttatatggaatttaatta

SEQ ID NO: 296026 - DNA, 721 bp, Unknown
  Bacterial polypeptide expressing nucleotide sequence isolated from the Sargasso Sea
catggaatttaattatatgattttacaagcatatgatttttttgaactaaacaaaaataaaaattgtcttatgcaaattggtggatctgatcaatggggaaatattgtcaatggagtagaattaattaaaagacagtctggaaatcaagcgtatggtttaacaactccattaataactttggcatctggtgcaaaaatgggtaaaacagagcaaggggctgtttggctagataaaaaattattatctccgtatgattattggcaattttggagaaatacagatgatagagatgtaataaaatttttaaagatgtttacggatatagaaattcaagaaattgaaaaaattaaaaataaagacattaatgaattaaaagttttacttgcaaataaagcaacaattatgctgcatggaaaaaaagaagctcaaagctctgaaaaattagctaaatctacttttgtcgataatttaagtggagaaaatttacccagtatcaaaattaaagatataacaaataaaaatattgttgatataattatttatgtaaatgataatttatctaaaagtgaaattagaagattaattaaatccaatggaattaaaataaataataaaactataaatgatgataaaattttaattaataaaaaattatttgataataaaggattttttaaattatctattggtaaaaaaaagcattttaaaatagtaaactaa

SEQ ID NO: 296027 - DNA, 757 bp, Unknown
  Bacterial polypeptide expressing nucleotide sequence isolated from the Sargasso Sea
aagggagcaatctttaagctacatggaatttaattatatgattttgcaagcatttgatttttttcaattatttaaaaaaagaaaatgtattttgcaaattggtgggtcagatcagtggggaaatattgttaatggcgtagaacttataagaaaattaacgaatcaatcatctttaggattaacaactcctttgattgtaacctcaagtggaaaaaaaatgggcaaaactgaaaaaggttcaatttggttggataaaaaacttatttctcattacgattattatcaattttggagaaataccaacgatgatgatgttgtaaaatttttaaaatattttactgaattaccaatcaatgaaattgataacttgtctacgaaagaaaaaaatatcaataaattgaaagagatattagcttttgagacaactaaaattcttcacggcaaaaaattagcagaagaagcaaaaaaaacttcaaaagagacatttagtggaactggagtaagtaaaaatcttcctttaattaaattggacaaaagagagactattaatggatttaatttaatcaatgttttaacaaaaaataatattttgagttcaaataatgaggtaagacgaatgattaaaagtcgaggaattaaaataaatgacgaaattgtaagcgatactagtgatgtaaattcaataaaaattgacttatcaaaaccaaataaaatttctataggaaaaaaaagacattacttgattaaggtttactag

SEQ ID NO: 296028 - DNA, 523 bp, Unknown
  Bacterial polypeptide expressing nucleotide sequence isolated from the Sargasso Sea
atgaataaatttttaaaagaatttaaagatagaggttatttctatcaatgtacaagtgaagcagaattatcaaacttactaaatcaaaaaaaaattagagcttatatagggtttgattgtactgcagaaagtttacatgttggtagtttactgcaaataatgtgcttgagattactgcaaaaaaatggtcatcaacctatagtattaattggtggtggaactacaagaattggggatccctcaggaaaagataagacaagaaaaatattaagtgaagataaaattgaaaaaaatattacgaatattcaaaacattttaaaaaaattcttagataacgacgatccgaaaattaaacctatttttgtaaataattacacttggcttaaagatttaaattatatttcttttttgcgggacattggaaaacatttcacgataaatagaatgcttacttttgatagtgttaaattaagattagatagagagcagtcactgagttacatggaatttaattatatgattt

SEQ ID NO: 296029 - DNA, 724 bp, Unknown
  Bacterial polypeptide expressing nucleotide sequence isolated from the Sargasso Sea
catggaattcaactacatgattttacaggcatatgatttttatgaacttaataaatctaataagtgtgaccttcagattggtggatcagaccaatgggggaatattgttaatggagtagaacttattaaaagaaaatctggaaatcatgtatatggtttaactacaccactcataactttggcatccggcacgaaaatgggtaaaacagaaaaaggcgcagtttggcttaataaggaaatgctatcagcttatgattattggcagttttggcgaaacacggatgatagagatgtattaaagtttttgagaatgtttactgatttgtctttagatgaaatagataatgaaaaacacagagatattaatgaattgaaaattttgctagcaaataatgcaacggcaatgttacatggagaaaaagaagcaaaaaaatcagtaaatcttgcaaaaaatacttttaaacaaaattcaactggtgaaaatcttcctgggataaaaattactaatgacattttatcaaacaatattgttgagctaatttcatttgttaataatgatatttcaaaatctgaaataagaagattgattaagtcaaatgctatcaaaatagacaacaagaatataaatgatgaaaaatatattattgataacaatttgttctcagaaaaaggatatgtaaaattatcgataggaaagaaaaaacactttaaaattacaaattag

SEQ ID NO: 296030 - DNA, 884 bp, Unknown
  Bacterial polypeptide expressing nucleotide sequence isolated from the Sargasso Sea
aactaggccaatatttgttaataattataaatggttaaaaaatctcaattatatttcctttttaagagatattggaaaacattttactatcaacaaaatgcttacttttgatagtgtaaaaaatagactagagcgagagcagtctttgagttatatggaatttaattacatgatacttcaagcatatgattttctagaattaaataaaaaagaaaattgtgttttgcaagtaggtggctctgatcaatggggaaatattataaatggagttgaattaattaagagatactcagataaacaagtttatggtctgacaacaccacttataactttggcaacaggagctaaaatgggtaaaacagcagatggagcagtttggttagataaaaaacttttttctccttataattattggcagttttggagaaacacagatgataaagatgtcattaaatttctaaaattttttacagattttaccactgacgaaattgaaaacataaaagattttgagattaatagtttaaaaataatgcttgctaataaaactactgagcttcttcatggtaaaaaagaatctgaaaaatctgaaaaaatcgctaaagaaacattttctggaaattctaaaggatcaaatctaccatcaattaaacttaaaaaatcaattttacaaaataatattgacataattgacttagttattttttcaaaatttgaaaaatctcgaagtgaaattcggagattgattaaaggtaatgcaatcaaaataaataatgaaaatataagtgatgaaaaatttataattgaatataaattatttaaagatgactatattaaactttccatagggaaaaaaagacacttaaaaattgaacttatttaat

SEQ ID NO: 296031 - DNA, 545 bp, Unknown
  Bacterial polypeptide expressing nucleotide sequence isolated from the Sargasso Sea
tatgaaagaatctcttgaattaataaagcgaggcatcgatgaggtcttaactgaagacgaccttatttcaaaacttaaatctaaaaaacaactaactattaaagttggatttgacccaactgcacccgatcttcatcttggccacactgtgatcttaaataagatgaggcacttccaagacctcggtcataaggtagtttttttaatcggagattttactggaagaataggggacccatctggcaaaaacaaaacacgtccatcacttgataaagaggaacttgaaaaaaatgctaaaacttactctgatcaagtatttaaaatcttaaataaagatttaacagatatcagatttaactctgagtggtgtgaagatctgggtgccgatggaattattgggcttgcatcaaaatataatttaggccgtatgcttgaaagagatgatttttcgaaacgctacaaagcaaatcaacaaattgccattcacgagtttttatatcctttaattcaggcttatgactcaatcgctttaaatgcagatgtgg

SEQ ID NO: 296032 - DNA, 798 bp, Unknown
  Bacterial polypeptide expressing nucleotide sequence isolated from the Sargasso Sea
attttacaattaataaaatgttgagttttgatagtgtaaaacttcgtttggatagagagcagtctttaagttatatggaatttaattacatgatacttcaagcatatgactttcttgaattaaataaaaaacagaattgtcttcttcaaattggaggatcagatcaatggggaaatatagtcaatggtgttgatttaatcaaaagatattcatctaaagaagtttttggattgacaacacctcttataactctagcttcaggagcaaaaatgggcaagactgaaagtggtgcagtatggttagataaaaacctactatctacctatgactattggcaattttggagaaatacagatgatcgagaagttatcaagtttctaaaaatgttcacagatttatctatagaaaaaatagaggaaattaaaaatgaaaatattaatgatttaaaaattttattagctaatgaagctacaaagatgttgcatggggaaattgaaacaaaaaaagttgaaaaattagcaaaatctacttttaaagaaaattcaactggagaacatttacctagtgttaaaattggaagtgacttaataggaaaagatataattagcttgatagaatatacaaataacgagttatcaaaaagtgaaataagaagattaattcaaaacaatggaattaaaattgataatgaaaaaattgaagatggaaaattattaataagtaaaaaattgtttgtaaataaaggttttattaaactttcagttggaaagaaaaagcattttaaaattattatttaat

SEQ ID NO: 296033 - DNA, 741 bp, Unknown
  Bacterial polypeptide expressing nucleotide sequence isolated from the Sargasso Sea
cgcttagttatatggaatttaattatatgatacttcaagcctacgattttttagaattaaataaaaaagaaaattgtgttttgcaaataggtggttcagatcaatgggggaacattgtaaacggtgtcgaacttattaaaagatattctaataaccaaacatatggattaacaacaccattgattactttagctacaggtacaaaaatgggaaaaactgaaaatggtgcaatttggctagacgaaaaatatttatcagcttatgactattggcaattttggagaaacgttgatgacagagatgtaataaaatttttaaaaatgtttactgatattgatgtaagtgaaattaattctttagagggaaaaaatattaatgaattaaaaatattattagcaaacaaagctacaactatgttacatggagaagatgcagctcaaaattctgaacaagcagcaaaagaggcattttctggaaattctttaggatctaacttaccaagtattaaaattgaaactaaacaattagagaataatatcaatataatcgatttgataattttatctaaagtggaaaattcaaaaagtgagataagaagattaattaagggtaaagcgattaagattaatgacactatagtttccgatgaaaaatttattattaatcagcaactatttacagagaattatttaaagctctctataggtaaaaaaagacacattaaagttgaattaagttaat

SEQ ID NO: 296034 - DNA, 781 bp, Unknown
  Bacterial polypeptide expressing nucleotide sequence isolated from the Sargasso Sea
tttgaaagtgttaaaactagattggatagggaacaatcattaagctatatggaatttaactatatgatcttacaagcttatgattttttggaattaaacaaaaaagaaaattgtactttacaaattggtggttcagatcaatggggaaatattgtaaacggaactgaattaataaaaagacattcaaacaaacaagcttatggactaactactcctcttattacattggcatcaggagctaaaatgggaaaaacggaagctggagcagtttggttagataagaaattattgacaccttacgattattggcaattctggagaaatactgatgatagagatgtaattaaatttttaaaaatgttcacagatttaaatattgatgaaataaatcaaatgaaagatgaggatattaataagctaaaaataaaattagcaaatgaaactacaactatattgcatggtaaaaatgaagccttgtctgctgagaaaactgcaaaaaaaacttttgaagaaaactcattaggagaaaatcttccttcaatagatatcggattagagaatgaaaataccaatataaatatagttgatttaattattttatctaaaactgaaagttcaaaaagtgaaattcgaagacttattaaaggtaaaggtattagaataaataatgaaataattaatgatgaaaaattttcaatacaaaaaaaatccttcggtaagaacaattttcttaaattatcaattggtaaaaaaaaacatataaagattaaattagcttagt

SEQ ID NO: 296035 - DNA, 563 bp, Unknown
  Bacterial polypeptide expressing nucleotide sequence isolated from the Sargasso Sea
tatgaataaatttttaaaagaatttaaagatagaggttacttttatcaatgcaccgatgaaaatgaattatcttctttattagataaaaaaaagattaaagcctacattggttttgattgtacagctgaaagtttacatgttggcagcctcctgcaaataatgtgtctacgaatgcttcaaaaacatggacaccaaccaattgtattgttaggtgggggaacaacaagaattggtgacccatctggtaaagataaaacacgaaaaattttaagtgaagatgaaattgagagaaattccaaaaatattgaaagaactttaaaaaaatttttaaatacaaatgataaaaatgtaaaaccaatatttgttaataattatgagtggctcaaaggtttaaattacatctcttttttaagagatattggaaaacactttacaataaataaaatgttaacatttgaaagcataaaaacaagattggatagagaacaatctctaagttacatggaatttaattatatgattttacaagcttatgattttttagaacttacaaaaaagaaat

SEQ ID NO: 296036 - DNA, 703 bp, Unknown
  Bacterial polypeptide expressing nucleotide sequence isolated from the Sargasso Sea
gatttttatcaattatttaaaaaagaaaattgtatattacaaataggaggctctgatcaatggggaaatattgttaatggaattgagttaataagaagaattcttaaaaaagagtcatttggattaacatctcctttaattactttagcctcaggagcaaaaatggggaaaaccgaaaaaggagctgtttggttaaatgaaaaattattttctgtttatgattattggcaattttggagaaatgttgatgatcgtgatgttaaaaaatttttatatttttttactgaaatagaatatgagaaaattaatacactttgtgaaaaagaggaaaacattaataacttaaagatattattagctaaccaagctacaagtattcttcatggaaagtcagctgcaaaaaaagcacagaaaacagctaaagaaacttttgaagataaaagcttaagtttaaatctaccagagataaaggttaactctgaagaggtaaaaaagggtatatctcttatagatttgttatcagttaatggggtcatgagttcgaaaagtgaagctagaagagcaatactaaataatggattaaagataaatgataaattagttggagatattaagagaactttaaagtcagaagattttgaagaaaaaattttaaaaatttcctacggaaagaagaaacattttaaagttaaaattatttagt

SEQ ID NO: 296037 - DNA, 673 bp, Unknown
  Bacterial polypeptide expressing nucleotide sequence isolated from the Sargasso Sea
aaaagtaaaaattgtttgatgcaaattggtggttctgaccaatggggaaatatagtaaatggtgttgaattaattaaaagacaatctggaaatcaagtttatggtttaacaacacctttgataactttagcatctggagctaaaatgggtaaaacggaaaaaggagctgtttggttagataaaaaaatattacctccctatgactactggcaattttggagaaatactgatgatagagatgtaattaaatttttaaaaatgtttactgatatgcctttaaatgaaattgaaaatattcaagaaaacaatattaatgacttaaaaattatacttgcaaataaagcaactgaaatgttacatggtgaaaaagctgcgaaagaatcagagaaaatggcagtatcaacatttaaaaatgattcttcaggagaaaatttaccaaatattaaaattaataaagaaattttaaataaaaaaatagtcgatctagcatcttatgtggcaaaagaaatttcaaaaagtgaaataagaagattgataaactcaaatggtataaaaattaataatcaattagtaaatgatgaacaatttattattaataaatcattatttttagaaaaaggctttataaaattatcaataggaaaaaaaaaacatttcaaaattataatttaat

SEQ ID NO: 296038 - DNA, 687 bp, Unknown
  Bacterial polypeptide expressing nucleotide sequence isolated from the Sargasso Sea
gatactacaagaaaattaataaaggaaactgaaattaaaaataatattaaaagtataaaaaaagtttttaataaaattttagatacttcaaataaaaatacttccccgatatttgtagataacgcaaattggttaacaaaattgaattatattgaatttcttagagatacaggcagtcactttacaattaataagatgcttacttttgacagcgtaaaattaagattaaatagagaacaatctctcagttatatggaatttaactatatgatcttacaagcatatgacttctatcaactatttaaaaataataattgtattcttcaaattggtgggtcagaccagtggggaaatattgttagtggtgtagatctaattagaagaaaattacaaaaagaggcttatgggcttacatcgccgttgataactttagcctctggagcgaaaatgggtaaaactgaaaaaggagcaatttggttaaacgaggataaactttctccgtatgattactggcaattctggagaaatacagatgatcgagacgtaaaaagatttttaaatttttttaccgagacacaaccaaaagaattaaatgagattattaataaagagaagaatatcaacaatttaaaaatattattagctaacgaagctactaaaatacttcatggtgaagcagcttcaaaa

SEQ ID NO: 296039 - DNA, 787 bp, Unknown
  Bacterial polypeptide expressing nucleotide sequence isolated from the Sargasso Sea
catcttgtccagttgatgctggtgcgagccctccaggaacgcggccataagccgttgctcctcgtcggtggggcgaccggtcttattggtgatcctaagatgaccggcgagcgacatatgaacgatcgggaagtcgttgctgagtgggtggagtcgatcaaggaccaggtgagcaagtatgtcgatactgatggccggaatgctgctcagatcgtcaataattacgactggacggttaagtacacagccctagacttgctgcgcgacgtcggcaagcatttctcagtcaaccgtatgctcgcccgcgacgtcgttgcccgacgactagaaagcggtatctcatacacggagttcagctacgtcctgttgcagtcgctggacttctacgaacttcataaacgctatggctgtacgttacaaacgggtgctcaggatcagtggggaaacatcactgccggtgctgagttcattcgcaagacgaccggtgacgttgttcatgggttggtgactccgttgattactaaggccgacggtaccaagtacggcaagacggagtctgggacggtatgggtggatcctgagttgacgagcgcctatgcctttcatcaattcttcctcaacgcggaggactcaaaggtcattgagtacctcaaaatctttagccctcgttctcgggaggagattgaggatcttgcccgtaagactgaggaggaaccgtggcgtagagcggctcagcattgccttgcggacgacctgaccgatctggtgcatggtgggagcagcgtaa

SEQ ID NO: 296040 - DNA, 475 bp, Unknown
  Bacterial polypeptide expressing nucleotide sequence isolated from the Sargasso Sea
atgaataaatttttaaaagaatttaaagatagaggatatttctatcaatgtactagtgaaactgacttatctaatttattagataaagaaaaaattaaagcttacataggatttgattgcactgctgaaagtttgcacgttggtagtttgttacaaattatgtgtttgagattgttgcaaaaaaatggtcatcagccaattgtattattgggaggtggaacaacaagaataggtgatccctcaggaaaagacaaaacaagaaaaattttagatgaaagtgaaattgaaaaaaatattaaaaatattcaaaatattctaaaaaaatttctagataatgatgatccaaaaacaaaacctatttatgtcaataattatacctggcttaaagatttaaattatatttcttttctaagagatataggaaaacattttaccatcaacagaatgcttacatttgatagtgtaaagctaagat

SEQ ID NO: 296041 - DNA, 903 bp, Unknown
  Bacterial polypeptide expressing nucleotide sequence isolated from the Sargasso Sea
tataaaaaacattgaaaaagttttcaaaatttacttaaaaactaataatacaaaattaaaacctatctttgtgaataattataaatggcttggaaaattaaattacataaaatttttaagagaaattggaaaacattttactattaataaaatgttaagtttcgatagtgttaaattaaggctagatagagaacagtcgttaagttatatggaatttaattacatgattttacaagcttatgattttttagaactgaataaaaacaaaaattgtctcatgcaaataggtggttcggatcagtggggtaatattgttaatggtgttgagctaattaaaagacactcttcaaaacaagtgtttggattaactacccctttaataactttagcttcaggaactaaaatgggtaaaacagaaaaaggagcagtctggcttgatgataaacttttatcatcctatgattattggcagttctggagaaatacagatgatagggatgtcttaagatttctaaaaatgtttaccgatttagatttaaatagaattgagaagttaaagaatgaaaatattaacaaattaaaagtcattttggccaatgaagctactgctatgttacatggtaagtcatcagctgctaaagcagaaaaaacagcaaaaattacttttgaaacaggaggcgtcggatcaaatttacctgaaattaaagttaagaaagttgatgtaaatcaaggaattaaaattttggactttttatcaattaacaaaattttttcatcaaagagtgaagcaagaagagcaattaaaagtaatgccttgaaaattgacaatataattataaccgatgaaaataagataattagattagatgattttaaaaataaagattttttaaaaatttcttt

SEQ ID NO: 296042 - DNA, 412 bp, Unknown
  Bacterial polypeptide expressing nucleotide sequence isolated from the Sargasso Sea
tatgaatagctttaactggaaattaataacccgcggcatagaagaagttcttacagaggatgatttaacagcaaagctagagtctaaaaaacagttaacagtaaaagttggatttgatccaaccgctccagatcttcatcttggccatacagtgattttaaacaaaatgagacactttcaggaacttggccataaggtagtttttcttattggagactttacagggagaataggggacccttctggcaaaaataagactagaccaactcttcaaaaaaaggaattaaaagaaaatgcaaaatcttattctgatcaggtatataaaatactcaaaaaagatttaactgaaataaagttcaattcagaatggtgcgacaagctgggagctgatgggattattgagcttgcttct

SEQ ID NO: 296043 - DNA, 826 bp, Unknown
  Bacterial polypeptide expressing nucleotide sequence isolated from the Sargasso Sea
tatgaattttaaatcagaatttattaacgaaattaatgaaagaggatttatatatcagcatatagatattgaagatctagataagttgatgtcaaagaacaaaatatcaggatatataggttttgatataactagtgacagtttacatgttggaagcttaattcaattgatgctgttacattggcttgatttttatggtcataaatcaattgcattaattggaggtggtaccaccttaataggtgatccttccggcaaagatcagacgagaaaaatattaagtaaaaaagagattgataacaatattactaacatagaagttacttttagtagatttattaatctccaaaataattcattaataattaataattatgattggctttcaaatctcaattatatagattttctaagagagtttggctcaagaataactttgaataaaatgcttacttttgactcagtaaaaactagattggatagagagcagccattaacaattttggaatttaattatatgcttcttcaagcatatgatttttattatttaaacaagaatcttaattgtgttttacaaatgggtggatcggaccaatggggaaacatattaagtggtgtagatttaataagaaaaattaataaaaaagaggcttttggtattacttcacctcttattacaaacagtgatggttcaaaaatgggtaaaacagcagatggagctgtttggcttaataaagagaaaatatcaagtttggattttttccaattttggagaaatgtaaatgataaagatgtttcgagattcttaaatttatttactaagctt

SEQ ID NO: 296044 - DNA, 958 bp, Unknown
  Bacterial polypeptide expressing nucleotide sequence isolated from the Sargasso Sea
cctattgttcttttaggtgggggaaccacactcattggagacccatcaggaaaagattctactagaaggatattgaagcagaaagatataaaaaaaaatatattaggtattaaaaaattatttgaaaaattattaaatcataaagataaaaaaactaaaccaattttcgttgataattattcttggcttggaaaattaaattatattgaatttttaaggaatattggatctcaatttacattaaataagatgttaacctttgatagcgttaaatcaagactggaaagagaacaatccttaagttacatggagtttaattacatgattctccaagcatttgatttttacaaactttatgaaaaagaaaagtgtttgttacagttgggaggatctgatcagtggggaaacatagttaatggggtagatttaattagacgtatacttaagaaggatgcttttggtttaaccagtccattaataacgttatcttctgggcaaaaaatgggtaaaactgaagagggtgcagtttggttaaatgaaaaattattttcgccatacgactattggcagttttggagaaattctgatgatagagatgtagtcagatttttaaaatttttcactgatatcaagattcaggatatacaaacatttgaaaaagaaaaacaaattaatgaactgaaaactatactagcaaatgaaactacgaaaatacttcacggaaaaataaaatcactaaaagctgaaaaaacagcagtagatatttttaaattaggtaaaattaatgacaatcttcccacgaaaaaaattacaagaagagatattgagactggcgtaaaactattagaattacttgttaatacaaatatcatgaactcgaaaagtgaggctagaagagcaattagcaataaaggtattaaaattaatgattttactattgaggatgagaataaaactt

SEQ ID NO: 296045 - DNA, 878 bp, Unknown
  Bacterial polypeptide expressing nucleotide sequence isolated from the Sargasso Sea
gagaggattaatttcagatgaaactccaggaatcagaaagattctttcttctgaaaaaataagtggatatattggatttgacccaacttcaaaaagtcttcacattggaaaccttttgccgataatgaatcttatgagaatgcaaaaatatggtcataggcctattgcggtagtcggaggcggtactggactaattggggatccaagcgggaaatcatctgaaagaaatatattaagtaagagtgcaattgaagagaatttatactccataaaatctcagctggagaaattcttagattttagcaaagatataaaaaatccggctcttattttaaataatgcggaatggcttgaaaaaataaattatctagattttcttagagatattggaaaacatttcacaataaactatatgatgaaaaaagagtcagttaaatcaaggctatcaagagatactggaatatcttatacagaattttcatacatgacgttacaagcttatgattatctttatttatatgaaaatcataaatgtatacttcaaatgggaggtagcgatcaattaggaaatattatagctggagttgacctaataaataaaaaaaatccaggaaattcgaaccctcttgctcatggaatagtatttcctttaataacctcaagttctggtgaaaagtttggtaaaagtgctggtagtgcacctacattagaccccataaaaacttctccttataaactttatcaattttttattaatactcctgatgaggatgtaattaattacataaaatattttactaatcttaatgaatcaaacataaaagatattacaaatgaatttaaaagatatccgaaatctagaattgctcaaaagaaac

SEQ ID NO: 296046 - DNA, 592 bp, Unknown
  Bacterial polypeptide expressing nucleotide sequence isolated from the Sargasso Sea
tatgaataaatttttaaaagaatttaaagatagaggttttttctatcaatgcacaagtgaagatgaactatctaaacaattagatgaagaaaagataaaaggttacataggttttgattgtacagcggaaagcttacatgtgggtagcttactacaaataatgtgtttacgactacttcaaaaaaatggacatcgaccaatagttttacttggtggaggaactacaagaattggggatccatctggtaaagataaaacaagaaaaatattaagtgaagatgagattgaaaaaaatatcaaaaatatcaaaaatattttaaaaaaatttttagataatgatgatccaaatacaaagccaatatttgttaataattatacttggcttaaagatttaaattatatttcatttttgagagatatcggaaaacatttcacgataaatagaatgctaacatttgatagtgtaaaactcagattagatagagaacaatctctaagctatatggagtttaattatatgattttacaagcatatgactttcttgaattaaataagaaagaaaattgtatcttacaaatcggaggttcagat

SEQ ID NO: 296047 - DNA, 1201 bp, Unknown
  Bacterial polypeptide expressing nucleotide sequence isolated from the Sargasso Sea
atgtcccagctcgaggtggcgctagccgagatcaagcgcggagcggaagaaattctggtggaagaagaactggtcgccaagttgaaggaagggcgcccgctgcgcatcaagttggggatggacccgacggctcccgacattcatctgggtcataccgtgatcctcaacaagctgaagaccttccaggatctgggccatgaagtgatcctgctgatcggtgacttcaccgccatggtgggtgacccctccggcaagaacgccacccgtccgccgctctccgaagaggccatcaagcacaacgccctcacctatgccgagcaggcgttcaagatcctcgatcccgccaagacccgcatcgagtacaactcgacctggctgagcgagctgggcgcgaccggcatgatcaagctggcggccaagcagaccgtggcccgcatgatggagcgcgacgacttcaagaagcgctacagcaacggccaatccatcgccattcacgaattcctctatccgctgctgcaaggctatgactcggtcgcgctgaaggcggacgtcgagctcggcggtaccgatcagaagttcaacctgctgatgggccgcgagctgcaaaaagatgccggcatggcgacccagtgcgtgctgatgatgccgctgctggtgggcctggatggcgtcaagaagatgtccaagtccgcggccaactacatcggcgtgcacgacgccccgggtgagatgttcggcaagatcatgtccatcaccgacgatctgatgtggaactactacgagctgctctccttccgtccgctggctgaaatcgaagagttcaaggcgggcattgccgccggcactctcaacccgcgcgacgtgaagatctggctggccaaagagatcatcgcccgttatcacgacgaggcggcggccgaagcagcccacgaagacttcacccagcgcttctccaagaacgccattccggacgaaatgccggaagtcgagctggcactggaaggcgaagggctggccatcgccaacctgctcaaagacgccgatctggtagccaccacctccgaagcactgcgcatgatcaagcagggcgcggtcaaggttgacggcgagaagctggacgatggcaaggcactcatcggtgccggtaccgccgtctaccaggtcggcaagcgcaagtttgcccgggtgaccgtcaagtaag

SEQ ID NO: 296048 - DNA, 972 bp, Unknown
  Bacterial polypeptide expressing nucleotide sequence isolated from the Sargasso Sea
aaagattttaccttgaaaaagaaattgagaaaaatattagaaatattcaaaaagtttttaaaatttttttaaaaaataaaaattcaaaaataaaaccaatttttataaataattataaatggctcggcaaactcaattatataaaatttttaagagaagtaggaaaacattttactgtaaataaaatgttaaacttagaaagtattaaacttagattagaacgagaacaatcattaagttatatggaatttaattatatgattttacaagcatatgattttctagaactaaataaaactaaaaaatgccaacttcaaataggaggttctgatcaatggggaaatatagttaacggagttgaattagtaaaaagatattcaaacaaacaagtttttggactaaccacacctttgcttacattgggctcaggatctaagatgggaaaaacagaaagaggtgctatctggttagataaaaaacttttatcttcatatgattattggcaattttggagaaatactgatgacagagatgttataaagtttttaaaaatgtttactgacttaaatttagaaaaaatagaaaaaattaaagataaaaatataaatcaactaaaaatattattagccaatgaagccactacaatgttacatggaaaagatgcagcaaataaagctgaacaaactgcaaaaaaaacttttgaaaataaatcgattggaaacgaccttcccacaataaatattgaaaaagaaaaatttgctaaaggaataaatataatggatattgttgttctttcaaaattattaaattcaaaaagtgaagttagaagaacaataaaaaacaggggtataaaaataaataataaaacagtcgaaaccgatcaattaaatatttttttaaatgattttgataaaaatattttaaaactatcacacggaaaaaaaaatcatataataattaaaataatttaaa

SEQ ID NO: 296049 - DNA, 853 bp, Unknown
  Bacterial polypeptide expressing nucleotide sequence isolated from the Sargasso Sea
gctaggtaaattaaattacattaaatttttacgagaaataggaaaacattttacaataaataaaatgctaacctttgatagtgttaaattgcgtttagatagagagcagtcattaagttatatggaatttaattatatgattttacaagcatatgattttttagaactgaataagtcaaaaaactgtgtaatgcaaataggtggttcggatcaatggggaaatattgttaatggagttgaattaattaaaagatattctggtaaacatgtttttggacttacgactcctttgattactttagcttctggtgctaaaatgggtaaaacagaaaagggagcgatttggttagataaaaaacttttgtcatcatatgattattggcaatactggagaaacacagacgatagagatgtgttaaggtttattaagatgtacacagatctacctttggaaaaaatagaagaaataaaaaataatgatattaacaaattaaaaataatattagccaatgaatgcactaaaatgcttcacggtagtaaagaagcaaaattatcagaaaaaactgcaataaaaacgttctccgaaagatcaactggcgaaagtcttccagttattaaaataagtcagaatcaattagatttaagtcttgatatagcaagtttaattttattgtctaatcttgaaagctctaaaagtgaaataaaaagaattattaaaaacaaaggtattaaaataaataattctacaatagaaaatgaaaagttaataattacaaatgatctctttgataaagaaaaatctcttaaactttcagttggaaaaaaaagacatgttaacgtaaaattagtttag

SEQ ID NO: 296050 - DNA, 715 bp, Unknown
  Bacterial polypeptide expressing nucleotide sequence isolated from the Sargasso Sea
tttgagctttcttgagacctttgaagaacgcggtttttttaaacagaccacgcaccctgaagaattaaaaaaacgtgtcaaatcaggccggatttgtgcctacatcgggttcgacccgaccgcggattcactccatgtcggacaccttatccctctgatgggactcacccacctgcagagggacggacaacgagtcatcgccctgatgggtggaggaactgcaatgatcggggatcccagcggcaaaacagaaatgcggaagatgctcacagaaaagcagttggaggataatgtcgggaagatcaaacctcagatggagcgcttcctggatttcagtgaagactcggaactaatcaataattctgaatggcttagaaatctaaactacatcgattttctccgggacatcgggcgccatttttccgtcaaccgcatgctttccttcgagacttacaaagtccgcctggaaacagggctttccttcctggaattcaactaccagcttttgcaggcatatgactttttggaactcaacaaacgctatcaatgcatcctgcagatgggcggtgacgaccagtgggtcaatatcctttcaggagtggatttgatccggagagtcagtcaaaacgaagccttcggttggacctatccgttgttgaccaccgcttccggaagaaagatggggaaaaccgtaaaaaggggccgtctggcttga

SEQ ID NO: 296051 - DNA, 913 bp, Unknown
  Bacterial polypeptide expressing nucleotide sequence isolated from the Sargasso Sea
tttgatcaataatctagattggacgcagaatcttgacctcttgacttttttacgaacagtgggaaagcatttttcggttaactcaatgattcaaaaagagtcagtgaaacagagaattgaaagggaaggagaagggatctctttcacagaatttagctacatgctcctgcaatcgctggattttgccgaattgcataagagatttaactgcactattcaggttggtggaagcgatcagtgggggaatattacagggggtatagatctgacccgtcggatgcatcagaagcaggtcttcggagtaaccacgcctttggttactaaagctgatggaacaaaatttggcaaaacagaaaagggaactatttggattagtgctaagaaaacctcaccctatgccctttatcagttttggttaaacgtttctgacctagatgtatacaaatacctcaggtactttacattcctgagtgctaaggaaattcgcgagattgaattggctgacaagtcgtcagaaagcaaacctgaggctcaaggcattctcgcaagcgaggtcacaaagcttctccatggagcagaaggcttgactgctgcaaaaaggataagcgacggacttttctcaggagatatttccaaactaactcgaggagacctcgagcaattagatttggatggtttgcccaaaacttctttcgacgaggaacgggtggatattgttcaggctttagtccgctgcgagttggcaaaatcaaacaaaatggcgagagaatttattggtaacaatgcgattagcgtgaatggtagctcgataagctcgacagatcttatcttagattccaataacgcgcttgacggagggtattttgttctccgtcgaggtaagaaaatgtttcatttggtaaagcttaagtaa

SEQ ID NO: 296052 - DNA, 1165 bp, Unknown
  Bacterial polypeptide expressing nucleotide sequence isolated from the Sargasso Sea
aaattatgtcattctcagagtattgcggcatatattggttttgattgtacagctgatagtttacatgtaggctcactaactcagataatgatgctaaggcaccttcaaaaaactgggcacaaacctattgtcttaatgggtggcggaacgacaaaagttggagatccttcaggaaaagacagtgcaagaccattactgactataaatgacattaatcttaatatggaaagtattaagtctatttttgagaagtatttggtttttggtaaaaatacaagtgacgctgtaatggttgataattctatttggcttgacaaacttgaacttatttcttttttaagagattacggaaagcacttctcaattaatagattactaagcatggaatctgtaaaacaaagacttgaaagagaacaaccattatcttttttagaattcaattatgcaatacttcaggcttatgattttcttgaattaaatcgtaaatataactgctttcttcaaatgggagggtctgatcaatgggggaatattatatcaggaattgatttaactagaagaattcaaagtaaagaagtatttggtttaacttcacctttaattacaactgcatctggttcaaaaatgggcaaaacagcaaatggcgctatttggcttaatgaagataagctaagtacttgggatttttggcaattttggagaaatacagaagataaagatgttattagatttttaaagttatttactgaacttcctatatctaaaatccaagaaattcagaaattaaaaggagctcaaattaatgatgcaaaaattttacttgcaaatgaagtaacaaaactgtgtcatggaacagaatcggccattaaagcttataattcagcaaaagaaacttttgaaaaaggaaaactaggtttagatcttccaaaatttaaggtagtattatctaaaaatgatagtatctccctaatagaagctctttgtaaaacagaattatgtaagagcaaaggtgaggcaagaagattaattaatggcggtggtgctagaataaacaatcagtcttttagagatgaagatcacgtaatacaaaaaagtgactttgatgaaactggtacattaaaaatttcatcaggaaaaaaaaatcatgctgttttgtacatttagc

SEQ ID NO: 296053 - DNA, 784 bp, Unknown
  Bacterial polypeptide expressing nucleotide sequence isolated from the Sargasso Sea
gatgcttacttttgaaagtgtcaaaacaagatgggatagagaccaatcgctaagttatatggagtttaactatatgattttacaagcatatgatttcttagaattaaacaaaaaagaaaattgttcattacaaattggtggctcagatcaatggggaaatattgttaatggaactgatcttataaaaagacatttaaataaacaagcatatggattaacaactcctcttattactttggcttcgggagctaagatgggaaaaacagaaactggtgcagtttggttagatagaaaactattatcaccttatgagtattggcagttttggagaaatattgatgatagagatgtaattaaatttttaaaaatgttcacagatttaaatatagatgaaataaataaaatgaaagatgatgatattaatcaattaaaaattaaattagcaaatgaaactacatcaatgttgcatggaaaagatgaagctttatctgctgaaaaaactgcaaagaaaacttttgaagaaaattcattaggagaaaatttacctactgcagaaataaaattaaatagtgaaaatggtatgaatataatcgacttagttattataacaaaaattgaaagctctaaaagtgaagtaagaagactcattaaaggaaaaggtctaagaataaataataagattattaatgacgaaaaatttttaatacaaaaaaaactttttgttaataattttataaagttgtcaatcggtaaaaaaaaacacgtaaaaataaaattatcttaa

SEQ ID NO: 296054 - DNA, 1297 bp, Unknown
  Bacterial polypeptide expressing nucleotide sequence isolated from the Sargasso Sea
atgaataatcaatttaataacgtaattgaagaatttagatggagaggtagccttaaagattacacaaccaaagcagactcaattttgatcaatgaaaaaattacttgttataacggctttgatcccacagcaaaaagtctacatattggaaacttgataccaatactaggattacaaagattacaaaaatatggtcatacacctatcgtcattgttggtggaggaacaggaatgatcggagatccttcaggaagaactgatgaaagaaagttaatgagtgaagcattaatagaagagaatcttgcaggaataaaaggtcagttagaaaaatttttagattttgataataaaaaaaatccagctcagataattaataatgctgagtggttaaatcaaatcaacctaattgatttcttaagagatactggtaaatttttcaacattaacaatatgcttggtaaagattcagtaaaaaatagattatctagagatgaaggcatttcatttacagaatttagttatcaattattacaagcttatgatttcttgtatttatttgaaaattataattgcagcttccaaatgggaggatctgatcaatggggaaatatagtagctggtattgacctaattagaaagaaaaatccattaaataagaataaggctcatggaataacttaccctctattaaccacatcctctggtgaaaaatttggtaaaagtatagatggagcagtaaccttagatccaaatgtaacaattccttataaactttttcaatatttttataatactagtgacgatgaagtattggattatataaagttatttactgacattaacattgaagaattcaacgaactagaaaaaataacattagaatcaccatataaaagagaagctcaactatttctttcaaaagaaattacacgaatagttcacggtgaaaaaggaatgaatagtgcacttaggcaaacagaaggactcaatcaagggaaatgggaaatcttaagtgatgatgatttttctgatttatatattggttcagaaagtataaatcagctttcaagaaaaaaattatctaatggagtaaacatacaagaactgactgttgactatgacttatgtaaatctttaggtgagtcaaaaagactaattaaccaaggcggaatttcattaaatggaaacaaaataacagatccagaaatgaaagtatttgaaaatgaccttaaagcaaataaaatattgattatttcaaaaggtaaaaaaaatcataaaataattaaagttgattgag

SEQ ID NO: 296055 - DNA, 1198 bp, Unknown
  Bacterial polypeptide expressing nucleotide sequence isolated from the Sargasso Sea
atgaatgactttaaaaaacaattagaaattataaaacaaggtattgatgaaatcataggtgaagatgatttaattgaaaaacttaaatctggtaaaaagttaacgatcaaagttggttttgacccaacagcgcctgatttacacgttggccatactgtaattttaagaaaaatgagacagtttcaagatcttggccataaggtaatttttttaataggtgattttactggcaaaatcggagacccaagcggaaaaaataagacaagaccacctctaactaatgatgaaatcaaagctaatgccaaaacttatgaagaccaagttctaaaagttcttgacccagacaagactacgattgattttaattctcgttggggagacaagatgtctgctgcagatatgattaagcttgccgctcaatcaacagttgcacgtatgattgaaagagatgatttctcaaaaagatataaaaacaatcaaccaatatccattcatgaatttctttatcccttaatgcaaggttatgactcagttgaattggaagttgatgttgagcttggcgggacagatcaaaaatttaatcttctagtaggcagagatctacaaaagaatgtaggacaatctccacagacaataattacgttacctctgttagaaggtttagatggagtaaagaaaatgtctaagacagaagaaaactatataggcataaccgaaaaggctgatgatatttttggcaaaacaatgtccattccagatgaaataatgatgaaatggtttgatctcttaagtttaagaccgttagaggaaataaaaaaagttgagaaagatataaagggaggggctaaccctcgtgatgcaaagattgatttagctatggagctaacaactagatttacttctgaaacagaagcagagaaagcaaaagataatttctttaaaaaattctcaagcaatgaactgcctagtgacattgaagaaaaagaaattagctatactgatatgcctgcattaccaaatttactaaaagatttgggtatggttggtagtacttcggaagcaataagattgatagagcagggtgcagtaaaaatagatcaagaaaaggtgacttcaaaagatcaagaagttagctttgaaacaaaaaaattaatacagataggaaagaaaaagtttctttacgtattttcaaaataaa

SEQ ID NO: 296056 - DNA, 1237 bp, Unknown
  Bacterial polypeptide expressing nucleotide sequence isolated from the Sargasso Sea
atggaaaattcgtacttatctgaattcaaaaatagacaatatttcaatcaatgtactaattttgaagagttagaacacttgatggataaaaagaaaattagagcatatattggttttgattgcactgctccaagcctacacgttggcagccttcttcaaatcatgtgcctaagattattacaaaaacatggtcaccaaccaattgtattgttaggtggcggtacaacaagaataggagatccatctggaaaagaagaaacaagaaagattctttctgaaaaacaaattgaaataaatataaaaaatatcaagaaggtgttcaaaatttatttaaaaacaaataattcaaaattaaagccaatttttgtaaataattataaatggcttaaaaaattgaattatataaaatttcttagagaaattggaaagcattttactgttaataaaatgttaagttttgaaagtgtaaaatcaagattagaaagagaacaatcgctaagttatatggagttcaattatatgatccttcaagcttatgattttcttgaacttaataaaagtaaaaattgcataatgcaagtcggtggttcagatcaatggggtaatattgttaatggagttgagctcattaaaagatattcaagtaaacaagtttttggattaacaactcctttgataaccttagcatcaggatcaaaaatgggcaaaacagagaaaggagcggtctggttagataaaaaattgttatcagcatatgattattggcaattttggagaaatacagatgatagagatgttattaaatttcttaaaatgtttacagatttaagtctggaaaaaatagaaaatattaaaaccaaagaaattaattttttaaaaatattattagcaaatgaaactacttcaatgttgcatggagctaaagcggctagacaagctgaaaaaactgcaaaaaatacttttggaaataaatctataggtgaagaattgccttcagtaagtataagcaaaaatcaaatcgaaaaaggtataaacattatagatattgttattttatccaaaatgttaagttcaaaaagtgaagttagaagaatgataaaaaataaaggaattaaaataaacaatattaccattgatgacgaaaaaaaagagatttctacaaaagattttaaagaaaatagcatgttaaaattatctttaggaaaaaaaaaacatactgtttttaagattaattaat

SEQ ID NO: 296057 - DNA, 841 bp, Unknown
  Bacterial polypeptide expressing nucleotide sequence isolated from the Sargasso Sea
ttgggaaaattaaattatattaaatttttaagagaaattggaaaacactttacaataaataaaatgctaagttttgacagtgttaagttacgtttggaaagagaacagtccctaagttatatggaatttaattatatgattttacaagcttatgatttcctagaacttaacaaaactaaaaattgcttaatgcaaataggtggttcggatcaatggggaaatatagtaaacggggttgatttaattaaaagacaatctggtaatcaagtttatggtttaacaactcctttgattactcttgcatcaggtacaaaaatgggaaaaactgaaaaaggagctatttggttggataaaaaacttttatctccatatgattattggcaattttggagaaatacagatgacagagatgtaataaaatttttaaagatgtttactcaaatttccttaatggaaattgataaagtaaaaaaaaataatattaatgatctaaaaatattacttgccaatgaagcaacaacaatgctccatggaaaaaaagaagcgataaatgcagaaaagttagccaaatccacatttaaagaaaattcctctggagaaaatttacctagttttaaaattgaaaatattatgaataagaatattgttgaaatattgtcttatgttaacaaagatattagtaaaagtgaaattagaagattaattaaatcaaggggaattaaaatcgagaatcaaactgttattgatgaaaaatttatattagatgaaaaattatttaaagaaaaaggttttgtaaaattatctttaggcaaaaaaaaacattacaaaattgtttgttaat

SEQ ID NO: 296058 - DNA, 801 bp, Unknown
  Bacterial polypeptide expressing nucleotide sequence isolated from the Sargasso Sea
tcaccataaatagaatgctaacatttgatagtgtaaaactcagattagatagagaacaatctctaagctatatggaatttaattatatgattttacaagcatatgactttcttgaattaaataagaaggaaaattgtgttctacaaataggaggttctgatcaatggggaaacattgttaatggagttgagcttataaaaagatattctaataatcaaacctttggattaacaactcccttaattacactagcaactggtgctaaaatgggaaaaactgaaaatggagccatttggttggatgaaaaatacttatcagcttatgattactggcagttttggaggaacgtagatgatagagatgtgattaaatttttaaaaatgtttaccgaaattgaaattaaggaaatagaaacaattaaagataaagatataaatgaattaaaaatactacttgcaaataaaaccacagaaatgttacatggaaaggaagcagctaaaaattctgagcaagcagcaaaagaagctttttccggcaacactctgggttcaaatatacctaaagttaatattcaatcaaataaaatagaagaaaaaataaatatagtagaccttgttttattatctaaactagaaaacacgaaaagtgaaatcagaagactgataaaagggaatgcggttaaaataaatgatgatgttatttcagatgaaaaattcgaaataaataaaaatttatttaaagataactatcttaaactatcccttggaaaaaaaaggcatattaaaatagaattaaattaac

SEQ ID NO: 296059 - DNA, 796 bp, Unknown
  Bacterial polypeptide expressing nucleotide sequence isolated from the Sargasso Sea
agaaattgaagtaaatataaataatataaaaaaagtttttaaaatttttcttaaaacaaataatccaaaattaaaaccgatttttgttaataattataaatggttgagtaaacttaattatataaattttttaagagatataggaagacattttacaataaataaaatgttatcatttgatagtgtaaaattaagattagaaagagaacaatcattaagttatatggaatttaattatatgattttacaagcatatgatttttatgaacttaataaatcaaataattgtaatttacagatcggtgggtcggatcaatggggcaatataattaatggtgttgaacttattaagagagaatctagaaagcaagcttatggactaactacaccactcataactttagcatcaggtgctaaaatgggaaaaactgagcaaggtgcagtatggttgaataaagaaatgttatcaccatatgattattggcaattttggagaaatacggatgatcgagacgtattgaaatttttaaagatgtttactgatttatctataattgagattgaaaatataaaagataaaaatataaatgaattaaaagtattactcgcaaataaaacaacagaaatgctacatggtaaaaaagtagcagaacaatcatggaaacttgcaaaaaatacctttaaagaaaattcaaccggtgaaaatcttcctggaattaaagttaataatagcattttatcaaaaaatatagtcgagcttatatcttttgtgaaacagggaaatttcaaaatctga

SEQ ID NO: 296060 - DNA, 1108 bp, Unknown
  Bacterial polypeptide expressing nucleotide sequence isolated from the Sargasso Sea
aaggttggttttgacccaactgcacctgatttacatcttggccatactgtaatcattaataagatgagacaattccaagaatttggccacgaagttatttttctaattggtgattacactggaatgattggtgacccttctggtgtaaacgagacgaggccagtgcttactgtagagcaggtcaaagaaaatgctcgaacgtatcaaaatcaaattttcaagatattagataaagacaaaaccagaatcgaatttaattcatcgtggatgaataaagtaacgagcgctgaactcatagatattgcttctaaatatactgttgcaagaatgctggagcgcgatgacttcaagaaaagattcaaatctgagaatccaatatccatccatgaatttatctatccgcttgttcagggctatgattctgttgccctagagtgtgatgtcgagatgggaggtacagaccagaaatttaatcttttagtcggaagacaccttcagcaactttatggccaagaaccacaaacaataatcacattgccacttttagaaggtttggatggtattaagaagatgtcgaaatctgcagataattatgttgcattaaatgattctggggatgatatgtttggaaagataatgtctgtttcagatgatttgatgtggagatattttgagcttgtgagttcaaagaatttaacggagataaagaatctaaaaaattccgtaaatgatggcgctaacccaagggatataaaatttctgctagcagaggaaattgttgaaagattccacaatcaatcagttgcaaaaaaagcaaaggaatctttcatgcagagatttcaaaaaggaggaatcccggaagatatagatttgacagaagtatcgataaaagatattcaaaatgatgatggcgaaataaatcttccaaggctcttagcgcataccaatcttgtcaattcaatttcagaaggacatcgtgcaattaaggctggatcagtaaggatcgatggggaaaaaataagccaaatatcactcaaaattcaaagcaaatctgagctcatcctttctcaaggaaaacgccgctttattaaagttaaaattatttaaa

SEQ ID NO: 296061 - DNA, 939 bp, Unknown
  Bacterial polypeptide expressing nucleotide sequence isolated from the Sargasso Sea
gtattaaaaaaattttgaaaaaactacttcattctaaaaataagaaaactaaaccaatttttgttaataactatgattggcttggcaaacttaaatatatcgactttctaagagatgttggaaaatatttcacaataaataaaatgcttacttttgatagtgtaaaacttagattggatagagagcaatctttaagttatacagagttcaattatatgattttgcaagcatatgatttctatcaactcatcaaaaagcatgattgtgttttgcaattaggtggttctgatcagtggggaaatatagtcaatggtgttgatctaataagaaggattacccaaaagaatgcttatggtttaaccaccccgctaataactttgtcctcaggagcaaaaatgggtaaaactgaaaaaggtgctgtatggttagatgaaaaaattttctcagcatatgaatattggcaattttggagaaatacatctgacgaagatgtgaagaaatttttaaaattttttacagaggatgacatagacaatttaacaatgcaaattgaaaatgaaaaagatattaataaattgaaaattttattagcaaataaagcaacaactattctacacggatccaaagctgcaaaagatagtgctgaaactgccaaagaaacctttgtaaaaggtggaataggtaaaaatatacctgaaaaaaaaattgaaaaaaaaattattatacaaggtattaatattatagaacttatttttcaaaataatttagctcaatctaaaagtgaagcaagaaggattttgaaaaataatggagttaaaataaatgatataacagttaacgatgaaaaaaaaattgttaatttagaagacgttcaagaaaataactttattaaattatccattggaaagaaaaaccacattaaggttaaagttatttagt

SEQ ID NO: 296062 - DNA, 958 bp, Unknown
  Bacterial polypeptide expressing nucleotide sequence isolated from the Sargasso Sea
tctatctgagaagcagatagaaaataatatcaataatataaaaaaagtttttaaaatttttcttaaaacaaataaccctaagttaaaaccaatctttgtcaataattacacatggttaagtaaattaaattatataagttttttaagagatattgggagacattttacaataaataaaatgttaagttttgatagtgtaaaattgagattagaaagagagcaatctttaagttatatggaatttaattatatgattttgcaagcatacgatttttatgagttaaataaatcaaataaatgtaatttacaaattggtggatcagaccaatggggaaatatagtaaatggtgttgagttaatcaaaagacaatctggtattcaagcgtacggtttaacaacgcctttaataactttggcatctggcgcaaaaatgggtaaaacagagaaaggtgctgtgtggttaaacaaagatatgttatctccttacgattactggcaattttggagaaatacagatgatcgtgatgtcataaaatttttaaggatgtttacagatttatcattgaatgaaatagataatattaaagataataatataaatgaattaaaagttctgcttgcaaatcatgcaacaaaaatgttgcatggaaaaaaagaagctgaagaatctgaaaaacttgctaaaaatacttttaaagaaaattcctcaggtgaaaatcttccaggtattaaagttgaaaatgatattttgtcgaaaaacatagttgagctaatttcttttgtaaataaaaatatttcaaaatctgaaattagaagattagtaaaatcaaatgctatcaaaattgataaccaaaatattaatgatgaaaaatatattattgatcttaatttgtttaaaaataaaggttttgtaaagttatcaataggcaagaaaaaacatttcaaaataattaattaa

SEQ ID NO: 296063 - DNA, 1198 bp, Unknown
  Bacterial polypeptide expressing nucleotide sequence isolated from the Sargasso Sea
tatgaatgactttaaaaaacaattagaaattataaaacaaggtattgatgaaatcatcggtgaagatgatttaattgaaaagcttaaatctggtaaaacattaacgattaaagttggttttgatccaacagcacctgatttacatgttggccatactgtaattttaagaaaaatgagacagtttcaagatcttggccataaggtaattttcttaataggtgattttactggcaaaatcggagatccaagcggcaaaaataagacaagaccacctctatctgatgatgaaataaaagctaatgctaaaacttatgaagaccaggttctaaaagtacttgatccaagcaagactacaattgattttaattctcgttggggagataagatgtctgctgctgatatgattaagcttgccgctcaatcaacagttgcacgcatgattgaaagagatgatttctcaaacagatataaaaataaccaaccaatatccattcatgaatttctttatcccttaatgcaaggttatgactcagttgaattggaagttgatgttgagcttggtggcacagatcaaaaatttaatcttttagtaggcagagatttacaaaagaatgtaggccaatcaccacagacaataattacattacctctattagaaggtttagatggtgtaaagaaaatgtctaagacagaagaaaactatataggcataaccgaaaaggctgatgatatttttggcaaaacaatgtccattccagatgaaataatgatgaaatggtttgatctcttaagtttaagacctttagaggaaataaaaaaagttgatgatgatataaaaggaggggccaaccctcgtgatgcaaagattgatttagctatggagctaacaactagatttacttctgaaaaagaagcagagaaagcaaaagataatttctttaaaaaattctcaagcaatgaactgcctagtgacattgaagagaaagaaattaactatactgatatgcctgcattaccaaatttattaaaagatttaggtatggttggcagcacttcggaagcaataagattgatagaacagggcgcagtaaaaatagatcaagaaaaggtggcttcaaaggatcaagaagtcagctttgaaacaaaaaaattaatacagataggaaagaaaaagtttctttacgtatcttcaaaataa

SEQ ID NO: 296064 - DNA, 1135 bp, Unknown
  Bacterial polypeptide expressing nucleotide sequence isolated from the Sargasso Sea
attgaagcaaaataaaccccttaaaatcaaggtcggttttgatcccactgcacctgatcttcacctcggccatactgtaataataaataagatgagacagttccaagagtttggccatgaagtcatttttctcataggtgattttactggcatgattggggacccatctggcgtaaatgaaaccagaccagtactcactaaagagcaggtcaaagaaaatgctcgtacttataaaaatcaaatatttaagatacttgataaaaataaaaccaggattgaattcaattcaacctggatgaataaaataaccagtgctgaactcattgacattgcatctaaatatactgtggctagaatgctggaacgagatgattttaagaaaagatttagatctgaaaatcccatttcaattcatgaatttctatacccacttgtacaaggctatgattctgttgcccttggttgcgatgtcgaaatgggaggaacggatcaaaaatttaatcttttggttggaaggcatcttcaacaaatttatggccaagaacctcagacaataataacgcttcctttactagaaggtttggatggcgttaagaagatgtcaaaatcttctaataattatgttgctcttaatgattctggtgatgatatgtttggaaagataatgtctatatcagatgatttgatgtggaaatattttgagctcttaagcacaaagaatttatcggaaatagaaaagctaaaggatgcaattaaaaagggtgccaatccaagagatataaaatttctattagcagaagaaattgtggagagatttcactcactatcaattgcaaaaaaagcaaaggaatcattcttgcaaagattccaaaaaggagggataccagaagatatagatttgatagaagtgtctattaaagatattgagaatgaccatggtgaaattaatctcccaagacttctagcgcacaccaatcttgttaattctgtgtcagagggacatcgagcaataaaggctggatcagtcaggattgacggtgaaaaaataagtcaaatatcattggatattcagagcgattccaagctcattctttctcaaggaaaacgacgctttattaaagttaaaattatttga

SEQ ID NO: 296065 - DNA, 1201 bp, Unknown
  Bacterial polypeptide expressing nucleotide sequence isolated from the Sargasso Sea
atgaaagattctgagttagcgctattattaaggggggtagaggaaattgttccagaaaaggaatttcataagaaattagatgaaaaaagatccttaagagttaaattgggttttgatcctactgcacctgacctgcatttagggcatacagtaatcttaaataaactaaaactttttcaagatttaggccaccaggtaattttcttgataggtgattttactggattggtgggtgacccttctggagtaaatgaaacccgtccagtcttaactgagaaagaaataaaagaaaatgctaagacttatgagagacaagtattcaagattcttgataagaagaaaactgagatcagatttaattctgagtggatgagtaagttctctcctgaagactttataagactctcttcagtgcaaactgtagcaagaatgcttgaaagagatgacttcagtaaaagatacagttctcaaaagcccatttcaatccatgaatttctttatcctttattacaaggttatgattcagtagctttagatgctgatattgaactaggaggaacagaccagaagttcaatctgcttctaggcagagaagtacaaaaattttatggcaaagaaccacaagttgctttcaccttgcccttattagaaggccttgatggagtgaagaagatgtcaaagactttagataattacattgctatcgaagataatgcagacgatatgtttggcaaaatcatgtctatttctgatgttttgatgtggagatattttgaactgcttagttttagatctgaaaaagagattatggagttaaaagaatcacaaaaaggaggctcaaacccgcgagatataaagtttttactggcagaagaaatagtaaatagatttcatggagaaggttcaggaaacagtgctaaagaagagtttctgtctagattccaaaagggaaataatccgtctgatataaaagaaattacaattaatcttgaagaaaaatctataactttagccaaagtgcttaaagaagccaaaatggtacctagtacctcagaggcattaaggttaatcgaacagggtgcagttagaattgaaggagaaaaaatattagactcaaagcatgaaattaatctaaattcttctcttttataccaggttggaaagagaaagttttctaagatcaagatagtcaaaaaatagc

SEQ ID NO: 296066 - DNA, 256 bp, Unknown
  Bacterial polypeptide expressing nucleotide sequence isolated from the Sargasso Sea
tatgaatgactttaaaaaacaattagaaattataaaacaaggtattgatgaaatcataggtgaagatgatttaattgaaaaacttaaatctggtaaaaagttaacgatcaaagttggttttgacccaacagcgcctgatttacacgttggccatactgtaattttaagaaaaatgagacagtttcaagatcttggtcataaggtaatttttttaataggtgattttactggcaaaatcggagacccaagcggaaaa

SEQ ID NO: 296067 - DNA, 613 bp, Unknown
  Bacterial polypeptide expressing nucleotide sequence isolated from the Sargasso Sea
tatgaataaatttttaaaagaatttaaagatagaggttttttctatcaatgtacaagtgaagatgaattatctaaacaattagatcaagaaaagattaaaggttacataggttttgattgcacagctgagagcttacatgtgggtagcttattgcaaataatgtgtttgcgactactacaaaaaaatggacatcgaccaatagttttacttggtggaggaactacaagaattggggatccgtctggtaaagacaaaactagaaaaatattaagcgaaaaagagattgagaaaaatattaaaaatatcaaaaatattttaaaaaaatttttagataataatgatccaaatacaaaaccaatatttgtaaataatcatacttggcttaaagatttaaattatatttcttttttaagagatataggaaaacattttacgataaatagaatgttaacatttgatagtgtaaaacttagattagatagagagcagtcgctaagctacatggagtttaattacatgattttacaagcatacgattttcttgaattaaataagaaagaaaattgtctcttgcaaatgggaggttcagatcaatggggaaaacattgttaa

SEQ ID NO: 296068 - DNA, 1243 bp, Unknown
  Bacterial polypeptide expressing nucleotide sequence isolated from the Sargasso Sea
atgaataaatctataaattcagattttctgaatgttatgaatgaaagaggttttattcatcaaattactgataaaaataatctagaccaagaattatctacaaatataatgactggttacataggtttcgattgcacagcaccctctcttcatgtgggatcattaattcaaataatgatgcttcgatggtttcaaaaaacagggcataaaccaatcgttcttatgggtgggggtacaactaaaattggtgatccatctggtaaagatagtgctcgacctgttctttcctcagaaaatatagaaaaaaatcaaaataatattagaactatttttgaaaaatttttaaaatttggatttagtaaaaacgatgcaattatggttaataattcagaatggttagaaaaacttaattatgtatcatttttaagagattttggatcctctttttcagttaataaacttataaatttagaaagtgttaaacaaagattagatagagaacaaaatttatcttttctagaatttaattactctttgcttcaggcatatgattttttgcatttgtatgaaagttacggttgtaaaatacaaatgggtgggtctgatcaatgggggaatatagttactggcttagacttaattagaaagaaaacttctaaacaaacatttggttttacttctccattattaactaccagtagtggtgcaaaaatgggcaaaacagctaatggagcagtctggctaaatgtagagcaattgtctgattgggatttttggcaatattggagaaacactgaagatttggatgttataaagtttttaaaactgtttacagaaataccaattacagagattaataaattacagcaattaaaaggtgtagaattaaatgatgccaaaataatcttggcaaatgaagttacaaaattgtgtagaagtccagaagctgctgaaaaaatatcaacttctgcttctaatttatttaataaaatcatagatgatgaaggattacccactataaatatatcaaaacacgaaatatcctttatcaatgctttaaaagaattaaactttctaaaaacaaatggggaagcaagaaggctaataagagggcatggtgctaaaattaacgatattatggtaagtgatgaaaattatattttaaaaatagatgattttaaaaatggtaaggtaaaaatttcgtccgggaaaaaaagacatggactattaatttgttcttagt

SEQ ID NO: 296069 - DNA, 772 bp, Unknown
  Bacterial polypeptide expressing nucleotide sequence isolated from the Sargasso Sea
tttgacagtgttaaacttcgtttagaaagagagcaatcacttagctatatggaattcaattatatgattttacaagcatatgattttcttgagcttaacaaaagtaaaaattgtttgatgcaaattggtggatcagatcaatggggaaatatagttaacggagttgaattaataaaaagacaatctggaaatcaagtttatggtttaacaacacctctaataacattagcgtctggtgcaaaaatgggaaaaacagaaaaaggggctgtttggttagataaaaaaatattatctcattatgattactggcaattttggagaaatactgatgacagagatgtaattaaatttttaaaaatgtttactgacttgcccttaaatgaaattgaaaaaattaaaggaaataatataaacaatttaaaaattttacttgcaaacgaagcaacaaaaatgttgcatggagaaaaggctgcaaaagagtctgaaaaaatggctgtatctacatttaaattagattcttcaggagagactttaccaaatataaaaattaaaaatgatatattaaacaaaagtataattgaattagtagcctatgtcataaaaaatatttcaaaaagtgaaataagaagactaattaaatcaaatggtattaaaataaataatcaattagtaaatgatgaaaaattaattattgaaaataaattatttttagaaaaaggatttataaagttatccgtaggtaaaaagaagcattacaaaattataatttagc

SEQ ID NO: 296070 - DNA, 1096 bp, Unknown
  Bacterial polypeptide expressing nucleotide sequence isolated from the Sargasso Sea
aatgaaagattggcaaacagcgctagctgagattaaacggggcgttgatgaaatactccccgaagaggatttaattgaaaaactaaaatccggcaaaaccctaaccatcaaagcgggttttgatccaactgcgcctgatctgcatcttggtcacactgtgttgatcaacaagttgcgtacattccagcaactaggccacaaagttgtttttcttattggcgattttactggcctaattggcgatcctacaggtaaaaatgtaacacgcaagcctttaagtaaagaacaggtattagagaacgcgaaaacgtatcaagaacaggtgttcaagatccttgatgaagataaaacggaaatacgttttaactcagaatggatggatggccttggcgcggcaggtatgattaaacttgcggctagtcagacggttgctcgtatgcttgagcgtgacgactttaaaaagcgttataacaacggtcagccaattgctattcatgagttcctgtacccgttggtgcaaggttgggattctgttgcgctagagtcagacgttgaattaggtggtactgatcagcgctttaacttactaatgggtcgtgaacttcaaaaagaacaaggccaaaagcagcaatctattgtaatggttccgcttctagaaggtctagacggcgttcagaagatgtctaagtctttgaacaactacattggtattacagatgcgccaaacgatatgtttggtaaagtgatgtctatttctgatgatttgatgtggcgttactatgaccttctaagcttccgaccgctagaagagattgctgagcttaaaactcgcgttgctaacggtgaaaacccacgtgatattaaaatcatgctggcgaaagaaattattgcacgcttccatgacgacgcagctgcagaaggcgcgcatcaggactttattcaacgtttccagaaaaacgctattcctgacgacatgcccgagcttgaaattgcattgagcgatgaaggtattgccattggtaatttgttgaaagaagctaaccttgtaggttcgacttcagatgctatgcgcatgattaaagcaggcgcagttaaa

SEQ ID NO: 296071 - DNA, 943 bp, Unknown
  Bacterial polypeptide expressing nucleotide sequence isolated from the Sargasso Sea
tatgaatgactttaaaaaacaattagaaattataaaacaaggtattgatgaaatcataggtgaagatgatttaattgaaaaacttaaatctggtaaaaaattaacaatcaaagttggttttgatccaacagcgcctgatttacacgttggccatactgtaattttaagaaaaatgagacagtttcaagaccttggccataaggtaattttcttaataggtgattttactggcaaaattggagatccaagcggaaaaaataagacaagaccacctctaactaataatgaaatcaaagctaatgctaaaacttatgaagatcaagttctaaaagttcttgatccagacaaaactacaattgattttaattctcgttggggagataagatgtctgctgcagatatgattaagcttgccgctcaatcaacagttgcacgtatgattgaaagagatgatttctcaaaaagatataaaaacaatcaaccaatatctattcatgaatttctttaccccttgatgcaaggctatgactcagttgaattggaagttgatgttgagcttggcggtacagatcaaaaatttaatcttctagtaggcagagatttacaaaagaatgtaggccaatcaccgcagacaataattacgttacctctattggaaggcttagatggagtaaagaaaatgtctaagacagaagaaaattatataggcataaccgaaaaggctgatgatatttttggcaaaacaatgtccattccagatgaaataatgatgaaatggtttgatctcttaagtttaagacctttagaggaaataaaaaaagttgatgaggatataaagggaggggctaaccctcgtgatgcaaagattgatttagctatggagctaacaactagatttacttctgaaaaagaagcagagaaagcaaaagataatttctttaaa

SEQ ID NO: 296072 - DNA, 704 bp, Unknown
  Bacterial polypeptide expressing nucleotide sequence isolated from the Sargasso Sea
tttgcaagcttatgatttttatgaacttaataaatcaaataattgtaacttgcaaattggtggatcggatcaatggggtaatatagtaaatggagttgatctcattaaaagagaaactggaaataatgcatatggtttaactacaccacttataactttagcatcgggtgctaaaatgggtaaaaccgaaaaaggtgcaatatggctaaataaaaaaatgctatcaccatatgattattggcagttttggagaaacacagatgatcgtgatgttataaagtttttaaaaatgttcactgatttacctttagatgaaataaagaatttaaacgataaaaatattaatgaattaaaaattttgttagccaataatgcaacagaaatgctacacgggaaaaaagaagctataaaatctggaaaacttgctaaaaatatctttaaagaaaattcaactggtgaaaatcttccaggtattaaagttaataatgatatattatcaaaaaatatagttgagctaatttcatttgttaataaaagtatctcaaaatctgaaataagaagattaattaaatcaaacgcaattaaaatagataataaaaatatacaggatgaaaaatatattattgaccctgtattattcctagacaaaggttttgtgaagttatctataggaaagaagaagcactttaaaattacagtttaat

SEQ ID NO: 296073 - DNA, 1198 bp, Unknown
  Bacterial polypeptide expressing nucleotide sequence isolated from the Sargasso Sea
gatggctgatttagaccaagtattagcagaaattagacgtggtaccgacgagatcctactcgaatcggatctgctggaaaaactcaaagaaggacgtccacttcgtatcaagttaggcgcagatcctaccgcaccggatatccatcttggacacacagtaattttaaataagttaagattattccaagagttaggtcatgaggtcattttcttaattggtgactttaccggtatggtgggtgatccaagtggtaaaaacagcactcgtccaccactgactcgtgagcaagtgttagccaatgccgagacctataaagagcaggtctataaaatccttgatcctgcaaaaacgcgtatcgagttcaactcgagctggttagagccattaggcgcggctgggatgattcgtttagcctcgcagcaaactgttgctcgtatgatggaacgtgatgactttaagaagcgttatgcatcgggtcaatcaatcgctatccacgaatttatgtatccgctactgcaaggatatgactctgtagctctcaaggccgacgttgaattaggggggactgaccagaagttcaacctattaatgggtcgtgagttacagaaagccgaaggccaaaaaccacaagctgtgattatgatgccactgcttgaaggtttagatggcgtgaagaaaatgtctaaatcggcgcacaactacattggtgtgagtgagcccgccaatgaaatgttcggcaagatcatgtcgatttctgacgaattaatgtggcgttactttgagctgctgtcattccgtcctttggccgagattgaacagttcaaacaagatatcgccaacggtgctaaccctcgtgataccaagattgcactcgcgaaggaaatcattgcgcgcttccacgacgaagccgccgctgaaagtgcccatcaagcctttatcgaccgttttcaaaagggtgctatccctgatgatatcccagaggttgaattagcggcgggtgaaggcttagcgattgctaacttacttaaagatgccgacttagtcggttcgacttccgatgcgatgcgtatgatcaagcaaggcgcggtgaagatggatggtgagaaggttgacgatagccgtatgaccttaagcgctggcacggttgccgtattccaggtcggtaagcgtaagtttgcgaaagtgactctggtttaa

SEQ ID NO: 296074 - DNA, 1198 bp, Unknown
  Bacterial polypeptide expressing nucleotide sequence isolated from the Sargasso Sea
gatggctgatttagaccaagtattagcagaaattagacgtggtaccgatgagatcctactcgaatcggatctgctggaaaaactcaaagaaggacgtccacttcgtatcaagttaggcgctgatcctaccgcaccggatatccatcttggacacacagtaattttaaataaattaagattattccaagagttaggtcatgaagtcattttcttaattggtgactttaccggtatggtgggtgatccaagtggtaaaaacagcacgcgtccaccactcacccgtgagcaagtattagccaacgctgagacctacaaagagcaggtctataaaattctggatcctgcaaaaacccgtatcgagttcaactcgagctggttagagccattaggcgcagcggggatgatccgtttagcctcgcagcaaaccgttgcccgtatgatggaacgtgatgactttaagaagcgctatgcttcgggtcagtcgattgctatccacgaatttatgtatccacttttacagggttatgactcagtagccctgaaggctgacgttgaactaggcggaaccgaccagaagttcaacctgttaatgggccgtgagttacagaaagccgaaggccaaaagccacaagccgtgatcatgatgccactgcttgaaggtttagacggcgtgaagaaaatgtctaaatcggcgcacaactacattggtgtgagtgagcccgccaatgaaatgtttggcaagatcatgtcgatttctgacgaattaatgtggcgctactttgagttgctgtcattccgtcctttggccgagattgaacagttcaaacaagatattgccaacggtgctaacccccgtgatactaagattgcgcttgcgaaggaaatcattgcgcgcttccacgaccaagcggcggccgagagtgcccatcaagcctttatcgaccgtttccaaaagggcgctatcccagatgatatccctgaggttgaattagcggcgggtgaaggcttagcgattgctaacttacttaaagatgccgacttagtggggtcgacttccgatgcgatgcgtatgatcaagcaaggcgcggtgaagatggacggtgagaaggttgacgatagccgtatgaccttaagcgctggcacggttgccgtattccaagttggtaagcgtaagttcgcgaaagtgactctggtttaa

SEQ ID NO: 296075 - DNA, 763 bp, Unknown
  Bacterial polypeptide expressing nucleotide sequence isolated from the Sargasso Sea
agattagatcgcgaacaatctctcagttacatggaatttaattatatgattttacaagcatacgatttcttagaacttaataaaaataaaaactgtgttatgcaaatagggggatcagaccaatggggtaacattgttaatggtgtagaattaataaaaagatattcaagtaagcagtcattcggcttaacaactccgttgataactttagcctctggagcaaaaatgggtaaaacagaaaaaggagctgtatggttagacaaaactttattatctccttacgaatattggcagttttggagaaacacagatgatagagatgtaataaaatttcttaaaatgttcactgatttaagtattaaaaaaatcaacgaaataaaaaataaaaatgtgaatgatttaaaaattactctagcaaacgaagctacctcaatgttacatggaaaatcggctgcagaaaaagctgaacagactgctagaaaaacttttgtatctggttcgataggtgaagatttgcctactctcaaaattggcaaaaaagaaattgaaaatggggtaaatatcatagatcttgttgtgttatcaaaacttttagtttcaaaaagtgaagttcgaagaacaataaaaaatagaggtataaaaattaataacgaaataattgaagatcaaaatttacaaatattattaaaagattttaaaaatcaaaattttttaaaattatcgcttggcaaaaaaaaacatgtgataataaaaatgggttaat

SEQ ID NO: 296076 - DNA, 886 bp, Unknown
  Bacterial polypeptide expressing nucleotide sequence isolated from the Sargasso Sea
atgacttcaggtaaggaacaaattctagaaatcaaaagaggtgtcgacgaaatcttggtcgagaaggattttttagacagactgaagcaaagtaaacctcttaaaatcaaggtcggttttgatcccaccgcacctgatcttcaccttggccatactgtaattataaacaagatgagacagttccaagagtttggccatgaagtcatttttcttataggtgattttactggcatgattggggatccatctggtgtaaatgaaaccagaccagtgctgactaaagagcaggtcaaagaaaatgctcgtacttataaaaatcaaatattcaagatactcgataaagataaaaccaggattgaattcaattcattctggatgaataaaataaccagtgctgaactcattgatattgcatcaaaatatactgtggctagaatgctggaacgagatgattttaagaaaagattcagatctgaaaatcccatttcaattcatgaatttctctacccgcttgtacaaggctatgattctgttgcccttggttctgatgtcgaaatgggaggaacggatcaaaaatttaatcttttggttggaaggcatctccaacaaatttatggccaagaacctcagacaataataacgcttcctttactagaaggcttggatggagttaagaagatgtcaaaatcttctaataattatgttgctctgaatgattctggggatgatatgtttggaaagataatgtctatatcagatgatttgatgtggaaatattttgaactcttaagcacaaagaatttatcggaaatagaaaagctaaaggatactgttaaaaatggtgccaatccaagagatataaaatttttattagcagaagaaaaat

SEQ ID NO: 296077 - DNA, 607 bp, Unknown
  Bacterial polypeptide expressing nucleotide sequence isolated from the Sargasso Sea
tatgaataaatttttaaaagaatttaaagatagaggcttctattatcaatgtaccaatgaaaaagaattatctaatttgattaataaaaaaaaaattagagcttatataggttttgattgtacagctgcaagtctccatgtgggtagcctacttcaaattatgtgtttaagattattacaaaaacatggtcatcaaccaatagtacttttgggcggtggaacaacaagaattggggacccctcgggtaaagataaaactcgtaaaatcttatctgaaaaagaaataaaaaaaaactctgctaacataaaaaagatattaaaaaattttttaaatacaaaagacaaaaaaataaaaccaatatttgttgataattttaaatggttaaaaaaacttaattatatttcattcttaagagatattggtaaacattttacaatcaacaaaatgttaacttttgatagtgtaaaaacaagattagaaagagaacaatctttaagttatatggaatttaactacatgattttacaagcttatgactttttagaattaaaccaaaaagaaaaatgtgaacttcaaattggaggatctgatcagtggggtaatatt

SEQ ID NO: 296078 - DNA, 757 bp, Unknown
  Bacterial polypeptide expressing nucleotide sequence isolated from the Sargasso Sea
atgaataattttttaaaagaatttaaagagagagggtactattatcaatgtaccaatgaaatagaattatcaaatctattaaataaagaaagcacaaatgcttatattggatttgatagtacagctccaagtttacatgttgggagtttattgcaaatcatgtgccttagacttttacaaaagtatggtcacagaccaattgttcttttgggtgggggcacgactagaataggagatccatcaggtaaagaggaaactagaaaaatcctttctgaaaagcaaattgagaataatattaataatataaaaaaggtttttaaaatttttcttaaaacaaataattcaaaattaaaaccaatttttgtgaataactataaatggctaagcaaactcaattatataaattttttaagagacataggtaaacattttacaataaataaaatgttaacatttgatagtgttaaattaagattagaaagagaacaatctctaagttatatggaatttaattatatgattttacaagcatatgatttttttgaacttaataaatcaaacaaatgtaatttacaaattggaggatctgatcaatggggaaatatagtaaatggtgttgaactaattaaaagagaatctggaaatcaagcatttggcttaactactccactaataacattagcatcaggtactaaaatgggtaaaactgaaaaagggactgtatggttgaataaagaaaatgttatctccatatgaa

SEQ ID NO: 296079 - DNA, 1039 bp, Unknown
  Bacterial polypeptide expressing nucleotide sequence isolated from the Sargasso Sea
tatggaaaattcatttctaaaagaattcaaagatagagaatactttaatcaatgtactaattctgaggaattagaacagttgatgagcaaaaaaaaaattaaagcatatattggatttgattgcacagcttcaagtttgcatgtgggaagtttgctacaaattatgtgtttaagacttttacaaaaacatggtcaccaaccaattgtattattaggtggtgggacaacaagaattggagatccatccggtaaagaagaaacaagaaaaattctttcagaaaaagagattgaaaaaaatataaaaaatattgaaaaggtatttaaaatttttcttaaaacaaaaagctctaagttgaaaccgatatttgttaataattataaatggttaggaaaattaaattacattaagtttttaagagaaattggaaaacatttcacaattaataaaatgcttagtttcgatagcgtaaaattaagattagagagagaacagtctttaagttatatggaattcaattatatgattctccaagcttatgattttcttgaattaaataaaactaaaaattgtcttatgcaaattggaggttctgatcaatggggtaacatcgtcaatggtgtcgaattaattaaaagacattctgcaaaacatgtatttgggttaacaacccctcttattactttagcttctggggcaaaaatgggtaaaacagaaaaaggtgcggtttggctagatgaaaaacttttgtctgcttacgaatattggcaattctggcggaacacagatgatagagatgtaattaaatttcttaaaatgtttacagatttaagtatagacagaattaataagcttaaaaacgagaatattaataatttaaaaattatattagcaaacgaaaccactgctatgttgcatggtaaaacagcagctcttaaagcagaaaaaaccgcaaaagcaacttttgaatctcgtggagctggtgatgatttgccagaaataaagatgaaagaaagtattttaaaactggaattaaaattt

SEQ ID NO: 296080 - DNA, 990 bp, Unknown
  Bacterial polypeptide expressing nucleotide sequence isolated from the Sargasso Sea
tgcacaagtgaagatgagttatctaaaaaattagatgaagaaaagattaaaggttacataggttttgattgtacagctgaaagcttacatgtaggtagcttgttgcaaataatgtgtctgcgattacttcaaaaaaatggacatcaaccaatagtcttacttggtgggggaactactagaattggagatccgtccggtaaagataaaactagaaaaatgttaagtgaagaagaaattgaaaaaaatattaaaaatatcaaaagtatatttaaaaaatttttagacaataaggatcctaatacaaaaccaatatttgtaaataattatacttggcttaaagatttaaattatatttcatttttaagagatataggaaaacatttcactataaatagaatgctaacatttgatagtgtaaaactcagattggatagagagcaatctctgagctatatggaatttaattatatgattttacaagcatatgattttcttgaattaaataagaaagaaaattgtgttttacaaatcggaggttcagatcaatggggaaatatagttaatggtgttgagcttataaaaagatattctaataatcaatcctttggtctaacaacacccttaattacgttagcgacgggtgctaaaatgggaaaaactgaaagcggagctatttggttagatgaaaaatacttatcagcttatgattattggcagttttggagaaatgtggatgatagagatgtaattaaatttttaaaaatgtttactgaaattgatattaaggaaatagaaacaattaaagataaagatattaatgaattaaaaatactacttgctaataaaaccacagaaatgttgcatggaaaggaagcagctaaaaattctgaacaagcagcaaaagaagctttttctggaaacgctctaggttcaaacttacctaaagtaaatattcaatctaacaaaataaaagataagataaatatagta

SEQ ID NO: 296081 - DNA, 841 bp, Unknown
  Bacterial polypeptide expressing nucleotide sequence isolated from the Sargasso Sea
tatgaaaagtaaatttttacaagaattgtcgtcacgtggatatttaaatcaatgcacagatttagacaaactagacgatatttgtagcagaaaacctatcctaggctacataggttttgactgtactgcaaaaagtcttcatgtcggtagtcttcttcaaattatgattttgagattaatgcaaaaacatgggcacaggccaattgtattattaggaggaggaactactttaatcggtgatccttctggaaaagatacaactagaaaaattttaaaaagtaaagaaatacaaaaaaatattaaaagtattaagaaaacttttgttaagatattaagcaactcaagtactaaaactaaaccaatttttgtagataattcaaagtggttaactaaattaaattacatcaaatttttaagagaaataggaagtcattttaccataaacaaaatgcttacattcgagagtgttaagtccagattagagagagaacaatctttgagttatatggaatttaactatatgattttacaagcttacgatttctatcaactttatttaaaaaataaatgtattttacaaattggtggttcagaccaatgggggaatatacttaacggggtcgatctaattagaagaattttgaaacaagattcttttggcttaacttcgcctttaattaccttggcgtcaggtttaaaaatgggtaaaacagaaaaaggagcaatttggcttaacaaagatttgctatcaccatatgattactggcaattttggagaaatacagacgatcgtgatgtaagaagatttttaaattttttttacagacttgaaaactattga

SEQ ID NO: 296082 - DNA, 680 bp, Unknown
  Bacterial polypeptide expressing nucleotide sequence isolated from the Sargasso Sea
tatgaataaatttttacaagaattccatgacagaggatatttttaccaatgtactgacaatgaaggattaagcagaatactaaataggaaaattagagcatatataggttttgattgtactgcagaaagtcttcatgttggtagtttgcttcaaataatgtgtctaaggttacttcaaaaacatggtcatcagccaattgtattgcttggtggtggaacaacaagaattggcgatccctctggaaaagataaaaccagaaagatattagatgaaaagattattgaaaaaaatatcaaaaatattgaaaaaattttaaaaatatttttaacgtctaaaaataaagaaacttctccaatatttgtaaataactatgattggcttaaaaatttaaattatatttcttttttaagagacgtaagaaaacattttactataaataaaatgttgagttttgacagtgtaaaattgaggttagaaagagaacaatctctgagctatatggaatttaattatatgatattgcaggcttatgattttttagagttaaataaaaaaaaggactgtgttctacaaataggtggatctgatcagtggggtaatattgttaatggagtggaactagttaaaagatattcttcaaaagaggtatttggacttacaacacccctaatcacacttg

SEQ ID NO: 296083 - DNA, 908 bp, Unknown
  Bacterial polypeptide expressing nucleotide sequence isolated from the Sargasso Sea
ggttttgatcctactgcaccagatttgcatctaggccatacagtcttgatcaataaacttaggcattttcaacaattaggacatcaaataatatttttaattggtgattttactggaatgatcggagatccttcaggaaaaaataaaactagacctccattagataaaactgatattgacgagaatgcaaaatcttataaaacgcaaatttttaaaattttagactctaagttaacagatgtaaggtttaattcagaatggagcaaaaaactcggtgctgagggagtaatcaaacttgcatctcaatataatttagccagaatgcttgagcgcgatgattttaataaaaggtataagtctaatcagagcattgctttgcatgaattattatatcctctgattcaagctaatgattcaataaccttgcatgcggatgtagagctcggtggtaccgatcaaaagtttaatcttttagtaggcagggatcttcaaagggcatttggccaagagcctcaagttgttatcactgttccaattctagagggtttagacggaaaaaataaaatgtctaaatctttagataattatgttggaatcgatgagtctccaaatgaaatgtttggaaaaattatgtctatatcagatgaactcatgtggagatggtttgatctgttgagctttaaatcttctgacgaaattaacgccttaaaatctcagcaagataatggaaggaatccaagagatataaaaattgaattagccaaagagctaattgctcgcttccatgacgaaaaatcagcaaatgatgcagaatcaaactttatcgatcaattccaaaaaaagaatattccagatgatattgaagaaatattgcataaaatttcaggtgagtctattccactagctaa

SEQ ID NO: 296084 - DNA, 724 bp, Unknown
  Bacterial polypeptide expressing nucleotide sequence isolated from the Sargasso Sea
aaatgcatatattggttttgatagcactgctcctagtttgcatgttggaagcttaatgcaaattatgtgtctaaaattattacaaaatcatggacatagaccaatcgtattattgggtgggggcaccacaagaataggtgatccatctgggaaagaagaaactagaaaaattttatctgaaaaacaaattgagaataatataaaaaatattcaaaaagtttttaaaatatttttaaaaacaaataatccaaagttaaaaccaatttttgtaaataattataaatggttaggaaaattaaattatattaaatttttaagagaaataggaagacattttactattaataaaatgttaagctttgacagtgttaaactgcgtttagaaagagaacagtcacttagttacatggaatttaactatatgattttacaagcatatgattttcttgagcttaacaaaagtaaaaattgtttaatgcaaataggtggatcagatcaatggggaaatatagttaatggagtagaactaattaaaagacaatctggaaatcaagtttttggattgacaacacctttaataactttagcatctggtgctaaaatggggaaaacagaacaaggagctgtttggctagataaaaaaatgttgtccgcttatgactactggcaattttggagaaatactgatgatagagacgtaattaaatttttgaaaatgtttaca

SEQ ID NO: 296085 - DNA, 895 bp, Unknown
  Bacterial polypeptide expressing nucleotide sequence isolated from the Sargasso Sea
ttgcaaataatggtattaaaactcctccaaaaatatggtcataaaccaataatcttgctagggggtggaactacaatgatcggagacccttctggaaaagatagcactagaaaaattttaagtaaaaaagaaattaaaaaaaatattgttggaataaaaaaaaattttgaaaagcttttagattttagggataaaaaaacaaaaccaatttttgtagataactacaactggttaaataatttaaagtatctagattttttaagagatatcggtagacattttacaataaataaaatgttagcatttgatagcgtcaaattaagattagaacgcgagcaatcactaagctatatggagtttaattatatgatactccaagcttacgattttttaaaacttaatgataaaaaatcctgccatttacaaataggtggatctgaccaatggggaaacattttaaatggagtagatttaatcagaagagtttctaaaaaaaatgtttttggattaactacgccactaataactctttcctctggtgctaaaatgggtaaaacagaaaaaggtgcagtatggttaaataagaataaattttcaccttacgattattggcagttttggaggaatacagaggataaagatgtggtaaattttatgaaatttttcacccaaattaatttaagggagattgatgaaatagttaataaagaaaaaaatattaataatttaaaactaattttagctaatgaagcaacaaaaatattacatggaagcaaagctgccaaggactctgagaaaactgcatctgatacttttttattcaaaggagtaggtaaaaatttaccagaaattaaaattgacagaaaggagatgaaaaagggatcaatattttaga

SEQ ID NO: 296086 - DNA, 829 bp, Unknown
  Bacterial polypeptide expressing nucleotide sequence isolated from the Sargasso Sea
tctttttttacgtgatattggaaaacattttacaataaataagatgttaacttttgatagtgtaaaaacaaggttagaaagagagcaatcattaagttatatggaatttaactacatgatattacaagcttacgattttttggaattaaataaaaatgaaaattgtgctttacagattggtggatctgatcaatggggaaacattgtaaatggtgtagaacttataaaaaggtattctaataaacaaggattcggattaacaacacctttaattacattagcatcaggtgctaaaatgggtaaaacagaaaatggagcaatttggttagatgagaaatatttgccagcatatgattactggcaattttggagaaatacagatgatagagatgtagtgaagtttttaaaattttttacagatttagagattgcagaaattgataaagttaaagaaaaagatattaatgaattaaaaactttattagcaaatgaaacaactacaatgttgcatggtcaaaaagctgcacaagagtcagaacaagctgctagagaagcattttcaggaaattcactaggatcaaattcaccatcaattaaaatcagtaataaagatattgaaaaaaaacttggtattattgatttagtaattttatctaaattagaaaattctaaaagtgaaattagaagattaattaaaggcaatgcaattaaaataaatgatgaaattatttcagatgaaaaatttattattaatcatgatttatttaaagaagactatctcaaattatcggttggaaaaaaaagacacttaaaaattgtgattagttaa

SEQ ID NO: 296087 - DNA, 804 bp, Unknown
  Bacterial polypeptide expressing nucleotide sequence isolated from the Sargasso Sea
tatgaaaaataattttttacaagaaatgcaagatagaggatttctcaatcaatgcaccaatttagacaaactaaaggaaatttgtaataaaagatcaatatctggctatataggttttgattgtactgcaagtagtttgcacgttggtagtttattgcaaattatgattttaaagttaatgcaaaaacatggtcatcgaccaattgtgctattaggcggtggcacaactttaatcggagacccttctggaaaagacatcacaaggaaaatattagaacaaagtgaaatcaaaagtaatattaaaagtattaaaaaattatttaataaaattttagatacatcaaataaaaagatatcacctatatttgtagataacgctgattggttaacaaaattaaattacataaattttcttagagacacgggaagtcattttacaattaataagatgcttacttttgatagtgtgaaactaagattagatagggaacaatcacttagttatatggaatttaattatatgatcctacaagcatatgacttctatcaactatttaaaaataataattgtgtccttcagattggaggatctgaccaatggggaaatattgttaatggggttgatttgataagaagaaagttacaaaaagaagcttatggtcttacgacaccattaattactctagcctctggagcaaaaatgggtaaaaccgaaaaaggagcaatttggttaaacgaggataaactttctccatatgactactggcaattttggagaaatacagatgatcgagatgtaaaaag

SEQ ID NO: 296088 - DNA, 675 bp, Unknown
  Bacterial polypeptide expressing nucleotide sequence isolated from the Sargasso Sea
atgcaaataatgtgtctaaaacttcttcaaaaacatggtcatagaccaatagttttattagggggtggaaccacaagaataggtgatccatctgggaaagaagaaacaagaaaaattttatctgaaaaacaaattgaaattaatattaaaaatattcagaaagtatttaatacttttttaaaatcagataatccaaaattaaaaccaatttttgtaaataactataaatggcttagaaaactaaattatataaattttttaagagaaataggaaaacattttacaataaataaaatgttaagttttgaaagtgttaaactaagattggaaagagaacaatctctcagttatatggaatttaattatatgatccttcaagcatatgattttctagaacttagtaaaactaaaaattgcatacttcagataggaggttcagatcagtggggaaatattgtaaatggtgtagatcttataaaaagacattcaaataaacatgtatttggacttacaactcccttagtcacattggcttcaggagcaaaaatgggtaagactgaaaaaggagctatttggttagataaaaaacttttgtcaccttatgattattatcaattctggagaaatacagatgataaagacgttatgaaatttttaaaaatgttcacagatcta

SEQ ID NO: 296089 - DNA, 788 bp, Unknown
  Bacterial polypeptide expressing nucleotide sequence isolated from the Sargasso Sea
tatgaagattttattgaacaattgaaatggaggggaatgttacatgatttaattcctggaactgaagaacatttagagaaaaataaaacaattggttatattggatttgatccaacttctgactctcttcatattggaagtttagttccaatttttattctaaaacactttcaaaattctggccatacacctatagttttattaggaggtgcaactggaatgattggggatccatctggtaaatctgatgaaagaaatttacttgataaaaatgtcttagattacaacgaaaaaaaacttactaaacaatttgaaaaatttttagattttaaatcaaataaacctaataaggctattttggttaataattacaactggatgaaaaaattttcgattatagatttttctagagatatagggaaacatataacagttaattacatgatggctaaagagtcagttaaaaaaagaatttcaaaagatacgactcaaggaatgtccttcacggaatttacatatcaacttattcaaggctatgattttctccatctatataaagaaatgaattgtatgttacaaatgggagggagtgatcaatggggaaatataactacaggaactgagttgattagaagaaaagaaaacaagaaggtctttgctatgacttgccctctaattaaaaaatcagatggatcgaaatttggtaagtcagaggggggtaatatttggctagataaagaaaaaacatctgtttataagttctatcagtattggcttaatatatctga

SEQ ID NO: 296090 - DNA, 850 bp, Unknown
  Bacterial polypeptide expressing nucleotide sequence isolated from the Sargasso Sea
gcaccggacttacatcttggccatactgtattgataaataaacttcgtcagttccagacgcttgggcataacattatttttttaattggtgattatacgggaatgataggggacccttctgggaagagtgcgacacgaccccctcttagcgcagaagaaataaaggaaaattcaaaaacatatgagaagcagatttttaagatactcgatccggatttaaccacagtggcatttaattcatcgtggatgaataaaatgaatgcggcagacttgattcgattagcttcacatcataccgtcgcacgaatgcttgaacgagatgattttgataaaagatataaatcaaatcaggccatttcaatacatgaatttctttaccctttgatacaaggctatgattcagttgcactagatgctgatgttgagcttgggggtacagaccaaaaatttaatttgcttgttgggagacaattacaggagttacatgccaagtcaccacaggtggttattacaatgccgatactcgaaggattagacggtagccagaaaatgtcaaaatcattaggtaactatattggggttgatgaacctgcaaaggaaatgttcggaaagattatgtcaatatctgataacttaatgtggcgatattttgaattattgagttttaaaaatctcgaagaaatcgaacaatttaaaaagcaagttgaaacaggaacaaaccctagagatataaaatttgaactcgctcaagaaattattacccgatttcatgacttaaaatcagcacaagacgcaaaaaatgattttgttaagcgctttagtgataatgcaattcccgaatgttattgac

SEQ ID NO: 296091 - DNA, 269 bp, Unknown
  Bacterial polypeptide expressing nucleotide sequence isolated from the Sargasso Sea
tatgaatttttttgatgaattaaaaaaccgtggaataataaatgattattcgcatgatgagcttgtcgatttgcttaataatgaacaagtgtccttttattgcggttttgatccaacctctaagtcattacaacttggtaatttatttgtagttattacaatgatgaggtttcaacgccaagggcataagccatatgctctagttggtggtgcaacaggaatgattggcgaccctagcggtaaaagtgatgaaagaaagttattatcaa

SEQ ID NO: 296092 - DNA, 699 bp, Unknown
  Bacterial polypeptide expressing nucleotide sequence isolated from the Sargasso Sea
tatgaataaatttttaaaagaatttaaagatagaggttttttctaccaatgtacaagtgaagatgaattatctaaacaattagatgaagaaaagattaaaggttacataggttttgattgtacagctgaaagcttacatgtaggtagcttattgcaaataatgtgtttgcgactacttcaaaaaaatggacatcgaccaatagttttacttggtggaggaactacaagaattggggacccttctggtaaagacaaaactagaaaaatattaagtgaagaagaaatagaaaaaaatattaaaaatatcaaaaatattttaaaaaaatttttagacaacgatgacccaaaaacaaaaccaatatttgtaaataattatacttggcttaaaaatttaaattatatttcatttttgagagatataggaaaacatttcactataaatagaatgctaacatttgatagtgtaaaactcagattggatagggaacaatctctgagctatatggagtttaattatatgattttacaagcatatgactttcttgaattaaataaaaaagaaaattgtttattgcaaatcggtggttcagaccaatggggaaacattgttaatggagttgagctcataaagagacactctaatactcaaacctttggtttaacaacaccattgattactttagctactggtgcaaagat

SEQ ID NO: 296093 - DNA, 789 bp, Unknown
  Bacterial polypeptide expressing nucleotide sequence isolated from the Sargasso Sea
attaggaggtggaacacaagaataggtgatccttcaggaaaagataaaacaagaaaaattttagatgaaagtgaaattgaaaaaaatattaaaaatattcaaaatattttaaaaaaatttttagataacaatgatccaaaaacaacaccaatttttgtcaataattatacctggcttaaagatttaaattatatttcctttctaagagatataggaaaacattttaccatcaatagaatgcttacatttgatagtgttaagctaagattagaaagagaacagtcgcttagttatatggaatttaattacatgatactccaagcctatgattttttagaattaaataaaaaagaaaattgtgttctacaaataggtggttcagatcaatggggaaacattgtgaacggtgtagaacttattaaaagatattctaataaccaaacatatggattaacaacgccattaattactttggccacaggtgcaaaaatgggaaaaactgaaaatggcgcaatttggttagacgaaaaatatttatcagcttatgactattggcaattttggagaaacgttgatgacagagatgtaacaaaatttttaaaaatgtttactgatattgatataagtgaaatcaattctttagagggaaaaaatattaatgaatcaaaaatattattagccaacaaagctacagccatgttgcatggagaagatgccgctcaaaattctgaacaagcagcaaaagaggcattttctggaaattctttaggatctaacttaccaagcgtt

SEQ ID NO: 296094 - DNA, 782 bp, Unknown
  Bacterial polypeptide expressing nucleotide sequence isolated from the Sargasso Sea
acatcaaccaattgtactgcttggagggggaactactcgaattggagatccgtctggcaaagaagagacgagaagaattctttcagaaaaacaaattgaaaaaaatattaaaaatataaaaaaaatttttaaaatatatttaaagacaaataatttaaaaactaaacctatattcgtaaataattacaaatggttaggaaagttaaattatataaagtttttaagagaaataggaaaacattttactataaataaaatgttaagttttgacagtgtaaaactgagattagatagagaacaatcactaagttatatggaatttaattatatgattttacaagcatatgattttttagaattaaataaaaataaaaattgtttgatgcaaataggtggttctgatcaatggggtaacattgttaatggagttgaacttataaaaagacattcaaataaaaaggtttttggtcttacaactcctttaattactttggcatctggctcaaaaatgggtaaaacagaaaaaggtgctatatggttagataataaacttttgtcagcctacgattattggcaattctggagaaatactgatgatagagatgttttgagatttcttaaaatgtttactgatttaagcctggataaaattgaacaaattaaaaatgaaaatattaataatttaaaaatattattggctaatgaatcaacttcaatgttgcatggcaaatccatgactgtaaaagcagaactaacagcaaaaaatacttttgaaaaaagat

SEQ ID NO: 296095 - DNA, 856 bp, Unknown
  Bacterial polypeptide expressing nucleotide sequence isolated from the Sargasso Sea
catgcaagatacatttctaacagaattcgaaaaaagaggttattttagtcaatgtactgaccaatctagcttaaatgaattaacgtccagaagtaaaataaaagcttacataggttttgattgtaccgcaccaagcctgcatgtcggaagtctcatgcagattatgtgtctacgtcttctgcaaaaatatggtcatcagccaatagtcttacttggtggcggaacaacattaataggtgatccttctggcaaagaagaaacaagaaaaatccttagtaaaaaagaaatagataaaaatataaaaagtattgaagatgtttttaatatttttttgaaatcaaaaaatcctaaaacaaaacctatctttgtaaacaactattcttggttaaataaattaaactacataagttttttaagagaaattggtaaacattttacaataaataaaatgttaacttttgatagtgtcaaacttcgtttggaaagagagcaatctttaagttatatggaatttaattatatgatgttgcaagcatatgatttttacgaactaaataaaatgtacaaatgtattttacaaataggtggttctgatcaatggggaaatatagtcaacggaattgatttaattaaaagaaaagaaaaaaatattgtctatggattaacaactccattactaacactttcttccggtgcaaaaatgggaaaaacagaaaagggggctatatggttaaataaaaaaatgctttctccctatgactattggcaattttggagaaacgccgatgataaagatgttataaattttttaaaactttttactgacatagatcttgaacaaatagaagatttaaaa

SEQ ID NO: 296096 - DNA, 917 bp, Unknown
  Bacterial polypeptide expressing nucleotide sequence isolated from the Sargasso Sea
aatgtgtttgcgactacttcaaaaaagtggacatagaccaatagttttacttggtggaggaactacaagaattggggatccgtctggtaaagacaaaactagaaaaatattaagtgaagaagagattgaaaaaaatattaaaaatatcaaaaatattttaaaaaaatttttagataatgatgatccaaatacaaaaccaatattcgtaaataattatacttggcttaaagatttaaattatatttcgtttttaagagatataggaaaacatttcacaataaatagaatgctatcatttgatagtgtaaaacttagattggatagagagcagtcactgagctacatggagtttaattacatgattttacaagcatatgattttcttgaattaaataggaaagaaaattgtatattacaaatcggaggttcagatcaatggggaaacattgttaatggtgttgagcttattaaaagatattctaataatcaaacctttggtttaacaactcccttaattacactagcaactggtgctaaaatgggaaaaactgaaagtggagcaatttggttggatgaaaaatacttatcagcttatgattattggcaattttggagaaacgtagatgatagagatgtaattaaatttttaaaaatgtttacagaagttgaaattaaggaaatagaaacgattaaagataaagatataaatgaattaaaaacattacttgctaataaaaccacagaaatgttacacggaaaggaagctgctaaaaattctgaacaagcagcaaaagaagctttctctggaaacactctgggttcaaacttacctaaagttaatattcaatcaaagaaaatagaagaaaaaatgaatatagtagaccttgttttattatctaaattagaaaactcaaaaa

SEQ ID NO: 296097 - DNA, 764 bp, Unknown
  Bacterial polypeptide expressing nucleotide sequence isolated from the Sargasso Sea
aatgaaaaattcattccttaaagagtttaatgaaagagaatattttaatcaatgtactaatttagagtcccttaatgggttaatggataagaaaaaaataagggcctatattggtttcgactgtactgctcaaagtttacacgtaggaagcttacttcaaattatgtgcttaagattgttgcaaaaacatggacatcaaccaattatattgctcggaggaggtactacaagaataggtgatccttcaggaaaagaagaaacaagaaaaattcttacagaaaaagaaatcgaaaagaacataaaaaatattaagaaagttttttcaatatttctaagtagcaaaaattctaaaacccgtcctatttatgtaaataattataaatggctgggtaaactaaattatataaagtttttaagagatatcggaaaacattttactattaataaaatgcttagttttgatagcgttaaacttagattggagagagagcaatctttaagctatatggaatttaactacatgatactacaagcatatgattttttagaacttaacaaaactaaaaattgtttaatgcaaattggtggttctgatcaatggggtaatatcgtgaatggtgtagagttagtaaaaagatattcaagtaagcaagtttatggtttaacaacaccattaattactttagcatctggagcaaaaatggggaaaaccgaaaaaggagctgtttggttagataaaaaacttttatcatcttatgactact

SEQ ID NO: 296098 - DNA, 802 bp, Unknown
  Bacterial polypeptide expressing nucleotide sequence isolated from the Sargasso Sea
tatgaataattttttaaaagaatttaaagatagaggatactattatcaatgtacaaatgaattagaattatcagatttatttaataaagaaagtattaacgcatacattggatttgatagtacggctcctagtcttcatgttggtagtttgttgcaaataatgtgccttagacttttacaaaaacatgggcatagaccaattgttcttctaggtggaggaacaactagaattggagatccatctggaaaagaagaaactagaaaaatattatctgaaaaacagatagagagtaatattaacaacataaaaaatgtttttaaaattttccttaaaacaaataatacaaaattaaaaccaatatttgttaataattataaatggttaagtaagcttaactatataaattttttgagagatataggtagacattttacaataaataaaatgttaacgtttgatagtgtaaaattaagattggaaagagagcaatcattaagctatatggagtttaattatatgattttgcaagcgtatgatttttatgaacttaataaatcgaataagtgcaaacttcaaatcggtggatcagatcaatggggtaatatagtaaatggagttgaacttatcaaaagagaatctggaaatcatgcgtatggtttaactactcctctgataaccttagcatctggtacaaaaatgggcaaaactgaaaagggtgctgtatggcttgataaggagatgctttcaccatatgattattggcagttttggagaaatacagatgatcgtgatgtattaaag

SEQ ID NO: 296099 - DNA, 619 bp, Unknown
  Bacterial polypeptide expressing nucleotide sequence isolated from the Sargasso Sea
atgaataaatttttaaaagaatttaaagatagaggttttttctatcagtgcacaagtgaagatgaactatctaaacaattagataaagaaaagataaaaggttacataggttttgattgtacggctgaaagtctgcatgtgggtagcttgttgcaaataatgtgtttgcgactgcttcaaaaaaatggacatcaaccaattgtattgcttggtggaggaactacaagaattggggatccatctggtaaagacaaaactagaaaaatattaagtgaagaagatattgaaaaaaatattaaaaatatcaaaaatattttaaaaaaatttttagataatgaagatccaaatacaaaaccaatattcgtaaacaattacacctggcttaaagatttaaattatatttcttttttaagagatataggaaaacatttcacaataaatagaatgttaacatttgatagtgtaaaacttagattggatagagagcagtcgctaagctatatggagtttaactatatgattttacaagcatatgattttcttgaattaaataggaaagaaaattgtgtcttacaaatcggaggttcggatcaatggggaaacattttaatggtgtgag

SEQ ID NO: 296100 - DNA, 865 bp, Unknown
  Bacterial polypeptide expressing nucleotide sequence isolated from the Sargasso Sea
tatgaataattttttaaatgaatttaaggatagagggtatttttatcaatgtactgatgaaataggcttatcaaaattattaaacgaaaaaagtaacaatgtatatattggatttgatagtactgctccaagcctacatgttggcagcttgttacagattatgtgtctaagactattacaaaaacatggacacagaccaattgttcttttgggtggaggaacaactagaattggagacccatcaggtaaagaagagacaaggaaaattctttcagaaaaacaaatagaaaataatattaataatataaaaaaagtatttaaaatttttttaaagacaaatgatagtaaattaaaaccaatttttgtaaataattataaatggctaagcaaacttaattatattaagtttttaagagatattgggaaacattttacaattaacaaaatgttaagcttcgatagtgttaaattaagattagagagagagcaatctttaagttatatggaatttaattatatgattttacaagcatatgatttttttgaacttaataaatcaaatagttgtaatttacaaattggtggatcagaccagtggggaaacataataaatggtgtcgaactaataaaaagagagaccgggaaacaggcatatggattgactacacctttaataactttagcgtctggtactaaaatgggtaaaactgagaaaggtgctatatggttgaataaagaaatgttatcaccatatgattactggcagttttggagaaatacagatgatagagatgttttgaaatttttgaaaatgtttaccgatttacctctagacaaaatagaaaacataaaagacccaaaatat

SEQ ID NO: 296101 - DNA, 904 bp, Unknown
  Bacterial polypeptide expressing nucleotide sequence isolated from the Sargasso Sea
aaaagaggttactttaaccagtgtacggacctttctgcgttggctgaattaatgtcaaaatctaaaattagagcctacattggctttgattgcacagcacaaagtctacatgttggaagtttaatgcaaattatgtgtcttcgccttttgcaaaaatacggtcatcagcctataattctgcttggaggaggtactacactaattggagatccttctggtaaagaagaaaccagaaaaattcttgataaaaaagaaattaataaaaatattaaaagtattcaaaatgtattcaaaatttttttaaaatcaaaaaattcaaaaactaaaccaatttttgttaataattattcttggttaagtaaattaaattatataaattttttaagagatattggtaaacatttcactataaataaaatgttgacctttgatagtgtcaaattacgacttgaaagagaacaatcattaagttacatggaatttaattacatgatgcttcaagcttatgatttttatgagctttgtaaaagatacaaatgtattttacagataggaggttcagatcagtggggcaatatagttaatggcaccgatctgattaaaagaaaagaaaaaaagcaaacatatggattaaccactcctttgataactctttcgtctggcgcaaaaatgggaaaaacagaaaaaggcgcaatctggttaaacaaaaatatgctttcaccatatgactattggcaattttggagaaatacagatgataaagatgttataaattttttaaaactatttacagatttaagtttagaaaaaatagaaaatttaaaaaataacgaagatataaataaacttaaaattttgcttgctaatgaaacaacaaaaatgctgcatgaaacaaggctgcaaa

SEQ ID NO: 296102 - DNA, 742 bp, Unknown
  Bacterial polypeptide expressing nucleotide sequence isolated from the Sargasso Sea
tatgaataaatttttaaaagaatttaaagatagagggtatttctaccaatgtactagcgaagatgaattatctgatttgttagataaaaaaagtattaatgcgtacataggctttgatagcactgcctcaagtttacatgttggaagtttgttacaaataatgtgcttaagattattacaaaaacatgggcatagaccgattgtacttttaggaggtggaactacaagaataggagatccttctggaaaagaagaaacaagaaaaatcttgtctgataaacaaattgaaaaaaatattaaaaatattaaaaaagtttttaaaatattcttaaaaacaaaaaatccaaaattaaaaccaatctttgtaaataattataaatggcttggtaaattaaattatataaaatttttaagagaaattggaaaacattttacaattaataaaatgctaagtttcgatagtgtaaaattaagattagatagagaacaatccttaagttatatggaatttaattatatgattttacaggcttatgattttcttgaattaaataaaaataaaaattgtacgatgcaaataggtggatctgatcaatggggcaacattgtaaatggagtagaactcattaaaagacactcaagtaaacatgtttttggattaacaactccactaataactttagcgtcaggaactaagatgggaaaaactgagaaaggcgcagtctggttagataataaactt

SEQ ID NO: 296103 - DNA, 880 bp, Unknown
  Bacterial polypeptide expressing nucleotide sequence isolated from the Sargasso Sea
atggaagaactcaaatatcgcggtttcttaaatcaatgcactaatgaagagtctctcaataaaatattaaaatctaaaaacattactttttatataggttttgattgtacggctaaatcattgcatgtaggtagcttaatacaaataatgataatgcgcctatttcaaaaatacggtcatactccaatcatattaattggtacaggaactacccgtattggtgatccttctggtaaagatgaaacgagaaaaatacttactgaagatgaaattaggaataatgcaaataatctaaaagctgtttttgacaaatatttatcattcaaaaataaaaagaataaagcgttaataatggataacgcggattggttagataaacttaattatgtagattttttaagagattttgggaaacattttacaataaacaagatgcttacctttgatagtgtaaaaatacgccttgaaagagagcagtccctcagctttgtagaatttaattatatgatttttcaagcttatgacttctatgaacttaataatcgaaattcgtgcaccttacaaattggaggttctgatcaatggggaaatattgtaaatggtgtggaactcataagaagagtaagtggcaaagaagtttttggacttacaactcctcttctcactaattctaatggtgataagatgggtaagacagttgatggagcaatatggcttaatgacgaccttctttcagcctatgattattggcagttctggagaaacatagacgacagagacgtaattcgtttcatgaaacttttcacagatctaagcaaagaacaaattgatggctatgaagaaaactcatcaaaaaatataaatgatttaaaaataatac

SEQ ID NO: 296104 - DNA, 813 bp, Unknown
  Bacterial polypeptide expressing nucleotide sequence isolated from the Sargasso Sea
atatttataaataattataaatggttaggtaaattaaattacataaaatttttaagagatattggaaaacattttacaataaataaaatgctaagctttgatagcgttaagctaagattggaaagagaacaatcattaagttatatggaatttaattatatgattttacaggcttatgattttttagaacttaataaaactaaaaattgctctttacaaataggtggatcagatcaatggggaaatatagttaatggtgtggatttaattaaaagacattctaacaaacaagtttttggattaactacacctttaataactttagcatctggaataaaaatgggaaaaacagaaagaggtgcaatttggttagataataaacttttatcatcttacgattattggcaattttggagaaatacggacgatagagatgtaataaaatttcttaaaatgtttacagatttaaaaatagaaaaaataaatgaaattaaaaataaagatataaatacattaaagatattattagccaatgaagctactaccatgttacatggaaaaattgctgctaataaagcagaacaaactgctaaaaatacttttgaaaataaatcagttggtgacagtttgccaacaattaaagtcaaaaaagaaaaatttaaaagtggtataaatataattgatattgtttttgcttcaaatttattaaattcaaaaagtgaagttagaagaatgataaataataaaggaattaaaataaataatataacagttgaaaatgaaaagttaaaaatttttttagatacttttaat

SEQ ID NO: 296105 - DNA, 917 bp, Unknown
  Bacterial polypeptide expressing nucleotide sequence isolated from the Sargasso Sea
tatgaaagaatctcttgaattaataaagcgaggcaccgatgaagtcttaactgaagacgaccttgtttcaaaacttaaatctaaaaaacaactaactgttaaagttggatttgatccaactgcacccgatcttcatcttggtcatactgtgatcttaaataagatgaggcacttccaagacctcggtcataaggtagtttttttaattggagattttactggaagaataggggacccatctggcaaaaacaaaacacgtccatcacttgataaagaggagcttgaaaaaaatgctaaaacttactctgatcaagtatttaaaatcttaaataaagatttaacagatatcagatttaactctgagtggtgtgaagatctgggtgccgatggaattattgggcttgcatcaaaatataatttaggtcgtatgcttgaaagagatgatttttcgaaacgctacaaagcaaatcaacaaattgccattcacgagtttttatatcctttaattcaggcctatgactcaatcgctttaaatgctgatgtggaaatgggcggaactgaccaaaaatttaatcttcttgtcggaagagagctgcaaagggcatttaatcaagagcctcaagtttgtataacccttcctatcttagaaggcttggatggaattaataaaatgtctaaatctttagataattatgttggtatcaatgaagatcctgatgaaatgttcggcaaaattatgtcaatttctgatgatttgatgtggagatggttcgaattactgagttttaggccaataaatgaggtaaatgagctaaaaaaagaggtgaaatcgggtatgaaccctcgagatactaagattttgcttgctgaagagataattgagcgatttcattctaaaaaagatgctgaaaatgcaa

SEQ ID NO: 296106 - DNA, 916 bp, Unknown
  Bacterial polypeptide expressing nucleotide sequence isolated from the Sargasso Sea
actgttaaggttggatttgatccaactgcacccgatcttcatcttggtcatactgtgatcttaaacaagatgaggcacttccaggatcttggtcataaggtagtttttttaatcggagactttactggaagaataggggatccctctgggaaaaacaaaacacgcccatcacttgataaagaggaacttgaaaaaaatgccaaaacttactccaaccaagtatttaaaatcttaaataaagatttaacagatatcagatttaactctgagtggtgtgaagatttaggagccgatggaattattgggcttgcatcaaaatataatttaggtcgtatgcttgaaagagatgatttttcgaaacgctacaaagcaaatcaacaaattgctattcacgagtttttatatcctttaattcaggcctatgactcaatcgctttaaatgctgatatagaaatgggtggaactgaccaaaaatttaatcttcttgtgggaagagagctgcaaagggcatttgatcaagagcctcaagtttgtataacccttcctatcttagaaggcttggatggaactaataaaatgtctaaatctttagataattatgttggcattaatgaagatcctgatgaaatgttcggcaaaattatgtcaatttctgatgatttgatgtggagatggttcgaattactgagttttaggccaataaatgaggtaaaagagcttaaaaatgaggtgaaatcgggtatgaaccctcgggacaccaagattttgcttgctgaagagatagttgagcgatttcattccaaagaagatgctgaaaatgcaaaaaatacttttcttgatagattccaaaaaggagcaaagccaaaaaatatagaaacgttctcaatttctttggatgatgatattgcaattggaa

SEQ ID NO: 296107 - DNA, 668 bp, Unknown
  Bacterial polypeptide expressing nucleotide sequence isolated from the Sargasso Sea
ccttgtttcaaaacttaaatctaaaaaacaactaactgttaaagttggatttgatccaactgcacccgatcttcatcttggtcatactgtgatcttaaataagatgaggcacttccaagacctcggtcataaggtagtttttttaattggagattttactggaagaataggggacccatctggcaaaaacaaaacacgtccatcacttgataaagaggagcttgaaaaaaatgctaaaacttactctgatcaagtatttaaaatcttaaataaagatttaacagatatcagatttaactctgagtggtgtgaagatctgggtgccgatggaattattgggcttgcatcaaaatataatttaggtcgtatgcttgaaagagatgatttttcgaaacgctacaaagcaaatcaacaaattgccattcacgagtttttatatcctttaattcaggcctatgactcaatcgctttaaatgctgatgtggaaatgggcggaactgaccaaaaatttaatcttcttgtcggaagagagctgcaaagggcatttaatcaagagcctcaagtttgtataacccttcctatcttagaaggcttggatggaattaataaaatgtctaaatctttagataattatgttggtatcaatgaagatcctgatgaaatgttcg

SEQ ID NO: 296108 - DNA, 779 bp, Unknown
  Bacterial polypeptide expressing nucleotide sequence isolated from the Sargasso Sea
gatggatttcattgatgaactaaaatggcgaggtttaattcatgactcaacaccaggattacatgaatatttaaaagaatctcaaagaactgcctatattggatttgatcccacctctgattctttgcacattggtagtctggttcctataatgttattggcgcattttcaaaaatgcggacatcaacccattgctcttgtgggtggagccactggtatgattggtgatccatctggaaaatcagcagaaagaaatctcttggatgaggcaacactcaaaaaaaatgaaagttgtatcaaggatcaactttctagatttttatcttttgacgataaattatctaatcatgctcttattaaaaataattatgattggatgaaagatttttcttttttagattttattagagatattgggaagcatataactgtaaattatatgaagtcaaaagattcagtaaaaaatagaattgattctgaatccggaactggaatgagttttactgaatttacttatcaacttgttcaaggttttgattttttatttctcaacagagaatacaattgttcaattcaaatgggtggcagtgatcaatggggaaatataaccaccggaatggaattaattagaagaattgataattcaaagggttatgcactaacatgtccattgattactaaatcagatggttcaaaatttggaaaatctgagggtggaaatatatggcttgatcctaaaaagacttctgcctataaattttatcaatattggttgaata

SEQ ID NO: 296109 - DNA, 943 bp, Unknown
  Bacterial polypeptide expressing nucleotide sequence isolated from the Sargasso Sea
catgtgtcttagacttttacaaaagtatggccacagaccaattgttcttttaggtgggggcacaactagaataggagatccatcaggtaaagaggaaactagaaaaatactttctgaaaagcaaatcgaaaaaaatattaataatattaaaaaggtttttaaaatttttctcaaaacaaataattcaaaattaaaaccaatttttgtgaataattataaatggttaagcaaactcaattatattgattttttaagagacataggtaaacattttacaataaataaaatgttaacatttgatagtgttaaattaagattagaaagagaacaatctttaagttatatggaatttaattatatgattttacaagcatatgatttttatgaacttaataaatcaaacaagtgtaatttacaaattggtggatccgatcaatggggaaatatagtaaacggtgttgaactaattaaaagagaatctggaaatcaagtatttggcttaactactccactaataacattagcatcaggtactaaaatgggaaaaactgaaaaaggagcagtatggctaaataaagaaatgttatctccatatgattattggcagttttggagaaatactgatgatagagatgtattaaagtttttaaaaatgtttactgatctgtctttagataagatagagaaagaaaaagagaaggatataaacgaactaaaaattttactcgccaataatgcaacagaaatgttacatggaataaaagaagctgaaaagtctgagaaacttgcaaaaaatacttttaaagagaattcaacaggagaaaatcttcctgggataaaagtcaataatgatattttatcaaaaaatatagttgagctgatttcttttgtaaataaagatatttcaaagtcagaaataagaagattaattaagtcaaacggg

SEQ ID NO: 296110 - DNA, 820 bp, Unknown
  Bacterial polypeptide expressing nucleotide sequence isolated from the Sargasso Sea
aaatatggacatcaaccgattgttttgatgggtggtggaacaactttaattggagacccttctggcaaagaagaaacaagaaaaattctcgataaaaaggaaattgataaaaatattaaaagtatccaaaatgtttttaatatttttttaaaatcaaaaaatccgaagacaaaacctatttttgttaataattattcttggttaagcaaattaaattatattagttttttaagagaaattggtaaatattttaccataaataaaatgttaaccttcgatagtgttaagttgagattagaaagagaacagtcgttaagctacatggaatttaattatatgatgcttcaagcctatgatttttatgaacttagtaaaagaaataaatgtattttacaaatcggcggttcagatcaatggggaaatatagttaatggaactgatttaattaaaagaaaagataagaaacaggcttatggattaactactccattaattactctttcttcaggagctaaaatggggaaaacagaaaaaggtgctatttggttaaataaaaaaatgctttctccttatgactactggcaattttggagaaatacagatgacaaaaatgtcattaattttttaaaactttttactgatttagatattgaaaaaataaacaatttaaaaaataaccaaaacattaacgatcttaaagttttgctcgctaatgaagcaacaacaatgcttcatgggtacaaagcttcaaaagactcggaaataactgcaaaaaaaacttttgaagaaaaatctgtggaaaagatttgccaacaataaa

SEQ ID NO: 296111 - DNA, 727 bp, Unknown
  Bacterial polypeptide expressing nucleotide sequence isolated from the Sargasso Sea
tatgcaaaaaaattttgtagatgagctaaggtggagaggattaataaatgatattattcctgatacagaaaaagtattattagaaggtccaatgaatggctatattggttttgatccaacatcagattctttacatattggaagtttggtacagataatcattttgatgcattttcaaaaatttggacaccggcctattattttactaggaggggcaactggaatgattggtgatccatcaggaaaatcaaaagaaagaaatttattggataacaaaactcttgaagagaattgtagattaataaaatttcaaatggaaaagtttcttgattttgataagaaaaaatcaaattcaactttaattgtaaataattatgattggatgaaagattttagcttagttgatttttctcgtaaaataggaaagcatattactgtaaattatatgatggctaaagactctgttaaaaaaagattaggaaaagagtctaatgaaggtatgtctttcactgaatttacttaccaattaattcaagggtatgattttctttatttacataataattatgattgtaaaattcagattggaggcagtgatcaatggggaaatattactacaggtacagaattaattagaagaaaaactggacaaaaagcttatgctctaacttgtcctatggtaaaaaaggtagatggaacaaaattggcaaaacagaagaaggaaata

SEQ ID NO: 296112 - DNA, 649 bp, Unknown
  Bacterial polypeptide expressing nucleotide sequence isolated from the Sargasso Sea
atgaataattttttaaaagaatttaaaaatagaggatatttttatcaatgtactgatgaaataggattatcaaaactattaaatgacgaaagcagtaatgcctatattggctttgatagtactgcaccaagcttgcatgttggtagtttgttgcagattatgtgcctaagacttttacaaaaacacggacatagaccgattgttcttttaggtggtggaacaaccagaattggtgatccatcaggaaaagaggaaacaagaaagatcctttctgagaaacaaatagaaagtaatataaataatataaaaaaggtttttaaaatttttttaaaaacaaaaaataaaaaattaaaacctctttttgttaataattataaatggctaagtaaacttaattatataaaatttttaagggatattggaaaacattttacaataaataaaatgttaagttttgagagtgttaaactcaggttagagagagaacaatctttaagctatatggaatttaattatatgattttacaagcttatgatttttatgaactaaataagtcaaataaatgtaatttacaaattgggggatcagatcaatggggaaatataataaatggtgttgaattaattaaaagggaatcaggaaagcaag

SEQ ID NO: 296113 - DNA, 676 bp, Unknown
  Bacterial polypeptide expressing nucleotide sequence isolated from the Sargasso Sea
aaaaccaatttttgtaaataactataaatggttaagcaaactcaattatatagattttttaagagacataggtaaacattttacaataaataaaatgttaacatttgatagtgttaaattaagattagaaagagaacaatctttaagttatatggaatttaattatatgattttacaagcatatgatttttttgaacttaataaatcaaacaaatgtaatttacaaattggtggatctgatcaatggggaaatatagtaaatggtgttgaacttattaaaagagaatctggaaatcaagcatttggcttaactactccactaataacattagcatcaggtactaaaatgggtaaaactgaaaaaggtgcagtatggttgaataaagaaatgttatctccatatgattattggcagttttggagaaatactgatgatagagatgtattaaagtttttaaaaatgtttactgatctatctttagataaaatagagaaagaaaaagataaggatataaacgaactaaaaattttactcgccaataatgcaacggaaatgctacatggaataaaagaagctgaaaagtctgagaaacttgcaaaaaatacttttaaagagaattctacaggagaaaatctcccagggataaaaatcaataatgatattttgtcaaaaaat

SEQ ID NO: 296114 - DNA, 847 bp, Unknown
  Bacterial polypeptide expressing nucleotide sequence isolated from the Sargasso Sea
atgactgaaagtaaaaacaaaagcgcttccaaagaggttcttgcagaactcaaacgcggcgtggaggagatgctcctcgaagaggaattgcttgagcgcctcgcttcgaatcggccattaaggatcaaggtaggtttcgatccgacagcgcctgatcttcatctgggacacacggtcatcatcaacaagatgcgccaattccaggaactggggcatgaagtggtgtttctgattggggatttcaccggcttgattggggatccaagcggcaagaatgtaacgcggccgccgctcacggcagaagagatcgaggcgaatgcagcaacctacaaggcgcaggtatttcgaatactggatcccgataagactcaggtcgagttcaattcaaagtggtgtagtgaattgggtgcagagggcatcattcgcctggcctcaagacatactgttgcccggatgctggagcgggacgacttctcgaagcgatacaagggcggccagccgatcgcgattcatgagtttctctaccccctcatgcagggctatgactcggtagcgcttaagaccgacgttgagatggggggaaccgatcagaagttcaacttgctggtggggcgtgagttgcaaaaacaatatggccaaccgagtcaggtggtgatcacgctgccgttgctcgaaggactggacggtgtacagaagatgtcgaagtcgttgggtaacatcgtggggattaccgatacgccagatgacatgttcggcaagctgatgtcaatctcagatgatctcatgtggcgatacttcgagctcttgagcttccaatccctgctggatataaaaaagttgcgcgagt

SEQ ID NO: 296115 - DNA, 856 bp, Unknown
  Bacterial polypeptide expressing nucleotide sequence isolated from the Sargasso Sea
atttttaaaagaattaaagatagagggtatttttatcaatgcacaagtgaagatgaattatctaaattattagacaaagaaaaaatcaaaggttatatcggttttgattgtacagctgaaagccttcatgttggaagcttgcttcaaataatgtgtttgagattaatgcaaaagtacggccatagaccaattgtactgattggaggtggaacaaccaggattggtgatccgtcaggaaaagataaaacaagaaaaattctaactgaagaagaaatagaaaaaaatattaaaaatatcgaaaaaatattaaaaaattatttagataataatgatccaaaaactaagcctatatttgtaaataactattcttggcttaaaggattaaattatatttctttcctacgagacattggaaaacattttacaataaataagatgcttactttcgaaagtgtaaaaactagactggatagagagcagtctttaagttatatggaatttaattatatgatcttgcaagcttacgattttttagaattaaataaaaatgaaaattgtacattgcaaatcggtggttcagatcaatgggggaatattgttaatggaactgaattaataaaaagatattcaaacaaacatgcttacggtttaacaactccactcattactttggcatcaggagctaaaatggggaaaacagagactggtgccatttggttggataaaagattattatcatcttatgattattggcaattttggagaaacacagatgacagagatgtgattaaatttttaaaaatgtttacagatttgaatattgatgaaataaataaaatgaaagatgaagatatca

SEQ ID NO: 296116 - DNA, 766 bp, Unknown
  Bacterial polypeptide expressing nucleotide sequence isolated from the Sargasso Sea
ttgaaaaaatttttagataatgatgatccaaatacaaaaccaatatttgttaataattatacttggctcaaaaatttgaattatatttcatttttaagagatataggaaaacatttcactattaatagaatgttaacatttgatagtgtaaaactcagattacaaagagagcaatctcttagctatatggagtttaattatatgattttacaagcatatgactttcttgaattaaataagaaagaagattgtatcttacaaattggaggttcagatcaatggggaaacattgtaaatggtgtcgagcttattaaaaggtattcaaataatcaaacctttggtttaacaacacctctaatcacaatggctactggtgctaaaatgggaaaaacagaaagtggtgctatttggttagatgaaaaatacttatcagcttacgattattggcagttttggagaaatgtagatgatagagatgtaattaaatttttaaaaatgtttactgaaattgaaattatggaaatagaaaaaaatagtcataaagatataaatcaattaaaaatactacttgctaataaaaccacagaaatgttacatggaaaagaagcagctacaaattctgagcaagcagcaaaagaagctttttctggaaataccttaggcttaaacttgcctaaatttaatattcaaaaaagtaaaatagaggaaaagataaatatagtagaccttgttttgttatctaaattagaaaactctaaaagtgaaa

SEQ ID NO: 296117 - DNA, 694 bp, Unknown
  Bacterial polypeptide expressing nucleotide sequence isolated from the Sargasso Sea
atgaataaatttttaaaagaatttaaagatagagggtatttttatcaatgcacgagtgaagaagaattgtctaaattattaaataaagagaaaatcaaaggttatatcggttttgattgtactgctgaaagtcttcatatcggaagcttgctacaaataatgtgtctaagactaatgcaaaagcacggtcatagacctattgtattaataggtggtggtacaactagaattggcgatccgtccggaaaagataaaacaagaaaaatactaactgaagaagaaatagaaaaaaatattaaaaatattgaaaaaatattaaaaaattatttagataataacgatccaaaaacaaaacctatattcgtaaataattattcttggcttaaaggtttaaattatatttcttttttaagagatattggaaaacattttacaataaataagatgctaacatttgaaagtgtaaaaactagactggatagagaacaatctttaagttatatggagtttaactatatgattttacaagcatatgattttttagaattaaataaaaaagaaaattgtacattgcagattggtggatctgatcaatggggaaatatagtaaatggtactgagcttataaaaagatattcaaataaacaggcatatggattaactacgcctctaataactttagcttcaggagcta

SEQ ID NO: 296118 - DNA, 916 bp, Unknown
  Bacterial polypeptide expressing nucleotide sequence isolated from the Sargasso Sea
agtgaagatgaattatctaaattattagataaagaaaaaatcaaaggttatatcggttttgattgtacagctgaaagtcttcatgttggaagcttgcttcaaataatgtgtttgagattaatgcaaaagcacggccatagaccaattgtactgattggaggtggaacaaccaggattggtgatccatcaggaaaagataaaacaagaaaaattctaaccgaagaagaaatagaaaaaaatattaaaaatattgaaaaaatattaaaaaattatttagataataatgatccaaaaactaagcccatatttgtaaataactattcttggcttaaaggattaaattatatttctttcctgcgagatattggaaaacattttacaataaataagatgcttactttcgaaagtgtaaaaactagactggatagagagcagtctttaagttatatggaatttaattatatgatcttacaagcatatgattttttagaattaaataaaaatgaaaattgtactttgcaaattggcggctcagatcaatggggtaatattgttaatggaactgaattaataaaaagatattcaaacaaacatgtttatggtttaacaactccacttattacactggcatctgggtctaaaatgggaaaaacagagactggggctatttggttagataaaagattattatcatcttatgattattggcagttttggagaaacacagatgacagagatgtgattaaatttttaaaaatgtttacagatttaaatattgatgaaataaataaaatgaaggatgaagatatcaataaattgaaaataaaactagccaatgaaactacatctatgcttcatggaaaaaatgaagctttatctgcagaaaaaactgcgaaaaaaactttgaagaaaattc

SEQ ID NO: 296119 - DNA, 667 bp, Unknown
  Bacterial polypeptide expressing nucleotide sequence isolated from the Sargasso Sea
tatgaataaatttttaaaagaatttaaagatcgtggatatttctaccaatgtactagtgaggatgcattatcaaatctactagataaagaaaaaatcaaagcttatattggttttgattgtactgcagagagtttacatgttggtagcttactgcaaataatgtgtttaagattacttcaaaaaaatggacatcgtcctattgttttacttggtggtggaactactagaattggtgacccttcaggaaaagataaaactagaaaaattttaagcgaagaagaaattgaaaaaaatatacaaaatattaaaaatattcttaaaaaatttttagataatgatgatccgtacacaaaaccaatatttgtaaataattattcttggttaaaaaatttgaattacatatctttccttagagatataggaaaacactttactatcaataggatgttgacatttgatagtgttaaattgagattggatagagaacaatcacttagttatatggaatttaattacatgattttacaagcatatgattttttagaattaaataaaaaagaaaattgtgttttacaaattggaggttctgatcagtgggggaatattgtgaacggtgttgaacttattaaaagatactctaataatcaaacttttggtttaactact

SEQ ID NO: 296120 - DNA, 907 bp, Unknown
  Bacterial polypeptide expressing nucleotide sequence isolated from the Sargasso Sea
gttttgattaacaaaatgcgtcagtttcaggatatggggcatgaagttcattttttgattggtgattttactggtatgattggtgatccatctggtaaaaataccactagagttgctttaacacgtgaacaggttttagagaattctaaaacctatgaaaaccagatatttaagatattggatcctaacaaaactaagttagagtttaattcgtcttggatgaataaattggatgctgcagatatgattcggttggcttcaaactgtactgttgctcggatgttagagcgtgatgattttagcaagcgttatagtcaggagcagcctattgccattcacgagtttttatatccacttttgcagggttatgattcggtcgcattggaggctgatgttgagttaggagggacggatcaaaagtttaatttattgatgggtcgtgagttgcaaaagcattttaaacagcgccctcaaattgtgataaccatgcccttgttggaaggattagatggtgttgataagatgtcaaagtctcttaataacgcgattggtattaatgatccagctgaggatatgtttgccaagttgatgtcaatttcggatgagttaatgtggcgttattttgagttgttaagtttcaagtctttgtctgaaattgaagcttatcagcgtgaggtggagcagggcaagaacccacgtgatgttaaggtggcgttagcacaggaaattgttactcgctttcatgatggcgatgcggctgagagtgccttgcaggtgtttgaggcgagatttaagcgccatgagttgccagacgacttagagcctatcgatattattgttactgatgatggcttggagattggttacattcttaagcaggcagatttggtgactagtacttctgagg

SEQ ID NO: 296121 - DNA, 580 bp, Unknown
  Bacterial polypeptide expressing nucleotide sequence isolated from the Sargasso Sea
ggaagcttattacaaataatgtgtttaagattgttgcaaaaacatggtcatcaaccaattgttttattaggtggtggaacgacacgtatcggggacccttcgggaaaagaagaaactagaaaaattttatcagaaaaagaaattgaaaaaaatataaaaaatattgaaaaaatatttaaaatatttttaaaaactaaaaaaaataaaacaaaaccaatttttataaacaattataaatggctaggtaaattaaattacattaaatttttaagagatattggaaaacattttaccattaataagatgttaagttttgatagtgttaaattacgtctagagagagaacaatctctaagttacatggaatttaattatatgattttacaagcatatgatttcctagaattaaacaaaacaaaaaattgtttaatgcaaattggaggatctgaccaatggggaaatatagttaacggtgttgaattaattaagagacattctagcaagcaagtttttggtttaactacgccattaattaccttggcttcaggagtaaaaatgggcaaaacagaaaaaggagcta

SEQ ID NO: 296122 - DNA, 724 bp, Unknown
  Bacterial polypeptide expressing nucleotide sequence isolated from the Sargasso Sea
atgaaaaattcattccttcaagagtttaatgaaagagaatattttaatcaatgcactaatttagagtccctaaacgggttaatggataagaaaaaaataagggcttatattggtttcgactgtactgctcaaagcctacacgttggaagcttacttcaaattatgtgtttaaggttgttgcaaaaacatggccatcaaccaattatattgcttgggggaggcactacaagaataggtgatccttcaggaaaagaagaaacaagaaaaattcttacagaaaaagaaatcgaaaagaatataaaaaatattaagaaagttttttcgatatttcttgataacaaaaattctaaaacccgtcctatttacgtaaataattataagtggcttggaaaactaaattatataaaatttttaagagaaattggaaaacattttacaatcaataaaatgctaagttttgatagtgttaaacttagattggaaagagagcaatctttaagctatatggaatttaactatatgatactacaagcatatgattttttagaactgaacaaaacaaaaaattgtttaatgcaaataggtggttctgatcagtggggaaacatcgtaaacggtgttgagttagttaaaagatattctagtaaacaagtttacggattaacaacaccgttaataactttagcttctggtgctaaaatgggtaaaacagaaaaaggtgctg

SEQ ID NO: 296123 - DNA, 673 bp, Unknown
  Bacterial polypeptide expressing nucleotide sequence isolated from the Sargasso Sea
atgacattaattgaagaattaaaatttcgtggtttccttcaccagtgtactaatgaagtaattttaaatgaattaataaattctaataaaataaaattttatattggctttgattgtacggctaagtccttgcatgtaggaagtcttattcaaataatgataatgaggctatttcaaaaatatggccatacgcctattgttcttatcggaaaaggcacaacccgtataggagacccatcaggcaaagatgaaacaagaaaaatattatctgatgatgaaatagattcaaatgcagaaaatctaaaacaggtctttgatagatttcttttatcagataatgaggattctaagtgggtaactaaagataattctgaatggttagacaaactaaattatgtcaacttcctaagagattatggaaaacattttacaattaataaaatgttaagctttgatagtgttaaaattagacttgatcgagagcagtcacttaattttgttgaatttaattatatgatatttcaagcctacgatttttttgaattatataaaagagacaactgcgtgcttcagataggtggatcagaccagtggggtaacattgtaaatggcgttgaattaataagaaaagcaagtggtaaggagtcttttggtctaaccacacctttatgac

SEQ ID NO: 296124 - DNA, 788 bp, Unknown
  Bacterial polypeptide expressing nucleotide sequence isolated from the Sargasso Sea
tatggaaaattcatacttatctgaatttaaaaatagggaatattttcaccaatgtactggttctgatgaattaaaaaagttaatgagtaaaaaaaaaatcagggcttacataggctttgattgtactgcatctagtctacatgttggaagtttgttgcaaataatgtgtttaagactattacaaaaacatggacaccaaccaatagttttgttgggtggtggtacaactcgaattggtgatccttctggaaaagaggaaacaagaaaaattctttctgagaataaaattgaaaacaacataaaaaatattgaaaaagtgtttaaaatttttcttaaaacaaaaaaccctaaaactaaaccaatatttgtaaataactttaaatggcttggaaaattaaattatataaaatttttaagagaaattggaaagcattttaccattaacaaaatgttaagttttgatagcgtaaaattaagattggatagagaacaatctttaagctacatggaatttaattatatgattttacaagcttatgattttctggaactgaataaaaataaaaactgtttaatgcaaattggaggttctgatcaatggggaaatattgttaatggagtagaattaattaaaagacattctggaaaacaagtttttggattaacaactcctttaataactttggcttcaggatctaaaatgggtaaaacagaaaaaggagctatatggttagataaaaaactattatcatcctatgactattggcagtattggagaaatacagatg

SEQ ID NO: 296125 - DNA, 788 bp, Unknown
  Bacterial polypeptide expressing nucleotide sequence isolated from the Sargasso Sea
tatgaataaatttttacaagaattccatgatagaggctactattatcagtgtactgataacaatgagctaagtaaaattttagatagtaaaaaaataagagcctatataggttttgattgtacagctgaaagtcttcatgttggaagtttactacaaataatgtgcttaagattacttcaaaaacacggtcaccaaccaattgttttgcttggaggtggaaccactagaataggtgacccttctggaaaagataaaactagacaattgttagatgagaaaacaattgaaaaaaatatcaaaaatattgaaaaaatattaaaaatatttttaactaccgacaataaaaatacatctccaatatttgttaacaactatgaatggcttaaagatttaaattatatttcttttttaagagatattggaaaatactttacaataaataaaatgttaagttttgatagtgtgaaacttaggttagaaagagaacaatctttaagttatatggaatttaattatatgattttacaagcatatgatttcttagaattaaataaaaaacacgggtgcttacttcaaattggaggatccgatcaatggggtaatattgtaaacggtgttgaattgataaaaagacattcctcaaatgaaagctttggtctcacaactccattaatcactttagcatcgggtgctaaaatgggtaaaacagaaagtggagctatatggctagataaaaacttactttctccatatgagtattggcagttctggagaaatgtagatgaca

SEQ ID NO: 296126 - DNA, 934 bp, Unknown
  Bacterial polypeptide expressing nucleotide sequence isolated from the Sargasso Sea
aatatggaaaattcatttctaaaagaattcaaagatagagaatattttaatcaatgtactaattctgaagaattagaacaattgatgagaaagaagaaaatcaaagcttatattggttttgattgcacggcatctagtttacatgttggaagcctattgcaaataatgtgtttgaggcttttacagaaatatggtcatcaaccaattgttttattaggtggcggtactacaagaataggagacccttctggtaaagaagaaacaagaaaaatactttctgaaaaacaaatagaaaaaaatattagaaatattgaaaaggtatttaagatttttttaaaaacaaaaaatcctaaattaaaacccatattcgtaaataattataaatggcttggaaaattaaattatataaaatttttaagggaaattggaaaacattttacgataaataaaatgctaagttttgatagtgttaagttgagattagatagagaacaatctttaagttatatggaatttaattatatgattctgcaagcatatgattttctcgagctgaataaaactaaaaattgtctaatgcaaataggtgggtcagatcaatggggaaatattgttaatggtgttgagctaataaaaagatattctgcaaatcaagttttcggattaacaactcctttaattacattggcttcaggtgctaaaatgggaaaaactgaaaaaggtgcaatctggcttgatcagaaactgttatcaccttacgattattggcaattttggagaaacactgatgatcgagatgttataaaatttcttaaaatgtttacagatttggaattaaataaaattgaaaaattaaaaaatgaagatatcaacaaattaaaaattattttggcaaatgaaaccttacttcaatgctacccatggaaaacttgca

SEQ ID NO: 296127 - DNA, 919 bp, Unknown
  Bacterial polypeptide expressing nucleotide sequence isolated from the Sargasso Sea
agatccttcaggcaaagattcaactagaaaaattttaaatcagaaagaaattaaaaataatataaaaaacattaaacaggtctttactaaagttttagacacatcaaaaaataagactaaaccaattttcgtagataactatgattggctagcaaaattaaattacattgattttttaagagatgtaggaaaacatttcactattaataaaatgctcacttttgatagtgttaaattaagattagaaagagaacaatcgcttagctatatggaatttaattacatgatcttacaagcgtatgatttttatcaactatttaaaaaaaataaatgtattttacaaattggtggttccgatcagtggggaaatattgtaagtggagttgaattaattagacggatgctaaagaaagaatcctacggacttactactccattaataactctatcttcaggggctaaaatgggaaaaactgaaaaaggtgcagtctggctaaatgaaaagttattttcttcatacgactattggcagttctggagaaatacagatgatagagatgttaaaaattttttaaatttttttactgaaattaaatctgataaagtaaatctattaattgaaagtgaaaaaaatattaataaattaaaaattcttcttgccaatgaagctacaaagatattgcacggtgaagctgctgcaaaaaaagctgaaaaaacagctaaagaaacttttgtgtcaggtggattcggatcgaatcttccggaaatcaaaattaaaaaagatgacttaaatcgaggaattaaaatattggatctactagtattaaataaagttatgtcctcaaaaagtgaagtaagacgagctgtcaaaagtaatgctttaaaaataaataatgaagtcttaacagatgaaaataaa

SEQ ID NO: 296128 - DNA, 811 bp, Unknown
  Bacterial polypeptide expressing nucleotide sequence isolated from the Sargasso Sea
catgccggaacatccgcagtccctgccggcttggttagcccgcggcatggccgatctcttccctgatggtgattcggctgatgtggatcaggctttggcggccaggctcgctgcggctagtgcccagggccggccgcttcggatcaagctcggcatcgaccccaccggcagcaatatccacctggggcacagcattttgtttcgcaaactgcgcgctttccaggacgcaggccatacggcggtgttgatcattggtgatttcaccgctcgcattggtgatcccaccggtaaaagtgccaccagggtgcaactcaccgctgaggacgtagaggccaacgcggccacctacctggcccagttagggcatggccagcccagggaacgggccctgttggattttgaaacgcctggccggcttgaggtccgccgcaacagtgaatggctggctgacctggatctgccccaggtgattggcctgctaggcaccgccaccgttggtcagatgctggctaaggaggattttgccaagcgctatggcagtggcactccgattgccctgcatgagtttctctacccgttgctgcagggatacgactcagtggcggtcgatgccgatgtggaactgggcggcaccgaccagaaattcaatgtggccatgggccgcgatcttcagcgccatttcggccagcgcactcagtttgggttgttgctgccgatcctggtgggcctcgatggggttcaaaagatgagcaagagcctcggcaacacggtgggcctagaagaggacccgctctcgatgtattccaagctt

SEQ ID NO: 296129 - DNA, 885 bp, Unknown
  Bacterial polypeptide expressing nucleotide sequence isolated from the Sargasso Sea
ttctaaagaaaaaacaataaaagcctatattggatttgattgttcagctcctagtttgcacgtcggaagtttacttcagattatgattttaagacttctccaaaagtatggtcataaacctattgtgttattaggtggtggaactacacttattggtgatccctctggtaaagatgcaactaggaaaattttcaagcaaaaagatataaaaaaaaatatcacgagtattaaaaaactttttgaaaaactattattctctaaaaataaaaaaaccaaaccaatttttgtcgataattatcagtggctctctaaacttaaatatatcgatttccttagagacataggtaaacattttacattaaataaaatgctaactttcgatagtgttaaattaagattagaccgtgaacaatcactaagttatacagaattcaattatatgattttacaggcttacgatttttaccaattatataagaaacatgattgtattttacaaatgggtggttcagatcagtggggcaatatagtaaatggtgtcgaattaataagacgaattctacaaaaagattcatatggattaacaacccctcttatcactttatcgtcaggcgccaaaatgggaaagacagaaaaaggtgctgtttggctagataaaaaaatgttttcaccatatgagtattggcaattttggagaaatatatcagatgaagatgttaaaaaatttttaaattattttacagaaatagaaactaacgatttatctcaaaaaattgatgaagaaaaaaatattaacaacttgaaaattcttttagcaaatgaagcaacaactttaatgcatggtgcaaaagctgccaaagatagtgcggatactgctaaggaaac

SEQ ID NO: 296130 - DNA, 709 bp, Unknown
  Bacterial polypeptide expressing nucleotide sequence isolated from the Sargasso Sea
atgaaaaattcattccttaaagagtttaatgaaagagaatattttaatcaatgtactaatttagaatccctaagcggtttaatggataagaaaaaggtaagggcttatattggtttcgactgcaccgcccaaagtttgcacgttggaagcttgcttcaaattatgtgtttacggttattacaaaaacatggacaccagccaattatattacttggaggaggcactacaagaataggtgacccttcaggaaaagaagaaacaaggaaaattcttacagaaaaggaaatcgaaaagaacataaaaaatattaaaaaagtgttttctgtatttctagatagcaaaaattctaaaacgcgtcctatttatgtaaacaattataaatggctcggaaaactaaattatataaaatttttaagagaaattggtaaacattttacaattaataaaatgttaagttttgatagtgtcaaacttagattggagagagagcaatcattaagctatatggaatttaactatatgatattacaagcatatgatttcttagaacttaacaaaacaaaaaattgtttaatgcagattggcggctctgatcaatggggtaacatcgttaatggtgttgagttagttaaaagatattctagtaatcaagtttacggtttaacaaccccattaataactttagcatctggtgctaaaatagggtaaa

SEQ ID NO: 296131 - DNA, 742 bp, Unknown
  Bacterial polypeptide expressing nucleotide sequence isolated from the Sargasso Sea
atggaaaattcatttctaaaagaattcaaagatagagagtatttcaatcaatgtactaattctgaagaattagaacaattgatgagtaagaaaaaaattagagcctatatcggctttgattgcacagcatccagtttacatgttggaagtcttttgcaaataatgtgcttaagacttttacaaaaacacggtcatcagccaattgtactactaggtggaggaacaacaagaataggagatccgtcaggaaaagaagaaactagaaaaatactttcagagaaacaaatagaaaagaatataaaaaatattgaaaaagtttttaggatttacttaaaaaataataatccaaaattaaagccgatatttgttaataattataagtggctagggaaattaaattatataaaatttttacgagagattggaaaacattttacaattaataaaatgctaagtttcgatagtgttaaattaagattagatagagaacaatcgttaagctatatggaatttaattacatgattttacaagcttatgacttcctagaactcaataaaactaagaattgtgtaatgcaaataggtggttcagatcagtggggtaatattgttaacggtattgagcttattaaaagatactcgagtaaacaagtttttggattaacgactccattaataactttagcatcaggtgctaagatgggaaaaactgagaaaggtgcggtctggctcgatgataaac

SEQ ID NO: 296132 - DNA, 731 bp, Unknown
  Bacterial polypeptide expressing nucleotide sequence isolated from the Sargasso Sea
tatggaagaggcattaaaaattattaatataggtacagatgaaattcttactgaatctgatctcaaaaaaaagcttgattcaggtaaacaacttatagttaaagcaggttttgatccgactgctcctgatttacattttgggcatactgttttattaaataagcttaggcacttccaagatctggggcataaagttgtttttttaattggagattttactggaagaattggtgatccgtctggtaaaaacaagacaagaccaactgtggattcagacagccttattaagaatgcgaaaacctacaaggaacaggtttttaaaattttaaaagaagatcttactgaagttaaattcaattccgaatggtgtgatgagcttggagcagatggactaatcaaacttgcatccaagtataacgtagcaagaatgctagagagagatgattttaataaaagatttacttctaataaaagtattgcgatacatgaatttttgtatcctttagttcaaggctatgattcagtcgcacttcaggctgatgttgagtgcggtggaacagatcaaaaattcaatttattagttggtagagaacttcaaagagattacgatcaagatcctcaagtagttataaccgttccaattcttgaaggtcttgatggcgaaaagaaaatgtcaaaatcccttgataactatatagctatagatgaagagccaaatgagatgttcggaa

SEQ ID NO: 296133 - DNA, 691 bp, Unknown
  Bacterial polypeptide expressing nucleotide sequence isolated from the Sargasso Sea
tatggaaaattcattcttaaaagaatttaaaaaaagagaatatttcaatcaatgtactaattcagatgaattagagcgattgatgaataaaaaaaaaattcgagcttatataggttttgactgtacttctcaaagcttgcacgtgggtagcttattacaaattatgtgtttaagaacacttcaaaaacatggtcaccagccaattgtcttattgggaggcggtaccactcgtattggtgatccttcgggtaaagaagaaactagaaaaatattatctgaaaaagaaattgaaaaaaatatacgaaatatacaaaaaatttttaaagtttttttaaatacaaaaaatacaaaaacaaaaccaatatttgttaataattacaaatggcttggaaaactaaattatataaaatttttaagagaaatcggtaaacattttacaattaataaaatgttaagttttgatagtgtgaaattaagactagatagagaacagtcgttaagctacatggagtttaattatatgatcttacaagcttatgattttcttgaattaaataaaacgaaaaattgtctaatgcaaattggtggttcggatcaatggggaaatattattaatggcgtagaccttattaaaagacattctaacaaacaagtttttggattaacaactccgttaattacattagcttcg

SEQ ID NO: 296134 - DNA, 752 bp, Unknown
  Bacterial polypeptide expressing nucleotide sequence isolated from the Sargasso Sea
aatgtgcctaagattactacaacatcacggtcatcagccaatagttttattgggtggaggtacaactagaataggagatccttctggtaaagacaaaacccgtaaaatattatctgagaaagaaattgaaaaaaatgcaaaaaatattgaaaaaatattaaaaaaatttttaaacacaaataatcaaaaaacaaaacctatttttgtaaataattataaatggttaagaaacttaaactacatctcgtttttaagagatataggaaaacatttcacgataaataagatgttaacttttgatagtgttaagaataggttagatagagaacaatctttaagttacatggaatttaattatatgattctccaagcttatgattttttagaattaaataaaaaagagagctgcctacttcaaataggtggatcagatcaatggggtaatattgttaatggagttgatcttattaaaagatattccaataaacaagcatacggtttaacgacacctcttataaccttagcctcaggtgcaaaaatgggaaaaacagcagatggtgctatttggttagataagaaatttttatccccctatgattattggcaattttggagaaatacagatgatcgagatgtagtaaaatttttaaaattttttacagacgaagcagtaagtgatattgaaaaattaaatgagaataatattaataatttaaagattttacttgcaaacaaagctactgaaatgcttc

SEQ ID NO: 296135 - DNA, 466 bp, Unknown
  Bacterial polypeptide expressing nucleotide sequence isolated from the Sargasso Sea
catggagaatttgatggcaagcagtaacttgattaaacaattgcaagagcggggcctcgtggcccaggtgacggacgaggaagcgttagcagagcgactggcgcaaggcccgatcgcgctctattgcggcttcgatcccaccgctgacagcttgcatttggggcatcttgttccattgttatgcctgaaacgcttccagatggcgggccataagcctgttgccctggtgggcggcgcgaccggtctgattggtgacccaagcttcaaagccgctgagcgtaaactgaacaccgaagataccgtgcaggagtgggtcgataagatccgcaaacaggttgcaccgttcctcgacttcaactgtggcgataacgccgcgattgccgcgaacaactacgactggtttggcaccatgaacgtgctgaccttcctgcgtgacatcggcaagcacttctctgttaacagatga

SEQ ID NO: 296136 - DNA, 902 bp, Unknown
  Bacterial polypeptide expressing nucleotide sequence isolated from the Sargasso Sea
gcagctcagcaaagaggatgtggccgccaatgcctccacctatctgcgccagttggggcaggaccaacccaaggaaacggcgctgctcgatttcgagactccaggccggctggaggtgcgatacaacaccgaatggctggaggggatggatctgccggcggtgattggcctgctgggcaccggcaccgtgggccagatgctggcgaaggacgacttctccaagcgctacggcagcggcaccccgattgccctgcatgaattcctctatccgctgctgcagggttacgactcggttgctgttgatgccgatgtggagctgggcggcaccgaccagaaattcaatgtggcgatggggcgcgacctacagcgccatttcggcaggagcacccagttcggtttgctgttgccgatcctggtggggctcgatggcgttcagaagatgagcaagagcctcggcaatgtggtggggctggaggaggatccgctgtcgatgtactccaagctggagaaggtcggcgatgcggcgatcaacgactacgtgacgttgctgaccgatctcgatctggcgacgttgcctgagaatccccgcgagaagcagaaggcgatggccctggcggtgaccgccagccgctatgggatggaagcggcgcacaaggcgcaagtggatgcggcctccctggtgggtggggccggcgatgccagtgcagaggttcccgaggcgtcgttggcggaggtgaacttcccggccaaggcgttctatctgctcagtgccgtgggcatctgcgccagcagcagcgatgctcgccgccagatcaagggcggtgcggtgcggctcgagggcgagaagatcatcgatcccaaccaggagttcgcctcagcggatgagctggagggcaaggtgc

SEQ ID NO: 296137 - DNA, 733 bp, Unknown
  Bacterial polypeptide expressing nucleotide sequence isolated from the Sargasso Sea
atgaatgactttaactggaaattaataaatcgtggcgttgatgaaatccttacaaaggatgatttaacagcaaaattagactctaaaaaacaactaattgtaaaagttggatttgacccaacagcgcctgatttacatcttgggcacacagttattttaaataagatgagacactttcaagagctgggccataaagtcgtttttctgatcggagattttactgggagaataggagatccttctggtaaaaataaaactaggccaactcttcaaaaagacgagttagaagaaaatgcaaaatcttattctgatcaagtatataaaatacttaaaaaagaattaacagagataagatttaattcagaatggtgcgataagttaggcgcagatggcattattgagcttgcttcaaaatataatttaggccgcatgctcgaaagagatgattttaataaaagatataaagctaatcagcagatagctcttcatgagtttttatatccccttatacaagcctatgattcaattgctcttaaagctgatattgaaatgggcgggacagatcaaaaatttaatcttttggtaggaagagagctgcaaagagcatttggtcaggagccgcaagtttgcattactctgccaatccttaaaggattatatggagttaataaaatgtcaaaatctttggataattatattggcattaatgaaaaacctgatgatatgtttggga

SEQ ID NO: 296138 - DNA, 931 bp, Unknown
  Bacterial polypeptide expressing nucleotide sequence isolated from the Sargasso Sea
tatgaataaatttttaaaagaatttaaagatagaggctttttttaccaatgtactgacgagagtcagttatctgaactactaaataaaaaaaagataaaagcatatataggatttgattgtacagctgaaagcttacatgtaggaagtctgttacaaataatgtgtttgaaattattgcaggatcacggacatcagccaattgtcctgcttggtggaggaacgacaagaataggtgatccatctggaaaagataaaactcgaaaaattctttctgaaaaagaaatagaaagaaactcaaaaaatatagaaaaaattttaaaaaattttttggatacaaaaaataaaaaaactaagcctatatttgtaaataattttacttggctaaagagcctaaattacatatcttttttaagggatataggtaagcattttacaataaataaaatgttaactttcgacagtgtaaaaacaagattagatagagaacaatccttaagttatatggaatttaattatatgatattacaagcatatgattttttagaactaaatagaaatgaaggttgcattttgcaaattggtggctccgatcaatggggtaatattgtaaatggtgtcgatcttattaaaagatattctgataatcaaacttacggtttaactacaccgcttattacattggcatctggagctaaaatgggcaaaacctctgatggagctgtttggttagataaaaaacttttatctccctatgattattggcaattttggagaaacacagatgatagagatgtaataaaatttttaaaattttttacagatatcaaggttaaagaaattaaaaatttggaaaataaaaacattaatgatttaaaaaatatacttgcaaacaaggccaccgaattactgcatgggaaaaagaagctgtag

SEQ ID NO: 296139 - DNA, 798 bp, Unknown
  Bacterial polypeptide expressing nucleotide sequence isolated from the Sargasso Sea
gatttcgggtaaacttaatgaagtaattaacaaaaaacctataaaagcatatattgggtttgattgtactgcaaagagtcttcacgttggaagcttattgcagattatgattttaagacttcttcaaaaacatggtcatcaaccaatagttttattagggggaggaaccaccttaattggagatccttcaggaaaggacacaacaagacaaattttaaaacataaggatataaaggcaaacatttcaagtatcaaaaaaattttcgaaagacttttaaaaaataaaaataaaaaggttaaacctatttttgtagataactatgactggttaggaaaattaaaatatattgagtttttaagagatgttggaaaacatttcacaataaataaaatgctttcatacgatagtgtaaaactcagactagatagagaacagtcactaagttatatggaatttaattatatgattttgcaggcatttgatttttataaactatttgaaaagcagaattgtgttttacaaatgggtggttcagatcaatggggtaatattgtaaatggtgttgaattaattagaagaattttaaaaaaagaatcctttggtcttactaccccgttaataactttgtcgtctggtgcaaaaatgggaaaaactgaaaaaggtgcagtgtggttagataaaaaattattttcaccgtatgaatattggcagttttggagaaatacttcggatcaagatgttaagaaatttttaatgtatttttcagaaattgatttaagtgaattaaaaaaaatttt

SEQ ID NO: 296140 - DNA, 795 bp, Unknown
  Bacterial polypeptide expressing nucleotide sequence isolated from the Sargasso Sea
tagcttacatgtcggtagcttattacagattatgattttaagattaatgcaaaaacatggtcataaaccaattgttttactgggagggggaactactttaatcggtgatccatctggaaaggactctactagaaaaatcttacatcaaagtgaaattagaaaaaatattaaaagcataaaacaagtttttaataaggtcttagataccactaataaaaaaacctcacccatttttgttgataattctaagtggttaacgaaattaaattatataaattttctaagagacattggatgtcattttacagtaaataaaatgcttacatttgaaagtgtaaaattacgattagaaagagagcaatctttaagttatatggaatttaattatatgatgttacaagcttatgatttttatcagttgtttaagaaaaataattgtgtgttacaaattggtgggtctgatcaatggggtaatatcgtaaacggtgtggatttaattaggagaaaattacaaaaagaatcgtacggtctaacttctccattgatcaccttagcctcaggcacaaaaatgggtaaaaccgaaaaaggtgcaatctggttaaatgaagatcaattctctgcatatgattattggcaattttggagaaatacagatgataaagacgtaaaaagatttttaaatttttttacagaaatagattcaaaaaaaatagatgatatttgttttaaggaaaaaaatattaataacctaaaagttttattagctaatgaagctacaaaaattctgcatggcga

SEQ ID NO: 296141 - DNA, 772 bp, Unknown
  Bacterial polypeptide expressing nucleotide sequence isolated from the Sargasso Sea
tgacccatctggaaaagataaaacaagacaaattctagacgaggttactattgaaaaaaatattaaaaatattgaaaaaatattaaaaaaatttttatcaactgacaataatgagactaaacctatttttgttaataactacgactggcttaaaaatttaaattacatttcttttttaagagatatcggaaagcacttcacaataaataaaatgttgagttttgatagtgttaaattacgattagaaagagaacaatctttaagctatatggaattcaattatatgattttacaagcttatgattttcttgaactaaataatagctttcaatgcttgctacagattggaggatcggaccaatggggaaatattgtaaatggagtagagttaattaaacgacattcatcaaaagaagtgtttggattaacgacacctttaataacactagcttctggtgcaaaaatgggaaaaactgaaagcggtgcaatatggttagatgaaaatttattgccagcatatgattattggcaattttggagaaacgtagacgatagagatttattaaaatttttaaaaatgtttacagacattagtattaaagaaatagaaaataaaaaaaacgataatataaatgacttaaaagtcttattagcaaaccatgcaacatctatgcttcatggtgaacaaatagcgaaagaatgttttgagcaagctaaaaaaatattttcagataactccacagacgaaggattgccgagtgttaaaattaat

SEQ ID NO: 296142 - DNA, 944 bp, Unknown
  Bacterial polypeptide expressing nucleotide sequence isolated from the Sargasso Sea
gatttttaaagaatttaaagacagaggatatttttatcaatgcacagacgaaaaggctctttcgaagaagctgaatgaagagagtataaaaggatatataggctttgattgcactgctcaaagtttacacgtaggtagcttgcttcaaattatgtgcttaagattaatgcaaaaacatggacacaaaccaattgttttacttgggggtggaactactagaataggagatccatctggaaaagataaaacaagaaaaattttagaagaaaatgaaatagaaaaaaatataaaaagcatagagaacatactaaaaaaatttttagagacaaaagatgaaaaagtggctccaatctttgttaacaactacacttggttaaaaaatttaaattatatatcttttctaagagatataggaaaacattttactataaataaaatgttaagttttgatagtgttaagttaagattagagagagagcaatcattaagttatatggaatttaattatatgattttgcaagcttacgattttctagaattaaataagaaagaaaactgtttgctccaaattggagggtcagatcaatggggcaatattgttaacggagttgaactcattaaaagatattcatctaacgaagtttatggtttaacaacagaacttataactttagcatcaggtgctaagatgggtaaaactgaaagcggtgctatttggttagataaaaaattattttctgtatttgagtattggcaattttggagaaatactgacgataaagatgtattaaaatttcttaaaatgtttactgatctaaaattaagtcaaattgaagatataagtaatcaagatataaataaacaaaaaattattttagccaatgaagctacctcaatccttcatggagcatatgaagctgctgaagcagaaaaaatagcaaaaa

SEQ ID NO: 296143 - DNA, 631 bp, Unknown
  Bacterial polypeptide expressing nucleotide sequence isolated from the Sargasso Sea
tatgaaaaatacctttttaacagaaatgagttcaaggggttttttaaatcaatgtacagatttggaaaaactaagcaaagtttctgatgaaaaacaaataaaagcatatattggttttgattgtacagctccgagcttgcacgtgggaagcttgatgcaaataatgatattaagacttcttcaaaaatatggtcaccagccaatagtgttattaggtggcggtactactttaattggagatccatccggtaaagactcaactagaaaaattttaaagcatacggatattaaaaaaaatatttcaaacattaaaaaaatatttgaaaaacttttgtattcaaaaaataaaaaaacaaaaccaatttttgttgataattataactggcttggaaaattaaaatatattgattttttaagagatattggaaaacactttaccataaataaaatgctgacatttgacagtgttaagctacgtttagatcgagaacaatctttaagctatatggaatttaattatatgattttacaagcatatgacttttatcagctacataaaaaatataattgtattttgcaaatgggaggttctgatcaatggggaaatattataaacggtgttgagctaata

SEQ ID NO: 296144 - DNA, 913 bp, Unknown
  Bacterial polypeptide expressing nucleotide sequence isolated from the Sargasso Sea
catcaacctattgtattgcttggtggaggaacgacacttattggagacccctcaggaaaagaagaaaccagaaaaatacttgataaaaaaataatagacaaaaatatcaaaagtatcaaaaatatatttaagatttttttgaaatcaaaaagttcaaaaacaaaacctatttttgttaataattattcatggttaagtaaattaaattatattagttttctgagagaaattggtaaacattttactgtaaataaaatgttaacttttgacagtgttaaactgagactggaaagggagcaatctttaagctacatggaatttaattatatgatgcttcaagcctatgatttttacgaattaaacaagagatataagtgtattttgcaaattggtggttcagatcaatggggtaatattgttaatggaactgatttaattaaaagaaaaaacaaaaaacaaacatatggattaaccactcctttgattactctctcctctggtacaaaaatgggaaaaacggagaaaggtgcagtttggttaaataaaaaaatgctttcgccatatgattattggcaattctggagaaatgctgatgacaaagatgttgtaaactttttaaaacttttcacagaattagatatagaaaaaatagataatttaaaaaatagtcaagatattaatgaacttaaaattttgcttgctaatgaagcaacgacaatgttgcatggatcaaaagctgctaaagattctgaggttactgcaaaaaaaacttttaaagatagatctgtaggaaaagatttaccaactataaagataaaaaaaaacgatatagctaatggaataaatatattagatttggttcttttaacaaaactatataactcgaaaggagaagtgagaagagtgataaaaa

SEQ ID NO: 296145 - DNA, 817 bp, Unknown
  Bacterial polypeptide expressing nucleotide sequence isolated from the Sargasso Sea
catgtgtttaagattgcttcaaaaacatggtcatcaaccaatagttttattaggtggtggtacgactagaattggagatccctcaggtaaggaaaaaactcgaaaaattttaagcgaaaatgaaattgaaaaaaattcaaagaatataaaaaaaattttagaaaaatttttgaaaagcaaggataaaaatattaaaccaatatttgtaaataattttgattggttaaaaaacctcaattatatttcttttttaagggatataggaaagcattttacaattaataaaatgttaacatttgaaagtgtaaaaactaggttggaaagagagcaatcacttagttatatggaatttaattatatgattttacaagcttatgattttttagaacttaataaaaaagaaaattgtttattacaaattggtgggtctgaccaatggggaaatatcgttaatggtattgatttaataaaaaaatattcaaataatcaggcttacggattaaccactcctttaattactttagcctcgggtgcaaaaatgggtaaaactgagacaggagctatttggctagataaaaaatttttatctccttatgactattggcaattttggagaaatattgatgatagagatgttttaaaatttattaaattttttactgatttaagtgttaaagatatcgaaaaagttaaaaatgaggagataaacaaacaaaaaattatcctagcaaatgaagcaacatcaatgcttcacgggtacgatgaagctaaaaatctgaagaaacagcaaaaaacattttctgaaaatcacttggtt

SEQ ID NO: 296146 - DNA, 850 bp, Unknown
  Bacterial polypeptide expressing nucleotide sequence isolated from the Sargasso Sea
tatgaataaatttttaaaagaatttaaagataggggtttttattatcagtgcacagcaggtgatgaactatctaaacttttagataaagaaaaaattaaagcttatataggtttcgattgtactgctggaagtttacatgtaggcagcttacttcaaattatgtgtttaagattacttcaaaaacatgggcaccaaccaatagttttgatcggaggtggtacaacaagaattggagatccttcaggaaaagacaaaactagaaaaattttaagtgaaaccgaaatagaaaaaaatataaaaaatatccaaaatattttaaaaaaatatttaaattctgatgatgaaaaaatcaaacctatttttgttaacaatttctcttggctgaaagacttgaattatatttcttttttgagagatattggaaagcattttacaataaataagatgttaacatttgatagtgtaaaaacgcgattagaaagagaacaatcattaagttatatggaatttaattatatgattttacaggcttatgattttttagagttaaataaaaaacataattgtgtacttcaattaggaggctcagatcaatggggaaatattgtaaacggtgttgagttaataaaaagatattcagataaaattgcttttggactaacaactccattaattactttagcctcaggagcaaaaatgggtaaaactgaaactggagctgtgtggttagataaacaatttctttcaccttatgattattggcaattctggagaaattcagatgatcgcgatgtaattaaattcttaaattattttacagatctttcaattgatgaaatgaaaagagaa

SEQ ID NO: 296147 - DNA, 736 bp, Unknown
  Bacterial polypeptide expressing nucleotide sequence isolated from the Sargasso Sea
agtgaaattctagaaaaaaatattgctggcatgaaatctcagttaaataacttaattgatttcgattgcggggctaattctgcaaaaattctaaataataataactggcttagcaaaataaatatgattgaattcttaagagatattggaaagaatttttcaataggatatatgatgtcaaaagaatctgtgaagaaccgaattaacgaacggggtatttcttatacagaattcacctatatgattcttcaagcatatgattttcttcatttattcgatacagaaaaatgccaattacaaataggcggttctgaccaatggggaaatatcactgcaggcattgaattaattcgcagaatgagatcagaaaacttatggggaattacttttcctttgattacaacctctagtggtaagaaatttggaaaaaccgaagaaggaaatatttggctagaccctaaactaactagtccataccgtttttatcaatattggatacaaacaaatgatgaagatgtaattaagtttctagcatactttactttcctcacagaaaaagaaatcgaagaaattgctaacgcacaaaaagaaaatcctgaaaaaagagaagcccaacttcaacttgcaagattaattacatcttttgtacatggagattcttcaacagagagtgcactgagagtctctgatttacttttcactggaaacatagaaggaataagtgaggaagatttaa

SEQ ID NO: 296148 - DNA, 492 bp, Unknown
  Bacterial polypeptide expressing nucleotide sequence isolated from the Sargasso Sea
tatgtccaaaaacctcattactgatttcaaagaacgcggattaatacatcaaaccacagacgctgacagtctgcacgactggcttgcaacacctggaagacggatctacgccggatttgacccaactgcagacagtcttcatgtagggcatcttgtcgctattattttactgcgacgggtggctcgcgctggtcacgaacccattgcgctcattggtggagccacgggtatgattggcgatccaagtgggcgaagtgaagagcggaatcttctctcacacgaagcactcgctgcaaatattgcagcggttggaaatcagatacggggcctcctcgaatcaaccaatcaaacgattcatgttgtcaacaatgccgattggatgcagggggttggatatctggaattccttcgcgatgttggcaagcatgtcccactttcccaaatgcttgcgaaggactcagtaaaaagtcgcctcgatcgtgacggtggcct

SEQ ID NO: 296149 - DNA, 860 bp, Unknown
  Bacterial polypeptide expressing nucleotide sequence isolated from the Sargasso Sea
actgatttaaataaactagaggaaatttgtaataaagaaagtttgcaaggatatatcggttttgattgtacggctaaaagccttcacgttggtagtttacttcaaataatgattttgaaacttatgcaaaaacatggtcatcgaccaatcattcttttaggtggtggtacgactctgataggagacccatcaggtaaagatacgacgagaaaaattttagaaaaaagagaaataaataaaaatattaaaagtattaaaaaagtttttaataaaattctagataataccaataaaaaaactaagccgatttatgttgataacgcaaaatggttgacaaaattaaacttaatcaaatttttaagggaaattggagttaatttcacaatcaataaaatgttaacctttgatagtgtaaaactaagattagaaagagaacaatccttaagctatatggaatttaactatatgcttttacaagcatttgacttttatcaactttttaaaacacataaatgtaaactacaaattgggggctctgatcagtggggaaatattattaatggagtagaattaattaggagaaagcttaaaaaagagtctttcgggattacttctcctctcataactttggcatctggagctaaaatgggtaaaacagaaaaaggagctatatggttaaataaagatctattttctccatatgaatattggcagttctggaggaatacagatgatcgtgatgtaagaagatttttaaattattttactgatataaaaacagaagagatcgaaaatatttgcggcaaagaaaaaaatataaataaactaaaaatacttttggccaataatgctacaagaat

SEQ ID NO: 296150 - DNA, 808 bp, Unknown
  Bacterial polypeptide expressing nucleotide sequence isolated from the Sargasso Sea
tcagaattattagaaaacgaaaaaattaaaggttatatcggttttgattgtactgcggaaagtcttcatgttggaagtttacttcaaattatgtgtttgagacttcttcagaaacatggtcatagacctattgtcttattaggtggaggcactactagaattggagatccatcaggtaaagataaaacaagaaaaattttaactgaaaaagaaatagaaaaaaatataaaaagtattgaaaaaatattaaaaaactttttagataataaagatccaaaaataaagcctatatttgtaaataattactcatggcttaaaggtttaaattatatttccttcttaagagatgttggaaaacattttacaattaataaaatgcttacttttgaaagtgttaagactaggttggatagagaacaatcattaagttatatggagttcaattatatgattttacaagcttatgattttctagaattaaacaaaaaagagaattgttctttgcaaattggtggttctgatcaatggggaaacatagttaatggaactgaacttgttaaaagatatttaagtaaacaggtatatggcttaactacaccacttattacattagcgtcaggagccaaaatggggaaaacagaaacgggtgcaatttggttagataaaaaaatgttgtcatcttacgattattggcaattttggagaaatgttgatgataaagatgtaataaaatttttaaaaatatttacagacttaagtattgaagaaatagataaaaataaagatgaggatataaataaacttaagg

SEQ ID NO: 296151 - DNA, 859 bp, Unknown
  Bacterial polypeptide expressing nucleotide sequence isolated from the Sargasso Sea
atgaaaagcacctttttatcagagatgaattcaaggggttttcttaatcagtgtactgatttagaaggcttaaaaaaaattttaaatcaaaaacctattaaagcttatattggatttgataccacagctccgagtcttcatgttggaagtttaatgcaaatcatgattttgagacttctacaaaaatatggacatcaaccaattgttttattaggaggtggaacaacattaatcggagatccatcaggaaaagattcaactagaaaaattttaaaagaaaaagaaattaaaaataatataaaaagtatcaaaaaaatttttgaaaaactacttcaaacaaaaaataagaagactaaaccaatctttgttaataactatgattggctaggtaaactcaaatatatagattttttgagggatgttggaaaacattttacaattaataaaatgcttacttttgatagtgtaaaactaagattagatagagagcaatctttaagttacacagagttcaattatatgattttacaagcgtatgatttctatcaacttcttaaaaaatatgactgtgttttacaattaggcggttctgatcagtgggggaatatagttaatggtgtagaacttattaggaggattatgcaaaaaaatgcttttggtttgacgaccccgctaataactttatcctcaggtgtaaaaatgggcaaaactgaaaagggcgctgtatggttagataagaaaatgtttacgccttacgactattggcaattttggagaaatacatcagacgaagatgtaaaaaaatttttaaaatattttacagaggatgatattgatagtttaacaaagcgagattgaa

SEQ ID NO: 296152 - DNA, 847 bp, Unknown
  Bacterial polypeptide expressing nucleotide sequence isolated from the Sargasso Sea
catgttagacattaaagagcaacttagtattatcaagcgtggtgtcgatgagattctcgttgaagaagaactaatcgaaaagctcaaactgaaaaggccactgaaggttaagttagggtgtgatccaacagcgcctgatattcaccttggacatgccgtggttttaaataaacttcgccaatttcaagatttgggtcatgaagtgcagtttttaattggtgattttactgggctaattggtgatccgtccggtaaaagtgcaacacgcaagcctctatcagaagaggctattgcagcaaatgctaaaacgtatgaacaacaagtctataaaatacttgatccagaaaaaacaaccataatgtttaactctgcatggatgaataagcgctctccagctgacatgattaaacttgcctcaagtgttaccgtcgccagaatgttagaacgggatgattttagcaaacgttttaaaaatgagcagcctattgccattcatgaatttttatatccgcttcttcaaggctatgactctgtggccatggagtgtgatattgagcttggcggcactgatcaaaaatttaatttacttatgggtcgcgaattacaaaaactgcacggcatgacaccacaaattgttatcaccatgcctcttttagaaggcttggatggtgtgaagaagatgtctaaatcattgaataattatattggcatagctgatagcccgaatgatatctttggcaaaatcatgtcggtttcggatgaacttatgtggcgctatttcgagctcttaagtgctaaaacgtctactgagattcaaagctataaaaaagaggtgtcggagggtgaa

SEQ ID NO: 296153 - DNA, 694 bp, Unknown
  Bacterial polypeptide expressing nucleotide sequence isolated from the Sargasso Sea
gatgaaatacaaaagaatatttaaaatattagaaaaaatattaaaaaattatttagataatgataatccaaaaactaaacctatatttgtaaataattattcttggcttaaagggttaaattatatttctttcttaagagatattggaaaacattttacaataaacaaaatgcttacttttgaaagtgttaaaactagattggatagagaacaatcattaagttatatggaatttaattatatgattttacaagcttatgattttttggaattaaataaaaaggaaaattgtactttacaaattggtggatcagatcaatggggaaacattattaatggaactgaattaataaaaaggcattccaataaacaagcttatggtttaaccactcctcttattacgttagcatcaggagctaaaatggggaaaactgaaactggagcagtttggttagataaaaaattattatctccttatgactattggcaattttggagaaatattgatgacagagatgtattaaaatttctaaaaatgttcacagatttaagtactgatgaaataaatcaaataaaggatgaagatatcaacaagttaaaaataaaattagcaaacgaaactacatctatgttgcatggtaaagatgaagctatgtctgctgagaaaactgcaaaaaaaacttttgaggaaaat

SEQ ID NO: 296154 - DNA, 828 bp, Unknown
  Bacterial polypeptide expressing nucleotide sequence isolated from the Sargasso Sea
gacttcttcaaaaaatggacatcgaccaatagttttgcttggtggaggaactacaagaattggggacccatctggcaaagacaaaactagaaaaatattaagtgaagaagagattgaaaaaaatattgaaaatatcaaaaatattttaaaaaaatttttagataacgacgatccaaatacaaaaccaatctttgtaaataattatacctggcttaaaggtttaaattatatttcatttttaagagagattggaaaacatttcactataaatagaatgctaacatttgatagtgtaaaactcagattagacagagagcagtcgctgagctatatggagtttaattatatgattttacaagcatatgattttcttgaattaaataaaaaagaaaattgtgtcttacaaatcggtggttcagatcagtggggaaatattgttaatggtgttgagcttataaaaagatattcaaataatcaaacctttggtttaacaacacctttaattacactagcaactggtgctaaaatgggaaaaacagaaaatggagctatttggttagatgataaatacttatctgcttatgattattggcaattttggagaaatgtagatgatagagatgtaattaaatttttaaaaatgtttactgaaattgatattgaggaaatagaacaaattaaaaataaagatatcaatgaattaaaaatactacttgctaataaaactactgaaatgcttcatggtaacgaagctgctaaaaattctgagcaagcagcacaagaggctttttctggaaactctttaggttcaaacttacctaaagtaaa

SEQ ID NO: 296155 - DNA, 835 bp, Unknown
  Bacterial polypeptide expressing nucleotide sequence isolated from the Sargasso Sea
acagttctaataaataaattacgccagtttcaggaattaggacatcaagtagttttcttaattggtgattttactgccatgattggcgatccgtcgggaaaaagcgcaactcgacctcgattaagtgttgaggaagtaagtgaaaatgcaaaaagctatgagcaacaaatttttaaaattttagatcctgatttaactaaggtcgaattcaattctagatggatgaaaaaaatgaatgctgcagaattgattggtctagcatcaaaccatacagttgcgaggatgctcgaacgtgatgattttgataaacgttacaaatcaaatcaatctatttcgattcatgaatttctttatcctattatacagggctatgattcagtggcactagatgccgatgttgaattgggcggtacagatcaaaaatttaatttacttgtaggacgtcaatttcaaacattgcatggtcagtcaccacaggttgttataactatgccaatattagagggactagatggcactcaaaaaatgtctaaatctctcggtaactacattggaattgatgagccagctacagaaatgtttggaaagattatgtcaatttccgatgttttaatgtggcgatattacgaattgttaagttttaaagatctagaagagatatcaagctataaaaaagatgttgaaaaaggtgtaaatccaagagatatcaaatttaaattagctgaagagatagttggaagatttcatgacgctaaattagccaagatagcaaaggatgattttgtcgagcgttttagtaaaaatgcaataccagaaaatatcgaacaggtgaaat

SEQ ID NO: 296156 - DNA, 748 bp, Unknown
  Bacterial polypeptide expressing nucleotide sequence isolated from the Sargasso Sea
atgaataaatttttaaaagaatttaaagataggggttatttctatcaatgcactagtgaaaacgaactgtcagaactattaaataaagaaaaaataaaaggttatattggctttgattgtactgctgaaagcctacatgttggaagtttgcttcaaattatgtgtttaagacttcttcaaaaatatggtcataaaccaatagttctgttgggcgggggtactactagaattggagatccttcaggtaaagataaaacaagaagaattttaactgaaaaagaaatagatagaaatattaaaagtattgaaaaaattttaaaaaaatttttagataatgataatccaaaaactaaacctatatttgtaaataattattcttggttaaagggattaaattatatttcttttttaagagatatcggaaaacattttacaataaataagatgttaacttttgagagtgtaaaaactagattggaaagagagcagtctttaagctacatggaatttaattatatgatcttacaggcttacgattttttagaattgaataaaaaacacagttgtaatttacaaattggtggctcagaccagtggggtaatattgttaacggtacagaacttataaaaagatactcaagtaaacaagtatttggtttgaccactcctctcataactttagcatcaggagctaaaatgggaaaaagtgaatcaggagcaatttggttagatgaaaaactattatcat

SEQ ID NO: 296157 - DNA, 1048 bp, Unknown
  Bacterial polypeptide expressing nucleotide sequence isolated from the Sargasso Sea
tatgaaaaatgcctttttgcaagagatgcagtcacgtggatatctaaatcaatgtacagatttagataaattagatgacatttgtaataaacaatcaataaacgcctatattggatttgattgtacagcagctagccttcacgttggaagtttattgcaaataatggttttaaaattaatgcaaaaacacggtcatcgccctatagtattattgggtggaggcacaacacttataggagatccatcaggaaaagactccactagaaaaattttaaatcataaagaaataaaaaagaatataaaaaatatcaaaaaagtttttaataaaattttagatacttcgaacaaaaaaactaaaccgatatttgtcgataattataattggttagcaaaattaaattatatagaatttttaagaaacataggaaaacattttacaataaataaaatgcttacttttgaaagtgttaaacttagattagagagggaacaatcattaagttatatggaatttaattatatgattttacaggcttatgatttctaccaactttttaaaaataaaaaatgtattttacaaattggaggttcagatcaatgggggaatatcgttaatggtgttgaattgattagaagaattttaaaaaaagaatcttacggtctcactacccctttaataaccttagcttctggagctaagatgggtaaaaccgaaaaaggggcagtttggttaaattctgatttattttctccttatgattattggcaattttggaggaacacagacgacaaagatgtaaaaaatttcttaaagttttttacagaattaagttcaaaaaaaatagatattcttacaaataacgaaacgaatataaataatttaaaaattttactagctaatgaagcaacaaaaattcttcatggtaaggctgcagcagaaaaatcagaaaaaacagctaaagaaacttttgaagttggtggtataggaaaagaacttccggaaatcaagattaaagagaacgatattaagaaaggtattcaaatagtt

SEQ ID NO: 296158 - DNA, 1092 bp, Unknown
  Bacterial polypeptide expressing nucleotide sequence isolated from the Sargasso Sea
catgccggaacatccgcagtccctgccggcttggctggcccgcggcatggccgatctcttccctgatggtgatccggctgatgcggatcaggcgttagcggccaggctcgctgcggctagtgcccagggccggccgcttcggatcaagctcggcatcgaccccaccggcagcaatatccacctggggcacagcattttgtttcgcaaactgcgcgctttccaggacgcaggccatacggcggtgttgatcattggtgatttcaccgcccgcattggtgatcccaccggcaaaagcgccacccgggtccaactcactgctgaggaagtggaggccaatgcggccacctacctggcccagttagggcagggcctgcccaaggagggggctctactggattttgaaacgccaggcaggcttgaggtgcgccgcaacagtgaatggctggctgacctggatctacctcaggtgattggcctgctgggcaccgccaccgttggtcagatgctggctaaagaggattttaccaagcgctatggcagtggcactccgattgcccttcacgagttcctctacccattgctgcagggatacgactcagtggcggtcgatgccgatgtggagctgggaggcaccgatcaaaaattcaatgtggccatgggccgcgaccttcagcgccatttcggccagcgcactcagtttgggttgttgctgccaatcctggtgggcctcgatggggttcaaaagatgagcaagagccttggcaacacggtgggcttagacgaggacccgctctcgatgtattccaagcttgagaaggtcggtgatggcgccattgatgactacatcaccttgctcaccgatctagatctcgccgggctaccagcgaatcccagagagcgtcagaaagcaatggctttggcggtgacagctagccgtcatggcagcgaagcggcccagaaagcccaagcagatgccgccaacttggtcggaggcgcaggtgatgccggggcggaggtgccggcggcttcattggcggacgtgagcttcccgggcaaagcgttttatctgctcagcgccgttggaatctgcgc

SEQ ID NO: 296159 - DNA, 1225 bp, Unknown
  Bacterial polypeptide expressing nucleotide sequence isolated from the Sargasso Sea
atgaataaatttttaaaagaatttaaagatagaggatatttctaccaatgtactaatgagaatgaattatctgacttattaaataaaaaaagtattaacgcatatatcggatttgatagtacggctcctagtttgcatgttggcagcttgatgcaaattatgtgtttaaaattattacaaaatcatggacatagaccaattgtattattggggggaggcacaacaagaataggtgatccatcaggaaaagaagaaacaaggaaaattttatctgaaaaacaaatagagcaaaatataaaaaatattcaaaatgtttttaaaatatttttaaaaacaaataatccaaaactaaaaccaatttttgtaaacaattataaatggttaagaaaattaaattatataaaatttttaagagaaattggaaaacattttactattaataaaatgttaagttttgacagtgtaaaattacgtttagaaagagagcagtctttaagttatatggaatttaattatatgatcttgcaagcgtatgattttcttgaactcaataaaagtaaaaattgtttgatgcaaattggcggttcagaccaatggggaaatatagttaatggggttgaattaataaaaagacaatccggaaatcaagtttttggtttaacaacacctttaataactttagcatctggagctaaaatgggaaaaacagaaaaaggtgctgtttggttagataaaaaaattttatccccttatgactactggcaattttggagaaatactgatgatagagatgtaattaaatttttaaaaatgtttaccaacatacctttggatgaaattgaaaatcttaaaaaaaataatattaatgatttaaaaattttgcttgcaaataaaacaacagaaatgttgcatggtgaaaaagcggcaaaagactctgaaaaaatggcagcatcaacatttaaaggtgattcttcaggtgaaaatttacccagtataaaaattagtaaagatattttaaacaaaaatatagttgagttagctgcctatgttgcaaaagatatttcaaaaagtgaaataagaagaatgattaaagcaaatggtattaaagttgataatcaattagttaacaatgaaaaattaattgtagataataaattatttgaagaaaaaggatttataaaattatctataggtaaaaagaaacattacaaagttataatctaat

SEQ ID NO: 296160 - DNA, 829 bp, Unknown
  Bacterial polypeptide expressing nucleotide sequence isolated from the Sargasso Sea
tatgaataaatttttaaaagaatttaaagataggggttatttctatcaatgtactaacgaagaagatttatcaaaactactggaaaaagaaaaaattaaaggttacatcggttttgattgtaccgcagaaagtctccacgttggaagtttacttcagataatgtgtttgagacttctacaaaaacacggacacagacccattgtattattaggtggtggtacaacaaggattggtgatccatctggtaaagataaaacgagaaaaattttaactgaaaaggaaatagaaaaaaatattaaaagtattgaaaaaatattaaaaaattttttagataataagaatccaaaaactaaacctatatttgtaaataattattcttggctaaaaggcttgaattatatttcattcctaagagatattggcaaacacttcacaattaacaaaatgctcacttttgaaagtgttaagactagattagatagagaacaatcattaagttatatggagtttaattatatgattcttcaagcttatgattttttagaattaaataaaaaagaaaattgttctttgcaaattggtggttctgatcaatggggaaatatagttaatggtaccgagcttattaaaagatactcaagcaaacaggcctatggtttgactacccctctgattactttagcatcaggagctaaaatgggcaaaacagaaactggtgcaatttggttagataaaaagatgttatcatcttataattattggcaattttggagaaatattgatgataaagatgtaataaaatttttgaaaatatttacagatttaagt

SEQ ID NO: 296161 - DNA, 1231 bp, Unknown
  Bacterial polypeptide expressing nucleotide sequence isolated from the Sargasso Sea
tatgaataaatttttaaaagaatttaaagataggggttacttctatcaatgtaccaacgaaaaagatttatctaaattactggaaaacgaaaagattaaaggttatatcggttttgattgtactgcagaaagtctccacgttggaagtttacttcagattatgtgtttgagacttctacaaaaacacggacacaaacctattgtattattaggtggtgggacaacaaggattggtgatccctcaggtaaagataaaacgagaaaaattttaactgaaaaggaaatagaaaaaaatattaaaagtattgaaaaaatattaaaaaattttttagataacaaaaatccaaaaactaaacctatatttgtaaataattattcttggcttaaaggcctgaattatatttctttcctaagagatataggcaaacacttcacaattaataaaatgcttacttttgaaagtgttaaggctagattggacagagaacaatcattaagttatatggagtttaattatatgattcttcaagcttatgattttttagaattaaataaaaaagaaaattgttctttgcaaattggtggttctgatcagtggggaaatatagttaatggtaccgaacttattaaaagatactcaagtaaacaagcctatggtttgactacacctcttattactttagcatcaggagctaaaatgggaaaaactgaaactggtgcgatttggttggataaaaaaatgttatcatcttataattattggcaattctggagaaatattgatgataaagatgtaataaaatttctaaaaatatttacagatttaagtatcgaagaaatagataaaaataaagatgaggatataaataaacttaagattagattagcaaacgaagcgactacgatgcttcacggtaaaaaagctgccctaaattctgaacaggctgccaaagaagctttctctggaaatttgctcggttctaatttgcctacaataaaaattaaagcgaagaatattaatgaaacgataactgttttagatttaataattttatcaaagttggaaaagtctaaaagtgagataaggagattaatcaaagggaatgcgataaaattaaataatgaaatgatatctaatgaaaattttattattagcgataaattattccaaaataattatttaaaactttctataggaaaaaaaagacatattaaaattgaaaaagactag

SEQ ID NO: 296162 - DNA, 652 bp, Unknown
  Bacterial polypeptide expressing nucleotide sequence isolated from the Sargasso Sea
tatgaataaatttttaaaagaatttaaagatagagggtatttttaccagtgcacaagtgaggatgaactatcaaaattgttagataaagaaaaaattaaaggttacatcggttttgattgtactgcagatagccttcatgttggaagtttgcttcaaataatgtgtttaagattaatgcagaaacacggtcatagaccgattgtgcttattggaggcggaacaacaagaattggcgacccatcaggtaaagataaaacaagaaaaattctaactgaacaagagatagaaaaaaatattaaaaatattgaaaaaatattaaaaacctatttagataataatgatccaaaaactaaacctatattcgtaaataattatttttggctcaaggggttaaattatatttctttcctaagagatattggaaaacattttacaataaacaaaatgcttacttttgaaagtgttaaaactagattggatagagaacaatcattaagttatatggaatttaattatatgattttgcaagcttatgattttttggaattaaataaaaaagaaaactgtaacttacaaatcggtggatcagatcaatggggaaacattgttaatggaactgaattaattaaaagacattccaataaacaagct

SEQ ID NO: 296163 - DNA, 1052 bp, Unknown
  Bacterial polypeptide expressing nucleotide sequence isolated from the Sargasso Sea
gcatactgttttattaaataagcttaggcacttccaagatctggggcataaagttgtttttttaattggagattttactggaagaattggtgatccgtctggtaaaaacaagacaagaccaactgtggattcagacagccttattaagaatgcgaaaacctacaaggaacaggtttttaaaattttaaaagaagatcttactgaagttaaattcaattccgaatggtgtgatgagcttggagcagatggactaatcaaacttgcatccaagtataacgtagcaagaatgctagagagagatgattttaataaaagatttacttctaataaaagtattgcgatacatgaatttttgtatcctttagttcaaggctatgattcagtcgcacttcaggctgatgttgagtgcggtggaacagatcaaaaattcaatttattagttggtagagaacttcaaagagattacgatcaagatcctcaagtagttataaccgttccaattcttgaaggtcttgatggcgaaaagaaaatgtcaaaatcccttgctaactatatagctatagatgaagagccaaatgagatgttcggaaaaattatgtcaatatcagataatttgatgtggagatggtttgagttattaagttttttgcctgaagaagaaatatctaagttaaaagatgaaatgaaagagggcaggaaccccagagatattaaattcattttggctgaggaacttgtagatagatttcatgaaataggagatggaaaaaattgtaaggaaaatttcctaaataggtttcagaagggaaagatgccagacaatattgaaacttttgagatagatataaaaaatgaatccatacctttagttaatcttttaaaagatactcaaatgatttcaagtgtttctgaggggaacaggcttataaaacaaggcggtattaaaattaaccaagaaaaagttatggatttaaaatttgaaatctcaaaaggatctgaaaatatttatcaggttggtaaaagaaaatttttaaaaattaaggttaaataat

SEQ ID NO: 296164 - DNA, 1228 bp, Unknown
  Bacterial polypeptide expressing nucleotide sequence isolated from the Sargasso Sea
tatgaataaatttttacaagaattccatgaaagaggttatttttatcaatgtactgataataatggattaagcagaacattagaagataagaaaattaaggcttatataggtttcgattgcactgctgaaagtctgcatgttggaagtctacttcaaataatgtgcttaagattactacaaaaacatggtcatcaacccattgttttgctaggtggtgggactacaagaattggtgatccatctggaaaagacaaaaccagacaaattttggaagaaaaaactatcgaaaataatattaaaaatattgaaaaaattttaaagatttttttaaaaacaaaaaacaaaaatacatctccaatatttgtaaataattatgactggcttaaaaatttaaattatatttcattcctaagagatatcgggaaacattttacaataaataaaatgctaaactttgatagtgtaaaacttagattggaaagagagcaatctttaagttacatggaatttaattatatgattttacaagcttatgattttttagaattaaataaaaaatacgattgtattcttcaaataggtggttctgatcaatggggaaatatagttaatggtgttgaccttattaaaagacactcttcaaatgagacatttggacttactactccattgataacattagcatctggcgcaaaaatgggaaaaacagaatctggagctatatggttagataaaaaattactttctacttatgactactggcaattttggagaaatgtggatgataaggatttaactaagtttttaaagatttttactgaaatctctttagacgaaatcgaaaaaagaaaaaatgataatataaatgaccttaaaatactcttagcaaatcatgcaacttctatgctacatggcgaagaggaagcaaaaaagtgttatgatcaagctaaaaaaatattctcagataaatcttccgacgatggattgccaaaaataaaagtaaaaaaaaatgaaatgaaaaataaaaacttatctgatcttattatatctgctaaattggaaacctcaaaaagtgagatcaaaagattgattaaaaataatggaataaaagtaaataatattaaaatagaggaagattcgccaatttcacaaataaatttaaatgaaaaaaattattttagactatcaattggtaaaaaaaaacattttaaaattgaatttaattag

SEQ ID NO: 296165 - DNA, 670 bp, Unknown
  Bacterial polypeptide expressing nucleotide sequence isolated from the Sargasso Sea
tatgaataaatttttaaaagaatttaaagatcgtggatatttttatcaatgcacaagcgagcatgaattatcaaatcttctagataaagaaaaaatcaaagcttatataggttttgattgcacagcggaaagtttacatgttggaagcttgctgcaaataatgtgtttgagattgcttcaaaaaaatggtcatcgtcctatagtcttattgggaggcggaactacaagaattggtgatccgtcaggaaaagataaaacaagaaagattttaagtgaaaaagaaatcgaaaaaaatattaaaaatattaaaaacattcttaaaaaatttttagataataacgacccaaatactaaacctatttttgtaaataatttcaactggttgaaaaatttaaattatatttctttcttaagagatattggaaaacactttactatcaacaggatgttaacttttgatagtgttaaattaagattagatagagaacaatcactaagttatatggagtttaattatatgattttacaagcatatgattttttagaattaaataaaaaagaaaaatgtgttttacaaattggtggttccgatcagtggggtaacatagtaaatggtgttgagctcataaaaaggtactctaataatcaatcttttggtttaactactcct

SEQ ID NO: 296166 - DNA, 801 bp, Unknown
  Bacterial polypeptide expressing nucleotide sequence isolated from the Sargasso Sea
tatgaataaatttttaaaagaatttaaagatagaggatatttctatcaatgtacaagtgagaatgaattatctaagttactagataaaaaaaaaatcaaaggttatataggttttgattgtactgccgaaagtcttcatgttggtagtttgcttcaaataatgtgtttgagattaatgcaaaagcatggacatagacctatagtgttaattggaggaggaacaaccagaattggagatccttctggtaaagataaaacaagaaaaattttaagcgaaaaagaaatagaaaaaaatataaaaaatattgaaaaaatattaaaaaattatcttgataataataatccaaaaactaaacctatatttgtaaacaattattcttggcttaaaggattaaattatatttcttttttaagagatattggaaaacactttacaataaataaaatgcttacttttgaaagtgtaaaaactagattagatagagaacaatctttaagctatatggaatttaactatatgattttgcaagcttatgattttttagaattaaataaaaatgaaaattgtgatttacagattggcggttcagatcaatggggtaatattgttaatggaaccgagctaattaaaagatattctaataatcaagcttttggtttaaccacacctcttataacgttagcctcaggagcaaaaatgggcaaaacagaaaatggtgctatttggttagataaaaatttattatcagcatataattattggcaattttggagaaatattgatgacaatgatgtagttaa

SEQ ID NO: 296167 - DNA, 1231 bp, Unknown
  Bacterial polypeptide expressing nucleotide sequence isolated from the Sargasso Sea
tatgaacaaatttttaaaggatttcaaagaaaagggatatttttatcaatgcactgatgaaaaaggtttgtccgatatattaaataaacaaaatataaaggcatatattggttttgattgtactgcagaaagtctccatgttggaagcttaatgcaaataatgtgtttaagattattacaagataacggtcatcaaccaatcgtacttttaggtggaggaactacaagaataggtgatccttcaggcaaagacaaaactagacaaattttagatgaaaaaacaatagaaaaaaatattaccaatattaggaaaatattagaaaactatttaattacagaggatgaaaaagttaaaccaatttttgttaacaattttgattggttaaaaaatcttaattatatttcttttttaagagaaataggaaagcatttcacaataaataaaatgctgagcttcgatagcgtaaagcttagactagaaagagaacaatcattaagttacatggaatttaattatatgattttacaagcatatgattttttagaattaaataaaaaagaaaattgtttattacaaattggtggttcagaccaatggggtaatatcgtaaatggtgtagatttaattaagaggttttcgaataaaaatgtttatggtcttacgactccattgattactttggcatctggtgcaaagatgggtaaaactgaaaatggggcaatttggctcgataaaaaacttttatcagcttatgatttttggcaattctggaggaatatcgatgacaaggatgtttcaaaatttttaaaatatttcactaatttatcaattgataagatcaatcaaatagaaaaatatgaaataaataaacagaaaattattcttgcaaatgaagctacgaaattactacatggtgagaaagaagcaaaaattgctgaggaaacagctcttaaaacttttcaagatagatcagcaggtgaaggattaccatcagttaaaatagctgaaaaagaattaaataatattgatatagtttctcttattgttttatcagatttagaaagttcaaagagtgaggtaaaaagaataatcaaaaataaaggtgttaagatagataatcaaataattacagacgaaaaaattaagatcaataaagatttttttaaaggacgtaatttttttagattatcacttggaaagaaaagacatattaaaatatctttaaaataa

SEQ ID NO: 296168 - DNA, 1033 bp, Unknown
  Bacterial polypeptide expressing nucleotide sequence isolated from the Sargasso Sea
tatggaaagttcattcttatctgaatttaagaaaagagattattttaatcaatgtaccaattctgaggaattggaaactttgatgaataaaaacaaaattaaagcatatataggatttgattgtacagcatctagtttgcatgtaggtagcctgttgcaaattatgtgcctacgaatgcttcaaaaatatggccaccagccaattgttttgcttggtggaggaacaacaagaattggtgatccatctggaaaagatgagactagaaaaatattatcagaaaaagaaattgaaaaaaatataaaaaatatagaaaaagtttttaaaatatatttaaaaactaataacccaaaaacaaaacctatttttgtaaacaattataaatggctcggaaaacttaactatataaaatttttgagggatataggaaaacattttacaataaataaaatgttgagtttcgatagtgtaaaattgcgattagatagagaacaatcattaagctatatggaatttaattacatgatattacaggcatatgattttttagaattaaataaaagtaaaaattgtgttatgcaaattggtggttctgaccaatggggtaatattgtaaatggagttgagttaattaaaagacattctagcaaacaagtttttggattaacgacaccattaataactttagcatctggagccaaaatgggaaaaacagagaaaggtgctgtatggttagatgaaaaacttttatcttcttacgactattggcaattttggagaaacacagatgatagagatgtattaaagttccttaaaatgtttactgacatagaactaaacaaaattgaagagattaaagataaagaaattaatgatttaaaagtattactagcaaatgaagctacttcaatgcttcatggaaaaaaagctgctcaaaaagcagaagagacggcaaagaaaacttttggcaaaggatcatttggtgatgatttacccaactataatttgagtaaatcaaatattgataaaaggaat

SEQ ID NO: 296169 - DNA, 1300 bp, Unknown
  Bacterial polypeptide expressing nucleotide sequence isolated from the Sargasso Sea
atgccaaataattttaaaaacgaacttgagtggagaggtttaatccaagatgtaaccaatggctttgatgatgaaataaataaaaactgtgtttcagcatatattggatttgatccaacttctgactctcttcatataggaagtcttgtacaacttgttatactgaggcattttcaaatttgtggacataaaccgatagttttgattggaggagcaaccggtatgattggtgatccctccggtaaatcaaaggagagaaacctacttagtgctgatgtaattgagaaaaatatttcagccttaaagattcaattctcaaagtttttagattttgatgagaaaaatcctaatgcagctataatcgtaaacaattatgaatggaatagtaaactaaatataatagagttttttagagattttggaaagcttttaacagtaaattatatgatgtctaaggattccgtaaaaaaaagaatctcaaactcagatttaagtgaaggcatgtcatttacagagtttacataccaattgtttcaggcttacgatttttattatttaattgagaattacaattgtaccattcaaatgggtggtagtgaccaatggggtaacataacctcaggtgtggaactaataagaaagaagaaaggtaaaaaagcttacgcacttacatgccccttaattacaaaatctgatggttcaaaatttggaaaaacagaagaaggtaatgtttggttggacagaagaaaaacatcaccatataagttttatcagtattggctgaactcatctgatgaagactcttacaagtatgtaaaaatcttcacatttgccaaaaaagaatttattgaaaaattaataaaagatcacaatgacgaacctcatttaaggaaactgcaaaagtttattgctgaggagattacaacaatggttcattctgaagaagacttgaaaaatgtaaaaaatgcctcttctatcttatttggaaaaaatactgaacaagatttatcactaattgatgaagaaacgtttttagatgtttttagtggtgttccccataaagaattaacaaaatctgagttaacagattgtaaattggttgagaatttattagaaaagtcaggtttttttggctctaaatctgaaattagacgattaattgatcaaaattcaatatctataaacaaggctaagataaatttagaatttaaaatttcagatttgaatctaattaataacaaatacatacttcttcaaaagggaaagaagaattattttttaattattttgatcacctagc

SEQ ID NO: 296170 - DNA, 1018 bp, Unknown
  Bacterial polypeptide expressing nucleotide sequence isolated from the Sargasso Sea
catgacttcaaataaggaacaaattctggaaatcaaaaggggtgttgatgaaatcttagtcgagaaagattttctagagaagcttaaaaagaataaacccttgaaaattaaagttggttttgacccaactgcacctgatttacatcttggccatactgtaatcattaataagatgagacaattccaagaatttggtcacgaagttatttttctaattggtgattacactggaatgattggtgatccttctggtgtaaatgagacaagaccagtgcttactgtggagcaggtcaaagaaaatgcccgaacgtataaaaaccaaattttcaagatactagataaagacaaaaccagaatcgaatttaattcatcgtggatgaataaagtaacgagcgctgaactcatagacatagcctctaaatacactgtggccagaatgcttgagcgcgatgacttcaagaaaagattcaaatctgagaatccaatatccatccatgaatttatctatccgcttgttcaaggatatgattctgttgccctagagtgtgatgtggagatgggaggcacagaccagaaatttaatctcttagttggaagacaccttcagcaactttatggccaagaaccacaaacaataatcacattgccacttttagaaggcttggatggtattaagaagatgtcgaaatctgcaaataattatgttgcattgaatgattctggcgatgatatgtttggaaagataatgtctgtttcagatgatttgatgtggagatattttgagcttgtgagttcaaaggatttaaaggagataaagaatctaaaagattccctaaatgacggcgctaatccaagggatataaaattcctgctagcagaggaaattgtcgagagattccacaatcaatcaattgcaaaaaaagcaaaggaatctttcatgcaaagatttcaaaaaggaggaatcccggaagatatagatttgacagaagtatcgataaaagatattcaaaatgatgac

SEQ ID NO: 296171 - DNA, 1225 bp, Unknown
  Bacterial polypeptide expressing nucleotide sequence isolated from the Sargasso Sea
tatgaatgattttataagagaatttaaagacagaggctttttctatcagtgtacagatgaagcagaactttcaaatctattaaataaagaaagtatcaaagggtatataggatttgattgtaccgctcaaagtctgcatgtgggcagtttgttacaaatcatgtgtttgaggcaattgcaaaagcatggacaccagccaatagttttgctaggtggaggaacaactaggattggagacccatcaggaaaagataaaacaagaaaaattttagatgaaagtgagattgaaaaaaatattaaaagtatcgagcttgttttaaaaaaatatcttaatactgaaaataaggcgacatctcctatatttgtaaataattattcttggttaaaagagttaaactatatttcttttctaagagatatagggaaacattttacaatcaataaaatgttgagttttgatagtgtaaaacttcgtttggatagagaacagtctttaagttatatggaatttaattacatgatacttcaagcatatgactttcttgaattgaataaaaaacataattgtcttcttcaaattggaggatcagaccaatggggaaacatcgttaatggtgttgatttaatcaaaagatatttatcaaaagaagtttttggattgacaacccctcttataactctggcctcaggagccaaaatgggaaagactgaaagtggagcagtatggttggataaaaatctactatctatctatgactattggcaattttggagaaacacagatgatcgggacgttatcaagtttctaaaaatgttcacagatttatctttagaaaaaatagaaaatatcaaaaatgaaaatattaacgatttgaaaattttattagctaatgaagctacaaagatgttgcatggggaaattgaaacaaaaaaagttgaagaattagcaaaatctacgtttaaagaaaattcaactggagaacatttacctagtgttaaaattggaagtgacttaataggaaaagatataattagcttaatagaatacacaaataatgaattatcaaaaagtgaaataagaagattaattcaaaacaatggaattaaaattgataatgagaaaattgaagatggaaaattattaataagtaaaaaattgtttgaaaataaaggttttattaaactttcagttggaaagaaaaagcattttaaaattatcatttaa

SEQ ID NO: 296172 - DNA, 811 bp, Unknown
  Bacterial polypeptide expressing nucleotide sequence isolated from the Sargasso Sea
tatgaataaatttttaaaagaatttaaagatagaggatatttctatcaatgtactagtgaagctgacttatctagtttattagataaagaaaaaattaaagcttacataggatttgattgcactgctgaaagtttacatgttggtagcttgttgcaaatcatgtgtttgaggttgttacaaaaaaatggacaccaaccaattgtattattaggaggaggaacaacaagaataggtgatccttcaggaaaagataaaacaagaaaaattttagatgaaagtgaaattgaaaaaaatattaaaaatattcaaaatattcttaaaaaatttctagataacgatgatccaaaaactacaccaatttatgtaaataattatagttggctaaaagatttaaattatatttcttttctaagagatataggaaaacattttaccatcaatagaatgctaacatttgatagtgtaaagctaagattggaaagagaacaatcacttagttatatggaatttaattacatgatacttcaagcctatgattttttagaattaaataaaaaagaaaattgtgttctgcaaataggcggttcagatcaatgggggaacattgtaaacggtgtcgaacttattaaaagatattccaataatcaaacatatggattaacaacgccattaattactttggctacaggtgcaaaaatgggaaaaactgaaaatggcgcaatatggttagacgaaaaatatttatctgcttatgactattggcatttttggagaaacgttgacgacagagatgtaataaaatttttaaaa

SEQ ID NO: 296173 - DNA, 700 bp, Unknown
  Bacterial polypeptide expressing nucleotide sequence isolated from the Sargasso Sea
atgaaaaacacctttttatcagaaatgaattcaaggggtttcctcaatcagtgtactgatttggagggcttaaaaaaaattttaaaccaacagactattaaggcttacattggattcgatacaactgctccaagtcttcatgtgggaagtttaatgcaaatcatgattttaagacttttacaaaaatatgggcatcagccgattgttttgttgggtggaggaacaacattaataggagatccatctggtaaggactcaactagaaaaattttaaaagaaaaggaaattaaaaataacattataagtattaaaaaaatttttgaaaagctgctacactcaaaaaataagaaaactaaaccaatttttgttaataattatgattggctaagtaaacttaaatatattgattttctaagggatattggaaaacattttacaattaataaaatgatcacctttgatagtgtaaaacttagattagatagagaacaatctttaagttatatggagtttaattatatgattttacaatcatatgatttttatcaactattcaaaaaacatgattgtattttacaattgggtggttctgatcagtggggaaatatagtcaatggtgtagagcttattagaaggattttgcaaaaaaacgcctttggtttaaccacaccacttttaactctttcttctaggtgcaaaa

SEQ ID NO: 296174 - DNA, 1234 bp, Unknown
  Bacterial polypeptide expressing nucleotide sequence isolated from the Sargasso Sea
atgaaaaattcattccttaaagagtttaatgaaagagaatattttaatcaatgtactaatttaaagtccctaaatgagttaatggataagaaaaaaataagggcttatattggtttcgactgtacagctcaaagcttacacgttggaagcttactccaaataatgtgcttaaggttgttgcaaaaacatggacatcagccaattatattgctcgggggaggtactacaagaataggtgatccttcaggaaaagaagaaacaagaaaaattcttacagaaaaagaaatcgaaaagaatataaaaaatattaagaaagttttttcaatatttcttaataataaaaattcaaaaacccgtcctatcttcgtaaacaattttaagtggcttggaaaactaaattatataaagtttttaagggaaattggaaaacatttcacaataaataaaatgctaagttttgatagcgttaaacttagattagagagagagcaatcattaagctatatggaatttaactatatgatactgcaagcatatgattttttagagcttaacaaaacaaaaaattgtttaatgcaaattggtggttctgatcaatggggtaatatcgtgaatggtgttgaattagtaaaaagatattcaagcaagcaagtttacggtttaacaacgccattaataactttagcatctggtgctaaaatgggaaaaactgaaaaaggagctgtttggttagataaaaaacttttgtcgtcttatgactactggcaattttggagaaatacagatgatagagatgttattaaatttttgaagatgtttacagacaaggatgtctctgaaattgaaagtataaaggataaaaatataaatgaattaaaaactcttttggcaaatgaggccactactcttttacacggaaaagcagctgcagtaaaagcttcagagacagctaaaaaaacatttgctggtggctcaggggatgaattaccgataataaaaattaaagaagatcaaattaataatggtttaagtataattgatttatcaatgaaaactaatttgtttagttcaaagagtgaaattagaagaactataaaaaattcaggtttaaaagtaaacaattctacggttacggatgaaaatttaataatttatttgtctgacttcagcggtgaagttttaaagctttctcatggtaagaaaaatcacgttttaataaaaattattggctagt

SEQ ID NO: 296175 - DNA, 1204 bp, Unknown
  Bacterial polypeptide expressing nucleotide sequence isolated from the Sargasso Sea
tatgaataattacaaagaacaacttcaaattattaaacaaggcatcgatgagattattggtgaaaaagaattaatagcaaaattaaagaaaggaaaaaaacttaatattaaagttggctttgatcccactgcacctgatttgcatttgggacatactgtaattcttagaaaaatgaggcaatttcaagacctcggtcataatgtggtttttttaattggtgattttactggaaaaattggcgatccaagtggcaagaataaaactagacctccattatcagaaaaagaaataaaaaataatgcagaaacttataaatctcaggtatttaaagttttagatgataaaaaaacaattgttgattttaattcacgttggggtaataaactcactgctactgagatgataactctcgcagcacaatcaactgttgcaaggatgattgagagagatgacttttcaaaacgttataaaaataatcagccaatatcaatacatgaatttctttaccctctaatgcaaggatacgattctgtttttttaaaaactgatgtagaactaggtggaactgatcaaaaatttaatcttttagtaggaagagacttacaaaaaaatgcacaacaagagcctcaaactgtaattaccttacccttacttgagggcttagatggagtaaagaaaatgtcaaaaagtgaagataattacattggtattactgaagatcctgatgaaatttttggcaaaacaatgtcaattccagatgagataatgtttaagtggtttgatctccttagcttaaaacctttagatgaaatatctgctctaaaaaaagcaatctctaaaggcgataatccaagagacataaaaattcttcttgctcttgaactcacagagagattttcaagtgaagagagtgcccagaatgcaaaggaaaactttttaaagaaattttcaaaaaatgaaataccagataatattccagagaaaattcttaagactaaagaggctattccactagcaaatattctcaaagatattgatatggtatcaagcacatctgaggctttaagattaataaatcaaggagcagtaaaaattgatcagcagaaagttgaatcgaaagattatgattttggtttagatgaaaaaaaattagttcaaataggaaagaaaaaatttatatatttaactttaaaaaaccattga

SEQ ID NO: 296176 - DNA, 1054 bp, Unknown
  Bacterial polypeptide expressing nucleotide sequence isolated from the Sargasso Sea
aatgacaacagcagcggtgagtaaaccccagttagtggatgacttactcgagcgtggcctgatagcccaaagttctaatccagaactcttacacgattttttaagcagcagacaaagcttgtactgtggttttgatcccacagccggcagcctgcatatagggcacctggtgcctttattgatgctgaaacgttttcaggatgcaggccatcacgtcatagctttaataggcggggctacaggttttataggcgatccaagctttaaagcgacggaacgtagtttaaacgcccctgaaatagtgaaggtctgggccgaacagcttggcagccaaatcattgcgctgttgcaacctgtgttatccgaaccgctgcaactggttaacaatgcagactggctgtcgacattggatgtgattagtttcttccgggatgtgggcaaacatttttcagtcaatgccatgatgcgtaaagattctgttcgccagcggctggagcgggccgatcagggcatttcttttacagagttcagctacagccttttacagtcattcgattttgccatgttaaaccaacgttttggctgcactttgcagatagggggcaatgatcagtggggcaatatagtggcaggtattgacctgacccgcagattaaaccatgccaaagtggaaggtttaaccctacctttgatcactaaagcggatggcactaagtttggcaaaacggaatccggcaccatttggctggataaaaccaaaacttcgccttacagcttctaccagttctggttaaataccgacgataaagacgtgtataacctgctgcgctactatagttttttaacttgcgccgagatagctgctatagagcaatcggatcgcaactctggtagcaaacctcaggcccaacgtattttggcagagcaggtgacccgatttgtacatggtgatgcagggctgctatcggctgaacggatcactaaggccctgtttgcaggacagccgcagcaactgagattagctgaattacagcagtggaacaggatgctttaa

SEQ ID NO: 296177 - DNA, 1009 bp, Unknown
  Bacterial polypeptide expressing nucleotide sequence isolated from the Sargasso Sea
tatgaataaatttttaaaagaatttaaagatagagggtatttttatcagtgcactagtgaaagtgaattatccaaattattagataaagaaaaaatcaaaggctacataggttttgattgcacagcagaaagtcttcatgttggaagtttacttcagataatgtgtttaagattaatgcaaaaacatggtcatagaccaattgtattgattggaggaggaaccaccagaattggtgatccttctggtaaagataaaacaagaaaaattttaaatgataaagaaatagaaaaaaatattaaaaatattgaaaaaatattaagaaattttttagataataatgatccaaaaactaaacctatatttgtaaacaattattcttggcttaaaggactaaattatatttcctttttaagagacattggaaaacattttacaataaataaaatgcttacttttgaaagtataaaatctagattagatagagagcaatctttaagttatatggaatttaattatatgattttacaagcatatgattttttagaattaaataaaaaagaaaattgtgctttacagattggaggctctgatcaatggggaaatatagttaatggaacagaactgattaaacggcattctaataatcaagcttacggtttaaccacacctcttataacattagcatctggagcaaaaatgggaaaaacagaatatggtgctatttggttagataaaaaattattatcagcttatgattattggcaattttggagaaatattgacgatagagatgtacttaaatttttaaaaatgttcacagatcttaatattgaggaaataaataaaatagaaaataatgatataaaccaactaaaaattatattagcaaacgaagccactaccatgttacatggtaaaaaatctgctcaaaactctgagaaaactgcaaaagaaatattttcaggaaattctcttggatctaatctaccttcaattaaaatcgaaaaa

SEQ ID NO: 296178 - DNA, 1237 bp, Unknown
  Bacterial polypeptide expressing nucleotide sequence isolated from the Sargasso Sea
aatgacacttattgaagaactcaaataccgcggtttcttacatcaatgcactgatgaggagtctctaaataaaaaattagaatctgaaaatattacattttacataggtttcgattgtacggctaaatcattgcatataggcagcttaatacagataatgataatgcgcctatttcaaaaatacggtcatacacccataatattgattggtacaggaactacccgcattggtgacccatcaggaaaagatgaaaccagaaaaatacttactgaagatgaaataaagaataatgcaaaaaatcttaaaactgtttttgacaaatatttatcatttaaaaatgaaaagaataaagccttaataatggataatgcggattggttagataaacttagctacgtagattttttaagagattttgggaaacattttacaataaataaaatgcttacatttgatagcgtgaaaatacgccttgaaagagaacagtctctaagctttgtagagtttaattatatgatttttcaagcttatgatttctatgaacttaataatcaaaattcgtgtactttacaaattggaggctctgatcaatggggaaatattgtaaatggggtggagcttataagaagagtaaatggcaaagaggtttttggactcacaactcctcttcttactaattctaatggcgataaaatgggcaagacagctgatggagcaatatggcttaatgatgaccttctatcagcctacgattattggcagttttggagaaatgtagatgacagagacgtaattcgtttcatgaaacttttcactgatttaagcaaagaacaaattgacagccatgaacaaaactcatcggaaaatataaatgatttaaaaataatacttgcaaatgaggtaactgctatgcttcatggggttgaaagctcaagaaaagctgagcaggcagcaaaacaaatatttgaaaataaaagcttgtctgaagatatgcctactctcaatttaagcaatgaagatgtacaaaatggtgctctattatcagatcttatcgttcaaatgaaatatgctaactcaaaatctgaaagtaggaaattgatacgtgggaaaggtgtaaaattaaacggaaaaatagtagaaaatgagcttcagttgttagactatgatcaaattacacagttcgaaaatgtaataagtgttggcaagaaaaaacactttaaagtgattattggctag

SEQ ID NO: 296179 - DNA, 1216 bp, Unknown
  Bacterial polypeptide expressing nucleotide sequence isolated from the Sargasso Sea
atgacttcaaataaggaacaaattctagaaatcaaaaggggtgttgatgaaatcttagtcgagaaagattttctagagaagcttaaaaagaataaacccttgaaaattaaggttggttttgatccaacagcacccgatttacatcttggccatactgtaatcattaataagatgagacaattccaagaatttggtcacgaagttatttttctaattggcgattatacaggaatgattggcgatccttctggtgtaaatgagacaaggccagtacttactattgagcaggtcaaagaaaatgcccgaacgtataaaaaccaaattttcaaaatattagacaaagacaaaaccagaatcgaattcaattcatcctggatgaataaagtaacaagtgcggaacttatagatattgcttccaaatacactgtagccagaatgcttgagcgtgatgacttcaagaaaagattcaaatctgagaatccaatatccatccatgaatttatctatccacttgttcaaggatatgattctgttgccctagagtgtgatgtcgagatgggaggtacagaccagaaatttaatctcttagttggaagacatcttcagcaactttatggccaagagccacaaacaataatcacattgccacttttagaaggcttagatggcgttaagaagatgtcaaaatctgcaaataattatgttgcattgaatgattctggcgatgatatgtttggaaagataatgtctatttcagatgatttgatgtggagatattttgagcttgtgagttcaaaggatttaaaggagataaagaatctaaaagattccgtaaatgatggcgttaatccaagggatataaaattcctgctagcagaggaaattgttgagagattccacaatcaatcaattgcaaaaaaagcaaaggaatctttcatgcagagatttcaaaaaggaggtatcccagaggatatcgattttactgaagtatcgataaaagatattcaaaatgatgacggcgaaataaaccttccaaggcttttagcgcataccaatcttgtcaattcaatttcagatggacatcgagctatcaaggcaggatcagtaaggatcgatggagaaaaaataagccaaacatcactcgaaattcaaaacaaatctgagctcgtcctttctcagggaaaacgccgctttatcaaagttaaaattatttaaa

SEQ ID NO: 296180 - DNA, 1036 bp, Unknown
  Bacterial polypeptide expressing nucleotide sequence isolated from the Sargasso Sea
aatagttttactaggcggtggaacaacaagaattggagatccttcgggaaaagaagaaactagaaaaattctttcagaaaagcaaatagaaaaaaatataaaaaatattcaaaaagtttttaaaatttatttaaaaacaaataatccaaaattaaagccaatatttgtgaataattacaaatggcttggaaaattaaattatataaaatttttaagagaaattggaaaacattttactattaataaaatgttaagttttgatagtgtaaaattaagactggatagagaacaatcattaagctatatggaatttaattatatgattttacaagcttatgactttcttgaacttaacaaatctaaaaattgtcaaatgcaaataggtggttcggaccaatggggtaatattgttaacggagttgaacttattaaaagatattctagcaaacaagttttcggattaacaactcctttaattacgttagcatcaggagcaaaaatgggtaaaactgaaaaaggtgcggtctggcttgatgataaacttttatcctcttacgactattggcagttttggagaaatacagatgacagagatgtaataaaatttcttaaaatgtttacagatctaaaattaaaaaaaattgaggaaataaaaaatgaaaatattaataaattaaaaattatcttggcaaatgaagccacttcaatgctacacggtaaaccttcagctattaaagcagaaaaaacagctaaagaaactttcgagtctggtggttctggagccaatcttccagaaattaaaataaaaaaagttgaattagaacttggaataaagatcttggacctattatcatcaaataagatcgtgtcttcaaaaagtgatgccagaagagcaattaaaagcaatgcgttaaaaattaataataaagtcttaactgaggaaaataaaataattaagcttaacgatttcaacaatgaaaaagttttaaaaatttcttttggcaaaaagaaacattatcttgttaaaattatttag

SEQ ID NO: 296181 - DNA, 1231 bp, Unknown
  Bacterial polypeptide expressing nucleotide sequence isolated from the Sargasso Sea
tatgaataaatttttaaaagaatttaaagatagaggttttttctatcaatgtacaagtgaagatgaattatctaaaaaattagatgaagaaaaaatcaaaggttacataggttttgattgtacagctgaaagcttgcatgtaggtagcttgttacaaataatgtgtttgcgacttcttcaaaaaagcggacatcaaccgatagttttacttggtgggggtactacaagaattggagatccatctggaaaagataaaactagaaagatattaagtgaggaagaaatagaaaaaaatattaaaaatatcaaaaatatttttaaaaaatttttaaataatgatgatccaaatacaaaaccaatatttgttaataattatacatggcttaaaaatttaaattatatttcatttttgagagatataggaaaacatttcacgatcaatagaatgctaacatttgacagtgtaaaacttagattagatagagagcagtctctgagctacatggagtttaattatatgattttacaagcatatgactttcttgaattaaataagaaagaaaattgtgtcttacaaatgggaggttcggatcaatggggaaatattgttaatggtgttgaacttataaaaagatattctaataatcaaacctttggtttaacaacacccttaattacactagcaactggtgctaaaatgggaaaaactgaaagtggagctatttggttggatgaaaaatacttatcagcttatgattattggcagttttggagaaacgtagatgacagagatgtaattaaatttttaaaaatgtttactgaaattgaaattagtgaaatagaaacaattaaagataaagatataaatgaattaaaaatactacttgctaataaagctacagaaatgttgcatggaaaggaagcagctaaaaattctgagcaagcagcaaatgaagctttttctggaaacactctaggttcaaacctacctaaagttaatattcaatcaaacaaaatagaagaaaaaataaatatagtagaccttgttttgttttctgaattagaaaactcgaaaagcgaaatcagaagacttataaaaggtaatgcagttaaaataaatgataatattatttcagatgaaaaatttgaaatcaataaaaatttatttaaagataactatcttaaactttctcttggaaaaaagaggcatattaaagtagaattaaattaa

SEQ ID NO: 296182 - DNA, 1231 bp, Unknown
  Bacterial polypeptide expressing nucleotide sequence isolated from the Sargasso Sea
atgaataaatttttaaaagaatttaaagatagaggttttttctatcaatgtacaagtgaagatgaactatctaaacaattagataaagaaaagataaaaggttacataggttttgattgtacggctgaaagcttacatgtgggtagcttgctacaaataatgtgtttacgactacttcaaaaaaatggacatcaaccaatagttttacttggtggaggaactacaagaattggggatccgtctggtaaagacaaaactagaaaaatattaagtgaagaagaaatagaaaaaaatattaaaaatattaaaaatattttaaaaaagtttttagataatgacgatcaaaatataaaaccaatatttgtaaataattatacttggcttaaagatttaaattatatttcatttttaagagatataggaaaacacttcactataaatagaatgctaacatttgatagtgtaaaacttagattggatagagagcaatcgctgagctacatggagtttaattatatgattttacaagcatatgattttcttgaattaaataagaaagaaaattgtgtcttgcaaatcggaggttcggatcaatgggggaacattgtaaatggtgttgagcttattaaaagatattcaaataatcaaacctttggtttaactacgcccttaattacactagcaagtggagttaaaatgggaaaaactgaaactggagctatttggttggatgaaaaatacttatcagcttatgattattggcaattttggagaaacgtagatgatagagacgtaattaaatttttaaaaatgtttactgaaattgaaattaaggagatagaaaaaattaaagataaagatataaacgaattaaaaatactacttgctaataaaactacagaaatgttgcatggaaaggaaacagctaaaaattctgagcaagcagcaaaagaagctttttcaggaaactctcttggtgcaaacttgccaaaagtaaatattcaatctaagaaaatagaggaaaaaattactataatagaccttgttttgttatccaaattagaaaactctaaaagcgaaatcagaagacttttaaaaggtaacgcggttaaaataaatgaaaatattatatcagatgaaaaatttgaaattaataaaaatttatttaaagaaaattatcttaaactttctcttggaaaaaaaagacatattaaaatagaattagattaat

SEQ ID NO: 296183 - DNA, 1237 bp, Unknown
  Bacterial polypeptide expressing nucleotide sequence isolated from the Sargasso Sea
tatggaaaattcatttttaaccgaatttaaagatagagattattttcatcaatgtactcagtttgatgaactagatcaattaatgaggaaaaagaaaattagagcatatattggttttgattgtactgcaaaaagtcttcatgttggaagtttgttgcagataatgtgcttgagactactgcaaaaacatggtcatcaaccaatcgtccttttgggcggaggtacaacaagaataggtgacccttcaggtaaagaagaaactagaaaaattctttctgataaagaaatagaaaagaacatcaaaaacattcaaaaagttttcaaggtttttttgaatacgaaaaatatcaaaacaaaaccaatatttgttaataattataaatggttaaaaaaactcaattatataaaatttctaagagaaattggaaaacattttacagtaaacaaaatgttaagctttgatagtgtaaagcttaggttggaaagagaacaatctttaagttatatggagtttaactacatgatactacaggcttatgattttttagaattaaataagtcaaaaaattgtttaatgcaaattggtggatctgatcaatggggaaatattgtaaatggtgttgatctaattaaaagatattctaaaaatcaagtttatgggttaacaactcctcttattactttagcttcaggagctaaaatgggtaaaacggagaaaggagcaatttggctcgataaaaaattactatcagcttatgaatattggcagttttggagaaatactgaagatacacatgttttgaagtttttaaaaatgttcacagatcttccgcttaaaaaaatagatcaaataaaaaacaataacattaatgatttaaaaataattcttgcgaatgaggcaacaagtatgcttcacggcaaagattcttcaaaaaaggctgagatgaccgcaaaaaacacttttgaaaaaggatttgttggagaaagtttaccgacattaaatttagagcaaaataagataaaaactggattgaatgtactagaattagttttattttcaaaacttctttcatctaaaagtgaaataagaagaatgattaggaacaaaggaatcaaaattaataatgaaactgtaaatgatgaaaagttaattatttcaattgacaattttaatactaataattttcttaagctttcacatggaaaaaaaaatcatgtaataataaaactagtttaa

SEQ ID NO: 296184 - DNA, 652 bp, Unknown
  Bacterial polypeptide expressing nucleotide sequence isolated from the Sargasso Sea
atgaataattttttaaaagaatttaaagaaagaggatactattatcaatgtacaaatgaaatagaattatcaaatctattaaataaagaaagcacaaatgcttatattggatttgatagtacagctccaagtttacatgttggaagtttattgcaaatcatgtgtcttagacttttacaaaagtatggccacagacctattgttcttttaggtggaggtacgactagaataggagatccatcaggtaaagaggaaactagaaaaatcctttctgaaaagcaaatcgagaaaaatattaataatataaaaaaagtttttaaaatttttcttaaaacaaataattcaaaattaaaaccaatttttgtgaataattataaatggttaagcaaacttaattatatagattttttaagagacataggtaaacattttacaataaataaaatgttaacatttgatagtgttaaattaagattagaaagagaacagtctttaagttatatggaatttaattatatgattttacaagcatatgatttttatgaacttaataaatcaaataaatgtaatttgcaaattggtggatccgatcaatggggaaatatagtaaacggtgttgaattaataaaagagaaactggaaatcaagtatt

SEQ ID NO: 296185 - DNA, 1186 bp, Unknown
  Bacterial polypeptide expressing nucleotide sequence isolated from the Sargasso Sea
tatgaaagaatctcttgaattaataaagcgaggcatcgatgaagtcctaactgaggatgaccttgtttcaaaacttaaatctaaaaaacaactaactgttaaggttggatttgatccgactgcacccgatctccatcttggccatactgtgatcttaaacaagatgaggcatttccaagatcttggtcataaggtagtttttttgatcggagatttcactggaagaataggtgatccctctggcaaaaataaaacacgtccagcacttgataaagaggagcttgaaaaaaatgccaaaacttattctgatcaagtatttaaaatcttaaataaagatttaacagaaatcagatttaactctgagtggtgtgaagatttaggtgctgatggaattattgggcttgcatcaaaatataatttaggtcgcatgcttgaaagagacgatttttcgaaacgctataaagcaaatcaacaaattgccattcacgagtttttatatcctttaattcaggcatatgactcaatcgctttaaatgctgatgtggaaatgggcggaactgaccaaaaatttaatcttcttgtgggaagagagctgcaaagggcatttgatcaagaacctcaagtttgtataaccctccctatcctagagggcttagatggaactaataaaatgtctaagtctctagataattatgttggtatcaatgaagatcctgatgaaatgttcggaaaaattatgtcaatttctgatgatttgatgtggagatggttcgaattactaagttttaggcctataaatgaaataaatgagcttaaaaaagaggtgaaatcaggcatgaatccccgagataccaaaattttgcttgctgaagagataattgagcgatttcattccaaagaagatgctgaaaacgcaaaaaatacttttcttgatagattccaaaaaggggcaaagccaaaagatatagaaacattctcaatttctttagacgatgacattgctattggaaacctgcttaaagaatctgggttagttcagagtacatcggaagctatgcgtttagttaaacaaggagcggtaaaaattaatgatgaaaagattgatgacccaaaactcagcattgaaaaaaatcaaaagttacttttccaagttggcaagagaagattcttaaaaattaaaacctaa

SEQ ID NO: 296186 - DNA, 789 bp, Unknown
  Bacterial polypeptide expressing nucleotide sequence isolated from the Sargasso Sea
tatgaaagaatctcttgaattaataaagcgaggcaccgatgaagtcttaactgaagacgaccttgtttcaaaactaaaatctaaaaaacaactaactgttaaagttggatttgacccaactgcacccgatcttcatcttggtcatactgtgatcttaaacaagatgaggcacttccaagacctcggtcataaggtagtttttttaattggagattttactggaagaataggggacccatctggcaaaaacaaaacacgtccatcacttgataaagaggaacttgaaaaaaatgctaaaacttactctgatcaagtatttaaaatcttaaataaagatttaacagatatcagatttaactctgagtggtgtgaagatctgggtgccgatggaattattgggcttgcatcaaaatataatttaggtcgtatgcttgaaagagatgatttttcgaaacgctacaaagcaaatcaacaaattgccattcatgagtttttatatcctttaattcaggcctatgactcaatcgctttaaatgctgatgtggaaatgggcggaactgaccaaaaatttaatcttcttgtcggaagagagctgcaaagggcatttgatcaagagcctcaagtttgtataacccttcctatcttagaaggcttggatggaattaataaaatgtctaaatctttagataattatgttggtatcaatgaagatcctgatgaaatgttcggcaaaattatgtcaatttctgatgatttgatgtggagatggttcgaattactgagtttagg

SEQ ID NO: 296187 - DNA, 883 bp, Unknown
  Bacterial polypeptide expressing nucleotide sequence isolated from the Sargasso Sea
atggaacaatttatagatgaacttaagtggagaggcatgcttcatgatgtaatacctggaactgaagaatatttatctaaaaataaaactattggatatgtaggatttgaccctacatctgattcacttcacattggaagccttgttcccatttttattttaagacattttcaaaatgcaggacatactccagtagttcttcttggaggagcaactggaatgattggcgatccatctggaaagtctgacgagagaaaccttttagataaaaagattttaaagtataatgaaaaaaaattaaagcttcaatttgaaaaatttcttgattttaaatccaaaaaaaataacagagctattcttgtgaataattatgattggatgagtaagttttctattattgacttctccagagatattggaaagcacataactgtaaactatatgatggcgaaagaatctgtgaaaaaaagaatctctaaagacacatcacaaggtatgtcatttactgaattcacataccaacttattcaaggatatgattttctccatctttacaaagacatgaattgtatgcttcaaatgggtggaagtgatcaatggggaaacataaccactgggactgaacttattagaaggaaggaaaataaaaaagcatatgcaatgacttgtcctttaataaaaaaatctgatgggtctaagtttggaaagtctgaaggtggtaatgtttggttagataaaaacaaaacttcagtttataagttttatcaatactggttaaatatatcagatgaagatgctttaagttacattaaggtatttacattcttatcaaaaagtaaagttgaagaattaatattagagcataataaagataaagctagaa

SEQ ID NO: 296188 - DNA, 1057 bp, Unknown
  Bacterial polypeptide expressing nucleotide sequence isolated from the Sargasso Sea
atggaaaactcattcttatctgaatttaaaaaaagagattatttcaatcaatgcacaaattctggagaattagaacatctgatggctaaaaaaaaaattagagcttatataggctttgattgtactgcgccaagcttgcatgttggaagtctcttgcagattatgtgtttaaggcttttacaaaaacatggtcatcaaccaattgttttactgggaggtggtacgacacgtattggtgatccttctggcaaagaagaaacaagaaaaattttatcagaaaaagaaattgataaaaatattaaaaatattcaaaaaatttttaaaatttacttaaaaccaaacagctcaaaaacaaaacctatatttgtgaataattataaatggcttggtaaattaaattatataaaatttctaagagagataggaaagcattttacaataaataaaatgttaagttttgacagtgttaaattacgattagatcgtgaacaatctttgagttatatggagtttaattatatgattttgcaagcttatgatttcttcgagcttaataaaaataaaaattgttcaatgcaaattggaggatccgatcaatggggaaacatagttaatggagttgaactaataaaaagaaagtctaacactcaggcatttggtctaacaacacctttgattactttggcctctggaataaagatgggcaaaacagaaaaaggagctgtgtggttagataaaaaaatgctttctccttatgactattggcaattttggagaaatacggatgatagagacgtattaaaatttataaaaatgtttacagacttaaaattagaaaaaatcgatgaaataaaaaatcaagatgttaacagattaaaaatattattagccaatgaagcaactacaatgttgcatggaaaagaagcggctagcaaagcagaaaaaactgcaaaaaatacttttgaaaaaggtgctattggagatgatttaccgtttttaaaaattaaaaaggaagaattagaaaatggaataaatgtaattgatattgtggtaaact

SEQ ID NO: 296189 - DNA, 1189 bp, Unknown
  Bacterial polypeptide expressing nucleotide sequence isolated from the Sargasso Sea
atgaaagaagatctaaatttaattaaacgtggcattgatgagcttattggtgaggatgagcttatatcaaaactcaaatccaaaaaggagctcattgttaaagctggttttgacccaaccgcacctgatcttcacctaggacacacagtcttaattaataaattaaggcattttcagcaattaggacatcagataatatttttgataggtgattttactggaatgattggagatccatcaggaaaaaataaaactagaccgccattagatcgagctgatattaatgagaatgctaaatcatataagaaacaagtttttaaaattttggatcctaagttaacagaaattaggtttaattcagaatggagtaaaaagcttggcgctgagggaattatcaaacttgcatctcaatataatttagccagaatgttagaacgtgatgatttcaataagaggtataagtctaatcaaagtattgctatgcatgaattgctgtatcctctaattcaagctaatgattccataactcttaatgctgatatagaactcggaggaaccgatcaaaaatttaatcttttggtgggcagagatctgcaaagagcatttgatcaagaaccccaagttgttataacagtaccgattcttgaaggtttagatggaaaaaataaaatgtctaaatctttggataattatgtgggaattgacgagtctcccaatgaaatgtttggaaaaattatgtctatatcggatgaactcatgtggagatggtttgatctgttaagctttaaatcctctggtgaaattaagaatttgaaatctgagcaagcgaaaggaaagaatccgagagatataaaaattgaattagccaaagagatcattgctcgcttccataatgaaaaatcagctaatgatgctgagtcaaagtttattgatcagtttcaaaaaaagaatactccagatgatattgaagaaatatcttacaaaatttctggtgatttaattccactacctaatttgttaaaagaatgtggtatgaccgccagtacttctgaagcaatgagaatgatacagcaaggagctgtaagaattgatgaacaaaaaataactgataaaaaatatcaagtttcaaagaatacttccgcaatttatcaggtgggaaaaagaaaatttaaaaaaattatcctttaag

SEQ ID NO: 296190 - DNA, 1189 bp, Unknown
  Bacterial polypeptide expressing nucleotide sequence isolated from the Sargasso Sea
atgaaagaagcacttaagcttattaacagaggtaccgatgagattctaactgaatctgatctaaagaaaaaacttgattctggtaaacagttaattatcaaggcaggtttcgatccaactgctccagatcttcatctaggccatactgttttattaaataaactaagacatttccaagatcttggacatcgagttgtgtttttaattggagattttactggaagaattggagatccttcaggtacaaataaaacaagaccaacgcttgatgcaaaagatttagaagaaaatgctaaaacttatgaaaaacaagtttttaaaatacttaaaaaagatctaacagatgtgcgatttaattcagagtggtgtgaaaagcttggtgcagatggattaatccgccttgcagcaaaatacaacgttgctaggatgcttgagagagacgattttagtaaaagattttctgaaaataagagcatcgcaattcatgagtttctatatcctttagttcaaggatatgactcagtagccctaaaagcagatgttgagttgggaggcaccgatcaaaagtttaatttgttagttggaagagagcttcaaagagattatgaccaagaacctcaggttgtcataacagttccaattttagagggactagatggcgtcaaaaaaatgtcaaagtcattaaataattacgttgcaattgatgaagagccagatgaaatgtttggcaaaattatgtcaatttcagatgatttaatgtggagatggtttgagttattaagtttcatgagtgaagaagaaataaattctctaaagaaagaaatgcaggatggtaaaaatccaagagatatcaagtttattcttgccgaggagattgtggatagattccataaagatggagatggtcaaaaatgtaaagaatcattccttaatagattccaaaaaggtcaaatacctgaaaatgttgacttagtaaaagttaatattgatggcgagtcgatactgcttgttaatttattgaaagaaacaaacatgattgccagtgtctctgaaggtaacaggctcataaaacaaggtggtataaaggtaaattctgagaaagttaatgacccaaagtttgaaatatcagttaactctgagaacctttaccaagttggtaaaagaagattcctcaaaattaaaatctaaa

SEQ ID NO: 296191 - DNA, 1237 bp, Unknown
  Bacterial polypeptide expressing nucleotide sequence isolated from the Sargasso Sea
tatggaaaattcatacttatctgaattcaaaaatagagaatatttcaatcaatgcactaattttcaagagttagaacagttgatgacaaaaaagaaaattagagcttacattggttttgactgtactgcccaaagcctacacgttggtagtcttcttcaaataatgtgcctaagattgttacaaaaacatggtcatcaaccaattgttttattaggtggtggcacaacaagaataggagatccctctggaaaagaagaaaccagaaagattctttctgaaaaacaaattgaaaaaaatataaaaaatattgagaaagtttttaaaatttatttaaaaacaaataatccaaaattaaaaccaatttttgtaaacaattataaatggctcggaaaattgaattatataaagtttctaagagaaattggaagacattttactataaataaaatgttaagctttgatagtgtaaaattaagattagaaagagaacaatcacttagctacatggaatttaattatatgattttacaagcgtatgactttcttgaacttaacaaagttaaaaattgcattatgcaaataggtggatcagatcaatggggaaatattgttaatggtgtggaattaattaaaagacaatctggaaatactgcttacggtttaactactcctctaataactttagcctctggtgcaaaaatgggaaaaacagagcaaggagctgtttggttagataaaaaaatgctatccccttatgactactggcaattctggagaaatacagatgatagagatgtcattaaatttcttaaaatgtttacagatttaagtttggaaaaaatagaaaatattaaaacaaaagatattaattatttaaaaatattgttagcaaatgaaactacttcaatgttacacggagctgagtcagcaagacaagctgaaagaactgcaaaaaatacttttaaaaacaaatctatagatgaaaacttgccttcagttactataaacaaaaatcaaatcgaaaaagagataaacattttgaatattgttattttatctaaaatgttaagttcaaaaggtgaaattagaagaatgataaaaaataaaggaattaaaataaataatgttactattgataatgaaaaaagaatgatttcaaaaaaagattttaaagaaaatagcatgctaaaattatctttgggaaaaaagaaacacactgtttttaaaattaattaa

SEQ ID NO: 296192 - DNA, 1231 bp, Unknown
  Bacterial polypeptide expressing nucleotide sequence isolated from the Sargasso Sea
tatgaataaatttttaaaagaatttaaagatagaggttatttttatcaatgtactgatgagaatgaattatcctcgttattagataaaaaaaagattaaagcctacattggatttgattgtacagctgaaagtttacatgttggaagccttttacaaattatgtgtttacgaatgcttcaaaaacatgggcaccaaccaatagtattattaggtggaggaactacaagaattggtgatccgtctgggaaggacaaaacaagaaaaattttgaatgaggatgaaattaaaaaaaattccaaaaatattgaaaaaattttaaaaaaatttttaagtacagataataaaaatataaaaccaatatttgttgataattttgagtggcttaaaggtttaaattatatttcttttttaagagatattggaaaacattttacaataaataaaatgttaacatttgaaagcgtgaaaacaagattagacagagaacaatctttaagttatatggaatttaattatatgattttacaagcttatgattttttagaattaaataaaaaagaaaattgtatattgcaaatcggtggttctgaccaatgggggaatataattaatggaactgaacttataaaaagacattctaataatatagcctacggtctaactactccattaattacgttagctggtggaaccaaaatgggtaaaactgaaactggagctatatggctagataaaaatttattatcatcatatgagtattggcaattttggagaaacactgatgataacgatgtaattaaatttttaaaaatgtttacagatttaacaattgatgaaattaataaatcaaaagataatgacataaatcagctaaaaattaaattagcaaacgaagcaactacaatgctacatggcaaaaaagaatcagaaaaagctgaagctacagcaaaaaaaacttttgaacaaaatttaagtggtgaaggattgcctacatacagtataagtaaaagtaagttaaataacttaacaatagttgaattggtttctttaacgaaaatacaaatttcaaagagtgaggtaagaagattaattaaaggaagtggaattaaaattaataataaaacaatcgatgatgaaaagtatttaataaaaaatgaatcatttaataaagatggttttattaaactttcgataggtaagaaaaaacatattaaaatagaattagattaa

SEQ ID NO: 296193 - DNA, 1225 bp, Unknown
  Bacterial polypeptide expressing nucleotide sequence isolated from the Sargasso Sea
tatgaataaatttttgaaagaatttaaagatagagggtatttctaccagtgcactaatgagaatgaattatctaacttgttagataaaaaaagtattaatgcttatattggttttgatagcacagctgctagtttgcatgtcggaagtttgatgcaaataatgtgtctaaaattattgcaaaagcatggacatagaccaatagttttattaggtggtggaactacaagaataggagatccgtctggcaaagaggagactagaaaaattttatctgaagtacaaattgaaaataatataaaaaatattcaaaacgtttttaaaatatttttgaaaacaaataatccaaaattgaaacctatttttgtaaataattataagtggttaggaaaattaaattatataaaatttttaagagaaattggaagacattttactattaacaaaatgttaagttttgaaagcgttaaacttcgtctcgagagagaacaatcgcttagctacatggaatttaattatatgatattacaagcatatgattttcttgaactcaacaaaagtaaaaattgcttgatgcaaattggtggttcagaccaatggggaaatatagttaatggtgttgaattaataaaaagacaatctggaaatcaagtttatggtttaacaacacctttgataactttatcatctggagctaaaatgggtaaaacggaaaaaggggctgtttggttagataaaaaaatgttacccccttacgactactggcaattttggagaaatactgacgacagagatgtaattaaatttttaaaaatgtttaccgacatgccattgaatgaaattgaaaatattcaagaaaacaatattaatgatttaaaaattatacttgcaaataaagcaactgaaatgttgcatggtgaaaaaacagcaaaagaatctgaaaaaatggctgtatcaacatttaaaaatgattcttcaggagaaaatttaccaaatattaaaataaataaagaaattttgaataaaaatatagtcgagctaacagcttatgtggcaaaaggaatttcaaaaagcgagataagaagactgataaaatcaaatgggataaaaattaataatcaattagtaaatgatgaaaaatacattatcaatgatgcattatttttagaaaatcgatttataaagttatcaataggtaaaaaaaaacattttaaaattatactttaa

SEQ ID NO: 296194 - DNA, 1198 bp, Unknown
  Bacterial polypeptide expressing nucleotide sequence isolated from the Sargasso Sea
atgattgattatatacagttatttaaagatagaaatctattcaatcaatgcactaatgaaatagaacttaataatttactcaataagaaaaaaattattttttatattggatttgatgctacagctgatgcgttacatgctggtagtcttgtacaattaagagctattaagactctaatcaaacatggtcatcaggcaatagtactattaggtggaggcacaacaaaaattggtgacccctctggcaaagatgcctcaagacaaattttaacttacgaaacaatccaaaaaaatattgagaattttaaaagaatatttgaacattattttagagatttcaaagaaaatataaaatttataaataatgatcaatggcttgataaattaaactacatagagttattgagagatttgggaagtcaagtctcaatcaatcgtatgcttacatttgagagtgttaaagagagacttaaaagagagcaatcattatcatttttagaatttaattacatgatacttcaaagttatgattttcttcacttaaataaacatgaaaattgcgagttgcaaattggtggctcggatcaatggggtaatatcgttttgggtatggaaattatatcaaaaataaacaaaaaagatgcttttggtcttactacacctcttttaactacctctacaggtaagaagatgggcaagacagagcaaggcgctgtctggatagatcaaaataaatacagctcttacgatttctatcagtattggagaaatgtggatgataatgatgtggaaaaactattacttatttttagtgatttagataaagaagaaattaaaatattaattaaagaagatatcaataatgcgaaaaaaaaattagcatatttagtgacaacagattgtcactcagaaagctcagcacaagaggctgaagaaaaagcaagatcaatttttgaaaataattcttacgataatattgatgaaattaactttaaaatagactcaaaactcatagatacactaacatccaatagttcggtctcatcaaaatctgaagcaaaaaggctaattgagggtggtggtataaagattgacgacgaccaaattaacgatattaatcttacaattgataagtcttataacggaaaaatactcaagattggtaaaaaaaaatattttaaaattattgttaagtaat

SEQ ID NO: 296195 - DNA, 1231 bp, Unknown
  Bacterial polypeptide expressing nucleotide sequence isolated from the Sargasso Sea
tatgaataaatttttaaaagattttaaagatcgtggatatttctaccaatgtactagtgaggatgaattatcaaatttactagataaagaaaaaatcaaagcttatattggttttgactgtaccgcagagagtttacatgttggtagcttactgcaaataatgtgtttgagattacttcaaaaaaatggacatcgtccaatagttttacttggtggtggaactacaagaattggtgacccatctggaaaagataaaactagaaaaattttaagtgaagaagaaattgaaaaaaatattttaaatattaaaaatattcttaaaaaatttttagacgatgatgacccaagtacaaaaccaatatttgtaaataattattcttggttaaaaaatttgaattatatatctttcctaagagatattggaaaacactttactatcaataggatgttgacatttgatagtgtcaaattgagactggatagagaacaatcacttagttatatggaatttaattatatgattttgcaagcatatgattttttagaattaaataaaacagaaaattgtgttttacaaattggtggttctgatcaatgggggaatattgtaaacggagttgagcttattaaaagatactctaataatcaaacttttggtttaactactccactaattactttagctacaggtgcaaaaatgggtaagacagaaaacggtgcagtttggttagatgaaaaatttttatcagcttatgattactggcaattttggagaaatattgatgacagggatgtgattaaatttataaaaatgtttactgatcttgatattgtcgagatagaaaaattaaaaaaaaataacataaatgaattaaaaattttgcttgcaaataaaactacctctttgcttcatggcgaaaaggcagcgaagaactcagaacaagcagctaaagaggcattttctggaaattcacttggttcaaatttaccttctgtaaatatatcattagaaaatgttgataaaaaaattaacgttttagatcttattttactgtctaaattagaaaattctaaaagtgagattagaagacttataaaaggaaatgcgataaaaattaatgataatactatatctgacgaaaaatttattattgatcacaatctttttaaagaaaattacctcaagttatctataggaaaaaaaagacacattaaagttgagctaaattaa

SEQ ID NO: 296196 - DNA, 808 bp, Unknown
  Bacterial polypeptide expressing nucleotide sequence isolated from the Sargasso Sea
tatgaataattttttgagagaatttaaagatagaggttactattaccaatgtaccaatgaaacggcgttatcagatttattgaacaaagaaaatattaacgcatatattggatttgatagtacagcacccagtcttcatgttggtagtttattacaaataatgtgccttagacttttacaaaaacatggtcacaaaccgattgttcttctaggtggaggaacaacaagaataggagatccatctggtaaagaagaaactagaaaaatattatctgaaaaacaaatagagaaaaatataaataatataaaaaatgtgtttaaaatttttcttaaaacaaataatccacaattgaagccgatttttgtaaataattttaaatggttaagtaaactaaactacataaattttttaagagatataggtaggcattttacaataaataaaatgttaacatttgatagtgtaaaattaagattggaaagagaacaatcattaagttacatggaatttaattatatgattttacaagcatatgatttctacgaacttaataaaacaaacaaatgtaatttacaaattggtggatcagaccagtggggaaacatagtaaatggtgttgaacttattaaaagagaatctgggaatcaagcatatggtttaactacgccactcataactttagcatcaggcacaaaaatgggtaaaaccgaaaaaggtgcagtatggttaaataaggaaatgttatcaccatatgattattggcagttttggagaaatactgatgatcgcgatgtactaaaattttaa

SEQ ID NO: 296197 - DNA, 1225 bp, Unknown
  Bacterial polypeptide expressing nucleotide sequence isolated from the Sargasso Sea
catgaataaatttttaaaagaatttaaagacagaggctatttctatcagtgtactaatgaaaatgaattatctgacttattagataaaaaaagtattagcatatatattggttttgatagtaccgctcctagtttacatgttggtagtttaatgcaaattatgtgtctaaaattattacaaaatcatgggcatagaccaattgtattattaggtggaggcactacaagaataggtgatccatctggaaaagatgaaactagaaaaattttatctgaaaaacaaattgaacaaaatattaaaaatattaaaaatgtttttaaaatattcttaaaaacaaaaaatccaaaattaaaacctgtatttgtcaataattataaatggttaggaaaacttaattatataaaatttttaagagaaattggaagacattttaccattaataaaatgttaagttttgatagtgtaaaattacgtttagaacgagaacagtctctaagttatatggaatttaactatatgattttacaagcatatgattttcttgaacttaataaaaataaaaattgtttgatgcaaattggtggctcagaccaatggggaaatatcgttaacggagttgaattaattaaaagacaatctgggaatcaagtttatggtttaacaacacctttaataactttagcttctggtgcaaaaatgggaaaaacagaacaaggtgcagtttggttagataaaaaaatgttgtctccctatgattactggcaattttggagaaatactgacgatagagatgtaattaaatttttaaaaatgtttactaccatttctataaatgaaattgaaaagattaaagataaaaatattaatgatttaaaaattattcttgcaaataaaactactgaaatgctgcacggtgaaaaatctgcaaaagaatctgaaaaaatggccctatctacatttaaagataattcttcaggagaaaatttaccaaatattaaaattaataaagaaattatggataaaaatatagttgaactaacagcatatgttacaaaagatatttcaaaaagtgaaataagaagaatgatcaaggctaacggtattaaaatagataatcaattagtaaacgatgaaaaatacattattaatagtcaattatttttagaaaaaggttttataaagttatcaataggaaaaaagaggcattacaaaattataatttaa

SEQ ID NO: 296198 - DNA, 978 bp, Unknown
  Bacterial polypeptide expressing nucleotide sequence isolated from the Sargasso Sea
aaacaagaaaaattttagatgaaaatgaaattgaaaaaaatattaaaaatattcaaaatatcttaaaaaaatttcttgacagtgaagatccaataacttcacctatttatgtcaataattatacctggcttaaagatttaaattatatttcttttttaagagatataggaaaacattttactattaatagaatgcttacatttgatagtgtaaagctaagattagaaagagaacagtcacttagttatatggaatttaattacatgatactccaagcctatgattttttagaattaaataaaaaagaaaattgtgttctacaaataggtggttctgatcaatggggaaacattgtaaatggtgttgaacttattaagagatattctaataaccaaacatacggattaacaacgccattaattactttagccacaggtgcaaaaatgggaaaaactgaaaatggcgctatttggttagatgagaaatatttatcagcttatgattattggcaattttggagaaatgttgatgaccgggatgtaatgaaatttttaaaaatgtttactgatattgatataaacgaaatcaatgctttagaggaaaaaaatattaatgaattaaaaatattattagctaataaggcgacggccatgttacatggagaagatgctgctcaaaattctgaacaagcagcaaaggaggcattttctggaaattctttaggctctaacttaccaagcgttaaaattgaaacaacacaattagaaaataatatcaatataattgatttaataattttatctaaagcagaaaattcaaaaagtgagataagaagattaattaagggtaaagctattaagattaatgatgctgtagtttcagatgaaaaatttattattaatcaggacctattttcggaaaattatttaaagctctccataggtaaaaaaaggcacattaaagtagaattaatttaat

SEQ ID NO: 296199 - DNA, 1100 bp, Unknown
  Bacterial polypeptide expressing nucleotide sequence isolated from the Sargasso Sea
aatgtaaaagcaggatttgacccaactgcaccggacttacatcttggtcatactgtattgataaataaacttcgtcagttccagacgcttgggcataacattattttcttaattggtgattatacgggaatgataggggacccttctgggaagagtgcgacacgacccccgcttagtgcagaagaaataaaggaaaattcaaaaacatatgagaagcagatttttaagatactcgatccggatttaaccacagtagtatttaattcatcgtggatgaataaaatgaatgcggcagatttgattcgattagcttcacatcataccgtcgcacgaatgcttgaacgagatgattttgataaaagatataaatcaaatcaggccatttcaatacatgaatttctataccctttgatacaaggctatgattcggttgcactagatgctgatgttgagcttgggggtacagaccaaaaatttaatttgcttgtcgggcgacaattacaggagttacatggcaagccaccacaggtggttattacaatgccgatactcgaaggattaggcggtagccagaaaatgtcaaaatcattaagcaactatattggtattgatgaatctgcaaaggaaatgtttggaaagattatgtcaatatctgataatttaatgtggcgatattttgaattattgagttttaaaaatcttgaagaaatcgaacaatttaaaaagcaagttgagacaggaacaaaccccagagacataaaatttgaactcgctcaagaaattattacccgatttcatgatttaaaatcggcgcaagacgcgaaaaatgattttgttaagcgctttagtgataatgcaattcccgatattattgacgatatagaaattaaggttagcaataagggaattgtttttgcgaatcttttaaaagagacgcagttagttagtagcacatctgatgcacaccgcatgattaaacaggctgcggtgaagattgatggcaaacgagcagatgatgggaagcagatactagaggcaggtttttctgcagttattcaggttggtaagcgaaaattcataagggttaaattaactgaata

SEQ ID NO: 296200 - DNA, 1091 bp, Unknown
  Bacterial polypeptide expressing nucleotide sequence isolated from the Sargasso Sea
catgacttcaaataaggaacaaattctggaaatcaaaaggggtgttgatgaaatcttagtcgagaaagattttctagagaagcttaaaaagaataaacccctgaaaattaaggttggttttgacccaactgcacctgatttacatcttggtcatactgtaatcattaataagatgagacaattccaagaatttggccacgaagttatttttctaattggtgattacactggaatgattggcgacccttctggtgtaaacgagacgaggccagtgcttactgtagagcaggtcaaagaaaatgctcgaacgtataaaaatcaaatttttaagatattagataaggacaaaaccaggatcgaattgaattcatcgtggatgaataaagtaacgagcgctgaactcatagatattgcttctaaatatactgttgcaagaatgcttgagcgcgatgacttcaagaaaagattcaaatctgagaatccaatatccatccatgaatttatctatccgctcgttcaggggtatgattctgttgccctagagtgtgatgtcgagatgggaggtacagaccagaaattcaatcttttagttggaagacatcttcagcaactttatggtcaagaaccacaaacaataatcacattgccacttttagaaggtttggatggtattaagaaaatgtcgaaatctgcaaataattttgttgcattgaatgattctggggatgatatgtttggaaagataatgtctgtttcagatgatttgatgtggagatattttgagcttgtaagttcaaagaatttaacagagataaagaatctaaaaaattctgtaaatgatggcgctaatccaagggatataaaatttctgctagcagaggaaattgttgaaagattccacaatcaatcaattgcaaaaaaagcaaaggaatctttcttgcagagatttcaaaaaggaggtatcccagaggatatagatttgacagaagtatcgataaaagatattcaaaatgatgatggcgaaataaatcttccaaggcttttagcgcataccaatcttgtcaattcaatttcagaaggacaccgtgcaa

SEQ ID NO: 296201 - DNA, 988 bp, Unknown
  Bacterial polypeptide expressing nucleotide sequence isolated from the Sargasso Sea
tatgagcatcaaatctgaggacattatttttgagttggagagcagaggcttaattgctcagctggctggtgaggacaatttacgggagcatctagccagcggtaaaagagtcgtttattgcggctttgaccccacggcagagagcttacacgtcggcagtgtagttcccttattggttctccggaggttccagctagcgggacacaagcctattgctcttgtagggggagccactgggcttataggtgacccaagcttcaagtcagctgagagacagctcaattcggccgatgtggtagaagaatgggttgaaagattaaaacctcagcttagccaattcttggattttgactgcggcgctaattctgcagttttggtcaataatctagattggacacagaatcttgatctcctgacttttttacgaacagtgggaaagcatttttcggttaactcgatgattcaaaaagagtcagtcaaacagagaattgaaagagaaggggaagggatctctttcacagaattcagctacatgcttctgcagtcgctggatttcgccgaattgcatgagagatttgactgcacaattcaggtcggtggaagcgatcagtgggggaacataacagggggtatagatctgacccgccggatgcatcaaaagcaagtgttcggagtaaccacgcctctggttactaaagctgatggaacaaaatttggtaaaacagaaaaggggactatttggattagtgccaagaaaacctcgccctatgccctgtatcagttttggttaaacgtttctgacctagacgtatacaaataccttaggtattttacattcctgagtgctaaggaaattcgcgagattgaattggccgacaagtcgtcagaacgcaagcccgaagctcaaggcattctcgcaagcgaggtcacaaagcttctccatggagcagaagggttgactgccgcaaaaaggataagcgacggactt

SEQ ID NO: 296202 - DNA, 1186 bp, Unknown
  Bacterial polypeptide expressing nucleotide sequence isolated from the Sargasso Sea
tatgaaagaatctcttgaattaataaagcgaggcatcgatgaggtcttaactgaagacgaccttatttcaaaacttaaatctaaaaaacaactaactgttaaagttggatttgacccaactgcacccgatcttcatcttggccacactgtgatcttaaataagatgaggcacttccaagacctcggtcataaggtagtttttttaatcggagattttactggaagaataggggacccatctggcaaaaacaaaacacgtccatcacttgataaagaggaacttgaaaaaaatgctaaaacttactctgatcaagtatttaaaatcttaaataaagatttaacagatatcagatttaactctgagtggtgtgaagatctgggtgccgatggaattattgggcttgcatcaaaatataatttaggtcgtatgcttgaaagagatgatttttcgaaacgctacaaagcaaatcaacaaattgccattcacgagtttttatatcctttaattcaggcctatgactcaatcgctttaaatgctgatgtggaaatgggcggaactgaccaaaaatttaatcttcttgtgggaagagagctgcaaagggcatttgatcaagagcctcaagtttgtataacccttcctatcttagaaggcttggatggaattaataaaatgtctaaatctttagataattatgttggtatcaatgaagatcctgatgaaatgttcggcaaaattatgtcaatttctgatgatttgatgtggagatggttcgaattactgagttttaggccaataaatgaggtaaatgagctaaaaaaagaggtgaaatcgggtatgaaccctcgagatactaagattttgcttgctgaagagataattgagcgatttcattctaaagaagatgctgaaaatgcaaaaaatacttttcttgatagattccaaaaaggggcaaagccaaaagatatagaaacgttctcaatttctttggatgatgatattgcgattggaaacttgcttaaagaatctgggttagttcagagcacgtcggaagcgatgcgtttagttaaacaaggagcagtaaaaattaatgatgaaaaaattgatgacccaaaactcagcattgaaaaaaatcaagagttacttgtccaagttggtaagagaagattcttaaaaattaaaacctaa

SEQ ID NO: 296203 - DNA, 1070 bp, Unknown
  Bacterial polypeptide expressing nucleotide sequence isolated from the Sargasso Sea
catgacttcaaataaggaacaaattctggaaatcaaaaggggtgttgatgaaatcttagtcgagaaagattttctagagaagcttaaaaagaaaaaacccttgaaaattaaggttggttttgacccaactgcacctgatttacatcttggtcatactgtaatcattaataagatgagacaattccaagaatttggtcatgagattatttttctaattggtgattacactggaatgattggcgacccttcgggtgtaaatgagacaaggccagtacttactctagagcaggtcaaagaaaatgctcgaacatataaaaaccaaattttcaagatattagataaggacaaaaccagaatcgaatttaattcaacctggatgaataaagtaacgagtgctgaactcatagatattgcttcaaaatatactgtggcaagaatgcttgagcgcgatgacttcaagaaaagattcaaatctaagaatccaatatccatacatgaattcatctatcctcttgttcaaggatatgattctgttgccctagagtgtgatgtcgagatgggaggtacagaccagaaatttaatctcttagtgggaagacaccttcagcaactttatggccaagaaccacaaacaataatcacattgccacttttggaaggcttggatggtgtaaagaagatgtcaaaatctgcaaataattatgttgcgttgaatgattctggcgatgatatgtttggaaagataatgtctgtttcagatgatttgatgtggagatattttgagcttgtgagctcaaagaatttaacagagataaagaacctaaaagattctgtagatgatggcgctaacccaagagatataaaattcctactagcagaggaaattgttgagagattccacaatcaaccaattgcaaaaaaagcaaaggaatcattcatgcagagatttcaaaaaagaggtattccggaagatatagatttgtcagaagtatcgataaaagatattcaaaatgataatggtgaaataaatcttccaaggcttttagcgcataccaatcttgtcaattcaa

SEQ ID NO: 296204 - DNA, 1189 bp, Unknown
  Bacterial polypeptide expressing nucleotide sequence isolated from the Sargasso Sea
atgaaagcagcactagaacttattcgtcgaggtgtcgacgaaattctcactgaagaagaccttatagctaagctcaagagtaaaaaacaattgcttatcaaggttggtttcgatcccactgcacctgatttgcatttaggtcatacggttattctcaataaaatgcgacattttcaggaactgggccataaagtcgtattccttattggtgacttcactggccgcattggtgatccctcaggaaaaaataaaacgcggccaacattagatgctgaagatttggtgaataatgcgcagacttacgcagatcaagtatttaagattcttgacaaacaactcactgaaataagatttaattccgagtggtgcgagcaattgggtgctgatggcattatccgtttagcctcccagtataatttaggcagaatgttagagcgtgaagattttaatgcacgctacaaagccaacgaacaaattgcactgcatgaatttttgtaccccttaattcaagcctatgactctatagcacttgaggccgatattgagatgggagggaccgaccaaaagttcaacttacttgtgggaagagagttgcaacgaggatacgggcaagatccccaagtttgcatcacattgcccatcttagagggtttggatggtgtgcacaaaatgtctaaatctctaaataactatgtgggtataaacgaaccaccggctgaaatgtttggcaaaattatgtctatttccgatgacctgatgtggcggtggtttgagttacttagttttgaatcgacaacaactattgctaactatcaaaaagatgttaaaacaggaaccaatcctcgtgatattaaatttaaacttgctcacgaattagtagcacgttttcattctgactcagccgcagcacaggcattgcaaagttttactgctcaatttcaaaaaggtgctaaacctgagcatattgatacgcaaatgctaaccctcactgaagataccattgccattgggaatctgctcaaagagactcaattaacttctagcacttctgaagcaatgcgcttagtgaagcagggagcagtcaaggttgatgatgagaaaataactgatccgaaactacaacttgataaagggaagtcgtatttagtccaagttggaaaacgtaaatttctaacagtccaactttaaa

SEQ ID NO: 296205 - DNA, 604 bp, Unknown
  Bacterial polypeptide expressing nucleotide sequence isolated from the Sargasso Sea
tatgaatgaatttttaaaagaatttaaagatagaggatatttttatcaatgcacagacgaaaaagctctttcaaagaagctgagtgaagagagtgtaaaaggatatataggctttgattgtacagctcaaagtttacacgtaggtagcttactccaaatcatgtgtttaagattgatgcaaaaacatggacataaaccaattgttttgcttggtggaggaactacaagaataggagatccatcaggaaaagataaaactagaaaaattttagatgaaaatgaaatagaaaaaaatattaaaagcatcgagaatattttaaaaaaatttttagttactaaagatgaaaagatatctccaatttttgttaacaactattcatggttaaaagatttaaattatatttcttttctaagagatataggaaaacattttacgataaataaaatgttaagttttgatagcgttaagcttaggttggaaagggaacaatcattaagttatatggaatttaattatatgattttacaagcttacgatttcttagagttaaataaaaagaagaattgtttattacaaattggggggtcagatcaatggggtaat

SEQ ID NO: 296206 - DNA, 1294 bp, Unknown
  Bacterial polypeptide expressing nucleotide sequence isolated from the Sargasso Sea
tatgaaaaactttattgatgaattaaaatggagaggaatgcttcaggatattatccctggaactgaagcgcatttaaacaaaaataaatcacttggttatataggttttgatccaacatcagattcgctgcacgttggaagtcttgttccaatttttatattaatgcattttcaaaagtatggtcatactcctgttgttctgcttggaggagcaactggaatgattggagatccatctggaaaatcagatgaaagaaaattgctagataaagatattttagattataattttaaaaagcttaaaaaacaatttgaaaaatttttagattttgattctaaaaaagaaaaccctgcaatactattgaacaattacgattggatgagtaagttttctgtaatagatttttctagaaatataggaaagcatataactataaactatatgatggcaaaagactcagtaaaaaagagaatagggaaagaatcaaatgatggaatgtcttttactgaatttacttatcaattaatccaagggtatgactttctttatttattccaaaatatgaattgtactgttcagatgggtggaagcgatcaatggggaaatattactacaggaacagaattgattagaagaaaagagaataaaaaagcatttgctttaacttgtcctttagtcactaaatctgatggttcaaaattcggtaaatcggagagtggaaatatttggctcgataaaaacaaaacttctgcatacaaattttatcagtattggataaatatttctgatgaagatgcaaaaaactatattaagatatttacatttttagaaaaaaatgaagtagaaaaattaattaaacaacacgatgataataaaggcttaaggatcctgcaaaaccatctagcagattccttaactaagcttattcatggagataaggagttgcaaaattcagtaaaagcatctaaaattttgtttggaaaatcaagtgaagatgatctgaaatcagttgatcctagcacaattatggaaatttttgaaggagtgcctaagtcaactataagttctcaaaagcttaaggcaggaattgatatagaaatacttttatctaaagagacaaattttttaaaatcattaagtgaggctaaaagagcacttggtgagaattcaatttatgtgaacaaaactaaagttcaaaacaattttgttgttagtgataaaaatttaattaacaataaattaattcttcttcaaaggggcaaaaaaaattattttttagtaaatgttaaataa

SEQ ID NO: 296207 - DNA, 879 bp, Unknown
  Bacterial polypeptide expressing nucleotide sequence isolated from the Sargasso Sea
aattaaaaccaatttttgtgaataactataaatggttaagcaaactcaattatatagattttttaagagacataggtaaacattttacaataaataaaatgttaacatttgatagtgttaaattaagattagaaagagaacaatctctaagttacatggaatttaattatatgattttacaagcatatgatttttttgaacttaataaatcaaacaaatgtaatttacaaattggtggatctgatcaatggggaaatatagtaaatggtgttgaactaattaaaagagaatctggaaatcaagcatttggcttaactactccactaataacattagcatcaggtactaaaatgggtaaaactgaaaaaggtgcagtatggttgaataaagaaatgttatctccatatgattattggcagttttggagaaatattgatgatagagatgtattaaagtttttaaaaatgtttactgatctgtctttagatgaaatagagaaagcaaaagataaggatataaacgaactaaaaattttactcgccaataatgcaacagaaatgctgcatggaataaaagaagctgaaaagtctgagaaacttgcaaaaaatacttttaaagagaattctacaggagaaaatcttcctgggataaaagtcaataatgatattttatcaaaaaatatagttgagctaatttcttttgtaaataaagaaatttctaaatcagaaataagaagattaattaagtcaaacgggataaaattaaataatgaaactgtattagatgaaaaatatataattgatcctaatttattctcagataagggttttattaaactatctataggaaaaaaaaagcactttaaaattacaaattaat

SEQ ID NO: 296208 - DNA, 1098 bp, Unknown
  Bacterial polypeptide expressing nucleotide sequence isolated from the Sargasso Sea
tacatgtaggtagcttactgcaaataatgtgtttacgactacttcaaaaaaatggacatcgaccaatagttttacttggtggaggaactacaagaattggggatccatctggtaaagataaaactagaaaaatattaagtgaagatgaaattgaaaaaaatattaaaaatattaaaaatattttaaaaaaatttttagataatgaagatccaaatacaaagccgatatttgtaaataattatacttggcttaaaaatttaaattatatttcatttttaagagatatcggaaaacattttactataaatagaatgctaacatttgatagtgtaaaacttagattagatagagaacaatctctaagctatatggagtttaattatatgattttacaagcatatgattttcttgagttaaataagaaagagaattgtgtcttacaaatcggaggttcagatcaatggggaaacattgttaatggtgttgagctaattaaaagatattctaataatcaaacttttggtttaacaactccattaattacactagcaactggtgctaaaatgggaaaaactgaaagtggagctatttggttagatcaaaaatacttatcagcttatgattattggcaattttggagaaacgtagatgatagagatgtaattaaatttttaaaaatgtttactgaaattgaaatcaaggaaatagaaacaattaaagataaagatataaatgaattaaaaatactacttgctaataaaaccacagaaatgttacatggaaaggaagcagctaaaaattctgagcaagcagcaaaagaagctttctctggaaacactctgggttcgaacttacctaaagttaatattcaatcaaataaaatagaagaaaaaataaatatagtagaccttgttttattatctaaactagaaaactcgaaaagcgaaatcagaagacttataaaagggaatgcagtaaaaattaatgacaatgttatttcagatgaaaaattcgaaatcaataaaaatttatttaaagataattatcttaaactttcccttggaaaaaaaagacatattaaaatagaattaaattaat

SEQ ID NO: 296209 - DNA, 637 bp, Unknown
  Bacterial polypeptide expressing nucleotide sequence isolated from the Sargasso Sea
tgtcgcactggtaggtggcgcaactggtctgattggtgacccgagctttaaagccgccgagcgtaaactgaataccgaggacaccgtgcaggagtgggtggataaaatccgcaaacaggttgcaccgttcctcgatttcgactgtggcgacaactcggcgattgctgcgaacaactacgactggtttggcggtatgaacgtactgactttcctgcgtgatatcggcaaacacttctccgttaaccagatgatcaacaaagaagcggttaagcagcgtctgaaccgtgacgatcaggggatctcctttaccgagttttcttacaacctgctgcagggttatgactttgcctgcctgaataagctgcacggcgtggcactgcagattggtggttctgaccagtggggtaacattacttcgggtatcgatttgacccgtcgtctgcatcagaatcaggtgtttggtctgaccgtaccactgattactaaagctgatggcaccaaattcggtaagacggaaagcggcgcagtgtggctggatccgaagaaaccagtccgtacaattctaccagttctggatcacaccgccgatgcggacgtttatcgcttcctgaaattcttcactttcatggatatttga

SEQ ID NO: 296210 - DNA, 1303 bp, Unknown
  Bacterial polypeptide expressing nucleotide sequence isolated from the Sargasso Sea
atgtggccttttccccctgctgttggagaccccatgatcaacccccacctgctcgatgagctgacccgacgcggcctggtggcccagaattccgacccggtggcgctcgcctctcacctcgccaccccgcgcaccatctactgcgggttcgatcccaccgccggcagcctgcacatcggccatctggtgccgctcctgatgctgcgccgcttccagctggcgggccacaccccggtggcgctggtgggcggtgccactggccttatcggcgatcccagcttcaaggcgaccgagcgcaacctcaacagtgccgaaacggtgcagggctgggtggccagcctgtcggcccagataaaagcgctgctgccggccagcgacgggctggcggcgccgctgctggtcaacaacgccgactggatggggcagatgtccgccctcgattttctgcgcgacattggcaaacacttctcggtcaacgccatgctggcccgcgaatcggtgcgccagcggctggcccgcccggatcaaggtatctccttcaccgagttctcctacgccctgctgcaatcccaggacttcgcggtgctcaaccagcgcctcggctgcaccctgcagatcggcggcaacgaccagtggggcaacatcaccagcggcatggatctcacccgccgtctccatcaggcccaggtgtatggcatgacgctgccgctcatcaccaaggcggacggcaccaagttcggcaagaccgaagggggcgcaatctggctcgatccggcgctcacctcgccctacgccttctaccagttctggctcggcaccgcggacgaggatgtttaccgcttcctgcgctactacagctttatggcgctgagcgagattgaggcgctggaggcggaggatgcgaagcggcaggggcgcaagctggcccagcaggtgctggccgacgagctgaccgagctggtgcacggcaagggggcgctggcggcggcgcagcgcatcagcgaattgctgttcagtggcgaggtggcccgccttggcgagagcgatctggcccagctggcgcaggatggcatgccgggctggcgtatcgagggggaaacagatctggtgaccctgctggtggagagcggtctggccaactccaggcgcatcgcccgtgagctgctggcggcaggggccatcagcctcaacggcgagatccgccgggatgaaccactgacagcggccgaccggctgttcggccgctacctgctgctgcgccggggcaagaagcagtaccggctggtgacgtggcaggggtgag

SEQ ID NO: 296211 - DNA, 334 bp, Unknown
  Bacterial polypeptide expressing nucleotide sequence isolated from the Sargasso Sea
tatggaagaaataactatagaagatttcatcaagattgatttacgagtagcaaagattattgaagtaaatgaagttgaagatgcagataaactaattcaattaaagttggatataggagaaaccggaactaaaactgtttttgctggtattaagtcagcttataaaccagatgagcttcttaataaacatgttgtttgcgtaaataacttaaaaccaagaaagatgagatttggtacgtcagaaggtatgatactagccgcaggtgatgatgatttaggtatttttgttttatcaccagatgaaggtgccttaccaggaatgaaagttagataa

SEQ ID NO: 296212 - DNA, 548 bp, Unknown
  Bacterial polypeptide expressing nucleotide sequence isolated from the Sargasso Sea
aatggataaaaatttttatataacaacgccgatttattatccatcagccaaaccacacatgggccatgcttattccagtattatcgcagatttttttgcaagatttaaaaaaattgatggttttaatgtaagttttttaactggtacagacgaacacggtcttaaaatacaaagagctgctaaaaataaaggtattgatacattacaattttgtgatgaaattagtaaaactttcaaagatttatctaaaattttaaaccttactaatacagattttataagaactactgaagatcgccataaaatatcagttcaaaatttatggaaagaactagaaaaaaatgaggatatttatttatcaaaatattctggttggtattctgtttcagatgaggctttttatactgaagatgaaatcgaagaagttgatggcaaaaaacaggctattttatcaaagtcatctgtagaatggatggatgaagagtcttatttttttaaattatctaaatgggaaaaacctttattggagcattataaaaaaaatccaa

SEQ ID NO: 296213 - DNA, 322 bp, Unknown
  Bacterial polypeptide expressing nucleotide sequence isolated from the Sargasso Sea
aaaccaatatattgatcatcacaaaccatgggtaatagctaaacaaacaattactgatgatagtaaaaaagaattacaaggtatatgtaccatgggtattaatttattccgtttactaataatctatctaaaaccagtattaccaaatgttgcatgtcaagctgaaaatttcttaaagattgaaccattacaatgggaagacgttaaaactacactattgaatcatcagataaatagctatgaggcactaatggtaagaattgagaaagaaaatattgaagcgatgattaaaaaaagtaaaaaagatttaataaaaatatag

SEQ ID NO: 296214 - DNA, 299 bp, Unknown
  Bacterial polypeptide expressing nucleotide sequence isolated from the Sargasso Sea
ttggagtatcgtttctgcctcaaacaaatatattgacgagcaggcaccatggaaactactaaagactgaaccagaacgcatgcaaacagtattatttacactcctggagacgatacgctgtatcggtattgtgcttcaacctgttatgccaggctctgctaatgaaattcttaaccagcttgctatagatccatcagctagatcctttagcactctaagtgaacagcactgcttgcagcctggtactaaactgcaacagccaaatcctatatttccaaggtttgatgaaaagacataaa

SEQ ID NO: 296215 - DNA, 334 bp, Unknown
  Bacterial polypeptide expressing nucleotide sequence isolated from the Sargasso Sea
atggataaaaatttttatataacaacacctatatattatccatctgcaaggcctcacatgggtcatgcttattcaagtattattgctgattttttttcacgatttaaaactattgatggatacaaagtttatttcctaactggaactgatgagcatggactaaaaattcaaagatcagcagagaaagaaggtctcgatcctcttaaattctgtgatcaaattagtacaacttttagagatttatctaaaactttaaatttatccaatacagattttatacgaactactgaagagcgacataagaaaacggttcaacatttaggaaagagctaga

SEQ ID NO: 296216 - DNA, 259 bp, Unknown
  Bacterial polypeptide expressing nucleotide sequence isolated from the Sargasso Sea
cacggcacccccattatgctaaaagcgcaaaaattaggtataactcctgagcaactggtgaaagataccagcgcgcgccaacataaagatttcactgattttggaattatctatgatcattatcactcaactcatgatgatttaaacaaacagattgtttgtgatctatataatactttaaaatctaaaaatctatttgaagcaaaagatatagaacaattatatgaccccaaagataacatgttcttacccgatagat

SEQ ID NO: 296217 - DNA, 315 bp, Unknown
  Bacterial polypeptide expressing nucleotide sequence isolated from the Sargasso Sea
aagattttgcgaaggttgagcttcgcgtagctaaaattgttaaagctgaaggtatagaagaagctgataagctcataaaattacatcttgatgtgggtgatcttggtgaaagaactgtttttgctggcataaaaagtgcatatgatcctgagagtcttaatggaagacatgttgtattagttgcaaatcttgagccaaggaaaatgaaatttggtgtatcggaaggaatggtcttagcgtccagtaatgatgagggatcaatttacttaatatcaccagatgaaggtgcaaagccaggtcagttagttaaataat

SEQ ID NO: 296218 - DNA, 550 bp, Unknown
  Bacterial polypeptide expressing nucleotide sequence isolated from the Sargasso Sea
tatgtcaaaaaacgtattagtttgtgtagcttggccatatgcaagcgggtcaagacatctaggccatattggtggagcatatctgcctgctgatatttttgcaaggtaccacagagctgttggtaacaatgttttaatggtgtcaggaagcgacgttcacggtaccccaataactgtaagagctgatgcagaaggtgttcaaccaatagatatagtcaataaatatcacaatgaatttttggggtattgggaaaaacttggtatttcttgggataactatacaacaacaatgactgataatcataaaaaagttactcaggaaatgttcttaaaaataaaagagaatggctttattgaaaaaaataaaagtatccaggcttttgatccacaagaaaaaaagtttttacctgatagatatgtagagggcacttgtccttgtcctgttgcttatagtgaagcaagaggtgaccaatgtgatagctgtggtaaactcttgatccagagagttaataatccctatagtaaatatctggaacaaagcagaatttaa

SEQ ID NO: 296219 - DNA, 361 bp, Unknown
  Bacterial polypeptide expressing nucleotide sequence isolated from the Sargasso Sea
actggaaacccaaaagaacgacaataaagatgactcggggaaaatcaccatcgatgaatttatgaaagtcgatctacgtacaggaaaaattctcgaggcagaaaaagtaaaaaaatctaaaaagcttattcaacttaaagtagatataggaacagaaacgcggcaaattctggccggcatagctgaaagttatgaaccagaaaacttgatagggcgtaccgtggttattgtagctaatcttaaacctgcaaaattgatgggcatcgaatcccaaggtatggtgcttgccgcaagcaacgatggaaccatcttgcttgcaggattcgaccaggaacctggacaaggaatacaagtgcgatga

SEQ ID NO: 296220 - DNA, 340 bp, Unknown
  Bacterial polypeptide expressing nucleotide sequence isolated from the Sargasso Sea
atggataatataaacttaataaatattgatcattttgctgctgttgatttaagagtagctaaaataataaaagctgaacatgttgagggtgctgataaattacttcaactgcatttagatgttggtgaattaggatcaagaaaagtatttgcaggtataaaaaatgcttatgaacctgagcaattaacaaataaacttgttgttctagttaacaatttagaacctcgtaaaatgaaatttggagtatctgagggaatggtattagcatcaagtaaagataacaatatatatttagtatctcctgataaaggtgcagagccaggaatgaaagttagataat

SEQ ID NO: 296221 - DNA, 129 bp, Unknown
  Bacterial polypeptide expressing nucleotide sequence isolated from the Sargasso Sea
gatggaaaaaaaccaaaggttcactataacctctgctcttccctacactaatggaccaattcacattggtcacttagccggagcatatttacctgcggatatttatgcaagatataaacgtctgtgtga

SEQ ID NO: 296222 - DNA, 439 bp, Unknown
  Bacterial polypeptide expressing nucleotide sequence isolated from the Sargasso Sea
atgtacgtatggttagatgcattaacttgctatgccaacggggttaattacttaaatgataatgataacgaattagaggaatattggaaaaatgtagtacatatagttggtaaagatattttaagacatcatactgtttactggccagcatttttattggcagcagatttagaactaccaagaaaaatatttgcacatggatggtggacaaatgaaggtaagaaaatttctaaatctttaggaaatgttattgatccaattgagattattaacaattatggccttgatcagttcagatactttttacttagagaagttccatttggcaatgatggagatttttcaaaaaatgctttgataaatagaattaatagcgatttagtaaatgatctaggaaatttatgtcaaagatcactgacaatgatgaaaaaaaactaaa

SEQ ID NO: 296223 - DNA, 148 bp, Unknown
  Bacterial polypeptide expressing nucleotide sequence isolated from the Sargasso Sea
atggatacaaaacattattatataaccacgccaatttattatccttctggcaaacctcacatgggtcatgcttattccagtattattgcagatgtaatagctcgttataaaagattagagggttttaaagtacattttttaactggta

SEQ ID NO: 296224 - DNA, 179 bp, Unknown
  Bacterial polypeptide expressing nucleotide sequence isolated from the Sargasso Sea
aatggataaaaacttttatataacaacaccaatctattatccctcagcaaaaccacatatgggacatgcttattcaagtattattgcagatttttttgcaagatttaaacgcatagatggttttgatgttaaatttctaactggtacagatgagcacggtctcaaaattcaaagagcag

SEQ ID NO: 296225 - DNA, 181 bp, Unknown
  Bacterial polypeptide expressing nucleotide sequence isolated from the Sargasso Sea
catgcaaaataaaaacttttatattacaacgccaatttattatccttcaggaaaaccgcatatgggccatgcatattctagtataatagctgatacctttgccaggttcaaaagactggaaggcaaagaagttttttatcttacagggacagatgaacatggtctgaagatacaaagagaa

SEQ ID NO: 296226 - DNA, 749 bp, Unknown
  Bacterial polypeptide expressing nucleotide sequence isolated from the Sargasso Sea
taggtttcatgctgtttattggccagcaatgcttatttcagcaggcatgaaagttcctaaaaaagtcttcggacatggttttctcactagggaagggcaaaaaatgggtaaaagtttaggaaatgtactagaccctgatttattgctttctaaatatggcaatgatcctgtcaggtggtacctaattaaagatatatcattaggtaatgatggagatttccaagacagaagatttgttgacattattaataatgatttagctaacacaattggtaatttattaaacagaacatcatctatgtcaagaaaatggtttgataataaagttccagattatattaaaaattcaagtgaaaataaattagagttattagccataaattcagtagaaaattattttaataagtttaatatttacaaattagatcaagcagcgaatgaagtattgaaacttgccattaacacaaatttatatctaaatgataatcagccatggttgttaataaaagataacgataagttacctgtagtaaaagaaattatttataacgtattagaaagtactcgaataataggattattattattacctttattacctgaattatcatcaaaaataaatatacaacttggctcaatttataaacaaaatatcccttgggaaaatcaactaaaatggggactactaattagtaactcgagtctccctaaaccaactccagtaataaataagctagagtatgaataat

SEQ ID NO: 296227 - DNA, 583 bp, Unknown
  Bacterial polypeptide expressing nucleotide sequence isolated from the Sargasso Sea
ggcttaaaaattcaaagagctgctgaaaaaaaaggaatggatacaaaaaaattttgtgatgaaataagcaccacctttcgagatctatcaaaaattttaaatttaagtaataatgattttataagaacaactgaagaaagacattttatctcagttcaacatttgtggaatatactagaaaaaaaaaacgaaatatatctctcaaaatattcaggatggtattctgtttctgatgaagcattttattctgatgacgaaattgaagatattaatggtttaaaaaagtcaaaactatcaggttcaccggttgaatgggttgaagaagaatcttatttctttaaactttcaaaatggcaagaacctttattaaaattttataaagaaaattcaaaatttattttgccagaaagtagaaaaaatgaggttataagttttgtatcgagtggtttaaaagatttatctgtaagtcgtaaatcattttcgtggggtattaaagttccctcaaatagaaatcacgttatttatgtctggctagatgcattgactaattacaaaagtgcattgaactatccagatgaaaata

SEQ ID NO: 296228 - DNA, 741 bp, Unknown
  Bacterial polypeptide expressing nucleotide sequence isolated from the Sargasso Sea
gatggattaaaagataaagtattctatggttggtttgataatcattttgcatacatttcttctacgttaaaatttctgaatgataaaaatattgatggcaaaagtttttggaatgatgcagacatttatcatttcattggtaaagatattgtttatcaccattatctatttttgcctgcaatgcgattgggacttgaaaaagaattcaaattacctgattacattccaacccgtggtcatcttacccttgaaggtaaaaaaatatcaaaaagccgaaattggtatattggtttaaaagatttcttagaaaaattccctgctgattatttacggttttatcttatttccataaatccatattctcaagatgatcttaattttgattgggaacaattttcaactaagattaattctgaattaattggcaatcttggaaatttggttaatcgtgctcttggatttacaaacaaaacttttgatggtgttgttcctgagcctgaaaaatttgatgagaaagactctgaatctgaacaaaaaataaaatctctcgctgaagatattggcaaactaatggaagaaaatcatctagatcgtgcattaaaacaactgatggaattttctgctcatttcaaccaatacttccaacacaaggaaccttggaaaaaaggacccggtactaatgcttgcatatacctgtctgtcaatgctgttcgttcaattgcaatatgcttacattcattt

SEQ ID NO: 296229 - DNA, 616 bp, Unknown
  Bacterial polypeptide expressing nucleotide sequence isolated from the Sargasso Sea
aatcatcttgcgtacatttcttccacgttaaaatttctgaatgataaaaatattgatggcaaaagtttttggaatgatgcagacatttatcattttattggtaaagatattgtttatcaccattatctatttttacccgcaatgcgattgggacttgaaaaagaattcaaattacctgattacattccaactcgtggccatcttacccttgaaggtaaaaaaatatcaaaaagccgcaattggtatattggtttaaaagatttcttagaaaaattccctgctgattatttacggttttatcttatttccataaacccgtattctcaagatgatcttaattttgattgggaacaattttcaactaagattaattctgaattaattggcaatctgggaaatttggttaatcgtgctcttggatttacaaacaaaacttttgatggtgttgttcctgagcctgaaaaatttgatgagaaagactctgaatctgaacaaaaaataaaatctcttgctgaagatattggcaaactaatggaagaaaaccatctagatcgtgcattaaaacaactgatggaattttctgctcatttcaacccaatacttccaaacataagga

SEQ ID NO: 296230 - DNA, 365 bp, Unknown
  Bacterial polypeptide expressing nucleotide sequence isolated from the Sargasso Sea
acagcaagagaccacatcaaatcttcctgtactaaaggatgagattgtatttgatgattttgtgaagatggacctaagagtaggagagatcaagagcgctgaaaaagtagaaaagtcgaataagcttctaaagttttcagtagatatgggcttagaaacccgaacaattcttagtggggtagccaagcactttaatgcggaagaaatggtaggtaagaaagtagtggttatggccaaccttgctccacgaaagattatgggcattgagtctcaaggcatgttgctttttgcagaaaatgcagatggaaagctcgtagcggtagctcccggatcaaatgctgagaatggagcgacgattgcctaat

SEQ ID NO: 296231 - DNA, 462 bp, Unknown
  Bacterial polypeptide expressing nucleotide sequence isolated from the Sargasso Sea
aatggattcaactaggtagcatagaactaatttcttcaaaaagtacaattaaaaatgaaggtttgctttttgaaaaaattgaaaaagagaccatccagaaagtaattcaaaaattgagtgaatctcaagatgatgaaaaacaattaacatacgcacctatgaaagagaatatttcctttgaagagttccaaaagatagatctgcggttaggaaccattcaatctgcggaaaaagtagaaaagagcagcaaattattaaagttaagaattgatctaggctttgaagaacgtactatagtatctggaatagcaaaatattacacccctaaagagttgatcggaaagcaagtggaagtcattgtaaatttagcggcaaggaaaatcatgggcatagaatcacaaggtatgctactaatggctgaagacacccgttggcaaattgagtttactgaagtccgataag

SEQ ID NO: 296232 - DNA, 461 bp, Unknown
  Bacterial polypeptide expressing nucleotide sequence isolated from the Sargasso Sea
aatgaacaaaaaagcaataatcactagtgcacttccatattcaaatggagaaatccatcttggtcatgttgcatcaacttaccttccagctgatgtcaccacacgttttctgaaacaaaatggtgttgaagcatactatgtgtgtgcatcagatgattttggaactccaattctaatacaatctgaaaaattaggtcaaactcctgaggaatacgttgcccattggaacaaacgtgattatgaagatttttcagcatttgatattgcatttgattacttttacaaaaccagttcttcagaaaatatttcttttgtgcaacaagtatttgaaaaacttcaaaaaaatggttacatctatgaaaaagaaatcattcaatttttctgtaattcttgtcacaaattccttccagaccgatttgtgataggaacttgtcctcatttgcatgcagaagatcaatatt

SEQ ID NO: 296233 - DNA, 925 bp, Unknown
  Bacterial polypeptide expressing nucleotide sequence isolated from the Sargasso Sea
aatacaatacagaatggggataaatgttggtgatgtgatccttagtgataacgatgtcttcggcgatagcgttaatattgcttcacgtcttgaaggactttctgtaccgggcggtatttgcttgagtgacattgtgtatcagctaattaatgaggataaaaagaaattatttaaagacttaggctcgcagagagtcaaaaatatctctcgccctattaaagtatggcaatgggacccaaactccgagctagaaaatagaaagaaaagcgtcgaggaattaaaacaacacgttcaattttgccttgctgaagatgatgcacaaattgcctttgctcgagttgggacaggggcaactatccttaaggcaccaaactggatgagccatattgagtacgaatggcgaagccctatttgggggccgcttctaaataagattgctgctcagcatgagcttatcaggtttgatcagcgagggggtggtttatccgattgggatgttgcagagatctctgaggatagaatgatttcggacattaacgatatcgttaattatgaaagtctagaaagattcacaatgcttggcctgtctcagggttgtgccttctcgattagattcgcattggagaacccagaaaaggtaaatggattaatcttatttggaggttatacgcgaggccgtttgatgcgcaattcagatgaagcaacaacgttacataaaacagcgcataacttaatcactgctgggtggggttccaataatccagcatataggactttttttacttcttcatttataccggatgcaacaatagagcaggctagcagttttgatgaattacaaagagtttgtacgagtgccgaaaatgcggcaaggatacatgaaatgaatggaactgtagatgtaagtgagatagctaaacaataa

SEQ ID NO: 296234 - DNA, 670 bp, Unknown
  Bacterial polypeptide expressing nucleotide sequence isolated from the Sargasso Sea
acaaatcaatatatagataaaacgggcccttggaatctcgccaaaacaggtgaaggaaaagagaggttaaaaaccgtcatgtataacgccgcagaatccttacgcattttaggtgttttgctatttccttttatgccaaaaagtagtgaatcattaatgctacaattagggatacaaaaaacaatagaagaacaagggatggcatcactgaaaaactggggtaaactacctcctggcacgaaaacacaaaaagccaaacagctctttccaaggattgaagacaagcaggtcacaaaaatacttgcagaattgaaaaacaaaaagagcgacaaggaagatgattcaggaaaaatcaccatcgatgaatttatgaaagtcgatctacgcacaggaaaaattctcgaggcggaaaaagtaaaaaaatctaaaaagcttattcaacttaaaatagatataggaacggaaacacgacaaattctggcaggcatagctgaaagttatgaaccagaaagcttgatagggcgtaccgtgattattgtagctaatcttaaacctgcaaaattgatgggcatcgaatcccaaggtatggtgctggctgcaagcaatgatggaaccatcttgcttgcaggattcgaccaggaacctgaacaaggaatacaagtaagatgat

SEQ ID NO: 296235 - DNA, 342 bp, Unknown
  Bacterial polypeptide expressing nucleotide sequence isolated from the Sargasso Sea
aatgagtaaaaatttctatataactacacctatttattatccttcagcaaaaccacatatgggtcatgcttattctagtattgtttctgatttttttgcaagatttaaaaaaaatgatggttattcagttcaatttttaactggtacagacgaacacggtttaaaaattcaaagatccgcagaaaaaaacaatatgaagccaaaagatttttgcgatcaaatatctaaaacttttgaaaatttgtctaggacgcttaatttatctaataccgatttcattagaactactgaaacaaggcatattaaatctgttcaacatttatggaaaattctagaggatca

SEQ ID NO: 296236 - DNA, 497 bp, Unknown
  Bacterial polypeptide expressing nucleotide sequence isolated from the Sargasso Sea
aatgaataaaaattattatattacaacaccaatttattatccttcagcaaaaccacatatgggacatgcatattctagtataattgtagatttttttgcaagatttaaaagaatagaaggttataaagtcttttttcttactggtacagacgagcatggattaaaaatacaaagagccgctgaggaaaatcaaaaaaaacctttagaattttgtgatgaaattagcaaaacttttaaagaattatctaatactttaaatttatcaaataatgattttattagaacaactgaaaaaagacatcataaatctgttcaaaatttatggaatatattagaaaaaaaaggagaaatttatttatcgaaatattctggctggtattctgtttctgacgaagcattttatttagatgatgaaattgaaacaatagatagtgttaaagttgctaaatcgtcaggttcgcctgttgaatggcttgaagaagagtcatattttttta

SEQ ID NO: 296237 - DNA, 409 bp, Unknown
  Bacterial polypeptide expressing nucleotide sequence isolated from the Sargasso Sea
aatgagtaaaaatttttacattactacaccaatttattatccatcagctaaacctcatatgggtcatgcttattctagtattattgcggattttcttgcaagatttaagagaatagatggttttaatgtcaactttctaactggaacagatgaacatggtctcaaaatacaaagagcagctgaaaagaaaaaaatagagccacttaaattttgtgatgaaataagtcaaacatttagaaacctttcaaaaactttaaatttaacaaatactgattttattagaactactgagaaacgacataaattgtcagtccaaaatttatggaatgaactaaaaaaaaatgatgaaatttacctttcaaaatattcaggttggtattcagtttgtgatgaggcattttactccgat

SEQ ID NO: 296238 - DNA, 790 bp, Unknown
  Bacterial polypeptide expressing nucleotide sequence isolated from the Sargasso Sea
atttcgggctttaattggggaaaaaccaacttttttaactggattagatgagcatggtttaaaagtccagcaagcagcagaaaaaaatggaaaggcacctcaagatcactgcgatttaatggctccagcatttatagatttgtggaaaaaattaaatattaattattctgattttattagaactactgagcatagacatacaaagattgttcaaaaaattttaacaaaagtccatgaatcaggtgatatatatatggatgagtacgaaggatggtattcaatttctgaagaaagatttattacagaaaaggaacttgattctggtcaatttggtgaggcaaaacaaataaaggaaaaaaattattttttcagaatgagtaaataccaaaaaactttaatagacaaaattgaaaaagatgaattgctaatacagccaaaaagtagaaagaatgaggtgcttggttttcttaaaaatgaattatctgatctttgcatttcaagaccaaaatctcgtcttgagtggggaatagaactaccttttgataataattatgtaacatatgtatggtttgatgcgctaataaattatatatcagctataggagtttttaaaaatgatgaacagttttcttctttatggcctgcagatgttcatttaattggtaaggatattttaactacacattcggtttattggcctacaatgttgctatcattaggattaccattgccacaaagaatttttgcacatggatggtggcttaccgatgatcagaaaatgagtaaatcg

SEQ ID NO: 296239 - DNA, 742 bp, Unknown
  Bacterial polypeptide expressing nucleotide sequence isolated from the Sargasso Sea
tttgttggcaaagataatgtaccttttcatgcaataatctggccagcaatgcttttggcttatggggatttaaacttacctactaatgttccagcaaatcaatacatattaattaaaggagaaaaagcatctgctagtagaggtgtagggaaaactctcaatgattatcttgatgaatggaatccagattcgttaagatattctctagcaagcattctcccagagcaaaatgattctgaaatctctgaagatgagatgattagacgaaataacgaagaacttgtggcagcatggggtaacctcgttcaaagagtgttttcacagtacataaataattttgatgatctagatataagttttgaatatgaaaaaattgatgaagaacttatggaaggtgctaaaagctgttttaaaacaacaggagaaatgattgaaaaagtagaacttaaatcttcacttcaaaatgtcatggcctatgtgaattctatcaatgcgtatttaaatgaaacagaaccgtggaaagttataaaaacagatagaaaaagagctagcggaatcttacattgcgcaattacagcaattgatgcttgtgcaactatgttcaccccttttatgccaactacttcacaaatagtaagtgatgccattcaaaaagatgatcaaaataattggggaattaatgaaattaaaaaaggtgcccctttaaaaaatataggacacctttttaaaaaatttgattagc

SEQ ID NO: 296240 - DNA, 460 bp, Unknown
  Bacterial polypeptide expressing nucleotide sequence isolated from the Sargasso Sea
gctaccaagtattagcgaaaagttagaaattggaaagggaagagtaattaaagaaggtaaaaatatagctgtaattaattttggaacaagactcaccgagtgtttaatggcaagtgaaaatttgtcaaaaaaaggaattaatataacaatagtagatgctagatttgcaaagcctctggatgtaaatctaatctggcaaatagccaacgatcatgaagcagtgattaccatagaagaagggtctattggcggttttggctctcatgtatctcaatttcttaatgaaaaaaatttattagataataatttgaaatttagatctatgtttttaccagataggtttattgatcatgataagccagaaatgatgtataaaaatgctggaatggacgccttaaatattgaaaataagatattagacactattaattcaaaagttatagttaagaaaagtaattaa

SEQ ID NO: 296241 - DNA, 829 bp, Unknown
  Bacterial polypeptide expressing nucleotide sequence isolated from the Sargasso Sea
ttaaactggggtgttcccgtaaaaaaaggtcaagaaaattggccaggtatggacggaaaagtattctatgtgtggtttgatgctccaatcgagtacattgcgtgtgctgaagaatgggttgattctggaaagggaaaagactggcatcgatggtggaaaaccgacaaaggagcagacgatgttatttatactcaatttatgggtaaagataatgttccatttcacactttgtctttcccagccaccatccttggatctggggaaccttggaaattagtcgattacataaaaagttttaattacttaaattatgatggtgggcagttctccacgtctcgcaatcgcggcatctttatggaccaagcgcttgaaattctcccaccggactattggcgctggtggctcttgagccatgctccagagagttccgattcagaatttacttgggaaaattttcaacaaacagtcaataaagacttagctgacgttcttggtaattttgtaagccgcgtcactaaattttgcagaagcaaatttggtgaagttatacccactgggggagtttggtctcaaaacgaaaagaaactggtaaatgaaattgaaaaacgtgtcatgaactatgaagtttgcatggaaagtaaagaaattagaaagtccgctaacgaacttagagcaatctgggcatgtggtaatgaataccttcaatctgctgaaccttggtcaacatttaaaagcgacccagaggcatctgcgatgcaaataagactgtctttaaacttaataaagctgtacggtgttttgtctgcgccgtttatacccgacgccgcag

SEQ ID NO: 296242 - DNA, 949 bp, Unknown
  Bacterial polypeptide expressing nucleotide sequence isolated from the Sargasso Sea
catggttgcatcaacatatctaccagctgacgttacaacacgatttctgaagcaaaatgggattgaggcatattatatttgcgcatctgatgattttggaactccaattctgatccagtcagaaaaggaaggcaaaactccacaagaatatgttgcacattggaataaacgagatcttgaagatttcacagcatttgacattgcatttgattttttttataaaacaagttcagaggaaaacatagaatttgtccaagatgttttcaagaaactacaagataatggtcatatctatgaaaatgagataatccaattcttctgtgaaaatgataagaaatttcttccggataggtttgtaaaaggaatttgtccatattgcaaggcagaggatcagtattctgatttatgtgaaaaatgtggcagagttcctgaagagattgaaaatccacactgttcaatctgtggtcagacacctgtaaagaaatctacaaatcattattttttcaaactaaaaaatttctcagcaccacttcttgattatctgaataatgcaccatatctacaaaaagatgtaaagaagtatgttgaaaactggattgaagagggattagttgattgggatatcacacgtgatatttcttggggcgttccaatcccaattgatggattagacaataaggtattctatggatggtttgacaatcatctggcatacatttcatcttcaatcaagtttctaaacgataaaggagtagatggtaagtcattttggaatgatgcagatatctatcatttcattggaaaagacatagtatatcatcattatctgtttttgcctgcaatgcgtttaggaattaacaaagagttcaagttaccagattacattcctactagagggcatctaacacttgaatcaaaaagatttcaaagagcagaaattggtatatag

SEQ ID NO: 296243 - DNA, 599 bp, Unknown
  Bacterial polypeptide expressing nucleotide sequence isolated from the Sargasso Sea
tatattaagatttcatgcagtgtattggccagcttttttaatggctgcgggtatcgaacctcctaaaagaatatttgcgcatggttggtggactaatgaagggcaaaaaatttctaaatcacttggtaatgtcatcgatccttacgatattattaatgaatatggcttggatcaaattaggttttttttatttagggaagtaccctttggaaatgatggagatttttcaaaaaaagcaatcgcaaatagaattaatgctgatttatcaaataattttggtaatttagtgcaaaggatttcatcatttgctgtaaaaaataatgattctattctaaagccatcagaaaatttaactaatgacgatcaggatttaattaatattcttcaaaataaatttgatgaatattgtatttttatgaataatcaacaaattgatagagcaattaagtctgtattggagttaatatctgcttgtaacgcttacgttgacactcaagcaccttggtcacttaaaaaaacaaataaaatcagaatggaagaagttttatatcttgttacaaatataattattaaatcagctataatgctctacccaatta

SEQ ID NO: 296244 - DNA, 306 bp, Unknown
  Bacterial polypeptide expressing nucleotide sequence isolated from the Sargasso Sea
tatgaataaaaatttttatataacaactccaatatattatccttctgcaaaaccacatatgggtcatgcatattccagcataattgctgatttttttgctcgtgcaaaaaaaatacaaggattaaatgtttttttcttaacgggaactgatgagcacggtctaaaaattcaaagagccgctgaaaaaaaaaaaatgaatccaaaagaattttgtgatgaaattagtctcacttttagagaattaacaaaaactttaaatttatccaataacgattttattagaactaccgaaaccagacattataa

SEQ ID NO: 296245 - DNA, 220 bp, Unknown
  Bacterial polypeptide expressing nucleotide sequence isolated from the Sargasso Sea
aatgaataaatatttttatataactacgcctatttattacccttcagcaaaacctcatatgggtcatgcatattctagtattgtgtctgatgttatagctaggtttaaaagattagacggttataatgttgagtttttaacaggcactgatgaacatggattaaaaatacaacgtgctgctgaagaaaggggagtggatccaaaaaagtctgtgatgaga

SEQ ID NO: 296246 - DNA, 234 bp, Unknown
  Bacterial polypeptide expressing nucleotide sequence isolated from the Sargasso Sea
aatgaataaaaatttttatataaccacacccatatactatccctctgccaaacctcatatgggtcacgcttattcaagtattattgctgacttttttgcacgtattaaaagaatacaaggtgttaacgttttttttcttacaggtacagacgagcatggtctaaaaattcaaagatctgcagaaaaaaaaaaaatggaaccaaaagatttttgcgatgaaatcagcgtaacttt

SEQ ID NO: 296247 - DNA, 930 bp, Unknown
  Bacterial polypeptide expressing nucleotide sequence isolated from the Sargasso Sea
aagatgtaaaaaaatacgttgaaaactggataaaagaaggattggttgattgggatattacacgtgacatatcttggggagttccaattccaatagagggattagacaataaggtgttctatggatggtttgataaccatctggcatacatttcatcttcaatcaagtttctaaacgataaaggaatagatggcaaatcattttggaatgatgcagacatctatcatttcattggaaaagacatagtatatcaccattatctatttttgcctgcaatgcgtttaggaattaacaaagagttcaagttgccagattacattcctaccagaggtcatctcacactagaatcaaaaaagatttcaaagagcagaaattggtacatcggattaaaagaatttttagaaatatttcctgcagactatctcaggttctatcttatttccatcaatccatactcacaagatgatttgaattttgactgggaccagtttgcaactaagattaattctgaattgattggtaatctaggaaatttagttaaccgtgcattgggatttacaaataaagcatttgatggtgtacttccggtacctgaagattttgatgaaaaagattccgagtcagagaaaagaataacgtcacttgcagatgacatttcaaaattaatgattgataatcagcttgaccgtgcattaaaacaaatcatggagttttcagctcactttaaccaatattttcaacataaagagccttggaaaaaaggccctggtacatcatcatgtgtctatttatcagtaaatgcagtgcgctcattggcaattgcaatacactcattcttaccaaaggcgtcacaacaaatttgggaacagattggaatgaacggagatgtgtctgaaacaaactggaacgagatgtcagaaatttcttaaa

SEQ ID NO: 296248 - DNA, 298 bp, Unknown
  Bacterial polypeptide expressing nucleotide sequence isolated from the Sargasso Sea
aatgtctaaaagaaatttttacataacaacgccaatttactatccatcaggcaaaccacatatggggcatgcttactcaagtataatagctgatgtattagcaagatttaaaaatatagatggttataatgttcattttttgactggcacagacgaacatggattaaaaattcaaagagaagctaaaaaaaacaataaagatcctaaatcattctgtgatgagatttcaattacctttaaaaatttaactaaaacgctaaacctttcaaataatgattttattcgaacaactgaaaaa

SEQ ID NO: 296249 - DNA, 691 bp, Unknown
  Bacterial polypeptide expressing nucleotide sequence isolated from the Sargasso Sea
tgagcagtgccgtgaacaatatctcgatgaaaacaaaccctggaaacttgccaaagaggaggatgaaagcgagcgtctcggaacagtactctacacggcgttggatgcttcggcatggttggtctgtcttttggaaccggtgatgcctgaaaaaatgaaagcggcccgaatccaactcggactaggtgaatcaccaatgacccttgaaattttgaaaccggggttggtccaatctggaactccacttccacttccagaaccccttttcccaaggattcaactcaaacagaaggaacccgaaaaacctggtccaacccccaaggcgaaacctcaatcggaagaaaagcaagaggcagaattggaaaacctggtcggtatcgagagcttccaaaaactcgatttcaggactggaaggattttggaatctaagaaagttaagggttcggacaaacttcttgtttcccaggttgatttaggagaatcaaaaccccgttcgatcgtctcgggtgttgccgaattttatcgccctgaggatcttcccgggatgaatgtggttgtggtctccaacctcaaaccggtcaaactccggggagaactgtcagaagggatgattctcgccaccgatgatggaaattcattgaaaattgtggaggcacctggcgactccaagcccggtacggtggttcgttaa

SEQ ID NO: 296250 - DNA, 502 bp, Unknown
  Bacterial polypeptide expressing nucleotide sequence isolated from the Sargasso Sea
aggaataaaaaaaacaatagaagaacaaggaatggtatcactgaaaacctggggcaatctatcccctgagacacaaacacaaaaagccaagcaactgttcccaagaatagaagataaacaagctgagaaaattctcgtaaaactagaaacacaaaaagaagataaaagtgaagccaccgggaaaattaccattgaagactttaagaagatcgatctgcgtacaggtaaaatcttggaagcagaaaaagtaaaaaaatctaaaaagcttattcagctgaaagtggacattggaacggagaccagacagatcctggcgggaatagcagaaaactatgaacccgaaattctgataggacgaacggttataattgttgctaatctcaaacctgcaaaactaatgggaatagaatcacagggaatgattttggccgcaagcagcgatgaaactattctccttgcaggctttgatcaggaaccaggaaaagggatacaagtaagatga

SEQ ID NO: 296251 - DNA, 595 bp, Unknown
  Bacterial polypeptide expressing nucleotide sequence isolated from the Sargasso Sea
acggatgataaactctacaaaaatttttggccggctaatttacatattataggaaaggatatattgcggtttcacgctatttattggcctgcttttttactagcagcaaatatttcaccaccaaaaaaagtatacggtcatggctggattctctcagaggataaaaaaatgtccaaatctgttggaaatatattagatcctatcgaaataataaaaaattttggaatagatcagttaaggtattatttaataaaagaggtttcactcggtaacgatggaagtatatctttaaaaaatttaaaaaattgtattaataacgatttagcaaataattttggaaacctgtgtcaaagagttttttcttttgtcgaaaaaaactgtaattcaaaaataccaaaatctggaaattttgaaaagattgataaagactttcaaaatgagttgatagataaaattccaagtttaattaaaatgatggatgatcaaaaattaaattcgtacataaaggaagtgataaatttatcgtttaattcaaacaaatattttaatgatttagaaccttggaaattaaaaaaaagtaatttaaatagaatga

SEQ ID NO: 296252 - DNA, 613 bp, Unknown
  Bacterial polypeptide expressing nucleotide sequence isolated from the Sargasso Sea
aatggtaaactattttatacgaaggctattgttgatgataccaacttttcttggttcaacagtattggtttttacaattctgcaaatggccccaggtggcccaattgagcaaatgatgttagagcttcaaatgggaggagctgtagctggagaaggaggcgctcagtcatcctctggggttactggtggtgtatcattgccgcctaaagctttaaaggaattagaaaggttttacggtttcgataaaccaatttatcagaggtatctaagctggttaggtatttggcctagggaaataaagcatagagattttactgtacctgagagtataaactcattcgagaaaagagtagggaaggttgatggcaaactatggaaagttgacattgttttatctgatgattcatcgccagtggtgtatgaaaaaaatggtgatatcagtaaaaattggcatgctaagatagaagagcacaatgatgatggttcgatagatgctgttgttttccaaaaagagtattcaggcatactcactggtaacttaggtaagtcatatacatatctaaaacctgttacagaggttatgaagcctaggtttaagatctccttattcttt

SEQ ID NO: 296253 - DNA, 472 bp, Unknown
  Bacterial polypeptide expressing nucleotide sequence isolated from the Sargasso Sea
agtagggattgaacttcctaatataagtgaaaaaattgaaattggaaaaggaagattaattaaagaaggaaaaaaagtggccataataaattttggtgcaagactgaatgagtgtttaattgctagagaaaatttattaaaaaagggaataaatataacattagtggatgctagatttgctaaacctttagacgaaaatcttatctggcaaatagctactgatcatgaggtggtaattacaattgaagagggttctattggtggttttggctctcatgtaggacaatttttaaatgaaaaaaatttacttgataataacttgaaatttagatcaatgtttttacccgatagatttatcgatcatgataaacctgaaataatgtacaaatatgctggcctggactcattaaatatagagtctaaaattttagatacactcaattctaaagttgtaattaaaaaaagtaattaa

SEQ ID NO: 296254 - DNA, 466 bp, Unknown
  Bacterial polypeptide expressing nucleotide sequence isolated from the Sargasso Sea
aatggataaaactttttatattactacgccaatatactatccatctgcaaaacctcatatgggtcatgcatattcaagtattatcgcagatttttttgcaaggtttaaattaattgatgattatcaggttcattttcttactggtacagacgaacatggattaaaaattcaaagatctgcagaaaaagcaggagaggagcctcaaatattttgtgatcaaattagccagacatttagagatctttcagatactttgaacttatcaaatactgattttattagaactacagaagctagacataaaaatacagttcaacatctttggaatgaacttgagaaaaatgatgacatatacttatcaaattattctggatggtattcagtatcagatgaagccttttataacgaggacgaatttgaggaagtagatggaaaaaaaatagctatatcatcaaaatctcttgtt

SEQ ID NO: 296255 - DNA, 469 bp, Unknown
  Bacterial polypeptide expressing nucleotide sequence isolated from the Sargasso Sea
atggcaagcacactcaccaccccgctttattacgtcaacgacaagccccacatcggcagcgtttacaccacgttggctgtggataccctggctcgtttcaagcgtttaagcggtgaacaggtgatgttcatcacgggttgtgatgaacatgggcaaaaaattcaacaaacggccgaatcagcagggatagaaccacagcaacactgtgatgagatcagcagtacgttcgcttcaacttggtctcaatggcaaatcagtaacgaccgttttatacgaacgactgatccacgccaccaatcaatagtcgaggaattctttgctcgagtcgaagcaaacggcgacattgttgagggacgtcagcaaggctggtattgcgttgcttgtgaagagtacaaagacgatccagctgacgcacaatcaccacattgcccaatccaccaaaaaccattggagtggagggatgaagcca

SEQ ID NO: 296256 - DNA, 328 bp, Unknown
  Bacterial polypeptide expressing nucleotide sequence isolated from the Sargasso Sea
atggataaaaacttttatataaccacacccatatactatccatctgctaaacctcatatggggcatgcctattcaagtataattgcagattttttttcacgttttaaaaaaattgatggttataatgtttattttttaactggtactgatgagcatggattaaaaattcaaagatctgctgaaaaacaaaataaagatccaaaaactttttgcgatgaaattagtaaaacttttgaaaatttaactaaaacattaaatttatctaataatgattttataagaacaactgaatatagacataaaatttctgtacagaaattttatgtct

SEQ ID NO: 296257 - DNA, 638 bp, Unknown
  Bacterial polypeptide expressing nucleotide sequence isolated from the Sargasso Sea
acatgtcgctggtaattgcctccctgctgacatacaatacagatacgaaagagccagagggagaagtgtactgatgtgcagcggttccgatgagcatggcacacccattacaatcactgcagaggagatgggcatttccccccaggaagtcgtggataggtatcacgaagtcaatactaaggctctagcggatttaggctgctcctggataaataatgtagatcctcgcggtcctgagttcggtggcgctttatacaatagaacatctgatgataagcacaaagagttggttcgggaagttttcacaaacctgttgaattccggattcttggagcgtaagacaatgcagcagtactgctctgttggtagagggggatctgtgagattcctccccgaccgatacgtcgaaggacaatgcccggtttgctcgtcagatggcgctaggggcgatcaatgtgattcctgtggcgcgacctatgaggcaaatgaactgatcaacccgagatccaaacttgacactgaatcagaaatcgagataagagatactgaccacttcttcctgaggctcggcgattttcaggattctttagagaaacatgcttccgagaggaaaggggtttggaaacctaatgtcagag

SEQ ID NO: 296258 - DNA, 568 bp, Unknown
  Bacterial polypeptide expressing nucleotide sequence isolated from the Sargasso Sea
atgtcaaaattacccaaaagatatactgtaactgcagctctaccatatactaatgggcctctacatattggccatttggctggagtttacattcctgctgatatttattgtcgctttttaagatgtaaaaaaagagatgttatatttatttgcggaagtgatgagcatggagtagctatttcaataaaagcaaaaaaagaaaataaatctcctcaagaaattgttgacaagtatgacaagttgattcgcgattcattcaaagattttgggatttcttttgataactattcaaggacatctttacctatccatcatgaaacggcaacagatttttttaatctattaaagtcaaaaaataaattttttgaaaaagaatctgaacagctatttgatgtaaaagaatctcaatttttggcagatcgatttgttacgggaacctgtccggtatgtaaggaaaaagatgcttatggagatcaatgcgaatcctgtggcacctcattgagcccagatgagctaataaacccaaaatctactctatcaggaagtgtaccaataaaaaggaaaacta

SEQ ID NO: 296259 - DNA, 885 bp, Unknown
  Bacterial polypeptide expressing nucleotide sequence isolated from the Sargasso Sea
aatttacccggctgatatatttgcaaggtttaatagaatgattggtaataatgtgcttatggtttctggaagcgatcaacatggaacacctgtcactataagggcaaaagaagaaaatactactccagagaaaattgctgaaaagtatcataaagtttggagcgaaacttttaaagaattagatttctcattcgacctttacacaaagactggtactgataatcataaagaaatagttcaaaatctttttaattctttaaatgaaaatggatttcttgaagaaaaatattctgaacaaccctattcagaaaaatcagaaatgttcttatcagatagatacatagaaggagattgccctcactgcccttcaagaaccaaaggagatcaatgtgatgattgcggaaaagactttgagccaattgatttgaagaacttgatatcaacaattgatagcagtgaagtaacatttaaaagcacaaaacatatttacctaaaacttccagaatttcaagaagaacttgataaatggataaaatcaaaaacatattggaggtcagcagtaaagaatcaaagtttaggctttttatcaaatggtttaattgatagagcaataacaagagatatagattggggtgttaaagttccaattaatggctatgaagataaaagaatttatgtttggtttgaagctgtgattggatatctatcagcttctattgaatggtccaagagcaaaaataacaaagaacaaaaagaagatttatggaaagattggtggctcaatcctgactcaaagcacttttattttcaaggcaaagacaatattccattccatacaataattcttcctgcgattttaattggctctggaagttataacttacc

SEQ ID NO: 296260 - DNA, 460 bp, Unknown
  Bacterial polypeptide expressing nucleotide sequence isolated from the Sargasso Sea
atggataaaactttttatattaccacacctatatattacccctcagcaaagcctcatatgggtcatgcatattcaagtattatttcagatttttttgcaagatttaaaacaattgataattaccaggttcattttctaactggcactgacgagcatggtttaaaaattcaaaggtctgcagaaaaagcagggaaggagcctcaaatattttgtgatcaaattagtcaaacatttagagatctttcagatactttaaatttatcaaatactgactttataagaactacagaaactagacataaaaaaacagttcagcatctttggaatgaacttgagaaaaatgatgatatatatttatcaaactattcaggatggtattcagtatcagatgaagccttttataacgaggatgaaattgaggaattagatggaaaaaaaattgctatatcatcaaaatctc

SEQ ID NO: 296261 - DNA, 208 bp, Unknown
  Bacterial polypeptide expressing nucleotide sequence isolated from the Sargasso Sea
atgaataaaaattattttattacaactccaatttattatccatcagctaaacctcatatgggtcatgcatattcaagtatagtatctgatgtaatagcaagatttaaaagattagatggatataatgttgaatttttaactggaactgatgagcatggtttaaaaatacagcgagctgctgaagcaaaaggtattgatactaagaaat

SEQ ID NO: 296262 - DNA, 174 bp, Unknown
  Bacterial polypeptide expressing nucleotide sequence isolated from the Sargasso Sea
aatggataagactttttatataacaacaccaatatattatccttctgcaaaaccacatatgggtcacgcttattcaagtataatatgtgatttttttgccagatttaaaactattgatggttatgaagttcattttttaactggtacagatgaacatggtttaaaagtacaaag

SEQ ID NO: 296263 - DNA, 810 bp, Unknown
  Bacterial polypeptide expressing nucleotide sequence isolated from the Sargasso Sea
gatcataaagataaagttaaaaaaattctaacatcattttatgaaaaaggagatatctattttgatgaatacgaaggcctatattctgtctcagaggagaggtttataaccgaaaaagaaaaagaagaagggcagtttagagaagttaagacaattaaagaaaagaactactttttcagaatgtcaaaatatcaaaaaaagctaattgatcatattaacaaaaatgaaaacttcattcgaccagaaagcagaaaaaatgaaattcttggttttttaaaaaaacctctaaatgatctatgtatatcaaggccaaagtctagactcagctggggcattgatttaccctttgataatgactatgttacatatgtctggtttgatgcccttattaattatattagtggtattggatggggcgaaaagagtagtgaaaattttgataattattggcctgctaattatcacctaatggcaaaagatatccttacgactcattgtgtttattggccaacaatgctaatggcttgtgatattgatttgccaaaatcaatatttgcacatggctggtggcttatcgataatatgaaaatgtcaaaatcaattgggaatgtcattaggccgttagaccttgctaatgaatatggttcagactcattaagatactacttgatgagaaatatggtgctgggtcaggactctacatttacaacagactcatttatagaaagatataatgcagatcttgcaaatgattatgggaatgtagtgaatagagtagtgattttaactaaaaaatattataattcaaaa

SEQ ID NO: 296264 - DNA, 163 bp, Unknown
  Bacterial polypeptide expressing nucleotide sequence isolated from the Sargasso Sea
tatgtcgaataaaaacttttatattacaacgcctatttattatccatccggaaaaccacacatgggacatgcatattcaagtataattgctgatatttttgccaggtttaaacgaattgatgaatttgatgtattttttttaactggtactgatgaacatggt

SEQ ID NO: 296265 - DNA, 289 bp, Unknown
  Bacterial polypeptide expressing nucleotide sequence isolated from the Sargasso Sea
aatggataaaaatttttatataacaacaccaatatattatccttcagcaaagcctcatatgggtcatgcttattcaagtattattgccgattttttttcacgatttaaaactatagatggatacgatgttcactttttaactggtacagatgaacacggacttaaaattcaaagatctgcagagaaacaaggtttggatccacataagttctgtgatcaaattagtgaaacttttagagatttatctaaaactttaaatttaaccaatacagattttatccgaacaact

SEQ ID NO: 296266 - DNA, 729 bp, Unknown
  Bacterial polypeptide expressing nucleotide sequence isolated from the Sargasso Sea
tatgacttttgtcattactacacctttatactatgttaatgataaacctcatttaggaagtgtatatacaacaataatttgtgacgcaatagctaggtataaaaggcttgcaggtgaagatgttattttcatcactggtgttgatgaacatggtttgaaaatacaaagaacagctaatgaaaagggtattgaaccaaaatctcattgtgatgaaatctcagaagtctttaataataattggaaaaattggaatatatcctttgataaatttataagaacaagctcaaaaaatcatgaatttgttgttaatgaattttatgaaagagtgaaagcatcagatgatatctatatgggagttcaaaaaggttggtattgtgtaggttgtgaagaatttaaagataatccagaaaactcatcaacatacaagtgtcccatacatcaaaaaaatctagaatggaaaaatgaagagaatctcttttttcggctttcaaaatatcaaaaagaaattgagaaaataatcaacgaaccttcttttatagagccaatagaaagaaagaatgaaattataaattttgtatctagaggtttaaaggatttttcaatttcaagaacaaatgtctcatggggaattcctgtccctggtcacgataatcatactttttatgtatggtttgatgctttacttggatatgtaagtgccattagctctgacgcgacagaacattcatt

SEQ ID NO: 296267 - DNA, 292 bp, Unknown
  Bacterial polypeptide expressing nucleotide sequence isolated from the Sargasso Sea
atggataaaaatttttatattactacgccgatatattacccatctggaagacctcatatggggcatgcatattcgagtattattgctgacttttttgcacgatttaaatctattgatgattataatgttcattttttaactggtacagatgagcatggtttaaagatacaaagatctgctgaaaaagcgggtaaggaacctaaggaattctgtgatcagattagtaaaacatttaaagatctctcaaacacattaaatttatctaatacagattttataagaactactgagg

SEQ ID NO: 296268 - DNA, 412 bp, Unknown
  Bacterial polypeptide expressing nucleotide sequence isolated from the Sargasso Sea
aatggataaaactttttatattaccacacctatatactacccctcagctaagcctcatatgggtcatgcatattcaagcattatcgcagattttttcgcaagatttaaaataattgatgattatcaagttcattttcttacaggtactgatgaacatggtttaaaaattcaaagatctgcagaaaaagcagggaaggagcctcaaatattttgtgatcaaattagtcagacctttagagatctttcagatactttaaacttatcaaatacagattttattagaactacagaaactagacacaagaatacagttcagcatctttggaatgagactgagaaaaatgatgatatatactttatcaattattctggatgggtatcagtatcagatgaagctttttataacgaggac

SEQ ID NO: 296269 - DNA, 345 bp, Unknown
  Bacterial polypeptide expressing nucleotide sequence isolated from the Sargasso Sea
aatggataaaaacttttatataaccacacccatatactatccatctgctaaacctcatatggggcatgcctattcaagtataattgcagattttttttcacgttttaaaaaaattgatggttataatgtttattttttaactggtactgatgagcatggattaaaaattcaaagatctgctgaaaaacaaaataaagatccaaaaactttttgcgatgaaattagtaaaacttttgaaaatttaactaaaacattaaatttatctaataatgattttataagaacaactgaatatagacataaaatttctgtacagaaattttatgtctatattcagttgttctt

SEQ ID NO: 296270 - DNA, 610 bp, Unknown
  Bacterial polypeptide expressing nucleotide sequence isolated from the Sargasso Sea
tgatatcacatatctttcaactcttcccaattttgttgtaatggcagcaagcgatgagtctgaacttgtaaaaatgattaatacctcaattgatattaatgatagaccatctgcatttaggtatccaaggggtaatggagtaggaattgagcttcctaatataagtgaaaaaattgaaatcggaaaaggaagattaattaaagaaggaaaaaaagtggccataataaattttggcgcaagactgaatgagtgtttaattgctagagaaaatttattaaaaaaaggagtaaatataacattagtggatgctagatttgctaaacctttagatgaaaatcttatctggcaaatagctactgatcatgaagtggtaattacaattgaagagggttctattggtggttttgggtctcatgtaggacaatttttaaatgaaaaaaatttacttgataataacttgaaatttagatcaatgtttttacctgatagatttattgatcatgacaaacctgaaataatgtataaatatgctggcctggactccttcaatatagagtctaaaattttagatactctcaattctaaagttgtaattaaaaaaagtaattaa

SEQ ID NO: 296271 - DNA, 373 bp, Unknown
  Bacterial polypeptide expressing nucleotide sequence isolated from the Sargasso Sea
atggataaaacttattatattactactcctatatactacccatcaggaaagcctcatatgggtcatgcatattcaagtattatcgcagatttttttgcaagatttaaaataattgatgattatcaggttcattttcttactggtacagatgaacatggattaaaaattcaaagatctgcggaaaaagcagggaaggaacctctagtattttgtgatcaaattagtcaaacctttagagatctttcggatactttgaatttatcaaatactgattttattagaactactgaagctagacataaaaaaacagttcaacatctttggaatgaacttgagaaaaatgatgatatatatttatcaaactattctggat

SEQ ID NO: 296272 - DNA, 373 bp, Unknown
  Bacterial polypeptide expressing nucleotide sequence isolated from the Sargasso Sea
atgtctaataagaaattttatataacaactccaatttattatccttctggtaagccacatatgggccatgcttattcgagtattatagcagacgttatagcaagatttaaaaaaacagagggttacgaagtgtattttttaacaggtacagatgaacatggattaaaaattcaaagagaggctaaaaaaaacaataaaaaccccaaaaatttttgcgacgatttatctttaacatttaaaaaattaactaaaattttgaacttatcaaacaatgactttataagaactacagaagatcgacatcataagtccgttagagaaatttgggaaagattagaaaaatctggcgatatttatttagataaatatagcg

SEQ ID NO: 296273 - DNA, 721 bp, Unknown
  Bacterial polypeptide expressing nucleotide sequence isolated from the Sargasso Sea
tgcttataatgatgatggtaaaaaactttcagaattgatttatgagctaaatgaaatgaatgatttaaaaagaatcaggtataccacatctcatccaaaagacatgacctcggatttaattgatgcacacgcaaaatgtaataaacttatgccaatattacatcttccagtacaaagtggctcatcaaaaatacttaaattgatgaacaggcgtcataatataagtgaatatttagaaattataaaaaaattaaaaaagattaataaaaacataaaattttcaagtgattttataattgggtatcctggggaagatgaaaaagactttgaagagtctattgaattaatgagaaaaataaaatttattaattcttactcatttgtttttagcccaagaccaggaactccagcttctaatcttgaaaggataaacgataaagtttcaaaagataggttaagattatttcaaaaattttctaatgagataaaatttcagtatagacagtcattacttaataaaaaaataaaagttctatttgaaaataagactaataacatcaatcaatattttggcagagatgaatataataattcagttatagtaaacagtagtgaaaatttaataggaaagatatacaatgtttatgtatctagtttaaatcaaaatactttgttcggaaagattgattttaatattaacaacgagtattttgcagcttaa

SEQ ID NO: 296274 - DNA, 355 bp, Unknown
  Bacterial polypeptide expressing nucleotide sequence isolated from the Sargasso Sea
atgaataaaaatttttatataactacacctatatattatccatcggcaaaacctcatatgggccatgcttattcaagcataattgcagatttttttgcacgttttaaaaaaatagatggttacaacatatattttttaactggaacagacgaacatggtcttaagatacaaagagcagcagagtctaaaaaagctgatacattaaaattttgtgatgaaataagtgaaacttttagaaatttaactaaaactttgaatttaattaatactgattttatccgaactactgaaaaaagacacaaagactcagtccaacacctctggaatgtattattaaaaaacgatgatatatatt

SEQ ID NO: 296275 - DNA, 763 bp, Unknown
  Bacterial polypeptide expressing nucleotide sequence isolated from the Sargasso Sea
gaataatgtcatacatatagtgggcaaagatatatttaggcatcacgcagtctactggcctgcctttttattggcagctgaattagatcttccaaaaaagatatttgcacacggttggtggacaaatgagggaagtaaaatttcaaaatcgcttggaaatgtaattgatccaatggaaattataaatgattatggacttgatcaatttaggtattttttgttaagagaagtgcccttcgggaatgacggggatttttctagaagagctctgattaacaggataaacagtgaccttgttaatgatcttggtaatttatgtcaaagatcattatctatgatagaaaaaaaactcggctcaatcgttccagatattactaataatggccatgatgagagcatgttacaagagtcaactgaaatgattttaaataaaggttttgagatggtagaagattttaaaattcatgattatataaaactggtatgggcacatataggaaaagtgaataaatattttaatgataataaaccttgggaattagaaaaaaataataaagaaaaatttttgaatgtattagctgcaacaacagaacaaattaaaaatattgctttctttattcacccaattatgccgaacaaatccatggaattgctaaaaataattggaataaaagacattaatgtgacatttgacgagatgaagcgagttaatgtatttgggaataagttgtcaaaagtaagtcatttatttagtagagtttaa

SEQ ID NO: 296276 - DNA, 619 bp, Unknown
  Bacterial polypeptide expressing nucleotide sequence isolated from the Sargasso Sea
aataaaatttcaaaatctttaggtaatgtaattgatcctatagacataattaataattacggtcttgatcaatttagatactttttattaagagaagttccgtttggcaatgatggtgatttttcaataaaagctctgatgaataggattaatagcgatttagttaatgaccttggaaatttatgccagagatctcttacaatgatagaaaaaaaacttgagtcaattattcctggtaaaactagcaaaggtccttacgaggaaatactagaaaaatcaagtgaagaggtaataattaaaggatcaaaaatgatagatgagtttaagattcatgattatataagactagtatgggagcatattggaagagttaataaatattttaatgatagtaaaccatgggaattagaaaaaagtgataaagaaaaattttcaaatgtattagctgtaacaactgaacaaattagaaatatagctttctttattaatccaattatacctcaaacttcaataaaaatacttcaaataatcggaattgatgaatctcaatttttatttaaaaagattaagaaccataatatagttggaaataatatatcaaatgtaaatcatttgttta

SEQ ID NO: 296277 - DNA, 334 bp, Unknown
  Bacterial polypeptide expressing nucleotide sequence isolated from the Sargasso Sea
aatggatgaaatttctatcgaagattttataaaaatagatctgagagttgctgagatcaaacacgctgagaatgtggaagaagcagacaaactcttaaaaataaatttagacctaggagaattaggtgaaagaacagtatttgcaggcataaaaaaattctatgatccagaaaaattaataggtctaaaaattatatgcgtagctaatttaaagcccaggaagatgcgatttggggtatctgagggtatgattcttgctgcaagtactgacgaagaaggagtatttattctgcatccagatcaaggagcaaaaccaggaatgagagtgagttaa

SEQ ID NO: 296278 - DNA, 379 bp, Unknown
  Bacterial polypeptide expressing nucleotide sequence isolated from the Sargasso Sea
atgcttgccgaaatctctaatgaaattggtaacggacaagaaatgacttatttaaaacctgtcttggatagagcaggtgttccagttcgttctgaatttacatcaggtcaggcatcatttagagacgctattatgcaagaatataaatttgagttgataggtgaaggacaagattcatttcataatagaagaagagggttgcaatattttttggatcatacaatactgccacataataactccattggaacaaaagtggctgtcggcgcaaagaaatatgctgccaatagagaagtcatattttctacagatcctaatcagattatgaagcttcaaatccctttaagtgaaattaacactaatgaattaattaattaag

SEQ ID NO: 296279 - DNA, 433 bp, Unknown
  Bacterial polypeptide expressing nucleotide sequence isolated from the Sargasso Sea
atggataaaatttatataacaacaccaatttattatgtgaatgataagcctcatgttggacatgcttataccagcatagcttgtgacgctttggcaaggttctatagaatcgcaggctatgatgttttctttcttacaggtacagatgagcatggtttgaaaattcagcaatcagctgaaaaaaaggatataaatattcaaacatttgttgatgatgttagcaaaaattttcaaaatctttctaagagtttgatgctaactaatgattattttattagaactacttctgagcaacataaaaatagcgcatcctttttttgggaaacactagttaagaagggtcaaatatatttagataaatacgcaggttggtactctgttagagatgaggcttattatcaagaagaagaacttattaatggaaaggctccta

SEQ ID NO: 296280 - DNA, 792 bp, Unknown
  Bacterial polypeptide expressing nucleotide sequence isolated from the Sargasso Sea
atttatataaaaagtattggcccgcagaccttcatgttattggtaaagacattttaagatttcatgcaatttattggcctgcttttttaatggcagctaaattacctttgcccaaaagaatatttggacacggatggatactttcagatgataaaaaaatgtcaaaatctataggaaatatcttggaccctattgatataattaaaaattatggaattgatcaactaagatattatctaatcaaagaagtttcattaggtaacgatggaaatgtgtccttagaaaatttgaaaaattgtattaataatgatttagcaaataattatggaaatttatgtcaaagagtattctcttttttaaaaaaaaattgttctaacaaaattcctaaaagtgattttttttcagatgaagataagattttaacaaataaacttaaaaaagatgtaaataaattaagcgaatttgtgaataaacaagatcttaataattatataaaaaaggtaatagaatattcttttgactcaaataaatattttaatgactctgaaccatggtctcttaaaaaaactaatgttaaaaaaatgaattcagtattatattcaattattgagcaaattaagaatattagcattcttttactaccaattatccctataagtgctaataaaattcttgatattttaaacgtaaaaaaagatttaagaataattgaggaaataaataaaaatttttcaataaatcatgataaagaattaggaaacattgaaattttatttaaaaaggttgaataat

SEQ ID NO: 296281 - DNA, 328 bp, Unknown
  Bacterial polypeptide expressing nucleotide sequence isolated from the Sargasso Sea
tatggacgaaatagactacgatcttttttctaagattgacttacgagtcggagaaataattagtgccgaagatgttgaaggtgcagataaattgctgtgtctaaaaatagatattgggtcaataactaaaacaatttttgctggcataaaaaagttttatgaaccagaaagccttttggggaaaaaaattataatagttaataacctaaaatctagaaaaatgaagttcggtgaatccgaaggtatgttactcgcagctgataacgatgaaaaagtatatctaatagaaatcgataaagacgttatcaatggagcaaaaattcgatga

SEQ ID NO: 296282 - DNA, 334 bp, Unknown
  Bacterial polypeptide expressing nucleotide sequence isolated from the Sargasso Sea
aatggatgaaatttctatagaagattttataaaaatagatctgagagttgctgagatcaaaaacgctgaaaacgtagaagaagcagataaactcctaaaaataattctagacctaggagatttaggagaaagaacagtatttgcaggtattaaaaaatattatgatccagaaaaattaataggtctaaaaattatatgtgtagctaatttaaagcctaggaagatgcgatttggagtatctgagggtatgattcttgctgcaagtaacgatgaagaaggcgtttttatactgcatcctgatcagggtgcaaaaccaggaatgagagtaagttaa

SEQ ID NO: 296283 - DNA, 343 bp, Unknown
  Bacterial polypeptide expressing nucleotide sequence isolated from the Sargasso Sea
atgagtaacgaagaaaatattattaattttgatgagttcatcaaagttgacttaagagtggctaagattatcgaggcaaaagatgttgaagaggcagataaacttcttgaaataagggtggatattggatcagaggaaagaaccatttttgcaggcatcaaaggatactatgatccctctgagcttgttggaaaaatgatcgttgtggttgccaatctgaaaccgagaaaaatgcgtttcggggtttctgaaggcatgttattggcatctggtgatgatgattcaggtgtctttctgatttcaccagatgatggagcagagcctggacaaagggtgagttgag

SEQ ID NO: 296284 - DNA, 343 bp, Unknown
  Bacterial polypeptide expressing nucleotide sequence isolated from the Sargasso Sea
atgagtaacgaagaaaatattattaattttgatgagttcatcaaagttgacttaagagtggctaagattatcgaggcaaaagatgttgaagaggcagataaacttcttgaaataagggtggatattggttcagaggaaagaaccatttttgcaggcatcaaaggatactatgatccctctgagcttgttggaaaaatgatcgttgtggttgcgaatctgaaaccgagaaaaatgcgtttcggggtttctgaaggcatgttattggcatctggtgatgatgattcaggtgtctttctgatttcaccagatgatggagcaaagcctggacaaagggtgagttgag

SEQ ID NO: 296285 - DNA, 340 bp, Unknown
  Bacterial polypeptide expressing nucleotide sequence isolated from the Sargasso Sea
tatgaaatacacaattacaacgccactatattatgttaacgacaagcctcatctaggtagttcatatacaacaatagcttgtgatgcaatagctcgttttgaaagactaaacggaaatactgtcctttttcttactggtgttgacgaacatggtcagaaaatagaacgtactgcagaaagcaaaaaccttgaacctcaactacattgcgatgaaatcacagaaaagtataagtatttgtgggataaactaaatattacttacgatcgtttcgttagaacaacttctattgaacatacatctttggttcatcaattttattccaaaagttttgaaatctga

SEQ ID NO: 296286 - DNA, 436 bp, Unknown
  Bacterial polypeptide expressing nucleotide sequence isolated from the Sargasso Sea
gaaattggaaaaggaagattaataaaagaaggaaaaaaagtggccataataaattttggtgcaagactgaatgagtgtttaatcgctagagaaagtttattaaaaaaaggagtaaatataacattagtggatgctagatttgctaaacctttagatgaaaatcttatctggcagatagctacagatcatgaagtggtaattacaattgaagagggttctattggtggttttgggtctcatgtaggacaatttttaaatgaaaaaaatttacttgataataacttgaaatttagatcaatgtttttacccgatagatttattgatcatgacaaacctgaaataatgtacaaaaatgctggcctagactcattcaatatagagtctagaattttagatacactcaattctaaagttgtaattaaaaaaagtaattaat

SEQ ID NO: 296287 - DNA, 1570 bp, Unknown
  Bacterial polypeptide expressing nucleotide sequence isolated from the Sargasso Sea
atgaaatctaataataatatttataatcaaactaattcttggcctttttttgaagcgaaaagagttttgaaacgtatatcaaaaagtaaacaaaacaaagaacttgttacttttcaaactggatacggaccatctggacttccacatattgggacatttggagaagtagtaagaaccaacatggttagaacagcgttttcttttttgaatgaaactccaactagacttatttgtttttccgatgatttagatggccttagaaaaatacctacaaatgtacctacaccagaaaaattagaagaagatttagatcttcccctaacaaaagtaagagatccttttggaaaatttaatagttttggcgatcacaataatgcaaaattaaaagaatttcttgataaatataatttcaattataattttgaatcagctactaaaaattataaagatggtatatttgatgacgccttaataaaaattctcgagaactatgataaaattatggaagttatactaccatcattaagagaagaaagaaagaaaacatactcaccctttcttcctataagcccaataactggcaaagttttacaagttgccattgaagaaataaataaaaccaaaggaactattacatacactgaacaaagtggtgaaaaaatagaattatcagttaaatcaggaaatgtaaaattgcagtggaagcctgattgggcaatgcggtggtttgctttagatgtagattatgaaatgtttggaaaggaccttattccatcagcagaactggcagcaaaaatatgtagaataataggtggaagccctccagaactattaaattacgaactttttttagatgaacatggtcaaaaaatatcaaaatcaaaaggtaatggtttatcaatagaggattggttaagatatgcagatcaagattctttaagtttttttatgttccaaaaacctaaaactgcaaaaagactctactttgatgttatacccaaaatggttgatgattatcaccaacatcttaataaatttattgaccaaaaagaagaagagaaaattaataatccagtatggcatattcatactggaaatcctcccatttcaaacatgataataaacttctcaatgctattaaacctagtttcagcttccggttcagaggatgaaaaaacattgtggacatttattaaacgttataaacctaacatagttgctagtgaacatcctgacttgggaagtgcagtaaaatatgcaattaattattatcaggactttgtgaaacctaataaaaaatttcgtaatgctactataattgagaaagatgcattaattgatttgtatcacagattagaaaatcttaagagcgattgtgaaattgaagaaattcaaactttactgttttctattggaaaggatcataaatttgataacctaagggactggttttctgcattttatgagattattttaggtgcaaaatctggaccaaaattaggaggttttatatcaatatatggaatagaagaaacaagaacactaatttgcaaaagattaagtttgtaat

SEQ ID NO: 296288 - DNA, 210 bp, Unknown
  Bacterial polypeptide expressing nucleotide sequence isolated from the Sargasso Sea
gtgaaagaactgtttttgctggcataaaaagtgcatatgatcctgagagtcttaatggaagacatgttgtattagttgcaaatcttgagccaaggaaaatgaaatttggagtatcggaaggaatggtcctagcgtcgagtaatgatgagggatcaatttatttaatatcaccagatgaaggtgcaaagccaggtcagttagttaaataat

SEQ ID NO: 296289 - DNA, 302 bp, Unknown
  Bacterial polypeptide expressing nucleotide sequence isolated from the Sargasso Sea
ggttgagcttcgcgtagctaagattgttaaagctgaaggtatagaagaagctgataagctcataaaattacatcttgatgtgggtgatcttggtgaaagaactgtttttgctggcataaaaagtgcatatgatcctgagaatcttaatggaagacatgttgtattagttgcaaatcttgagccaaggaaaatgaagtttggagtatcagaaggaatggtcttagcgtcaagtaatgatgagggatcaatttatttaatatcaccagatgaaggtgcaaagccaggtcagttagttaaataat

SEQ ID NO: 296290 - DNA, 166 bp, Unknown
  Bacterial polypeptide expressing nucleotide sequence isolated from the Sargasso Sea
gatgtctaataatgctgaaaaaagagatattttagttacaagtgctttgccttatgccactgcaccacttcatcttgggcatattttagaacatacccagacagataaatgggttagatatcaaagattaattgagaataattgcacttacgtatggctgacgacg

SEQ ID NO: 296291 - DNA, 568 bp, Unknown
  Bacterial polypeptide expressing nucleotide sequence isolated from the Sargasso Sea
tctaaattaagtacgggagttgacgatatagatctaaacttagaagatctcaaacaaaaggtaaacgctgacttggtgaataaattagtaaatatagccagtagatctgctaatttcttaaataaatattttaataatgaactatctaaagaaattgataatgttgaacttgtagaatattttattaaatcatcagaagaaatatctaaacattatgaaaacttagaactcaataaggctatgaaagaaattatggctcttgcagacaaagctaatcaatatgttgataaaatggaaccttgggttcttatcaaggatgaaagaaatttagaattggttcataggatatgtagtacagcattaaatctatttagaattttaataattatgattgaaccagtgactcctaatctatcaaaaaaatctcttaattttttaaatgaagagctatcttgggattccattaaaagtcccctgttaaatcataaaataaactcttttgaaactttactaattagaatcgaagataatcaaataaatcaattaatggaattaaaaaatgtctgag

SEQ ID NO: 296292 - DNA, 334 bp, Unknown
  Bacterial polypeptide expressing nucleotide sequence isolated from the Sargasso Sea
aatgtctgagataacaatagaagattttataaagttagatttaagaatagcaaaaattaaaaaagcagagtctgtagaaggtgctgataaattgcttaaattagagttagatttgggagctctgggcagtaaaactgtttttgcaggtatgaagcaagcttatgacccggacaatttagttaataagttagtggtttgtgtaaataatcttaagcatagaaaaatgcgatttggtacgtctgagggtatgatattggcagcaggagatgatgaattgggtatttttataatttctccggatgaaggtgctaaaccaggaatgcaagtaaggtag

SEQ ID NO: 296293 - DNA, 343 bp, Unknown
  Bacterial polypeptide expressing nucleotide sequence isolated from the Sargasso Sea
aatgagtgacgaagaaaacattataaattttgatgaattcatcaatgtagacttgagagtagctagaatcgttgacgcaaaagatgttgaagaagccgataaacttctcgaaatcagagtggatatcggctcagaacaaagaacaatttttgcaggcatcaaaggatattatgatccctcagaactgattggaaaattgatcgttgttgttgccaaccttaagccaagaaaaatgcgctttggggtatctgaagggatgttactggcatctggtgatgacgattcaggcgtctttttaatttcgccagatgaaggagcaaaacctggacaaagagtcagctga

SEQ ID NO: 296294 - DNA, 196 bp, Unknown
  Bacterial polypeptide expressing nucleotide sequence isolated from the Sargasso Sea
atacagggttttaatgtctattttttgactggtacagatgagcacggacaaaaaatacaacgagctgcagaagaaaaaaaaatggatcctttattattttgtaatgaaattagtaaaacctttagagatttatctggtacattaaatttatctaataatgatttcataaggacaactggagaaaagacattctaaa

SEQ ID NO: 296295 - DNA, 265 bp, Unknown
  Bacterial polypeptide expressing nucleotide sequence isolated from the Sargasso Sea
aatggacaattctaaaaaaactaaaagaaaaatacttgtcactcaagctttgccttatgcaaatgcaccactgcacttaggacatattcttgaagctgttcaaacagatatttggactagatttcaaaactttaatggtaacgaatgcctattcttttgtgctgatgatactcatggaacaccagttatgttgaaagccaatgaaatgggtataaagccagaagaattaatttctgatgtttataaagaccataaatcctcatat

SEQ ID NO: 296296 - DNA, 829 bp, Unknown
  Bacterial polypeptide expressing nucleotide sequence isolated from the Sargasso Sea
tacttgttatgccatggggttagttatctaaatgataaagaaaacgaattaaaggaatattggaaaaatgtagtacatatagtcggtaaagatattttacgacatcatgctgtttactggccagcatttttattagcagcagatttggatcttccaaaaaaaatatttgcacacggatggtggacgaatgagggtaacaaaatttctaaatctttaggcaatgtaattgatccaattgagattataaacaattatggacttgatcagtttagatacttcttactaagagaagttccatttggcaatgatggagatttctcaaaaaatgctttaattaatagaattaatagtgatttagtaaatgacttaggaaatttgtgtcaaagatctttaaccatgattgaaaaaaaactaaattcaataataccacaagtaaataatacaaatgaagctggaggtaaattatttaaaatgtatgacgaaacagttgagcgatccttgactcttgtagaaaactataaattacatgattacattaagctagtatggttgtatataaatgaagtaaataaattctttaatgatagtaaaccttgggaattatctgatagcgatccaaaattatttgctgacattcttggtttaactagtgataatattaaaaaaatagcttttttaattaatccaatcatgccagacacttcattaaaaatttttaatatgcttgatataaaattagaaaatataaacttcgaaatggaaaaatctatttcaataagtggaaatagacttaatcaagtaaaacatttattttcaaggattcaataat

SEQ ID NO: 296297 - DNA, 207 bp, Unknown
  Bacterial polypeptide expressing nucleotide sequence isolated from the Sargasso Sea
ggactcgtaatgttttcgcaggtattaagagctcatatactccttcagacttagataataggttagtaattctagtttacaatcttgcaccaagaaaaatgaaatttggcatttctgaaggtatggttcttgcctcaagtaatgatgatggtatttatttaatatcaccagacgaaggtgcaaaaccaggaatgaaagtaaaataat

SEQ ID NO: 296298 - DNA, 820 bp, Unknown
  Bacterial polypeptide expressing nucleotide sequence isolated from the Sargasso Sea
ctggagcgtctggagcagtgcggctggccggcatccgtgcatgtgatcggcaaggacatcctccgtttccatgccgtgttctggccggcgatgctgatgtctgcaggactgcctctgccgaagtccgtcttcggccacggctttctcacccgggaaggcttgaagatgggcaagtcgctgggcaatgtgctcgacccggaacatcttctcgagtgctgcggatcagatgccgttcgttggtatctgctgcgcgacatccaattcggggacgacggcgattttcaacagcagcgcttcgttgatgtggtgaacaacgacctggccaacaccatcggcaacctgctcaaccgcacatcatccatggccaggaaatggttcgctgatgctgttccaccccacaccgatgccgtgggtccccaccatccccttgccgcgacggccaacaccgccgtcacaacggttgtgacatccatgccgtcgcttggcttcaagccggcagcggaggccgttctccagctggcgatcgcagccaatggtcatctcaacgacacagcgccctggagccggatgaagcaaccaggcctggaatccgaagtcggcgatgacctctatgccgttctggaagccacccggattgtgggactgctgctcaatccactgctgccggacttgagcaatcgaatcctggagcagctcggcaccagcattaatcccgacgggtggaccgaacagctgagctggggtggcctggtaagtggtgcgtctctccccaaaccatctccggtgatgcagcgcctcgaactcgaggagtccctctgag

SEQ ID NO: 296299 - DNA, 166 bp, Unknown
  Bacterial polypeptide expressing nucleotide sequence isolated from the Sargasso Sea
atgactcaagctaaaagacacaccattacagccgcattaccttatgctaatggaccattgcatttgggtcatcttgctggagtatacatttcttcagatatatacgctcgttttttacgttctaatggaaaagatgttgcttttatttgtgcttcagacgaacatg

SEQ ID NO: 296300 - DNA, 344 bp, Unknown
  Bacterial polypeptide expressing nucleotide sequence isolated from the Sargasso Sea
aatggacaatcctaaaaaaaataaaagaaaaattcttgtaactcaagcattgccttatgcaaatgctcccttacacttaggacatattttagaggctgttcaaactgatatttggactagatttcaaaatataaataataatgagtgttactttttttgtgctgatgatactcatggcacgccagtaatgttaaaagctaatgagctaggaattacaccagaagaactaatcaaagatgtttataaggatcataaatctacatatgaactttatgatattaaatttgcaaactttcacagtacgcatagtgatgaaaataaaaaattttcagaacttatctata

SEQ ID NO: 296301 - DNA, 799 bp, Unknown
  Bacterial polypeptide expressing nucleotide sequence isolated from the Sargasso Sea
atgccttcaaaatcaaaaaaacatctcgttactgctgcattgccctatgccaatggcccgttgcacattggacatttagcaggagcttaccttcctgctgacatctatgtcaggtatttaaaatctaaaggggaagaagtggtatttgtctgtggttcagatgaacatggcgctgccattaccttaagggcaaaaaaagaaggaaaaagtccatctgagatcgtaaatcaatatcatgaattgaacgataaggcatttaaaacgcttggcattgattttgatatttttcatcgcacatcagatcctttgcaccatcaaactgcaaaggatttttttctaactcttgagcaaaaaggagtttttacaaaagaaacctcagagcagttttacgatgagagttatggtcagtttttagcagaccgttacattacgggacaatgtcctaaatgcgattacgaaaatgcatatggagatcaatgtgaaaactgcggaagcgcacttagtccaaatgaattaatacatccaaaatcgacgctaagtggtgagcctccaatactaaaaacaactacacattggtatttacccatgcaagaccatgagtcttggttaaaagaatggatcgagaagggaacgcttgaaggtcaatttcatcatcgtccatcagaatggagaaaccaagtgattggtcaatgcaaatcctggttagatgccggattaaaaccaagagcgatgacaagagacttggattggggcgtgaaagttcctttaaaagacgctaaagggaaggtactctatgttt

SEQ ID NO: 296302 - DNA, 115 bp, Unknown
  Bacterial polypeptide expressing nucleotide sequence isolated from the Sargasso Sea
atgaaaaaaagtaaagaaacttttacaataactgctgctttgccatatgcaaatggacccattcatattggacatttagcaggtgtttatatacctgctgctcgtcacatttaag

SEQ ID NO: 296303 - DNA, 910 bp, Unknown
  Bacterial polypeptide expressing nucleotide sequence isolated from the Sargasso Sea
ctcgggtcccccgtaaggttcgtgaccggcctggacgaacatggccagaaggttcagcagggagcggaggcggagggaatcgacccaatccagaggtgcgaccgcgtggcggaagagtttgagtccatgctccgcctccttgacatctccaacgacgactatattcggacgacccaggaaaggcacaagaaggtggtggctcacctccttcgggaacttcatgaccgcggggaaatttaccaagcagagtatcaaggttactattcgacccgggcggagcaatttcttcaggagaaggacaaggtggacggggaatggcccgaaatatttggagaagtcactcggatcacggaacggaactatttcttcaggctgagcaactatcaagactggctggtttcgcacctcgaagagaaccctggcttcattgagcctgcccatcgacaaaagcaagttcttgaattcctcaaggaacctctcaacgacctttgcatatcccgtccaaaagataggttgaactggggaatccctctgcctttcgacccggactacgtgacctacgtttggttcgatgccctggtcaactacgtctcggcggccggtttcggagacccgggctttgagcaactttggcctgcggatcttcatgtcataggcaaggatatcctagctccgcctcatgccgtctactggccgatcatgctcaaggcctccaaccttcccctcccagccaagatacttgcccacggttggtggacgagctccggggccaagatgtccaagagcacgggtgaaacggtggacccattgagtctcgcggaaaggtatggctccgatcccttccgctatttcgtcatgcgcgagatgacggtgggcaacgatgccgaattttccctcgagcgcttgagtc

SEQ ID NO: 296304 - DNA, 658 bp, Unknown
  Bacterial polypeptide expressing nucleotide sequence isolated from the Sargasso Sea
aatggataaaaatttttatataactacaccgatttattatccttctgcgaaacctcacatggggcatgcatactcaagtattattgcagatttttttgcaagatttaaaaaaattgatggttttaatataaattttttaacaggaacggatgagcatggtttaaaaattcaaagagcagctgaaaaacagggtattgatactttagaattttgtaaccaaattagccaaactttcaaggatttatcaaaaattttaaatttaactaacacagactttattagaactactgaagatcgccataaaatttcagtccaaaatttatggaaagaacttgaaaaaaatgaagatatttacctatctaaatattctggatggtattcagtttccgatgaagctttttatactgaagaagaaattgaggaaatagacggtaaaaaaaaagcaatatcatcaaaatccacagttgaatgggttgatgaagagtcttatttttttagattatccaaatgggaaaaaccattacttgatcattatgataaaaatccagattttattttacctgaaagtagaaaaaatgaagtaattagatttgttaaaagtggtttaaaagatttatctgttagcagaaaaagtttttcctggggaataaaagttcca

SEQ ID NO: 296305 - DNA, 560 bp, Unknown
  Bacterial polypeptide expressing nucleotide sequence isolated from the Sargasso Sea
aatgagtaaaaatttttatattactacacctatatattacccatcagctaagcctcatatgggtcatgcttactcaagtattattgctgattttttttcacgctttaaaaaaattgatggatacaatgtttattttttgactggcacagatgaacatgggttaaaaattcaaagatcagcggaacatcaaaaaaaagaccctaaatccttttgtgatgaaatcagtaaaacattcgaagatttaacaaaaaccctaaatctgtctaacactgactttataagaacaactgaaaatagacataaagtttctgtacaaaatctctggaatatacttgaaaaaaataatcaaatttatctttctaaatattcaggatggtattctgtttcagatgaagctttttacaatattgatgaagtagaagaaaaagatggatctaaaattgcaaaaatatcagggtctgttgtagaatgggtagaagaagaatcttattttttcaaattgtccgaatgggaaaaacctttattagaattttatgagaaaaataaaaatttcatacttc

SEQ ID NO: 296306 - DNA, 667 bp, Unknown
  Bacterial polypeptide expressing nucleotide sequence isolated from the Sargasso Sea
atggataaaaatttttttataactacaccaatttattacccatcagcaaaaccacatatggggcatgcttattcaagtattgtttccgatgtaattgccagatttaaaagattagatgaatataatgtagaatttttaactggcactgatgaacatggtttaaaaatacaaagagctgcagaagaaaaggggattgaaccaaaaaagttttgtgatgaaataagtaaaacatttagaaacttatctaacactctaaatttatcaaatactgattttattagaactactgaggatagacacattaaatctgttcaaaatttgtggaaaattttagaaaaaaaagatcaaatttatctttcaaaatattctgggtggtactcagtttctgacgaggctttttataataacgatgaaattaaagaagaaaatggtaaaaatttttctattatatctggatctaaagttgaatgggtagaagaagaatcgtatttttttaagctttcaaaatgggaaaatcaattattaaaattttatgaagataatcctaaatttattttgcctgaaagtagacgtaatgaagttttaaattttgtaaaaagtggccttaaagatttatcagtaagtagaaaatcattttcttggggcataaaagttcctgtaacaaaga

SEQ ID NO: 296307 - DNA, 784 bp, Unknown
  Bacterial polypeptide expressing nucleotide sequence isolated from the Sargasso Sea
aagttttggccagcaaacatacatattataggaaaagatatcttaagatttcacgctgtatattggccagcttttttattagccgctaaacttccactaccacagaaaatatttggccacggatggattctgtcagatgataagaaaatgtctaaatcagttggaaatattttagacccaattgaaattgttaataattatggaacagatcaattacgatattatttggtaaaggaggtttctctcggtaatgacggtagtatttcaatgaataatcttaaaaattgtataaataatgatctagccaacaattatggaaatttatgtcaaagagttttttcctttattaaaaaaaattgctctaacaaaatccctaaggcaaaaaaattggaaaaagttgataatttgttattaagtaagttaaaagataatttaccaaatctagttgaattaatgaataatcaaaatttaaatgaatatataaaaactgttgtaagttattcttttgatgcaaataagtattttaatgattcagaaccatggtcagtaaaaaaaaaagatatagataaaatggaaacgattttatttacaacctgcacacaaataaagaatatcagtattctattaaatcctataataccaaaagcgactgaaaaagttttagagactatgaatattgaaaagaaagatattcttattaatcaaataaatgtattagactgttttgatcataacaaagaattaaaaaaactagacatattatttaataaaatagaaaaatgat

SEQ ID NO: 296308 - DNA, 836 bp, Unknown
  Bacterial polypeptide expressing nucleotide sequence isolated from the Sargasso Sea
tgatgccttaattaattatatcactgctcctggatatttaaatgataaaaacttatttaaaaaattttggccagcagatatacatctaattggtaaggacatactaactacgcatgctgtttattggcctactatgcttatgtctgcaggaattaagctcccaaaaatgatttttgcgcacggttggtggcttatggataaagaaaaaatgagtaagtctagcggtaatgtaattaaccctatggatttaattgatgactatggtgttgaccctgttcgttattatctaatgcgagaaatggtactaggtcaagatgcaaacttcactgttaaatcttttataaatagatataatagtgatctagctaatgatcttggaaatcttttaagtcgcatttctacattaattaaaaaaaactataatggtcaaatacctgaaggatattctccaggcaataaagagaaagaaataagagataaatcgattgaattagtcaaaaactttgataaaaacatgtcgagtttatcaattaatgatgcaattgaagaaacacttcagtttgttcgaagtattaatagatactttgaacacaaggcgccttggaaacttgtaaaggaagatctagaatctgcaggagcagttttatatactggtgctgaagcattaaggatatgtgctattttattatctcctataatgccaaaaagaatgaaattgctacgatctattttaaatgcagaatcatctgatagaacctgggggaacttagagtcagggaagcttatgggagagcacaaaccattatttcctagaataaaccctgaaaatatttaat

SEQ ID NO: 296309 - DNA, 889 bp, Unknown
  Bacterial polypeptide expressing nucleotide sequence isolated from the Sargasso Sea
tggacataccttttatgtttggttcgatgcactacttggttacatcacggcactacttgattcagatgatgaacctgacctacaaaaagcaatcagccgtggctggccagcgtcactgcatgtaatcggtaaagatattctcagatttcatgcggtctactggcctgctatgtgtctgtcagcagggattgatcctcctcaagcagtttttggccatggattccttaccagagaaggtcaaaaaatgggaaaatctcttggcaatacaattgatccttcacggttgctggaatattgcggtgccgatgcaatccgttggtacctactaagggacatccaatttggtgaagatggagatatcaagcaacaacgtctactggaccttgtcaataatgaccttgccaacaccattggaaaccttgtcaatcgcacagtcgcgatgagccgtaaatggtttgatggtgttccagagctatcatcaacgcctgatgatcaacaccctcttgctcttgcagcagctgctgctattcgccaagcacctacctactataaagagctcgcatttcatctcgcagcgcaggatgcattgcaattagcgaccgatgccaatggatatcttagtgagaaagccccttggagtgccatcaaggatccaaacaaccgggatgctgttgctgcagatctatacgccgtcctcgaaactgcccgactggttggtgttttgttagcacccctcctgccagatctcagcgagcggcttttgaagcagctggatcaacccccacttgactggaggcgtgacggccagtggggtcagctcaatccaggagcttcactacccgaaccggtgcccctgttgcaacgactggagttggaggagccgatttga

SEQ ID NO: 296310 - DNA, 760 bp, Unknown
  Bacterial polypeptide expressing nucleotide sequence isolated from the Sargasso Sea
gtactggccggcgatgcttctcgcggccggtgagccattgccggcgcaggttttcgcacacggctggctgctggtcgggggcgagaagatgagtaagtccaagctcacgggaatcgcacccgaagacatcatcggccacttcggctcggacgctttccggtactacttcatgcgcgccatcagtttcggccaggacggctccttctcctgggaggacatgtctgctcggtacacctcggagttggcgaacggcctgggcaacctggcatcgcgatcgacggcgatggtggggaagtatcgcgacggcgcgcttccagagcccggcccgctcaccgccgccgaggacgccgttgtcgagcgacttgcgtcggccacgacgagcgccgacgcggccatggacgaactcgacttctccaccgccatcgcggaaatccgcggtgtggtcgagctggtcaaccagtacgtcaccgaggtggaaccgtgggtgctcgctaaagacgacgccaacacccagcgtttggacacggtcctctacacgatgtgtgaagtgctgcgcgccgtcgccgttctctacaacgccgtgatgccgaaagcgatggcgagcttgtggtcgcagttgggggcgggtgaggctctcggcgccctggctgctcaacgaacagccgatgctggtcgatggggtcaacttcctcccgggtcgaccgtaaccaagggggatgctctctttcctcggctgccggacgagccgacggagtcctag

SEQ ID NO: 296311 - DNA, 822 bp, Unknown
  Bacterial polypeptide expressing nucleotide sequence isolated from the Sargasso Sea
taaattacccaaatatcaatgataatctttataaaaatttttggcctgcatcaattcatttaataggaaaagatatattaagatttcatgctatatattggccagctttccttttagctgcagagataccattgcctaaacgagtttatggtcatggttggattttatctggagaagaaaaaatgtcaaaatcaaaaggaaatatattagatccattagaaattatagacagatatggacttgattcattaagatactatttaattaaagaagtttcttttggaaacgatggcaatatatcaaaagataaacttgaaaattgtattaacagtgatcttgcaaataattatggaaatttgtgtcaaagagttatttctttctgtgaaaaaaattgtaatcttgttataccatcacaaattaaatttaacaaagaggatttagatttgttagattatttcaaagataattatttaaatttagatgattatatagaaaatcaagatttaaactcttatatgaattttattgttgataggctttttgcaactaataaatattttaatgatcaagaaccatggaaaaaaaaatctgacattttaaggttaaatacaattgtctatgttgctctagaatctataagaaagatctcaataatgctttacccagttataccgtcatcttctttaaaagttcttaatatgtttcatattgacgaaaaagatattagttttagtagtatcaaaaatcatgactcattaaagtcttcagacaaaataaataaaattgatattttatttaaaaaaatagaaaaagatgattgat

SEQ ID NO: 296312 - DNA, 895 bp, Unknown
  Bacterial polypeptide expressing nucleotide sequence isolated from the Sargasso Sea
tatttaaggtactacttctcaagtaggctaacgaataagattgaagatattgatttgaatttcgatgacttcataacacgtgttaattcagacttggttggaaaaataattaatataggtagtcgttgtgcaaaattcataaataaagactttgataacaaattgtcttctgaagttggtaatgaagaattgattaaatcaatcctatctagaaaagaagatattatacaaaattatgaaactagaaattatgcagcaaacatgagaattatctcaagtctaagtgatgaggtaaataagtatttagatgatgaaaaaccatggatcaaaattaaagatgattcaacaaaaagtcatgtacaaacaatttgctctgatggcatcaatggatttaaattaattatagggtatctaaaacctgtacttcctgagatagcaaagaaggttgaaaatctacttaattgtgatttaatcacttggtccaatgtagataaccaacttaaaaatcataaaattaatgcatttgaaccattaatcactagaattaataaagagagtattgaaaaaatgaaagaagaaaataataaagagacggtcgtagcagaggatacagataaaattactatcgatgattttgttaaagttgatctaagagttgccaaagtaattaatgcaagagaacttgaggattctagaaagcttctagagcttgaggttgatcttggggatgaaactagaactattttcgcaggtatcaaaaaatcttattctccagatgagcttataggcaagcaagtagtggtaattgctaatctaaagccaagaaaaatgaaattcggaacttctaatggaatggttctagccactcaacatgatggagatgttattattattc

SEQ ID NO: 296313 - DNA, 616 bp, Unknown
  Bacterial polypeptide expressing nucleotide sequence isolated from the Sargasso Sea
atggaaaacatatacattactacacccatatattatgttaacgacaaacctcacgtaggccatgcttatacaagtgtagcatgtgacgctttggcgaggttttatagactaaaagggtacgaagtgttcttccttacggggaccgatgaacacggacttaaaatacagcaagctgctgagcaaaaagaagtcacaactcaaacatttgttgacgacatgagcactaattttcaaaatttaactcagattctcaatctaacaaatgatgattttattcgaactagttcagacaggcatattgctggtgtaaggaagttttgggaaaaattaagcacaaacaatcaaatctatttagataaatattcaggatggtattcggtgagagacgaagccttttataatgaagatgagattaaagacggtaaggctccatcaggatcacctgttgaatgggtagaagaatcaagctacttctttaaactctctgaatgggagggtccacttcttaaattttattcagataatccagattttgttcaacctaaatcaagatttaatgaagttatcagctttgttaaacaaggactaaaagacttgtccatttcacgtacgagct

SEQ ID NO: 296314 - DNA, 802 bp, Unknown
  Bacterial polypeptide expressing nucleotide sequence isolated from the Sargasso Sea
ttaaaaatacaaagaacagctagtgataagggtattgaaccaaagtcacattgtgatgaaatctcagaaatcttcaatattaattggaaaaattgggatatatcctttgataaatttataaggacaagctcagaaaagcatgaatttgttgttaatgaattttatgaaagagtaaaagcatcagatgatatctatatgggagttcaaaaaggttggtattgtgtcggttgtgaagaatttaaagataatccagaaaactcatcaacatatcagtgtcccatacatcaaaaaaatctagaatggaaaaatgaagagaatctcttttttaggctttctaaatatcaaaaagaaattgagaaaataatcaacgaaccttcttttatagagccaatagaaagaaagaatgaaattttaaattttgtttctagaggtttaaaggatttttcaatttcaagaacaaatgtctcatggggaattcctgtccctggttacgataaccataccttttatgtatggtttgatgctttacttggatatgtaagtgccattagttctgatgcgaaagataattcattggaaaaatcaattaatggaggttggccagctgatgttcatttaattggtaaagatatactgaggttccatgctgtatattggcctgcaatgcttatttctgctcatatgaaaatccctaaaaaagtttttggacatgggtttcttacaagagaggggcaaaaaatgggtaaaagcttgggaaatgtactcgaccctgacttattgctttcaaaatatggaaattgat

SEQ ID NO: 296315 - DNA, 880 bp, Unknown
  Bacterial polypeptide expressing nucleotide sequence isolated from the Sargasso Sea
gatgagtttgaagattttataagagattggattacaaaagaacataaagatgattggaaacctaatgttttaggtcaggtcaaatcatggcttgataatggtttaaaacctagagcggttacaagagatttagattgggggattcctattaaaattgatggagaagaaggtaaagttctttatgtgtggtttgaagcccctattggatatatatctgcaacaaaagaatgggcagaaaaaaacaataaaaattggaataaatattggaaagataaagacaccaaactagttcactttattggtaaagacaatattgtcttccattgtataatttttccaataatattaagaatgacaggagatcatattcttccatttaatgtgcctgcaaatgaatttttaaatcttgagggaaataaaatttctacttctaggaactgggcagtatggcttcatgagtatctgaaagattttccagatatgcaagatgttttaagatatgtattaacagtaaatgctcctgaaacaaaagataatgactttacctggaaagaattccaaatgagaaataatagtgaattagttgctatctatggaaactttataaatagagtgcttacactaattataaaatactataatgggatattacctaatcctgaaagtattgatgaagaaaatcaaaaaattattaatgaagctaaaaccttcccaaaattaattggcaatttcttagacgaattcaaattcagggaagctataaagtcacttatgaaccttgcaagaaatggtaataaatttctagctgagagtgaaccgtggaaactacaaaagtctaatcctgaaaaggttaaagaaattttatatgtaggatatatta

SEQ ID NO: 296316 - DNA, 910 bp, Unknown
  Bacterial polypeptide expressing nucleotide sequence isolated from the Sargasso Sea
atttgggtaagaaaccttaaccttaattctcatcaagcttattacttttgtgctagtgatactcatggaacaccagtcatgctgaaagcgaaagaattaagcattaaacctgaagatcttgtaaataagatgaagatagagcatcagaaaaccttcgaggacttcaatataaatctaacaaatttccatactactcatagtaaagagagtgaagaacttaccctaaatattttcaataagctaagcaaaaacaagaagatttatacaaaagatattattcagttatttgatgaaaaggaaaatatatttctttcagatagatttgtaaaaggaacatgtcctgcatgtggggcagctgatcaatatggtgatgcgtgtgaggtctgtggtaaaacatatgatgccttagatttgatagatcccgtctcaacattatcaaacactacacctatacaaaaaaagtcatctcattattttttttctttatctgaatttaaagatttcttaaaaataagagtaagtgaactatcagatcaaaaacctgtcatccataaaattaatgaatggctagaggatgatttaaaagattgggatgtttcacgggatgaaccttacttcggttttaagattcctggagaagaaagtaaatttatttatgtttggttagatgcgcctgtcggttattttgcatcaattaaaaactggtgtgatcaaaacaatcacaaatatgaagatttcttagataaagattcaaaattggtacattttatagggaaagatataatgtattttcaccttcttttttggccttcaactcttcatgcagctcaagtaaaacaacccgataaagtttttgtccatggctttatgactatcgagggcaataaaatgtcaaaatcccgtgggaact

SEQ ID NO: 296317 - DNA, 436 bp, Unknown
  Bacterial polypeptide expressing nucleotide sequence isolated from the Sargasso Sea
catgtcagataaaactttttatataactaccccgatatattatccttctggcaagcctcacatgggtcatgcatatacaggtatcatatcagatgtatttgccagatttaaaagactagatgattgtcgtgttttatttcttacaggtactgacgaacacggacttaaaatgcaacgtgaagccaaaaaaaaatcaaaagaagttaaattgttttgtgatgaactttcaagtaaatttaaaaatcttactaaaatattaaatttatcaaatgatgatttcattcgtacaacagaaaaaagacattttaaagctgttgaagaaatttggaagagattaattgactcaaaggatatttatctttccaaatataaaggttggtattcagtttctgatgaagcttattatgatgatgatgaaattgaaaataaaaataat

SEQ ID NO: 296318 - DNA, 563 bp, Unknown
  Bacterial polypeptide expressing nucleotide sequence isolated from the Sargasso Sea
aatgaataaaaatttttatattactactccaatttattatccatcaggtaaaccacatatgggtcatgcatattcaagtataatagctgatatttttgcacgttttaaaagaatagaaggttataatgttctatttttgactggcacagatgaacatggtcaaaaaattcaaaaagaggcagaaaaaaacaacaaagatcctaaaatattttgtgatgaattgtcagataaatttagatcactaactaaaattttaaatttaacaaatgatgattttataagaacctcagaaaaaagacattctaaatctgttaatgaattatggaaaaaattggttaaatcaggtgacatttatttagataaatacagtggttggtattcagtttctgatgaggccttttatgatgaagatgagattgaggtaaaagagggtaaaaaaatttcaaaaagctcaggatcattagtagagtgggtggaagaagagtcatatttttttaaattatcgtcatggactaaaaaacttttagagcactacaaaaataataaagaatttatacttcctg

SEQ ID NO: 296319 - DNA, 138 bp, Unknown
  Bacterial polypeptide expressing nucleotide sequence isolated from the Sargasso Sea
aatgagaagaataatagttacaagcgcactgccttatgctaatggttctatccatttaggccaccttgttgaatacttacaaacagatatctgggtgagaagtcagaagatggcaggtaatgattgtgtctatatctg

SEQ ID NO: 296320 - DNA, 784 bp, Unknown
  Bacterial polypeptide expressing nucleotide sequence isolated from the Sargasso Sea
aaacagcaggacatcgcaaaactatatgaaaatttagattacagtaaagcagttcgcttgattatggcttcagccgacttggccaacaaatttatcaatgaaaaacagccttgggttattgccaaggacaacccccaatcagaagagttgcaggcaatttgctcaaccggcattaatgcattcagactacttattatttatattaaaccagtcttgcccgctttagcggttaaagcagaatcatttttaaaaattgatccactaaattggaaggatcttaattatattctaacaaaccataaaatctctaaattcaatgcgatggttcaacgaatcgaacccgacaaggtaaatttgatggtcgatgaaacaaaacacggttcagaatccaaaccaagcgttaaagaggaagccaaagagcctgaaggtacttttgagccagaaatctcggtggatgacttttttaagatcgatctccggatcgcgaaaattatttcagcatctgaaattgaagacgccgacaagctactcaaattgcagctggatttaggtaaagatgaaaaaggtaaccaaatccaccgtacagtattttcaggaatcaaatcagcctacaagccggaagaaatgataggtatgctgacagtagtggtcgcgaacttacggccgcgtaaaatgaagttcggcatttcagaaggtatgatcttggcagcggggccaggcggtaaagatatttggcttattgagccacactctggcgcaagccccggtatgcgagtcacttgaa

SEQ ID NO: 296321 - DNA, 552 bp, Unknown
  Bacterial polypeptide expressing nucleotide sequence isolated from the Sargasso Sea
aatggataaaacttattatattaccacgcctatttactacccatcagctaagcctcatatgggtcatgcatactcaagtatcgtcgcagatttttttgcaagatttaaaataattgataattatcaggttcattttcttacaggtacagacgagcatggattaaaaattcaaagatctgctgaaaaagcagggaaagagcctctagtattttgtgatcaaattagtcaaacctttagagatctttcggatactttgaatttatcaaatactgattttattagaactacagaagctagacataaaaaaacagttcagcatctttggaatgaacttgagaaaaatgatgatatatatttatcaaactattcaggatggtattcagtatcagatgaagccttttataacgaggatgaaattgaggaattagatggaaaaaaaattgctatatcatcaaaatctcctgttgaatggattgaagaagagtcttatttttttagactttcaaagtgggaaaaacctttattagactattataaatctaatccagattt

SEQ ID NO: 296322 - DNA, 502 bp, Unknown
  Bacterial polypeptide expressing nucleotide sequence isolated from the Sargasso Sea
aatgagtaaaaatttttacataacaacacctatttattatccatctgcaaaaccacatatgggacacgcctactcgagtattattgccgatttttttgctcgtattaaaaaaattcaagggtacaaggttttttttttaacaggtactgatgaacatggtttgaaaattcaacgagctgctgaaaaaaatggaatgaagccaattgatttctgtgataaaattagtgtcacattcagaaaattatcaaaaattttaaatttatcaaataacgattttataagaacaaccgaggaaagacattttaggtctgttcagaaattatggaatattcttgagaaaaaaaacgaaatttatttatctaagtattcaggctggtactccgtgtctgatgaggcattttattcgaatgaagaagttgagagtattgaaggtgttaaaatagccaaatcctcaaattctccagttgaatgggtagaggaagagtcttacttctttaaactt

SEQ ID NO: 296323 - DNA, 775 bp, Unknown
  Bacterial polypeptide expressing nucleotide sequence isolated from the Sargasso Sea
gaaaaaaatcttttttcattaattaaatcagaacagtttttcgatgttaatgagaatcaatttttggctgatagatatatctctggtacttgtcctgtttgtggttttgatgaagcgtatggagatcaatgtgaaaagtgtggatcaactctgagtcctgaggaattaataaatcctaaatcaacaatctctaattcatctccaattcttaaagagaccaaacactattatatcaaacttgatgaatttgaggaatttattagaaactggataacggtggaaaataaagataaatggaagacaaatgttgttgggcaggttaagtcatggttagatagtgggttaaaaccaagggcagttacaagagacttggattggggtatacctgtaaaaatagatgatgaagatggaaaggtattatatgtttggtttgaggcacctattggatatatctcatctacaattgaatgggctaatgcaaatgacaaagattggcagcaatattggaaaaatccagaaactaatcttattcactttattggtaaagacaatattgtttttcattgtataatttttccaattatgcttcgaatgtttggtgattttattctacccaaaaatgttccagcaaatgaattcctaaatcttgaaggcaataagatttcaacttctaaaaactgggcagtttggcttcatgaatatttaattgattttccaaacatgcaagatgtattaagatatgtattaacatctacatgtcctgaaacaaaagaca

SEQ ID NO: 296324 - DNA, 478 bp, Unknown
  Bacterial polypeptide expressing nucleotide sequence isolated from the Sargasso Sea
atgttagatattgatgacctcaaaatagaaaatcttgaaaatgaattagttgatactaaaataggtgattttcagccaatcctctcaagagttaaacccttaaatattcaagatttttataaaaaggaagaagaaatgaaagaagataatgttattcaaatagatgattttatgaaagttgatctaagagttgcgcaggttgaggaggcctctcatgttgaaggtgcagataaactccttgccattaaattaaacctaggtgagcttggtacaaaaaatgtatttgctggaataaaatcagcttatgaaccttctgatttaaaaggaaaattagttgtaatggtttacaacttagctcccagaaaaatgaaatttggattatctgaaggcatgattctagctgcaagtgattccgaaggtggtatctttgtattgtcgccagattcaggcgctcaaccaggacaaaggattaaatgaa

SEQ ID NO: 296325 - DNA, 765 bp, Unknown
  Bacterial polypeptide expressing nucleotide sequence isolated from the Sargasso Sea
tgcgtatacaactattttagcagatgtgttatctcgatatcaaaagcaagctggtaataaaccatttttccttactgggttagatgaacatggacaaaaagtacaagatgcggctaaagatagagggattgaaacacaaaatcattgtgatgaaatgtccaagagatttatatccttatgggaaagattacacatatcaaacgatgattttattagaacaactgagattagacacaagaatgtagtaagagaaatactaaaaacagttttcgatgctggcgacatttacgaggatgaatatcaaggtctttattcagtctctgaagagcggtttattacggaaaaagaagctgatactggacaatttcgcgatataaaaacattaaaagaaaaaaactacttttttagaatgagcaaatatcaggataggctaataaatcatatagaagctaatcctagctttattcagccagatcatagaaaaaatgaaatacttggatttttaaatcaacccttaaatgatttatgtatttcaagaccaaagtcaagattaaactgggggattgaattaccttttgattcagattacgttacttatgtttggtttgatgccttaattaattatatcactgctcctggatatttagatgataaaagcttatttaaaaaattttggccagcagatatacatctaattggtaaggacatactaactacgcatgctgtttattggcctactatgcttatgtctgcaggcattaagct

SEQ ID NO: 296326 - DNA, 331 bp, Unknown
  Bacterial polypeptide expressing nucleotide sequence isolated from the Sargasso Sea
atgaaaaaaaataatttttatattactacacccatatattacccttcaggatcccctcatatgggtcatgcctattcaagtattcttgcagatatttttgcaagatttaatcgtttaaacggaaataaagttcattttttgacaggtactgatgagcatggtctcaaaattcaaaaagcagctaataaaaataagctagatccaaaaacttactgcgataaaatttctaaaatatttaaagatcttacggtaaaactcaatttatctaacgatgattttattagaacaacagaaaaaagacattatgattcagttaatgatcttggaatag

SEQ ID NO: 296327 - DNA, 596 bp, Unknown
  Bacterial polypeptide expressing nucleotide sequence isolated from the Sargasso Sea
aatgaataaaaatttttatataactacaccaatttattatccatcgggtaaaccacatatgggccatgcatattcaagtatagttgcagatatctttgcaaggtttaaaagaattgaaggttttaatgttttatttctgacaggaacagatgaacatggtcaaaaaatacaaaaagaagctgagaaaaataagaaagagccaaaattattttgtgatgaaatatctgaaaccttcagatcacttactaaaacattaaatttaacaaataatgattttattagaacaactgaaccaagacactttaaatcagtaaacgaaatatggaaaagattagtaaattctggtgatatttatttagataaatatagtggttggtattcagtgtccgatgaagcctattatgatgaagatgaaattgaggaaaaagacggaataaaaacttcaaaaatttcggggtcatcagtagaatgggtagaggaagagtcttatttttttaaattatctgcatggcaaaaaaaattattaaattattttgaaaaaaataaagaatttatccttcctccatcaagaagaaatgaagtaataagatttgtag

SEQ ID NO: 296328 - DNA, 842 bp, Unknown
  Bacterial polypeptide expressing nucleotide sequence isolated from the Sargasso Sea
ggttgaggaaccatcgtattttttcaatctttcggcttggcaggacaagctactggcgttttatgacgaaaatccccacttcgtagggccggaaagccgtttcaacgaggtgaagagctttgtaagaagcgggcttcgtgatttgtcggttagccgagccagtttcaaatggggtattcccgttccaagtgatgataaccatgtgatgtacgtatggcttgacgcactaacaaactatttgacggcggccggttggccagaggatgggccagcaggtgatatggaaaaatattcacgggtgtggcctgctgatttacacatggtaggaaaggacatattgcgatttcatgcagtttattggccagcgtttcttatggcagctgacctaccattaccaaaacgcgtttatgcgcatggctggtggacaaatgatgggcaaaaaatttcgaaatctctgggtaatacaattgatccaaaccagcttgctgcaacctacggtcttgatcaaacgcgttattttttgatgcgtgaggtaccgtttgggaacgacggtgatttttcggttcaggcaattacgcagcggataaatggtgacctcgctaatgaccttggtaatttatcacagcgtgtgctttcgatggttttcaagaattgtgatggcattatgccagcaagaccggaaccattacaattagaagataaagaacttctggagagagttgattcactattaatagatgttcgtcgacatattgataatcaggcgttccatgaagcattacgaataatctggcaggttatttcacaagccaaccgatatgttgacgctgttgccccatggg

SEQ ID NO: 296329 - DNA, 727 bp, Unknown
  Bacterial polypeptide expressing nucleotide sequence isolated from the Sargasso Sea
atggataaaaattattatataactactccaatttactatccgtcagcaaagcctcatatgggacatgcttactcaagtattattgcagatttttttgcgagatttaaaagaattgatggatttaatgtttactttcttacaggtactgatgaacatggacttaaaattcaaagagcagctgaaaaaaaaggtcttcaaactttagaattttgtaatcaaataagtaagacttttaaagatttatctttaacattaaatttaaccaatactgattttattagaacgacagaagatcgtcataaaaaatctgttcaatttatttggagtcaacttgaaaaaaacaacgatatttatttatctaaatattctggatggtattcagtttctgatgaagctttttataatgatgatgaagtagagaagattgatggaaaaaattttgctatttcgtccaaatcatctgttgagtgggttgatgaagaatcatatttttttaaattatcaaagtgggaaaaacctttgttgaaattttataaagataatccagattttattgcaccagagtctagaaaaaatgaagttgtaagttttgtaaaaagtggattaaaagatttatcgataagtagaaaaagttttacatggggtattaaagttccaaataatgataatcatgtaatttatgtttggttagatgcattaactaactacttaagtgctttgaattatc

SEQ ID NO: 296330 - DNA, 187 bp, Unknown
  Bacterial polypeptide expressing nucleotide sequence isolated from the Sargasso Sea
aatgagaagaatagtcgttacaagcgccctaccttatgccaatgggtctatccatataggtcatcttgtagagtatatccaaacagatatttgggctaggagccaaaaaatgactggaaatgagtgtgtgtatatctgcgcagacgattctcatggaactccgattatgctcaaagccaaaaaactt

SEQ ID NO: 296331 - DNA, 587 bp, Unknown
  Bacterial polypeptide expressing nucleotide sequence isolated from the Sargasso Sea
aatggataaaaattattacataacaactccaatttattatccttctgcaaggccacacatggggcatgcttattctagtattgtcgcagatttttttgcacgttttaaaagaattgaagggtataaagttttttttttaacaggaacagatgagcatgggcaaaaaatacaaagagctgctgaaaaaattggtaaagatcctttaatattttgtgatgagatcagtaaaacatttaaagatttatctataaaacttaacctatcaaataatgattttataagaactactgaaaaaagacattttgactctgtaactgaactctggaatattttagaaaagaaaaaagaaatttatttatcaaaatactctggttggtactcagtttctgatgaagctttttattctgaagatgaaatagaaactaataatgagaaaaaaatttcaaaaatttctggctctgaagttgagtgggttgaggaggagtcttatttttttaaactatcaaaatggcaagaacctttattaaaattttactctgaaaatccaaaatttattttaccagaaagcagaaaaaatgaagttataa

SEQ ID NO: 296332 - DNA, 883 bp, Unknown
  Bacterial polypeptide expressing nucleotide sequence isolated from the Sargasso Sea
tttttactttgccagcaagttaaatgcaaagatagatgacatagatcttgatctaaaagattttgtaaaaaaaattaattcatcgttggtaggtaaattatttaacattgcaagtagattggatggttttctaagtaaaagcagctatcaaacttcaaaaaatatagatgatgcttttttagatgagtgttcttatgaatatgaattaataagaaaagatttaaacaataaggatttttcaaaagcagtgagtagaattttaaaagttgccgatgatacgaatagctacatcaataataaaacaccttggaagctaaatgatgacgatgctctagaagttgcaactactggcatatctatttataaagatttatgtatattaatgatgccaatcatgcctagccttgcatctaaagcacttgcacaattaaagataaagaatccatcatttgatgatcttgataatgaattaactaatgaagagattaatgcttataatccattactaaatcgattggaagataaagatctcttaacaccttcaaaggaaatgaagatgactgaaattgataataatgaaataactattgatgattttgcaaagattgaccttagggtagctgaagttattgaagcgaatcatattgatggtgctgacaaactaatccaattaacacttgatgttggtgaactaggacaaagaaatgtctttgcaggaattaaatcaatgtactctcctgaagaccttcagggaaaatttgtagctttggttgcaaacctaaaaccaagaaaaatgaaatttggtacatctgagggtatggtccttgctgcctcgaatgatgaaggtggaatttttattatgagccctgcttcaggtgcaaaa

SEQ ID NO: 296333 - DNA, 805 bp, Unknown
  Bacterial polypeptide expressing nucleotide sequence isolated from the Sargasso Sea
tttgatgatttcatgacacgcgtaaattctgacttagttggcaagataattaatatcggaagtcgctgtgcaaaattcatcaataaagattttaataatcagctatctaaagatgttggaaataaatccttactagattccatgctatctaaaaaagatgaaatcatctctaattatgaattaagaaacttcgcaacgaatatcagagtgattacaagtttaagtgatgaagtaaacaaatatcttgatgaggaaaaaccatggattaaaattaaaaatcaagatactaaagagtcagtacaaaccatttgtacagatggtattaatgcatttcgtataatcataacttatctaaaaccagtccttccagagattgcgagtaaagttgaatcaatgcttattactgattcgctcagctatcaaaatataagcgatatgattttagaccataaaattaatacatttgaaccattgataactagaattaatagagagagtatagagaaaatgaaagatgaaaacaaacaagaagatgctgtaactgaagataccaataaaatcaccattgatgattttataaaagttgatttacgtgttgcgaaagtcacaaatgtaaaagaaattgaagattcacgaaaactactggaacttgaactggatctaggtgacgagactaggacggtttttgcaggtataaaaaagtcctatagtccagatgaattaattggaaaatcagttgtcgttattgctaatttgaaaccaagaaaaatgaaattcggtgtatcaaatggaatggtattagcaa

SEQ ID NO: 296334 - DNA, 505 bp, Unknown
  Bacterial polypeptide expressing nucleotide sequence isolated from the Sargasso Sea
tgaatctattctaacaaaccatgcaatcggtaagtttgaatcattacttcatcgaatcgagtctgacaaggtacaaactatgatcgaagaaaccaaaaaggtattccaatcaaaggaagaggtaaagggtaaaaccgataagctcaaagatacgtttgagccagaaatcatggtggatgacttctttaaaattgatctgagaatagcaagaattatttccgcgactcaagttgagggagcagataaattactcaaattaacattagaattaggacaagatgaagagggcgagaccatccagcgcacggtgttttctggaatcaaatctgcttatgaaccagaaaaaatcataggaatgctaactatagtcgttgcaaatctcagaccccgtaaaatgaaatttggtttgtctgaaggaatgatcttggcagctggaccaggaggaaaggatatttggcttatcgagccgcatgcaggcgcacggccaggtatgcgagtaacttga

SEQ ID NO: 296335 - DNA, 183 bp, Unknown
  Bacterial polypeptide expressing nucleotide sequence isolated from the Sargasso Sea
catggaaaagtattatataactacacctatttattatgtgaacgataagccacatattggccatgcatatacaacaatacttgcagatacaatttcaagatttcgggctttaattggggaaaaaccaacttttttaactggattagatgagcatggtttaaaagtccagcaagcagcaaaaaa

SEQ ID NO: 296336 - DNA, 810 bp, Unknown
  Bacterial polypeptide expressing nucleotide sequence isolated from the Sargasso Sea
tttataaaaccaaagtctagatataatgaagttatcaaatttgtagaagcaggattacaggatttatctatctctagaacaagtttttcatggggtattaatgtccctagatcttctgaccatataatttatgtttggctagacgcattatttaattacattagtgttttaagaacagaaaaagataactttaaaaaatactggcctgctgatgcacatatagttggaaaagatatattgaagtttcatgctatattttggccagcatttctattatctgcaaatttaaagctaccaaagaaaatttttgcacatggatggtggacaataaatggagaaaagatgtcaaagtctttaggcaatgtaatagatcctatttatctggcaaaaaagtatggcattgatcaaataagatattttttattaagagaaataccgtttggtgaagacggtaacttttctgaattatctttaataaaaagattaaatagtgacttaactaatgatttaggtaatttagtacaaagagttttgagtatgataattaaatataatgatggtgtaattttaaaaagaaactctatggataaagatgataataaattattaaatttacctgaagaaatatttttaaaatactgcaaattaatggataattttgagtttagtaacgctcttataatgatatgggacattataagaaaagcaaactcatatgttgatcataaagctccgtggaaactttttaaagaagacaaggatcaattatctacaactttaaatgtattaataaactctatatataaaatt

SEQ ID NO: 296337 - DNA, 812 bp, Unknown
  Bacterial polypeptide expressing nucleotide sequence isolated from the Sargasso Sea
aacacaaaagcattactcgatctaggttgttcttgggagcctaatatcgatcctagaggagtagaatatggtggttctctattcaaccgtactagcgatccagaacatcacgaatttgttaaacaaaatttcctttctttgttaaatgcagggttgtttgagaaaaaaacaatgcagcagtattacgaattaagggccgatggtggcagattcctacctgacaggtatgtagaaggtgaatgtccaaattgtggcgaggatggtgctagaggagatcaatgcgaccagtgtggagttacttacgagtctcatgaattgaaaaatccccgatcaaaaatgaatcctgattctgagatagaaattagagatactgaacaccttttctatcgcttggatttatttcaatcggtattggaagaacatgcttcacaaagacaaggcgtttggaaatccaatgtccgtgcaatgacaaaacaatggctcgacatgggtctaaggccgcgtgcggttactcgagacctccaatggggaattcccttgccattagatggaaaagaatgggaaggaaagtgcatctatgtatggtttgaagcggttcagggatactattcatgtgcaagattatgggcacagaggcatggtggtgctgaatcagattgggaaaaatggtggaagatttctgccgatgggacaaagcctcgtcatttatacttccttggcaaagacaacattccattccatactgtaatttggcctgctctaataatggggctaaatcatgcttctaaagggctcaatgctgatgatatcac

SEQ ID NO: 296338 - DNA, 327 bp, Unknown
  Bacterial polypeptide expressing nucleotide sequence isolated from the Sargasso Sea
tatgtctaagaaaaacttttacataacaactccaatttattatccatctggaaaaccacacatgggtcatgcgtattcaagcattgttgctgatatttttgcccgctttaaacgtatagatgattataatgtaatgtttttaacaggcactgacgaacacggcctgaaaatgcaaagagaagcgaaaaaaaaatctaaagatacaaagttattttgtgatgaactttcatcaaaatttagagatttaacaaaaatattaaacttgtctaatgatgattttattcgaacaacagaaaaaagacattacacctctgttatagatatatg

SEQ ID NO: 296339 - DNA, 307 bp, Unknown
  Bacterial polypeptide expressing nucleotide sequence isolated from the Sargasso Sea
gatggataaaaatttttatataacgacaccaatatattatccatctgcaaaaccacacatgggtcatgcttattctagtattgctgcggatttttttgctaggtttaaacgtttacagggttttaatgttttttttttaactggcacagatgaacatggtcaaaaaattcaacgtgccgcaaaggaaaataataaagaaccacaggttttttgtgatgaaattagcaaaactttttttaatttgtcaaaaaccctcaacttgtctaatgatgattttattcgaactacagaaaaacggcacaaatct

SEQ ID NO: 296340 - DNA, 658 bp, Unknown
  Bacterial polypeptide expressing nucleotide sequence isolated from the Sargasso Sea
aatggacaattctaagaaaactaaaagaaaaatactggttacacaagcattgccatatgcaaacgctccacttcatttggggcatattcttgaagctgtccaaactgatatatgggctagatttcataaccttaataataacgaatgtttgtttttttgtgcagatgatactcatggaacaccggtcatgttaaaggcaaatgaaatgggagttaaaccagaagaattaattgcaaatgtatataaagatcacaaatctacatataaactttatgatataaattttgcaaatttttactcaacacatagtgatgaaaataagaaattctctgaatatatatacgaatgtgcgaaaaataataacttaatatcaaaattatcaatcgaacaatattacgatgaaaaagaaaagatatttttatctgatagatacataaagggaacatgcccaaagtgtggtgcagaagatcaacatggagacaattgtggagtatgtggagcttcatatgatgtattggacgttaaaaatcctgtttcaattttatctaattcaacttcaattaaaaaaaagagtgatcatatattttttgatcttcctcaaaaaaataaaatgcttaaagattttttaaataaagtagatctacaagagtctataaaa

SEQ ID NO: 296341 - DNA, 586 bp, Unknown
  Bacterial polypeptide expressing nucleotide sequence isolated from the Sargasso Sea
aatgaataaaaaagcaataatcacaagcgctctgccatattccaatggtgagatacatctgggtcatgttgcatctacatatctccctgcggatgttaccactcgtttcttaaaacaaaatggtgttgaagcatattacgtatgtgcatctgatgattatggaactccaattttaatacaatctgaaaaattaaaacaaactccacaagaatatgttgcacattggaataaacgtgattttgaagattttaccgcttttgatataggatttgactttttttataaaacaagttcagaagaaaatatctcatttgtccaagatgtctttaaaaaaattgaaaaaaatggacatatctacgaaaaagaaatcatccaagctttttgcacttcttgtgacaaatttcttccagaccgatttgtaaagggaacttgcccattttgtgatgctgaagatcaatattctgatttatgtgaaaaatgtgggcgtattcctgaagaaattgaaaatcctcattgttcaatatgtggtgaaacacctgtacaaaaatcaaccaatcactatttctttaaactgaaaaatttctct

SEQ ID NO: 296342 - DNA, 902 bp, Unknown
  Bacterial polypeptide expressing nucleotide sequence isolated from the Sargasso Sea
gggtataaaagtaccagaggataacaatcatgtaatatatgtctggttagatgcattaacaaattacataagtgcacttaattatcctaataaaaaagaaaaattattcaaacaattctggcctgcatcacttcatttgatagggaaagatattttaagatttcatgcgatttattggccagcatttcttttagcggcaaaaattgaattacctaaaaaagtttatggtcatggttggattctttcggatgatgaaaaaatgtctaaatcaaaaggaaacattttagatcctttagaaataattgatcaatatggtttagatcctttaagatattatttaataaaagaagtttcttttggaaatgatggaaatatatctcaagatcgtttggaaaattgtataaatagtgacttagcaaataattttggaaatttgtgccaaagagtaactgcttttacaattaaaaactgtgatagtaaaattcccactgaaattgaatttagaaaagatgatttaaatattttagataaatataaaaatagtattgatgaaataaggaataagattgataaacaagatctaaattattatatagaatatattgtgaattccctctttgaagctaataaatattttaacgaccaggaaccgtggaaaaaaaaaaatgataaaaaaagattaaatacaatcgtttttactactttagaaatagtaagaaaaataagttttatgttatatccagttattcctgagacatcattaaaagcactagctatatttaatattaaagaagatcaaattgaattctccagtattgctgataataatttcttaaaaaaaggaaatagtataaaatctataggtttattatttaaaaaaatagaaaaaaaaaatgattgat

SEQ ID NO: 296343 - DNA, 957 bp, Unknown
  Bacterial polypeptide expressing nucleotide sequence isolated from the Sargasso Sea
tactatgtatgtgcatctgatgactttgaaactcctattctaatacaatctgaaaaattagatcaaacacctgaggaatatgttgcccattggaataagcgtgattatgaagatttttcagcatttgacattggatttgattacttttacaaaactagctcttcagaaaacatttcttttgtacaacaagtatttgaaaaactacaaaaaaatggacatatctatgaaaaagaaatcatacaatttttctgtgaaaatgatcaaaaatttcttcctgatagatttgtaaaaggaacttgtccttattgtgatgcagaagatcaatattctgatttatgtgaaaaatgtggtcgagttcctgaagaaatttctaatcctcattgttctatttgtggccaaagtcctgttaaaaaatcgaccaatcactatttctttaaactaaaaaacttctctgaacctctccttgattatcttacaaatgcaccacatcttcaaaaagatgtcaaaaaatatgttgaaaattggattaaagaaggtcttgtggattgggatattacacgtgatatttcttggggagttcctattccaattgaaggtctaaaggacaaagtattctatggttggtttgacaatcatcttgcttacatatcgtccactttgaaattcttagaagacaaaaacattgatggaaaaaacttttggaatgatgcagatatttatcatttcattggcaaagacattgtctatcaccattacttgtttttacctgcaatgagattaggtattgataaagaattcaagttacctgattacattccaactcgtggtcatctcactcttgaaggaaagaaaatctcaaaaagcaggaactggtatattggactaaaagatttcctagaaactttccctgcagattatcttagattctatcttatttctatcaatccttattctcaa

SEQ ID NO: 296344 - DNA, 790 bp, Unknown
  Bacterial polypeptide expressing nucleotide sequence isolated from the Sargasso Sea
gatgcgacagaaccaatcattggaaaaatcaattaatggaggatggccagctgatgttcatttaattggtaaggatattctgagattccatgctgtatattggcctgcaatgctcatttctgccaagatgaaagttcctaaaaaggtttttgggcacggatttcttacaagagagggccaaaaaatgggtaaaagcttaggaaatgtactcgaccctgatttattgctgacaaaatatggaaatgatcctgtaaggtggtacctcattaaagacatatctctaggaaatgatggagattttcaagataaaagatttgttgacatcatcaataatgacttagctaatacaattggtaatttattaaatagaacatcatctatgtctagaaaatggtttgataataaagtgcctaataatgaaaaaattttaagtgaaaataaattagagaattttgccaaaattgcagttaataaatatatttataactttgataactacaaattagatttagcagctaatgaagtacttagcctagcaattaatacaaatttgtatttaaatgataatcagccatgggtgctaataaaagagaaagataatctacctctagttaaagaaattatttataacgttttagaaagtacacgaataataggattattattactacctttattgcccgaattatctacaaaaataatgaaacacttggctctatatacagagaagaaattccttggaaaaaacattaatttgggggattatagtttagcactcaagtcttcctaa

SEQ ID NO: 296345 - DNA, 788 bp, Unknown
  Bacterial polypeptide expressing nucleotide sequence isolated from the Sargasso Sea
acacgggcaaaaagttcaagaagcagcagaacaaaaagatattgatgctcaaaaacactgtgatgagatggccccaaggttcgttaagctttgggaaaaactatatatttcgaatgatgatttcattcgtaccactgaagagaggcataaacgaatcgtacagtatattttacaaagagttatggataatggggatatttatgaagctgaatatgagggactttattctgtttctgaggagagatttattacagaaaaagaagcagagtccggagagttcagagacataaaacaattaaaggaaaaaaattacttctttaagatgagtaaatatcaagatcaattgatagatcacattcaatcaaatccaaaattcatccaaccagaacacagaaaaaatgaaattttaggctttcttcggaagccactaaatgatttgtgcatttcaaggcctaaatcaagattggcttggggtattgagctcccttttgataaagattatgtaacctatgtttggtttgatgcgcttattaactaccttaccgccgctggttttaatcaatcgagtgaaaactttaaaaaaaggtggcctgcatcctgtcatttaataggtaaagacatactaacaacacacgcagtctattggcccacaatgctcttttctgctggggtctcattgccattatccatctttgcacatggttggtggcttactggggaatcaaaaatgagtaaatcgcttgggaatgtcattaacccgatggatctcattaaagattatggggttg

SEQ ID NO: 296346 - DNA, 565 bp, Unknown
  Bacterial polypeptide expressing nucleotide sequence isolated from the Sargasso Sea
atggataaaactttttatattactactcccatatactatccatcagcaaaacctcacatgggtcacgcatattcaagtattattgctgatttttttgctaggtttaaattaattgatgattatgatgtttattttcttacaggtactgatgagcatggattaaaaatacaaagatctgcagaaaatgtaggtaaagagcctaaaatattttgtgatcaaataagtcaaacatttagagatcttactgatactttaaatttatcaaatactgacttcattagaactacagaagatagacataaaaaaacagttcaacatctttggaaagaacttgaaaaaaacgatgatatttatttatcaaattattctggttggtattcagtgtctgatgaggctttttataacgaagatgaaatagaagaagttgatggaaaaaaaattgctatatcttcaaaatcttctgtagagtggattgaagaggaatcttatttttttaggctttcaaaatggcaaaaaccattattagaatattataaggctaatccaaatttttctctccagactc

SEQ ID NO: 296347 - DNA, 596 bp, Unknown
  Bacterial polypeptide expressing nucleotide sequence isolated from the Sargasso Sea
aatgaaaaaaagtaaagaaacttttacaattacagctgccttaccatatgcaaacggacctattcatattgggcatttagcaggtgtttatatacctgccgacatctatgcaagatataagagactgactaaaaatgatgttgcatttatatgtggaagtgatgaacatggagttgccatatctttagcctcaaaaaaggcctcaataagccctaaagagttaattgataaatatgataaaattattaaatcttcattccaaaaatttggtatttcatttgataattattctagaacttcaaagaaagttcatcatgaaacatcaatagatttatttaatttattaaaagaaaaagatctattttcattaatagaatctgagcaattttttgatataaatgaaaatcaattcttagctgacagatacataataggtgattgtcctgtatgtaaatctgagggagcttatggcgaccaatgtgaaaaatgtggctcagcattaagtccagaagaattaaagaatcccaaatctacaatatccgattctactcctattttaaaaaaaacaaaacactattatataaaacttaatgaat

SEQ ID NO: 296348 - DNA, 741 bp, Unknown
  Bacterial polypeptide expressing nucleotide sequence isolated from the Sargasso Sea
cttaagcgctctaaattacccagatcaaaataatgaattttataagaaattttggcctgccgatgttcacattattggaaaggatattttgagatttcatgcaatttattggccagcatttcttttagccgctggtattagcccacctaaaaaggtttatggtcatggctggatactttctggagatcaaaaaatgtctaagtcaaaaggcaatattctagatccactcgaaatgattcagaaatatggactagacccattaaggtattatttgcttaaagaagtatcatttggaaatgatggaaatatatctaatgaaaaattagaaagctgtataaatagtgatttggcaaacaattatggtaacttatgtcagcgggtaatttctttttgtgaaaagaacataggtttaaaaataccagattgccatgaattttcagaagaagatttagcaattttagacatttataaaaattctattgaagatttaaaaaaaaatattgataatcaaaatataaatttttacttaaattttattgtagatcaactttttaaagcgaataaatactttaatgatcaagaaccttggaaaaaaaaagaagacaaatcaagattaaatactatcgtttatgtttctttagaaatcatcagaaaaatttcaatactattatatcctataatacctgatacatcattaaaagcgcttaatatttttagtatcaaggaaaatgaaattaactt

SEQ ID NO: 296349 - DNA, 97 bp, Unknown
  Bacterial polypeptide expressing nucleotide sequence isolated from the Sargasso Sea
gatgaacaggacgttctacgttactacaccgatatattatgtgaatgctcacccacacataggccatgcatataccacggtcatggagacttctaag

SEQ ID NO: 296350 - DNA, 703 bp, Unknown
  Bacterial polypeptide expressing nucleotide sequence isolated from the Sargasso Sea
ttggtagcaatagtggaaagtaaaaaaagatataccattacgtctgcattgccatatacaaatggacgtttacatattggacatttagctggagcatatataccagctgatatctatgcaaggttcaaaagaatcactgataatgatgtagcttacatttgtggaagtgatgaacatggtgttgcaatttctattagagcaaaaaaagaaaataaaaccccaaaagaaattattgataaatatcatgcattaataaaaaaaagctttgatgattttggtatttctttcgacaattattcaagaacatcctccaaaatccatcatgaaacagcatctgaattttttaaatttcttaataaaaaaaattgttttgaaattaaaaaatccaaacaattgtatgacccagtagaaaatcaatttttggcagatagatttgttgagggggaatgccctcattgtggatttgaacatgcttacggcgatcaatgtgaaaattgtggaagctcattaagccctgaacaattaattaatcctatttcaaaaataagtggagcaaaaccagaagaaaaagaaactacacattggtacttaccattgggagaatatgaaaattttataaagaactggtttcttaaggataaaaaagattctgcaaaatcaaatgtatatgggcaagttaaatcatggattgatcaaggattgg

SEQ ID NO: 296351 - DNA, 166 bp, Unknown
  Bacterial polypeptide expressing nucleotide sequence isolated from the Sargasso Sea
atgaataatttttatatcactactccaatttattatgtcaatgatcgccctcacataggccatgcttatactagcattgcatgtgatatattagctagatattataaattaaaaaattttaatgtttattttttatcaggaacagatgagcatgtcaaaaagtgaa

SEQ ID NO: 296352 - DNA, 246 bp, Unknown
  Bacterial polypeptide expressing nucleotide sequence isolated from the Sargasso Sea
aatgagaagaataatagttacaagcgcactgccttatgctaatggttctatccatttaggccaccttgttgaatacttacaaacagatatctgggtgagaagtcagaagatggcaggtaatgattgtgtctatatctgtgctgatgattctcatggaacacctattatgctcaaagcaaaagaactcggtgtaacacctgaagaattgattaaaaatacttataatgaacacgtgaaagattttta

SEQ ID NO: 296353 - DNA, 911 bp, Unknown
  Bacterial polypeptide expressing nucleotide sequence isolated from the Sargasso Sea
aaataacttaccggctgatatattcgctaggtaccataggatggtaggaaataatgtattaatggtttctggtagtgaccagcatggaacaccagtaacaattagggcaagggaagaaaatactacaccaaaagaaatttctgaaaaataccacaatatttggagtgaaacttttaaggatttagatttctcttttgatctttacacaaaaactggaacagaaaaccataaggaagttgttcaaaaattatttaatttattaaatgaaaaaggatacttgcaagaaaaagtttcaaaacaaccatattctgaagaatctgaaatgtttttatcagatagatatattgaaggagactgtcctcattgcccatcaagaactaagggtgatcaatgtgatgattgcagcaaagactttgagcctattgacttaaaaaatttaatttcaactattgataatagtaaagttactttcaaagaaacaaatcacatatatttgaagctacctgaatttcaagaagatcttaataaatggataaaatctaaatcatattggaagccttcggtcaaaaatcaaagtttaggatttttatccaacggcttaatagatagggctataacaagagatatcgattggggagttaaggttcctttaaaaaattatgaaaaaaagagaatttatgtttggtttgaagctgtaattggatacttatcagcatctattgaatgggctaaaagtgataaaaatatatccaacaataaagatatatggaaagaatggtggcaaaacccagactctaaacatttttactttcaaggcaaggataatattccatttcacacaataatacttccagctatcttgatgggttctggtgaatataatttaccttatgatgtagtagcaaatgaat

SEQ ID NO: 296354 - DNA, 438 bp, Unknown
  Bacterial polypeptide expressing nucleotide sequence isolated from the Sargasso Sea
aatgaaaaataaattttatatcacaacacctatttattatccatctgctaaacctcacatgggtcatgcttattcaagtattgttgctgacttttttgcacgattcaaaagaatagataattatgatgttttttttttaactgggacagatgagcatggacaaaaaattgaaagagcttctaaagataataataaagataccttaaaattttgcgatgaaattagttctattttcaaagatttaacttttaagttaaacttatcaaataatgattttattaggacaacagaaaagagacactttgatgccgtagagcatctttggaatatacttgaaaaaaaaaattatatatatttatctaaatattctggatggtactcagtgtcagatgaagcattttattccgaagacgaaattgaagaaatcgataatattaa

SEQ ID NO: 296355 - DNA, 874 bp, Unknown
  Bacterial polypeptide expressing nucleotide sequence isolated from the Sargasso Sea
tgcaagatttatgcgtcttaatgattatgatgtaaggtttcaaacaggtacagatgagcatggtctcaaaatacagaaggctgccgaaagtaaaggaaaagaaccattagagttgtgtgacgaaaattcacgaatttttagagatcttacaactacattagatttgtcaaatgatgactttatcagaactactgaacaaaggcatattgacggtgcgtctttcttatggaacagactgtatgaaagaaatcaaatatatttaggagaatatacagggtggtattcaattaatgatgaaactttttacaatgaaaaagatttagtaaaacaaagtgatggaagctttaaaactgttacaggtgggcccgttgaatggattacagaaaagtcatatttttttaaattatctgaatggtctgataaattattagatctatacaaaaaataccctgattttataagtccaaaatctaaaagaaatgaggttattaaatttgttgagtctggcttaaatgacttatctgtatctagaacttcatttaactggggcattaagactccaacagataatgatcatattatgtatgtttggcttgatgctctaacttgttacgcaaatggtgttaaatatctaaccgactcaaaaaatgatctaagtgtctactggaacaatgtagttcatatagtaggcaaagatatattgagacatcatgctgtatactggcccgcctttttattagcagctgatctaaaattgccaaataaagtatttgcacatggatggtggacaaatgaaggtaaaaaaatttctaaatccataggaaacgtcattgatcctatagaaataattaataattacggtcttgatcaattt

SEQ ID NO: 296356 - DNA, 800 bp, Unknown
  Bacterial polypeptide expressing nucleotide sequence isolated from the Sargasso Sea
gaacaaagattcaccctcggaagtttttcactttataggcaaagatattatgtactttcatacgttattttttccagcaatgttatcgaatgcagatctaaagaccccaaatggtgtttttgtgcacggctttcttacactcaatggcgaaaaaatgtctaaatcaagaggtaactttatttctgcagaaaactatatcgataccttagattcagactatctaagatatttctttgcatccaaacttagtactggcgtcgatgatattgatctaaatttagaagaattcaaacaaaaatgtaactctgatctagtaaataaatatgcaaatattgccagcaggtctgctaggtttattaataagaattttaataatattctttcagaggaattggattcacctgaattaattgaagagtttaaaaatacatcacaaaaaatagcggaccattacgaaaaacttgaatttagtaaagcacaaaaagaaataatgttattagcagataaagctaatcaatatgtagattcaaagcaaccttgggttctcataaaagaaaaaggtaatgagaaattggttcactctatttgcacaacctcaataaatttatttcgaatactaactataatgctacaacctgttatacctagttttgttgataaaagtttaagattcttaaaagaagataaaatagaatggaattcaataaataagactcttttaaattgtaaaataggcaattttgaagccatagtcacaagaatagatgataatcatttggacaaattaataggaagttaaa

SEQ ID NO: 296357 - DNA, 283 bp, Unknown
  Bacterial polypeptide expressing nucleotide sequence isolated from the Sargasso Sea
atgactaaaaatttttatattaccacaccaatttattatccatctggcaaaccacatatgggtcacgcctattcaagtatagtggctgatatttttgcacgatttaaaagattagaaggttataaggttttatttttaacaggaacagatgaacatggccagaaaattcaaaaggaagcaaaaaaaaataataaagacccaaaaattttttgcgacgaactttctgaaacttttagatctctaacaaaaaccttaaatttatcaaatgatggattttattaga

SEQ ID NO: 296358 - DNA, 775 bp, Unknown
  Bacterial polypeptide expressing nucleotide sequence isolated from the Sargasso Sea
attgaacttccttttgacaaaaactttgtaacttatgtctggtttgatgcactgcttaattatgctagtgctcttggctggcctgatggagaaaaatacaaaaaattttggccgcatgttcaccatactattggaaaagatattcttaaaacgcatggaatatactggccatgtatgctgaaagcagcaggaataccgatctttaaaaaacttgttgttcacggacactgggtggtgggaggtagtaaaatgagtaagtcgctgggaaatgtagttgaccccttagccgtaaaagataagcttggtgtagatgcattgcgctattttttgcttcgtgatatgagttttggtgaagattctaatttcacggaagaacttgctataacgcgctataatagtgatttagccaataattttgggaatttaatgaaccgttcaatcagcatgagccgcaaaaatttccaaggttgtgtccctcctttaggtaaagcaggtaagcaggagaaagaattacatgagtcgtttgcaaagggagttcagaaatgccgcgaatatattattaaattccagcctcatcgtgctttagaacatgtggcctttcttagtagcaaggttaataaatacatagatacatgcaagccgtggactcttacaaaagaggaaaaaaacagtgagcgtttgggaacagttctttatacagcacttgatatgtcaagaatcataaaaggattacttgatcctgttatgccaaaaaaaatgtgcgaggccagaaaaa

SEQ ID NO: 296359 - DNA, 481 bp, Unknown
  Bacterial polypeptide expressing nucleotide sequence isolated from the Sargasso Sea
atgccagataaaaatttttatattacaacacccatatactatccttcaggaaaaccacacatgggtcatgcatattcaggaatagtttctgacgtatttgcaagatttaaaagattagatgggtttaatgttatgtttttaacaggaactgatgagcatggtttaaaaatgcaaagagaagcagagaaaaaaactaaagatgtaaaaatattttgcgatgaattatctgaaaaatttaaagaattaagtcaaactttaaacttatctaatgatgattttattagaacaactgaacaaagacattttaaagcggtcgaagatatatggatgagattgataaaatcaaaagatatttatctctcaaaatataagggatggtattcagtctctgacgaggcatattatgatgatgatgaaattgaaaccaaagataatatcaaatattcgaaatcttcaggttcgaaagttgaatgggttgagg

SEQ ID NO: 296360 - DNA, 586 bp, Unknown
  Bacterial polypeptide expressing nucleotide sequence isolated from the Sargasso Sea
atgaaaaaaattctaattacatcagcattaccatatattaacggaataaaacacctaggtaatctaattggtagtcaactaccagctgatgtttatgcaagatatatgcgtgctactggtcatagagttttatatatttgtgcaacagatgaacatggtactccagcagaacttgcagctatagaagataacttaacagtagagaaattctgtgaaaaaatgtggcatattcagaaaaaaattgcagatgaatttcatatttcatttgattactttggacgctcatcaagcaaacataaccatgaacttactcaatattttgcaacgaaattatgggaaaataattttttagaagaagtgaatgaaaaacaatttttttcattaaaagataacagatatttaccagatagatatataacaggtacttgcccatcttgcggatatgaaaaggccagaggagatcaatgtgaaaattgtactaaacaattagacccaacagatcttattgatccagtttctacaatttcaggatctaaagatttggaaataagagaaacaaaacatttatatttaagacaaaagtaaa

SEQ ID NO: 296361 - DNA, 790 bp, Unknown
  Bacterial polypeptide expressing nucleotide sequence isolated from the Sargasso Sea
gaactgggtattgatcctaaagaatatgttgatgaaatatctaaagaatttattcaattgtctatatcgttaaactgctcaaatgatgatttcataagaactacagatgaacgccatgtaaaaaatgttcaatcaatttggaaaattcttttcgataaaggtgatatttatcttgatcaatattcaggttggtattcaattacggatgaagctttttataacgaagaagaattaatgaaaaccgaaagtaattcgtttttatctcctaatggaaacccagttgaatgggtggatgaagaaagttattttttcaaattatctaaatatcaaaatgacttattagaactttatgaaaaaaatgaaaaatttattcttccaagctcaagaatgaatgaaattaaaaactttgtaaaatcaggtcttaaagatatttcaatatcaagaaaaaatatttcatggggaattcctgttaaaggaaataaagatcactcaatttatgtttggcttgacgcattaactaattatatttctgcgcttgattggtgtgatagcaatgagtcatttaaaagattttggccggcagatattcatcttatagggaaagatattacaaggtttcatgctgtttactggcctgcatttcttttttcggctggaattgaaattcctaaaatgattttttcacatgggttccttcttaataaaggcgaaaaaatatcaaagagtttaggaaatacagttgatccatttaaattaattaattttttcggagtagatcaactaaggtttt

SEQ ID NO: 296362 - DNA, 439 bp, Unknown
  Bacterial polypeptide expressing nucleotide sequence isolated from the Sargasso Sea
tttgtcacagaaacccgcttattacatcacaactgcaatttcttatgtgaatgggctgccgcatttaggccatgcatatgaagcaatatctgcagacgccatggccaggtttaagcggctagatggctatcatgttttttttcttactggcacagatgagcatggacaaaaagttgaaaagtcagctattgaggcgggagaggaacccttgagattttgtgacgaaaatgcagatgcgtttcgtcaaatgacacatctacttaatatctctaatgatgattttattagaacaaccgagcaaagacatataagagctagtcagtcaatttggaaaaatcttttagacgcaggagatatttaccttggcaagtatgccggatggtacagtgtaaaagacgaggcttactttgaggaagcagaactagctatgacccaggtg

SEQ ID NO: 296363 - DNA, 640 bp, Unknown
  Bacterial polypeptide expressing nucleotide sequence isolated from the Sargasso Sea
atgacgcttgaaaataaaaaaatttttgtgaccaatgctttgccctatgccaatggtccaattcatattggtcatatggttggttacatacaggcagacatttggtctagatttcagagaatgcaagggcatgatgtggttttcatatgcgcaagtgatgcacatggaacaccaataatgttgagcgctgaagatctgggtgttgaaccagtggagcttgctgctgaatatactcgtcaacatgagaatgatttcaatgactttcacgtatcatttgacaactaccacacgacccattcggaagaaaatgaagaattagtcggagagatatatcaaagactgaaagaaaacgactgcattcgaacagaagtcattgagcaagcctatgatgatcaggaaaatatgtttcttcctgatcgttacgtcagaggtacatgccccaaatgcaatacccctgatcaatatggagacaattgtgaaaagtgtggcgcaacatacaaaccaacagatctgattgatccaatctccgcaatatctggaaaagcaccgagtttaaaagaatctgagcattattttatgaaactgacaaagtttgaaaatatgctcgaggattggatcgaaacaattgatatacactcat

SEQ ID NO: 296364 - DNA, 641 bp, Unknown
  Bacterial polypeptide expressing nucleotide sequence isolated from the Sargasso Sea
tatgaaacgccatttaattacatcagcaattccatatatcaatggcgttaaacatctgggaaatttggttggcagtcagttaccggcggacttatttgctagatatcaaagagctaaaggtaatgaagtcctatttctatgtgcgacagacgaacatggaacgccggcggagcttgctgccgaaaaagccggtaaaccaattgctgaatactgtgatgaaatgcacaccattcaatctaagttagccaaaggtttccgactttcttttgatcattttggtagatcttcaagccaacaaaaccataaattaactcaacactttgcagcgaaattgtcggaacgcggattggtaaaagaaattacagaaaaacaagttttttcaaaccaagatcaacgctttttacctgatagatatattgagggcacatgtccaaattgtggttttgaagaagcccgcggcgatcaatgtgataactgtactaagcaacttcaaccgaatgaacttataaatcctcgatcaactatttctggatcaacagacttagaggagcgtgaaacaaagcatcttcatctacgccagtcgttaatgaaagaagaactagaaagctggattgatagcaaatctgactggcctattctaa

SEQ ID NO: 296365 - DNA, 659 bp, Unknown
  Bacterial polypeptide expressing nucleotide sequence isolated from the Sargasso Sea
aatggacaattctaaaaaaattaaaagaaaaatacttgttacacaagcattaccatatgcaaatgcacctttacatttaggacatatactagagtcagtacaaactgatatttggacaagatttcaaaatcttaatggtaatgaatgtttatttttctgcgctgatgatactcatggaactcctgtgatgttaaaagcaaatgaaatgggcattaggccagaaaaattgatagaagatatatataaagatcataaatctacatatgaactttatgatataaattttacaaatttctattcaacccatagtgatgaaaatagaaaatattctgaatatatatatgaatgtgctaagaaaaataatttgatatctaaatctaatgtagagcaatattatgataaagaagaaaaaatgtttctctctgatagattaataaaaggtacttgtccaaagtgtggtgcagaagatcaacatggtgacaattgtagtgtatgtggtgcatcttataatgtcctggagataaaaaaccctatctcaattctttcaaacacaagaccaattaaaaaaaagagtgagcatatattttttgatctccctaaaaaaattgaaatgttaaaagactttataaaaaaagttgatttacaagaatctataaaaa

SEQ ID NO: 296366 - DNA, 941 bp, Unknown
  Bacterial polypeptide expressing nucleotide sequence isolated from the Sargasso Sea
ggggaaaacctttttacttgattactataaaaaaaatccagattttatatgtccatcttcaagaaaaaatgaggttattagttttgttaaaagtggattaaaagatctttcagtaagtagaaaaagtttttcatgggggattcaagtacctgataataaagatcacattatatatgtatggctcgatgctcttacaaattatattagtgcattaaattatccaaatacagacgatccattattcaaaaaattttggcctgcatctattcatttaattggtaaagatattctaagatttcatgcaatttattggcccgcttttttattagcagcaaaaatccctctacctaaaaaaatatatggtcatggatggatacttttaggtgaacaaaaaatgtccaaatcaaaaggtaatattttagatccaatagaaattattaatgaatatggtttggatccattaagatactatctaatcaaagaagtttcgtttggtaatgatggaaatatatcaaaagataaattagaggattgtattaatagcgatttagcaaacaattttggaaatctatgtcaaagggttacagcctttgctgttaagaattgtaatagcaaaattcctgttgaaattgattttcaaaaagatgatctggaaattttagataaatttaaatcaaatttagacaaaattagaattaaaatagataatcaagatatcaatttttatactgattttattataaatagattatttgaaacaaataaatactttaatgatcaagaaccttggaaaaaaaaagataatttgattagacttaacacgatagtctatactactttagaaatagtgagaaaaataagctatatgttatatccaattataccccagtcatctttgaaagcattgaaaatatttgatattaaagaaaacaaaatagaat

SEQ ID NO: 296367 - DNA, 652 bp, Unknown
  Bacterial polypeptide expressing nucleotide sequence isolated from the Sargasso Sea
ctttgcacatggctggtggcttactggggaatcaaaaatgagtaaatcgcttggaaacgttattaatccgatggatcttattaaggactatggggttgatcctgtaagatattatttgatgagagagatggttttgggaaatgattctagttttaccatagaatcttttatccagcgatataatagtgaccttgcaaatgactttggtaaccttttaagcagagtaactacactgataaagaaaaattatgatggtttggtaccagaacctggcgatttaggtgatcttgacataggtatcaagaaaaaaggggaagctctatctaaaacagttcatcggtatgtagatgacatgagattgaatgatgctattgaagaaataatgcagtttattcgtggggttaataaatacatggaggagaatgcaccctggaagatggtaaaagaagacaaggatggagctgggaggattttatacacggcgggagaggcactaagattaggagctgtattattatctccaataatgcctaatcgaaccaaaacattactcgatgcgctgaatgtaaaagagaaggacttttcctggggagcgcttaaagcgggtactaggataaaaagtcatgaaccactttttccaaggataaaataa

SEQ ID NO: 296368 - DNA, 511 bp, Unknown
  Bacterial polypeptide expressing nucleotide sequence isolated from the Sargasso Sea
aatggataaaaattactacataacaactccaatttattatccttctgctaaaccacacatgggtcacgcatattctagcataaccgctgatttttttgcacgttttaaaaaaattgaaggttataatgttttttttttaactggaacagatgaacatggacaaaaaatacaaagagctgctgaaaaaatcggtaaggatcctttaatattttgtgatgaaataagtaaaacatttaaagatctatctttaaaactaaatttatccaataatgattttattagaactacagaaaaaagacattttaactccgtaactgaactttggaatattttagaaaaaagaaaagaaatctatttatcaaaatattctggttggtattcagtatcagatgaggctttttactctgaagaagaaatcgagtctaataataataaaaagatttcaaaaatttctggttctgaagttgaatgggtcgaagaggagtcttatttttttaaactatcaaaatgg

SEQ ID NO: 296369 - DNA, 157 bp, Unknown
  Bacterial polypeptide expressing nucleotide sequence isolated from the Sargasso Sea
gtaaaatcaaaactcaaagaatggtttgatgttggattgagggattgggatatttccagagatgcgccctactttggcttccttattccaggggaagaagataaatatttctatgtttggctcgatgcgccaattggatattttgcatctctaaaaa

SEQ ID NO: 296370 - DNA, 811 bp, Unknown
  Bacterial polypeptide expressing nucleotide sequence isolated from the Sargasso Sea
attggaaaaatcaataaatggaggatggccagctgatgttcattttattggtaaagatattctgagattccatgctgtatattggcccgcaatgctcatttcagccaatatgaaagttcctaaaaaggtttttgggcatgggttccttacgagagagggtcaaaaaatgggtaagagtttagggaatgttctcgatcctgacttgctgctttctaaatatggaaatgatccagtaaggtggtacctcattaaagacatatcactaggaaatgatggagattttcaaaataaacgatttgttgacattatcaacaatgacttagctaatacaattggtaatttactaaatagaacatcatctatgtctagaaaatggtttgataataaagtgccaaatatagaaaagatatcaagtgaaaataaattagaggattttgccaaaattgcagtagaaaactatattcataaatttgatatctacaaattagatctagcagctaatgaagtgcttagccttgcgattaaaactaatttgtatttgaatgataaccaaccatggatgttgataaaagaagaaaataatttgccttttgttaaagaaattatttacaacgtattagaaagtacacgaataataggattattattattaccattattgccagaactatcatcaaaaataaatgaacaactttgttctacatacaataaagaaattccttgggaacaacaattaaaatggggattattaaatagtaactcaagccttcctaaacccactccaataataaataaacttgagtatgaataa

SEQ ID NO: 296371 - DNA, 346 bp, Unknown
  Bacterial polypeptide expressing nucleotide sequence isolated from the Sargasso Sea
atgaaaaatagcttttatattactactccaatttactatgttaatgatattcctcatttaggacatgcttatactagttttgttgcagacacaatttctagatataaaagactatcaaattttgatgtatattttactacaggaactgatgaacacggacaaaaagttgaaaactcagctagagataaaaatattgatactctagagtttacagataaagtttctgctagatttaaagatttatgttccaaacttaaacttaccaataatgattttataagaactacagagaatagacataaaaataaggttcaaaaaatatggaataaacttatagaaaataatg

SEQ ID NO: 296372 - DNA, 575 bp, Unknown
  Bacterial polypeptide expressing nucleotide sequence isolated from the Sargasso Sea
aatggataaaaatttttatattactacaccaatttattatccatctgcaaaacctcatatgggacatgcttattccagtataatagcagattttttttccagatttaaaaaaatagacggctttacagttcattttttaactggtactgacgagcatggtttaaaaatccaaagatctgctgaaaaaaaaggattaaaaccattagaattttgtgatgaaattagtaaaacttttagaaatctatctgagatactaaatctaactaatacagattttattagaacgacagaagcccgccataaaatctcagttcaacatttatggagagaattagaaaaaaatgatgatatttatctatctaaatattctggttggtattcagtctcagatgaagcgttttacagtgaggaagaaattgaagaaattaatggttcgaaagtcgcaacatcatctaaatctactgtagaatgggtggatgaagagtcatatttttttagattatctaaatgggaaaaaccattactggaattttatgaaaaaatccagatttcatttcacctgaaagcagaaaaat

SEQ ID NO: 296373 - DNA, 241 bp, Unknown
  Bacterial polypeptide expressing nucleotide sequence isolated from the Sargasso Sea
aatgaataaaaacttttatatcacaacaccaatttattatccttcgggaaaacctcatatgggccatgcttattctagtatagttgctgacttctttgctagatttaaaagaatacaaggtcataatgttttctttttaactggaacagatgaacatggtcaaaaaattcagagagctgctgaaaaaaaaggaatggaacctaaagctttttgtgacgagatatcaaaaactttttttgat

SEQ ID NO: 296374 - DNA, 163 bp, Unknown
  Bacterial polypeptide expressing nucleotide sequence isolated from the Sargasso Sea
atgagtaattcattttacataacaacaccaatctattatgtaaatgatattccacatataggtcatgcgtatacaactattttagcagatgtgttatctagatatcaaaagcaagttggtaataaaccattcttccttactggattagatgaacacggacaaa

SEQ ID NO: 296375 - DNA, 865 bp, Unknown
  Bacterial polypeptide expressing nucleotide sequence isolated from the Sargasso Sea
ttatttagccagtcatttaaattacttaataaaacaagattgcgaaaaagacttcgaaagtttctggagcaaggattcggcctcggaagttttccattttataggtaaagatataatgtactttcacacgttattttttcctgcaatgttagcaaatgcagatctaaagactccaaatggagtttttgttcatggatttcttacactcaatggcgaaaaaatgtctaaatcaagaggtaactttatatctgcagaaaactatatcgacaatttagattcagactatcttagatatttctttgcatccaaactaagtactggcgtggatgatattgatctaaatttagatgaattcaaacaaaaatgtaactcagatttagtaaataagtatgcaaatattgccagcagatccgcaaaatttattaataagaattttgataataatctttcagaaatattagattctccagatttgatcgaagaatttaaagttacttcagagaaaatagctgatcattatgaaaaacttgaatttagtaaagcacttaaagaaataatgttattagccgataaagccaatcaatatattgattccaaacaaccttgggttctcataaaagaagaaggaaatgagcaattggtacactcgatttgcacaacctcattaaacttatttcgaatactcactataatgttacaacctgttatacctggttttgttgataagagtttaagattcttaaaagaagataaaatagaatggaattcaataaataagactattttaaattgtaaaatagataattttgaagccatagtcacaagaatagatgacaatcatttggctaaattaatgggaaattaa

SEQ ID NO: 296376 - DNA, 760 bp, Unknown
  Bacterial polypeptide expressing nucleotide sequence isolated from the Sargasso Sea
atggataaaaatttttatattaccactcctatatattatccatctgctaaaccacacatgggtcatgcttattcaagtattatagctgatttttttgcaagatttaaaaaaattgatggttttaaggtaaattttttaacaggtacagacgaacatggtctaaaaatacaaagagctgcagaggtcaaaggaatagatccactaaaattttgtgacgagattagtttgacatttaaagacttatctaaaacacttaacttaaccaatacagatttcataagaaccactgaaagtagacataaaaaatcagttcaaaatctttggaaagtattagaaaaaaataatgaaatatatttatcaaaatattctggatggtattctgtttctgatgaagctttttattctgatgatgaaattgaggaaataaatggaaaaaaaatatcttcatcatcaaaatcatctgttgaatgggtggacgaggagtcttatttttttagactatcaaaatgggagaaaccactattagatctttataaagataatccgtattttatttctcctccctcaagaaaaaatgaaatagttagttttgttaaaagtgggttaaaagatttgtcaatcagtagaaaaagtttttcatggggaatacctgttccaaataacaaagatcatgttatctatgtttggctagatgcactaactaattatttaagtgccttaaactatcctgatactaacaacgaattatataaaaattttt

SEQ ID NO: 296377 - DNA, 553 bp, Unknown
  Bacterial polypeptide expressing nucleotide sequence isolated from the Sargasso Sea
atgaataaaaatttttatataacaacaccaatttattatccctcagcaaagcctcatatgggtcatgcttattctagtattgtagctgatttttttgcacgttttaaaaaaattcagggttttgatgttttttttttaactggaactgatgagcacggtcaaaaaattcaaagagctgctgaaaaaaaaaaaatggatccacaatcattttgtgacgaaataagtaagacttttaaagatctatccaagtctttaaatctttcaaatactgattttatacgaacaaccgaagttagacataaaaaatctgttagtaatttatggaatatcttagaaaaaaagggtgagatatatctttccaagtattcaggctggtattccgtttctgatgaagctttttattctgaagacgaagttgtagaaaataatggatctaaaatttctaaaatttctgggtctctagttgaatgggttgaagaagagtcatattttttcaaattatcaaaatggcaaaaacctttattagattattacaaaaaaaatccaaattaat

SEQ ID NO: 296378 - DNA, 256 bp, Unknown
  Bacterial polypeptide expressing nucleotide sequence isolated from the Sargasso Sea
taaaggtgctgacaaactcttacgacttactttagatgttggcgatttaggaacgagaaatgtatttgcaggcattaaaagtgcctatgaacctaatgaacttactgataaacatattgtgttagttaacaatctggaacctaggaagatgaagtttggagtttctgaaggtatggtgcttgcatcaagtaatgacgagggtatttatttggtttcacctgatagcggtgcaaagcctggtatgaaagtaagataa

SEQ ID NO: 296379 - DNA, 599 bp, Unknown
  Bacterial polypeptide expressing nucleotide sequence isolated from the Sargasso Sea
aatgaataaaaatttctacataacaacaccaatatactatccatcagctagacctcacatgggtcacgcttattcaagtatagtatctgatttttttgctagattaaaaaaaattcaaggttatgaagttttttttcttacaggaactgatgaacatggacaaaaaattcaacgtgcagctgaaaaaaaaaaaaaagatccacttaaattttgtgatgaaataagtgccacgtttaaagatctttctaaaattttaaatctttctaacaatgattttatcagaacaactgaagcaagacataaaaaatctgttgaaaatttatggaaagttttagaaaaaaaaaaagaaatttatttatctaagtattcaggctggtattctgtatctgatgaagcgttctatagtgaagatgaaatagaggatgacggcgatttaaaaataagtaaattatctggatctaaagtggagtgggtagaggaggaatcttacttctttaaattatcaaagtggcaggaaccgttacttagtttttatgaaaaaaacccagattttatcttgcctaaaacaagaaaaaatgaggttgtaagttttgttagag

SEQ ID NO: 296380 - DNA, 802 bp, Unknown
  Bacterial polypeptide expressing nucleotide sequence isolated from the Sargasso Sea
atgtcgcgtattttaataacttctgcgctaccttacataaatggcattaaacaccttggaaatttaattggaagccaattaccgtcagacgtttatgcccgatttatgcgagctaacggccatgaagtacttttaatttgcgcaactgatgagcatgggactccagctgaactagcggcgacaaaggcagattgtgcagttgcagactattgtgagaaaatgtggaaagcccaaaaagaattagcagcgggattctgtctgtcatttgatttttttggtcgctcatcttcaaaacaaaatcataaattgacgcaacatttcgcgaaaaaactttgcgaagcagggttaatttcagagattgttgaaaagcaaattttctccatagatgataacaggtttctcccagaccggtatgttgaaggcgaatgtccggagtgcggttacagccgagccagaggtgatcagtgcgaaagctgcacaaaacaattgaatccagtggatcttataaagcctcgatctgttatctcaggctcagaaaacttagagctaagagaaacaaagcatctgtatctgcgccaaagtttaatgagggaaagacttagacgctggttagatcaaaaaagtgattggcccatcttgacaacgtcgatagcaaagaaatggctaaatgacggtgaaggcctgcaagatagaggaattaccagagacttggaatggggcatacctgtacacactccggaggaccaatggcctgggcttgaaaataaggttttttacgtttggtttgacgctccaattggag

SEQ ID NO: 296381 - DNA, 445 bp, Unknown
  Bacterial polypeptide expressing nucleotide sequence isolated from the Sargasso Sea
aatggataaatactactatattacaactcctatatactatccttctgcaaaacctcatatgggacatgcctattctagtattgtttctgatgtttttgcaagatttaaaactatcgatggttacaaagttcattttcttacaggcacagatgaacatggtcaaaaaatagaaagagcagccaaagaaaaacaaatggatcctttggctttttgcaatgaaataagcaaaacatttaaagatctgtgtagtttattaaatctttctaatactgattttattagaacaacagaaaatagacataaaatatcagtacaacatctatggaatgagcttgaaaaatctggtgatatatatttgtccaaatactcaggatggtattctgtatctgacgaagctttttatcaagaagatgaaatagaaactaaaaataatcaaaaaatatca

SEQ ID NO: 296382 - DNA, 737 bp, Unknown
  Bacterial polypeptide expressing nucleotide sequence isolated from the Sargasso Sea
agatgagcatggacaaaagatcgctgaatctgcagccatttctggaattgagcctaaggaatttgttgacaagatcagtgaagaatttcgacaattatggcctaatctgaatattgatcacgaccagtttattcgtacaactgattctaatcataaaacctgtgttcagaaaatattgcaaaaaatttatgaccaaggggagatctatataaaagaatacgagggactttactgcataggatgtgaaaggttttttgatgagtcagagttagaaaacggtaattgccctgatcatcaaacacccccagaattttataaggagaaaaattacttcttcaagatgagctcttaccaggaatggctcactaaagagttaaaacaaaatgtggactggatttatcctggacgttacaggaatgagctaattcagttgcttaaagatcctctgcaggatttgtgtatttcaaggcctaaaagtagggtgaggtggggtattgagctcccttttgacaacaaatttgtaacttatgtctggtttgatgcactgcttaattatgtcagtgctcttgaatggcctgatggagaaaaattcaaaaaattctggccacatgttaaccataccatagggaaagatattcttaaaacgcatgggatatactggccctgcatgctgaaagcagcaggaatgcctgtctttaaaaagctggttgttcatggacattgggtggttggaggaa

SEQ ID NO: 296383 - DNA, 502 bp, Unknown
  Bacterial polypeptide expressing nucleotide sequence isolated from the Sargasso Sea
aatgaataaaaaagcaataatcacaagtgctcttccatattctaatggcgagatacatctgggtcatgttgcatctacctacctgcctgctgatgttaccacacgtttcttaaaacaaaatggtgttgaggcatattacgtatgtgcatctgatgattatggaactccaattttaatacaatctgaaaaattaaaacaaactccacaagaatatgttgcacattggaataaacgtgattatgaagatttcaccgcttttgatataggatttgattttttctataaaacaagttctgaagaaaatatctcatttgtccaagatgtctttaaaaaaattgaaaaaaatgggcatatttacgaaaaagaaatcatacaagctttttgtacttcttgtgacaaatttcttccagaccgatttgtaaagggaacttgtccattttgtgatgccgaagatcaatattctgatttatgtgaaaaatgtgggcgcattccgaagaaatga

SEQ ID NO: 296384 - DNA, 515 bp, Unknown
  Bacterial polypeptide expressing nucleotide sequence isolated from the Sargasso Sea
aatggataaaaatttttatataactacaccaatttattatccttcagctaacccacatatgggtcatgcttattcgagtatcattgcagatttttttgctagatttaaaagaattgatggttttaatgttaattttttaaccggaactgatgaacatggtttaaagatacaaagggcagctaaaaaaaaaggaatggagacacaaaaattttgtgatcaaataagtcaaacttttagagatctttcagaaaaactaaacttaacaaatacagattttattagaacttctgaagaacggcataaaatatcagttcaaaatttatggaatgagttaaaaaaaaacgatgatatatatttatcaaaatattcaggctggtattctgtttcagatgaagctttttattcagataatgaagtagaggaggttgatggaaataaacaatcaatttcttccaagtctcctgttgagtggatggatgaagaatcatatttttttcgattatcaaaatgggaaa

SEQ ID NO: 296385 - DNA, 370 bp, Unknown
  Bacterial polypeptide expressing nucleotide sequence isolated from the Sargasso Sea
gatgaataaaaatttttacataacaacaccaatttattatccctcaggtaagccacatatgggtcatgcttattccagtatcatcgctgatatttttgcaagatttaaaagattagaaggtaataatgttttgtttttgactggtacagatgagcatggtcaaaaaatacaaaaagaagcagaaaaaaataaaaaagatccaaaaaaattttgtgatgaaatatctgaaacttttcgatctttaaccaaaatattaaatctatcaaataatgattttataagaacaactgagccaagacatttaaaatcagtaaacgaaatatggtatagattaataaaatcaggtgacatttatttagataaatatagc

SEQ ID NO: 296386 - DNA, 505 bp, Unknown
  Bacterial polypeptide expressing nucleotide sequence isolated from the Sargasso Sea
aatgaaaaataaattttacatcacaactcctatttattacccatctgctaaacctcacatgggtcatgcttattcaagtatagttgctgacttttttgcgcgtttcaaaagaatagataattatgatgttttttttttaacaggaacagatgaacatggacaaaaaattgagagagcttctaaagataacaataaagatactttaaaattttgtgatgaaattagttctattttcaaagatttaacttttaaattaaatttatcaaataatgattttattagaacaacggaaaagaggcactttgatgccgtagaacatctttggaatatacttgaaaaaaaaaattatatttatttatctaaatattctggatggtactcagtgtcagatgaagcattttattctgaggatgaaattgaagaaatcgataatattaaaaaatctaaatcatcaggatcaaaagttgagtgggaagaggaggagtcctatttttttaagttatct

SEQ ID NO: 296387 - DNA, 343 bp, Unknown
  Bacterial polypeptide expressing nucleotide sequence isolated from the Sargasso Sea
tatgtcaaataaaaacttttacattacaactcctatttattatccatctggaaaaccacatatgggacatgcatattccagtataattgctgatatttttgccaggtttaaaagaattgatgaatttgacgtattttttttgacgggcactgatgaacatgggcttaaaatgcaaagggaagcagaaaaaaattcaaaagatgtcaaattattctgtgatgaattatcttcaaaatttaaagatcttactaatattctttatctttctaacgatgactttattagaacaactgaaaagcgtcattttaagtctgttgtagacatttggtctaagcttgaaaaa

SEQ ID NO: 296388 - DNA, 677 bp, Unknown
  Bacterial polypeptide expressing nucleotide sequence isolated from the Sargasso Sea
gtacgccctaagagatgaagctttttattctgaaaaagaaataactaacggtaaagctcctacaggagctgaagttacatgggttgaagaggagagctatttttttgatttatcaaaatggcaagatcaattattaaatttttatgatgaaaatccatcttttatttatcctataagtagaatgaatgaagttaagagctttgttaaaagtggattaagagatttatctgtaagcgaaacgagttttgaatggggtgtaaaagttcctaacaataatcatcatataatgtatgtttggttagatgcgctcacaaattatctttctgcagttgggtatccagacattaataatattgagtatattgatttctggccttccaatttgcatatggttggaaaagatattttaagattccacgctgtgtattggccagcatttttgttagctgcagatttacccttaccaaagagaatatttgcacatggatggtggacaaatgaagggaaaaaaatatcaaaatcagacggaaatgtaatagatccaattgatattattaatgattatggtttagatcaaatacgttactttttaatgagagaagtaccttttggaagtgatggggatttttcaaaaacagcattaaaagcaagaattaacagtgacctttctaatgatt

SEQ ID NO: 296389 - DNA, 897 bp, Unknown
  Bacterial polypeptide expressing nucleotide sequence isolated from the Sargasso Sea
aaaatatttgtgggataggctttaccaaaaaggtcatatctatcaaggggaatacgaaggttggtattcagtaagtgatgaaactttttataatgaaaaagatctgattaaaacagacaatggctcttttaaaactattactaatggatctgttgagtggatatcagaaaaatcttatttttttaaattatcagaatggagctctaaacttcttgatttatataaatacaataaaaattttattaatccagaatctaaaaaaaacgaggttattaagtttgtggaatctggtttaaatgatctttccgtctcaagaacttcgtttaattggggaattaaaacgcctacagatagtaagcatattatgtatgtttggttagatgcattaacatgctacgcaaatggtgttaattatttaaatgatgaaaatgataatataaaagattattggaataatgtaacacatatcgttggtaaggacatacttcgtcatcatgctgtatattggccggcgtttctaatggcggctgaattagaattacctaaaaaaatatatgcacatggttggtggacaaatgaaggtcagaaaatttcaaaatctctaggaaacacaattgatcctattgatataattaataattacggacttgatcagtttagatattttcttttgcgtgaggtaccatttggcaatgacggtgacttttcaaaatcagctttgattaacagaattaacagtgatttggttaatgatttaggaaatctatgtcaaagatctctatctatgattgaaaagaaattaaattcaattattccaaaaataaaagaagaatctagaaataacaagcttatgaaaatgtacgaagaaattatttctgagacatctgtgttggttga

SEQ ID NO: 296390 - DNA, 571 bp, Unknown
  Bacterial polypeptide expressing nucleotide sequence isolated from the Sargasso Sea
atggataaaactttttatattactacacctatttactatccatcagctaagcctcatatgggtcatgcatattcaagtattattgcagatttttttgcacgatttaaaataattgatgattatcaagttcattttcttacaggtacagacgaacatggcttaaaaattcaaagatctgcagaaaaagcagggaaggagcctcaaatattttgtgatcaaattagtcaaacctttagagacctttcagatactttgaatttatcaaatactgattttataagaactactgaggctagacataaaaaaacagttcaacatctttggaatgaacttgaaaaaaacgatgatatatacttatcaaattattctggatggtattcagtatcagatgaagctttttataacgaagatgaaattgaggaagtagatggaaaaaaaattgctttatcatcaaaatctcctgttgaatggattgaagaagaatcctacttttttagactttcaaagtgggaaaagcctttattagattattatgaagctaatcctgattttatatctccagaatctagaa

SEQ ID NO: 296391 - DNA, 826 bp, Unknown
  Bacterial polypeptide expressing nucleotide sequence isolated from the Sargasso Sea
tgtaattatattacagcattaaattatccaaatactgaaactaaatcattcaagacattttggcctggcattcatgtagttggaaaagatatattacgatttcacgcagtttactggccagcatttctgatggctgctggaatagagccaccaaaaaaaatatttgcccatggttggtggactaatgaaggtcaaaaaatatcaaaatcaattggaaatattatcaatccatatgatattataggtaaatacggattagatcagattaggttttttcttttcagagaagttccgtttggaaatgatggtgatttttctaaagatgcaatttctgaaagagtaaatgctgatttatccaacaattatggaaatttaattcaaagaatatcttcttttattttaaagaattctgactctaaagtatttaaaccaataaattatgaacaaactgatttaaatatatttcaatcatttgatgaaactttaaatatttatttaaaaaatatgaattcttttaaaattgataaagctttaaaatgtatttttgattatttatcatcaattaatgcttatgttgatactcaagctccttggtctctaaaaaatacacatcatgaaagaatgggcgatgttttatatgttataactttgatgactattaagtgctctatcttattatatccagttataccttctagtattattaaggtacttaatatttacaatttatcaattagtgatttaaatttaaataatgttgagtcatttttacctgacactataatattaaataaagctgaaccaatttttcctcgtatagaattgt

SEQ ID NO: 296392 - DNA, 685 bp, Unknown
  Bacterial polypeptide expressing nucleotide sequence isolated from the Sargasso Sea
tctttttggcctgcagatctccatttaataggaaaagatatattaagattccatgcaatttactggccggcatttttgttagctgctgatataaatccaccaaaaagagtatttggtcatggatggatactctcaggtgatgaaaaaatgtcaaaatctaaaggtaatattttagacccgcttgaaattatagatacttatggtttagatccattaagatattatttaattaaagaagtttcattcggtaatgatggaaatatttcacaagaaaaattagaagcttgtataaatagtgatttagctaacaattatggaaatctgtgtcaaagggttttatcgttttgtgataaaaattctaattttgaagttcctgataatgatgcttttacagaagatgataaattgatcttagatcaatactctaaaaattatgaaaatttaataaaatattctgataatcaggatgtaaatttatatataaattttattgttgaacagttatttgcagcaaataagtacttcaatgaccaggaaccttggaaaaaaaagaatgataaatcaagaatgaatactattatttatgttgcattggagctaataagaaaagtaactatcttactatatccaataatacctagttcatctataaaagtattagaaatatttggtataaaggaagata

SEQ ID NO: 296393 - DNA, 544 bp, Unknown
  Bacterial polypeptide expressing nucleotide sequence isolated from the Sargasso Sea
aatgaataaaaatttttacatcactacaccaatttactatccttcagcgaaaccccatatgggccatgcttattccagtattgtagctgacttttttgctcgttttaaaaaaattgatggatttaacattcattttctaacaggtactgacgaacatggtttaaagattcaaagagctgcagaaaaaaaaaaattagaaccattaacattttgtgatgaaataagtaaaacttttaaagatctttcaaaaactttaaatctatcaaatacagattttattcgaactactgagaaacgtcataaaaaagcagttcaacatttatggaatgaacttataaaaaatgataatatatatttatctaaatactctggatggtattcggtgtcagatgaagctttctattctgaagatgaaattgaggaaaaaaatggtcttaaaatttccaaattatcttcttcaaaagttgaatgggtggatgaagaatcctacttttttagattatctaaatgggagaaaccattattagactattatgaaaaaaat

SEQ ID NO: 296394 - DNA, 503 bp, Unknown
  Bacterial polypeptide expressing nucleotide sequence isolated from the Sargasso Sea
attggaaaaaaataatgatatctatctttctaaatattctggatggtactcagtttcagatgaagctttttatgctgacgatgaagtagaagattttgaaggtaaaaaacaagctatatcttcaaaatcacaagttgaatggatggatgaggagtcttatttttttagattatcgaagtggcaaaatcatttattggatcattataacaaaaatccagaatttatctctcctccttcaagaaaaaatgaagtgataagttttgttaaaagtggtttaaaagatctttctgttagtagaaaaagtttttcatggggtataaaagtacccaataataatgatcatataatttatgtgtggcttgatgcattaacaaattatattagtgctttaaattatcctaatactgaaaatgaaatttataagcagttttggccagctgatattcatttaattggtaaagatattttgagatttcacgctgtttattggccggcttttttgt

SEQ ID NO: 296395 - DNA, 375 bp, Unknown
  Bacterial polypeptide expressing nucleotide sequence isolated from the Sargasso Sea
aatggataaaaatttttatattacaactccaatatattatccatcagctaaacctcatatggggcacgcttattcaagcatagttgctgatttttttgctcgatttaaaagaattcaaggttataaggtttactttttgacaggtactgacgaacatggtcaaaaaatacaaagagctgctgaaaaaaaaggaatggaccccaaagctttttgcgatgaaatatctaagactttttttgatttatctaaaattttaaatctttcaaatgatgattttataaggacaactgaggataggcacagaaaatctgttgaaaatttatggaatatattggaaaaaaaaaatgaaatttatctatctaaatattctgggtg

SEQ ID NO: 296396 - DNA, 667 bp, Unknown
  Bacterial polypeptide expressing nucleotide sequence isolated from the Sargasso Sea
aatggacaattctaaaaaaactaaaagaaaaatacttgttactcaagctttgccttatgcaaatgcaccactgcacttaggacatattcttgaagctgttcaaacagatatttggactagatttcaaaactttaatgataacgaatgcctcttcttttgtgctgatgatactcatggaacaccagttatgttgaaagctaatgaaatgggtataaagccagaagaattaatttctgatgtttataaagaccataaatcctcatatgaactttatggaataaattttgcaaatttttactcaacacatagtgatgaaaatagaaaatattcagaatatatatatgaatgcgccaaaaataataatttaatttctaaagcaaatattgaacaatactatgacgaaaaagaagaaatgtttctttccgataggtttataaaaggaacatgtccaaaatgtggtgctgaagatcagaatggtgacaattgtggtgtatgtggagcatcttacaacgtacttgatgttaaaaaacctatatcaattatctcaaatacagttccaattaagaaagaaagtgagcatatattttttgatctacctcaaaagaataaaatgcttaaagattttttaaaaaatgtagatcttcaagagtcaataaaaaatagttaa

SEQ ID NO: 296397 - DNA, 829 bp, Unknown
  Bacterial polypeptide expressing nucleotide sequence isolated from the Sargasso Sea
ttataagaaaaataaagattttatattaccagaaacaagaaaaaatgaagtaatcagctttgttgagagtggattaaacgatttatccgttagtcgtaaatccttctcatggggtattaaggtaccaaaaaataatgatcatgtaatttatgtatggttggatgcattaacaaattatttgagtgctttaaattatccagatgagaaagataaaaaatataaaaatttttggcctgcaaacttacatattataggaaaagatatacttaggtttcatgcaatttattggccagcttttttacttgctgcagaaataccccctccaaaaagggtttatggtcatggttggattttgtctggtgatgagaaaatgtcaaaatcaaaagggaacatacttgatccaatagaaattatagataagtatggacttgatcctcttagatattacttgttaaaggaggtttcttttgggaatgatggaagtatatcaaaggatcagcttgaaaattgtataaacagcgacttagcaaataattacggaaacctttgtcaaagagttttagcttttaatgaaaagaatttaaacctaaaagttccagaaaactacaatctaaatgatttagataaaaaaatacttgataaatattcattaagttataatcaaataatttcttttatagataatcaagatataaataattatatgttatttatacaaaaacaattatttgaggcaaacaagtacttcaatgatcaagcaccttggaataagaaagatgataatgaaagactcaatacaattatatatgtatctttggaattaattaga

SEQ ID NO: 296398 - DNA, 711 bp, Unknown
  Bacterial polypeptide expressing nucleotide sequence isolated from the Sargasso Sea
ttcgataagccctaaagagttaattgataaatatgataaaattattaaatcttcattccaaaaatttggtatttcatttgataattattctagaacttcaaaaaaagttcatcatgaaacatcaatagatttatttaatttattaaaagaaaaagatcttttttcattaatagaatctgagcaattttttgatataaatgaaaatcaattcttagctgatagatacataattggtgattgtcctgtatgtgcttctgagggagcttatggcgaccaatgtgaaaaatgtggctcagcattaagtccagaagaattaaagaatcccaaatctacaatatccgattctactcctattttaaaaaaaacaaaacactattatataaaactcaatgaatttgaagatttcctgagaaattggataactgttgagaacaaagacatttggaaggctaatgtaataggacaagtaaaatcttggttagacagtgggctaaagccgagagctgttacaagagatttagactggggtattccaattcaagttgatggtgatgatggaaaagtactatatgtttggtttgaagcgcctattggttacatatcctctactaaagaatgggcagcgagaaataataaagattgggaacattactggaaaagtcctaaaactaatttaattcattttataggtaaggataatatagtgtttca

SEQ ID NO: 296399 - DNA, 721 bp, Unknown
  Bacterial polypeptide expressing nucleotide sequence isolated from the Sargasso Sea
aaaaatacaaagggcagctgaaaaaaggaatatggatcctctttctttctgcgatgaaattagtaagacttttagaaacttatccaaaactttaaatttatcgaatactgatttcattagaactactgaaaaaagacatgctgtatctgttacaaatttatggaatatattagaaaaaaaaaaagaaatttatttatcaaaatattcaggctggtattctgtctcagatgaagcattttatactgatgatgaaatagatgatgataatggtaacaaagtttctaaaaattcaggttctcctgttgagtgggtagaagaggaatcttatttttttaaactttctaaatggcaagaacctttattaaaattttactctgaaaatccaaattttatattgcctgaaagcagaaaaaatgaagtaataagttttgttaaaagtggtttaaaagatctttcagtaagtaggaaatcattttcttggggcattaaagttccatctaataaggatcatgttatttatgtttggttggacgctcttacaaactacttaagtgcattgaattatcctgatgaaaatcacaaattgtataaaaattactggcctgcggacattcatttaattggaaaagatatattaagattccatgctgtatattggccagcatttttgttagctgctgatattccattaccaaaaagaatttatggtcatggatggata

SEQ ID NO: 296400 - DNA, 891 bp, Unknown
  Bacterial polypeptide expressing nucleotide sequence isolated from the Sargasso Sea
cagcagcacttccatatgcaaatggccctatacatattggccatctagcaggtgtttatattcctgctgatatattcgctagatacaaaagacttacaaataatgatgttgcattcatttgtggaagtgatgaacacggggttgcaatttctttagcatctaaaaaagcttcaatttctccaaaggagttaattgataaatatgataaaatgattaaaaaatcatttgatgaatttggaattttatttgataattattcaagaacatcaaataagattcatcatgaaacttctataaatttttttgagaatcttaaagaaaaaaatcttttttcactaattaaatcagaacagtttttcgatgttaatgagaatcaatttttagctgatagatatatctctggtacttgtcctgtttgtggttatgatgaagcatatggagatcaatgtgaaaagtgtggatcaacccttagcccagaggaactaaaaaatcctaaatcaacaatctctaattcagctccaattctaaaagagactaaacactattatatcaaacttgatgaatttgaggattttattaaaaactggataactgttgaaaataaagataaatggaagacaaatgttgttggacaggttaagtcatggttagatagtggattaaaaccaagggcggttacaagagatctggattggggtatacctgtaaaaatagatgatgaagatggcaaggtactatatgtttggtttgaggcacctattggatatatctcatctactattgaatgggctaaagcaaatgacaaagattgggagcaatattggaaaaatccagaaactaatcttattcactttattggtaaagaccaatattgtttttcacttgtataat

SEQ ID NO: 296401 - DNA, 814 bp, Unknown
  Bacterial polypeptide expressing nucleotide sequence isolated from the Sargasso Sea
aaaaacttttacaattacagcagcacttccatatgcaaatggaccaattcatattggccatctagctggtgtttatattcctgctgatatttttgctagatacaaaagacttacaaataatgatgttgcatttatctgtggaagtgatgaacatggggttgcaatttccttagcatctaaaaaagcttcaatctctccaaaggagttaattgataaatatgataaaatgatcaaaaaatcatttgatgaatttggaattttatttgataattattcaagaacatcaagtaaagtccatcatgaaacttctctaatgttttttgagaatcttaaagaaaaaaatcttttttcacttattaaatcagaacagttttttgatgttgatgagaatcaatttttggctgatcgctatatctctggtacttgtcctttttgtgattttgatgaagcgtatggagatcaatgtgaaaagtgtggatcaactctgagtccggaggaattaaaaaatcctaaatcaacaatctctaattcatctccaattcttaaggagactaaacattattatatcaaacttgatgaatttgaggaatttattagaaactggataacggtggaaaataaagataactggaaggcaaatgttgttggacaggttaagtcttggttagatagtgggttaaaaccaagggcggttacaagagatcttgattggggtatacctgtaaaaatagatgatgaagatggcaaggtactatatgtttggtttgaggcacctataggatatatctcatctacaattgaatgggctaaagca

SEQ ID NO: 296402 - DNA, 513 bp, Unknown
  Bacterial polypeptide expressing nucleotide sequence isolated from the Sargasso Sea
aatgacaaataagaatttttatattaccaccccaatatactatccatcaggaaaaccacacatgggacacgcttactccagtatcgttgcagatgtcattgctcgttttaaaagaatagagggttataatgttcactttctaactggtactgacgagcatggtctgaaaattcaaagagaggcggaaaaaaacaataaaaccagccaagtcttttgtgatgagttgtcaaaaaaatttaaagaattaactaaaattctgaatttatctaataatgattttatcagaacaacagaaaaaagacattttaagtcggtagaagatttatggataaaattggttaattctggagatatttatttagataaatataaaggttggtattcagtatcagatgaagcttattatgatgaggatgaaattgaggaaaaaaatggaactaaagtatctaaattatctggttcaaaagttgaatgggtcgaagaggagtcttatttttttaaactttcagcatg

SEQ ID NO: 296403 - DNA, 643 bp, Unknown
  Bacterial polypeptide expressing nucleotide sequence isolated from the Sargasso Sea
gttttgtgataaaattagtaaaacattgagagatctttcagaaactttgaatttatcaaatactgattttataagaactacggaagctagacataaaaaaacagttcaacatctttggaatgaacttttgaaaaatgatgatatatacttatcaaactattctggatggtattcagtatcagatgaagccttttataacgaagacgaaattgaggaaatagatggaaaaaaaatttctatatcatcaaaatctgctgttgaatggattgaagaagaatcttatttttttagactttcaaagtgggaaaaacctttattagactattataaagctaatccagattttatagctccacaatctaggaaaaatgaagttattagttttgtaaaaagtggtcttaaagatctttctgttagtagaaaaagtttttcatggggcatacctgttccaaataataaaaaccacgttatatatgtttggctcgatgcattaacaaattatctgagcgcattaaactatcctgatacaaatgatgatttgtttaacaaattttggccagcctcaatacatttaattggaaaagatatacttagattccatgctgtttattggcctgcctttttattagcagcaaaaaattga

SEQ ID NO: 296404 - DNA, 805 bp, Unknown
  Bacterial polypeptide expressing nucleotide sequence isolated from the Sargasso Sea
atggggaataaaagtgcctaataacgacaatcatgtcatgtacgtttggattgatgcattatgtaattatctcacttctatagggtatcctgatgtaaatcataaaacttttaaaaaattttggccaggttttcatatgatagggaaagatattttacgttttcatgctatttattggcctgcttttttaatggctgcagatattgatccacctaaaagaatatttgcacatggttggtggacgaatgaaggtcaaaaaatttctaaatctgttggaaatattattgatccttatgaaatcatcaataaatatggattagatcaaattagattttttttatttagagaagttccgtttggtaatgatggggatttttcaaaagatgctattgctaatagattaaatgctgacttatcaaacaattacggaaatttagttcaaagaattgcaactttttgtgtaaaaaattgtaattcaaatattaaaaataattcaaattttactaaagcagataaaaatttaatagaatttatgaatttaaaatttgatgaatataaaaaatttatgaatgaagaaaaaatagataaatcaattaaatgtgtttttgaattattatctgaaactaatgcttatattgatacagaagcaccttggaatttaaaaaaaacaaataaaaacagaatgaatgatgtattattcttaactcttaatataattaaaaattcttctataatgttaattcctgtaatgcctgatagtgcaaataaaattttagatatactcaatgtctacaaaacagaaaga

SEQ ID NO: 296405 - DNA, 168 bp, Unknown
  Bacterial polypeptide expressing nucleotide sequence isolated from the Sargasso Sea
aatgaaaaataactattatattactacaccaatttattatccatctgcaaaacctcatatggggcatgcatattcaagtatagtagccgatttttttgcaagatttaaaagaattagtgagcataatgttttttttttaactgggacagatgagcatggtcaaaaaat

SEQ ID NO: 296406 - DNA, 286 bp, Unknown
  Bacterial polypeptide expressing nucleotide sequence isolated from the Sargasso Sea
gatgccctacaccctcacaactccgctttattacgtcaacgacaagccccatctcggcagtacctacacgactatcgcctgcgacgccctggcccgctaccagcgtttgcgcaacggttccgtggtgttcatcaccggtgttgatgaacatggccagaagatccagcgcacagcggaacgacagggggtttcaccccaggaacactgcgatcgcatcagttccacctaccgcgacctctgggcccgctgggggatcagccaggaccgcttcatccgcaccaccgat

SEQ ID NO: 296407 - DNA, 619 bp, Unknown
  Bacterial polypeptide expressing nucleotide sequence isolated from the Sargasso Sea
catgcaagataaaacctttttcataacgacacctatttattatccatccggcaagcctcacatgggacatgcttattcaagcataatagcagatatatttgctagatttaaaagaatcgaaaattttgaagtaatgtttttaactggtacagatgaacatggattgaaaattcaaagagaagctaaaaaaaattcaaaagatcccaaaatattttgtgatgaaatatccttaaaatttaaagatctaacgaaaattttaaatttatcaaacgacgattttataagaactactgaaaagagacatcataaagcagtaaatgaaatatggtctagattaataaaatctaacgatatctatttatctaaatataagggatggtattctgtttctgatgaagcttactacgatgaggacgaaattgaaataaagggtgatacaagattttctaaattatctggatcaaaagttgaatgggtcgaagaagaatcttttttttttaaattatcctcatggcaaaagaaattaattaaattttatgatgataatccagaatttattttacctaaatctagaaaaaatgaagtagttgagtttgtaaaaagtggattaaaggattta

SEQ ID NO: 296408 - DNA, 907 bp, Unknown
  Bacterial polypeptide expressing nucleotide sequence isolated from the Sargasso Sea
gaagaccagcataaagcgacggttacagcattcctgcaacgactctgggatcgcgatcagatctatgaaggaacgtattcaggctggtattgtgtctctgacgagcgttactggactgagaaagaccttggagaaggtcgcacctgtccgatttgcggccgggaagtcacctacgttgaagagaaaaactatttcttcaaaatgagcgagtggcaggatgcgctcgtaaaacaaattcaagacaacccagactggattgtcccagagatccgcaaaaacgaaatcctcagctttctgaaacaacctctcggcgacctatccatatcgcgtccaaaatcgcggctatcgtgggggatcgatctacccttcgaccaagaccatgtagcatatgtgtgggtcgacgcgttaatcaattacctcaccgcttcaggtgcgatcgaccccagcagggcagaaggcgaccagggttttgaagatgtaactctctcgtggtggcccgcagacatgcacctggtcggtaaagacatccttaccacacattccgtgtattggccgacgctgctcatgggtgtggggcttcccgtaccccgacaaatcctcgctcatgggtggtgggttgtaggagagacgaaaatgtcaaaatctctcggtaatgtcgtggacccactcatgctacgagatacattcggcacggatgcggttcgttggtacctcatgcgggagatgcccacaggtgccgacgcttcgtatacgccggaacggttcttagcacgttatgatgaactcgccaacgtactgggcaacctggtgagccgctccacgtcgatgatcaacaaatatcgcgctggcctcgtgccagaagcagcttctaacggactcgaccctgaagttgatcacgcactcaaat

SEQ ID NO: 296409 - DNA, 396 bp, Unknown
  Bacterial polypeptide expressing nucleotide sequence isolated from the Sargasso Sea
aaatgaaattgaagataaagataacgttaaagtaaacaaattatctggttcaaaagttgaatgggttgaagaagaatcttttttctttaaattatctaaatgggaaaaaaaattactagaatattatgataaaaatcctgaattcataagaccggaaagtagaagaaatgaagttatcagttttgttaaagggggccttaaagatttgtctgtaagtagaaaatctataacctgggggataaatgttccctcccaaaaagaccatattatttatgtatggttagatgctttaacaaattatttgagtgcacttgattatccaaatattgatactgttaaatataagaatttctggcctgcatctgttcacataattggtaaagacatattaaggtt

SEQ ID NO: 296410 - DNA, 685 bp, Unknown
  Bacterial polypeptide expressing nucleotide sequence isolated from the Sargasso Sea
ctatcggcaggtattaaactgcctgaatctatctttgcgcatggatggtggcttatgggtgaatcaaagatgagcaaatcattggggaatgttataaatccgatggaccttattgatgattacggcgttgatccagtacgttactacctgatgagagaaatggtcttagggcaagattctaattttacaatggagtcattcatccaaagatataatagcgatctagctaatgattttgggaacctgctaagcagagttactactcttataacaaagaattatgatggtaaaataccggagcctggagaatacttagaatcagatctccaaattaggctaaaaggtgagtcattatcttcaaaagtagaaatgttgattggtgaaatgcgattgaatgaggctatagaagatataatgcaatatattcgaacagtaaacaagtatatggaggaaaatgcaccttggaaattagtcaaagaagataaagtcgctgctggaaggattctttatgtcgctggtgaagcactaaggttaggggctgttttattatcgccagtgatgcctcaccgaactagaatattgcttgatgcgcttaatgcgcatgacaccgacaaatcatggggtagacttaaacctaacagcatgttaaaagaccacgaaccattgtttccacggataaaataag

SEQ ID NO: 296411 - DNA, 463 bp, Unknown
  Bacterial polypeptide expressing nucleotide sequence isolated from the Sargasso Sea
aatgaagaataactattatatcacaacaccaatttattatccttctgctaagccacatatgggacatgcttattcaagtattgttgccgatttttttgcacgatttaaacgtatacaaggatacaatgtattttatcttacgggaactgatgagcatgggcaaaaaatcgagagagctgcaaatattaaaaaaaaaaatccacaagatttttgtgatgatattagccaaatatttaaagatctaacaaaaactctcaatttgtctaataacgattttataagaaccacagaaacaagacataaaaaatcagcaataaatgtgtggaaaattttagaggaaaaaaaagaaatttatttatcaaaatattctggctggtattcagtatcagacgaagctttttattccgaggacgagattatggaggaagatggaaagaaaaatctaaattatctggatctttag

SEQ ID NO: 296412 - DNA, 849 bp, Unknown
  Bacterial polypeptide expressing nucleotide sequence isolated from the Sargasso Sea
atgcattacaaaattatctgagtgctgttaattttccaaatatgtctgacgaactttacaaagatttttggccagccgatttgcatgtaataggaaaagatatactcagatttcatgccatttattggccagcctttttactagcagcagatataaaacttccaaaacgtgtcttcggacatggttggattttgtctgatgaaaaaaaaatgtcaaaatcattaggaaatatattagatcctgtagatataactgaaaaatatggatccgatcaattgagatattatttgatgaaagaggtctcacacggtaatgatggaaatatctcactacaaaatttagaaaattgtatcaataacgatctagcaaataattttgggaatttatgtcaaagagttttttcattcattaaaaaaaatttagataataaaattccaaaatataaaaatatagaaaaaaaagatcgacaattaaaagaaaaaatcaaaaaagatttaaaactattaagtaaaactattaacaaccaagagttaaatttatatattaaaaaagttgttgagtattcgttcgaggcaaataaatatttcaacgacgctgcaccatgggacttaaaagactcacccgaaaagatgggcaatgtgttgtatgtttctttacttcatattctatatattgcaattttattaaatccattaattccgattgccacgataaaagtgttaaagatctttaaattagatgaaaatgatttaaaattagagacaataactaaagataattttctcaaatctgggattgagttaaatcaaagttcaattctttttaaaaaggtagagcatgataattgat

SEQ ID NO: 296413 - DNA, 1045 bp, Unknown
  Bacterial polypeptide expressing nucleotide sequence isolated from the Sargasso Sea
gaagtaaagcaaataaaagaaaaaaactatttttttacaatgagtaaataccaaaataccttaattaataagattgaaagtgatgaattgttaatacagcctaagagtagaaaaaatgaggtacttggctttcttaaaaatgaattatctgacctttgtatttcaagaccaaaatctcgtcttgagtggggcatagagcttccttttgatgacaattatgtaacatatgtatggtttgatgcactgattaattatatatctgctataggagcttacaaggatgataaaaagttttcttctttatggcctgcagatgttcatttaattggtaaagatattttaactacgcattcggtatattggcctacaatgttgttatcattaggacttccattaccaaaaagaatttttgcgcatggatggtggcttactgataatcagaaaatgagtaaatcattagggaatatcgtaagtccgttaatgttaatagatgactttggagttgattctgtaagatattatttaatgtctgaaatggttttgggtatggatgctacattttcatcagaatcttttgaaaaaaaatataatagtgacttagccaatgattttggaaacctagtgagcagagtttctactctaataaagaataattttgatgaaaagattccaaaaaatagtttagcagaatctgatctttcttccaactttcagaaaatagttttaaaggaacaagtagataacttggagattgataaagtaattaatgatataatgattttcattcgcagtattaatgtttttatggaacaaaatgaaccatggaaattggtaaaaagtgataaagagcaagctggaaatatattatatcattgtgcagaatccttgaggttagctgctgtaatgctatcacctgtaatgccttcaaaaacaaaagatatcttagatatcttaggtactaatgaagcagaattagtatggggtaaattaaattcagggtcaaagatttctacaacagagcctattttcccgagaattaattaat

SEQ ID NO: 296414 - DNA, 757 bp, Unknown
  Bacterial polypeptide expressing nucleotide sequence isolated from the Sargasso Sea
aatggataaaactttttatattaccacacctatatactatccctcagctaagcctcatatgggtcatgcatattcaagtattgtcgcagattttttcgcaagatttaaaataattgatgattacgaagttcattttcttacaggtactgacgaacatggtttaaaaattcaaagatctgcagaaaaagcaggtaaggagcctcaaatattttgcgatcaaattagccaaacatttagagatctttcggatactttgaatttatcaaatactgattttataagaactacagaatctaggcataaaaaaacagttcaacatctatggaatgaacttgagaaaaatgatgatatatacttatcaaattactctggatggtattcggtatcagatgaagccttttataacgaagacgaaattgaggaagtagatggaaaaaaaattgctatatcctcaaaatctcctgttgaatggattgaagaagaatcttatttttttagactttcaaagtgggaaaaaccgttattagattattatgaaaataatccagatttcatttatccacaatctagaaaaaatgaagttattagctttgtaaagagtggtcttaaagacctttctgtaagtagaaaaagtttttcatggggtatacctgttccaaataataaaaaccatgtgatatatgtttggctcgatgctttaacaaattatttaagtgcattaaattatccaaataaagatgatgatttgtataaaaaa

SEQ ID NO: 296415 - DNA, 1669 bp, Unknown
  Bacterial polypeptide expressing nucleotide sequence isolated from the Sargasso Sea
aatggtaaataaacaaaaaaatatattagtttgtgttgcttggccttatgtaaatgggcctcctcatcttggtcatatagcaggcatgagtattccagcagatatttttgcaagatacaacagattaattggtaataatgtggctatggtttcaggttctgatatgcacggaactcctgtaacgcttttagcaaatgatttaggggtttctcctgaagaaatctcttcaaaatatcatgacatatggtctaaaagcctcaaagatatgaattttcagtatgatttatatactaatacacatacagataaccatatggaaattgtaaaggatatattttcagatttgttagctaaagaattacttgaaattagagaacagctaatgccttattcaattactgaaaatatatttctaagcgataggctggttgaaggagaatgcccttgtggagataatgaaaaagctcgaggagatcaatgtgaacaatgtggcaaaactcttgatccgagtgatctaaaaaatattagatcaaaaagagatggctcaatacctgaattcagaaaaacttctcattattttctcaagctaagtcaaatggaatcaaaaattaaaaaatggataaattctagagaaggatggagacaaaatgtcaaaaaccaaagtctttcatttataaatgaaggactaagggatagagcaataactagagatttatcatggggtattgatattcccgttgaaggatgggatgataaaaaaatatatgtttggtttgaagctgtattgggttatcttacagctacagttgaactgtttagcaaaactgaaaatcctgaccaatggaaagatttttgggaaaaagaagactcagaatcatattatttccaaggtaaagataacattccattccatactataattttgcctgccattttacttggaattggtggtaaaaatttgccaactgatgttgttgcaaatgaatatcttaatttcgcaggaagagaattttctaaaagtagtaattgggcagtttggttgccagattttctagaaaaatactcacctgattcattaagatattatctaacttcaataatgcccgaaacctctgactcagattttacttgggaaggatatgtagcttcaaataataacgaacttgttgcaactcttggaaactttatacatagagtattaacaatgtctcatagaaattttgatggagaggtcccatattttgatacaaattcatcatcaacaaaagaaataattgaaaaatcagaaaaagctttggaagaagttggtgaatcaatttcaaaaagaaaatttagagaaagcttaaataaattaatgaatctagcaagatttggaaatcaatatttagataaacatgagccttggaaaaaaataaaagaagacaaaaaatcggcaggtgaagttttaggtcaatcaatgattataataagcgctataagctccatgcttgaaccttttcttccaaactcagctgaaaaacttcaaaaagtaatttttaatgataaaaaaaataattggaacttaattcttccaatttcaggagataaatttgataaaccaactccattatttgaaaaattagaggaagaaaaagtgctagaagaaaacgggatgatttctgatgagtag

SEQ ID NO: 296416 - DNA, 1306 bp, Unknown
  Bacterial polypeptide expressing nucleotide sequence isolated from the Sargasso Sea
atgaaaaaaattcttattacatctgctctaccatatataaatgggataaaacacctaggtaatcttattggaagtcaattacccgctgatgtatatgcaagatatatgcgagcaagaggtaataaagtactctttatttgcgctacagatgaacatggtacaccagccgagcttgcagcgattgagaaaaaagaaacggttgaaaaattttgtgagaaaatgtggaatattcaaaaaaatattgctgatggtttttttatttcttttgattacttcggccgttcatcaagccaacaaaatcatgaactcacccagcacttcgctaccagattatgggaaaatggttttttaaaagaagtaaatgaaaaacaatttttttccacagaggatagccgatacctgccagatcgatatattacagggacttgcccatcatgtgggtatgaaaaagctagaggagaccagtgtgaaaattgtacaaaacagcttcaacctacagaccttattgatccttcctctacaatatcaggatctaagtcattagaaattagagaaacaaaacatttatatctaaaacaaagtgaacttaaaaataaattagatgattggatttcaaaaaaagatgattggccaattctaacaaaatctatagcaaaaaaatggcttcataataaggaaggtttaaaagatagggggataacgagagatttaacttggggagttaaagtaaaaaagaatggtaaagcttggaagggttttgaaaataaagtattttatgtctggtttgatgcacctattgcatatattgcggctacaaaagaatggtcagaaaataattccaacaaggaatggaagaagtggtggattactgatcaaggagccgatgaagtatactatgttcaattcatggctaaggataacataccgtttcataccctttcttttcctgcaactattttcggatctggagaaaattggaagctagttgattacataaaaggatttaattggttgctttatgaaggaggtaaattttcaacaagtgagaagcgtggtatttttatggatgttgccttaaaaatatttccagctgactattggcgttggtggttattatctaacgctcctgaaaattctgatacaaattttacttgggatagttttcaaaatacaataaataaagatttggcagatgtattaggaaattttataacaagagtaacaaaattttctttagcaaaatttggtagcaaaattcctataagcaataaatatggtgttttagaaactaaaacaattaatgaat

SEQ ID NO: 296417 - DNA, 775 bp, Unknown
  Bacterial polypeptide expressing nucleotide sequence isolated from the Sargasso Sea
aatgaaaaaaagcaaggaaacttttacgattactgctgctctaccatatgcaaatggacctattcatattggacatttagcaggtgtatatatacctgctgatatatatgcaagatataagagactgactgaaaatgatgttgcatttatttgtggaagtgacgagcatggtgtagctatatcattagcttcaaaaaaagcatccataagtccaaaagaattaattgataagtatgatgaaatgattaaatcatcattccaagaatttggtatttcatttgataattattccagaacatcaaaaaaaattcatcacgaaacatcaatagatttatttaatttattaaaagaaaaggatctgttttcattaatagagtctgagcaattttttgatataaatgaaagtcaatttttagctgatagatatattaccggtgattgtcctgtgtgtggttcagaaggagcttatggtgaccaatgtgagaaatgtggttcagcattaagtcctgaagaattgaagaatcctaaatctacaatttcagattctattcctattttaagaaatacaaaacactattatataaagctaaatgagtttgaagatttcttaagaggttggatcactatagataataaagacatttggaaagctaatgttatcggacaagttaaatcatggctagataatggactcaaaccaagagctgtaactagagatttagactggggtattccgattgaagttgatggtgatgatggtaaagttctatatgtt

SEQ ID NO: 296418 - DNA, 1063 bp, Unknown
  Bacterial polypeptide expressing nucleotide sequence isolated from the Sargasso Sea
tacaaaactagttcttcagaaaatatttctgtttgtacaacaagtatttgaaaaacttcaaaaaaatggtcacatttatgaaaaagaaatcatacaatttttctgtaattcttgtcaaaaattccttccagacagatttgtaataggaacttgtcctcattgcaatgcagaagatcaatattctgatttatgtgaaaaatgtggccgtattcctgaagaaattgataatcctcattgttcaatttgtggcgaaaaacctgaaaacaaatccaccaatcactatttctttaaactaaaaaacttctccgaacctctccttgattatcttactaatacgccacatcttcaaaaagatgtaaaaaaatatgttgaaaattggattaaagaaggtcttgtagactgggacataacacgggatatttcttggggagttcctattccaattgaaggtctaaaggacaaagtattctatggttggtttgataatcatcttgcttacatatcatctactttgaaattcttagaagacaaaaacattgatggaaaaaacttttggaatgatgcagacatttaccatttcattggcaaagacattgtttatcaccattacttgtttttacctgcaatgagattaggtattgataaagaattcaaattacctgattacattccaactcgtggccatttaactcttgaaggaaagaaaatctcaaaaagcaggaattggtatatcggactaaaagattttctagaaactttccctgcagactatcttcgtttctatcttatttctatcaatccttattctcaagatgatctcaattttgattgggaacaattctccacaaaaattaattctgaattgattggcaatctaggcaatttggttaatcgtgcacttgggttcacaaacaaagcgtttgacggtgttctacctgaacctgaaaactttgatgaaaaggattccgagtctgaagaaaaaataaaatctcttgctgaaaatgttggaaaattaatgcaagagaatcatcttgatcgtgcattgaaacaattgatggaattt

SEQ ID NO: 296419 - DNA, 749 bp, Unknown
  Bacterial polypeptide expressing nucleotide sequence isolated from the Sargasso Sea
aaaaaatatagatcatgattttttagatgagtgttcttctgaatatgaattaataagaaaagatttaaacaataaggatttttctaaagcagtgagcagaattttaaaagttgccgacgatacaaatagctacattaacaataaaacaccttggaagctaaatgatgacgatgctttggaagttgcaactactggcatatctatatacaaagatttatgtatattaattatgccaatcatccctaaccttgcatctaagggactttcacaagtgaagatagaaaatccatcgtttgatgatcttaataatgaattaaccaacgtagagattaatgcttataatccattactaaatcgattagaagataaagatctcttaactccttcaaaggaaatgaagatgactgaaattgataataatgaaataactattgatgattttgcaaagattgatcttagggtagctgaagttattgaagcaaatcatatagatggtgctgacaaactaatccagttaacacttgatgttggtgagctaggacaaagaaatgtttttgcagggattaaatcaaagtactctcctgaagaccttcagggaaaatttgtagctttagttgcaaacctaaaaccaagaaaaatgaaatttggtacatctgagggtatggtccttgctgcctcgaatgatgaaggtggaatttttattatgagccctgcttcaggtgcaaaagctggagataaaataaaatgac

SEQ ID NO: 296420 - DNA, 1153 bp, Unknown
  Bacterial polypeptide expressing nucleotide sequence isolated from the Sargasso Sea
taattcaacaccaatattaaagcagactaaacattactttattaagcttaatgaatttgaagaattcattagaaattggataactgttgaaaataaagataagtggaaaacaaatgttgttggacaagttaaatcttggttagataatggtttaaaaccaagagctgttaccagagacttagattggggtataccagtaaaagttgataatgaagatggtaaagttctttatgtatggtttgaagcacctattggttatatatcctctacgattgaatgggcaaaaaaaaataataaagattgggagaaatattggaaaaatccggataccaatttaattcattttatcggaaaagataatattgtattccattgtattatttttccaataatgttaaaaatgtttgggaattttattttgccaaagaatgttccagcgaatgaattccttaatcttgaaggtaataaaatatcaacttcaagaaattgggctgtttggctgcatgaatatttaattgattttccagatatgcaagatgtacttagatatgttttgatatctacatgtccagagacaaaagataatgacttcacgtggaaagactttcaggcaagaaataatagtgaattagtagctatatatggaaattttgccaatagagttctatcattaattaaaaaatattacgatggcaaaataccaaaagtaaaatcaaaaaacagagtcgatgatttggtattagaggacgttaaagtattgaaagaagaaattgagttaaatctagatagctttaaatttagagaagcaactaaaaatttaatgaatatagccagaataggcaataaatatcttgctgagactgagccatggaaaataaaagaatcagatcctttaagagtagaacaaattcttcatacttcctttattataatttcttatttagctattgtgtctgaaccgtttttaccttttacatctgttaagttaaagaatatgattggactaaatgattacagttgggatgatttagataaaatatttggtactattaactacaactttacgatagttgatattgaaatactttttaaaagaatagaagactctgagatagaatatcaaatagataaattaaaaaaaagcgctagttaa

SEQ ID NO: 296421 - DNA, 109 bp, Unknown
  Bacterial polypeptide expressing nucleotide sequence isolated from the Sargasso Sea
aatgaaatcacgcaagattctggtaacaagtgcattgccatatgctaatggttcaatacatattggacatgttcttgaatctgtaattactgatatttgggtaagatac

SEQ ID NO: 296422 - DNA, 517 bp, Unknown
  Bacterial polypeptide expressing nucleotide sequence isolated from the Sargasso Sea
atggaaagcaaaaaacgatatacaataacatctgcgttaccatatacaaatggtaaaattcatattgggcacctagctggtgcatatattcctgccgatatatacgcaagattcaaaagggtaacggacaacgatgttgcatatatttgtggaagtgacgaacacggggttgctatttcaattcgagcaaaaaaagaaaaaaaaacaccaaaagaaatcattgataaatatcatgatttaattaaaaaaagtttttctgattttggaatttcatttgataattattctagaacatcatctaaaatccaccacgagacagcgtcagaattttttaaattcttagaaaacaaaaaagtttttgaaataaaggattctaaacagctttatgatccacaagaaaaccaatttttagctgatagattcgttgagggagagtgtccacattgtggatttgaacatgcttatggtgatcaatgtgaaaactgtggtagttcactaagtcctgaagaattaataa

SEQ ID NO: 296423 - DNA, 788 bp, Unknown
  Bacterial polypeptide expressing nucleotide sequence isolated from the Sargasso Sea
catgaagtatttagttacaagcgcccttccctatgcaaatgctcctctacatttaggacacgttttagaaattgttcaaacagatgtctgggtaaggcaaaaaaatctttccaatgaagaagctctttatttttgtgcaagcgatacgcacggtacaccgattatgcttaaggcaaaagaaatgaatgttactccagaggaactaattaaagacatacatgaaaaacatcatcaaacttttaaaaactttaatgttaaattagcgaattttcactcaacacattctgatgaaaataaacacttaacatcagaaatatttcagaatgctattaaaaataaatacattcataaaaaggaaatttcccaactatatgacgaaaaagaacaaatcttcttagctgatagatttgtaaaaggttcatgtccagcttgtggagctgaagagcagtatggggacgcatgtgaaaagtgcggatctacttatgatgctcttgagttaaagaatccaatatcagtgctttccaataccgcacctgtagtgaaagaatctgaacattatttctttaaattaaatgaatttaacgctttcttaaaagaaaatgttcaaaagatctcaaatcaaacacccattaaagcaaaactagatgagtggttaaatgaggatttacgagattgggatgtttcaagagatgagccatatttcggatttaatgtacctggggaagattcgaagtacatttatgtctggatggatgcacccagtagggtatctgtcatctattcaaaac

SEQ ID NO: 296424 - DNA, 1105 bp, Unknown
  Bacterial polypeptide expressing nucleotide sequence isolated from the Sargasso Sea
ataatcacaagtgctctgccatattccaatggtgagatacatctgggtcatgttgcatctacatatctccctgctgatgttaccactcgtttcttaaaacaaaatggtgttgaagcatattacgtatgtgcatctgatgattatggaactccaattttaatacaatctgaaaaattaaaacaaactccacaagaatatgttgcacattggaataaacgtgattttgaagattttacagcttttgatataggatttgactttttttataaaacaagttcagaagaaaatatctcatttgtccaagatgtctttaaaaaaattgaaaaaaatggacatatctacgaaaaagaaatcatccaagctttttgtacttcttgtgacaaatttcttccagaccgatttgtaaagggaacttgcccattttgtgatgctgaagatcaatattctgatttatgtgaaaaatgtgggcgcattcctgaagaaattgaaaatcctcattgttcaatatgtggtgaaacacctgtacaaaaatcaaccaatcattatttctttaaactgaaaaatttctctgaaccacttttggaatatcttgaaaatgctccacatcttcaaaaagatgtaaaaaaatatgttgaaaattggattaaagaaggactagttgattgggatatcactcgagatattccgtggggagtgcctattccaattgatggattaaaagataaagtattctatggttggtttgataatcatcttgcatacatttcttctacgttaaaatttctgaatgataaaaatattgatggcaaaagtttttggaatgatgctgacatttatcatttcattggtaaagatattgtttatcaccattatctatttttacctgcaatgcgattgggacttgaaaaagaattcaaattacctgattacattccaactcgtggtcatcttacccttgaaggtaaaaaaatatcaaaaagccgaaattggtacattggtttaaaagattttttagaaaaattccctgctgattatttacggttttatcttatatccataaacccatattctcaagatgatcttaattttgattgggaacaatttt

SEQ ID NO: 296425 - DNA, 541 bp, Unknown
  Bacterial polypeptide expressing nucleotide sequence isolated from the Sargasso Sea
atggataaaaatttttatattactactccaatatattacccatctggaagacctcatatgggacatgcatattcaagcattatagctgacttttttgcacgatttaaatcaattgatgattataatgttcattttttaactggtacggatgagcatggtttaaagatacaaagatcagctgaaaaagccggcaaggatcctaaggaattctgtgatcaaataagtcaaacatttaaagatctttcaaaaacattaaatttatccaatacagattttataagaactactgaggatagacataaaaaaacagtccagcatctctggtctcttcttgaaaaaaatgatgatatttatttatcaaattattctgggtggtattcagtctcagatgaagctttttacaatgaagatgaaatagaagaaatagagggaaaaaaaattgcaaaattatcaaaatctaccgttgaatggatagaggaggagtcatatttttttcgactttctaaatggcaaaaacctttattagaattttatgaaaata

SEQ ID NO: 296426 - DNA, 1075 bp, Unknown
  Bacterial polypeptide expressing nucleotide sequence isolated from the Sargasso Sea
gatgaaacatggtctcaaaatacagaaagctgctgaaagtatgggaaaagagcctttagagttgtgcgacgaaaactcacaaatttttagagaccttacagctatattagatttgtcgaatgatgactttatcagaactactgaacagaggcatattgacggcgcatcttttttatggaagagactgcatgaaagaaatcaaatatatttaggtgaatatagaggatggtattcaattaatgatgaaactttttacaatgaaaaagatttagtaaagcaaagtgatggaacctttaaaactgttacaggtgggcctgttgattggattacagaaaagtcatatttttttaaactatcggaatggtctggtaaattattagatttatacaaaaaaaacccagattttatttgtcccagatctaaaagaaatgaggtaattaaatttgttgagtctggtttaaatgatttgtcagtatctagaacatcatttaactgggggattaaaactccaacagacaaagatcatattatgtatgtttggctagatgctctaacttgttacgcaaatggcgttaattatctaacagacttagaaaatgggctaagtgactactggaacaatgcaattcatatagtgggaaaagatatattgagacatcatgctgtatattggcctgcttttttactggcagctgatttaaaattgccgaataaaatatttgcacatggatggtggacaaatgaaggcaataaaatttcaaaatccttaggtaacgcaattgatcctttggaaataattaataattacggtcttgatcaatttagatacttcttgttaagagaagtcccgtttggtaatgatggtgatttttcagttaaagctttagtgaataggattaatagcgatttagtgaacgaccttggaaatttatgccaaagatcacttacaatgatagaaaaaaaacttaagtcaattattcctggtaaaactagcataggtcctaacgaggaaattttagaaaactcaagtgaagaggtaataattaaagggtcaaaaatgatagatgaattaaga

SEQ ID NO: 296427 - DNA, 876 bp, Unknown
  Bacterial polypeptide expressing nucleotide sequence isolated from the Sargasso Sea
aacatgtaatctatgtctggttagatgctttaacgaattatctaagtgctttaaacttcccagatatagacgacaaaagttaccaaaatttttggccagcagatatacatataattggcaaagatattttgagatttcatgcaatttattggcctgcttttctgttggcagcaaaacttcctttacctaaaaaaatatttgggcatgggtggatattgtctgacgataaaaaaatgtcaaaatctttaggaaatattttagatccaattgaaataatcgaaaactacggtttagatcaactgagatattatcttataaaagaagtttctctaggtaatgatggaaatatttctatgaaaaatctgaaaaactgtataaataatgatctagcaaataactatggaaatttatgccaaagagtattttcatttataaaaaaaaattgttctaataaaatcccaaaaccaaaaaaactagaatctattgatttaaaattgatagataaattaaaaaaagatgttccaaatttagttaaattaatggataatcaaaatttaaatgagtatattaaatctgttgtcagttattcttttgatgcaaacaagtattttaacgatttagaaccatggtcggtaaaaaagaaagacccggagagaatgcaagcaattttatttacagcttctgaacaaataaaaaacataagcattttgttgaatgcaattataccctcatctactgaaaaagtttttaaaacgttgaatataaataaaaaagacataacaattaatcagataaatagtttagatacttttgaccacaataaagaattaaaagaattagatatattatttaataaaattgaaaatgataattgat

SEQ ID NO: 296428 - DNA, 958 bp, Unknown
  Bacterial polypeptide expressing nucleotide sequence isolated from the Sargasso Sea
ttctgcaactttaggctccctgatagcataaatgtgcacggattcttaactattaatggtgaaaaaatgtctaaatcaaccggtactggtattttagcaaaagattttgtgaaatttacaaatcccgaaacattgagatattattttggagcaaaattaaacaataaagtagaagatattgatttaaactttgatgactatattcaaagaattaattctgacttagtaggaaaatatttaaacattgcctcaaggtctgcttcatttttgaaaaaaaattcaaatgttatttctagtgatatagatcaagaggttataaataaattaattgaaaagaaaaatgaaattatcaatctatatgaatctaaacaatattcaaaagttgttagaattatcatggatttagcagacgacataaacaaatatattaacgagcaaacaccatggaaaaaagataatgatgaagctgtgataatagcatcaacagcaattaatgcttttaaaattctaagtatttatcttcatccaataatacccaatatcaccaatgaggcatttaaatttttaaatatagattcgcccttatttgatgacatagatgaaaaattaattaacaaaataaataattacaagccattgcttaataggcttgataaaataataattccaaaggaagaagatatggataatgtaaatctaataaatattgaccaattctcagttgttgatttaagagttgctaaaattactgatgcgtctaatgtggaaggcgctgacaaattattacaactcactttagacgtaggagaatttggtactaggaatgtatttgcaggaattaaaagtacatatgagccagatgatttaattaatagattggttatattggtaaataatttagagcctagaaaaatgaaatttggtgtttcagaaaggtatggttcttgcctcgagtaat

SEQ ID NO: 296429 - DNA, 1069 bp, Unknown
  Bacterial polypeptide expressing nucleotide sequence isolated from the Sargasso Sea
gaacttgattctggtcaatttggtgaggcaaaacaaataaaggaaaaaaattattttttcagaatgagtaaataccaaaaaactttaatagataaaattgaaaaagatgaattgctaatacagccaaaaagtagaaagaatgaggtacttggttttcttaaaaatgaattatctgatctttgcatttcaagaccgaaatctcgtcttgagtggggaatagaactaccttttgataataattatgtaacatatgtatggtttgatgcactaataaattatatatcagctataggagcttttaaaaatgatgaacagttttcttctttatggcctgcagatgttcatttaattggtaaggatattttaactacacattcggtttattggcctacaatgttgctatcattaggattaccattaccacaaagaatttttgcacatggatggtggcttaccgatgatcagaaaatgagtaaatcattaggaaatgttgtaagtccgttaattttaatagatgattttggagttgattctgttagatattatttaatgtctgaaatggttttgggtatggatgcaacattttcatcagaatcttttgaaaaaaaatataatagtgacttagccaatgattttggcaacttagttagtagagtttcaactttaataaagaataattttgatgaaaaaattccaaaaagtggcttaatagaatctgatctctcctccaattttcagaaaatagttttaaagagaaaattagataatttggagattgataaagtaattaatgatataatgactttcattcgaagtattaatgtttttatggaacaaaacgaaccatggaaattagtaaaaagtgataaagctcaggctggagatatattataccattgtgcagaatccttaagattagctgctgtaatgttatctcctgtaatgccttcaaaaaccaaagatattttagatattttaggtactaatgatgtagaattagtttggggtaaattaaaatcaggatcaaagatttctacctcagagcctattttcccgagaattagttaat

SEQ ID NO: 296430 - DNA, 1183 bp, Unknown
  Bacterial polypeptide expressing nucleotide sequence isolated from the Sargasso Sea
ggaattagagtgccatctaatgaaaatcatacaatatatgtttggctggatgcactaacaaactatttaagtgcattaaattatccagacactaaaaataatttgtataagaacttttggccagcatcattacatttaataggtaaagatatattaagatttcatgctgttttttggccagcatttcttttagcagcaaaaattgacccccctaagagaatttatggtcacggatggatcctgtctggtgatgaaaaaatgtctaaatcaaaaggtaatattttagatcctatagatataatcaaagagtatggtcttgacccgcttagatattatttaataaaagaagtgtcatttggaaatgatgggaatatttcaagagatcagttagaaagatgtattaatagtgatttagcaaataattatggaaacctatgtcagcgtgttatttcatttttagataaaaatttaaatttagaaattccaaataatgcaaattttgaaaatgaagatcataatattttgaataaatttgatgaaaattataataatttgataaatgaaattgataatcaaaatattaattattatataaatttcgtaattaatcagttattcgcagcaaataaatattttaatgaccaggaaccatggaacaaaaagaatgatgtaaaacgtctacatacaattttatacgtatcattagaattaataagaaaaatttctatacttttgtatcctgttatcccagaaagtgcattaaaagttttgagtatttttaatgtaaaagaaactgaattaacgtatatctcaattaaaaataataactttctaaaacctaaaacaaaaataaaaaaaattgaaatattatttaaaaaaatagaaaaaaaaaaattgattgattctcactgtcatctagatcatgaaccactttttgctgatttagataatgttataattagagcaaagaatattggtgttaaaaaatttctaacaatctgcacaaataaaaagagctacaaaaatataattacttttattgataaatatccagaagtttatggaacttttggtatacatccccataatacagaaaatgaattattaacaaaaaatgaaattattgaaaaggtaaaaataaataaaaaatttataggggttggcgaaagtggtcttgattttt

SEQ ID NO: 296431 - DNA, 649 bp, Unknown
  Bacterial polypeptide expressing nucleotide sequence isolated from the Sargasso Sea
atggataaaaatttttttattacaactcctatttactatccatctgccaaacctcatatgggtcatgcatattcaagtataatttccgacgtaatagcacgatttaaaagattagatggatataatgttgaatttctaactggtactgatgaacatggtttaaaaatccagagagcagctgaggcaaagggtgttgatacaaaagatttttgtgatgaaataagcaaaacttttagaaatttatctgatcttcttaatcttactaatactgactttattagaacaactgaggaaagacatattaaatctgttcaaaacttatggaatactttgttaaagaataatcaaatttatttatcaaaatattcaggttggtattcagtttcagatgaagcattctacaatgaaaatgagattaaagaagaaaatggaatatatatatcaatcaattctggatctaaagtcgagtgggtcgaagaagaatcttatttttttaaattatctgaatgggaaaataagttgttaaatttttatgaaaaaaatccaaaatttattttacctaattctagacgtaatgaagtaatacagtttgttaaaagtggactaaaagatctttcggtaagcagaaaatctttttcttggggtataa

SEQ ID NO: 296432 - DNA, 205 bp, Unknown
  Bacterial polypeptide expressing nucleotide sequence isolated from the Sargasso Sea
atgaataacagtttctatatatcaacacccatttactacgtaaatgataagccacatataggccatgcatatactaccatattagcagatgtgattgcccgtttttatcgtcagctcaattatgacacctttttcttaacagggttagatgaacatgggcaaaaggtgcaggaagcagcaagtaatcgaaaagtagagccacaag

SEQ ID NO: 296433 - DNA, 739 bp, Unknown
  Bacterial polypeptide expressing nucleotide sequence isolated from the Sargasso Sea
cacgctgtatattggccagcttttttattagcagcaggcctcgagccacctgaaagagttttcgcgcacgggtggtggactaacgaaggtcagaagatatcaaaatctttaggtaacgtaattgacccaatagagttagtagagaaatatggtctcgatcaagtaaggtatttcttgttgcgggaagtaccgtttggaaatgatggagatttttcaaaaagttctatgattaatcgtatcaatagcgatttatcaaatgatttaggtaacttatgccagcgtgtactgtcatttgtgcaaaaaaattgtgatgcaagaataccgcagaacaatgggttttctatagatgatgaacggctgattgctcaagtttatggggtcttgccaagcctgagggcggacttcaattctcaatcttttaatgtggcactggaaagaatttggagtatcgtttcttcctctaacaaatatattgatgagcaggcaccatggaaactacgaaagactgaaccagaacgcatgcaaacagtattatttacacttctggagacgatacgctgtattggtatattgcttcaacctgttatgccagcctctgctaacggaattcttaaccagcttgctatagatccatcagatagatcctttagcgctctaaatgaggaacactgcttgcagtctggtgctaaattgcaacagccaaatcctatatttccaaggtttgatgaaaagacataaa

SEQ ID NO: 296434 - DNA, 490 bp, Unknown
  Bacterial polypeptide expressing nucleotide sequence isolated from the Sargasso Sea
gtggtcaacatgcccagccgctgcgcgggctttttgcgcaagaagtttgataatcgcatggacaaggagtgtgctgagcccgagctggtacagagctttatcgatgctggcgacagcatcgctgggttgtacgagacgcgtgagttcaaccgcgccatgcgcgagatcatcactttggcagatcgcgccaaccagtacatcgacgagaaaaagccctgggtcatggcaaaagatgatgcattggtcgatgaggtgcaggcagtctgctcagtcggtataaatttgttccgagtccttgcgacttacctaaagcctgtgctgcccgccatggccgaaaaatccgagacgtttctccagcactctctcgattggaccgcactgagcgcgccactggttgatcatcaactcgcgacgtttgaggcactactgcagcgcgtcgatgccgatgtcgtcgcggcaatggtcgaggccagcaaaagcggcctctgaa

SEQ ID NO: 296435 - DNA, 796 bp, Unknown
  Bacterial polypeptide expressing nucleotide sequence isolated from the Sargasso Sea
taaagacgaattatataaaaatttttggcctgctgatgttcacataattggaaaagatatattaagatttcacgctatttattggccagcctttttaatggcagctaaattacctttgcctaaaagagtttatggccatggttggatactatctggtgatgaaaaaatgtctaagtcaaaggggaacatactcgatccattagagattatagatgtatatgggctagatacacttagatattatcttttaaaagaggtttcctttggcaatgatggaaatatttctcaagaaaagcttgaaagttgtataaatagtgatttagcaaataattacggaaatttatgtcaaagagttttgactttttgcgaaaaaaattgtggttcgaaaatcccaactagtgattttataaatgatgatttggagattttgaaaaatttcgaaaatttagcatatttgagagatttaatagacaatcaaaacatcaatgattatatgaaatttattatagatatgcttttttcatcaaataaatattttaatgatcaagaaccttggaagaaaaaaaatgataaaaatagattgaatacaattgtttatactgctttagatttaattagaaaaatttctatactattaaatccagttatacctgatacaactttaaaggttctaaaaatatttgacattaataacgacaaactaaaatttgaagatattaataatcataaatttctggaaagtggaaaaaatattggaaaattaaatatactatttaaaaagatagaaaatgattga

SEQ ID NO: 296436 - DNA, 996 bp, Unknown
  Bacterial polypeptide expressing nucleotide sequence isolated from the Sargasso Sea
aaaaagacattataaagcggttaaagagatttggagtagattgataaaatctaatgatatttatttatcaaaatacagtggatggtattcagtttctgacgaagcatattatgatgatgacgaaatagtaacaaaagaaaacatcaaatactcaaaaaattcaggttccaaagttgagtgggtagaagaggagtcgtatttttttaaattgtctgcctggcaagaaaaactaataaaattttatgaggacaatccgaaatttattttacctgagtctagaaaaaatgaagtagttgaatttgtaaaaagggggttaaaagatttgtctgtaagtcgaacttctttttcatggggtattcccgttcctgaaaattcaaaacatgttatatatgtctggcttgatgccttaactaattatttaagtgcactagattttcctgatacaaaaaataaaaaatacaaaaagttttggccggctactattcatgtaattggaaaagatatattaagatttcatgctgtttattggcctgcttttttaatggccgcaaacgttcctcttccaaaaagagtttatggacacggatggatactttccgatgaaaaaaaaatgtctaaatcactaggaaacattttagatcctttagaaattatagataaatatggaattgatcagctgagatactatttaataaaagaagtttctttgggtaacgatggaaacatttctctagaaagtttgaagaattgtattaataatgatttagcaaataattttggaaatttatgccaaagagtatttgcttttgttgataaaaactgtgagtcaaaaataccgttatgtaaaaatttttttgaagaagacaatataatcttaaacgacttaacaaaaaagatttcaaatttaaaaaaattaatgaacaatcaagaattaaatttatacataaaagaggttataaatttttcttttgttgccaataaatattttaatgatct

SEQ ID NO: 296437 - DNA, 973 bp, Unknown
  Bacterial polypeptide expressing nucleotide sequence isolated from the Sargasso Sea
aaaaaaatttcaattagttctaagtcaacggttgaatggatagaggaggagtcatatttttttagactttccaaatgggaaaagcccttattagatttttatgaaaaaaaccctaattttatttcacctgcatcaagaaaaaatgaggtaataagttttgttaaaagtggtcttaaagatctttcagtaagtagaaaatctttttcatggggaattaaagtccctgggaatgataaacatgttatttatgtttggcttgatgcacttactaactatataagtgctttaaattaccccaataaagaagatgagttgtttaaaaaattttggcctgcctcaatacatttaattggtaaagatatattaagatttcatgctgtatattggccagcgtttttattagctgctaaaattgaactaccaaaaaaagtttatggtcacggatggatactttcgggagatgagaaaatgtctaaatcaaaaggcaatattttagatccattgcaaattattgatgaatatggcctagatccattaagatactatttaataaaagaagtctcttttggcaacgatggaaatatttcacaagataaattagaggactgtataaatagtgatttagcgaataattacggaaatttatgtcagcgtgttattgcttttgcaataaaaaattgtgatgggaaaataccagaaaaaataaaatttgaagaagatgatttaaatattttaaataaatttggtgacaatttagaaaatattagatctaagatagatcatcaaaatttaaatttttatattgactatatagttaattcactttttgaggctaataaatattttaacgaccaagagccatggaaaaagaaagacgatattattagattaaatactatcgtatttactgccttggaaattattagaaagataagttttttactctatccaataatcccagatcagtattaaa

SEQ ID NO: 296438 - DNA, 1107 bp, Unknown
  Bacterial polypeptide expressing nucleotide sequence isolated from the Sargasso Sea
ggagttgagccaaaagaatttgttgacaagatcagtcaaaaatttcgagatttgtggcctaatctgcatattgaacacgaccagtttattcgtacaactgattccaatcataaagcttgtgttcagaaaatactgcaaaaaatttacgaacaaggggagatatatctaaaagaatacgagggactttactgcataggatgtgagaggttttttgatgagtcagagttagaaaacggtaactgccctgatcatcaaactcctccagaattttataaggagcaaaattatttcttcaagatgagcacttaccaggagtggctaactaaagagttaaagcaaaatgtagactggatttatcctggacgttacaggaatgagctaattcagttgcttaaagatcctctacaggatttgtgtatttcaaggcctaaaagtagggtaaagtggggtattgagctgccttttgacagcaaatttgtaacttatgtctggtttgatgcactgcttaattatgtcagtgctcttgactggcctgatggagaaaaatacaaaaaattctggccacatgttaaccataccattgggaaagatattctcaaaacacatgggatatactggccctgcatgctgaaagcagcagaaatgcctgtctttaaaaagctagttgttcatggacattgggtggttggagggaacaaaatgagtaagtcattgggaaatgtagttgatcccttagccatgagagatcagcttggtgttgatgcgctgcgttattttttactgcgtgatatgagttttggtgaagattccaatttcacagaagagctcgctgtaactagatataatggagatttagcaaacaattttggaaatttaatgaaccgatcaataagtatgagtcgcaaaaatttccagggatgtgtccctccatcaggtaaaacaggagatcaggagaaagaacttcatcaatcttttgccaatggcgtaaagaaatgccacgaatatattattaaattccagcctcatcggaccttagaacatgtggcattgcttagcagcaaggtgaataaatatatagatacatgtaaaccatggaaactaacaaaa

SEQ ID NO: 296439 - DNA, 784 bp, Unknown
  Bacterial polypeptide expressing nucleotide sequence isolated from the Sargasso Sea
tacatttaaatggggcgtgccggttcctgatgatgacgatcatattatgtacgtatggcttgacgctcttacaaactatatcactgctgtcgggttccctgaagtggagggagagtacgctaattattggcctgcgagtcttcacatggttggaaaagatatattgcggtttcacgccgtttattggccggcttttttaatggcagctggtttaccgccgcctgagcgggtatttgcacatggttggtggactaatgagggggaaaaaatttcaaaatcacttggcaatgttatcgatcccattgatctggtgaggcgatttggcctcgaccaggtaagatactttttgcttcgtgaggtacctttcggcaatgacggtgatttttctcaaagggctatggttaaccgaattaatggtgatttggcaaacgactacgggaatttggcccaaagagttctatcgatgattgcaaagaactgtgagggcattgtgccaacgcccagtctatttaatgacgaagataatgcattacagaattcagctacagcacttctgggtaatcttcgaggtaaaattgaagtgcaggcatttcatgaggcgctggagtctatttgggcacttatccgagcagccaactcgtatgttgacagtcaggcgccttggaaactgcgaaagggagacccggagcgtatggcaaccgtgttatatatactcgcagatacgattaggaaattagcatttttaacgcaaccatttatgccagggtcctctagcataattctt

SEQ ID NO: 296440 - DNA, 1057 bp, Unknown
  Bacterial polypeptide expressing nucleotide sequence isolated from the Sargasso Sea
atttgataactttcataccactcactccgatgaaaatagagaaatatctgaaagaatttatctagcacttaaagataaaggtgatattgcaagtaaagagattgaacagttctatgatgatgaagcaaaaatgtttctaccagatagattcattaaaggtgaatgccctaaatgtggcgctaaagatcaatatggagattcttgtgaagagtgtggcgcgacatactcatcttctgaaattaaaaatccaatctcaacggtcacaaatacgaaaccaataaccaaaaagacagaacatgtcttttttaaattaagttcttatgaaaagtttttaaaaaaatggatggatgataatgacattcaaaaagaaataaaaaataaattaagcgaatggctatcaggtggcttagtcgattgggacattactcgtgataagccttattttggatttgagatacctggattgaaagataaattcttttatgtttggttggatgcgcctattggatatattgcatctcataaaaattattgtgataaaaataatcaaaactacttagatgattgggcagaaggatctaaaacagaactgtatcatttcatcggaaaagatatcgcctacttccatggtttattttggccagcaatgttagagggcgcaggttttagaaaaccagatggagttttttgtcatgggtttttaacgattgatggcgagaagatgtcaaaatctcgaggaactttttttaatgcacgtacttatcttaattacttacaaccagattatctaagatattatttttcgagtcgtcttactaataagatagaagatattgatttgaattttgatgacttcatggcacgtgttaattctgatcttgttgggaagattattaatataggaagccgctgtgcaaaatttattaataaagattttaatgatcaattatctgatgaaattggtaatgataatttacttaaatctgtatctaataaaaaaaatgagattatagataattatgaagcaaagaaattatgcagcaaatatgagaatcca

SEQ ID NO: 296441 - DNA, 1042 bp, Unknown
  Bacterial polypeptide expressing nucleotide sequence isolated from the Sargasso Sea
aatggttaaaaaattttatataacgacaccaatttattatccatcagctaaacctcatatgggtcatgcttattcaagtattatagcagatttttttgcaagatttaaaagaatggatggatttgatgtaagttttttaactggtacggatgaacacggccttaagattgaaagagctgctaaaaaaaagggtattaatacacttcagttttgtaatgagattagtcaaactttcaaagatttatcgaaaattttaaatcttactaacactgattttataagaactacagaagatcgtcataaattgtcagttcaaaatttatggaaagaattagaaaaaaatgaagatatttatttatcgaaatattctggatggtactctgtttcagatgaggctttttacacagaagatgaaattgaagaagttgatggtaaaaaacaagctgtttcctcaaaatctcctgttgaatggatggatgaagaatcatacttttttaagttgtctaaatgggagaaaccattactcgaatattatgaaaaaaatccaaattttatttcaccaatatcaagaaaaaatgaggtaattagctttgttaaaagtggtttaaaagatttatctgttagcagaaaaagtttatcttggggtattcaagtaccaaataataaaaatcatataatttatgtatggctagatgctctaactaactatataagtgcactaaattatcctaacactaatgattctttatataaaaagttttggcctgcatcaattcatttaattggtaaagatattttaagatttcatgctgtttattggccagcatttttgctagcagcaaatattcccttacctaaaaaagtttatggccatggttggattttatctggtgaagaaaaaatgtcaaaatcaaaaggtaatattttagatccaattgaaattatagaaaaatacggtctagatcctttaagatattacttaattaaagaagtatcttttggaaatgatggcaatatttctcaagaaagattagaagattgt

SEQ ID NO: 296442 - DNA, 955 bp, Unknown
  Bacterial polypeptide expressing nucleotide sequence isolated from the Sargasso Sea
ctttggaatgaacttgagaaaaatgacgatatatacttatcaaactattctggatggtattcggtatcagatgaagccttttataacgaggatgaaatgagggaattagatggaaaaaagatttctatatcatcaaaatcatctgttgagtggattgaagaagaatcttttttttttagactttcaaaatgggaaaaaccgctattaaaatattatgaagctaatccagattttattgctccacaatctaggaaaaatgaagttattagttttgtaaaaagtggtcttaaagatctttctgttagtagaaaaagtttttcatggggcatacctgttccaaataataaaaaccatgtgatatatgtttggctcgatgctttaacaaattatttgagtgcattaaattatcctaatacagatgatgatttgtttaaaaaattttggccggcctcaatacatttaattggaaaagatatactcagattccatgctgtttattggcctgcctttttattagcagcaaaaattgatttaccaaagagagtttacgggcatggatggatattatcaggtgaagaaaaaatgtctaaatctaaaggaaatattcttgatccacttgaaataattaaacagtatggtctagatcctttaagatactacttaatcaaagaagtttcttttggaaatgatggaaatatatctcaagaaagactagaagattgtattaatagtgatctagctaataattatggaaatttatgtcagcgtgtaagcacctttgcaataaaaaattgtaatggaaaaattccattagaagtaaaatttcatgatgaagatttattaatattaaataagtataatgataatttagatagtattaggtcgcaaattggcaatcaaaatattaatttttacattgattatattgtaaattcactttttgaagctaacaaat

SEQ ID NO: 296443 - DNA, 895 bp, Unknown
  Bacterial polypeptide expressing nucleotide sequence isolated from the Sargasso Sea
acgcacagtgaagagaacaagcagttcgccagcgagatttataccaagctggaccaaggtggttatatcaaacgcaaaaccatcagccagctgtttgacccggaaaaacaaatgttcctgccggatcgtttcgttaaaggcgactgcccaaaatgtggtgctttggatcaaaacggcgacagctgtgattcctgcggcgcgacttatagcccaactgaactgaaaaacccacgttcagtggtctctggcgcaacgcctgtgttaaaagacagcgaacactacttcttcgacctgcctgcttttgagcaaatgctgaaagactggacccgcagtggttcattgcaggacgaaatggcgaacaaactgcaggaatggtttactgaaggcctgcaacaatgggatatcagccgcgacgcaccttattttggttttgaaattccaggcgctccaggcaagtttttttatgtctggttagacgcacctatcggctacctggccagctttaaaaactactgtgataaaaccggcgttaactttgaccagttctggcaaaaagactcagaggctgagatttaccactttatcggtaaagacattatctatttccacagtctgttctggccagctatgttagatggtgctggttaccgtaaaccaacctctgtctatgcgcacggttttgttactgtcaacggcgccaaaatgtccaagtcacgcggcacctttatcaaagcccgtacttatctggaacatttaaacccagagtatctgcgttattactttgcgtctaaactgaccagcaatatcacagacttagacttaaatctggaagattttgcgcaaaaagtgaatgcagatttggttggcaaagtggtcaatatcgccagtcgttgtg

SEQ ID NO: 296444 - DNA, 929 bp, Unknown
  Bacterial polypeptide expressing nucleotide sequence isolated from the Sargasso Sea
ccggtattatatcacaacaccgatttactacgtaaacgatgacccccacatcggccatgcgtacacaacactcgcgtgcgatgtcttggcgcggttcatgcgtctcgacggtcgcgaagtctgctttctaacaggtacagatgagcacggccaaaaagtcgagaaggcagcggaaaacaatggagttgatcctcaagctttcactgatgaaatctctaagaattttcgacgattagcagacgttatgaactttagttatgatgattttattcgcacgactgagtcacgtcatctatcatcttgtcaggcgatttggcaagcaattgcatcgaagaagtcaccacttggtaaagataatatctaccttggcaaatatgctggctggtacgcggttcgcgatgaggctttttacactgaaagcgagctgaaagacgatctcgcgggaaagaaaatcgccccaagcggcgccgaagtagaatgggtggaagagcccagttacttttttcgcctttctgactggcaagaagcccttttaaagttttacaccgagcatcctgattttatagcaccagcaagtcggcgtaatgaggttatcagtttcgttgaaggcggtttaaacgacttatcaatttcgagaacaaccttcaagtggggtgttcccgtacctggagacgaagaccacattatgtatgtttggcttgatgcgttgacaaattacatcactgcggttgggtatccggacacagatggcgacttgtggaaatactggccagcagatctccatatggttggcaaagatatattgaggttccacgccgtctattggcctgccttcctcatggcggcgggtattgaaccacccaagcgcatctttgcacacggatggtggactaatgagggtcaaaaaatatcaaaatcggtgggcaacg

SEQ ID NO: 296445 - DNA, 718 bp, Unknown
  Bacterial polypeptide expressing nucleotide sequence isolated from the Sargasso Sea
atgaatttttatataactacaccaatttactacactaatgatattcctcatataggtcatgcttatactagcatagcttgcgatattattgcgcgatataataaattattaggaaacaatgtattcttcttaacaggtacagatgagcatggacaaaaagtagaaaaagctgctattaattcaaacttaaaacctaaagaatttgtcgataaactttcagttaattttatcaatttaataccttttttaggatgtgaaacagatgatttcataagaactactgaagaaagacatattaaagcttcacaagaactttggaagcaattagaaaaaaataatcaattatatctttcaaattatgaaggttggtactcagttagagatgaagcattttatttagaaaatgaattaaaaaagattgatggtaaatatgttaccgataatggatcacctgtagaatgggttaaggaagaaagttatttttttaaactttcagaatggcaagataagttaatcaattattatgaaaaaaatccagaatcaatcttaccaaaaacgagatataatgaagtattaagttttattaaaggtggattaaaagatctttctatttcaagaacaacttttaactggggagtgccagttccaaataattctaaacatgttatgtatgtttggattgatgcattatgtaactatttaacagcaattggttagc

SEQ ID NO: 296446 - DNA, 884 bp, Unknown
  Bacterial polypeptide expressing nucleotide sequence isolated from the Sargasso Sea
tttgaaattccagaaggaagataataaatatttttatgtatgggttgatgcgcctattgggtacatagcatcaatggagaattggcttaaagataaaaagctaaatgctactgacctttggtcaaaaaattcagactatgaaatttatcattttataggcaaggatattgcttattttcatggtttattttggccagctcttctaagctctgcaaatcttaaacttccagatggaatttttgtgcatggctttctgactataaatggtgaaaagatgtcaaaatcaaaaggcacaggaatttcagctaaagattttgcagaaatgtgtgatccagagaccttaagatattatttagctgcaaaattaaacgataaggtagaagacttagatttaaactttgaagattatgttcagcgaattaatagtgatttggttggaaaatatctaaatattgcctcaagaagtgctacatttttaaagaaaaacaataatgaattatctgagagcatagataaaaatttaattaagtctttgactgacgagaaagaaaagattattaaattatatgaagaaagaaagtattctaaacttataagattaatcatggacttggcagatgatgttaataaatatataaatgaacagactccatggaaaaaagatataaatgaagcagtaagcatttgttcaacatcattaaatgcttttaaaattattacaatctatttgagtccaataattccaaatataaccaaaaatgcatacaaatttttaaatttagaaaactgttcgtttgatgatgtagatattaaattatctggaaaaataaatacctacaaatcattgctaaatagacttgaaccattaataattcctgaggaag

SEQ ID NO: 296447 - DNA, 550 bp, Unknown
  Bacterial polypeptide expressing nucleotide sequence isolated from the Sargasso Sea
tatgaataacagtttctatatatcgacaccgatttactacgtaaatgataagccacatataggtcatgcatatactaccatattagcagatgtgatcgcccgtttttatcgtcagctcaattatgacacctttttcttaacagggttagatgaacatgggcaaaaggtgcaggaagcagcaagtaatcgaaaagtagagccacaagatcattgcaacgaaatggctccacgctttatggagttatgggaaaaactacatatttcaaatgatgattttataagaacaacagaagaaagacacaaaaaagttgttcaagaatttttgcagcttgtttttgataaaggagatatttataaagatgagtatactggattatattcagtttcagaggaaaggttcataacggaaaaggaagctgaaagcggaatatttagggacataaaagagcttaaagaaattaattatttttttaaaatgagcaatttccaaacccaattgatagatcatattgaaaataataataatttcattcagcctgctcatcgaaaa

SEQ ID NO: 296448 - DNA, 835 bp, Unknown
  Bacterial polypeptide expressing nucleotide sequence isolated from the Sargasso Sea
atgaaatcacgcaagattctggtaacaagcgcattgccatatgccaatggttcaatacatattggacatgttcttgaatctgtaattactgatatttgggtaagataccaaaatattaatggtaatgaatgtctctacttttgtgcagatgatacgcacggaacgcctgtcatgctcaaagccaaagagcttggaatagatcctgaagagcttattaaaagaactagagaggagcacataaaaagttattcaagatttaatattaattttgataatttttatactactcattctgatgagaacaaaaaatatgctgaagatatttatcaaaagtgtaaagaaggaaatctaatctttaaaaaagaaattgaacagttttatgactcagaagaaggtttattcttatctgatagatttataaaaggtacatgtccaaaatgtggcgctgaagatcagtatggtgatggttgttctgtctgtggcacgacttatacacctgatgatttactaaatcccgtatcgtcattatcgaattctgagcttaccaagaaaagaactgagcatgtgttttttgatttgcctcaaatgaaagattttcttgagaattatctcaaagacttaactcttcaagatcctataaaaaataaactaaatgaatggattgaggatgggttaaagccatgggatatatcaagagacaagccatactttggatttgaaatacccggagagaaagataaatatttttatgtttggcttgatgcaccgattggatatttagcttctgcaaaaaattgggcagaaaacaataatatggatatgaaagatttatggg

SEQ ID NO: 296449 - DNA, 631 bp, Unknown
  Bacterial polypeptide expressing nucleotide sequence isolated from the Sargasso Sea
aatgactaagaaatattatataactactccaatttattatgtgaatgacgttcctcacattggccatgcgtatacttcagttgcaacagactgtttagcgagatttaagaaaatggaaggatacgatgttcgctttcaaacagggacagacgaacacggtcttaaaattcaaaaagcagctgataagttgaaaataaaacctatcgagctatgtaataaaaattcgaaggtttttgaggatttgactaaaacattaaatttgtcaaacaatgacttcattcgaacaacggaaaatagacatatagagggtgctcaaaatttgtgggacaaactacaaaagaataatcaaatttacttagatgaatatgaaggctggtactcaataaatgacgagacattctataatgaaaaagacttaataagagacgaaagtggagattttaaaactccgactggtggcccagtcgaatggattactgaaaaatcatatttctttaaactttctgaatggagtgacaaacttctaacatattataaaaaaaaccccgattttattaaacctgcatctaaaaaaaatgaagttataaaatttgttgaaggaggactaaaagatttatcagtttcaagaaca

SEQ ID NO: 296450 - DNA, 808 bp, Unknown
  Bacterial polypeptide expressing nucleotide sequence isolated from the Sargasso Sea
aatgctcactatgactcaagtcgcgaagaaaattctggtaacgtgcgcgctgccgtacgctaacggctcaatccacctcggccacatgctggagcacatccaggctgatgtctgggtccgttaccagcgaatgcgcggcaacgaggtcaatttcatctgtgcagacgacgcccacggtacgcctatcatgctgaaagctcagcagcttggcgtctctcctgagcagatgattggcgaaatgagtcaggagcatcagaccgattttgcgggctttgatattagctacgacaactaccactcgacgcacagcgacgagaaccgcgagctgtctgagctgatctacggccgtctgaaagagaacggttttatcaaaaaccgcaccatctctcagctttacgatccggaaaaagggatgttcctgccggaccgtttcgtgaaaggcacctgtccgaagtgtaaatcaccggatcagtatggcgataactgcgaagtgtgcggcgcgacctacagcccgactgagctgatcgacccgaaatccgtggtttccggcgcgaccccggtgatgcgtgaatctgagcacttcttcttcgacctgccgtcctttagcgaaatgctgcaggcgtggacccgcagcggcgcactgcaggagcaggtggcgaacaaaatgcaggagtggttcgagtccggtctgcagcagtgggatatttcccgcgacgcgccgtactttggcttcgaaatccccaacgcgccgggcaaatatttctacgtctggctggatgcgccgatcggctacatgggctcgttcaag

SEQ ID NO: 296451 - DNA, 762 bp, Unknown
  Bacterial polypeptide expressing nucleotide sequence isolated from the Sargasso Sea
tttgcgagattcatggagaaataataattgtaaagtttattttttaactggaactgatgaacatggattgaagatacaaaaggcagcagaaaagaataattctgatccattagcatattgcaataaaatttctaaaatatttaaagatttagctattaagttagatttatctaatgatgattttataagaactacagaaaaaagacatcacacatcagttaatgatatatggagtaggcttattaaatcaggtgatatttatttatccaaatacaaagggtggtattcggtctctgacgaggcttattataattcagatgagattattgagaagaatggaaaaaaatattcaactttttctggttccttagtagaatgggttgaagaagagtcatttttttttaaactatcttcctggcaaagcaagttaatagaatattacgaaaataataaaaattttatacttccaatatcaagaagaaatgaggtaattaattttgttaaatctggtcttaaagatttgtcagtaagtaggacttcgtttacttggggtataaaagtaccaaacaaggaaaatcatataatttatgtatggcttgatgctttaactaattatttaagtgctctaaattttcctaatactaaagattctctttataaaaatttttggccagcttcattacatgtaattggtaaagatattttgagattccatgcaatatattggcctgcttttttaatggcagcaaaattgagcctcaa

SEQ ID NO: 296452 - DNA, 457 bp, Unknown
  Bacterial polypeptide expressing nucleotide sequence isolated from the Sargasso Sea
aatgaatttttatataactacacctatttactatactaatgatgttcctcatataggtcatgcttatacaagtatagcttgtgatattattgcgcgatataataaattattaggaaacaatgtattctttttaacaggaacagacgagcatgggcaaaaagtagaaaaagctgctattaattcaaacttaaaacctaaagaatttgtcgataaactttcagtcaattttattaatttaattccttttttaggatgtgaaatagatgattttataagaactactgaagaaaggcatattaaagcctcacaagaactttggaagcaattagaaaaaaataatcaaatatatctttcaaattatgaaggttggtattcagttagagatgaagcatattatttagaaaatgaattgaaaaaggttaatggtaaatatgttaccgataatggatcacctgta

SEQ ID NO: 296453 - DNA, 910 bp, Unknown
  Bacterial polypeptide expressing nucleotide sequence isolated from the Sargasso Sea
ttaaagccatgggatatatcaagagacaagccatactttggatttgaaatacccggagagaaagataaatatttttatgtttggcttgatgcaccgattggatatttagcttctgcaaagaattgggcagaaaacaataatatggatatgaaagatttatggggtgaaagctctgattatgaaattcatcattttattggaaaagatattgcttattttcatgccctattctggccagcacttttaaagtcatcaaatattcgcttacctgagtcaattaatgttcatgggtttttaactattggtggtgagaagatgtcaaaatccaatggaacctttataaatgcagacgactttgctgaaaactatgatggtgagttattaagatattattttgctgataagtttaataattcaattgatgatctagattttaatgaagatgaatttattcaaaaaattaattcagatatcgtcggtaaatatttaaatattgctagcagagtttcaaaatttattgagaagaatggtaataatctctctgcaaacttagatgtggactttattgagaaaaatctatcaatgatcgatgaagtgattgagcattatgaaaacttaaatctttctaaatctgtaaaaattattatgaagatggcagatgaagttaataaatatattaatgagaatgagccttggaaatccagtgaagaaaaggctgtggaggtatcatcgacagcaattaactgttttagagttatctcaatattgcttaatcctgttctaccaacaataacatcaaaggctttagaggtatttaatgatagtgctacaaatgattttaataatattaaggattatcttgtaaatacaaaaattaatccatataagcccctattaaaaagattaagaa

SEQ ID NO: 296454 - DNA, 910 bp, Unknown
  Bacterial polypeptide expressing nucleotide sequence isolated from the Sargasso Sea
gatgaaccttatttttggttttaagattcctggggaatccagtaaatatttttacgtgtggatggatgcgcctgttggctatctagcatcaataaagaactgggctgataaaaacaacgttaattttgaagatttacttaacaatcctgataccaatctagttcattttattggtaaagatatagtctattttcatctactattttggcccgcaatgcttaattctgcagatatacatcaattaaagaatgtttttgtgcatggatttttaacaatagaaggtatgaaaatgtctaaatcaaaaggtaattttatcttagctgatcatgcgcttaaattttcacaccccgattactacagatattacctgtcatcaaaacttaatactgatatagctgatattgatttttcaattgatgattttatacaaaaagttaatagtgatttgattggcaaatttatcaatattgcaagcaggtcccaaaattttatctcgaaacttaacaacggaagcttaatggcctcaaccttgggacaagataaaaaattgagagatgaatatgatctcattatttcgcatacccagaacagagaatactcaaaagcattgaagggcataatggctctggccgatcaaatcaatacctatatatcagaacaagagccttggaaaatggctagggaagatcgtgtacgagagtgtgttgaagtctgctcaaatgcattgcatgtctttaaagatttaataattttactccatccttatataccagaaataacaaataaactttttgagatgcttaatctcagtgagcaaacatatgctaatcttttagaaggaaatttggttcaggtggaaaagtttaagccttttgttgggagattggataaagcaaattttgaggatatg

SEQ ID NO: 296455 - DNA, 403 bp, Unknown
  Bacterial polypeptide expressing nucleotide sequence isolated from the Sargasso Sea
ggcagggaaatcgggcatagacgacgcaacatcaacagaggctgcggatcaagcaatggaaaaaacagccgaaaataacacgatcgaatttgatgactttgcaaaactggaacttcgtatcgcaaaaattgaaaaagcggagcatgtcgagggtgccgacaagctcatcaagctgacccttgacataggtacagagcagagacaggtttttgcgggcattaaggcggcttatcagcctgacgatatcgttgggcgactaacagtgatggtcacaaacctagcaccacgtaagatgcgatttggggtatccgaaggtatggtgcttgctgccggtcccggaggacaagacctgtttcttctgtcaccagacagcggagccgaaccgggtatggaagtaaaatag

SEQ ID NO: 296456 - DNA, 686 bp, Unknown
  Bacterial polypeptide expressing nucleotide sequence isolated from the Sargasso Sea
tgactttataaggacaacagaggaaagacatatattttctgttcaaaatttatggaaaaaacttgaaaaaaacgatgaaatttatttatctaaatattcaggttggtattcagtttcagatgaagccttttataatgaagatgaacttaaagaaattgaaggaaaaaaaattgcaatttcttctggatcaactgtagaatgggttgatgaagagtcttttttttttagattatcaaaatgggaaaagccattacttaaattttacgaagataatccaaactttatatgtccagagtctaaaaaaaacgaggtaatcagttttgttaaaaatggattaaaagatctatcaataagtagaaaaagtttttcctggggtattaaagttccaaataacgataatcatgttatttatgtttggttagatgcattaacaaattatctaagcgcactcaattatcctgacactaacgatgaattatttcaaaatttttggccagcctctcttcatttaataggtaaagatatattaagatttcatgctgtatattggccggcttttcttttagctgcaaaaattgaattacctaaaaaagtctacggacacggttggatactatcaggcgaagaaaaaatgtctaaatctaaagggaatattcttgatccaattgatataattaaaagatacg

SEQ ID NO: 296457 - DNA, 887 bp, Unknown
  Bacterial polypeptide expressing nucleotide sequence isolated from the Sargasso Sea
ggatatcgtttacttccacagcctgttctggcctgccatgctggaaggcagtaacttccgtaagccaaccaacctgttcgtccacggttatgtgacggtgaacggcgcgaagatgtctaaatctcgtggcaccttcattaaggcaagcacctggctgaagcacttcgatgccgacagtctgcgctattactacacggcgaaactatcttcacgtattgatgacatcgacctgaatctggaggactttgtccagcgcgttaatgccgatatcgtcaacaaagtagtcaacctggcatcccgtaatgcaggctttattgctaagcgttttgacggcattctggcgactgagctggccgacccggcgctgtataaaaccttcaccgacgccgcagcagcgatcggcgaagcatgggaaagccgtgaatttggtaaagctattcgtgaaatcatggcgctggccgacgtggcaaaccgctacgttgacgaacaagcaccgtgggttgtggctaaacaggaaggccgcgatgccgacctgcaggcagtttgctccatgggcattaacctgttccgtgtgctgatgacctacctgaagccggttctgccaacgcttgctgaacgtgtggaagcgttccttaactgcgaactgagctgggatgccattgagcagccactgctcggtcacaaggtcaacacctttaaagcgctgtacaatcgcatcgacatgaaacaagttgaagcgctggtggaagcgtcgaaagaagaagtgaaagccgctgccgcaccagtaaccggtccgctggcggatgacccgattcaagaaaccatcacctttgacgatttcgccaaagttgacctgcgcgtagcgttgattgaaaacgccgaattcg

SEQ ID NO: 296458 - DNA, 934 bp, Unknown
  Bacterial polypeptide expressing nucleotide sequence isolated from the Sargasso Sea
tggagctcctgtagaatgggttaaagaagagagttatttctttaaattatcagaatgggaagataggttaattgaattttatgaaagcaataatcaagctatactgcctaaatcaagatacaatgaagtaattagttttattaaaagtggcttaaaagatttatctatttcaagaactacttttaaatggggtattcaggttccggacaagaataaccatgtcatgtatgtctggatagatgctttgtgtaattatattacagcattaaattatcctgatattgatagcgaatctttcaaaaaattttggccaggcgtccatattattggtaaagatattttaagatttcatgcagtttattggccggcttttttaatggcagcagatttagatcctcctaaaaaaatttttgcacatggttggtggacaaatgaaggtgaaaaaatttctaaatctattggaaatattataaatccatatgaaattattgaagaatatggcttagatcaaattagattttttttatttagacatgttccttttggcaatgatggtgatttttcaaaagattctatagcagaaagaataaatgcagatttatcaaataactatggaaacttaattcaaagaatatctacctttattgttaaaaattctaactctaaagtcaataaaccaactaagtttattaaagatgatcaagaattattaaatttatttgataaaactcatgatgattatattaaacatatgaattcttttcaaatagatagagctttaaaaaatgtatttgaatatttatcagatgttaatgcatatgttgataatcaagcaccttggttactcaaaaaaacagatacaattagaatgcaggatgttttgtatattgtaacattagttataattagatgttctattttgctatacccaatc

SEQ ID NO: 296459 - DNA, 592 bp, Unknown
  Bacterial polypeptide expressing nucleotide sequence isolated from the Sargasso Sea
atgtcaaatagatacactgttacaacagctttaccctatgcaaatgggccacttcatttaggtcatgttgcgggtgtttatattcctgcggatatttatgtaagatatcttcgtgctaatagtaaagatgtagtttttattggaggaactgatgaacatggtgttccgatttccattaaggctaaaaatgagggtgtttcaccaaaagaggttgttgatcgatatcatgggattattaaaaattctctagagggtttaggtatttctcttgatttttttggtcaaacatcatcttcaacccattatgatgttgcaacagagtggtttcaaaaactttataacgatggtgttttttctgaagaagtattgcaacaatattatgatgaggaaaataaccaatttcttgcggatagatatattacagggacttgtcctagctgtaaagatgaaggtgcatacggcgatcaatgtgaaaagtgtggagcctcattaagcccaacagaattgattaacccaaaatctgcacttagtggaaataagcctgttttaaaagaaacaaagcactggtatctacctttgaacaatttcgaac

SEQ ID NO: 296460 - DNA, 853 bp, Unknown
  Bacterial polypeptide expressing nucleotide sequence isolated from the Sargasso Sea
ttctatattacaacaccaatatattatgtaaatgatatacctcatattgggcacgcctatacatctgttgcaacagactgcttggcaagatttaaacgaatggaaggttttgatgttcgatttcagactggaacagatgaacacggtcttaaaatacaaaaagccgctgataaattgaatattcaacctattgagttgtgtaacaaaaattcaaaagtatttaaagatttaacagaaattttaaatttatccaacgatgatttcattagaacaactgaaaacagacacatagaaggagctcaaaatctatgggataaacttcaaaaaaatggtcaaatatatcttgatgaatatgaaggttggtattcagttaatgatgaaactttttataacgaaaaagatctaattaagggagatgataaaagtctcaaaactccaacaggaggtcctgttgaatggataacagaaaaatcatatttttttcggctttcagaatggagtggggaacttttaaatctatataaaaattctgactttattagaccagagtctaagcgtaatgaagtcataagttttgttgaaagcggattaaaagatttatcagtttcaagaacttcatttaaatgggggatagaaacaccaaatgatcctgatcacatcatgtatgtttggcttgatgctctaacatgttatccaaatggggtgggctatctaaagagtgaatcaagtgatttagctaatttttggactgaaactactcatatagtgggaaaagatattttaaggcaccatgccgtatactggccagcatttctaatggcagcaaaattagaattaccaagaagaatattgc

SEQ ID NO: 296461 - DNA, 916 bp, Unknown
  Bacterial polypeptide expressing nucleotide sequence isolated from the Sargasso Sea
tttgtgacaactcagctttttttagcggatcgttatattaaaggaacgtgccctaaatgtggtgccccagatcaatatggagatgcttgtgaacattgctattcaacctacagtgcgacggatttgattgacccaatttctgttttttcagggattgcccctgttttaaaaacatcgacgcattatttttttaaacttgaaaaatatcgtgaaattattcagtcttggttggatacgaaccccgtgactcagtctgttaaaaataaacttaatgaatggttcgatcaggggttaaaagattgggatatttctagagatgggccttattttggcttcaagattccgaatactgaaaataaatttttttatgtttggatggatgctccgatagggtatatcgcaactactgaacattgggcggcaaaacatggtaaatctcatcaagacttttggaacaataaggatgtcgaaattcatcattttattggaaaagatataatgtattttcataccttattctggccagcgatgttaacggttgctggttatgatgtcccaacaaaagtaaacattcatggatttttaaccgttaatggtgaaaaaatgtccaaaagtcgaggcacgtttattttagcacgtgattatgcaaaagattttgatactgatattttgcgatattattatgcagcaaagttgtcttcgtcaatggatgatattgattttaatattgaggattttgtgaatcggattaattctgatgttttgggtaagtttattaatattgctagccgtattggttcgattgttaataaaaaattggatggaaaattatcaaccattgatgatgaaggtcaattattgttagataaatttttagttatgctgatcaaattaagactgaatattcaaatttaga

SEQ ID NO: 296462 - DNA, 826 bp, Unknown
  Bacterial polypeptide expressing nucleotide sequence isolated from the Sargasso Sea
tataaaaagaacaatgattttatattaccaaaatcacgaagaaatgaagtaattagttttgtggaaaaaggtcttaaagatctatccataagtagaacttccttctcttggggaattccagttccacaaaacaacaaacatgttatttatgtttggttagatgctttaacaaattatttaagcgcgctaaattttcctaatacagatgataaaaaatataaaactttttggccagcagacgttcatattattggaaaagatattttaagatttcatgcgatatactggccagcttttttgattgcagcaaatttaccattacctaaaagagtatttggacatggctggatcctttcagatgataaaaaaatgtctaaatcacttggtaatattttagatccaattgaggtaatcaaagattgtggaattgatcaactaagatattatttaataaaagaagtttctttaggaaacgatggaagtatttcaatggaaaatcttaaaaattgtataaataatgatttagctaataattacggtaatctctgccaaagagttttttcatttataaaaaaaaattgtaataataaaatacctaaaaaaaataaattaaaagaaaacgatataaaattaattgaaaatataaaagataatattcctaaactaattaagtatataaacaatcaaaatttaaatgattatattaaaatggtagttaatttttcatttgaagcaaacaaatattttaacgactcagaaccatggtctttaaaaacaaaagatcccgaaagaatgaatacaattcttaatacaattttggaacaaa

SEQ ID NO: 296463 - DNA, 817 bp, Unknown
  Bacterial polypeptide expressing nucleotide sequence isolated from the Sargasso Sea
cgaattgaacggtaaggattttaacaatcttattaaaagtgattctacaaaacttgttcattttataggaaaagatattgcgtattttcatcttcttttttggcctgcagtactcgaagccgcaggtatgaaattgcctgaggaggttttcactcatgggtttatgacgatggaagggaaaaaaatgtcaaaatcaagaggcaactttattagtgctgaaaaagcacttgaatatgcacctgctgatttctatcgatactatatttcgtcaaagctaaacgaaagcgtttccgacatcgatttttccctggaagattttgttgaaaaggttaatagtgatttagttggtaaattcatcaatataccaagcagaatccaaaactttatatataaacataatcaagggaaaattaaccctaacaccaattcccttaatcaaagattttcctctgattaccaaactattataaatgctaccgaaactaggaattatgctctggcaatcagacatataatgaaaattgctgatgaaataaatttatatgtctcagagaataaaccatgggatcttgagaaaactggagatctgcaaggatgtttagaaatatgctctgaagctttggttgccttcaagtccttggttgttcttatggagccttacattcccgaaatttcacaacaaatatataaacttctaaacctatcagattgcacgtattccatagtttatgagcaaggaattagtgaaattaacaaatatgaacatattataaaaagactagatatagatgaactcaaaggggtctacgatggttga

SEQ ID NO: 296464 - DNA, 430 bp, Unknown
  Bacterial polypeptide expressing nucleotide sequence isolated from the Sargasso Sea
atgagttccttttttgtcacaacaccaatttattatgtaaatgataaacctcacataggtactagttatactacaatagcatgtgatattcttgcacgttatcataagctaaaaggagaggacatattttttctcaccggcactgatgaacatggtcaaaaagtagaaaaagctgccatcaatgaatccattaaaactataagttttgttgataaaatgtcccaatattttaaggatttaattccatttcttggatgtgaaattaatgattttataagaactacagaaaaaagacatattacagcctctcaacatctttggaataaaatttttaaaaataatcaaatatatctatctaactatgaaggttggtattcagttagggatgaagctttttatacagaatcagaaataattaaaaaaaataata

SEQ ID NO: 296465 - DNA, 918 bp, Unknown
  Bacterial polypeptide expressing nucleotide sequence isolated from the Sargasso Sea
tacttgaaaaaaataagcaaatttttttgtctaaatattctggttggtattctgtatcagatgaggctttttataatgaagatgaggttgaagaaaaagatggtttaaaagttgctaaatcatccggttcagctgttgagtgggttgaagaagaatcttttttttttaaactttcagaatgggaaaaaccgttattagaattttatgaaaaaaataaaaattttattttacctgaaagtagaagaaatgaagtaataagttttgtcaaaagtggattaaaagacttatctgttagtagaaaaacattttcttggggtgtaaaagtaccaagtgatgaaaatcatgtcgtttatgtatggttagatgcattaacaaattatttaagttctttaaaatatccagatgaaaataatgaattatataaaagtttttggccagcagatttacatattattggtaaagacatattaagatttcacgctatttattggccagcattcttattagctgcaaaaatagaaccgcctaagagggtatacggacatggatggatactctctggtgatgaaaaaatgtcaaaatcaaaaggaaatattttagatccgttagaaattataaatgtctatggtctagatccattaagatattatttacttaaagaagtttcttttggtaatgatggtaatatttctgaggaaaaattagaaaattgtattaatagcgatttggcaaataattttggaaatctctgtcaaagagtactttcttttgctgaaaaaaattgttcatctttaatacctgatcataaatttactgatgaggatttggaaattttaaaaccattaaataatctagataaaataagatcatttatagataatcaagatataaacccaatatatgagttttattgttgat

SEQ ID NO: 296466 - DNA, 655 bp, Unknown
  Bacterial polypeptide expressing nucleotide sequence isolated from the Sargasso Sea
ttgacaaaacaagacttttatttaaccacgccaatatattatgtgaatgataagcctcacattggtcatgcgtatacaacattagcttgtgatgtgcttgctcggtttaataggctggatggtaagaacgtattttttctaacaggcacggatgaacacggtcaaaaggtacaaaagtcagccgaagcagcgggcaaagagcctcaagaatttacagattcgttaagtcaaaactttcgacaattagcggaagaaatgaattattcccatgatgattttattagaacaactgaaagcagacatattaaagcgacacaagatctttggaaaaagattagggaaaatggacatatatatctaggtagctattcgggttggtacgcagtccgtgatgaagcgttttatggagaaaaggagttatcagttaatgacaaaggtcaaaaggtagctccatcaggggctgaggtagaatgggttgaagagccaagctacttctttgatttatcaaaatggcaagaaccattattagacttttataacaaaaacccaaattttataggaccaaaaagcagaagaaatgaagtgattagttttgtaaaaggaggtctaaatgatctctcagtaagcagaactagctttaattgggggataccag

SEQ ID NO: 296467 - DNA, 878 bp, Unknown
  Bacterial polypeptide expressing nucleotide sequence isolated from the Sargasso Sea
gtactctagtattgtagcagacatttttgcaagatttaaaagattagacggttttaatgttttgtttttaactggcacagatgaacatggtttaaaaatccaaagagaagctgaaaaaaataaaaaaaaacctaaaattttttgtgacgaattatcaaaaaattttagagatttaacaaaaatattaaatttatcgaatgatgattttatcagaactacagagtctagacaccataaatcagttaatgaaatatggaacagactgatagactcaggggatatatatttagataaatacaaaggttggtactcagtttcagatgaggcttattatgatgaagatgaaattgagtcttcaaatggaaaaaaatattctaaaacttctggatcacaagttgattgggtagaagaagagtcatatttttttaaattatcagcttggacaaaaaagttattgaagttttatgaagaaaatcaagattttattttgccaaaatctagaaaaaacgaagtaataaattttgtaaaaaaaggattaactgatttatcagtaagtagaacatcttttacatggggaatacctgttcctaataatagcaaacatgtaatttatgtttggttagatgcattaaccaattacttaagtgctattaattttcccaatacaaaagatttaaaatataaaaacttttggcctgccgatgttcatataattggaaaggatattttaagatttcatgctatatattggcctgcttttctactagctgccaaactacctgttcctaagagagtattcggacatggatggatactttcggatgataaaaaaatgtccaaatcacttggcaatatattggatcctatagaaataataa

SEQ ID NO: 296468 - DNA, 809 bp, Unknown
  Bacterial polypeptide expressing nucleotide sequence isolated from the Sargasso Sea
taaaataccagatgaaatagacaaatatttttatgtttggcttgatgcaccaattggatatttagcatcaattttgaattgggctaataataacaatttaaaaatggaagatttatggtctaaaaaatcgaattacgagatttatcattttataggtaaagatattgcttattttcatggtcttttctggcctgctttgttaagttctggaggttataaattacctaacggaataaatgtccatggttttttgaccattaatggtgaaaaaatgtccaaatctaaaggaactggtattttggcaaaggattttgccaatattacaaatccagaaacattaagatatttttttgcggcaaagttaaataataaagttgaggatattgatctaaattttgatgactatactcaacgaataaattcagatctagttggtaaatatttaaatattgcttcacggtcagcttcttttttaaagaaaaatgataatgtagtctctgaaaatattaatcaaaatatcatagataatttattgcaaaaaaaagaagatattttagatctgtatgaatccaaagagtattcaaaactagttagaataattatggtactagctgatattgttaataaatatataaacgacgaaaaaccatggaaattggatcttgaggatgctgttatagtaagttcaacatctttaaatgcttttaaaatattatctatctatctccatcctataataccaaacctaactactgatgcgtttaaattcttaaatacaaaaatatcatcctttcatgatattgatgaaa

SEQ ID NO: 296469 - DNA, 179 bp, Unknown
  Bacterial polypeptide expressing nucleotide sequence isolated from the Sargasso Sea
aatgaagccaacatattacattactacaccaatatattatgtaaatgatgttcctcacattggtcacgcctacactacattagcttgtgatgcaatagctagatttaagcgccttgatgattatgaagtttttttcttaactggaacagatgaacatggacaaaaagttgaaacagcag

SEQ ID NO: 296470 - DNA, 568 bp, Unknown
  Bacterial polypeptide expressing nucleotide sequence isolated from the Sargasso Sea
atgcctagaaaaatattcgtcaccagcgccttacctaacgcaaacgggcccatccacttggggcatatgttggagcacatccaaacagacatctgggtcaggtttcagcgtatgagaggtcatgaggtcatctatgcttgtgcagatgatactcacggaacggcgaccatgcttaaggccgaagaagaggacacgactccggaagaattaatcgagagagtccgagtagagcatcaactagacttcgagaacttcttggtcagccatgacaactattactcaacacattcacaagaaaaccaatactactcagagctgatatacacaaaactgaaagaaaaaggactgataataaagaaagatgtcgaacaactgtttgatagacacaaaggcctttttttagcagaccgatttattaaaggaacttgcccaaaatgccatgccgaagatcagtatggagacaactgccaggtctgcggagctacttatgatgcaacagagctactcaactcccgatcggtatacagcggcgaacctcccgagctaaaaaaatcggagcactttttct

SEQ ID NO: 296471 - DNA, 838 bp, Unknown
  Bacterial polypeptide expressing nucleotide sequence isolated from the Sargasso Sea
gaagaattaatcgagagagtccgagtagagcatcaactagacttcgagaacttcttggtcagccatgacaactattactcaacacattcacaagaaaaccaatactactcagagctgatatacacaaaactgaaagaaaaaggactgataataaagaaagatgtcgaacaactgtttgataaacacaaaggcctttttttagcagaccgatttattaaaggaacttgcccgaaatgtcatgccgaagatcagtatggagacaactgccaggtctgcggagctacttatgatgcgacagagctactcaactcccgatcggtatacagcggcgaacctcccgagctaaaaaaatcggaacactttttctttgatctagctcaatttggggagtttctgaaagattggttgagtcaaaacccggttagaaatgaagtggcgaataaattaagagagtggttagaagatggtcttcgtccatgggatatttctagagatgcaccttattttggttttcaaataccaggggaagacgaaaagtttttttacgtctggatggatgctcccattgggtacctggctagtcttaagaactggtgtgacaaatcaaagctttctaatatcgaggattattgggcgcataattcacccgccgaggttcatcactttattgggaaagatatcattaattttcatgcgcttttctggccagcagtccttgaaggctcgggatttcgaaagcctacaaaagttcacgtacacgggtttctcacagtgaatggtgtcaagatgtcgaaatcaaggggcacattcatcaccgcaaaaacctatagcgaacttt

SEQ ID NO: 296472 - DNA, 937 bp, Unknown
  Bacterial polypeptide expressing nucleotide sequence isolated from the Sargasso Sea
cttgagtctgtattactgatattttgggtaagataccaaaatcttaatggtaatgagtgtctctacttttgtgcagatgatacgcacggaacgcctgtcatgctcaaagccaaagagcttggaatagatcctgaagaacttattaaaagaactagaaaggagcacataaaaagttattcaagatttaatattaattttgataatttttatactactcactctgttgagaacaagaaatatgctgaagatatttatcaaaactgtaaagaagggaatctaatctttaaaaaagaaattgaacagttttatgactcagaagaaggtttattcttatccgatagatttataaaaggcacatgtccaaaatgtggtgcggaagatcaatatggtgatggttgttctgtctgtggcacgacctatactcctgatgatttactaaatccagtatcatcattatcgaattctgagcttaccaagaaaaaaactgaacatgttttttttgatttacctcaaatgaaagattttcttgaggattatctcaaagacttaactcttcaagatccaataaaaaataaactaaatgaatggattgaggatgggttaaagccatgggacatatcaagagacaagccatactttggatttgaaatacccggagagaagaataaatatttttatgtttggcttgacgcaccgattggatatttagcttctgcaaaaaattgggcagaaaacaataatatggatatgaaagatttatggggtgaaagctctgattatgaaattcatcattttataggaaaagatattgcttattttcatgccctattctggccagcacttttgaagtcatcaaatattcgcttacctgagtcaattaatgttcatgggtttttaactattgatggtgagaagatgtcaaaatccaatggaactt

SEQ ID NO: 296473 - DNA, 814 bp, Unknown
  Bacterial polypeptide expressing nucleotide sequence isolated from the Sargasso Sea
taatccaaattttattcttccagattctagaagaaatgaggtaattcaatttgttaaaaagggattaaaagatttatcggtaagtaggacatctttcacatggggaattcctgtgccaaaaaattctaaacacataatttatgtttggttagatgcactaacaaactatcttagcgctctaaactttccaaatttagaagataaaaaatataaacttttctggcctgcatctttacatataataggtaaagatatattaagatttcatgccatatattggcctgcatttttaatggcagcaaaaattcctttaccaaaaagagtttacggtcatggttggattctttccgatgataagaaaatgtctaaatctttaggaaatattttagatccaattggaataatcaaagattatggtattgaccaactaagatattatttaattaaagaagtctcattaggaaacgatggaaatgtatcacttgcaaatcttaaaaattgcataaataatgatttagcaaataattatggaaacttgtgtcaaagagtttttacattcctaagtaaaaattgtgagtcaaaaatcccctcattcgaaaatttttctcaagaagatgaaaagttatttaataatttagtaaataaaatccctgaacttatgaatatgatggataatcaaaatcttaacttatatatgaaaaatgttattaatttttcatttgaaagcaataaatattttaatgactctgagccttggtccttaaaaaaggacaaacctcaaagaatgaatacaatattatatgttattctaaat

SEQ ID NO: 296474 - DNA, 658 bp, Unknown
  Bacterial polypeptide expressing nucleotide sequence isolated from the Sargasso Sea
aatgtctaacaaatactatataacaacaccaatttattatgtgaatgacaggccccatataggccatgcttatacttctgttgctacagattttattgcaagatttatgactcttaaagggtatgatgtgagattccaaacaggaacagatgaacacggactcaaaatacaaaaagcagctgaagcaaaaaaaatagatcctatagaactttgtaatcaaaactctcagatttttagagatcttactgtttcgctaaatctatcaaatgatgattttataagaaccacagaagaaaggcatattgacggagcctcatatttatggaaacgactttatgaaagagatcaaatttatttaggggagtatactggatggtactcaataagtgatgaaacattttataatgaaaaagatttagtaaaacagaatgatggctcgtttaaaactatcactggtggtcccgttgaatggattactgaaaaatcatacttttttaagctttcacagtggtctaataaattattagatttgtatagtagtaacccaaactttataagcccagcttcaaagagaaatgaagttattaaatttgtagagtcaggtttaaatgacctgtctgtatcaagaacgtcatttaaatggggaataaaaacacca

SEQ ID NO: 296475 - DNA, 124 bp, Unknown
  Bacterial polypeptide expressing nucleotide sequence isolated from the Sargasso Sea
atgaccgatcagaacgctcgcaaaatattagttaccagtgccctgccctacgcaaacggctccattcaccttggccacctgcttgaatacattcagacagacatctgggtccgcttcagaaagc

SEQ ID NO: 296476 - DNA, 434 bp, Unknown
  Bacterial polypeptide expressing nucleotide sequence isolated from the Sargasso Sea
aatgagtgtatacattactactcccatatattacaccaatgataagcctcatataggtcatgcatatacgactatagcgtgtgatatttttgctagatttagtaaattgtcacaaaaagatgttttttttctatcgggcactgatgaacatggtcaaaaagttgaaaaagctgcaaaagaagctcatatcgatccaaaaaaattcgttgataacttatcgttaaattttgaaaaacttgtaaatgatttaggttgtgaaataaatgattttattagaactacagaaataagacatagaaatgctgctcaatcattatggatcaaattaaaagaaaataatcaaatttatttatcaaattatgaaggttggtattcaattagagatgaagctttttatcaggagagtgaattaaaaaaaattgatgacaaatatt

SEQ ID NO: 296477 - DNA, 825 bp, Unknown
  Bacterial polypeptide expressing nucleotide sequence isolated from the Sargasso Sea
aaatgatgatatttatctatctaaatattctggtttgtattcagtttcagatgaagcgttttacagtgatgaggaaattgaggaaattaatggttcgaaagtcgcaatctcatctaaatcaactgtagaatgggtggatgaagagtcatatttttttagattatcaaaatgggaaaaaccattactggaattttatgaaaaaaacccaggtttcatttcacctgaagcaagaaaaaatgaggtagttagctttgtaaaaagtggtttaaaggatctatcaattagtagaaaaagtttttcttggggaattaaagttcctggtaatgaaaatcatgttatttatgtctggttggacgctttaacaaattatattagtgctttaaactatccaaatactaaggaaaaattatttaaaagtttttggccagcttccattcatttaataggaaaagatattttgagatttcatgcagtatattggcctgcatttcttcttgcagctaaaatagatcttcctaaaaaagtttatggtcatggttggatactttctggagatgaaaagatgtctaaatcgaaaggtaatattcttgatcccatagaaattattaatcaatatggcctagattcattaagatattatcttataaaagaagtttcatttggtaatgatggaaatatttctcaagaacgtttagaagattgtattaacagtgacttggctaacaattttggtaatctgtgtcaacgagtaaccgcctttgcaattaaaaattgtgacagtaaaatcccaaaaaaaattgaattaaatgatgatgatcacaagat

SEQ ID NO: 296478 - DNA, 517 bp, Unknown
  Bacterial polypeptide expressing nucleotide sequence isolated from the Sargasso Sea
atgaataaaaatttttatataactacacctatatattatccatctgctaaaccgcatatgggtcatgcctattctagtatagtagcagacttttttgctagatttaagaggatccaagggtacaaagttttctttttaaccggaactgatgaacatgggcaaaaaattcaaagagcagcagaaaataaaaatatggatccaaaagctttttgtgacaaaatatcaaaaactttttttgatttatcgaaaacattaaatctttcaaatgatgattttattagaacaactgaagaaagacataaaaaatctgtagaaaatttatggaatatactagaaaaaaagaatgaaatttatttatctaaatacgcaggttggtattctgtttctgatgaagctttttactctgaagaagaaatagatacaaaagacaatataaaattatcaaaaatatcaggttcacaagtcgaatgggttgaggaagaatcctttttttttaaactttctaaatggcaagaac

SEQ ID NO: 296479 - DNA, 725 bp, Unknown
  Bacterial polypeptide expressing nucleotide sequence isolated from the Sargasso Sea
aatgaaatcacgcaagattctggtaacaagcgcattgccatatgcaaatggttcaatacatattggacatgttcttgaatctgtaattactgatatttgggtaagataccaaaatattaatggtaatgaatgtctctacttttgtgcagatgatacgcacggaacgcctgtcatgctcaaagccaaagagcttggaatagatcctgaagagcttattaaaagaactagagaggagcacataaaaagttattcaagatttaatattaattttgataatttttatactactcattctgatgagaacaaaaaatatgctgaagatatttatcaaaagtgtaaagaaggaaatctaatctttaaaaaagaaattgaacagttttatgactcagaagaaggtttattcttatctgatagatttataaaaggtacatgtccaaaatgtggcgctgaagatcagtatggtgatggttgttctgtctgtggcacgacttatacacctgatgatttactaaatcccgtatcgtcattatcgaattctgagcttaccaagaaaaaaactgagcatgtgttttttgatttgcctcaaatgaaagattttcttgagaattatctcaaagacttaactcttcaagatcctataaaaaataaactaaatgaatggattgatgatgggttaaagccatgggatatatcaagagacaagccatactttggatttgaaatac

SEQ ID NO: 296480 - DNA, 1006 bp, Unknown
  Bacterial polypeptide expressing nucleotide sequence isolated from the Sargasso Sea
tattgctgacttttttgcaagatttaaacggattcaaggttataatgtattttttttgactggtacagatgaacatggacaaaagatccagagagctgcagaaaaagagggtattgatccaaaatcattttgtgacgagataagtaaaacttttaaagaactatcaaaaatacttaatttatctaataatgattttattagaactactgaaattagacattttaaatctgttgaaaatctatggaagattcttgaaaaaaaaggtgagatttatctatctaaatactctggttggtattcagtatccgatgaagcattttactcagaggatgaaattgaaaatgtggacaataaaaaaatagctaaaacatctgggtcgccagttgaatggattgaggaagaatcttatttctttaaactatcaaaatggcaagagccacttttaaaattttattctgaaaatcctgattttattctaccagaaacaagaagaaatgaagtagtcagctttgtcaaaggtggcttgaaagatctttctgtaagtagaaaatcattttcatggggaattaaggttccatcaaataaagatcatgtaatttatgtttggctggatgcactaactaattatattagtgctttgaattacccagatactgacaataaactttataaaaattattggcctgctactttacatttaataggtaaagatattttaagattccacgctgtatattggcctgcttttctcttggccgctgatataccaactccaaaaagagtctatggacatggatggattttgtcaggtgaagaaaaaatgtcaaaatctaaaggcaatattttagaccctatcgaaataattgaaaattatggtttagatacattgagatattatttgttaaaagaagtttcttttggaaatgatggtagtatctcaaaagaaaagttagaaaattgtataaatagtgacttggcaaataattttggaaactatgtcagagag

SEQ ID NO: 296481 - DNA, 778 bp, Unknown
  Bacterial polypeptide expressing nucleotide sequence isolated from the Sargasso Sea
gcctctttacatttaattggaaaagatatcttaagatttcatgcagtgtattggccagcttttttattagctgcaaaattacctttacctgataaaatttatagtcatggatggatactatcgggtgaagaaaaaatgtccaaatcaaaaggtaatattttggatcctattgaaattataaatgaatatggattggatccattaagatattatcttattaaagaagtatcatttggcaatgatggtaatatttctaccgataggttagaaaattgtattaatagtgatttagcaaataattttggtaacttatgtcaaagagttactgcgtttgtttttaaaaatttagatggtaaaatacctaacgacgtaaaatacgacaaagaagatctaaaaattttagataagtttaaaataaatttaaatgtggtaagaaaaaaaattgataaacaggatataaatttttatataaattttattgttgattcattatttgatgctaataagtattttaatgatcaagaaccatggaaaaaaaagaatagtcctattcgtttaaatgcaataatatatacaacattagaagttatacgaaaaatttgttatatgctatatccaataataccacttgcttcactacaagcattaaaaatatttaatatcaaagaaaatgaaattaaactttcttctttagaaaatcataattatttgagatttggttcaaaaataaataagattgatattctttttaaaaaaattgagaaaaacaatgattgat

SEQ ID NO: 296482 - DNA, 883 bp, Unknown
  Bacterial polypeptide expressing nucleotide sequence isolated from the Sargasso Sea
aatgataaatctttttatattactacacctatatactatccttcagcaaaacctcatatgggtcatgcatattcgagcattatcgcagatttttttgcaaggtttaaattaattgatgattatcaagttcattttctgacaggtacagacgaacatggtttaaaaattcaaagatctgcagaaaaagcagggaaggagcctcaaatattttgtgatcagattagtcaaacttttagagatctttcagaaacattaaatctatcaaatactgattttataagaactacagagtctagacataaaaaaacggtccaacatctttggagtgagcttgaaaaaaacgatgatatatacttatcaaattattctggatggtattcagtatcagacgaagctttttataacgaagatgaaattgatgaagtagatggaaaaaaaattgctttatcatcaaaatctcctgttgaatggattgaagaagaatcctacttttttagactttcaaagtgggaaaaacctttattagatttttatttagctaatcctgattttatatctccagaatctagaaaaaatgaagttattagttttgtaaaaagtggtcttaaagatctttctgtaagtagaaaaagtttttcatggggaatacctgttccaaataataaaaaccacgtgatatatgtttggcttgatgctttaacgaattatttaagtgcattaaattatcctgatacagatgatgatttatttaaaaaattttggccagcctcaatacacttaattgggaaagatatactcagatttcatgctgtatattggcctgcttttttattagcagcaaaaattgatttaccaaagagagtttatggtcatggatggatat

SEQ ID NO: 296483 - DNA, 862 bp, Unknown
  Bacterial polypeptide expressing nucleotide sequence isolated from the Sargasso Sea
gatttgaacttggatgatttcgttcagaaagtaaactctgacttagttggtaaagtggttaacattgccagccgttgtgcaaaattcatcaacaccaagtttgataataaattatcagcaacttgtgcagagcctgaattggtacaaagctttatcgatgcaggtgcttcaattgctgctcaatatgagtcacgtgagttctctgctgcaattcgtgaaatcatggcacttgcagataaagccaaccaatatattgatgagaaaaaaccttgggctttagcgaaaattgaaggcgaagatcaacaagtacatgatgtatgttcggtcgggattaacctgttccgtcaattggctgtgtaccttgcacctgtacttccgactttagcggctcaagtgcaagcgttcttaaaactagaccactttgactttgcttctgctcaaacagcattggtcgatcatgaaattgcactgttcaaaccgttaatgcagcgtgtagacccgaaagcggttgcggcaatggtcgatgcttctaaagactctttagcggctgcggctgaacctgcaaaagttgagaagaagaaagaaaagaaagcttcgactaagcctgagccaaaagttggcgaggcagaagtgattggtattgaagactttatgaaagttgacctacgtgtcgctgaagttttagaagctgcaacggtcgaaggctctgacaaattgcttcaattgactttaaatgttggtgaagctgaaccgcgtaatgtattcagtggtattcgtgagttttaccaaccagaagacttaaaaggtaaattggtggtgatggtggctaatcttgcaccacgtaaaatgcgttttggtattt

SEQ ID NO: 296484 - DNA, 967 bp, Unknown
  Bacterial polypeptide expressing nucleotide sequence isolated from the Sargasso Sea
ggatgtgaaaatgataactttattaggactactgaaattagacacattagatcagctcaaactttatggaagacattatttgataataaccaaatttatttatctaattatgaagggtggtattcaattagagatgaagcctattatcaagaaagtgagttaaaagaaattaatggtaattattttacagataatggatctcctgttgaatgggtaaaggaagaaagttatttttttagattatctgaatggcaagacaaacttattaagttttatgaaaacaatcctaacagtatatcgccaaaatcaagatataatgaggtattaagttttataaaaggtggtttaaaagatttatccatatcaagaactacattcaattggggcgtccctgtccccaatgatcaaaaacatgtaatgtatgtttggatagatgctttgtgtaactatcttactgctattggttatccagatatatctaataatcaatttaaaaaattttggccagcaaatcatattgttggaaaagatatacttaggtttcatgctgtttattggccagcttttttaatggccgctgaaatagaacctcctaataaaatttttgctcatggctggtggacgaatgaaggacaaaaaatttcaaagtcgttaggtaatgtaattgatccatatgaaattatagatttatatggattagatcagattagatattttttatttagagaagttccatttggaaatgatggagatttttccaaagattcaatctccaatagaatcaatgctgatttgtcaaacaattatggaaatttagttcagcgtatcctaaaatttattgtaaaaaattgtaactcaaaattaactactactagtgattataataaaagtgataatgatctttttgaattttttgaaaataaatttcaagaatatttaaattttatgaataattatcaaattgata

SEQ ID NO: 296485 - DNA, 847 bp, Unknown
  Bacterial polypeptide expressing nucleotide sequence isolated from the Sargasso Sea
tatggtgaccaatgcgaacgttggtggttctacactaaatgcaaccgatttaatcaacccaaaatctacaatcacaggtgagacaccagttttaaaagagacgaaacactggtttttacctttagatagatatcaagattttctagaaaaatggatgcttcaagaccacaaaaacgattggaaaacgaatgttttagggcaagtaaaatcgtggttagatgatggtttaaaaccaagagctgtaacacgtgatttagattggggaattgatgttcctgtaaaaggtgcagaaggtaaaaaattatacgtttggtttgatgctcctattggatacatttcttcaacaaaagaatgggcagaaaaagaaggaaaagactgggaaccttattggaaagatactgatactaaattagtacactttatcggaaaagataatattgtattccattgcatcatattcccagcgatgttgaaagctgaaggaagctatattttacctgataatgttccagcgaatgaatttttaaatttagaaggaaataaactttcgacttcaaaaaactgggcagtttggttgcacgaatatttacaagattttccaaaccaacaagacgttttgcgttatgctttaacttctaatgctcctgaaaccaaagacaatgactttacttggaaagattttcaagccagaaataacaatgaattagtcgctgtttttggaaatttcatcaatcgtgtggtggttttaaccaataaatattatgacggaattgttcctactccaaatgaatttacagaagtagatgaagcaactttaacagaattaaaagcttatccagaagtaatt

SEQ ID NO: 296486 - DNA, 904 bp, Unknown
  Bacterial polypeptide expressing nucleotide sequence isolated from the Sargasso Sea
ttttcaagatttaataaattaagaaatgaagatactttttttttaacaggtactgatgaacatggtcaaaaagtagaaaaagcttcattaattcagaataaagatactaataaatttgttgaagaaatgtcaaaaaattttagaaatttaattccaattttaggttgtgaaattgatgattttataaggacaacagaaaatagacataaaaaagccgcacaatttttgtggaatcaacttaaaaaaaatgatcagatatatctatcaaattatgaaggctggtattcagtaagagatgaagctttttatttggaatctgaattaaaaaaagttgagaatggttttattgccccttcaggagctccagtagaatgggtacaagaggaaagttatttttttaaattatcagaatgggaagataaattaattaaatactatgaaaaaaacactgatgcaatacttccaaaatcgagatacaatgaggttttaagttttattaaaggcggtttaaaagatttatctatttccaggaccacgtttaactggggtattaaagttcctgatgctgataatcatgtaatgtatgtttggatagacgcactttgtaattatattactgcattaaattatccaaatatatataatgatagttttaaaaaattttggcccggtattcatattgtaggtaaagatattttgagatttcacgcagtatattggcctgcatttctaatggcagctgatttagatcctcctaaaaaaatatttgctcacggctggtggacaaatgaaggtaaaaaaatatccaaatcagatggtaatactattaatccatatgaaataattgaacaatatggattagatcagataagattttttctttttagagaggttccttttggaa

SEQ ID NO: 296487 - DNA, 751 bp, Unknown
  Bacterial polypeptide expressing nucleotide sequence isolated from the Sargasso Sea
aatggacaattctaaaaaaactaaaagaaaaatacttgtaactcaagctttgccttatgcaaatgcaccactgcacttaggacatattcttgaagctgttcaaacagatatttggactagatttcaaaactttaatggtaacgaatgcctattcttttgtgctgatgatactcatggaacaccagttatgttgaaagctaatgaaatgggtataaagccagaagaattaatttctgatgtttataaagaccataaatcctcatatgaactttatggaataaattttgcaaatttttactcaacacatagtgatgaaaatagaaaatattcagaatatatatatgaatgcgccaaaaataataatttaatttctaaagcaaatattgaacaatattatgacgaaaaagaagaaatgtttctttctgatagatttataaaaggaacatgtccaaaatgtggtgctgaagatcagcatggtgacaattgtggtgtatgtggagcttcttacaacgtacttgatgttataaaaccaatatcgattatctcaaatacagttccaattaagaaagaaagtgagcatatattttttgatctacctcaaaagaataaaatgcttaaagattttttaaaaaatgtagatcttcaagaatcaattaaaaataagttaaacgaatggctaaatgatgacttaaaaaaatgggatatttctcgagatgcgccctattttggttttgaatacctggagaaaagg

SEQ ID NO: 296488 - DNA, 781 bp, Unknown
  Bacterial polypeptide expressing nucleotide sequence isolated from the Sargasso Sea
ttttggcctgcaaatatccatgtagtaggtaaagatatattaaggtttcatgctgtgtattggccagcatttttaatggcagccggtatagaacttccaaaaaagatttatgcgcatggatggtggacagtaaatggtcaaaaaatgtcaaagtctctaggcaatgtagttaatccaaaagaaattataaataactatggattggaccaagttaaatattttttattaagagaggtaaaatttgggcaagatggcgattattcagaggatgctttattaaaaaggtcaaattcagatttagcaaatgactatggaaaccttgcacaaagagtactttcatttgtttataaaaattgtgacaaaaaaatacctcaagctaataaactatcaaaagaagaccaattattaatagactctgtagaaaaatcaaaagatcaaattttaaaactaatgaataattatgaaattacaggtgctttagaagaactttggaagattattagagaatcaaatgcttatatagattctgaagctccttggtcacttaagaatacaaatataaatcgaatgaatactgtgttaaatatattatgtaatacaattagaaaaattagcttaattgcacaaaattttgttccagatggtgctaataatatattggatcaactttcagtagataaagataaaagaaattatttaaattttaatgacgaattaaaagaaaacgctatagataaaccatatggagtgtttcctagattggaaaaaagaaatgattgat

SEQ ID NO: 296489 - DNA, 703 bp, Unknown
  Bacterial polypeptide expressing nucleotide sequence isolated from the Sargasso Sea
tgacgaaaaagaagaaatgtttctttccgataggtttataaaaggaacatgtccaaaatgtggtactgaagatcagaatggtgacaattgtggtgtatgtggagcatcttacaacgtacttgatgttaaaaaacctatatcgattatctcaaatacagttccaattaagaaagaaagtgagcatatattttttgatctacctcaaaagaataaaatgcttaaagattttttaaaaaatgtagatcttcaagagtcaattaaaaataagttaaacgaatggctaaatgatgacttaaaaaaatgggatatttctcgagatgcgccctattttggttttgaaattcctggagaagagaataaatacttttatgtgtgggtagatgcacctataggttatttagcatcaatctctaactgggcagaaaaaaataaattgaatatgcaagatttatggtctgaaaattctaagtatgagatttatcattttattggaaaagatattgcttattttcatggattattttggccagccttattgagtgcagcaaatctcaaattaccaagtggaatcaatgttcatggttttttaaccataaatggtgaaaaaatgtctaagtcaaaaggtacaggtatattagcaaaagaatttgctgagattacaaatcctgaaactttgagatattactttgcagctaaacttaat

SEQ ID NO: 296490 - DNA, 992 bp, Unknown
  Bacterial polypeptide expressing nucleotide sequence isolated from the Sargasso Sea
acatgttctgaaatctgtaattactgatattggggtaagataccaaaatcttaatggtaatgaatgtttctacttttgtgcagatgatacgcacggaacgcctgtcatgctgaaagccaaagagctcggaatcgatcctgaagagcttattaaaagaactagagaggagcacataaaaagttattcaagatttaatattaattttgataatttttatactactcattctgatgagaacaagaaatatgctgaagatatttatcaaaaatgtaaagaaggaaatctaatctttaaaaaagaaattgagcagttttatgactcagatgaaggtttattcttatccgatagatttattaaaggtacatgtccaaaatgtggtgcggaagatcaatatggtgatggttgttctgtctgtggcacgacttatacgcccgatgatttactaaatcccgtatcatcattatcgaattctgagcttaccaagaaaaaaactgaacatgtgttttttgatttgcctcaaatgaaaaattttcttgagaattatctcaaagacttaactcttcaagatccaataaaaaataaactaaatgaatggattgaggatgggttaaagccatgggatatatcaagagacaagccatactttggatttgaaatacccggagagaaagataaatatttttatgtttggcttgatgcgccgattggatatttagcttctgcaaaaaattgggcagaaaacaatgatatggatatgaaagatttatggggtgaaagctctgattatgaaattcatcattttattggaaaggatattgcttattttcatgccctattctggccagcacttttaaagtcatcaaatattcgcttacctgaatcaattaatgttcatggttttttaactattgatggtaagaagatgtctaaatccaatggaacctttataaatgcagacgactttgctgaaaactatgatggtgagttataag

SEQ ID NO: 296491 - DNA, 886 bp, Unknown
  Bacterial polypeptide expressing nucleotide sequence isolated from the Sargasso Sea
catggaaaagtattacataactacaccaatatattatgtgaatgataagcctcatattggccatgcatatacaacaatacttgcagataccatttcaagatttagggctttaataggagaaaaacccacttttttaactggattagatgagcatgggttaaaagttcagcaagcagcagaaaaaaatggaaaggcgcctcaggatcattgcgattcaatggctccagcttttgtagatttgtggaaaaaattaaatataaactattctgatttcattaggactacggagcatagacatacaaagattgttcaacaaattttaacaaaagttcatgaatcaggtgacatatatatggacgaatatgaaggatggtattcaatctctgaagaaagatttattacagaaaaggaacttgattctggtcaatttggtcagataaaacaaataaaagaaaaaaattattttttcagaatgagtaaataccaagcaaccttaatagataaaattgaaaaagatgaattattaattcagccaaaaagtagaaagaatgaggtacttggttttcttaaaaatgaattatctgatctttgcatttccagaccaaaatctcgtcttgagtggggaatagaactaccttttgatgataattatgtcacatatgtatggtttgatgcactaatcaattatatatcagcgataggagcttatagtaatgatgagcagttttcttctttatggcctgcagatgttcatttaattggtaaagatattttaactacccattcggtttattggcctacaatgttgctatcattaggattgccattaccgcaaagaatttttgcacatggatggtggctgactgatgatcagaaaatgagtaaa

SEQ ID NO: 296492 - DNA, 469 bp, Unknown
  Bacterial polypeptide expressing nucleotide sequence isolated from the Sargasso Sea
atggaaaagtattatataactacacctatttattatgtgaacgataaaccacatattggacatgcatatacaacaatacttgcagatacaatttcaagatttcgagctttaataggggaaaaaccaacttttttaactggattagatgagcatggtttaaaagtccagcaagcggcagaaaaaaatggaaaagcacctcaagatcattgcgattcaatggctccagcatttatagatttgtggaaaaaattaaatattaattattccgattttattagaactacggagcatagacatacaaagattgttcaacaaattttaacaaaagtccatgaatcaggtgatatatatatggatgagtatgaaggatggtattcaatttctgaagaaagatttattacaaaaaaggaatttgattctggtcaatttggtgaggcaaaacaaataaaggaaaaaaattattttttca

SEQ ID NO: 296493 - DNA, 589 bp, Unknown
  Bacterial polypeptide expressing nucleotide sequence isolated from the Sargasso Sea
tatgaagccattttatattactacaccaatatattatgtaaatgataagcctcatattgggcatgcatataccactattctagcagatgtactagcaagacactatcgaaatattggcagggatgttttccttcttacaggccttgatgagcatggacaaaaggtgcagcaggcagcagaatcaagaaatataaaccccaagcaacattgcgatgaaatggcgccacgatttttaaaactgtgggataagcttcacataagctacgatgatttcattcgcactacagaaaaacgccataccgatatcgttaaatattttcttcaaaaagtttacgacaaaggagatatttatgaagacagttatgaaggcctttattcggtatccgaagagcgatttattactgaaaaagaggctgagtccggagactttcgagatattaaagaattaaaagaaaagaattacttttttaaaatgtcaaaatatcaaaataaactgataaagcacattgaagaaaacccaagttttattcagcctaaatttcgaagaaatgaagtacttggttttctaagatctcccctagaagaccta

SEQ ID NO: 296494 - DNA, 891 bp, Unknown
  Bacterial polypeptide expressing nucleotide sequence isolated from the Sargasso Sea
aagtattatataactacacctatttattatgtgaacgataaaccacatattggacatgcatatacaacaatacttgcagatacaatttcaagatttcgagctttaataggggaaaaaccaacttttttaactggattagatgagcatggtttaaaagtccagcaagcggcagaaaaaaatggaaaagcacctcaagatcactgcgattcaatggctccagcatttatagatttgtggaaaaaattaaatattaattattctgattttattagaactactgagcatagacatacaaagattgttcaacaaattttaacaaaagtccatgaatcaggtgatatatatatggatgagtatgaaggatggtattcaatttctgaagaaagatttattacaaaaaaggaatttgattctggtcaatttggtgaggcaaaacaaataaaggaaaaaaattattttttcagaatgagtaaataccaaaaaactttaatagataaaattgaaaaagatgaattgctaatacagccaaaaagtagaaagaatgaggtgcttggttttcttaaaaatgaattatctgatctttgcatttcaagaccaaaatctcgtcttgagtggggaatagaactaccttttgatgataattatgtaacatacgtatggtttgatgcactaataaattatatatcagctataggagcttttaaaaatgatgaacagttttcttctttatggcctgcagatgttcatttaattggtaaggatattttaactacacattcggtttattggcctacaatgttgctatcattaggattaccattaccacaaagaatttttgcacatggatggtggcttaccgatgatcggaaaatgagtaaatcattaggaaat

SEQ ID NO: 296495 - DNA, 850 bp, Unknown
  Bacterial polypeptide expressing nucleotide sequence isolated from the Sargasso Sea
atgagtaaaaatttttatattactacacctatatattatccatcagctaaacctcacatgggtcatgcttactcaagtattattgctgattttttttcacgctttaaaaaaattgatggatacaatgtttattttttgactggcacagatgaacatgggttaaaaattcaaagatcagcggaaaatcaaaaaaaagacccaaaatccttttgtgatgaaatcagtaaaacattcgaagatttaacaaaaaccctaaatctgtctaacactgactttataagaacaactgaaaatagacataaagtttctgtacaaaatctctggaatatacttgaaaaaaataatcaaatttatctttctaaatattcaggatggtattctgtttcagatgaagctttttacaatattgatgaagtagaagaaaaagatggatctaaaattgcaaaaatttcagggtctgttgtagaatgggtagaagaagaatcttattttttcaaattgtccgaatgggaaaaacctttattagaattttatgagaaaaataaaaatttcatacttcccgaaagtagaagaaatgaagttattagttttgtaaaaaatggattaaaagatttatctgttagtagaaaaacttttacatggggtattaatgtgccaaatgatgaaaaacatgttgtgtatgtatggctagatgcgctaactaattatttaagttctttaaaatatccagatgaaaataatgatttatttaagaatttttggccagccgatatacatattattggtaaggatatattaagatttcatgcaatatattggccagcatttttattagccgcaaaatattaaa

SEQ ID NO: 296496 - DNA, 727 bp, Unknown
  Bacterial polypeptide expressing nucleotide sequence isolated from the Sargasso Sea
tcagcagagaaagaaggtctagatccttttaatttctgtgatcaaattagtaaaacttttagagatttatctaaaactttaaatttatccaatacagattttatacgaactactgaagagcgacataagaaaacagttcaacatttgtggaaagaactagaaaaaaatgatgatatttatctttccaattattcaggatggtactctgtttcagatgaagctttttataatgaagatgaaatagaagaagtagaaggtaaaaaaatttcaattagttctaaatcacctgttgaatggatagaggaggagtcatatttttttagactttccaaatgggaaaagcctttattagatttttatgaaaaaaaccctaattttatttcacctgcatcaagaaagaatgaggtaataagttttgttaaaagtggtcttaaagatctttcagtaagtagaaaatctttttcatggggaattaaagtccctgggaatgataaacatgttatttacgtttggcttgatgcacttactaactatataagtgctttaaattaccccaataaagaagatgaattgtttaaaaaattttggcctgcctcaatacatttaattggtaaagatatattaagatttcatgctgtatattggccagcttttttattagctgctaaaattgaactaccaaaaaaagtttatggtcacggatggatacttacgggagatgagaaaa

SEQ ID NO: 296497 - DNA, 814 bp, Unknown
  Bacterial polypeptide expressing nucleotide sequence isolated from the Sargasso Sea
atatttttacgtatggcttgacgcaccgatcggttatattgcaattttagataactttttgtcagaaaattcttcctcaatttcggcagaagaattatggaatgaatcagaaatttatcatttcattggaaaggatattatgaattttcatactttattttggccggcccttctggatgcttctgattttaaaaaaccttcaaatgtctttgtccacggttttatgacactcaatggtaaaaaaatgtctaaatcaaaaggtaattttcttttgattgatgattatttgaatctattaaatccagattatatgagatattttttggccactaaattgtcaaacggtattgatgatttagatttagatctgttggattttcaaaaaaaagttaatacagacttagtaggtaaatttgtaaacatcgcaagtagaagtcaaggtttcttaaaggagtttaacaatattctttctaatgatttagatgaagatcttatagatgaattctcaaataagaaaaatgaaatttttaatcactatttagatagaaattattcgaaagccttgaaagaaatcatgactcttgcagataaagcaaaccagtacatcgactctaataagccttggatactaaataaagaatctaacaataaagaaaaagttcgcaaaattgcatctacagcaattaatttatttaaaattttaaatctatacttagagccagttattccagaaacttcagaaaagattaaaaaatatttaaaatgtaacgacagtgtcgataacgtttctttttatttgaaaaatcatgaaata

SEQ ID NO: 296498 - DNA, 889 bp, Unknown
  Bacterial polypeptide expressing nucleotide sequence isolated from the Sargasso Sea
aaacaataattttattttaccaaattctagaagaaatgaagttatcagctttgtaaaaggaggtttgaaagatctttcagttagtaggactagtttttcttggggtgtaaaggttccaaataacgattcccacattatgtatgtatggctcgatgctctaacaaattatttatcagcctgtaattatacaagttctgagaacgatactttttataaattttggcctgcagatattcatatggttgggaaagacatattaagatttcatgcagtttattggcctgcttttttaatggctgctgatttaccattacctaaaaaaatatttgcacacggatggtggacaaatgaaggaaataaaatatctaaatctctaggtaatgtaattgatccacttgaattagttgataaatatggtgttgatcaaattagatattttttgatgcgggaagttccttttggtaatgatggtgatttctctaattctcaacttattaacagaattaatagtgatttagcgaacagttatggtaatttatttcaaagagttatctcaatgatattaaaaaattgtaatgcaattattccaattagaccaaaagattttcaagatgaagatttaagattaataaattctatcagaaattctttacaaaactatagaagtttaatggatgaacaaaaatttgaccaattcttaaaaaatatttggttggtaatctcagatgcaaacaaatatgttgataatcaagctccgtggtcactcaagaagaatgactttcaaagaatggaggttgttttgtatacgttaatagaaaccataagacaaatatctataatccttcaaccttttattccaaatacttcaaagtttattttggatcatatt

SEQ ID NO: 296499 - DNA, 703 bp, Unknown
  Bacterial polypeptide expressing nucleotide sequence isolated from the Sargasso Sea
tccgagcattatttctttaaactaccgtcctttagcgctgaaataaaagaatggattctgcattcaggggccgttcaggatgacgtcaaggcaaaggccttagagtggatcgaaagcggccttaaagactgggatatttctagagatgcgccttactttggttttttgatacctggtactacagataaatatttttatgtttggatggatgcacctattggctatatggcaaccacccagaaatggtgtgctgacaaaggttatgattttgataagatctggaaaggtgatcattatgagattcatcactttataggcaaagacattgtttattttcatgtgctcttttggcctttaatgttacaagtaggtggctttaaaaaaccaaacaaggtacatgttcatggttttttaaccattaatggcgagaagatgtccaaaagcagaggtacctttattacagcccaaacttatctagagcatctagaccctgaacttttacgctactattatgcctgtaaactatcaggaaatattacggatatcgatttaaacctagaagactttgtttacagagttaattcagatatcgtaaataaagtcgtcaacatcggcagcagacttggttctattatcaataaaaaattagatggcaaactaggatctttagacaaagaaggcgaagacctactagctacaatca

SEQ ID NO: 296500 - DNA, 599 bp, Unknown
  Bacterial polypeptide expressing nucleotide sequence isolated from the Sargasso Sea
aatgaataaaaattattatataaccacaccaatatactatccttctgcaaaacctcatatgggccatgcttattctagtatagtagctgatttttttgcacgttttaaaaaaattcaaggatataacgttttttttttaacaggtactgatgaacatggacaaaaaattcaaagggccgcagaaaagaagcaaatggatccactttcattttgtgatgaaattagcaaaacatttagagatttgtcaaaaactttaaatttatctaacactgattttattagaactaccgaagaaaggcacgccaagtcagttgccaacctttggaatattttagaaaaaaaaaatgaaatttacttatcgaaatactctggatggtactcagtatcagatgaagcattttattcagatgaagaaattaatgaagaaaatggtaacaaaatctcaaaagtttctggttcgcctgttgaatgggttgaggaagagtcatatttttttagattgtcaaaatggcaggaaccacttttagaattttattctaaaaattcaaaatttatattgccagaaagccgaaaaaatgaagttttaagttttgttaaaa

SEQ ID NO: 296501 - DNA, 628 bp, Unknown
  Bacterial polypeptide expressing nucleotide sequence isolated from the Sargasso Sea
tatgccatatttcattaccactccaatatattacgttaatgatgctccacatattggtcatgcctacactacaatcgcttgtgatatattaacaagatttagtaaattaaatggtcatgaaacatacttcttaacaggaactgatgaacatggacaaaaagtagaaaaagctgcaatatctaacaaaaaggatactcaagattttgttgatgaaatgtctaaaaattttcgtaatttaattccttatcttggctgtcaaatagatgattttattagaactacagaagaaagacataaaaaagcaacacaatttttatggaataaattaaaagagaatgagcaaatttatttatctaattatgagggttggtattccataagagacgaagctttttatttagagtcagaattaataaaaactgaaaatggatttattgctccatctggagcatcagttgaatgggttaaggaagaaagttatttttttaaattgtccaaatgggaagataaattaattgaatattatggtaacaatcccgaatctatactgccgcgttcaagatataatgaagttttaagcttcattagaggaggcttgaaagatttatcaatttctagaactacttta

SEQ ID NO: 296502 - DNA, 861 bp, Unknown
  Bacterial polypeptide expressing nucleotide sequence isolated from the Sargasso Sea
ttctggttcaaagttgagtgggttgaggaagaatcatatttttttaaattatcagcatgcggagaataaattacttaaactatatgagaataataaaaaatttatcttacctgaatcaagaaaaaatgaggttgtgcaatttgtaaaaaaaggccttaaagatttatctgtaagtcgtacatccttttcttggggcattcctgtacctaaaaattctaaacatgtaatatatgtctggcttgacgctttaacaaattacttaagcgcagttaattatccaaatacagatgatgaaaaatataaaagtttttggcctgcaaatgttcatattattggaaaagatattttaagatttcatgctgtatactggcctgctttcttaatggcagcaaatatacctgtcccaaatagagtatatggacatggctggatactttcagatgataagaaaatgtctaaatctttaggcaatattcttgatccaatagaaataataaaaaattttggtatagatcaacttagatattatttaactaaagaagtttctttgggcaatgatggaaatatttcattaaaaagtctaactgattgtattaacaatgatctagcaaataattatggaaatttgtgtcaaagagttttttcatttattgaaaaaaatagcaattcgaaaattcctaagattaaaaagttagatttagatgacaaaaaaatatctgatgaaattataaataaattaccaaaacttagaacattaatggacaatcaagaattaaatttatacttaaaagaagttattaaattttcctttaatgctaacaaatattttaatgatcaggcaccatggaaactaaaaaaaaa

SEQ ID NO: 296503 - DNA, 850 bp, Unknown
  Bacterial polypeptide expressing nucleotide sequence isolated from the Sargasso Sea
tacgcacggaacgcctgtcatgctgaaagccaaagagcttggaattgatcctgaagagcttatcaaaagaactagagaggagcacataaaaagttattcaagatttagtattaattttgataatttttatactactcattctgatgagaacaagaaatatgctgaagatatttatcaaaaatgtaaagaaggaaatctaatctttaaaaaagaaattgaacagttttatgactcagatgaaggtttattcttatccgatagatttattaaaggtacatgtccaaaatgtggtgcggaagatcaatatggtgatggttgttctgtctgtggcaccacttatacacccgatgatttactaaatcccgtatcatcattatcgaattctgagcttaccaagaaaaaaactgaacatgtgttttttgatttgcctcaaatgaaaaattttcttgagaattatctcaaagacttaactcttcaagatccaataaaaaataaactaaatgaatggattgaggatgggttaaagccatgggatatatcaagagacaagccatactttggatttgaaatacccggagagaaagataaatatttttatgtttggcttgatgcgccgattggatatttagcttctgcaaaaaattgggcagaaaacaatgatatggatatgaaagatttatggggtgaaagctctgattatgaaattcatcattttattggaaaggatattgcttattttcatgccctattctggccagcacttttaaagtcatcaaatattcgcttacctgaatcaattaatgttcatggttttttaactattgatggtgagaagatgtctaaatccaat

SEQ ID NO: 296504 - DNA, 526 bp, Unknown
  Bacterial polypeptide expressing nucleotide sequence isolated from the Sargasso Sea
gtaaaaaatggtcttaaagatctttctgtaagtagaaaaagtttttcatgggggatacctgttcctaataataaaaaccacgtaatatatgtttggttagatgcactcacaaattatttaagcgcattaaattatcctaatatggatgatgatttatttaaaaaattttggccagtctcaatccatttaattggaaaagatatactcaggtttcatgctgtgtattggcctgcttttttattagcagcaaaaattgaattacctaagagagtttatggtcatggatggatattatcaggtgaagaaaaaatgtctaaatccaaaggtaatatacttgatccacttgagataattaaacagtatggtttaaatcctttaagatattatttaattaaagaagtttcttttggtaatgatggaaacatatctcaagaaagattagaagattgtattaatagtgatttagctaataattatggaaatttatgtcagcgtgtaatatgcttttgcaataaaaaattgtgat

SEQ ID NO: 296505 - DNA, 577 bp, Unknown
  Bacterial polypeptide expressing nucleotide sequence isolated from the Sargasso Sea
cacggtgataactgtggagtatgtggtgcgtcttataatgttctagaaattgaaaacccagtttctacaatttcaaacacaaaacctgtaaaaaaagaaagtgagcacattttttttgatctgccagcaaagagagatatgcttaaagaatttatagagaaagtcgatatccaagaatctattaaaaataagttaaaagaatggcttggcgatgatttaaaaaaatgggatatctcaagagatgcgccttattttggttttgaaattcctggagaagataataaattcttttatgtttgggtggatgcaccaataggatacatcgcctcgatctctaactgggcaaattcaaatcaaattgcgatggaggatctatggtcagaaaactcatcatatgaaatttatcatttcattggaaaagatattgcgtattttcatgggctcttttggccagcattgttaagctcagcaaaattgaaacttccaagtggtattaatgttcatggttttttaactataaatggagaaaagatgtcaaagtctcttggaactggaatattagcaaaggattttgcaa

SEQ ID NO: 296506 - DNA, 748 bp, Unknown
  Bacterial polypeptide expressing nucleotide sequence isolated from the Sargasso Sea
atgactaatccattctacataagtacagcaatatcctatacaaacggtccaccacacattgggcatgcttatgaagttattgcagcagatgcaattgcaagatttaaaagattggatgggtatgatgtttttttcttaactggaacggatgagcatggcctaaaagttcaaaaaaaagcaaaagaaatgggtgttgaccctaaaaaatatgtagatgatatatctaaagaatttatcaaattgtctatctctctcgactgctcaaataatgatttcataagaactacagatgagcggcatataaaaaatgttcattcaatatggaaaattctttttgataaaggtgatatttatcttgatcaatattcagggtggtattcaattacggatgaagctttctataacgaagaagaattaattaaaacggaaagtaattcttttttatctccgaatgggaacccggttgaatgggtagatgaagagagttattttttcaaattatctaagtatgaaaataacttattggaactttatgaaaaaaatgaagaatttatttttccaaactcgagaatgaatgaaattaaaaactttgttaaatcaggtctgaaagatatttcaatatcaagaaaaaatatttcatggggaattcctgttaaagaaaatacagatcactcaatttatgtttggcttgacgcattaactaattatatttctgcacttgattggtgtgataacaatgagttattaa

SEQ ID NO: 296507 - DNA, 562 bp, Unknown
  Bacterial polypeptide expressing nucleotide sequence isolated from the Sargasso Sea
atggaatcacgaaaatattatttaactacaccaatttattacgttaatgacgtcccgcatatagggcatgcatacactacgttggcgtgtgatgtcttagctcgttttaaacgtttggatgggttcgatgtcctttttctgaccggaacggatgagcacggccagaaagttgagaaggcggcagaagcggtggatatgaagccacaggcctttaccgataaagtttcccaaaattttagggatcttcttccgtttatgaatattagcaatgacgacttcataagaactactgaaacaaggcacaaagaggccgcacaagccatttggcatagattaatgaaaaatgggcatatttacttagacaaatattcaggctggtattctgtgagagacgaggcatatttttctgagggtgagttagtagacggaaaggccccaactggagcaccggtagaatgggttgaggaaccgagctatttctttgatttgtcacaatgggaaacaaaattgttacaattttatgaagataatccagattttatagcgcctgtaagtcgaagga

SEQ ID NO: 296508 - DNA, 851 bp, Unknown
  Bacterial polypeptide expressing nucleotide sequence isolated from the Sargasso Sea
atccaaaccgatatttggactagatttatgcgcaactccaatcatgaagttctaagcttttgtgctgatgatgcacatggtgcccctatcatgatgaaagcagacgaaatgcaaataaaaccaattgatttcatagatcaaatgaaaaaggatcacataaattctttagaaaaatttggaattaaatatacaaattatcactctactcattcaagtgagaacgaaggcttagtctcggaaatttatcttgctgcaaaagatgcgggtttaatttataaggaagatatcgagcaatgctttgatgaagaaaagaagatgtttcttgcagatagatatgtcattggtgaatgtccaaaatgtggtgctaaggatcaatatggagatggttgtgattcatgtggagctacgtattctgctacagaactaattaatccaaaatcgtcgctaactggcagcacgccaagcacaaaaatatcagaacatgttttctttaatcttcaaaaatctaaatctaatcttaaaaagtttttaaaaactgcttctattcagaattcagttgttggcaagctctcagaatggcttgaaggcgatttaaggagttgggatatctctcgtgatgctccatactttggttttaaaattccagatgaatcagataaatatttttatgtatgggttgatgctccaatcggatatatagcatcagcaaaaaattgggccaaaaaaaataatttaagtattgataagctatggggcaaaaattcagaatatgagattcatcattttataggtaaggatattacctattttcatggtttattttggccagctcttttagataattcaaatta

SEQ ID NO: 296509 - DNA, 862 bp, Unknown
  Bacterial polypeptide expressing nucleotide sequence isolated from the Sargasso Sea
ggctcacaagttgaatgggtagaggaggaatcttttttttttaagctttctaaatggcaagaacctttattaaaattctataatgaaaatccagaatttattttacctgaatctagaagaaatgaagttatcagctttgttaaaagtggtttaaaagatttatctgttagcagaaaatctttttcttggggtataaaagttccatcaaataaagatcacgtaatatatgtatggttagatgctttaactaattacattagtgcattaaattatcctgacaccaatagcaatctttataagtcatattggcccgctacattgcatttaattggaaaagacatattaagatttcatgctgtatattggccagctttcttacttgctgcaaatcttccgccacccaaaagagtttatggtcatggatggatactttctggagaagaaaaaatgtcaaaatcaaaagataacatattagatccattagaaattatagatacttacggattagaccctctaagatactatttaataaaagaagtttcttttggaaacgatggcaacatttcaaaagaaaaattagaaaactgtattaatagtgatttagctaataattatggaaatctttgtcaaagagtcatttcttttattgaaaaaaatttagatctaagagttccaaataattatactttaataaatgaagataataatgttttaaaaatttataatgaatcatttaataaattaataggtgctatagatagccaaaacgttaacttttatgttaattttatccaagaacaactattctcagctaacaaatattttaacgatcaagaaccatggagcaaaaaagatgataccg

SEQ ID NO: 296510 - DNA, 646 bp, Unknown
  Bacterial polypeptide expressing nucleotide sequence isolated from the Sargasso Sea
gatgctagaggcgatcaatgtgataattgcacgaagcagttagatcttacagatctcataaacccgcgctcttcaatctcgggagcaacagaactggagcaaagagaaactaagcatttgtatctttgccaatccaatatgagagataacttggaaaactggattgagagtaagacggattggcccgttctcacaacatctattgcgaagaaatggctacatgatggcgaagggttgcaggatcgtggaattacaagagacctagactggggcattcccgttaaaaaaggtaacagtccttggcctggaatggaagacaaggtattttatgtctggtttgatgctccaattgagtacatcgcatgtgcgcaggaatgggtaaatgcgggtaaagggaacgactgggaaaagtggtggcgcactgataaaggtgctgatgaagttgtctacacccaattcatgggaaaagataacgtgccttttcatactctttctttccctgccactgttttgggctcaggcgaaccttggaagcttgtagactatataaaatcttttaactatttaaactatgacggcggtcaattttctacttcgagaggtcgaggtgttttcatggacgatgcacttaagattcttcctgcgg

SEQ ID NO: 296511 - DNA, 673 bp, Unknown
  Bacterial polypeptide expressing nucleotide sequence isolated from the Sargasso Sea
atgaataacagtttctatatatcaacacccatttactacgtaaatgataagccacatataggccatgcatatactaccatattagcagatgtgattgcccgtttttatcgtcagctcaattatgacacctttttcttaacagggttagatgaacatgggcaaaaggtgcaggaagcagcaagtaatcgaaaagtagagccacaagatcattgcaacgaaatggcaccacgctttatagagttatgggaaaaactacatatttcaaatgatgattttataagaacaacagaagaaagacacaaaaaagttgttcaagaatttttgcagcttgtttttgataaaggagatatttataaagatgagtatactggattatattcagtttcagaggaaaggttcataacggagaaggaagctgaaagcggaatatttagagatataaaagagcttaaagaaattaattatttttttaaaatgagcaatttccaatcccaattgatagatcatattgaaaataataataatttcattcagcctgctcatcgaaaaaatgaaatcctcggttttttaaaacagccactatctgatttatgtatttctcgacctaaatcaagattgaattggggtattgaattaccttttgacgatgaatatgtaacgtatgtttggtttg

SEQ ID NO: 296512 - DNA, 882 bp, Unknown
  Bacterial polypeptide expressing nucleotide sequence isolated from the Sargasso Sea
atacagggttttaaagtctattttttaactggcacagacgagcatggacaaaaaatacaacgagctgcagaagaaaaaaaaatggatcctttattattttgtgatgaaattagtaaaacctttagagatttatctgacactttaaatttatctaataatgatttcataagaactactgagaaaagacatgcaaaatctgttgaaaatctctggaatattttagaaaaaaaagatgaaatttacttatccaagtactctggttggtattcagtttcagacgaagcattttatgcagagagcgaaattgaagacttagacggtataaaaaaatcgattagttcaggttcaaaagtagagtgggtagaagaagagtcttatttttttaaattatcaaggtggcaagataaattacttgagttttataataagaatccagattttatactccccgaaacaagaaaaaatgaagttatcagttttgttaaatcaggattaaaagatttatcagtaagtagaaaatcttttaattggggtataaaagttccatccaataaagaccatgttatttatgtttggttggatgctttaacaaattatctaagtgctttaaattatccaaatgaaagtgacaatttgtacaaatctttttggcctgcagatctgcatctaattggaaaagatatattaagatttcatgctatttattggccagctttcttattagctgcagatatagaacctccaaaaagagtgtttggccatggatggatactttctggagatgaaaaaatgtctaaatctaaaggtaacattttagatccacttgagattatagataattatggcttagatcctttaagatattatttaattaaagaggtt

SEQ ID NO: 296513 - DNA, 927 bp, Unknown
  Bacterial polypeptide expressing nucleotide sequence isolated from the Sargasso Sea
gagcatcagactgattttgcgggctttaacatcagctacgacaactaccactcgacgcacagcgacgagaaccgcgagctgtccgagctgatttatggtcgcctgaaagagaacggttttattaaaaaccgcaccatctctcagctgtacgatccggaaaaaggcatgttcctgccggaccgtttcgtcaaaggcacctgcccgaaatgtaaatcaccggatcaatacggggataactgcgaagtgtgcggcgcgacctacagcccaaccgagcttatcgagccgaaatccgtcgtctctggcgccacgccggtgatgcgcgagtctgagcacttcttctttgacctgccgtccttcagcgaaatgctgcaggcatggacccgcagcggcgcgttgcaggagcaggtcgcgaacaaaatgcaggaatggtttgaatccggcctgcagcagtgggatatctcccgcgatgcgccgtacttcggttttgaaatcccgaacgcgccgggcaaatacttctacgtctggctggatgcgccaatcggctacatgggctccttcaagaacctgtgcgacaagcgcggcgacaccactagcttcgacgagtactggaagaaagactctaccgccgagctgtatcactttatcggcaaagatatcgtctatttccacagcctgttctggcctgccatgctggaaggcagcaacttccgtaagccgaccaacctgttcgtgcacggctacgtgacggtgaacggggcgaagatgtccaagtctcgcggtacctttattaaagccagcacctggctcaagcactttgatgccgacagtctgcgctactactacaccgcgaagctctcttcccgcatcgacgatatcgacctgaacctggaagatttcatccagcgcgtcaacgccgacatcggaaca

SEQ ID NO: 296514 - DNA, 820 bp, Unknown
  Bacterial polypeptide expressing nucleotide sequence isolated from the Sargasso Sea
gacgaacatggtttaaaagttgaaaaagctgctagaaaaaaaaattcagaccctcaagaatacgttgacataatttcaaagaattttcttaatctcagtgaaattttaaatctttcaaacgatgattttattagaacaactgaactgagacataaggaatctgtaaaatctttttgggaaaaacttgttaaaaacaatcaaatttatttggataaatatgaaggttggtattcgataaaagatgagacattttaccaagaaaaagaactaacgaaaaaaaatggaggttttgaaactaaagatggagaaaaagttgagtgggttgaagaagagagctatttttttaaattatctcgatggcagaacaaattacttgaattatacgaaacaaatgaaaaatttatcctaccgaaatcaagaagaaatgaagttgtgagttttgttaagaatggtctaaaagatttatcaatttctagaacgagttttagttggggaatcaaggttccaaatacagaaaatcacgtgatatatgtttggattgatgctttgactaattatattacttcgttagattatcccaatattaataaacatggatcatctttatggaaaaactctattcacattataggcaaagatattttaaaatttcatgccgtttattggccagcgttattaatgggtgcaaatttagatcctcctaaacaaatttttgcacatggatggtggacaaatgagggaaaaaaaatttcaaaatcccttggaaatacaatagatccattggagatagttaaaaaatttggtttagatcaaattagat

SEQ ID NO: 296515 - DNA, 928 bp, Unknown
  Bacterial polypeptide expressing nucleotide sequence isolated from the Sargasso Sea
tcagtaagcaggacatctttttcatggggtattacagttccaaatcacaacaaacatgtcatttatgtttggttagatgcgttgacaaattacttaagtgctcttgatttcccagatttaaaaagtattaaatataataaattttggcctgcaagcgtacatattattggaaaagatattttacgttttcatgctatttattggccagcttttttaatggctgctaaaattccattacctaaaagagtttatggtcacggatggattctatccgatgaaaaaaaaatgtctaaatcattaggaaatattcttgatcctttggaaattatagacaaatatggaattgatcccctaagatattatttaaccaaagaagtatcactcggtaatgatggtagtatttccctcaaaagtttaacaaactgtattaataatgatttagcgaataactatggaaatttatgtcaaagagtttttacttttttagaaaaaaattgtaattcaataataccgaaatatggaaaattaaataatcaagataaagatttgacacaagaccttacaaataaaatttccgatttaaaaaaactaatgaataatcaggaattaaatcagtatataaaagaagttataaacttttcatttaaatcaaataaatattttaatgatttaaaaccttgggatctaaaaaaaagtaatcccgatagaatgaatacagtaatatatgttgttttaaatcaaattagatcaattagtattttgttaaatccaattattccaaactcaacagaaaaaattttgtcttgtttaaatattaaaaaagctgatattacaattgataatttattaaatactgaatttcttaaaccaggaatgaagataatgaaacccaacatattatttaaaaaaattgataatgataattgat

SEQ ID NO: 296516 - DNA, 695 bp, Unknown
  Bacterial polypeptide expressing nucleotide sequence isolated from the Sargasso Sea
catggaaaagtattatataactacacctatttattatgtgaacgataaaccacatattggacatgcatatacaacaatacttgcagatacaatttcaagatttcgggctttaataggggaaaaaccaacttttttaactggattagatgagcatggtttaaaagtccaacaagcggcagaaaaaaatggaaaggaacctcaagatcactgcgattcaatggctccagcatttatagatttgtggaaaaaattaaatattaattattctgattttattagaactacggagcatagacatacaaagattgttcaacaaattttaacaaaagttcatgaatcaggtgatatatatatggatgagtacgaaggatggtattcaatttctgaagaaagatttattacagagaaggaacttgattctggtcaatttggtgaggcaaaaaaaataaaggaaaaaaactattttttcagaatgagtaaataccaaaaaactttaatagataaaattgaaaaagatgaattgctaatacagccaaaaagtagaaagaatgaggtgcttggttttcttaaaaatgaattatctgatctttgcatttcaagaccaaaatctcgtcttgaatggggaatagaactaccttttgatgataattatgtaacatatgtatggtttgatgcactaataaattatatatcag

SEQ ID NO: 296517 - DNA, 568 bp, Unknown
  Bacterial polypeptide expressing nucleotide sequence isolated from the Sargasso Sea
atgaaaaattattatatcacaactcctatatattatgtaaatgataaacctcatatcgggcatgcttatacaacaattttagcagatacattatcaagatttcgtcaattaattaatcagaaaactttctttcttacggggctagatgaacatggtttaaaagtacaacaagcagcagaaaaaaatggagcgaatccgcaagatcattgtgatgcaatggctcctgcattcctagaattgtggaagaagcttgatattcaatattctgattttattcgaacaacagaagcaagacatgtaaaaattgtacaaaatatactaactgaggtttacaataatggagatatttataaagataaatatgaaggatggtattcaatttcagaagaaagatttattacagaaaaagaattagatagtggtttatttagagatgttaaaaagattgaagaagaaaattattttttcaaaatgagtaaatatcaaaaacaattaattaaaaaaattgaagatgatgaagaatttattcaaccatctacaagaaaaaatgaagtgttaggattttaaa

SEQ ID NO: 296518 - DNA, 822 bp, Unknown
  Bacterial polypeptide expressing nucleotide sequence isolated from the Sargasso Sea
actaattatttgagtgctttaaattatccaaatgaaaatgatgatctttataaaagattttggcccgcatcgattcatttaattggtaaagatatattaagatttcatgcagtttattggccagcttttttacttgctgccggcataccattacctaaaagagtttatggccatggatggattttatctggtgaagaaaaaatgtcaaaatcaaaaggaaatatattagatccaatagaaattataaaaaattatggactagactctcttagatactatctaataaaagaagtttcatttggtaacgatggtaatatatctaaagagaaattagaaagctgtataaatagcgatttagctaataattacggaaatttgtgtcagagggttatatcatttaatgaaaaaaattgtgattttaaaatacccaaagttgattcttttaataaagatgatttagatttacttgagagatttgaaactaattttgataaattaattcatcatattgataaacaggatttaaactcatatatgaattttgttgttgaaagtctatttatagcaaataaatattttaacgatcaagaaccctggaagaaaaaatcagatcaattaagacttaacacaatcgtttacgttgctcttgaagttataagaaaaatttcaataatgctttatccagtaattccaaattcttcattaaaagttcttcgagtttttaatataaatgaacagaatatagattttaatagtataaaaaaacacaatgtgttaatcgctgataaaaaaattaataaaattaatattttatttgccaga

SEQ ID NO: 296519 - DNA, 911 bp, Unknown
  Bacterial polypeptide expressing nucleotide sequence isolated from the Sargasso Sea
agaatccagaaaaaatgaagtggtaaattttgtaaagaaaggcttaaaggatttgtctgttagcagaacatcgttttcatgggggatacctgtaccaaataataaaaaacatgtcatctatgtttggttagatgctttgacaaattacataagtgcattaaattttccaaacaccaatgacaaactgtataaagatttttggccagctgatatccacataataggtaaagatatattgagatttcacgcaatctattggccagcctttttattggctgcaaagcttaaagctcctaaaagggtttacggacatggatggatactttctgatgaaaaaaagatgtctaaatcattgggaaatattttggatccattggaaataattaaaaattatggagtagatcaacttagatattatctaatgaaagaagtatcactgggaaatgatggaagtatttctctagaaaatcttaaaaattgtataaataacgatttagcaaataattttggaaatttgtgtcaaagagtattttcttttgtagaaaagaattgtaattcaaaaattccttctccagaaaaatttaatactaaggacaatgaattgttgaatgagataataaaaaaactgcctaaattaaaagaaatgatggataatcaggaactgaactcatatgttaaggaaattataaatttttccttcaattccaacaaatatttcaatgatcttgaaccatggaagctaaaaaaatcaaatttgggcagaatgaatacagtattatattgtattttaaaccaaataaaatcgataagcatactactgtacccgattatgcctaattctattgaaaaaacctttcaattaatgggtttaaaaaaaggagacatagcactaagcgaagtcaaaaattgaa

SEQ ID NO: 296520 - DNA, 892 bp, Unknown
  Bacterial polypeptide expressing nucleotide sequence isolated from the Sargasso Sea
tcaagaagccgaacagtttttggccgatcggtttgtggtgggtacttgtccacattgcggccatgaagaggcttatggtgaccaatgtgagtcttgtgggcgctcgctcaatgcaaatgatttaatacatccaacctctactatttctggcagtgttcctgtcaccaaagcaaccaaacattggttcctcccactggataggtatcaaagttttttggaagattggattctgaaagggcatgctgatgattggaaacccaatgtatatggacaagtaaaatcctggcttgacgatgggctcaaaccaagggcagtaacgcgagaccttgactgggggattccagtaccagtaccaggaggtgaaaacaaagtactttatgtttggtttgatgcgccaattggatatatctctgcaaccaaagattgggcacagcaaaacaattccgactgggagccatattggaaagacaaaaacaccaagctcatccactttatcggtaaggacaatatcgtgtttcactgcattatctttccctcgatgctaaaagcggaggggtcttatgtattgccgaccaatgtgcctgctaatgagtttctaaaactcgaaggacaaaaactatcaacctcaaaaaattgggctgtttggctccatgagtatttggaggattttccaggcaaacaagacgttttgcgttatgtcttaactgccaatgcaccagaaaacaaagacaacgactttacttggcgtgattttcaagctagaaatgacaatgaactcgttgctgtttatggaaactttatcaatcgaattgttgtgctcacccataagtactatgaaggagtggtccctgcaccaaatcacaacacccaagttgacaaagaaaccctttga

SEQ ID NO: 296521 - DNA, 838 bp, Unknown
  Bacterial polypeptide expressing nucleotide sequence isolated from the Sargasso Sea
aaagtagagtgggtagaagaagaatcttatttttttaaattatcaaactggcaacataaattaattgagttttataataaaaatccagattttatactacctgaaacaagaaaaaatgaagttatcagttttgttaaatcaggattaaaagatttatctgtaagtagaaaatcttttaattggggtataaaagttccatctaataaagaccatgttatttatgtttggttggatgctttaacaaattatctaagtgctttaaattacccaaatgaaaacgatgatttgtacaaatctttttggcctgcagatctacatttaattggaaaagatatattaagatttcacgctatttattggccagctttcttattggctgcagatatagaacccccaaaaagagtatttggtcatggatggatactttctggtgatgaaaaaatgtcaaaatctaaaggtaacattttagacccacttgagattatagataactatggcctagatcctctaagatattatttaatcaaagaagtttcatttggcaatgatggaaatatctcacaagaaaaattagaggcttgtatcaatagtgatttagctaataattatggaaatttgtgtcaaagagttttgtcattttgtgataagaatgctaacttagaagttcctgatatagataaactaacagaggatgataaaattattttagatcaatactctaaatattatgatgatttggtaaagtattcagataatcaagatgtaaattcatacattaattttattgttgaacaactattttctgcaaaaaagtattttaatgatcaagaaccctgaa

SEQ ID NO: 296522 - DNA, 826 bp, Unknown
  Bacterial polypeptide expressing nucleotide sequence isolated from the Sargasso Sea
ttgaattatccaaatactaaggaaaaattatttaaaaatttttggccagcttccatacatttaataggaaaagatattttgagatttcatgcagtatattggcctgcatttcttctcgctgctaaaatagatcttcctaaaaaagtttatggtcatggctggatactttctggagacgaaaagatgtctaaatcgaaaggtaatattcttgatcctatagaaattataaataaatatggtctagattcgttaaggtattatcttataaaagaagtttcattcggtaatgatggaaatatttctcaagaacgtttagaggattgtattaacagtgacttggctaataattttggtaatctgtgtcagcgagtaaccgcttttgcaatcaaaaattgtaacagtaaaattccaaaaaaaattgaatttaacgaacatgatcacaagatattaaataattataaagataacattgatttaattagagaaaaaattgataatcaggatatcaatttctatataaactttatcgttaattcgttatttgaagccaataaatattttaatgatcaagaaccatggaataaaaaagaggatttattaagattaaatactattgtttttacaacattagagattgttagaaaagttagttttttattgtatccgattattccagaaagctctattaaggcacttaaaatttttggcataaatgaagcggacattaatttatcgtctatagaaaataataattttttatcaaaagttgataaaattaataaaatagatattctttttaaaaaaatagaaagaaaagatgattgat

SEQ ID NO: 296523 - DNA, 852 bp, Unknown
  Bacterial polypeptide expressing nucleotide sequence isolated from the Sargasso Sea
tatgagtttaaattttcaaaaccttactaaaattttaaatctttctaataatgattttattagaacaagttctcaaagacatattaatgcggtaagaagtttttgggagaaattgaacaataatgggcaagtttatttggataaatattccggatggtattcaatacgggatgaagcattttataatgaagaagaaattgtggatgggcatgcacctacaggtgcaccggtcgaatgggtagaagaatcaagttatttttttaaattgtcagattgggaagagaaattactgaagttttatgaagataatccaacatttattcagcctaagtctagatacaatgaggtggtaagttttgttaagcaaggattaaaggacttatcaatttcccgaacaagttttgactggggtgttaaggttcctggagatgaatctcatgttgtctatgtatggattgatgcactgacaaattatttaactgctttaggatatcctgataatgacagcaagtctttaaaggatttttggcccgcaaatttccattttgtaggtaaagatatactaagatttcatgcagtttattggccagctttgttaatggctgcaggaatggaaacaccaaaaaaaattatagctcatggttggtggactgtagagaaagaaaagatgtctaagtctctaggaaatgtagttaatcctcaggacattattaataagtatggactcgaccagtttagatattttttattaagagaggttccatttggtaatgatggagatttttcggaggatgctttaataagcagaattaattctgagcttgcaaataactttgggcatcttgtgaacag

SEQ ID NO: 296524 - DNA, 688 bp, Unknown
  Bacterial polypeptide expressing nucleotide sequence isolated from the Sargasso Sea
tatgaataaaacattttatatcactactccaatttattacgtgaacgatattcctcatattggtcatgcatatacaacaatacttgctgatgttttaagtaggtaccaaaagcaaattgggaatgacagcttttttttaactggggttgatgaacacggacaaaaagttcaagaagctgctaaaaaaagaggagtaaaccctttgcagcattgtgatgaaatggcaaaacgttttacttctctttggcaggaattgcatatatctaatgatgacttcattcgaaccacggagcaaagacatcagaaagttgtgaaaaaaatattaaatatagttaatgatgctggtgatatatatgcagatgagtatgaaggtctttattcaatttctgaggaaagatttattacagaaaaagaatcagagagcggtcaatttcgagatataaaaaaattaaaagaaaaaaattattttttcaaaatgagtaaatatcaagatcaattaattaaccatataaacaagaacccaaaattcattcagccagaacatcgaaagaatgaaatattagggtttttaaaacagccccttaatgatctatgtatttcaaggcctaaatcaaggcttgattgggggattgagttgccttttgatagcaattatgtgacttatgtttggttcgatgcttttgataaa

SEQ ID NO: 296525 - DNA, 367 bp, Unknown
  Bacterial polypeptide expressing nucleotide sequence isolated from the Sargasso Sea
aatgtctagaaaaatattcgtcaccagcgccttacctaacgcaaacggacccatccatttgggccatatgttggagcacatccaaacagacatctgggtcaggtttcagcgtatgagaggccatgaggtcgtctatgcttgtgcagatgatactcacggaacagcgaccatgcttaaggccgaagaagaggacacgactccggaagaattaatcgagagagtccgagtagagcatcaactagacttcgagaacttcttggtcagccatgacaactattactcaacacattcacaagaaaaccaatactactcagagctgatatacacaaaactgaaagaaaaaggactgataataaagaaagatgtc

SEQ ID NO: 296526 - DNA, 898 bp, Unknown
  Bacterial polypeptide expressing nucleotide sequence isolated from the Sargasso Sea
attggtaaacgaaaaaacagaaaaacaagttttttcaaaccaagatcaacgttttttaccggatagatatatcgaaggcacatgtccaaattgtggttttgaagaagctcgcggtgatcaatgcgataactgcactaagcaacttcaaccgaatgagctcataaatcctcggtcaactatttccggatcaacagacttagaggagcgcgaaacaaagcatcttcatttacgccagtcgttaatgaaagaagaactagaaagctggattgacactaaatctgactggccaattctgactacctctatcgcaaaaaaatggctcaatgatggagacggtttgcaagataggggaataacaagagatttaaactggggtgttcccgtaaaaaaaggtcaggaaaattggccaggtatggacggaaaagtattctatgtgtggtttgatgctccaatcgagtacattgcgtgtgctgaagaatgggttgacgctggaaagggagaagactggcatcgatggtggaaaaccgacaaaggagcggatgacgttatttatactcaatttatgggtaaagataatgttccatttcacactttgtctttcccggctactatcctaggatctggtgaaccttggaaattagtcgattacataaaaagttttaattacttaaattatgacggtgggcagttttccacgtctcgcaatcgcggcatctttatggaccaagcgcttgaaattctcccacctgactattggcgctggtggctcttgagccatgctccagaaagttccgattcagagtttacttgggaaaattttcagcaaacagtgaataaagacttagctgacgtacttggtaactttgtcagccgtgtcactaaattttgtagaagtaaa

SEQ ID NO: 296527 - DNA, 907 bp, Unknown
  Bacterial polypeptide expressing nucleotide sequence isolated from the Sargasso Sea
cggggacgcggcaatgaggtgatgttcctttgcgccaccgacgaacacggcacccccgccgaactggccgcagccaaggcgggcaaacccgtggccgattattgcgccgagatgcacgaagttcaggccgacatcgccaagcggtttggcctgtcgtttgaccattatggccgctcctccagcccgcagaaccacgcgttgacccagcatttcgcgggcaagctggaagaggccgggctgatcaccgaagtgtcggaaaaacaggtctattccaacgccgatggccgcttcctgcccgaccgctatattgagggcacctgccccaactgcggcttcgagaaggcgcgcggcgatcagtgcgaggaatgcaccaagcaactcgatccgaccgaccttatcaacccgcgctccgcgatctccgggtccaccgatcttgaggtgcgcgagaccaagcacctgttcctgcgccaatccgcaatgcgcgaccaattggaccagtggatcgactccaagaccgactggccggtgctcaccacctcgattgccaaaaaatggctgcatgacggcgacggtttgcaggaccggggcatcacccgtgacctcgactggggcatcgcggtcaaaaaaggcaccgaggactggcccggcatggaaggcaaggtcttctacgtctggttcgacgcgccgatcgagtatatcgcagctgctggcgaatgggccgaggcacacggcaaatcggatgcggactgggagcgctggtggcgcaccgacaagggcgcggacgatgtgaaatacgtccagttcatgggcaaggataacgtccccttccacaccctgtccttccccgcgaccctgctgggatcgggcgagccgtggaagatggtggatcacctaaagtcgttcaact

SEQ ID NO: 296528 - DNA, 928 bp, Unknown
  Bacterial polypeptide expressing nucleotide sequence isolated from the Sargasso Sea
caagctgaatggttcagtagacgatatagacctaaacctagaagacttcgtgcagagaatcaattctgacctggttggcaaaatagttaacatagccagccgcaccgcctctttcataacaaagaacttcaacggagggctagcagatgatgtccatgacccagcgctgttagctcaatttaaagcaacaggaaaagaaatctcgaatttatatgaaaatagagagttcaataaagcggttcgagaaataacgggattagcggatttagcaaatcaatatatagcaaaacatgaaccctggaagcttgccaagaaccctgataaatctagccaacttcatcttgtttgctcgcaagcgatagaaatgtttaggatgttacagatattcttgaagccaatacttccgaacagtgcagcaaaagcggaagaatttctcgataccgatcctcttctttgggcagatttggacaaaccattgttcggcaaatcgataaaacctttcaaaaaactacttgatcgcatcgagattaagacagtcatgcaacttgttaaggaacctgaccaggatggaaagagcatgctagaggaaaacccttcaactatcgtgcacattggcattgaggatttcgcgaaaatcgatctcagagtagcaaagatcgagagcgcagaaacggtagatggggcagataaattactccgattgactctcgatgtgggcaacgtgaaacgcacggttttctccggaatcaaagaagcctacaagcctgaagaccttgagggtagactcaccgtattggtctacaacttggcaccaaggaagatgaagtttggtgtctccgagggcatggtacttgctgccggtcccggaggaggagatatctttctgctgtcgccagattctggagcgacacctggaatgatcgttagc

SEQ ID NO: 296529 - DNA, 812 bp, Unknown
  Bacterial polypeptide expressing nucleotide sequence isolated from the Sargasso Sea
tatgtctggttggatgctttaacaaattatattagtgctttgaattatccaaatactaaggaaaaattatttaaaagtttttggccagcttccatccatttaataggaaaagatatattgagatttcatgcagtttattggcctgcatttcttcttgcagctaaaatagatcttccaaaaaaagtttatggtcatggttggatactttctggagacgaaaagatgtctaaatcgaaaggtaatattcttgatcccatagaaattattaatgaatatggtctagattcattaagatattatcttataaaagaagtttcatttggtaatgatggaaatatttctcaagagcgtttagaagattgtattaacagtgacttggctaataattttggtaatctatgtcaacgagtaaccgcttttgcaattaaaaactgtgatagtaaaattccaaaaaaaattaaatttaatgaagaagatcacaagattctaaataattataaagataatattgagttaattagaaaaaaaattgataatcaagatatcaatttctatataaactttatcgttaattctttatttgaagctaataaatattttaacgatcaagaaccgtggaataaaaaagaggatttattaagattaaatactattgtttttacaacattagaaatcgttagaaaagttagttttttattatatccaattattccagaaagttctattaaagcacttaaaatttttagtataaatgaagctgacattaatttatcatctatagaaaataataactttttatcaaaagttgataa

SEQ ID NO: 296530 - DNA, 751 bp, Unknown
  Bacterial polypeptide expressing nucleotide sequence isolated from the Sargasso Sea
gctaaaagcaaacgaacttggtataaaacctgaagaattaatagctgatgtcctagaagatcataaaagcacttatgatctttatagtataaattttaataattattacactactcacagtgatgaaaataaacaattttcagaacaaatatatgaaagcgctaaaaagaataatttaatatctaaatcaagtgttgaacagtactttgatgaaaaagaagaaatgtttctttctgataggtttattaagggaacttgtccaaaatgtggtgctgaagatcaacatggcgataattgtggtgtttgtggagcttcatatgacattcttgatttgaagaatccaatttctataatttcaaactctgttcctgtaagaaaaaaaagtgatcatattttttttgatttacctcaaaaaaaagaaatgcttaaagagtttattaaaaatgttgaattacaaacatcaattaaaaacaagctaaatgagtggcttgatgatgatttaaaaaaatgggatatatcaagggatgcgccatattttggttttaaaataccagatgaaatagataaatatttttatgtttggcttgatgcaccaattggatatttagcatccattttgaattgggctgataataataatttaaaaatggttgatttatggtctgaaaaatcaaattacgagatttatcattttataggtaaagatattgcttattttcatggtcttttttggcctgctttgttaagttct

SEQ ID NO: 296531 - DNA, 835 bp, Unknown
  Bacterial polypeptide expressing nucleotide sequence isolated from the Sargasso Sea
aaacccttattgaatcattataaagataatcctgattttatatctccaaaatctagaagaaatgaagttataagctttgtaaaaagtggcctgaaggatttatctgtaagcagaaaaagcctttcatggggaatacctgtaccctcaaacaaagatcatgttatttatgtatggttagatgcattaactaattatattagtgcactaaactatcctgatcttaatgataaattatttaataaatattggccagcttccatccatttaataggaaaagatattttaagatttcatgctatttattggcctgcatttttattagccgcaaaaatatctttacctaaaaaaatctatggccatggatggatactttccggtgaagaaaaaatgtcaaaatcaaaaggtaacatattggatccaattgaaataattaatgaatatggtttagaccctttaagatactatttaattaaagaagtttcatttggtaatgacgggaatatctcacaagaaagattagaagattgtattaatagtgacttagctaacaattttgggaatctctgccaaagagtaactgcttttacaatcaaaaattgtaatggaaaaatacctagtaaaattgaatttgaaaaagatgatttgaaaattttagataagtttaagttaaatttagatttaattagagaaaaaattgataatcaagatctgaattattatatcgactttatcgtcaattctttatttgaaacaaataagtattttaacgatcaagaaccatggaaaaaaaaagacaatagtacaagacttaatacaattgtttatacaactttag

SEQ ID NO: 296532 - DNA, 835 bp, Unknown
  Bacterial polypeptide expressing nucleotide sequence isolated from the Sargasso Sea
catgctaaatctgttcaaaacctatggaatgttcttgaaaaaaaaggtgagatttacttatcaaaatattccggttggtattctgtgtcagatgaagccttttattcagagagtgaaatcgaagatgttgatggggtaaaaaaatcaataagctctggatctaatgttgagtgggtagaggaagaatcgtatttcttcagattatcaaaatggcaggataaattaattgagttttatagtaaaaacccaaattttattttacctgaaactaggaaaaatgaagttatcagctttgttaaatcaggtttaaaagatttatctgtgagcagaaaatcctttaattggggtatcaaagtacctactaataatgagcatgtaatttatgtttggttagacgccctaacaaattatcttagtgctttaaattacccaaatgaaagtgacaatttatataaatccttttggccagcagatcttcatttgataggtaaggatatattaagatttcatgctatttattggccagcctttttattagcagctgatattaaaccaccaaaaagagtatttggacatggatggatactttctggcgacgaaaaaatgtcaaagtcaaaaggcaatattctagatccactcgaaattatagacaattatggtttagatcctttgagatattatttaattaaagaagtttcatttggcaatgatggaaatatttcacaagaaaaattagaattatgtataaatagcgatttagcaaacaattatgggaatttgtgccaaagagttttagctttttgtgaaaagaatgctaactatgaggttcctgaaa

SEQ ID NO: 296533 - DNA, 904 bp, Unknown
  Bacterial polypeptide expressing nucleotide sequence isolated from the Sargasso Sea
ttaccagaccgttatatcgagggaacctgccctgcgtgtggattcgaagatgctagaggcgatcaatgtgatagttgcacgaagcagttagatcctacagatcttataaacccgcgctcctcaatatcgggagcaacagaactggaacaacgagaaactaagcatttgtatctttgccaatccaatatgaaagataacttggaaaactggattgagagtaagacggattggcccgttctcacaacatctattgcgaagaaatggctacatgatggtgatgggttgcaggatcgtggaattacaagagacctagactggggcattcccgttaaaaaagggaacagtccttggcctggaatggaagacaaggtattttatgtctggtttgatgctccaattgagtacatcgcatgtgcgcaggagtgggtaaatgcggataaagggaacaactgggaaaagtggtggcgcactgataagggtgctgatgacgttgtctatacccaattcatgggaaaagataacgtaccttttcatactctttccttccctgccactattttgggctcaggcgaaccttggaagctagtagactatataaaatcctttaactatttaaattatgacggcggtcaattttctacttcgagaggccgaggtgttttcatggacgatgctctcgacattcttccagcggattattggcgctggtggctgcttagccatgctcctgaaagctctgactctgaatttacgtgggataattttcaaagtagcgtaaacaaagatctggctgatgtttctaggcactttgtaagcagagtaaccaaattttgccggtctaaatttggtgaagaaataccagccggtggagactatggtcaggctgaaagtagtcttatttgat

SEQ ID NO: 296534 - DNA, 934 bp, Unknown
  Bacterial polypeptide expressing nucleotide sequence isolated from the Sargasso Sea
atgatttttactcacgacgatttcatccgcacgacggagccgcgacacaaggccgcctgccaggccatttggaagcgcttgttcgatgccggcgatatttacttgggcagctacgagggttggtatgctgttcgagacgaggccttttacggtgagggagaactcaccactggccctgatggcaaacggatcgcatcctcaggagcggaagtcgagtggatccaggaaccgagttatttttttcgtttatcggcttgggaagaccgccttcttcaattttatgacgacaatcctaatttcatcctacctcgtacacggcgcaatgaggtgatcagttttgtcaaaggagggctccaagacctatctgtctctcggaccaccttcaaatggggcgtgcctgtgccgagcgatgatgcgcatattgtttacgtctggttggacgccttgacaaactatatcacggctgttggatttcctgagactgaggcagattcttttacccaatattggcctgcggatctgcatatggtcgggaaagatatattgcgtttccatgctgtatattggccagcatttctaatggctgcgggtttggagcctccgaagcgcatttttgcccacggttggtggaccaacgaggggcaaaagatctccaaatcagtcggcaatgtcatcgacccgatagagttggtcaataaatacggcctcgatcaggttcgttattttctcctccgcgaggtacctttcggtaacgatggtgatttctcgcagcaagcaatggtgaaccgcatgaacggcgagcttgctaatgattatggtaatcttgcccaacgcgtattgtccatgatcgccaagaattgcgatcgccaggtgccagctccggacaagtttacggttgatgatgaaaatttgttggcgcaggcgatggcttaga

SEQ ID NO: 296535 - DNA, 817 bp, Unknown
  Bacterial polypeptide expressing nucleotide sequence isolated from the Sargasso Sea
aacatttaattggggagtgcctgtcccaaataatccaaaacatgttatgtatgtatggattgatgcattatgtaactacttaactgctgttggttatccagatacaaataatcacaactataagcaattttggcccgcaactcacattgttggaaaagatattttaagatttcatgcagtatattggccggcttttctaatggcagcaggtttagaacctccaaagcgcatatttgcacatggctggtggactaatgagggacaaaaaatatctaaatctcttggtaatattatagacccttatgagataattaatgaatacgggttagatcaaataagattttttttatttagagaagttccatttggaaacgatggagatttttcaaaaaaatctatttcaaatagaattaatgcagatttatctaataattttggaaatttagtgcaaaggatttcatcttttgcagtaaaaaataacgactcactaattaaaccttcacaaaatctaacaaatgatgatcaggaactaattaatttgcttcagattaaatacgatgaatactgtaactttatggaaaatcaacaaatagatagagcaataaaatctgtattagaattaatatctgctggtaatgtatacgtagataatcaagcaccctggttactaaaaaaatctaataaaattagaatggaagaagttttgtatataatttgtaatataattattaaatcagctataatgctatatccagtaataccaaatagttctaaaaaaatacttaatatatttaattataatatagataaattaaga

SEQ ID NO: 296536 - DNA, 732 bp, Unknown
  Bacterial polypeptide expressing nucleotide sequence isolated from the Sargasso Sea
aatggataaaaattattatattactacaccaatatattatccttctgcaaaaccacatatgggtcatgcatattcaagtatacttgctgatttttttgcaagatttaaaaaaatacagggatttaatgttttttttttaactggcactgatgaacatgggcaaaaaattcaaagagcagcccaaaaaaaaaatatggacccacaatcattttgcgatgaaataagtgaaaactttagaaaactatctaaaactctaaatttatctaataatgattttataagaactactgagccaagacactcgacttcagcatcaaaactttggaacatactcgaaagtaataatgaaatttatctttctaaatattcaggatggtattcagtatcagatgaagctttttattcagaagatgaaattaaagtattaaacggaaaaaaaattgcaataaattcaggatctgaagttgagtgggttgaagaagagtcgtatttttttagactttctaaatgggaaaagccattacttgatttttataaaaaaaatccaaaatttattttacctgaaagtagaaaaaatgaagtaataagtttcgtaaaaagtggtttgaaagatctctctgttagcaggaaatcattttcttggggtattaaagttccatctaacaaagatcatgttatatatgtttggttagatgctttacaaattatattagtgcactcaattacccaaat

SEQ ID NO: 296537 - DNA, 910 bp, Unknown
  Bacterial polypeptide expressing nucleotide sequence isolated from the Sargasso Sea
aaaactttttatattactactcctatatactatccttctggaaaacctcatatgggtcatgcttattcaagtattgttgctgatttttttgcaaggtttaaaagaattcaaggtcataaggttttttttttaactggcacagacgaacatggtcaaaaaatacaacgttcagctgagaaagcaaaaatggatccacagactttctgtgatcaaattagcaaaactttctttaacttgtctaaagttttgaatctgtctaatgatgattttattagaacaacagaaaatagacataaaaaatctgttttaaatttatggaaaatattagaaaaaaaaaatgaaatttacttatccaaatactctggatggtactcagtatcagatgaagctttttattctgatgatgaaattgaagagattgataataaaaaagtttccaaatcatcaggttcattagttgaatgggtagaagaagagtcttatttttttaaattatctaaatggcagaaatctcttttaaatttttataatgaaaatcccaatttcattttaccagaatcaaggaaaaatgaagttatatcttttgttaaaagtggattaaaagatctttcagtaagcaggaaatcctttagctggggtattcaggtaccctcgaataaagatcatgttatatatgtttggctagatgcattaacaaattacttaagcgcattaaattacccaaatacaaatgacaatttatataagaatttttggccagcatctttacatttgattgggaaagatattttaagatttcatgctatttattggccagcttttttactagcggcagaaatacctctaccaaaaagaatatatggccatggttggatactttcaaatgaacaaaaaatgtctaaatcaaaag

SEQ ID NO: 296538 - DNA, 846 bp, Unknown
  Bacterial polypeptide expressing nucleotide sequence isolated from the Sargasso Sea
aaataaggatccaaaatctttttgtgatgaaataagtaaaacatttgaggatttaactaaaacattaaacttatctaatacagattttattagaacgacagaagatagacataaagtatctgtacaaaatttatggaatatacttgaaaaaaataatcaaatttttttgtctaaatattctggttggtattctgtatcagacgaggctttttataatgaagatgaggtcgaagaaaaagatggtttaaaagttgctaaatcatccggctcagctgttgagtgggtagaagaagaatcttttttttttaaactttcagaatgggaaaaaccgttattagatttttatgaaaaaaataaaaatttcatattacctgaaagtagaagaaatgaagtaataagctttgtcaaaagtggattaaaagacttatctgttagtagaaaaacattttcttggggtgtaaaagtaccaagtgatgaaaatcatgtcgtttatgtatggttagatgcattaacaaattatttaagttctttaaaatttcccgatgaaaataatgaattatataaaagtttttggccagcagatttacatattattggtaaagacatattaagatttcacgctatttattggccagcattcttattggctgcaaaaatagaaccgccaaaaagggtatacggacatggatggatactctctggtgacgagaaaatgtcaaaatcaaaaggaaatattttagatccattagaaataataaatatttatggtttagatccattaagatattatttacttaaagaagtttcttttggtaatgatggtaatatttctgaggaaaaattaaa

SEQ ID NO: 296539 - DNA, 775 bp, Unknown
  Bacterial polypeptide expressing nucleotide sequence isolated from the Sargasso Sea
aatattgccaaactctacgaggaattagattacagtaaagcagtacgcctgattatgtctcgggcagatttagccaataaatatattaacgaaaaacaaccttgggttgttgcgaaagacaatccgcaatcaactgagttacagggcatatgctcgactgggattaatgccttcagactcttaattatctatattaaaccagtactgcccgcaatagcagaaaaagctgagtcatttttaaacgttcagccattaaactgggaggatattgaatctattctaacaaaccatacgattggcaaatttgaagcattagttcatcgggttgagcttgataaggtaggcattatggtcgaagaaacgaaaagcgcattccaagcaaaggaaaatatgaatagcgagtctaatgaattcgagaatatttttgagccggaaatttcggtggatgacttttttaaaattgatctgagagtcgcgagaatcatttccgcaactcaggttgaaggggcggataaattactcaaattaaagttagatttaggacaagatgaagaaggacaaccagtcgaacgaacagtattctccggaatcaaatctgcttacgaacctgaaaaaatgatggggatgctaactgtagtcgttgcaaatctgaaaccccgtaaaatgaagttcggtgtgtcagaaggaatgatcctggcagcagggccaggtggaaaggacatttggcttatcgagccacatacaggtgccagccccggtatgcgcgtaacttgag

SEQ ID NO: 296540 - DNA, 328 bp, Unknown
  Bacterial polypeptide expressing nucleotide sequence isolated from the Sargasso Sea
atgaatttttatattactactccaatatattacacaaatgatattccacatataggacatgcatacaccacaatagcctgtgatattcttgctagatttaataaattatctaataatcaagttttctttttaactggaaccgatgaacatggtcaaaaagtagaaaaagctgctaatgaggcaaatttagatcctcaaaaatttgtagatcaactttcattaaattttgaaaaattagtacctgaacttggttgtgaggtgaatgattttataagaactactgaaaaaagacatatattatcatctcaagcttttggaataaattagt

SEQ ID NO: 296541 - DNA, 904 bp, Unknown
  Bacterial polypeptide expressing nucleotide sequence isolated from the Sargasso Sea
gctctgggatggctccgagacgaagggcttattgatagagctattactagagatcttgattggggagttgagctacctgttgatgaccttggtgaaggtaaaagaatctatgtttggtatgacgcagttatcggctacctttctgcatccaaggagtgggcagagcgacaaggaactccagacaggtggaaacactggtggcataacgataaatcacgccatgtgtatttcattggaaaggataatatcccatttcatgccttattctggccagctcagctaatggcggtaggagagcaagtagctggcaaagagcttcacttacctgatgatatcccagcgaatcagtatgtcacttttaaaggagggaaggcatcagctagtcgaggagtcgggatgacaatcgaggaaggacttcaacactttcaagcagatgcactacggtatgcccttgcgtcgaacttccccgaacaagctgataccgaaatctcatatgaagagatagttagacgcattaacgaagaattagtggcgaattgggggaacctagtcaatcgagtcttgtcgatgacgcataagacctgcggcggagctgttgctgaacccggtgagctaaccaaagatgatacggctctacttgcgtttattgatcgctctctcgaagagtctgcagagctattcgaaatcgttgagttacgtgctgcattacgtaaggggatggaagcagcccaagcagcgaacagatatctcaacgcaacagaaccttggaaactggcaaagactgatctgggtcgagctcaaaccattctgttcgttgccctaagtgcaattaacggtattcgcgtcatgctcagtccattccttccgtttacttctgagaaacttaatgaccttttagggcatc

SEQ ID NO: 296542 - DNA, 900 bp, Unknown
  Bacterial polypeptide expressing nucleotide sequence isolated from the Sargasso Sea
tgaagaattagaagtaaaaccagaacagttaatcgctcgtatatacgaaagtcatattaagacttttaattcatacaacataaaacatgataattatcatactactcatagtgaagaaaacaggatcctttctgaaagaatcttcaatgagttaaatgaaaaaggtttaatagaagttaaaacaatagaacaattatatgataactctagaaacatgtttctttctgatcgttatgttaaaggtacttgtcctaagtgtttagcagaggatcaatatggagacaattgtgaaatatgtagtgcaacttatgaagctactgaactgattgaccctgtatctgttcttagtaaaacaacaccagttatcaaagaatcagaccacctattttttaaattaagtgcgttaaaagtagaaattaaaaattggttagagagctctaaaatacaaagtcctgttaaaaataaactttctgaatggttagaagaagatttaagagattgggacataagcagagattcaccatattttggctttaaaatccctggatatgaagataagtacttctacgtatggcttgatgcgcctatagggtatcttgctagtcatatcaattatttagagaaacaaaattctgaagaatttgagcagttttgggatcctaattcaaattcagaaatttatcactttataggtaaagatattatgtatttccatacgctattctttccagttatgttatcaaatgctggatttaaaatgccttcgggagtttttgtacatggttttgtgatgttggatggagagaagatgtctaaatccagaggtaattttatctctgctgatgattttgttactgtattggatccagaatatttaagatattactttgcttcaaaatt

SEQ ID NO: 296543 - DNA, 858 bp, Unknown
  Bacterial polypeptide expressing nucleotide sequence isolated from the Sargasso Sea
aatcagttaacgaaatgtggactcgattagttaactctggagatatttatttagataaatataagggctggtattctatttcagatgaggcctattatgatgaaagtgaaatcgaggacaatgagggagtaaaaacctctaaagtatctggttctaaagttgattgggtagaagaagagtcttatttttttaaattatcggcttgggaaaaaccattgcttgaccatataaaagaaaaccctgaatttattttacctaaatctaggaaaaatgaagttgttaactttatcgaaaaaggtttaaaagatttatctgtaagcaggacatctttttcttggggtataccagttccaaaaaataataagcatgttatttacgtatggcttgatgctttaacaaactatattagtgctttaaattttcccaatgtcactgacaaactttttaaaagtttttggccagcagatctacatgtaataggtaaagatattttgaggtttcacgcaatttattggcctgcttttttaatggctgcaaagctaccaatacctagaagaatatttggccacggctggatactttcagatgataaaaaaatgtcaaaatcgataggaaatattcttgatcctattgagattattaataagtttggtattgatcaattaagatattatttaataaaagaagtttctcttggaaacgatggaaatgtttccatggaaaacttgaaaaactgcataaataatgatttggcaaataactttggaaatctttgtcaaagagtcttttcatttattgaaaaaaattgtgataatagaataccaaaacctataaaattgtctgaaaccagatattaaa

SEQ ID NO: 296544 - DNA, 545 bp, Unknown
  Bacterial polypeptide expressing nucleotide sequence isolated from the Sargasso Sea
tatggtaaataaagaaaaaaaattttatataacgacaccaatatattatgtgaatgatgtacctcatattggacatgcatatactactgtgatttgcgatacaattgccaattttaataaatggcttggtaatgaagttaactttttaacaggaactgatgagcatgggcaaaaagtagaaaaatcagccttaaaagcaaatatggatcctcagacttttactgataatgtctctacaagctttaaaaaattagcgtctaaacttgaaataaataatacagattttattagaactactgaagataggcatataaaatctgttaaacatctatggaatgtacttgtgaataaaggagatatttacatagataaatattccggctggtattcaattagagatgaagcattctattctaatgatgagattatagaagataaaaatggtaaaaaattggcacctaacggttctgaagtagaatggcttgaagaaccatcttatttttttaaactttcatcatggcaagataaactattaaaattttata

SEQ ID NO: 296545 - DNA, 873 bp, Unknown
  Bacterial polypeptide expressing nucleotide sequence isolated from the Sargasso Sea
cctgatcgaggtgcgcaccatcgaacagttcttcgaccccgagaagaacatgttcctgcccgaccgctacatcaagggcgaatgccccaagtgccacgccaaagaccagtacggcgacaactgcgaggtgtgcggcacggtgtacgcccccaccgacctgatcaaccccttctcagccctctccggtgccaagcccgaactcaagcactctgagcacttctttttcaagctctcggacccgcgctgcgtggagtttctggagaactggacgcaggacggcaagctgcagcccgaggtggccaacaagatcaaggaatggttcaccgtccgcaccaaccccgacggcaccaccagcgaaggcctgggcgactgggacatcagccgcgacgcgccctacttcggcatcgagatcccggacgcaccgggcaaatacttctacgtgtggctcgatgcgcccgtgggctacctcgcatcgctgaaaaacctgctggaaaagcgcggcgagagctacgacgcctacatggccgacccggccatggagcagtaccacttcatcggtaaggacatcgtcaccttccacaccctgttctggcccgccatgctgcacttcagcggccgcaagacgccgaacaacgtgttcgtgcacggcttcctcacggtgaacaacggcgagaagatgagcaaaagccgtggcaccggcctggacccgctcaagtacctgagcctgggcatgaacgccgagtggctgcgctactacctggcggccaaactgagcgcgcgcaatgaagacatcgacttcaatgccgaagacttcatgctgcgggtgaacagcgatctgatcggcaagtacgtgaacatcgccagccgcgcggc

SEQ ID NO: 296546 - DNA, 869 bp, Unknown
  Bacterial polypeptide expressing nucleotide sequence isolated from the Sargasso Sea
tagtataatagctgatatattcgcaagatttaaaaggatagatggatttaatgttatgtttttaaccggaactgatgaacatggattaaagatgcaaagagaggcagaaaaaaaatccaaagatataaaattattttgtgatgaattatctcttaaatttaaagatttaacaaaaacattaaatttatcaaatgacgattttattagaacaactgaaaaaagacatcataaatctgttttggacatatggtccagattagaaaaatcaaaagatatttatttatcaaaatataaaggttggtattcagtttctgatgaggcttattatgatgaagacgaaatagagacaaaaaataatattaaatattcaaaatcttctggctcaaaggtagagtgggtagaggaggagtcttattttttcaaattatcttcctggcaagataaactgctaaaattatacgaaaaagataatccaaaatttattttaccttcatcaagaaaaaatgaagttgttcaatttgtaaaaaaaggattaaaagatttatcggttagtcgtacatctttttcatggggaattcctgtgcccaaaaattctaaacatgtaatctatgtatggcttgatgctttaactaattatttgagtgccttaaattttccaaatactactgacaaaaaatataaaacattttggcctgcagacgttcatgttatcggaaaagatatacttagatttcatgctatttattggccagcatttttaatggccgcaaaaattcctgtgccaaaaagggtttatggtcacggctggatactttcagatgaaaaaaaaatgtcaaaatcattaggaaacattctagatccaatagaaa

SEQ ID NO: 296547 - DNA, 772 bp, Unknown
  Bacterial polypeptide expressing nucleotide sequence isolated from the Sargasso Sea
catgaatgaatttttctacataactactccaatatattatgtgaacagtcatccgcatatcggacatgcttacactacaattgcaacagatgttttgacgcgctacatgaagctgtttggagctgaaacttattttcttacagggacagatgagcatggacaaaagattgctgaatctgcagctaattccggaattgagccaaaggaatttgttgacaagatcagtcaagaatttcgagaattgtggcctaatctgcatattgagcacgaccagtttattcgtacaactgattctaatcataaagcttgtgttcagagaatactgcaaaaaatttttgaccaaggtgagatatatctaaaagaatacgagggactttactgcataggatgtgaaaggttttttgatgagtcagagttagaaaacggtaattgccctgatcatcaaacccccccagaattttataaggagcaaaattacttcttcaagatgagctcttaccagaagtggcttaccaaagagttaaatcaaaatgaggactggatttatcctggacgttacaggaacgagctaattcagtttcttaaagatcctctacaggatttgtgcatttcaaggcctaaaagtaggttaaagtggggtattgagctgccttttgataacaaatttgtaacttatgtctggtttgatgcactgcttaattatgtaagtgctcttgactggcctgatggagaaaaatacaaaaaattctggccacatgttaaccataccatt

SEQ ID NO: 296548 - DNA, 640 bp, Unknown
  Bacterial polypeptide expressing nucleotide sequence isolated from the Sargasso Sea
tatgaataacagtttctatatatcgacaccgatttactacgtaaatgataagccacatataggtcatgcatatactaccatattagcagatgtgatcgcccgtttttatcgtcagctcaattatgacacctttttcttaacaggattagatgaacatgggcaaaaggtgcaggaagcagcaagtaatcgaaaagtagagccacaagatcattgcaacgaaatggctccacgctttacggagttatgggaaaaactacatatttcaaatgatgattttataagaacaacagaagaaagacacaaaaaagttgttcaagaatttttgcagcttgtttttgataaaggagatatttataaagatgagtatactggattatattcagtttcagaggaaaggttcataacggaaaaagaagctgaaagcggaatatttagggacataaaagagcttaaagaaattaattatttttttaaaatgagcaatttccaaacccaattgatagaacatattgaaaataataataatttcattcagcctgctcatcgaaaaaatgaaatcctcggttttttaaaacagccgctatctgatttatgtatttctcgaccaaaatcaagattgaattggggtattgaattgcct

SEQ ID NO: 296549 - DNA, 438 bp, Unknown
  Bacterial polypeptide expressing nucleotide sequence isolated from the Sargasso Sea
catgagtaccaccccgagaaacatactggtgacgtcggcattaccctatgccaacgcgcccctgcacctcggacacatgctcgagcaggcgcaaaccgatatctgggtgcgttttcagcgatctcgcggtcatcactgccgctacgtgtgcgccgacgacgcccacggcaccgccatcatgctttcagcggaagccgccaaccgcaccccaaaagagcacatcgctgcgatccaggcccagcacgagcaagactcggcgggctttctcatccaatttgatcactaccattcaacccattcacccgaaaatcagcgctggtcagagacgattttcaagcggcttgaggcgggtgggcatatcgctgtgcgcgacattacccaggcctacgaccccgaaaaaggtctgttcctagccgatcgattcatcaagggcacgtg

SEQ ID NO: 296550 - DNA, 809 bp, Unknown
  Bacterial polypeptide expressing nucleotide sequence isolated from the Sargasso Sea
tatggcaaagaactataaaagacatacgatcacatcagcacttccttatgcaaatggaccggtgcacatcgggcatttggccggagtttatgtgccagcagatatctatgcaagatacctccgatgcaagggtgaagatgtggccttcataggaggttctgacgaacatggcgtggcaatcgagctaagagcgcgcaaggagggaaaaacacctcagcaaattgtggacttttatcacaatcaaatcaaagactcgttcgagaaatttggaataagttttgacgtctacagtcgaacctctaagcaaatccatcatgagacagcgtcggagtactttaaaaagctgcatgcggaaggaaagtttactgaggaggtttcacagcagttttatgatgaatccgagaagcagtttttagctgaccgatacatcaaagggacatgtccgaactgtggttttgaagaagcatatggtgatcaatgcgaaaattgtggttctaccttaagtccagcggagctaaaaaatccgaaatcgatgttgagcggtaatgctcccattttgaaggagaccaagcactggtacctcccgatggatcagtatgagccttggctaaaggagtggttattggaaggacataaagaatggaaaccaaatgtatacggtcagtgtaaaagctggatagacaatggactaaagccacgaccgatgacacgcgacctgaagtggggtattcctgtgcccgtcgatgggggagatggcaaagttctttatgtgtggttcgatgcaccaattgggtacatctctgcaacaa

SEQ ID NO: 296551 - DNA, 508 bp, Unknown
  Bacterial polypeptide expressing nucleotide sequence isolated from the Sargasso Sea
atgaatttttatataacaacaccaatttactacactaatgatattcctcatattggtcatgcttatactagtatagcttgtgatattattgcgcgatataataaattattaggaaacaatgtattcttcttgacaggtacagacgaacatgggcaaaaagtagaaaaagctgctattaattcaaacttaaaacctaaagattttgtcgataaactttcagttaattttataaatttaataccctttttaggatgtgaaatagatgatttcataagaaccactgaagaaagacatattaaagcatcacaagaaatgtggaggcaattagaaaaaaataatcaaatatatctttcaaattatgaaggttggtactcagttagagatgaagcattttatttagaaaatgaattgaaaaaggttaatgataaatatgttaccgataatggatcacctgtagagtgggttaaggaggagagttatttttttaaattatcagagtggcaagata

SEQ ID NO: 296552 - DNA, 817 bp, Unknown
  Bacterial polypeptide expressing nucleotide sequence isolated from the Sargasso Sea
aaagcaggcaaggaaccccaaatattttgtgatcaaatcagtcagacttttagagatctatctgatactttaaatttatcaaatacagattttattagaacaactgaagctagacataaaaaaacagtccaatatctttggaatgaacttgaaaaaaatgatgatatttatttatcaaactattctggatggtattcagtatcagacgaagctttttataatgaagacgaaatagaagatgtagatggaaaaaaaatagcaatatcatcaaaatcatcagttgaatggattgaagaagaatcttacttttttagactttcaaaatggcaaaaacctttattagaatattatgaagctaacccagaatttatcttaccagaatcgagaagaaatgaggtaattagttttgttaaaggtggtcttaaagatctttctgtaagcagaaaaagtttttcgtggggtatacctgtcccaaataataaaaaccatgttatatatgtatggcttgacgcacttacaaattatttaagtgcactaaattatcctaatattaaagatgatttatttaaaaaatattggccagcatcattgcatttaattggtaaggatatacttagatttcatgctgtttattggcctgcttttttactagcagctaaaatacaattaccaaaaaaagtttatggtcatggatggatactatctggtgaagaaaagatgtctaagtcaaaaggaaacatattagatccaaaaaaaataatcaaagagtatggaattgatccattaaggtattatttaattaaagaagtttcttttg

SEQ ID NO: 296553 - DNA, 886 bp, Unknown
  Bacterial polypeptide expressing nucleotide sequence isolated from the Sargasso Sea
agatcaatgctgcaaaaaaaggatctaatgaccagaatattaattacttctgctctaccatatataaatggtgtaaaacatcttgggaatttggttggtagccagctcccagctgatgcttttgccaggtttatgcgcctgaagaagtataatgttctatttatttgcgcaactgatgagcatggcacacccgctgaattggctgcggccgaggcaaatatggaaataaatgaattttgttcccttatgtggaaatcccaaaaaaaattaagcgacggatttaatttgtcttttgattattttgggagatcatcttcaaaagagaaccacaaattgacacaaaattttgcgaaagctcttcacgcaaataatttaattgaagaagtcattgagaagcaaattttttctcttgaagacaataggttcttgccagatcgctatatcgaaggtacttgcccaaactgtggttacaataaagcaagaggcgaccaatgcgagagttgtaccaagcagctaaatccaactgatcttatcgaccccaaatctgcaatttcagggtccaaaaatcttgaaattagagaaactaagcatctttacttgaagcaaagcaacattaaagaaaaattggaggattggatttcgaaaaaaactgattggccaatattagcaacctctatagctaaaaagtggttaacggatggcgagggcctgaaagaccgaggcataactagggacttaaaatggggcataccagttaaaaagggatcagagctctggccaggcctagaagataaagttttttacgtctggtttgacgcccctattggatatattgccgctactgaggagtgggaaaagtcgaacaaaataaagtcaggtacatggg

SEQ ID NO: 296554 - DNA, 889 bp, Unknown
  Bacterial polypeptide expressing nucleotide sequence isolated from the Sargasso Sea
ttgaatttatcaaacactgattttataagaaccacagaagtcaggcataaaaaaacagttcaacatctttggaatcaacttgagaaaaatgatgacatatacttatcaaattattctggatggtattctgtatcagatgaagctttttatagtgaagacgaaattgaagaattagatggaaaaaaaattgctatatcttccaaatctcctgttgaatggattgaagaagagtcatatttttttagactttcaaagtgggaaaaaccactattagattattatgaagctaatccagattttatatttccacaatctagaaaaaatgaagttattagttttgtaaaaaatggtcttaaagatctttctgtgagtagaaaaagtttttcatgggggatacctgttccaaataataaaaaccatgtaatatatgtttggttagatgcactcacaaattatttaagtgcattaaattatcctaatatagatgatgatttatttaaaaaattttggccagtctcgatccatttaattggaaaagatatactcagattccatgctgtgtattggcctgcttttttattagcagcaaaaattgaattacctaagagagtttatggtcatggatggatattatcaggtgaagaaaaaatgtctaaatccaaaggcaacatacttgatccacttgagataattaaacagtatggtttggatcctttaagattttatttaataaaagaagtttcttttggtaacgatggaaacatatctcaagaaagattagaagattgtatcaatagtgatttagctaacaattatggaaatttatgtcagcgtgttactacttttgcaataaaaaattgtgacggaaaaattccatcagaaataaaat

SEQ ID NO: 296555 - DNA, 875 bp, Unknown
  Bacterial polypeptide expressing nucleotide sequence isolated from the Sargasso Sea
ttattatgaaaaaaatccagaatcaatcttaccaaaaacaagatataatgaagtattaagttttattaaaggtggattaaaagatctgtctatttcgagaacaacttttaattggggggtgccagttccaaataattctaaacacgtgatgtatgtttggattgatgcattatgtaattacctaactgcaattggttatccagatacaaataataataattacaagaaattttggcctgcaacacacattgtaggaaaagatatattaagatttcatgcagtgtattggccagcttttttaatggctgcgggtatcgaacctcctaaaagaatatttgcgcacggttggtggactaatgaaggacaaaaaatttctaaatcacttggtaatgtcattgatccttacgaaattattaatgaatatggcctggatcaaattaggttttttttatttagagaggtaccctttggaaatgatggagatttttcaaaacaagcaatcgcaaatagaattaacgcagatctatcaaataattttggtaatttagtacaaagaatttcatcatttgttgtaaaaaataatgattctatactaaagccaacagaaaatttaactaatgatgatcaggatttaattaatattcttcaaaataaatttgatgaatattgtaaatttatgaataatcaacagattgatagagcaatcaagtctgtcttggaattaatatcttctggtaatgcatatgttgacactcaagcaccatggacattgaaaaaaacaaataaaattagaatggaagaagttttatatattgttacaaatataattattaaatcagctataatgctctatccaataatacaaactagttcaa

SEQ ID NO: 296556 - DNA, 440 bp, Unknown
  Bacterial polypeptide expressing nucleotide sequence isolated from the Sargasso Sea
aatgaaaaatttttttataacaactccaatttattatataaattcagatccacatattggccatgcatacacttcaattgcatgtgatatattatctagatataataaaattaatggaaaaaatgtttatttcttaactggtactgatgaacatggtcaaaaagttgaaaaagctgcacttgatcaatctttgaaacctaaaatatttgctgacaaaatgtcaaaaaaatttcaagatttaacaaattttcttaattgtgaaatcaatgattttatcagaactacagaacaaagacataaagtagctgctactgctttgtggaataaattattagaaaatgatcaaatatatttatctacttatgaaggttggtattctgtaagagatgaagctttttattctgaagatgaattatcaaaaaaaaataataaaatgtatg

SEQ ID NO: 296557 - DNA, 841 bp, Unknown
  Bacterial polypeptide expressing nucleotide sequence isolated from the Sargasso Sea
gaatcttttttttttaaattatcttcatgggaaaaaagattattagaattttatgataaaaataaaaaatttatacttccagcttcacgaagaaatgaggttataaattttgttaaaagtggacttaaagatttatctgtaagtcgaacttcatttacttggggcatcaaagtaccagaaaatgataagcatgttatttacgtttggttagatgctcttacaaattacttaagtgctcttaattatccggacataaacagtaagttatacaaagatttttggcctgcttcattgcatgtaataggtaaagatatattaagatttcatgctatctattggccagcatttctactagctgctaaaattgagcctccaataagagtctttggacatggttggattttgtcaggtgatgaaaaaatgtcaaaatctaaaggtaatattttaaatcctatagagatcattgaaaagtatggaattgatgaattgagatactatttgatgaaggaggtgtctcacggtaccgatggtagcatatcattaaaaagcttagaaaattgtattaatagtgatcttgctaataactatggaaatttatgtcaaagagttttttcttttattagaaataattgttcaaacaaagtaaccaaatctccaaaattaacagactcagataaaacactcattgaaaaaactaagcaacttaccaaaaatcttgatgaacttatggataatcaaaatttaaatagttatttaaaatcagttatagaaataagttttttaacaaataaatatgttaatgatgaagaaccttggaaacttaaaaaaaaagatgaagata

SEQ ID NO: 296558 - DNA, 891 bp, Unknown
  Bacterial polypeptide expressing nucleotide sequence isolated from the Sargasso Sea
agaattaactaaaacggaaaatggatttacagctccatcaggatcacctgtagaatgggtaaaagaagaaagttatttttttaaattatctgaatgggaaaataaacttattgatttttatgaaaagaataaagaggcaatactacctaaatctagatataatgaagttataagttttattaagggtggtctaaaagatttatctatttcgagaactacatttaaatggggtataaaagttccagaagagacaaatcatgtaatgtatgtttggattgatgcgctttgtaattatattacagctttaaattatcctgatattaataatgatagttttaagaagttttggccaggtatccatatagttggaaaagacattttgagatttcatgctgtatattggccagcatttttaatggcagcagatcttgaacccccaaaaaaaatatttgcacatggttggtggacaaatgaaggtcaaaaaatttcaaaatctctaggtaacgttattaatccttatgaaataattgatcaatatggtttagatcaaattagattttttctttttagagaggttccttttggaaatgatggagatttttccaaagatgcaatagcgcaacgtgttaatgcagatttatctaataacttcggcaatctaattcaaagaatagcatcatttataattaaaaatacaaatgctgaagtgtcaaaaccaaaaaaaattgaagaaaaagatgatcatttaatccaggaatttaatagaacttttagcaattatttaaataatatggataattttcagattgataaagcacttaaaaatatttttgaatatttatctgacgttaatgcatatgtagatgagcaagctccatggtcattaaaaaa

SEQ ID NO: 296559 - DNA, 865 bp, Unknown
  Bacterial polypeptide expressing nucleotide sequence isolated from the Sargasso Sea
atgaataaatatttttttataacaactcctatatattatccttcggcaagaccacatatggggcatgcttattcaagcattgtttcagatgtaatagccagatttaaaaggctagatggttataatgttgaatttttaacagggactgatgagcatggtttaaaaatccagcgtgctgccgaaaaaaacggtattgatccaaaaaaattttgtgacgagataagtgaaacttttagaggtttgtccaaaattctaaacctttcaaatactgattttattagaactacagagaacaggcatataaaatcagttcaaaacttatggaaagttttggaaagcaaagatgaaatttatttatcaaattattcaggttggtattcggtttctgatgaagctttttatagtgaagatgaaattataaaggaaaacagcattaatgtttctaaaaactctggttctaaagtggagtgggttgaagaagaatcttatttttttaaattatctaaatggcaagataaattactaaaattttatgatgaaaatcctgaatttattcttcctaattctagacgaaatgaagttataaattttgtaaaaagtggtcttaaagatttatcaataagcagaaaatctttttcctggggaataaaagtaccaaataataataatcatgtaatatatgtttggttagatgctttgacgaactatataagtgcattaaattatccagacacaaaagataaaaaatataagaatttttggccggcagatattcatatgataggaaaagatattttaagatttcatgcagtttattggccggcttttttacttgctgctgatttaccaccaccgaaaaaaattt

SEQ ID NO: 296560 - DNA, 910 bp, Unknown
  Bacterial polypeptide expressing nucleotide sequence isolated from the Sargasso Sea
ttattcagaagaagaaattgatacaataggtgatcaaaaaaaatcaaaagtttccggatctattgtagaatggatagaggaagaatcttatttttttaggctatcaaaatggcaagaaccattgctgaaattttattctgaaaatccaaattttattttacctgaatcaagaaaaaacgaagttataagcttcgttaaaagtggcttaaaagatctatctgttagtagaaaatctttttcatgggggattaaagtgccttcaaataaagatcatgtaatttatgtttggttagacgcacttactaattatctaagtgcattaaactatcctgatacaaatgataaactttacaaaaattactggcctgcagaccttcatttaataggtaaagatatacttagatttcacgctgtttactggcctgcatttttattagcagcgaatattcctccacctaaaagagtatatggtcatggatggatactatcaggagaagaaaaaatgtctaaatctaaaggaaatattttagatccaatagaaataatcaaaaattatggattagatcctttaagatattatttattaaaagaagtttcttttggaaatgatggaaatatttcaaaagaaaaattagaaagttgtataaatagtgatttagctaataactttggaaatttatgtcaaagagttattgcttttacagagataaatttgaaactcaaaattcctgataaatatgaatttaataaagacgatatatcaatacttaattcatactcatcaaattatgaaaaattaattgatcatgtagacagtcaaaatttaaataattatatgaattttatacaagaacaattatttttggctaacaaatattttaatgatcaagaaccaggaataaaaaatcaa

SEQ ID NO: 296561 - DNA, 864 bp, Unknown
  Bacterial polypeptide expressing nucleotide sequence isolated from the Sargasso Sea
accttattttggttttcaataccaggggaagaggaaaagtttttttacgtctggatggatgctcccattgggtacttggctagtcttaagaattggtgtgatgaatcaaagctttctaatatcgaagattattgggcgcataattcatccgccgaggttcatcattttattggaaaagatatcattaattttcacgcgcttttctggccagcagtccttgaaggctcggggtttcgaaagcccacaaaagttcacgtacacggatttcttacagtgaatggggtcaagatgtcgaaatcaaggggcacattcatcaccgcaaaaacctatagcgaacttttggatccagaatatcttcgttattacctcgctgcgaaactaaacggatccgttgacgatgtggattttaatcttgaagactttgtcctcagaaccaattctgacttagttggaaaagtcattaatatcgccagcaggtgttctggattcattgaaaaaaattttgaaaacactctttctaacaacatcgataatcaagttttgctcgacgatcttctcgctcaaacagagaccattgcctcatattacgagcaaaacgacacaagcaaagccgtaagagaaataatgtcattagccgatctgtgcaatcaatacattgccgaaaaacagccatggaaaatcatcaaagataaaaatcgagttgacgaagtacaacaagtttgcagtctgggcatcaacctgttccgaatattaatggcttacctgaagcctatcctcccagaacttgcatctaaagcagaagtatttctcaattgtgcaccccttgactggtcgaacattgatcagcctctgcttaaacacaaa

SEQ ID NO: 296562 - DNA, 400 bp, Unknown
  Bacterial polypeptide expressing nucleotide sequence isolated from the Sargasso Sea
atgcgtaaaattctagtcacaagtgctctcccatatgcaaatggttctatacaccttgggcacctggttgaatatcttcaaacagatatatgggttagaaaccaaaaaatgtctggaaatacatgctattacatttgtgcggatgatgctcacggaactccgataatgctgaaagctaaggagcttgatgtaaaacctgaagaattaattcaaaaaacatatcaagagcatgtgaaagattttgaagattttggtattgaatttgataattactatacaacccactcagaggaaaatagggaatattctgaatttatctataactcactcaaagataatggtgatatcaaatcacaagaaattgagcaattctacgatgaatcagcgaagatgtttttac

SEQ ID NO: 296563 - DNA, 760 bp, Unknown
  Bacterial polypeptide expressing nucleotide sequence isolated from the Sargasso Sea
gataaaagagaaatattagtcacttcagccctaccatatgctaacggtgaattgcacctaggacatatgttggaacaaatacaaactgatatatgggttagatatcaaaaacttataggcaatgaatgtacttatgtatgtgctgatgatgctcacggtactcccataatgttaagggcagaagagttaggtatagatccagagcatcttattagtgacgtttatgaaaatcacctaagagattctaagggttttttgattgaccaagataattaccactcaactcatagtgatgaaaataaatatttttcagaattgatctttgaaaggtgtaaagaaaagggatatatcttagagaaagaaatagaccagctttttgacatagagaaacaaatatttctttctgatagatatgtaaaaggaatttgtccttcgtgcggagcgaaagatcaatatggagataattgtgaagtttgtggtaagacttatctagccactgacttgatcgatccaatctctacacttagcgacacgattcctgaagttaaaaaaagtctacatttattttttgctcttagtcaattgaacgatgaagctaaaagctggtttaaatcttctaaagttcagaaacaagctttaaataaactaaatgaatggattgatgatcttagggattgggatatttctagagatgcaccttattttggttttgaaatacctaattaccctaataaatatttttatgtttggcttgatgcac

SEQ ID NO: 296564 - DNA, 319 bp, Unknown
  Bacterial polypeptide expressing nucleotide sequence isolated from the Sargasso Sea
atgacttatttcattactacaccaatttattatgttaatgacgcccctcatatcggtcatgcttacacaacaattgcttgcgatattttatcaagatataataagttaaagggtgataaaacatttttcttaactggaactgatgagcatgggcaaaaagtagaaaaagctgctttatctaagaaaaaagatacgcaaaattttgttgatgaaatgtcccaaaattttcgagatttagtcccttttcttggctgtcaaattgatgattttattagaaccacagaagaaagacataaaattgcaacaccaatttttatga

SEQ ID NO: 296565 - DNA, 784 bp, Unknown
  Bacterial polypeptide expressing nucleotide sequence isolated from the Sargasso Sea
atgcctagaaaaatattcgtcaccagcgccttacctaacgcaaacgggcccatccacttgggccatatgttggagcacatccaaacagacatctgggtcaggtttcagcgtatgagaggtcatgaggtcatctatgcttgtgcagatgatactcacggaacggcgaccatgcttaaggccgaagaagaggacacgactccggaagaattaatcgagagagtccgagtagagcatcaactagacttcgagaacttcttggtcagccatgacaactattactcaacacattcacaagaaaaccaatactactcagagctgatatacacaaaactgaaagaaaaaggactgataataaagaaagatgtcgaacaactgtttgataaacacaaaggcctttttttagcagaccgatttattaaaggaacttgcccgaaatgtcatgccgaagatcagtatggagacaactgccaggtctgcggagctacttatgatgcgacagagctactcaactcccgatcggtatacagcggcgaacctcccgagctaaaaaaatcggaacactttttctttgatctagctcaatttggggagtttctgaaagattggttgagtcaaaacccggttagaaatgaagtggcgaataaattaagagagtggttagaagatggtcttcgtccatgggatatttctagagatgcaccttattttggttttcaaataccaggggaagacgaaaagtttttttacgtctggatggatgctccccattgggtacctggctagt

SEQ ID NO: 296566 - DNA, 877 bp, Unknown
  Bacterial polypeptide expressing nucleotide sequence isolated from the Sargasso Sea
agaaacctccccaggtccgccaggagaagattattttttccggatgagtgcataccaggagtggcttattggactccttgaagaaaacaaggatctggttcaacctgcaaggtatcgcaatgaactgctgagttttctcaaggcacccctccaggacctctgcatttcaaggccgaaaagccggcttgaatggggaatcgaccttcctttcgacaatgattttgtcacctatgtctggtttgatgcgttgctgaattatgtcaccgcattgggctggccggaggattctcgttatgagcatttttggacgcactgccatcatgtgatcggcaaggatattctcaaaacccacggaatctactggccctgtatgctcaaggctgcgggtttcccggtcttcaaaaaattggccgtccatgggcattgggtggttcaaggcagtaagatgagcaagtctctgggcaacgtcgtcaatcctttggaaatgaaagacctgattggagtcgacgggttgcgctatttcctgttgagagaaatgagttatggagaagacgcgaattttaccgaagatctggtgttcgcacgttaccacggagagctttcgaacaatttcgggaatctgctcaaccgttccatttcgatgtcacggaaaaatttcgaaaatgtggttcctccccggggtgagccaggaaaacaggaaatcgaactgtaccaaatgtttgagcaggaaacttctcagatcaaagcatgggtccaacagtttgagccgcatcgggctttggaacggattgccatgatgagcagtgccgtaaacaaatatctcgatgaaaataaaccctggaaacttgccaaagaagaggatcaaaacgaacgtctc

SEQ ID NO: 296567 - DNA, 958 bp, Unknown
  Bacterial polypeptide expressing nucleotide sequence isolated from the Sargasso Sea
tatgaagccattttatatcactacaccaatatattacgtaaatgacaaacctcatattgggcatgcatataccactatcctagcagatgtattagcaaggcactatcgaaacataggtagagatgttttccttcttacaggccttgatgagcatggacaaaaggtacagcaggcagcagaatcaagaaatattaaccccaagcagcattgcgatgaaatggcgccaagatttttaaatctatgggagaagcttcacataagctacgatgatttcattcgcactacagaaaaacgccataccgatatcgttaagtattttcttcaaaaagtttatgacagaggagatatttatgaagatagttatgagggtctttattctatatctgaagagcgatttattaccgaaaaggaggctgagtccggagacttccgagatattaaagaattaaaagaaaagaattacttttttaaaatgtcaaaatatcaaagtaaactgataaagcacattgaagaaaacccaagttttattcagcctaaatttcgaagaaatgaagtacttggttttttaagatcgcccctagaagacctatgtatttcacgtccaaaatctcgtttgagttggggtattgaaatgccttttgattcaaattatgttacctatgtttggtttgatgctctaattaattatgtatctgcaataggatttaatagtgacgaaaaaaaatataaaaccctctggccagtaaattatcatttgataggaaaagatattttaaccacccattcagtttattggcccacaatgctaatgtcagctggaattaaactgcccaagagtatttttgctcatggctggtggttaagtgatcaatcaaaaatgagcaaatcgttaggaaatgttatcgatccattaaaactaattgaaacctatggcgttgatcctgtcagattttatctg

SEQ ID NO: 296568 - DNA, 774 bp, Unknown
  Bacterial polypeptide expressing nucleotide sequence isolated from the Sargasso Sea
gatgaccggttcagacaagaagcgtttttacgttacaacaccgatttactacgtgaatgacaagccgcatatcggccacgcctacacgacccttgcctgtgatgtgctggcccgcttcaaacgcctcgacgggtttgaggtgatgtttctcaccggtaccgacgaacatggccagaaagtcgagaaagccgcgacagacaaaggcgtgacgccgcaagcctttaccgacagtgtcagccagaattttcgggatctgacattccgcatgaatttctccaatgatgacttcatcaggacgaccgaggcacggcatcgtgcagcctgccaaaaactctggtcgatcctgcttgagcgtggccacatcaccctcggcagttacgctggatggtatgccgttagggacgaggccttctacaccgagacggaaattgtcgacggcaaggcgccgaccggggcgcccgtcgaatgggtcgaggagccgtcctatttcttcaatctgtcgcattggcaggaaccgcttcttgaattctacgaggcaaaccccgatttcgtcggtccggcatcccgctttaatgaagtgaagagttttgtaagcggcgggcttcgcgacctgtcggtaagccgtgcaagtttctcgtggggcgtgccggttcccgatgacgacgcgcatgtgatgtatgtctggcttgacgcgttgacgaactatctgacagccaccgggttggcccgtggacggcgatttcggagacaaggacagggaacgagcgtttctgg

SEQ ID NO: 296569 - DNA, 501 bp, Unknown
  Bacterial polypeptide expressing nucleotide sequence isolated from the Sargasso Sea
tacaaagtctatatcatggggtattaaagttccaaataatgataaacatgttatttatgtatggttagatgctttaacgaattatttaagtagtttaaaatatccagataccaaaaataaattatataaagatttttggccagcacatttacaccttataggaaaagatatactaaggttccatgcaatttattggcctgcttttttattagcaacaaaaatacctcttcctaaaaaaatttatggacatggatggattttatctggtgatgagaaaatgtctaaatcaaaaggtaatatattatatccattagaaattattgataattatggcttacatcctctaagatattatttaattaaagaggtttctttcggtagtgatggaaatatttctaaagataaacttgaaaattgtataaatagtgatctagctaataattttggaaatttatgtcaaagagttgtatcttttaatgaaaaaaatttttctctttcaat

SEQ ID NO: 296570 - DNA, 677 bp, Unknown
  Bacterial polypeptide expressing nucleotide sequence isolated from the Sargasso Sea
caaacattaaatctgtctaataatgattttataataaccactgaagaaagacataaaaagtctgcaaaaaacatatggaatatattagaaaagaaaggcgagatatacctctcaaaatattcaggctggtattctgtctcagatgaagccttttatacagatgatgaaatagaggaggttaacggttttaaacaatgtaaaatttcaggttctaaagttgaatgggttgaggaagagtcttatttttttaaattatctaaatgggaaaaaacattaataaagttttatgaagataatccgtattttattttaccaatatcaagaaaaaatgaagttgtaagttttgttaaaggtggtttaaaagatttatctgtaagtagaaaatcttttaagtggggcatacctgttccaacaaatgaccaacatgttatgtacgtttggttagatgctttaacaaattatttaagtgcattaaattatccaaacgaaaaagatgaattatataaaaatttttggccagcagatttacatgtaattggtaaagatattttaagatttcatgctgtttattggcccgcatttcttctagcagcagatattaagcctccgaaaagggtgtatggacatggatggattttatctggagatcaaaaaatgtctaaatcaaagggtaatat

SEQ ID NO: 296571 - DNA, 752 bp, Unknown
  Bacterial polypeptide expressing nucleotide sequence isolated from the Sargasso Sea
tatgttaaaagccgaagagttgaataaagaacctgaagacctaatagaagaaatctatgcaaatcatgtaaatactttcaacttatacaatattaatcatgataattttcatactacgcatagtgaagaaaatagaactctctctgagagaatttttaatgctctaaatgaaaagggtttaattgaaattaggacgattgaacagttatatgatacttcaagaaatatgtttctttctgatcgttacgttaaaggaacttgccctaaatgttatgcagaagatcaatatggagataactgcgaagtctgcagtgctacctatgacgctatagaattgattgaccctttctccgtccttagcaatacctcaccagttataaaagaatctgagcacttattttttaaattaagtgaactaaaacaggaaatagttgaatggttaaaaggctctaaaattcaaaaccctgtacaaaataaacttgcagaatggcttgatgaagatttaaaagattgggatataagcagagactcaccctacttcggttttgagattcctggtcacaaggataaattcttttatgtttggctagacgcccctataggttacctagcaagtcatattaattatttaaataagcaaaattctaatgaattcgaaaatttctggaatccagagtctaattctgaaatttatcactttattggtaaagatataatgtactttcacactctcttcttcccggttatgttat

SEQ ID NO: 296572 - DNA, 536 bp, Unknown
  Bacterial polypeptide expressing nucleotide sequence isolated from the Sargasso Sea
aatgaaagcaaaaaaacaaatacttgtcacaagtgcattaccatatgcaaatggtccaattcaccttgggcaccttgtagaatacatacaaactgatatttgggtgaggtaccaaagatctatcgggcaagatgttatatacatttgttcagatgatgcacacggcactccaataatgttaaaggcaaaagagcttggaatctctccagaagaacttattttagagacgaaaaaacaacatgaaaaagattttaaagaattttttgtcgattttgaccattactcctctacaaactcagaaaaaaataaggaattatgtgaaaatatatttaataaattaaatgcagcaggtcatatctctaaaaaagaaatttctcaattttacgataatgaagaaaaaatatttctgcctgacaggtacataaaaggaacttgtccaaaatgtaaagcgccggatcaatatggtgactcgtgtgaatcttgtggggcaacatattcgccaactgatttaatagacccaaagtcaatattatcaa

SEQ ID NO: 296573 - DNA, 679 bp, Unknown
  Bacterial polypeptide expressing nucleotide sequence isolated from the Sargasso Sea
aatgaaagataatttttatatcactacaccaatttattacccttctgcaaaacctcacatggggcatgcttactcaagtatagtagctgatttttttgcacgtcttaaaagaattcaaggtcataaagttttttttttaactggtactgatgaacatgggcaaaaaatacaaagagcagctgaaaaatcaaagaaagaccccttaaaattttgtgacgaaataagtaagacatttagaaacttatcctctttacttaatttatcaaacgatgattttatacgaactacagaaaaaagacatgcatcagccgtaacaaatctttggaatatcttagaaaaaaaagaggaaatttatctttcaaaatactctgggtggtactcagtccctgatgaggctttttataatgaagatgaaattgaagatttaaataaaaaaaagatatctaaatcatctggatcccatgtagagtgggttgaagaggagtcttatttttttaaattatctaaatggcaagaaccgcttttaaaattctattcggaaaatccaaaatttatattaccagagagtcgaaaaaatgaggtaattagttttgtgaaaagtggattgaaagatttatctgttagcaggaaatctttttcttgggggattaaagttccatcaaataaagatcacgttata

SEQ ID NO: 296574 - DNA, 937 bp, Unknown
  Bacterial polypeptide expressing nucleotide sequence isolated from the Sargasso Sea
aatgaaatgggtataaagccagaagaattaatttctgacgtttataaagaccataaatcctcatatgaactttacggaataaattttgcaaatttttactcaacacatagtgatgaaaatagaaaatattcagaatatatatatgaatgcgccaaaaataataatttaatttctaaagcaaatattgaacaatattatgacgaaaaagaagaaatgtttctttctgatagatttataaaaggaacatgtccaaaatgtggtgctgaagatcagcatggtgacaattgtggtgtatgtggagcatcttacaacgtacttgatgttaaaaaaccaatatcgattatctcaaatacagttccaattaaaaaagaaagtgagcatatattttttgatctacctcaaaagaataaaatgcttaaagattttttaaaaaatgtagatcttcaaaaatcaattaaaaacaagttaaacgaatggctaaatgatgacttaaaaaaatgggatatttctcgagatgcgccctattttggttttgaaatacctggagaaaaggataagtatttttatgtgtgggtagatgcacctataggttatttagcatcaatctctaactgggcagaaaagagtaaattgaatatgcaagatttatggtcagaaaattctgaatatgagatttatcattttattggaaaagatattgcttattttcatggattattttggcctgcgttattgagtgcagcaaacctcaaattaccaagtggaatcaatgttcatggttttttaactataaatggtgaaaaaatgtctaagtcaaaaggtacaggtatattagcaaaagaatttgctgagattacaaatcctgaaactttaagatattactttgcagctaaacttaataacaaagttgaggatatagatttaaactttgatgatt

SEQ ID NO: 296575 - DNA, 897 bp, Unknown
  Bacterial polypeptide expressing nucleotide sequence isolated from the Sargasso Sea
tttattagaaccaccgaacaaaggcatattaaatctgttcaacatttatggaaaattctagaagatcaaaatcaaatttatatgtctaaatatgaaggttggtattccgtttctgatgaagcattttatcaacctgatgaaatagaaagtaaagaaaataaacattttgtaataagttctggttccccagttgagtgggtagaggaggaatcctttttttttaaattatctgaatgggaaaaaccattactaaagttttatgatgaaaatccaaaatttatcttgccagagggtagaaggaatgaagtcattagttttgttaaaaatggtttaaaagatttgtctgttagcagaaaaacattttcctggggtattaaaattccttcaaataatgaccatattatttatgtatggctagatgcacttaccaattatttaagtgctttaaattatccaaatactaaagacgaattatataaaaatttttggcctgctgatgttcatataattggaaaagatatattaagatttcatgcaatttattggccagcttttttaatggcagccaaattacctttgcctaaaagagtttatggccatggttggatattatctggtgatgaaaaaatgtctaagtcaaaggggaacatactcgatccattagagattatagatgtatatgggctagatacacttagatattatctcttaaaagaggtttcctttggcaatgatggaaatatatctcaagaaaagcttgaaagttgtataaatagtgatttagcaaataattatggaaatttatgtcaaagagttttggctttttgcgaaaaaaattgtggttctaaaatcccaactagtgattttataaatgatgatttggagattttgaaaaat

SEQ ID NO: 296576 - DNA, 786 bp, Unknown
  Bacterial polypeptide expressing nucleotide sequence isolated from the Sargasso Sea
agatgaagcattttatttagaaaatgaattaaaaaagattgatggtaaatattttacggataatggatcacctgtagagtgggtcaaggaggaaagttatttttttaaactttcagaatggcagaataagttaatcgattattatgaaaaaaatccagaatcaatcttaccaaaaacaagatataatgaagtattaagttttattaaaggtggattaaaagatctttctatctcaagaacaacttttaactggggagttcccgtacccaataattcgaagcatgttatgtatgtttggattgatgcattatgtaactacttaactgcaattggttatccagatataaataataaaaattataaacaattttggcctgcaacacacattgtggggaaagacatattaagatttcatgcagtgtattggccagctttcttaatggctgcaggcatcgagcctcctaaaagaatatttgcgcacggatggtggacaaatgaaggacaaaaaatttctaaatcacttggcaatgttattgatccttatgaaataattgatgagtatggtttggatcaaataagattttttttatttagagaagtaccctttggaaatgatggagatttttcaaaaaaagctatcgcaaatagaattaatgctgatttatcaaataattttggtaacttagttcaaaggatttcatcatttgctgtgaaaaataatgattctatactaaagccagcagaaaatttaactaatgaagatcaggatttaattaatattcttca

SEQ ID NO: 296577 - DNA, 805 bp, Unknown
  Bacterial polypeptide expressing nucleotide sequence isolated from the Sargasso Sea
atgaagccattttatattactacaccaatatattatgtaaatgacaagcctcatattgggcatgcatataccaccattctagcagatgtattagctagacactatcgaaatattggcagggatgttttccttcttacaggccttgatgagcatggacaaaaggtgcagcaagcagcagaatcaagaaatataaaccccaagcaacattgcgatgaaatggcgccacgatttttaaaactgtgggataagcttcacataagctacgatgatttcattcgcactacagaaaaacgtcataccgatatcgttaaatattttcttcaaaaagtttacgacaaaggagatatttatgaagacagttacgaaggcctttattcggtatccgaagagcgatttattactgaaaaagaggctgagtccggagactttcgagatattaaagaattaaaagaaaagaattatttttttaaaatgtcaaaatatcaaaataaactgataaaacacattgaagaaaacccaagttttattcagcctaaatttcgaagaaatgaagtacttggttttttaagatctcccctagaagacctatgtatttcacgtcccaaatctcgtttgagctggggtattgaaatgccttttgattcaaattatgttacctatgtttggtttgatgctcttatcaattatgtatctgcaataggacttaatagtgacgaaaaaaaatataaaaccttctggccagtaaattatcatttgataggaaaagatattttaaccacccattcagtttattggcctacaatgc

SEQ ID NO: 296578 - DNA, 527 bp, Unknown
  Bacterial polypeptide expressing nucleotide sequence isolated from the Sargasso Sea
aatggaaaatcgaaaaatactagtaactagcgctttaccgtacgcaaatggtcccatacatattggacatttagtagagtatattcaaactgatatttgggtgagatttcagaaaatgtgtgggcatgagtgttattatatctgtgccagtgacgcgcatggcactcctataatgctgaaggctgaagaagaagggatctcaccagagactttggttacgaagacacgagaggaacatcttgaacatttttctggattctcgatcgagtttgataattttcacactacacattctgacgaaaacaaacagatagttgagcaaatttatagttctctgcttgatgaagggcatataaaaaagcgacctgtgcagcaattttttgatccggtaaaaagtatgtttttaccggaccgttttattcgaggtagttgcccctcgtgtggtgcgccagatcagtatggagatagttgcgaaaagtgcggttccacttattctcccttagacttgatagaccctaggtcagttc

SEQ ID NO: 296579 - DNA, 784 bp, Unknown
  Bacterial polypeptide expressing nucleotide sequence isolated from the Sargasso Sea
agttcactttttgactggtacagatgagcatggtcaaaaaattcaacgagctgctgaaaaacaaggcaaagatcctttgtcattttgcaatgaaattagtttaacttttagaaatctatcaaaaaccttaaacctatcaaatgatgatttcatcagaactactgaggatcgtcatataaaatctgtccaaaatttgtggaatatattagaaaaaaaaggtgaaatttatctttcaaaatattcaggatggtattcagtttcagatgaagctttttattctgaagatgaaattgattcaaaagatggtaataaagtttccaaattatcaggctctccagtagaatgggttgaggaagaatcctatttttttaaactttcaaagtggcaaaaacctttattaaaactttacactgacaatcctaactttattttaccagaaaccagaaaaaatgaagttgttagttttgtaaaatcaggactaaaagatttatcggtaagtagaaaatcttttacatggggtataaaagtaccatcaaataaggatcatgttatatatgtttggctagatgctttgaccaattatttgagcgcattgaattatccagatactgaaagttctctttataaaaacttttggcctgctacaatacatttaataggtaaagatatattaagatttcatgctgtatattggccagcttttttattggcagcaaatttacctgttccaattcgagtatatgggcatggctggattcttgcaggagatgaaaaaatgtctaaa

SEQ ID NO: 296580 - DNA, 950 bp, Unknown
  Bacterial polypeptide expressing nucleotide sequence isolated from the Sargasso Sea
aaaaaatttctgcgatgaaatttctgagacttttagatctttaactaatacattgaacttaactaataatgatttcattagaaccacagaggcaaggcattataaatcggtaaacgaaatatggaaaagattagtaaagtctggagatatttatttagataaatatagtggttggtattctgtttcggatgaggcttactacgatgaggatgaaatagaagaaaaggacggaaaaaaaatatctaaatcttcaggctctcttgttgaatgggtagaggaggagtcttatttctttaaattatctgcatttcaaaaaaaattattaaattattataaagaaaataaagattttattttacctcaatcaagaagaaatgaggttgtaagttttgtagaaaaaggtttgaatgatttgtcaataagcagaacatctttctcttggggaattccagtacctgaaaacaaaaaacatattatttacgtttggcttgatgcattaacaaattatttaagtgcgctaaattttcctaatactgaggatgaaaaatataaatctttttggcctgcagatgttcatataattggaaaagatattttacgattccatgcaatttattggccagcatttttatttgcagcaaaattgccattacccaaaagagtatttggtcatggctggatactttcggacgataaaaagatgtctaaatctcttggaaatatattggatccaatagaaataataaaaaattatggcattgatcagcttagatattatttaattaaagaagtttctcttggtaatgatggcagcatatcaatggaaaacctaaaaaattgtattaataatgatctagctaataattatggaaatttatgtcaagagagtattctcatttataaaaaaaaatttgtaataacaaaattacctaaaaatttaataatttaga

SEQ ID NO: 296581 - DNA, 202 bp, Unknown
  Bacterial polypeptide expressing nucleotide sequence isolated from the Sargasso Sea
tatgcgtaaaattctagtcacaagtgctctcccatatgcaaatggttctatacaccttgggcacctagttgaatatcttcagacagatatatgggttagaaaccaaaaaatgtctggaaatacatgctattacatttgtgcggatgatgctcacggaactccgataatgctgaaagctaaggaacttgatgtaaaacctgaa

SEQ ID NO: 296582 - DNA, 910 bp, Unknown
  Bacterial polypeptide expressing nucleotide sequence isolated from the Sargasso Sea
caaacaaaacggtcacatttcgctcgggaaatatgagggttggtattccgttcgtgatgaagctttttatacggaaaccgaactcgttgatggtaaggcccctacgggtgcccccgtcgaatgggttgaagaaccatcatatttttttaatctttcgacatggcaggataagcttttggagttttatgacaaaaatccccaatttgttggaccggaaagcagatttaatgaagtaaaaagttttgtgaagggaggacttcgtgatctttcagtcagccgcgctagctttaaatggggtgttcctgtaccggatgacgataatcatgtgatgtatgtgtggttggatgctcttacaaattatctaaccgcaactggttggccggtggatgggccaactggagaccaagaaaaacatgatcgtttatggcctgctgaccttcatatggttggtaaggatattttacggtttcatgctgtttattggccagcatttttgatggccgctaacctacctttgccaaagcgaatttatgctcatggatggtggacgaatgacggacaaaaaatatcgaagtcgcttggaaatgcaattgaccctatcaaactagctgagagttttggactagatcaaacgcgttatttcctcatgcgtgaagtgccgtttggcaatgatggtgatttttcagttcaggctatgactcagaggatgaatggtgatctcgcgaatgacctaggaaatttgtcacaacgggttctatctatgatttttaaaaattgtgacggtatgatgccaagcttcccagatattttgaacgaagaagaccaacaactaatccaatccgcagatgccttgctgagtaatgttcggcaccatatagacaatcaagctttccatgaggcgttaagggtt

SEQ ID NO: 296583 - DNA, 856 bp, Unknown
  Bacterial polypeptide expressing nucleotide sequence isolated from the Sargasso Sea
tatgtccaaaaattttagagatttaattccatatttaggttgtgaaattgatgattttataagaactaccgaagaaagacataaaatagcagttcagtctctatggaataaacttaaagaaaataatcaaatatatctatctaattacgaaggctggtattctgtaagagacgaggcatattatttagagactgaattaaaaaaaaatgaaaatggtaatagagttgcaccttctggagcaccagtagaatgggtaaaagaagagagttatttttttaaattatcacaatggcaagataaactaatcaaatattatgaatctaataaagaagctatagttcctaaatcaaggtataatgaagttttaagttttattaaaggtggtttaaaagatttatctatttcacgtactacatttaaatggggaataaaagttcctgaagatgataatcatgtaatgtatgtttggattgatgctttatgtaattatttaacagcattaaattatcctgataaaaataatgaagattttaaaaaattttggcctggtattcatattgtcggtaaggatatattaagatttcatgcagtttattggccagcttttcttatggctgctaatatggagccaccaaaacaaatttttgcacatggatggtggaccaatgaaggtcaaaaaatttcaaaatctgttggaaatattattaatccatatgaaataattgatgaatatggtttagatcaaattagattttttctttttagagaagtgccatttggtaatgatggtgatttttctaaagcgctatttcaccacgaaataatgcagacctatccaataattatgggaaattaa

SEQ ID NO: 296584 - DNA, 889 bp, Unknown
  Bacterial polypeptide expressing nucleotide sequence isolated from the Sargasso Sea
tcagaacaattgcatcatcatacagcacaagaatttttcaaaaaactttgggaagaagaaaagtttgtcgaaaaaaaatcagaacaatattttgaccaaaaaaatcaacaatttcttgcggatagatacattactggaacctgtccaaaatgcggatacaaccatgcttatggagatcaatgtgaaagttgtggtgcagatttaagcccgatggatttaatttctcccaaatccacacttagtggagacattccaattattaaagaaacgaaacattggtatctaccaatgaataggcatgaagattggttaaaaaaatgggttaaagatggggttttagatggcaaatctgttcatgatcctaaagaatggagaaaccaggtggttggacagtgtttgtcatggattgacggtggcttaaaaccaagagccatgactagagatttagattggggagttaaggttcctataaagggaaatgaggagaaagttctttacgtttggcttgatgcgcctattggatatatttctgcaacaaaacaatgggcaattgaaaacaaaaaagattggaaaaagtattggtgtaaagacgaagctggagatagaaagttagtccattttattggaaaggacaacattgtttttcatgcaattattttcccaatacttttaaaagatcatggaggttttattttgcctcataatgttccctcttccgaattcttaaatcttgagggtagaaaattctctacttcaaaaaattgggcagtttggttgcatgagtatatggagaggtatccagagaaaggagatgaactacgttacgtattaacttctattgctccagaatccaaagatgctgaatttacatggaaggaatatcaagcta

SEQ ID NO: 296585 - DNA, 250 bp, Unknown
  Bacterial polypeptide expressing nucleotide sequence isolated from the Sargasso Sea
atggataatttttatattactactccaatttattatgtcaatgatcgtcctcatatcggacatgcctacactagtattgcatgtgatatattagctagatattataaattaaaaaattttaatgtttattttttatctggaacagatgagcacggtcaaaaagttgaaaaagcatccaaagaatcaaaaatggatactcaagattttgttgataaaatgtcagtatcttttagagaattaattccttttt

SEQ ID NO: 296586 - DNA, 785 bp, Unknown
  Bacterial polypeptide expressing nucleotide sequence isolated from the Sargasso Sea
attttatttagaaaatgaattaaaaaagattgatggtaaatttgttaccgataatggatcaccagtagagtgggtaaaggaggagagttatttttttaaactttcagaatggcaagataagttaatcaattattatgaaaaaaatccagaatcaattttaccaaaaacaagatataatgaagtattaagttttattaaaagtggattaaaagatctatccatttcaagaacaacttttaaatggggagtaccagttccaaataattctaagcatgttatgtatgtttggattgatgcattatgtaactacttaactgcaattggttatccagatacaaataataaaaattataagcaattttggcccgcaacacacattgtaggaaaagatatattaagatttcatgcagtgtattggccagcttttttaatggcagcgggtatcgagccccctaaaagaatatttgcgcatggttggtggactaatgagggtgaaaaaatttctaaatcacttggtaatgtcatcgatccttacgaaattattaatgaatatgggttagatcaaattaggttttttttatttagagaagtaccatttggaaatgatggagatttttcaaaaaaagcaattgcaaatagaattaatgcagatttatcaaataattttggtaatttagtacaaaggatttcatcatttgtagtaaacaataatgattctttaataaagccagcagaaaatataactaatgatgatcaggatttaattaatattcttcaaagataaa

SEQ ID NO: 296587 - DNA, 542 bp, Unknown
  Bacterial polypeptide expressing nucleotide sequence isolated from the Sargasso Sea
aatgaatttttatataactacaccaatttattacactaatgatattcctcatataggtcatgcttatacaagtatagcttgtgatattattgcgcgatataataaactattaggaaacaatgtattctttttaacaggaacagacgagcatgggcaaaaagtagaaaaagctgctattaattcaaacttaaaacctaaagaatttgtcgataaactttcagtcaattttattaatttaataccttttttaggatgtgaaatagatgattttataagaactactgaagaaagacatattaaagctgcacaagaactttggaagcaattagaaaaaaataatcaaatatatctttcaaattatgaaggttggtactcagttagagatgaagcattttatttagaaaatgaattgaaaaaggttgatggtaaatatgttactgataatggatcacctgtagagtgggttaaggaggaaagttatttttttaaactttcagaatggcaagataagttgatcaattattatgaaaaaaatccagaat

SEQ ID NO: 296588 - DNA, 826 bp, Unknown
  Bacterial polypeptide expressing nucleotide sequence isolated from the Sargasso Sea
atggataaaaaattttatataacaactcctatttattatccttctgcaaaaccacatatgggtcatgcttactctagtttaattgctgatttttttgccagatttaaaagaatggatgatcatgaggtttattttttaacaggtactgatgaacacggattaaagattcagagatcagctgaaaaacaaaatttagatccattaaaattctgcgatgaaattagtaaaatatttagagaattaacaaaaattttaaatttaactaacactgattttataagaactactgaagaaagacacaaaaaatcagttcagcatctctggagtcagcttgaaaaaaatgatgatatttatttatcaaaatactcaggttggtattcagtttctgatgaagctttttacaatgaagatgaaattgaagaattagatggaaaaaaaattgctatatcttcaaaatcattagttgaatggatagaagaggagtcatatttttttcgtctatcaaaatggcaaaagcctcttttagattattataaatcacatccaaattttatttctccagagtctagaaaaaatgaagttataagttttgtgaaaagtggtttaaaagatttatcagttagtagaaaaacattttcatggggcataaaagttcctggtaatgacgatcatgtaatttatgtttggttagatgctttaacaaattatcttagtgctttgaattatccagatgtaaataataaactttataaagacttttggcctgcttcaattcatctaattggtaaagatatattaagatttcatgcaatatattggcctgcat

SEQ ID NO: 296589 - DNA, 718 bp, Unknown
  Bacterial polypeptide expressing nucleotide sequence isolated from the Sargasso Sea
atggacaatcctaaaaataaaagaaaaattcttgttactcaagcattgccttatgcaaatgctccattacatttgggacatatcttagaagccgttcaaactgatatttgggtaagattccaaaatttaaataataatgaatgccatttcttttgtgctgatgatacgcatggcaccccggtaatgctaaaagctaatgaaatggctatctcgcctgaggaattaattgaaaatgtttatgttgatcacaagtcaacatacaaactatatgacattaattttgcaaacttttatagcacacatagtgaagaaaataaaaaattttcagaacttatttataacagtgctaagtcaaataatcttatatcaaaagcaaccatagaacagtactttgacgaaaaggaaaaaatgtttctttcagatagatttataaaaggaacatgtccaaaatgtggtgcagatgatcaaaatggcgatagctgcaatgaatgtggcgcctcttacgaaatacaggacctgaaaaatcccaaatctatactttctggcactgcacctattaaaagagaaagtgaacacatattttttgaccttcctcaaaaaactgaaatgcttaaaaattttttaaaaaccgttcagttacaagaatcgataaaaaataaactaaacgaatggttaggcgatgatttaaaaaaatgggatatatcaagagatgcaccct

SEQ ID NO: 296590 - DNA, 787 bp, Unknown
  Bacterial polypeptide expressing nucleotide sequence isolated from the Sargasso Sea
tttttttttaaattatcagaatgggaaaaaccactattagaattctacgataaaaataagaactttattcttcctgaaagtagaagaaatgaagttattagttttgtaaaaagtgggttaaaagatttatcagtaagtagaaaaacattttcttggggcattaaagttccaaacgatgaagctcatgttgtttatgtttggttagatgctttaactaattatttaagttcattaaaatatcctgatgaagataataatttattcaaaaatttttggccagcagatttacatataattggtaaagatattttaagatttcatgcaatttattggccagcttttttattagcagccaatataaagccaccaaaaagagtttacggtcatggatggatattgtcaggagatgaaaaaatgtcaaagtctaaaggaaatatattagatcctttagaaattattaaaaattatggtttagactcattaaggtattatcttttgaaagaagtttcttttggaaatgatggaaatatatcagaagataaacttgaaaattgtattaatagcgatctagcaaataactatgggaatttgtgtcaaagagtattatcatttgccgaaaaaaattgttcttctcttataccaaaacatgaatttgttaatgaagatttaattattctaaattcaatcacaaacttagataaaattagatatttcattgataatcaagatatcaatcaatatatgtcctttattgtagattgtctttttgcatcaaataaatatttta

SEQ ID NO: 296591 - DNA, 907 bp, Unknown
  Bacterial polypeptide expressing nucleotide sequence isolated from the Sargasso Sea
aaatggcttgataattctagaatacaagaatcagttagaaataaattgaatgaatggttagaaggagaacttaaagactgggatataagcagagataacccttattttggttttaaaattcctggttatgaggataaattcttttatgtttggttagatgcgccaataggttacttggcaagtcaccttaattatttaaaaaacagggatctagaagctaaatttgaagatttttggaatcctaattcagataaagaaatttatcattttatagggaaggacattatgtatttccatgcattgtttttcccaatgatgttatcaaatgctgatttcaaaactcctaatggtctatttgttcatggctttttaactctgaatggtcagaaaatgtccaaatctagaggtaattttatttcagcagagaattatattgagaatttggatcctgattatcttagatatttctttgcttcaaaattaggaataggtgtagatgatattgatcttaatcttgaagactttaaacaaaaaaccaactctgatcttgtaaataaatacgcaaacatcgctagtagaactgcaaaatttattaataaatattatgacagtaaccttgctgatgaattagattcacctgaaatcctagatgaatttattgaggtctcatctaaagtggctcaattctatgaaaatctagaatttagcaaagcaataagagagataatgtctttagctgataaagctaatcagtatgtagattcaaaagagccatgggtgttaattaaacaagaaggaaatgaacaagctgtccagtctatttgcactactgctattaatctctttagaattttaacaataatgctacatccaggttattccaaggttttactaatcaagcgacaga

SEQ ID NO: 296592 - DNA, 931 bp, Unknown
  Bacterial polypeptide expressing nucleotide sequence isolated from the Sargasso Sea
tggtattctgtatcagatgaagcattttacactgaaagtgaaattgaggatttagacggtactaaaaaatcaattagctcaggttcaaaagtagagtgggtagaagaagaatcttatttttttaaattatcaaactggcaagataaattaattgagttttataataaaaatccagattttatacttccagaaacaagaaaaaatgaagttatcagttttgttaaatcaggattaaaagatttatctgtaagtagaaaatcttttaattggggtataaaagttccatctaataaagaccatgttatttatgtttggttggatgcattaacaaattatctaagtgctttaaattatccaaatgaaaatgacaatttatacaaatctttttggcctgcagatttacatctaattggaaaagatatattaagatttcatgctatttattggccagctttcctattagctgcagatatagaacctccaaaaagagtgtttggtcacggatggatactttctggagatgaaaaaatgtctaaatctaaaggtaatattttagatccccttgaaattatagataattatggcctagatcctttaagatattatttaattaaagaggtttcttttggcaatgatggaaatatctcgcaagaaaaactagagtcttgtattaatagtgatttagctaataattatggaaatttgtgtcaaagagttttatcgttttgtgaaaagaatgcaaatttagaagttcctgccatagaagatctaaaagaagaggacaaaattattttaaatcaatatacgaaatattatgataatttagttatgtattcagataatcaagatgttaattcatatattaattttattgttcaacaactattttcagcaaataaatatttcaacgatcaagaacctggaaaaaaaa

SEQ ID NO: 296593 - DNA, 823 bp, Unknown
  Bacterial polypeptide expressing nucleotide sequence isolated from the Sargasso Sea
gaatggtttactgacggcttacaacagtgggatatcagccgtgatgcgccttactttggtttcgaaattccaaatgccccaggtaaatacttttacgtatggctagatgcgccaattggttacatggccagctttaaaaacctgtgtgataaaaaagggattgattttgacgcattttgggctgaaggatcagaagcagaactttaccactttattggtaaagacattatttacttccacagcttattttggccagccatgctagaaggcgctaaatttagaaaaccaactaacgtatttgcacacgggttcgttactgtaaatggcgaaaaaatgtctaagtcaaagggcacgtttattaaagcgcgtacctacctagacaacctaaatccagaatacttacgttactattacgctgcaaaattaaacagcggtattatcgatcttgatttaaacctagaagactttgcacaacgtgttaattcagatctggttggtaaagtcgttaatatagcgagccgttgcgcaggctttattaccaaaaagtttgatggaaaattaagcgcaaccattatgcaaccagagcttctcgaagagttccaagctgctgcgccaagtattaccacccattttgagaaccgtgaatacagtcgcgcaattcgtgaaattatggcccttgccgacaaagcaaaccaatttattgatggcgcagcaccatgggtattaattaaagacgaaactaagcaacaagaagctcacgatgtgtgttcgcttggccttaacttgttccgtgttttaattacctatttaaaaccagtactac

SEQ ID NO: 296594 - DNA, 733 bp, Unknown
  Bacterial polypeptide expressing nucleotide sequence isolated from the Sargasso Sea
tgatggaaaaaaaatcgcctcttcttctaaatcacctgtcgaatggttggatgaagagtcgtacttttttaaattatctaaatgggaaaaacccttactagatttttataaaaaaaatccaaattttatatgtcctgagtcaagaaaaaatgaagttatcagctttgtaaaaaatggtttaaaggatttatccgttagtagaaaaagtttttcttggggcataaaagtacccaataataatgatcatgttatatatgtctggttagatgctttaaccaactatataagtgctcttaattatccagataataaaagtgatttattcaaaaaattttggcctgcttctgttcatttaattggaaaagatattttaagattccatgctgtttattggcctgcttttttacttgcagcaaatatccaaccaccaatgaaagtttatggacacggatggatcctttcaggagatgaaaaaatgtcaaaatccaagggtaatatattagatcccgtagaaattattgaaaaatatggtttagaccctttaagatattatcttattaaagaagtttcattcggaaatgatggaaatatttcacgggatagattagaggattgtattaatagtgatttagcaaataattacggtaatttatgtcaacgcgttacaacatttgctataaataattgtgaaagtaaaataccaaaagaaattaattttgagaaggaagatctt

SEQ ID NO: 296595 - DNA, 883 bp, Unknown
  Bacterial polypeptide expressing nucleotide sequence isolated from the Sargasso Sea
aaataaaaaaatttttgtgaccaatgccttaccctatgccaatggtccgattcatattggtcatatggttggttacatacaggctgatatttggtctagatttcagagaatgcaagggcatgatgtggttttcatatgtgcaagtgatgcacatggaacgccaataatgttgagcgctgaagacctgggtgttgaaccagtggagcttgctgctgaatatactcgccagcatgagaatgatttcaatgactttcacgtttcatttgacaattaccacacgacccattcgaaagaaaatgaagaattggtcggagagatatatcaaaaactgaaagaaaacgactgcattcgaacagaagtcattgaacaagcatatgatgaacaggaaaatatgtttcttcccgatcgttatgtcagaggtacatgccccaaatgcaatgccactgatcaatatggagacaattgtgaaaagtgtggcgcaacatacaagccaacagatctgatagacccgatttcggtcatatctggaaaagcaccgagtttaaaagaatccgaacattatttcatgagactgacaaagtttgaaaatatgctcgaggattggattgaaacaatcgatatgcaccaatctgtaaaatcaaaactcaaagaatggtttgatgttggattgagggattgggatatttctagagatacaccctactttggctttcttattccaggggaagaagataaatatttctatgtctggctcgatgcgccaattggatattttgcatctctaaaaaatctatcggataaatccgatcttcagtttgaagaatacttcaaagatggctcagatacacacatggttcattttatggaaaggacatcatatatt

SEQ ID NO: 296596 - DNA, 196 bp, Unknown
  Bacterial polypeptide expressing nucleotide sequence isolated from the Sargasso Sea
aatcatgatttatacaataatttttggcctgcagatgtccatatgataggaaaagatatattaagatttcatgctgtttactggccggcctttttacttgcagcagatttacctacgccaaaaagaatttatagtcatggatggatcctttcaggtgatgaaaaaatgtctaaatcaaagggtaatattttagatc

SEQ ID NO: 296597 - DNA, 996 bp, Unknown
  Bacterial polypeptide expressing nucleotide sequence isolated from the Sargasso Sea
cattggtcatgcctatacaacaatagcttgcgatattttatcacgatttagtaagttaaatggtgatgaaacttactttttaactggtacagatgaacatggtcaaaaagtagaaaaggccgctttatctaataaaaaagacacacaggattttgttgatgaaatgtctaaaaattttcgagatttagtaccttatcttggttgtcaaatagatgatttcataagaacaactgaaaaaagacataaaacatctgctcaatttttatggaataaattaaaaaataatgatcaaatatatttgtccaattatgaaggttggtattctataagagatgaagctttttatttagagtcagaattaaaaaaaactgataaaggatttcttgctccatcaggagctccagtagattgggtaaaagaagaaagttatttttttaaattatcaaaatgggaagataaattaattcaatattatgaaaaaaatcctgattctattctccctaagtcaagatataatgaagttgtaagttttataaagggaggtttaaaagatttatcaatttcaaggactacttttaactggggtattaaagtaccagatgctgagaagcatgtaatgtatgtttggatagatgctctttgtaattatattacagcattaaattatccaaatatagaaaacgaatcatttcataaattttggcctggtattcatgtagttggaaaagatatattaagatttcacgcagtttactggccagcatttctgatggctgcagatctagagcctccaaaaaaaatatttgcacatggttggtggactaatgaaggtcaaaaaatatctaaatcagttggaaatattataaatccctatgaaatcatagatacatatggacttgatcaaattagattttttctttttagagaagttccttttggaaatgatggtgatttttcaaaaggtgctattgcccaaagagttaatgctgaattatc

SEQ ID NO: 296598 - DNA, 844 bp, Unknown
  Bacterial polypeptide expressing nucleotide sequence isolated from the Sargasso Sea
gtgcatggttttttgactataaatggagaaaaaatgtctaagtcaaaaggcacttttattacggctgatcagtttgcagacttatgtgatcctgaactattgagatattattttgcaagtaaattaaactctaaaattgaggacttagatttaaatcttgaagacttagctcaaaaaattaattcagatttagttggtaaattttcaaatatctttagtcgttcagcaccttttatctcaaaaaataataattttcttggcgaagaaatacaccaagatcatttattgcattgcaacaaaaatattgaaaaaatattacaacattttgaaaataaggagttctccaaagcaataaagttaatcatggagattgcagacgatactaataaattcattaacgagcatgccccttggaagcttgatcaaactgaagcagttaccgtggcaacaacagctattaatgtttttaaaaacttatgtatcttgctctcacctgtaacaccaaacctgtgtaggaagatgttgttaatgttaaacattgataatcaaaataaagaaaatctagaagttgaattaattaatgctgagatagatgaatttgaacccattatctcaagaattaagccaataaatatccaagatttaaataaaaaggaagaaaaaatgaacgaagaagataataatatcattcagatagatgactttatgaaagttgatctaagagttgctaaagttgaagaagcttcatatgttgagggagcagataaattacttgctataaagttaaacttaggtgacttgggtaccaaaaatgtatttgctggaattaaatcagcatatgaac

SEQ ID NO: 296599 - DNA, 915 bp, Unknown
  Bacterial polypeptide expressing nucleotide sequence isolated from the Sargasso Sea
gacaatgtaaatcatggttgaaagaaggccttaaaccaagagcaatgacaagagacttagattggggtgtaaaagttcctttaaaagactcagaaggcaaggttttgtatgtttggtttgatgcgccaattggttacatatcagctacaaaagaatttattccagaaaaatgggagaaatactggatggataataataccaatttggttcattttattggaaaagataatatagtatttcattgtattatttttccaatgatgttaatggaacacggtgattacattcttccatcaaatgttcctgccaacgagtttatgaatctggaaggtgaaaaaatttctacttctaaaaattgggctgtatggttacatgagtatatggatgaatttccaaatcaacaagatgttttaaggtatgttcttacttcaaatgctcctgaatctaaggatagtgattttacatggaaagattttcaagcaaaaaataataatgagcttgttgctagctatgggaattatattaatagagtttttgttttatgtcataaattttttaatggtaatatcccttcaaaaggtcgttttaataaagatgaagataaacttcttaatagtattattgatattagagataaaattgagagaagtattgaaaagtttaaatttagagaagctttaacttttttaatggatctctctagaataggaaataaatatttaacagatacagaaccatggaaaattataaaagaagataaagaaagggttggaacaatattgaatgtttcaatgcaagttgtttgtaatatagcaatattatctgccccattccttccatttacatctaataaaatttttaaattattaaatataaaaacaaaaatatgggatgatatagataaagaaatttaaa

SEQ ID NO: 296600 - DNA, 910 bp, Unknown
  Bacterial polypeptide expressing nucleotide sequence isolated from the Sargasso Sea
atcgatggaaaatatgtgactgataatggatcgcctgtagagtgggtcaaagaggaaagttatttttttaaattgtctgaatggcaaaataaattaattgattactacgaaaaaaatccagaattaattttaccaaaaactagatataatgaagttttaagttttattaaaggtgggctaaaagatttgtctatttcaagaacaacttttaaatggggtgttcctgtgcccaataattctaaacacgtcatgtatgtttggattgatgcattatgtaattatttaacggctattggttacccggataaaaataataaaaactataaacaattttggcctgcaacacatattgtgggaaaagatatattaaggtttcatgctgtttactggcctgcttttcttatggcagcagacatagaaccaccaaaaagaatatttgctcatggatggtggactaatgaagggcaaaaaatctctaagtcattaggcaatgtgattgatccttatgaaattattgatgaatatggtttggatcagatacggttctttttatttagagaagtaccttttggaaatgatggagatttttcaaaaaaagcaattgcaaatagaattaatgcagacttatcgaataattttggcaatttagtacaaaggatttcatcatttgcagttaaaaataatgattctttactaaaaccagtagaaaatttatctaaagatgatgaggatttaatgaatatccttcaaaacaaatttgatgaatactgcaactttatgaataatcagcaaattgacagagcaatcaaatctgtcttggagttaatatcatctgctaatgcctacgttgatactcaagcgccttggtcgcttaaaaaaacaaataaaattagaatggaagaagttctat

SEQ ID NO: 296601 - DNA, 910 bp, Unknown
  Bacterial polypeptide expressing nucleotide sequence isolated from the Sargasso Sea
catggacaaaaaattcaaaaagaagctgaaaaaaataaaaaggatcctaaaatattttgtgatgaaatttccaaaacatttagatcattaacaaatactttgaaattaactaatgatgattttattagaacaacagagtcaagacattttaaatcagtaaatgaaatatggaatagattaatcaattctggagatatttatttagacaaatatagcggttggtattctgtatctgatgaagcttattatgacgaggatgaaattgaagttaaagaggagttaaaggtttctaaaatatctggatcaaaagttgaatgggtagaagaagaatcttttttttttaaattatcatcttttcaaaataaactcttagatcattataaaaaaaatgaaaattttatacttccacaatcaagacgaaatgaggtaataagcttcgtagaaaaggggcttaaagatttatcaataagcagaacctcattttcttggggcataccggtcccagaaaataaaaagcatgtaatctatgtttggttagatgctctaacaaactatttaagtgcattaaattttccaaatacagatgacattaaatataaatctttttggccagctgatgttcatataattggaaaagatatattaagatttcacgcgatttattggcctgcttttttaatagctgcaaatttgcctttacctaaaagaatttttggccatggttggatactctcagatgacaaaaaaatgtctaagtcactagggaatatcctagatccaataaaaattattgataattttggagttgatcaattaagatactacctagtaaaagaagtttctttaggaaacgatggcagcatatcaatggaaaatcttaaaaattgtataaacaatgatcttgctaata

SEQ ID NO: 296602 - DNA, 771 bp, Unknown
  Bacterial polypeptide expressing nucleotide sequence isolated from the Sargasso Sea
tagtaaaacttttagagatttatctaaaactttaaatttatccaatacagattttatacgaactactgaagagcgacataagaaaacagttcaacatttgtggaaagaactagaaaataatgatgatatttatctttccaattattcgggatggtactctgtttcagatgaagctttttataatgatgatgaaatagaagaagtagaaggtaaaaaaatttcaattagttctaagtcaacggttgaatggatagaggaggagtcatatttttttagactttccaaatgggaaaagcccttattagatttttatgaaaaaaaccctaattttatttcacccgcatcaagaaaaaatgaggtaataagttttgttaaaagtggtcttaaagatctttcagtaagtagaaaatctttttcatggggaattaaagtccctgggaatgataaacatgttatttatgtttggcttgatgcacttactaactatataagtgctttaaattaccccaataaagaagatgagttgtttaaaaaattttggcctgcctcaatacatttaattggtaaagatatattaagatttcatgctgtatattggccagcgtttttattagctgctaaaattgaactaccaaaaaaagtttatggtcacggatggatactttcgggggatgagaaaatgtctaaatcaaaaggcaatattttagatccattgcaaattattgatgaatatggtctagatccattaagatattatttaataaaagaagt

SEQ ID NO: 296603 - DNA, 406 bp, Unknown
  Bacterial polypeptide expressing nucleotide sequence isolated from the Sargasso Sea
atgtctaataatgctgaaaaaagagatattttagttacaagtgctttgccttatgccactgcaccgcttcatcttgggcatattttagaacatacacagacagatatatgggttagatatcaaagattaattgggaataattgtacttacgtatgtgctgacgacgcgcatggtacacctattatgttaaaagccgaagagttgaataaagaacctgaagacttaatagaagaaatctatgcaaatcatgtaaatactttcaatttatacaatattaatcatgataattttcatacaacgcatagtgaagaaaatagaactctctctgagagaatctttaatgccctaaatgaaaagggtttaattgaaattaggatgattgaacagttatacgatacttcaagaa

SEQ ID NO: 296604 - DNA, 697 bp, Unknown
  Bacterial polypeptide expressing nucleotide sequence isolated from the Sargasso Sea
agaatactccaaagcaatgagaaagatcatatcgcttgccgatgaagctaatcgatacttagaaaacaaaaaaccatggattatgattaaagatgaagcacttcataaggaggttcagagtgtttgcacgcaaggattaaatttattcagaatacttatgatttatctctatcctgtaataccggaaatagcaattaatgcgatgaaattgtttaatgaaaaagaatggagatggaaagacctgaactctccaattttaggcaagaaaataaaagaatatcgcccattactcacaagaatagaaaagaaaaaggtggaaaatttaatgacaagcaaagaagatcagtcagataaaataaccaaagaaactggaaaaataacaattgatgattttatgaaaattgatcttcgtgttggcattattgacgaagccaaagaagtagaaggagcagataaactactaaaattaattgtgaatcttgataaagaaaaacgaacaatttttgctggaatcaaatcagcttacaaggtcgaagatttggtaggaagaagtgtagttgtggcagcaaatctagctccaagaaaaatgaaatttggcacatcagaaggcatgatattagctgcaggacctggtggtgaccagatatttttattatcgacggacgaaggcgcaaagcctggaatgaagatcaaataa

SEQ ID NO: 296605 - DNA, 874 bp, Unknown
  Bacterial polypeptide expressing nucleotide sequence isolated from the Sargasso Sea
atgcctttttatatcactacacctatttattatgtcaatgatgcacctcatattgggcatgcttatacaactatcgcctgtgatatatttgctcgatttaataaacttataggtgaagaaactttttttttaactggtacagatgagcatgggcagaaagtagagaaagcagctaaaaatcaaggaaaagatactcaaatttttgttgataatatgtcaaataattttaggaaaataataccatttttaggttgtgatattgataactttataagaaccactgaagatagacataaaaaagctgcacaatttttatggaacacactaaaagaaaataatcaaatatatctttctaattatgaaggttggtactcaataagagatgaagctttttatcaggagaatgaattaaaaaaaatagatggaattttaactgctccaacgggcgcacctgttgaatgggttaaagaagaaagttatttttttaaattatctgaatgggaaaataaacttttaaaattttatgaacaaaatcaagagtcaatattaccaaaaactagatacaatgaagttttaagcttcattaaaggtggattaaaagacctgtctatatccagaacaacttttaaatggggtattaaggttccaaatgaagaaaaacatgtaatgtacgtatggattgatgcattatgcaattatcttactgctttagactatcctgatacagaaagtaaacttttcaagaaattttggcctgcaattcacattgttggaaaagatatccttagattccatgcagtttattggcctgcttttttaatggctgctaatattgaaattccaaaaaaaaatttttgcaccatggttggtggac

SEQ ID NO: 296606 - DNA, 757 bp, Unknown
  Bacterial polypeptide expressing nucleotide sequence isolated from the Sargasso Sea
ctacgagaagcgcgaattcggcaaagccatgcgtgaaattatggccctggccgatcacgccaacgtctacatcgccgacaaggctccctggagcctctctaaggaagaaggcaaagagcaggaagtgttggctatatgcagcaccgccattaacgtcttccggctgctggtgatctacctgaaaccggttttgcccgcgttggccgaacgcgccgaagccttcatgcaggtggagccgctcacctgggcggattcggagcaactgttactcggccatgagattgccaagttcaagcctctgctcagccgtgtggatatggcacaggtagaatccatgctcgaagattccaaagaaagcacaccggcccccgctgccgccaagcctaaaaaggccgccacgcaaaaagcagacgcaggcgacaatgacgaaaccatcagcatcgatgatttcctcaaggtgaaattgcgcgtggcccgcgtggccaaggccgcgcacgtagacggtgccgacaagttgttgcagctaacgctggacgtaggcgagctgggtgaacgcaatgtgtttgccggcatcaaggcccgttacgcaccggaggagctggaaggcaagctggtcgtattggtggccaacctggcaccacggaaaatgaaattcggcatttccgaaggcatggtgctggccgccggccccggcggagatgatattcatattctcagccccgacagcggcgccgaacccggcatggaagtgcgttaa

SEQ ID NO: 296607 - DNA, 777 bp, Unknown
  Bacterial polypeptide expressing nucleotide sequence isolated from the Sargasso Sea
ttcaagtattattgctgatttttttgcaagattaaaaagaatacagggttttaatgtttattttttaacaggcactgatgagcatggacaaaaaatacaacgagctgcagaagaaaaaaaaatggatcctttattattttgtgatgaaattagcaaaacctttagagatttatccgacacattaaatttgtctaataatgatttcataagaactactgagaaaagacattcgaaatctgttgtgaatctttggaatattttagaaaaaaaaggtgaaatttacttatccaagtactctggttggtattcagtatctgatgaagcattttacacagaaagtgaaattgaagatttagacggtataaaaaaatcaattagttcaggttcaaaagtagagtgggtggaagaagagtcgtatttttttaaattatcaaattggcaagataaattgattgagttttataataaaaatccagattttatactacctgaaacaagaaaaaatgaagttatcagttttgtaaaatcaggattaaaagatttatctgtaagtagaaaatcttttaattggggtataaaagttccatctaataaagaccatgttatttatgtttggttagatgctttaacaaattatctaagtgctttaaattatccgaatgaaagtgatgatttgtacaaatccttttggcccgcagatcttcatctaattggaaaagatatattaagatttcatgctatttattggccggctttcttattggctgcacatataga

SEQ ID NO: 296608 - DNA, 898 bp, Unknown
  Bacterial polypeptide expressing nucleotide sequence isolated from the Sargasso Sea
agtattaagttttataaaaggtggattaaaagatctttctatctcaagaacaacttttaactggggagttcccgtacccaataattctaagcatgttatgtatgtttggattgatgcattatgtaactacttaactgcaattggttatccagatataaataataaaaattataaacaattttggcctgcaacacacattgtggggaaagacatattaagatttcatgcagtgtattggccagcttttttaatggctgcgggtatcgagccccctaaaagaatatttgcacatggatggtggactaatgaaggacaaaaaatttctaaatcacttggtaatgtcattgatccttacgaaattattaatgaatatgggttggatcaaattaggttttttttatttagagaagtaccatttggaaatgatggagatttttcaaaaaaagcaatcgcaaatagaattaacgcagatttatcgaataattttggtaatttagtacaaaggatttcatcatttgctctaaaaaataatgattctatactaaagccaacagaaaatttaactaatgatgatcaggatttaattaaaattcttcaaaataaatttgatgaatattgtaaatttatgaacaatcaacaaattgatagagcaatcaagtctgtcttagaattaatatctgctggtaacgcatatgttgacactcaagcaccatggacattgaaaaaaacaaataaaattagaatggaagaagttttatatattattacaaatataattattaaatcagctataatgctctatccaataataccaactagttcaaaaaaaatacttaatatttttaattataatatggacaataataaatttgagaatttaactcaactaatcaatcaa

SEQ ID NO: 296609 - DNA, 799 bp, Unknown
  Bacterial polypeptide expressing nucleotide sequence isolated from the Sargasso Sea
agatgcattaaccaattaccttagtgctttaaattatcctaatgaaaatgataaattgtttaaaaatttttggcctgcagatatacacattattgggaaagatattttgagatttcacgctgtttattggcctgcatttttattggcagctgaaatcaaacctccaaaaagagtatatggtcatggctggatactaacaggagatgaaaaaatgtcgaaatctaaaggtaatattttggatccattagaaataattagtaattatggattagacccactcagatattatcttattaaagaagtctcatttggtaatgatggaaatatttcaaaagaaaaacttgagaactgcattaatagtgatttagctaataattttggaaatctgtgtcaaagagttataacttttagtgaaaaaaatacagacctaacaattccagagaaaagtaattttaatgatgatgatataaaaatattggatatatataataaaaattatgaaaatctagtagaggaaactaacaatcaaaatattaactcttatattaattttattgttgatcagctatttgctgcaaataaatattttaatgaccaagaaccttggaagaaaaaaaatgatattaaaagattaaatactataatttatacttcatttgaattgataagaagagttagtattttactttatccaataatgccagaaacctcattaaaagttttaaatatatttggtattaatgaagatcaaattaagtttgaaacaattattattaatgattacttaaaatccaagact

SEQ ID NO: 296610 - DNA, 189 bp, Unknown
  Bacterial polypeptide expressing nucleotide sequence isolated from the Sargasso Sea
tatgagctattatataacaactcctatttattataccaatgatgtacctcatattggtcatgcttatacaactatctcctgtgatattcttgctagattcaataaacttttgaataatgatgtattttttttaacaggcacagatgaacacggacaaaaagtcgaaaaagctgcaaaagaggcaggagt

SEQ ID NO: 296611 - DNA, 713 bp, Unknown
  Bacterial polypeptide expressing nucleotide sequence isolated from the Sargasso Sea
gagtgggttgaagaagagtcttatttttttaaactatcaaaatggcaagaaccacttttaaagttttactcagaaaatccaaaatttatattaccagagagccgaaaaaacgaggtaattagttttgtgaaaagtggattgaaagatttatctgtaagcagaaagtcatttacctggggtatcaaagtaccatctaacaaagatcatgttatatatgtgtggcttgatgctttaacaaattatctttcggccttaaattatccaaaagaaactgaaaaattatataaagacttttggcctgctaatattcatattataggaaaagatattttgagatttcacgcagtgtattggccagcttttttattggcagcaggtattaaacctccacagagagtatacggtcacggatggatactttcaggcgatgaaaaaatgtcaaagtctaaaggtaatattttagatcctattgaaataattgatatctatggattagatgcattgagatattatttactcaaagaagtttcttttggaaatgatggaaacatttcaaaggaaaaattagaaagctgtataaatagtgatttggcgaataactatggaaatttatgtcaaagagttattttgttttgtgaaaaaaatattggtcttaaagttccagaaaaatatgattttattaatgatgaccttaaaattctagatgactttta

SEQ ID NO: 296612 - DNA, 787 bp, Unknown
  Bacterial polypeptide expressing nucleotide sequence isolated from the Sargasso Sea
aggtaaaaaagtttcaaaagtctcaggctcaacagttgattgggttgaagaggagtcgtatttttttaaactatcctcttggtcagaaaaattgttaaaatattataagagtaataaagattttattttaccttcatctagaaaaaatgaagtagttaattttgttaaaaagggtttaaaagatctctctgttagccgaacttctttttcttggggtatacctgttccaaaagataacaaacacgttatatatgtttggttggatgcccttacaaattatataagcgctttaaattttccagatatcaatgataagaattataaaaaatattggcctgcaaacgttcatattataggaaaggatattttaagatttcatgccatttactggcctgcttttcttctagctgctaaacttcctcttccagaaagaatatttggacatggatggatactttcagaagataaaaaaatgtctaaatcccttggtaatattttagatccaattgaaattattaaaatttatggaatagatcagttgagatactatttagttaaagaagtctctttgggaaacgacggaagtatttctttgcaaaatcttaaaaattgtataaataatgacttagcaaataactatggaaatttatgtcaaagagttttttcttttattaaaaaaaattgttcaaataaaattccaaaagtaaaaaaattatcagattcagataataagttgcttaatcaattaaaaaataatattcctaaattgatagaattaatgaataaa

SEQ ID NO: 296613 - DNA, 817 bp, Unknown
  Bacterial polypeptide expressing nucleotide sequence isolated from the Sargasso Sea
gatgaattgattaaaaatgatgatatttatttgtcaaaatactcgggatggtactcagtctctgatgaggccttttataacgaagatgaaatatatgaggaaaatggatctaaaattgctaaagtttcaaaatccccagttgaatgggtagatgaggaatctttcttttttagactatctaagtggcaagaacctttgttaaaattttataatgaaaatccagactttattcaaccagagtctagaaaaaatgaagttataagttttgttaaaagtggcttaaaagatttatcagtaagtagaaaaagcttttcttgggggatcaaggtcccaaataatgatgagcatgtaatatatgtttggctggatgctttaactaattatataagtgcattgaattaccctaatacaaaaaatgatttatttaaaagtttttggccagcatctttacatttaataggtaaagatattttaagatttcatgcaatttattggcctgcttttttaatggcagcaaaagtagaattaccaaaaagagtgtatggacatggttggattttgtcaggagatgaaaaaatgtctaagtcaaaaggtaatattcttgatccaattgaaattataaataaatatggtcttgatcctctaaggtactacttagttaaagaagtttcttttggcaatgatgggaacatttctcaggatagattggaagactgtattaatagcgatctggcaaataattatggaaatctatgtcaaagaacaatttcgtttgcaattaaaaattgtaaccaaaaaaattccaaaaaatattaat

SEQ ID NO: 296614 - DNA, 852 bp, Unknown
  Bacterial polypeptide expressing nucleotide sequence isolated from the Sargasso Sea
tgcaaagctgcagctgataacggtgtagatccgatcgagctatgtaaccagaactctaataacttccgaaaattattagccacacttaatatctcgaatgatgattttattcgtacaacagagcaacgacataagagcgcctgccaggctctgtggaaaagtctatttgataaaggtcatatctacatgggaaagtattctggttggtatgcagtacgagatgaggcttattacgatgaagcagagctttctaaaggcccctctggtgagcgtttagctcccactggagctgttgttgagtggatggaagaagaaacatattttttcgatctctcgaaatggcaaaatgaattactggcgttctatgactcgaatcccgattttattggaccgcagagtagatttaatgaggtatatagttttgttaagggaggactaaaagatatttcgatttctagggccactttttcctggggaattcctgttccaggagaaactaaacacgtcatgtatgtgtggatcgatgctcttacaaattatctaactgccctaggttttccggccttgaaagacgattacgcaaaattctggcctgtatgccatcacatggtaggaaaagatatcatccgtttccattgtgtttattggccagcctttttgatggcagctaacttgatgccaccgaaaagagtatacgcccatggctggtggacagtagaagggcaaaaaatgtctaagtctcttggcaatgcgattgacccgaaccatatggtggctgagtacggtcttgatcaaatgcgtttctttcttatgcgcgaggttccatttggaaatgatggggatttttctgag

SEQ ID NO: 296615 - DNA, 400 bp, Unknown
  Bacterial polypeptide expressing nucleotide sequence isolated from the Sargasso Sea
atggcatattttattactactccaatttattatgtaaatgatgttcctcacataggtcatgcttatacaacaatagcttgtgatattttttcacgattcaataaattgaagggaaataaaactttttttttaacaggaactgacgaacatggacaaaaagtagaaaaggcagctttatctaaacaaataaatactcagaattttgttgatgaaatgtcacaaaattttcgagaattaattccatttcttggctgtgaaattgatgattttatcagaaccacggaaaaaaggcataaaattgcaacacaatttttatggaacaaattaaaagataatgatcaaatttatttatctaattatgaaggttggtattctatacgagatgaggctttctatttag

SEQ ID NO: 296616 - DNA, 676 bp, Unknown
  Bacterial polypeptide expressing nucleotide sequence isolated from the Sargasso Sea
tctggtaacaagcgcattgccatatgcaaatggttcaatacatattggacatgttcttgaatctgtaattactgatatttgggtaagataccaaaatattaatggtaatgaatgtctctacttttgtgcagatgatacgcacggaacgcctgtcatgctcaaagccaaagagcttggaatagatcctgaagagcttattaaaagaactagagaggagcacataaaaagttattcaagatttaatattaattttgataatttttatactactcattctgatgagaacaaaaaatatgctgaagatatttatcaaaagtgtaaagaaggaaatctaatctttaaaaaagaaattgaacagttttatgactcagaagaaggtttattcttatctgatagatttataaaaggtacatgtccaaaatgtggcgctgaagatcagtatggtgatggttgttctgtctgtggcacgacttatacacctgatgatttactaaatcccgtatcgtcattatcgaattctgagcttaccaagaaaaaaactgagcatgtgttttttgatttgcctcaaatgaaagattttcttgagaattatctcaaagacttaactcttcaagatcctataaaaaataaactaaatgaatggattgatgatgggttaaagccatgggatatatca

SEQ ID NO: 296617 - DNA, 895 bp, Unknown
  Bacterial polypeptide expressing nucleotide sequence isolated from the Sargasso Sea
tgaattagataaaatagatggaaaatttattactaaaaatggctctcctgtagaatggttgaaagaagagagttacttttttaaattatcagaatggcaagataaattaattgattattatgaaaaaaataatcgacctatttacccagaaagtagatataatgaagttcttagttttgttaaaggtggtttaaaagacttatctatatcaagaacaacatttaaatggggtatacccgttccaaataataatgatcatgtgatgtatgtatggattgatgctttatgcaattatctaagtgctattggctaccctgatataaataattctaaatttaaaaaatattggccagcatttcatgttgttggaaaagatatattaagattccatgcagtttattggcctgcttttttaatggctgcaaatttggaaccaccaaaaaaaattattgctcatggatggtggacaaacgaaggcaaaaaaatttctaaatctcttggtaatgttattgacccatatgaaataataaatgaatatgggctagatcaaattagatattttttatttagagaggtaccttttggtaatgatggtaatttttctaaaaaatcaatttcaattagagtcaatgcagacttatcaaataattatggaaacttgatccaaaggatcgcaacatttgttgttaagaattgtgagtctaaaatatcaccttctattaacttaaatgttaatgataaaaaactaaatgaaactattaaaaatgtaacaattaagtatctggaattaatggataatatgcaatttgatagtgctttaaaaggaattatggagttattaaatgaagctaatgcatatgtagactctcaagctccttggaagctaagaaatact

SEQ ID NO: 296618 - DNA, 737 bp, Unknown
  Bacterial polypeptide expressing nucleotide sequence isolated from the Sargasso Sea
aaacaaagatcatgttatatacgtttggctggatgctttgaccaattacataagtgcattgaaccaccctaatagtgaagacaaattatacaaaagctattggcctgcagatctgcatttgataggtaaagatattttaagatttcatgctgtatactggcctgcctttttaatggctgcaaacataccattgccaaaaagagtctatggtcatggttggatattgtcgggagatgaaaaaatgtcgaaatcaaaaggtaatattttagatccattagaaataattgaaaagtatggtttggatccacttagatattatttacttaaagaagtttcctttggaaatgatggaaatatatcacaagaaaaacttgaaaaatgtattaacagtgatttagctaataattatggaaacctatgtcaaagggttgtttcttttgtagaaaaaaatgcaaatttagaaattcctgaaaaagatcagttcaattctgatgatttaaaaatactagatgattttaaaaaagaatttaacaacctaattacatatattaataatcaagaattgaatttatatttaaactttattgttgataaactgttttctgctaataaatattttaatgatcaagaaccatggaaaaaaaaatctgacatgaagagattgaacacaattatttatgtagcattagaactaataagaaagataacaattatgctttacccgattattccctgaa

SEQ ID NO: 296619 - DNA, 643 bp, Unknown
  Bacterial polypeptide expressing nucleotide sequence isolated from the Sargasso Sea
tatgagttctaattattatatcaccactccaatttattatgtcaatgatgttcctcatattggtcacgcttatacaacattagcttgtgatgttattgctagatttaagagattagacggatttaatgtttttttcttaactggtactgatgagcacgggcaaaaagttgaattagcagctaaaaacaaaggagtaatgcctaaagaatttgttgacgacgtatctcaaaactttagaaatcttttgaaatgtatgaatttttctaatgatgattttattagaaccacagaaaagagacatatagatacatgtcaaaaaatttgggaaaaattacttaaaaataaatctatatatttagataaatattctggatggtactcggttagagatgaggctttttattctgagacggaaatagttgacggaaaagctccatcaggtgcgccagttgaatgggtcgaagaaccatcttatttttttaatctatcaaaatgggaagataaactgcttaaactttatgaagaaaacaatgattttattcttccaaattctagaagaaatgaagttattagtttcgtaaaaggaggtttgaaagacctttcagttagtaggactagtttttcgtggggtataaaggtccaa

SEQ ID NO: 296620 - DNA, 850 bp, Unknown
  Bacterial polypeptide expressing nucleotide sequence isolated from the Sargasso Sea
aatcgaccttcctttcgacaatgattttgtaacgtatgtctggttcgatgccttgctgaattatgtcaccgcattgggctggccggaggactcccgttatgagcagttttggaagcactgccatcatgtgatcggcaaggatattctcaaaacccacggaatctactggccctgcatgctcgaggctgcgggtttcccggttttcaaaaaattggccgtccatgggcattgggtggttcaaggcagtaagatgagcaagtctctgggcaacgtcgtcaatcctttggaaatgaaagacctgattggagtcgacgggttgcgctatttccttttgagagaaatgagttatggagaagacgcgaatttcaccgaagatctggtgttcgcacgttaccacggcgagctttcgaacaattttgggaatttgctgaaccgttccatttcgatgtcacggaaaaatttcgaaaatgaggttcctccccggggtgagccaggaaaacaggaaatcgaactgtaccaaatatttgaacaagaaacttctcagatcaaagcatgggtccaacagtttgagccccatcgggctttggaacggattgccatgatgagcagtgccgtaaacaaatatcttgatgaaaacaaaccctggaaacttgccaaagaagaggatcaaaacgaacgtcttggaacagtactctatacggcattggatgcttcggcatggttggtctgtcttctggaaccggtgatgcctgaaaaaatgaaagcggcccgaatccaactcggacttggtgaatcaccaatgaccctggaaatgttgaaaccggggttggtccaatctggaacttcactt

SEQ ID NO: 296621 - DNA, 869 bp, Unknown
  Bacterial polypeptide expressing nucleotide sequence isolated from the Sargasso Sea
gtgaaaattagtggaagcagtttaaacccgcttgaactaataaatccaaaatcaagattgtcaggcacaaaacccatactaaaaatgacaaaacattggtatttaccactaaataaatatgaaaagtttattaatgattggataattaaaggtcacaaaaatgattggaaaccaaatgtttacggacaagtaaaatcttggattgacagtggtcttagaccaagagctgttacaagagacctagactggggagttcaactaccaattgaaaaatataagaataaagtattgtatgtttggtttgatgctccaataggttatatttcatcaacaaaagaatgggcaaaaaaaaacaataaagattggaaaccttattggaaagatgaaaaaactgaattaattcattttattggaaaagataatattgtttttcattgtataatctttccaattatattaaagacctcaaaaaattatattttacctaaaaatgttcctgcaaacgaatttttaaatttagagggaaggaaaatatcaacctcaaaaaattgggctgtctggcttcatgagtatttggaggaatttccagaacaacaggatgttttaagatatgttttaacagcaaattccccagagtctaaagataatgactttacatggaaagactttcaatcaagaaataataacgaactcgttgccatttatggaaactttgttaatagagtagttgttttaataaataaatattacaaaggaagcgtgccaaaatcagaaagtttattagatgacgatattaaaatatttcaagaaataggtacaataccatcaaagatcaaaaattcaattgaaaaatttcagtttagagatgg

SEQ ID NO: 296622 - DNA, 325 bp, Unknown
  Bacterial polypeptide expressing nucleotide sequence isolated from the Sargasso Sea
tatggaaacgagtcaaccggcaattttggcgaccatcgctttaccgtatgcgaatggacagttgcacttggggcatatggtggaagcggtacaggcggatatttgggtgcgctttcaacgtcaacagggccgagagtgtgtgttcgtttgtggtagtgatgcgcatggaacggcggtgatgttatcagcggagaaagcgggtgtggcaccagaacagtgggtgcaaacgattcgtgcggatcatgagcgagactaccgggatattcaggttgactttgatcattttcatacgacgcactcagatgaaaaccaacgttatcagaaa

SEQ ID NO: 296623 - DNA, 553 bp, Unknown
  Bacterial polypeptide expressing nucleotide sequence isolated from the Sargasso Sea
tatgaataacgttttctacataacaactccaatatattacgtaaacagtcacccgcatattgggcatgcgtacaccacgattgcaacagatgtctttatacgttataagaaactctttggagctgaaacttattttcttacaggaacagatgagcatggacaaaaaattgccgaatctgcagctaattctgggattaaaccacaagaatttgctgacaaaatcagtcaggaattccgcgaaatgtggcctcatctgcatattgagaatgaccaatttattcgtacaactgattctaaacacaaagcctgtgttcagcaaatcctgcaaaaaatttttgatcagggtgagatctatctcaaagaatacgagggcctgtactgcataggctgtgaaaggtttttggatgaagctgagttggaaaacggcaattgccccgatcatcaaattcaacctgaatttcataaagagcaaaattacttctttaggatgagctcttaccagacatggcttgctgaagagttaaagcaaaatgagaactgggtttacccggca

SEQ ID NO: 296624 - DNA, 661 bp, Unknown
  Bacterial polypeptide expressing nucleotide sequence isolated from the Sargasso Sea
atgtctgatagatataccgttactacagcattaccttacgcaaatggtccacttcatttagggcatgttgccggtgtttacattcctgcagacatttatgtgagatatcttcgttcaaacaataaagatgtagtttttattggaggaactgatgaacatggtgttccgatttccattaaggctaaaaatgagggtgtttcaccaaaagaggttgttgatcgatatcatggaattattaaaaattctctagagggtttaggtatttctcttgatttttttggccaaacttcttcctcaaatcattatgacgttgcgacggaatggtttcaaaaactgcataatgatggtgttttttcggaagaagttttacaacaatactatgatgaggaaaataagcaatttcttgcggatagatacataactggtatttgccctagttgtaagcaagatggtgcttatggtgatcaatgtgaaaagtgtggagcctcattaagcccaacagaattgattaacccaaaatctgcacttagtggaaataagcctgttttaaaagaaacaaagcactggtatctacctttgaacaatttcgaaccttggttaaaagagtggattgaaaagaaaaaaccgcttttgaaatccaaatgtttatggtcaagttaag

SEQ ID NO: 296625 - DNA, 820 bp, Unknown
  Bacterial polypeptide expressing nucleotide sequence isolated from the Sargasso Sea
atgactttttatgttacaactccaatatattatgtaaatgatgtacctcacataggtcatgcttatacaactatagcatgtgatatattgtctagatttaataaactcaaaggtgaagaaactttttttttaactggaacagatgaacatggtcaaaaagtagaaaaagcatctaatttaaaaaatcaagatactcaaagttttgtagatgaaatgtcaaaaagtttcagagatctaataccatttttaggttgtgacatagatggttttattagaacaactgaaaatagacataagaaagctgcacaatttctatggaataaacttaaagataataatcaaatatatttatctaattatgaaggatggtattcaattcgagatgaagctttttatttagaaaatgaattaaaaaaagttaatgattcatttatcgctccttcaggatcacctgttgaatgggttaaagaagaaagtttttttttcagactatcatcttgggaagataaattaataaaatattatgagaaaaatcaagactcaattttaccaaaatcacgttacaatgaagttctgagttttatcaaaggtggtttaaaagatctatcaatatcaagaactacttttaaatggggaataaaagtccctgaagaagataatcatgtaatgtatgtatggatagatgcactttgcaattatttaacggcaataaattatccagacgaagataatcaaaatttcaaaaaattttggccaggagttcatgttgtaggcaagagatattttaaggtttcatgcagtatattggcctgctttttta

SEQ ID NO: 296626 - DNA, 721 bp, Unknown
  Bacterial polypeptide expressing nucleotide sequence isolated from the Sargasso Sea
aatgagtaattcattttacataacaacaccaatctattatgtaaatgatattccccatataggtcatgcgtatacaactattttagcagatgtgttatctagatatcaaaagcaagttggcaacaagccattttttcttactggattagatgaacacggtcaaaaagtacaagatgctgccaaggatagaggaattgaaacacaggatcattgtgatgaaatgtccaagagatttatatttttatgggaaaggttacacatatcaaacgatgattttattagaacaactgagattagacacaagaatgtagtaagagaaatactaaaaacagttttcgatgctggcgacatttacgaggatgaatatcaaggtctttattcagtctctgaagagcggtttattacggaaaaagaagctgatacaggacaatttcgcgatataaaaacattaaaagaaaaaaactacttttttagaatgagcaaatatcagaataggctaataaatcatatagaagctaatcctagctttattcagccagatcatagaaaaaatgaaatacttggatttttaaatcaatccttaaataatttatgtatttcaagaccaaagtcaagattgaactgggggattgaattaccttttgattcagattacgttacctatgtttggtttgatgccttaattaattatatcactgctcctggatatttagatgataaa

SEQ ID NO: 296627 - DNA, 881 bp, Unknown
  Bacterial polypeptide expressing nucleotide sequence isolated from the Sargasso Sea
gtcggaggaaatagaagagaataatggaatcaaagtatctaaaacttccggttcaactgtcgaatgggtagaggaagaatcttatttttttaggctatctgagtttcaaaaaagattattagatcattataaaaaaaatgaggactttattttaccaaaatctagaaaaaatgaagttattaagtttgtagaaaaaggtttaaaggatttatcaataagcaggacatctttttcttggggaattccagttcctgaaaataaaaaacatgtaatttatgtttggttggatgcgttaacaaattacttaagtgcacttaattttcctaatactaaggatgaaaaatataaatctttttggccagctgatgttcatgtaattggcaaagatattttgagatttcatgctgtttactggccggcctttttattagcagcaaagctaccactgccaaaaagaatttttggacatggctggatactttcagatgataaaaagatgtctaaatcacttggtaatattttggatccaattgaggtgattaaagactatggaatagatcaattgagatattatttgattaaagaagtttcattaggaaacgatggaagtatttctatgcaaaatcttaaaaactgtattaacaatgacctagctaataattatggtaatctatgccaaagagtttttgcatttataaaaaaaaattgtaataataaaattccaaaaaaaattgacttgaacgatagagacataaaactaattaagaatcttaaagatgaaattcctcaactaattgaatacataaacaaacaaaatttaaacgagtatattaaaacagtgataaatttttcttttgaagctaataaatattttaatgatt

SEQ ID NO: 296628 - DNA, 607 bp, Unknown
  Bacterial polypeptide expressing nucleotide sequence isolated from the Sargasso Sea
aatgactagtaactctttttttattaccactcctatttattatgtcaatgatgagccacatataggacacgcttatacaagcatagcttgtgatgtaattgctagatttaatagattaaaaaataaagacataatgtttttaactggaactgatgaacatggattgaaaattgaacaagctgcaaaaaaaaaaaatatggatacaaaaaaatttgttgatgaaatgagtcaaagttttaaaaaattaacaaaaacactgaatttaaccaatgatttctttgtaagaacaactgattcctatcacaaaaaagcatctcaacacatatggaatattttaaaaaaaaatgatcaaatatatttagataaatataagggatggtattcagtaagtgatgaagcatattttaatgatgatgaaattattactgatgaaaaaacaaaaaaaaaattagctccatcaggaaatgaagttcaatgggttgaagaagaaagttatttttttaaattatcaaagtggcaagataaattattagatttttataaaaataatccaaattttatagggccagactcaagaagaaatgaagttataagctttgtaaaaaac

SEQ ID NO: 296629 - DNA, 888 bp, Unknown
  Bacterial polypeptide expressing nucleotide sequence isolated from the Sargasso Sea
gcatttagggcacatattagaacacatacagtcagatatatgggttagattccaaagattacaaggtaataattgcacgtatatatgtggagaagatgctcacggaacgtcaataatgcttaaagccgaagaactaggtatatcgccagaggatctaattaaacaaatcagagtgagtcatgaacaagattttaaagcttttaatattagtcatgataattaccacactactcatagtgaagaaaacaggcattattctgaaactatcttcatgcgtcttaaaaaagagggactaattgaagagaaagagatagaacaactttatgatactaaaaaaggtctttttctttctgataggtatgtaaaaggtacttgtcctagttgtaaatcagaaaaccaatacggagacaattgtgaagtatgtagttcagcttattctgcagtagacttaattgaccctgtatcagttattaccaacactaagcctaaattaaaaaaaagcacacatcttttttttaaattgtcagttctaaaaaaagagataaaaaactggttaaactctgctcaggttgtttcacaagctataaataagctttcagaatggactgaatcagagattaaagattgggatatcagcagagatgccccctactttggttttgagattccagaatatgaaaataaattcttttatgtttggcttgatgcccccataggttatttagctagtcataaaaattatttagataaattaaaaaagcctgaagaatttaattattattgggattcagattcaactgctgaactttatcactttattggaaaggatattatgtacttccacaccctcttctttcctgcaatgcttctaaaatctgattttagaca

SEQ ID NO: 296630 - DNA, 913 bp, Unknown
  Bacterial polypeptide expressing nucleotide sequence isolated from the Sargasso Sea
gatccaataaaaaataaactaaatgaatggattgaggatgggttaaagccatgggatatatcaagagacaagccatactttggatttgaaatacccggagagaaagataaatatttttatgtttggcttgatgcgccgattggatatttagcttctgcaaaaaattgggcagaaaacaatgatatggatatgaaagatttatggggtgaaagctctgattatgaaattcatcattttattggaaaggatattgcttattttcatgccctattctggccagcacttttaaagtcatcaaatattcgcttacctgaatcaattaatgttcatggttttttaactattgatggtgagaagatgtctaaatccaatggaacctttataaatgcagacgactttgctgaaaactatgatggtgagttattaagatattattttgctgataagtttaataattcaattgatgatctagattttaatgaagatgaatttattcaaaaaattaattcagatatcgtcggtaaatatctaaatattgctagcagagtttcaaaatttattgagaagaatgataataatctctctgcaaacttagatgaggactttattgagaaaaatctatcaatgatcgatgaagttattgagcattatgaagacttaaatctttctaaatctataaaaattattatgaagatggcagatgaagttaataaatatattaatgagaacgagccttggaaatccagtgaagaaaaggctgtagaggtatcatcgacagcaattaactgttttagagttatctcaatattgcttaatcctgttttaccaacaataacatcaaaagctttagaggtatttaataatagttctacaaatgattttaataatattaaggattaccttgtagatacaa

SEQ ID NO: 296631 - DNA, 694 bp, Unknown
  Bacterial polypeptide expressing nucleotide sequence isolated from the Sargasso Sea
aaaaattattatataactacgccaatttattacccatctgcaaaacctcatatgggacatgcctactcgagtattatttcagatttttttgcaagattaaaaaaaattcaaggatatgaagttttttttcttacaggaactgatgaacatggtcaaaaaattcaacgcgctgctgaaaataacaaaaaagatccacttaaattttgtgatgaaataagtgccacctttaaagatctttctaaaattttaaatctttcaaacaatgattttatcagaacaactgaggtaaggcataaaaaatctgttgaaaatttatggaaagttttagaaaaaaaaaaggaaatttatttatctaagtattcaggctggtattctgtatctgatgaagcgttctatagtgaagatgaaatagaagatgatggcaatttaaaaataagcaaattgtcaggatccaaagtggagtgggtagaagaagaatcttacttttttaaattatcaaagtggcaggaacctttacttagtttttatgagaataacccagattttatcttacctaaaacaagaaaaaatgaggttgttagttttgttagagctggtcttaaagatttatcgataagtagaaaatcatttacatggggtataaaagttccatccaataatgaacatgttatttacgtatggttagatgcattaa

SEQ ID NO: 296632 - DNA, 600 bp, Unknown
  Bacterial polypeptide expressing nucleotide sequence isolated from the Sargasso Sea
tttgagcaaatgctgcaggactggacccgcggcggttctttgcaaagcgaaatggccaataaacttcaggaatggtttaaagaaggtttgcagcaatgcggatatcagccgtgacgcgccttattttggttttgaaattccaggcgcacctggcaagtttttttacgtctggttagatgcgcctatcggctatctggcgagctttaaaaacctttgtgataaaaccggtatcaactttgacgacttctggaaactcgattctgacgccgaggtataccactttatcggcaaagacattatttatttccacagtctgttctggcccgccatgctcgacggcgccggttaccgtaagccaagcagcgtgtttgcccatggttttgtgaccgtaaacggtgcaaaaatgtcgaaatcccgtggcacttttattaaagcccgcacttatctggacaatttaaaccctgaatatctgcgttattattttgcgtcaaaactcacctctggcatcgtcgacctggatttaaatctggaagacttttcacaaaaagtgaacgccgatttagtaggaaaagtcgttaatatcgccagccgctgcgccag

SEQ ID NO: 296633 - DNA, 842 bp, Unknown
  Bacterial polypeptide expressing nucleotide sequence isolated from the Sargasso Sea
tttttggaataaattattaaagaatgatcaaatatatctttccgattacgaaggatggtattctgtaagagatgaagctttttatcaagaaagtgaattagttaatataaatggaaaattacaaactaaattaggtgcaccagttgatttaattaaagaagaaagttatttttttaaattatcaaattacgaagaaagattaattaatttttatgaaaaaaacccaaacattatttcacccaaaagtagatataatgaagtattgagttttataaaaaatggacttaaagatttatccatttcaagaacaacatttaaatggggagtgcaggttccaaataatccaaagcatgttatgtatgtttggatcgatgcattatgcaattatctaacagcaattgattacccaaacacagaaagtcaaaaatttaaaaattattggccagcaactcatattgttggaaaagacattttaagatttcatgcagtttattggcctgcttttctcatggctgctgatttagaaccgccaaaaaaaatattcgcgcatggttggtggacaaatgaaggtcaaaaaatttcaaaatctttaggtaatgtaatagatccatatttaattgttcaagaatttggtttagatcaaataagatatttcttatttagtgaagttccatttggtaacgatggtgatttttctaaaaaagcaatatcaaaaagagtaaatgcagatttatcaaataattacggaaatttaatacaaagaatcttaacttttatcgtaaataattgcaatagctctattaagccatcatttgattttactgaagatgataaaaatttat

SEQ ID NO: 296634 - DNA, 304 bp, Unknown
  Bacterial polypeptide expressing nucleotide sequence isolated from the Sargasso Sea
atgaagccattttatatcactactccaatatattatgtaaacgataagccacatattggacatgcttatactacaattctagctgacgttttagcgcgccatcatcgcaacagcggtaaagaagtgttttttcttactggcttggatgagcacggacaaaaagttcagcaggcagcagagaaaagaggggttgaccctaaaaaacattgcgatgagatggctcctagatttttagacctttgggaacagctccacattcagtacgacgattttattcgaacaacagaaaaacgtcacacagaca

SEQ ID NO: 296635 - DNA, 775 bp, Unknown
  Bacterial polypeptide expressing nucleotide sequence isolated from the Sargasso Sea
aacattcaagaatttatcaaaaactcttaatttaacaaataatgattttataagaactactgagtctcgacacaaaaaatctgttcaatatttatgggaagaattaaaaaaaaatgatgacatctatttatcaaaatattctggttggtattcagtatcggatgaagcgttttacaatgaggatgaaattgaagatcttgataataaaaaagtggctatatcatctaaatctcctgttgaatgggttgatgaggaatcttatttttttagattatctaagtgggaaaagccattattagaattttacgaaaaaaatcctgattttatttctccagcgtctagaaaaaatgaagtcataagttttgttaaaagtggattaaaagatttgtcagtgagtagaaaaagtttttcttggggtattaaagttccgaatgataatgaacacgtaatttatgtgtggttagatgctcttactaattatattagtgctttaaattatcctaataaagatgatgaattatataaaagattttggccagcatctgttcacttgattggaaaagatatattaagatttcatgcaatatattggccggcgttcctattggctgcaaaaatagctcctccaaaaaaagtttacggacatggatggatattatcgaatgaggaaaaaatgtctaaatcaaaaggaaatatattagatccattagaaattataaaacaatatggattggatcctttaagatattatttaataaaagaagtttcatttggc

SEQ ID NO: 296636 - DNA, 813 bp, Unknown
  Bacterial polypeptide expressing nucleotide sequence isolated from the Sargasso Sea
ggcatcagaagagaagggtcttgatcctaaaaatttctgtgatgaattaagtaaaacatttagaagcttatctaaaactctaaatctttctaatacagattttataagaactacagaagatagacatattaaatctgtacagaatttatggaaaattttagaaaaaaaaaaccaaatctatctatcaaaatattctggttggtattctgtttcagatgaagcattttacggtgacaatgaaattaaagaagaaaatggtattaatatttcatctatttccggttctaaagttgagtgggtcgaagaagaatcatatttttttaaactgtcagaatgggaaaataaattactaaaattttatgaggagaatcctaaatttattttgccagaaactaggcgcaacgaagttctaagttttgtaaaaggtggtcttaaagacttatcagtaagtagaaaatcattttcttggggtattaaagttcctggtaataatgatcatgttatttatgtttggcttgatgcattaactaattatataagtgcattaaattatcctgatactacagataataaatataaaaattattggcctgctgatcttcacatgattggaaaagatatacttagatttcatgcagtctattggccagcttttttattagcagctgatttaccacctcccaaacgagtttatggacatggttggatattatctggcgataaaaagatgtcaaaatcaaaaggtaacattttagatccattggaaattgtagataaatatggactagactctcttaggttttatctactgaa

SEQ ID NO: 296637 - DNA, 954 bp, Unknown
  Bacterial polypeptide expressing nucleotide sequence isolated from the Sargasso Sea
aaataagtttctaccagatagatatgttgaaggtgaatgcccaaaatgtaattaccttgaagctagaggtgaccaatgcgatagttgtggaataacattagatccagaagaattaatcaacccaaaaagtaaaataaacggaaatcctgcagaatttaaggaaacagaacattatttcttgaaactgagtgctttgaacgacaaactcgctgattggctaaatactaaaaaaggctggaggccccatgttattaacttttcaaaatcttttgttgaagaaggtttgcaggatagagcaattaccagggatttagattggggtatagagataccagataatgaacttggagatggaaaaaagatttatgtttggtttgaggctgtaataggttacttatccgcttcaaaagagtgggcaagtaacaatgggactccagaagcctggaaagatttctggctagatgaaaatgctgagtcttattattttgttggcaaagataatgtaccttttcatgcaataatctggccagcaatgcttttggcttatggggatttaaacttacctactaatgttccagcaaatcaatacatattaattaaaggagaaaaagcatctgctagtagaggtgtagggaaaactctcaatgattatcttgatgaatggaatccagattcgttaagatattctctagcaagcattctcccagagcaaaatgattcggagatttctgaagatgaaatgataagaagaaataacgaagaactcgtggcagcatgggggaatcttgttcaaagggtcttttcacagtacataaataattttgatgatttagatacaagctttgaatatgaaaagattgatgaagaacttatggaaggtgctaaaagctgttttaaaacaacaggagaaatgattgaaaaagtagaacttaaatcttcacttcaaaatgtcat

SEQ ID NO: 296638 - DNA, 864 bp, Unknown
  Bacterial polypeptide expressing nucleotide sequence isolated from the Sargasso Sea
aaaattcaaagatcagcagaaaatgaagggcaggatcctaaaacattttgtgaccaaataagcaaaacattcagagatctatctaaaaccttaaatttatctaatactgactttattagaactactgaattaagacataaaaaatctgttgaacatctatggaatgaacttgaaaaaaatgatgacatatatttatctaattattctggatggtattcagtatcagatgaagctttttacaatgatgatgaaatagaggaaatagatggaattaaaaaggctaagttgtctaattcaatcgttgagtgggttgaagaagagtcgtatttttttagactttcaaagtggcaaaagccattattagaatattatgagaaacatcctaattttatttctcctgaatctagaaaaaatgaggtaattagttttgtaaaaagtggacttaaagatctttctgttagcagaacaacattttcttggggaataaaagtcccaaataataaagatcatgtaatatacgtttggcttgatgctctaacaaattatttaagtgctttaaattatcctgatataaaaaatgagttgtttaaaaatttctggccagcttctattcatttgataggtaaagatatattaagatttcatgctatatattggcctgcctttttattggcagctaatattaaattaccattaaaaatttatggtcatggatggattttgtcgggtgaagaaaaaatgtcgaaatcgagaggtaatatacttgacccaatagaaataattaaagaatacgggttagatccattaagatattatttaattaaagaagtttcttttggtaatgatggcaatatctctcaagat

SEQ ID NO: 296639 - DNA, 826 bp, Unknown
  Bacterial polypeptide expressing nucleotide sequence isolated from the Sargasso Sea
gatgagattatcgagaaaaatggtaaaaaaatttcatcattttcgggttcgatagtcgaatgggtagaagaagagtcgttttttttcaagttatctgcttgggaaaaaaaactattaaatttttatgaagaaaatccaaaatttattttgcccacttcaagacgcagcgaggtaataaattttgttaaaaatggtttaaaagatttatcagtaagcagaacttcttttacatggggcataaatgttccgaataacaaaaaacatgttatttatgtatggcttgacgcattaacaaactatctaagcgctttaaattatccagatactaataataaattatataaaaatttctggccagcttctgttcatgtaataggaaaagatatattaagatttcatgcaatttattggccagcttttttattagcagcaaaaattgaacctcctaaaagagtatttggtcacggatggatattgtctggtgatgaaaaaatgtctaaatccaaaggaaatatattaaatccattagaaattatagaaagttatggaattgacgaaatgagatattatttaatgaaagaagtttctcatggaagtgacggaaatatttccattacaaatttaaaaaaatgtattaacagcgacttggcaaataattatggaaatttatgtcaaagagttttttcatttataaaaaataattgtaatagcatagttattaaaaaaggagattattcagaaaatgataaaaaatttattaaaaatatagataatttaactaaaaatttaagagaattaattgataatcaaaatcttaataattaaa

SEQ ID NO: 296640 - DNA, 795 bp, Unknown
  Bacterial polypeptide expressing nucleotide sequence isolated from the Sargasso Sea
catgagtgacactccccgcaagatactggtcaccagtgcccttccctacgccaatggccctattcatctcggccatttgctggaatacattcaaacggacatctgggttcgcttccagaaactccgtggccagcaatgcatctatgtgtgtgctgacgacgcccatggcaccgccatcatgctcaaggccgaggaaaacggcgtcaccccggaacagcaaatcgcccaggtgaaagccgaccacgagcgtgatttcgccgatttccaagtaaacttcgacaactactacagcacccacagccccgaaaaccgggcgctgtcggaaatggtattccagcgcaacaaagatgcgggctacattctggaaaaaaccatcacccagctgtatgacccgcagaaaggcatgttcctggccgatcgcttcgttaagggcacctgccccaaatgcaaaagcgaagaccagtacggcgataactgcgaagtgtgcggcgccacctatacccctgcggagctgattgagccctattcttccgtcagtggcgccaccccggtggaaaaagaaaccacccaactgttcttcgacctgcccaagttcgaagccctgctgcgcgagtggacccgctccggcgccctgcaggaacaggtcgccaacaaactgcaggaatggattgaagacctgcagccctgggatatttcccgtgaagcgccttacttcggcttcgagatccccggctacccgggcaagtatttctatgtgtggctcgatgcccccattggctacatggccagcttcca

SEQ ID NO: 296641 - DNA, 867 bp, Unknown
  Bacterial polypeptide expressing nucleotide sequence isolated from the Sargasso Sea
catgccaaaaactagatacaatgaagttgttaaatttgtagaaggcgggctcaatgacctatcaatatctagaaatagttttagctggggcataaatgtgccagatgatgaagaacatattatttatgtttggctagatgctttatttaattataaaagtatttttgagaaaaataattgtattaaagacttctggcctgcagatgttcatatagttggtaaagatatcttaaggtttcattctatttattggccagcttttttaatgtcggcaggctatgaacttcctaaaactatctatgcacatggttggtggactatagaaggaaaaaaaatgtcgaaatctcttggtaatgtagttgatcccaaccaggttataaaaaaatatggaagcgatcaaattagatattttttactaaaagaaataccctttggtgaagacggaaattattcagaagaattgttaattaaaagaattaatagtgatttagcaaatgatttaggtaatttatttcaacgagtgttatcaatgttaagtaaatattttgatggagttttacctcagttgcaggatactaatgataaagacaaaactttaataggttttcctgcaaatactttagaagatcttcataagcatatgaaattattacagtttaataaatcaattaactctatatggcagatagtaaaggccgcaaatgcttatgtagatatggaagaaccatggaaattaaataaagaaaacccaaagagattgcagacagtcatgtacttattagtaaattctatttataaaattactattcttttgcaaccttttttacctaatacctctacaaatatactaactcaattaaagcaaga

SEQ ID NO: 296642 - DNA, 766 bp, Unknown
  Bacterial polypeptide expressing nucleotide sequence isolated from the Sargasso Sea
acactagccgaccgcgctaacgaatacattcaggcaaaagcgccatgggcaatgtcgaaagaagaaggccgcgaacaggaagtactcgaagtttgctccgttgcggtgaaccttttccgtcagttgatgacctacttgtcacccgtgctgcctgaacttgctgaaaaaaccgcagccttcctgaaccttgaatcactcggttgggaagatcgccgcagcatcctgactggccatgcgatcaataagttcaagccaatgctggcccgtgccgaaatggacaaggtcaccgccattctggaagaaacaaaaaccgaactcgaaaaagagaacggtggagctgcaactgctaaagatcagaaaacagacaagaagactgagaaaaaggcaaaaaacaaaggacctgagctcagagaagacggcaacgaagtaatcgccgacactatcgagttcccggactttgccaaggtcgatcttcgtatcgcccgcattatcaaagccgaccatgttgagggtgcagataaacttctgcagctgactctggatattggcaatggcgaaacccggaacgtattctcaggtattaaagcggcctataagccagaagacctggaaggcaaactgactgtaatggtcgcgaacctggctccgcgtaaaatgaagtttggtctgtcagaaggcatggtgcttgccgccggccctggcggcagcgaaatctacctacttgaaccgcacgacggcgcccaaccgggcatgagggtaatgtaat

SEQ ID NO: 296643 - DNA, 859 bp, Unknown
  Bacterial polypeptide expressing nucleotide sequence isolated from the Sargasso Sea
tcacagtgggagtctagattattagaattttatgaaaaaaaccctgactttataagacctgagtcaagaatgaatgaagtgaaaagttttgtgaaatcaggattaaaagacttgtcagtctcaagaactagttttaattggggaataaagattccagagtcgccagatcatataatgtatgtttggattgatgcgttaacaaattatttaacttcaattggttacccaaaaatagaaaatgataaaatgaatttttggaaaaattgtattcatgtaattggaaaagatattttaaagtttcatgctatttattggcccgcaatgttaatgtcaataaattttcctttacctaaatcaatttttgctcacgggtggtggactaacgaagggaaaaaaatatctaaatctcttggaaattcaattgatccaaataaaatgattgatgagtttggtcttgatcaatttaaatattttctgttacgagaggtaccccttggaaatgatggtgatttttctgaaaaagctcttgtcagtagagtaaattctgacctatcaaataatttaggtaatttggtgcaaagagttataaaattttttgataaaaattttaataacactgtaactcattccctttgtaaagaaaaaaatatttcaaaaattcagaagaagggttatgaattaattaacatagtgaagaaaaaaatggagaaatttgaaattagcaaagctctggaggaaatatttttttatgttgatgatctgaataaatttgttgacgaaagtcaaccttggaaaagtttcaagacaaatcctgaaaaagcagctaaagacctttcattactaattgaatgttttagaa

SEQ ID NO: 296644 - DNA, 898 bp, Unknown
  Bacterial polypeptide expressing nucleotide sequence isolated from the Sargasso Sea
atataccttgataagtatagcgggtggtactctgtttctgatgaagcttattatgatgaagacgaaatagaaaaaaataataaaggtgaaaatacttctaaaagttcaggatcaaaagtagagtgggtagaggaagagtcttatttttttaaactatcgtcatgggaaaaaaaattacttaaattttatgaggaaaattcaaattttattcttccccaatcaagaaaaaatgaagttgtgagttttgtaaaaagaggtttgaaggatttatcagtaagtagaacctcattcacttggggaataaaagttccaaaaaatgaaaaacacgtaatatatgtatggttggatgccttaacaaattacctaagtgcattaaatttcccagatgaacaaaataaattatataaagatttttggcctgcaagcgtacacataattgggaaggatattttaagatttcatgctgtttattggccagcatttttaatggctgctggattaaaatgcccccaaagagtttttggtcatggctggatactttcagacgataaaaagatgtctaaatcgattggaaatatattggatcccctagagataatagataaatttgggattgatcaacttagatattacttgattaaagaagtttctttaggaaatgatggtaatatttctatgtataatcttaaaaactgtatcaataatgatttggccaacaactatggtaacctttgtcaaagggtattaacttttgttgaaaaaaattgtgataacgaaattcctagaccagaagctctaaatgaaaaagataagaaacttattaaaagattaaaagatgaagttaaaaatatgatagatttgataaatagacaaaaattaaatacttatgtaaaaaaag

SEQ ID NO: 296645 - DNA, 775 bp, Unknown
  Bacterial polypeptide expressing nucleotide sequence isolated from the Sargasso Sea
tgatactaccaaacaaatgtttctttccgatatgtatgtaaaaggcagttgtcctgtttgtcttgaaaaagatcagtatggagataattgtgaaaaatgcagcgcaacttatgatgcagtggaattaatagaccctgtatcggttatctctggtactaaaccaataattaaagaatcagatcatctcttctttaagctaagctctttgaaaaaacagataattaattggttaaataactcaaacatacaagatcctgtaagaaacaaactcaatgaatggcttgaaggcgatttaagagattgggatataagcagggacagtccttatttcggatttgaaatacccaattatccagataaatttttttatgtttggttggatgcacctattggttacctcgcgagtcatttaaattatctaaaaagaaatgatcaagaagaaaaatttgaagagttttggaatacaaaatcaaaaggagaagtgtttcatttcatagggaaagacataatgtactttcatacacttttctttcctgtgatgctatcagaatcaaacctcaaaacacccaatggagtttttgttcatggttttctaactttaaatggtgacaagatgtccaaatcaagagaaaactttatttctgctgaaaattatattaatacattagatgcagactacttgcgttacttttttgcttctaaactaggaaccggagtagatgatattgatcttaatttagaagactttaggcaaaaaagtaactctgatttggta

SEQ ID NO: 296646 - DNA, 850 bp, Unknown
  Bacterial polypeptide expressing nucleotide sequence isolated from the Sargasso Sea
atcaaacaacccactcttctgaaaataaagagctttacagcacaaatttaccttcaattaaaaaagaatggtcatataaagcgacgcacaattaaacaggcatacgatgataaaaagggtcttttcctaccagatcgttatgtgcgcggcgaatgcccagcatgtggtgctaaggatcaatatggtgacgcttgtgaacactgcagtgcgacatacacgccgatggatctcaaaaaccctatttcagttatctcgggaacaacaccatccctacgagaatctgaacacttattttttcagcttgctgactttcaagaagaattacgtgcttgggttccagaccatgttgatgcatcaatggtcaacaagcttagtgagtggcttgaaagcggtctaaaggactgggatatatcacgagatgcgccatattttggttttgaaatcccagacgaaaatgaaaaatatttttatgtctggttcgatgcaaccataggctatatggcaagctttctaaatttatgcagaaaatctgataaggaagcagactttaataaattttggaaaaaaaacaagaatacagagctttatcactttataggtaaagacataatttattttcatgcgctgttctggccatccgttttaagtggatcaggatatagaaaaccgtctagtatatttgttcatggttttcttacagttgacggccaaaaaatgtctaaatccagaggcacttttatcatggcctcaacctattacaagcatttagacccagactacctacgttactatttaacagcaaagcttagttctaatatagatgatattgacttaaattttgatgatttca

SEQ ID NO: 296647 - DNA, 771 bp, Unknown
  Bacterial polypeptide expressing nucleotide sequence isolated from the Sargasso Sea
tccatattatcggaaaagatattttaagatttcatgcagtgtattggccagcttttttactagcagcaaagttaccattaccaaaaagagtttttggacatgggtggatactttctgatgaaaaaaaaatgtccaaatctcttggaaatattttagatccaattgaaataatccggaattatggaattgatcaattaagatattatttaatcaaagaagtttcgctgggaaatgacgggagtatttcaatggaaaatctaaaaaattgtattaataatgatttagctaataattacgggaatttatgtcaacgagtgttttcatttataaaaaaaaattgtaataataaagttcctaaaactaataattttaaagagattgatactaaattaattaataatttaaaagacaacattccaaaacttattgatttaattaataaacaaaatttaaatgaatatattaagactgttgtcaatttttcttttgaagctaataaatattttaatgactctgagccttggttatttaaacaaaaaaatcctgaaagaatgaatgcaattttgaatactattgttgtgcaaattaaaaatatatcgatacttttaaatccaataataccgatctctactaaaaaagttttaaatacaattaatatttctgataaagatattttagtagaaactataaaaaaagaaaatattatagataacaataaagaattaaaaaatttagatattctttttaaaaaaattgaaaatgataattgat

SEQ ID NO: 296648 - DNA, 838 bp, Unknown
  Bacterial polypeptide expressing nucleotide sequence isolated from the Sargasso Sea
ttagatttttataaaaaaaatcctgattttatttctcctgagtctagaaaaaatgaagttataaaatttgtagaaaatggtttaagggacttatctgttagtagaaaaagtttatcttggggtattaaagtgccaaataataaaaatcatgttatatacgtttggttagatgctttaacgaattatataagtgctcttaattacccaaataataatgatgatttgtttaaaaaattttggccagcatccttacatttaattggaaaagatatacttagatttcacgctgtttattggcctgcttttttactagcagcaaatataaaacctcctaaaaaaatttatggtcatggatggatactttctggcgatgaaaaaatgtcaaaatctaaaggcaatatattagatccaattgaagtaattaaagaatatggattagatcctttaaggtattatttaattaaagaagtatcctttggtaatgatggaaatatttcacaagaaagattggaagactgtattaatagtgatttggcgaacaattttggaaacttatgtcaacgtgtaacggcctttactattaaaaattgtcaaagtaaaattccagataaaattgaatttaataatgatgatttaaatattcttaataaatataaagataatttagatgaaataaggtctaaagttgataatcaaaatatcaatttttatattgattatattgttaattcattatttgaagcaaataaatattttaatgaccaagaaccttggaaaaaaaaagataaattaataagattaaatacaattatatttactagcctcgaaattataagaa

SEQ ID NO: 296649 - DNA, 841 bp, Unknown
  Bacterial polypeptide expressing nucleotide sequence isolated from the Sargasso Sea
aatgaataacaaaaatttttatataacgacacctatttattatccgtctggaaaaccacatatgggtcacgcctattctagtattatagcagatattttggccagatttaataaaattgatggtaaaaatgttttttttcttactggaacagatgaacatggattaaaaatacaaagggaagctgaaaaaaataataaaaatccgattgatttttgtgatgaattatcaaagaagtttaaagaccttacttcaacattgtatttatcgaataatgatttcatacgtactacagagaaaagacattatgagtcagttaaaaatatatggaacaagttgtatgataatgggaatatatatttagataaatacagtggttggtattctgtttctgatgaagcttattatgacgaagatgaaatagaaacaagagacggcaataaatttgcaaaattatcaggatcaaaagtagactgggtggaggaagagtcctacttttttagattatcaaagtggtctgaaaagttattggagcattatgataaaaatcctgaatttattctaccatcttcaagaaaaaaagaagttgtaaattttgttaaaaaaggccttaaagacctctctgtaagtagaacttcatttacttggggaattaaagttcctcaaaatcataaacatgtaatatatgtttggttggatgctttaacaaattacataagtgctcttaattatccaaatacaaatgacaaattatataaagaattttggccagcaaatatacatattatcggtaaagatattttaagatttcatgctatttattggccagcatttttaatggct

SEQ ID NO: 296650 - DNA, 920 bp, Unknown
  Bacterial polypeptide expressing nucleotide sequence isolated from the Sargasso Sea
taaaaatatagatttacaaaaatcagtaaaaaataaattaaatgaatggcttaatgatgatttaaaaaaatgggacatttcaagagatgcaccctattttggttttgaaatacctggagaaaaaaataaatatttttatgtatgggttgatgcaccaattggttatttagcatcaatatctaactgggctgaaaaaaataatttagatatgcaagatttatggtcagaaaattctgagtatgagatttatcattttattggaaaagatattgcatattttcatgggttgttttggccagcacttttaagtgctgctaactttaaactgcctaatggaattaatgttcatggttttttaactataaatggtgaaaaaatgtctaaatccaaaggaacaggcatcttagcaaaagagtttgcaaatataattaaccctgaaaccttaagatattacttcgctgcaaagcttaataataaagttgaagatatagatttaaattttgaagattatgttcaaagaattaattctgacttagttggaaaatatcttaatatcgcctcaagatctgcatcatttataaaaaagaataaaaatgttttatctacaaatattaataaagatattcttaataatttaatactaaaaaaagataagattatttcattatatgaaactagagaatattcaaaattagtaagaattattatggatttagcagacgatataaacaaatatataaatgaacagactccatggaaaaaggatataaatgaggcagttgatattacctcaactgctataaatgctttttatataataactacatatcttcatccaatcatacctaatataacgaatgaagcttttaagtttttaaatattaaaacaatatcgattgatgatgttgataaaacagaaa

SEQ ID NO: 296651 - DNA, 922 bp, Unknown
  Bacterial polypeptide expressing nucleotide sequence isolated from the Sargasso Sea
tattttagaacatacacagacagatatttgggttagatatcaaaaattaattgagaataattgcacttatgtatgtgctgacgacgcgcatggtacgcctattatgttaaaagctgaagaattgaataaagaacccgaagacctaatagaagaaatctatgcaaatcatgtaaatactttcaatttatacaatattaatcatgataattttcacacaacacatagtgaagaaaaccgaattctctctgagagaatctttaattccctaaacgaaaagggtttaattgaaattaggacgattgaacagttatatgatacttcaagaaatatgtttctttctgatcgttacgttaaaggaacttgccctaaatgttatgcagaagatcaatatggtgataattgtgaagtctgtagtgctacctatgacgctatagaattgattgaccctttctccgtacttagcaatacctctccagttataaaagaatctgagcacttattttttaaattaagtgaactaaaacaggaaatagttgaatggttaaagaactctaatattcaaaaaccagtacaaaataaactttcagaatggcttgatcaagatttaaaagattgggatataagtagagactcgccctacttcggttttgaaatacctggtcacaaggataaattcttttatgtttggcttgatgctcctataggttacctagcaagtcatattaattatttaaataagcaaaattctaatgaattcgaaaagttctggaatccggagtctaattctgaaatttatcattttattggtaaagatataatgtacttccatacactcttctttccggttatgttatcaaacgctaattttaagaagccttcaggagtttttgttcatggctttctaactcttgaggagaaagga

SEQ ID NO: 296652 - DNA, 891 bp, Unknown
  Bacterial polypeptide expressing nucleotide sequence isolated from the Sargasso Sea
tttttccgatttaaacattgatggatacaaagtttatttcctgactggaactgatgagcatggactaaaaattcaaagatcagcagagaaagaaggtctaaatcctcttaatttctgtgatcaaattagtaaaacttttagagatttatctaaaactttaaatttatccaatacagattttatacgaactactgaagagcgacataagaaaacagttcaacatttgtggaaagaactagaaaataatgatgatatttatctttccaattattcgggatggtactctgtttcagatgaagctttttataatgatgatgaaatagaagaagtagaaggtaaaaaaatttcaattagttctaagtctacggttgaatggatagaggaggagtcatatttttttagactttccaaatgggaaaagcccttattagatttttatgaaaaaaaccctaattttatttcacctgcatcaagaaaaaatgaggtaattagttttgttaaaagtggtcttaaagatctttcagtaagtagaaaatctttttcatggggaattaaagtccctgggaatgataaacatgttatttatgtttggcttgatgcacttactaactatataagtgctttaaattaccccaataaagaagatgagttgtttaaaaaattttggcctgcctcaatacatttaattggtaaagatatattaagatttcatgctgtatattggccagcgtttttgttagctgctaaaattgaactaccaaaaaaagtttatggtcacggatggatactttcggggaatgagaaaatgtctaaatcaaaaggcaatattttagatccattgcaaattattgatgaatatggtctagatccattaagatattatttaataaa

SEQ ID NO: 296653 - DNA, 738 bp, Unknown
  Bacterial polypeptide expressing nucleotide sequence isolated from the Sargasso Sea
aatgaataaaaattattatattactactcctatatattacccgtcaggtaaaccccatatgggtcatgcttattcaagcataattgcagatttttttgccagatttaaaagaatgcagggtggagatgttttctttcttaccggaacagacgaacatggacaaaaaattcagcgagctgctgaaaaggatggatcggatccattatcgttttgtaataaaataagtaaaaatttctatgagctaactaaaaaattgaatctttcaaatgatgattttattagaactacggaaaaaagacataatgattctgttgttcatttgtggaatattttagaaaaaaagaatcaaatatatctttcaaagtattctggttggtactctgtatcagacgaggctttttatacggaggacgaagttgaaaccattgataatcttaaaatctctaaaacatcaggatctaaagttgaatgggttgaagaggagtcttacttttttagattatcagaatggcaaaaaccactattaaaattctactcagataataaaaattttattttaccagagtctagacgaaatgaggtaataagctttgttaaaaacggtctcaacgatctttctgttagcagaaaatcattttcgtggggtattaaagttccttcaaataatgatcatgttatttatgtatggcttgatgcattaactaactatttaagcgcattagattatacaaatgttga

SEQ ID NO: 296654 - DNA, 943 bp, Unknown
  Bacterial polypeptide expressing nucleotide sequence isolated from the Sargasso Sea
aaagattttattaaaaaagttaatttacaagaatcagtaaaaaataagttaagtgagtggttaaatgatgatttaaagaaatgggatatatctagagatccaccatattttgggtttaagattcccggtgaagttgaaaagtatttttatgtttgggttgatgctccaattggatacttagcatctatatcaaattgggccaaaaaaaataatcttgatatgaatcagctttggtcacaaaagtctgactatgaaatacatcactttattggcaaagatattgcttattttcatggattattttggcctgccctcttaagctcagcaaattataagttaccagatagtattaatgtccatggttttttaactattaatggagaaaaaatgtctaaatctagggggactggaattctagcaaaagattttgtaagtgttattaatccagaaactttgagatattatttcgctgctaagttaaacaataaagtagaggatattgatttaaattttgaagattatgttcaaagaataaattctgatattgttggaaaatatttaaatatagcttcaagatctgcttcttttatcaaaaaaaataataatctattatctaaaaatattaatcaagatatcttagattcattattaaataaaaaaggtgagattatcgatctgtatgattctaagcaatactcaaagcttattagaataattatggatcttgctgacgacgttaataaatttattaatgatgagactccatggaagaaggatatcaatgaagcattagatattagttctacagcattgaatgcttttaaaattttatcaatttatttacatccaattattccaaacattactaaagatgcttttgaatttcttaatcttaagaaatttactttaaatgatgttgatgtgaatttaaatgaaaaaataa

SEQ ID NO: 296655 - DNA, 884 bp, Unknown
  Bacterial polypeptide expressing nucleotide sequence isolated from the Sargasso Sea
catgcatactcaagtatagttgctgatttctttgcaagatttaaaagaatacaaggatataaagtatattttttaacaggtacagatgaacatggcttaaaaatacaaagagctgctgaaaaaaaaggcatgcaaccaaaggatttttgtgaccaaattagcaaaacattttatgatttatcaagtgatttaaatttaagcaatgatgactttataaggacaactgaacaaagacataaaaaagctgttgaacatttatggaatattcttgaaaaaaaaaatgaaatctatttatcaaaatataaaggatggtattctgtatcagatgaagctttttattcagaagatgaaattgagaaagctgatggcaaagttgtatctaaagtttctaaatcaactgtagagtgggtcgaggaagaatcttatttttttaaattatccaaatggcaaaattcactattaaaattttttgatgataatccaaattttattttgcctgaaactagaaaaaatgaagttgtaagtttcgtaaaaagtggactgaaagatctatcagtaagtagaaaatcattttcatggggaattaaagttccgtctaataatgaacatataatttatgtttggcttgatgcacttacaaattatctaagtgctttgaattttcctgatgataaggataaaaaatacatagatttttggccagcttctgttcatcttataggtaaggacattttgagatttcatgctgtttactggcctgcttttttattggctgcgggtataaaaccaccaaaaagaatatttagtcatggatggatactatctggtgaagaaaaaatgtctaaatcaaaaggaaatatcttagatcctctagagatattaaa

SEQ ID NO: 296656 - DNA, 805 bp, Unknown
  Bacterial polypeptide expressing nucleotide sequence isolated from the Sargasso Sea
tatgtctaaaggaaacttttatataacaacaccgatttactatccgtctggtaagccacatatgggtcatgcatattcaagcattattgcagatgttttagccagattcaaaaaaatagatggtcacaaagtttattttttaactggtactgatgagcacggtttaaaaatccaaagagaggcaaaaaaaaataacaaagatccaaaagtattttgtgatgaaatatctattacttttaaaaatttaactaaaatacttaatttatcaaacaatgacttcataagaacaacagaaaaaagacaccatgaatcagttaaagaaatttggaaaagattagaaaaatctggcgatatatatttagataaatatagcggctggtactcagtatcagacgaagcatattacgatgaagatgaaataatacatgaaaatgggtttaaaaaatccaaaacttctggctcaaatgtagaatgggttgaggaagagtcttatttttttaaactttctgcatggggtgaaaaattattaaaattttatgaaaaaaatcccaactttatacttcctgagtctaggaaaaatgaagtagtaaattttgttaaaaaaggtttaaaagatttgtctgtaagtagaacatctttttcttggggtataggcgttccaacgaataaaaaacatgttatctatgtatggttagatgctttaactaattatattagtgcactaaactttccaaacactgatgataaactttataaggatttttggccggccaatgttcatataataggtaaagatatattaaga

SEQ ID NO: 296657 - DNA, 976 bp, Unknown
  Bacterial polypeptide expressing nucleotide sequence isolated from the Sargasso Sea
aatgtctaaacatttttatataacgacaccaatttattacccttcagcaaaacctcatatggggcatgcttattcaagtatagttgctgatttctttgcaagatttaaagtaattgacggatatgatgttcactttttgactggtacagatgagcatggtttaaaaatacaaagatcagctgaaaaagcaggtaaagatccacaggaattttgtgatgaaataagcaagacatttaaaaatttatcaaatacgcttaatctatcaaatacagattttataagaacaacagaacagcgccataaaaaaacagttcaatatctctggagtcaacttaaaaaaaacgatgatatttatttatcaaaatattctggttggtactctgtttcagacgaggctttttataatgatgatgaaatagaggaagttgatggaaaaaaattttcaatttcatcaaaatcttctgttgagtggatagaagaagagtcttatttttttaggttatcaaaatgggaaaaaccgcttttagaattttataaatctaatccatactttattttaccagagtctaggagaaatgaggtaattagttttgttcaaaatggattgaaagacttatcaataagtagaaaaacatttacatggggcattcctgtaccaaacaataataaacatattatatatgtatggttagatgctttaacaaattatctaagtgcattaaattatccagaccttaatgataacttatataaaaaattttggcccgcatctattcatcttattggaaaagatattttaaggtttcatgctatttattggcctgcttttttattagcagcaaagatagatttaccaaaaagggtttacggacatggttggattttatctggtgaggaaaaaatgtccaaatcaaaaggaaatattttagatcctataggaataattaataaatacggattagatcctttaagatat

SEQ ID NO: 296658 - DNA, 688 bp, Unknown
  Bacterial polypeptide expressing nucleotide sequence isolated from the Sargasso Sea
tatggaagcgcctacatattatttaactacgccaatctattacgtaaatgacgtgccgcatataggacatgcttacaccacattggcctgcgatgttctagcacgatttatgcgcttggatgggtgtgacgttcttttccttacaggaacggatgaacatgggcagaaagtggaaaaggccgctaaaactctaaaaatggaaccacaagcttttaccgataaagtttctaaaaactttagagacctccttccatttatgaatattagcaatgatgattttataagaacaacggaggcccgacataaggtctcagctcaagctatttggcgacgtttaatgcaaaatggtcatatttatttagataaatactctggttggtattcggtaagagacgaagcttattttgccgaaaacgagttaattgacggcaaagcaccgactggtgccccagtggaatgggtagaggagccaagttattttttcgatttatctaagtggcaaacaaaattattagaattttataatgagaatcctaattttatcgcgcctgcaagtcgacggaatgaagtaatcagttttgtttcttccggtttaagagacctttcaatctccaggacaagtttcaactggggcatcgcagtaccggatgacgaaaaacacattatgtatgtttggttagatgcatta

SEQ ID NO: 296659 - DNA, 867 bp, Unknown
  Bacterial polypeptide expressing nucleotide sequence isolated from the Sargasso Sea
gatcaatatggcgactcatgtgaagagtgtggagcaacctattcaccgaccgacgtaaaaaaccctatctcaacagtttcaaacacagcacctgttagaaagaaaacagaacatgtcttttttcagttgagctcatatgagtcatttttaaaagattggatgcaaaataatgatattcaaagagagattaaaaataaacttagtgagtggcttgagggcggattagttgattgggacataacacgtgataaaccatattttggatttgaaattcctgacttagaggataaatacttttatgtatggcttgatgcgcccattggatacatagcatcacataaaaactattgcgataaaaataaacaaaattatctagatgattggaaagaagattctaaaactgagctctatcatttcataggaaaagatattgcctattttcatggactgttttggccagcaatgcttgaaggagcaggtcttaaaaaacccaatggggtcttttgtcatggctttcttacaattgatggcgagaagatgtctaaatcacgcggaacatttttcaatgcaagaacttatctaaatcatctccaacctgattatttaagatattatttctcaagtcgtctcacaagcaaaattgaagatattgatttaagttttgatgatttcatgacacgtgtaaattctgatctagttggcaaaataataaatatcgggagtcgctgcgcaaaattcattaataaagattttaatgaccaactttctaaggagattggaaataagttattgcttgattcattgctatctaaaaaaaatgaaattattgctaattatgaatcaaggaacttcgcaactaatatcaga

SEQ ID NO: 296660 - DNA, 874 bp, Unknown
  Bacterial polypeptide expressing nucleotide sequence isolated from the Sargasso Sea
tttatactatgttaatgataaacctcatttaggaagtgtatatacaacaataatttgtgactcaattgctagatataaaaggcttgcaggtgaagatgttattttcatcactggtgttgatgaacatggtttgaaaatacaaagaacagctaatgaaaagggtattgaaccaaaatcacattgtgatgaaatctcagaagtctttaataataattggaaaaattggaatatatccttagataaatttataagaacaagctcaaaaaatcatgaaattattgttaatgaattctatgaaagagtaaaagcatcagatgatatctatatgggagttcaaaaaggttggtattgtgtcggttgtgaagaatttaaagataatccagaaaactcatcaacatacaagtgtcccatacatcaaaaaaatctagaatggaaaaatgaagagaatctcttttttagactttcaaaatatcaaaaagaaattgagacaataatcaaagaaccttcttttatagagccaatagaaagaaagaatgaaattttaaattttgtatctagaggattaaaagatttttcaatttcaagaacaaatgtcacatggggaattcctgtccctggttacgataaccatactttttatgtttggtttgatgctttacttggatatgtaagcgccattagttctgatgccacagaacattcattggaaaaatcaattaatggaggatggccagctgatgttcattttattggtaaagatattctgagattccatgctgtatattggcccgcaatgctcatttctgccaatatgaaagttcctaaaaaggtttttgggcacgggtttcttacaagagaggggcaaaaaatgggg

SEQ ID NO: 296661 - DNA, 922 bp, Unknown
  Bacterial polypeptide expressing nucleotide sequence isolated from the Sargasso Sea
gatttttttgcaagatttaaaagaattgatggttataaagttcattttttaactggtactgatgaacatggtttaaaaatacaaagagcagctgagaataaaaaaattgatcctttaaaattttgtgatgagataagtcagacatttagggatttatcaaaaacacttaatttaactaatactgactttataagaacaacagagcaaagacatatcaaatctgttcaaaatttatgggacaaacttaaacaaaatgatgaaatttatttatctaaatattcaggttggtattcagtttcagatgaagccttttacaatgaagatgaacttgaagaaattgcagggaaaaaaattgctatatcctctggatcaactgttgaatgggtcgacgaagaatcttttttttttagattatcaaaatgggaaaagccactgctaaaattttatgaagataacccagatttcatatgtccagagtctaaaaggaatgaggtaataagctttgtaaaaaatggattaaaagatctatcaataagtagaaaaagtttttcctggggtattaaagttccgaataatgatgatcatgttatatatgtttggttagatgcattaacaaattatctaagcgcacttaattatccagatacagatgatgaattatttaagaatttttggccagcttctctacatttaataggtaaagatatattaagatttcatgctgtatattggccagcttttcttttagctgcaaaaattgaattacctaaaaaagtctacggacacggttggatactatcaggtgaagaaaaaatgtctaaatctaaaggaaatattcttgatccaattgatataattaaaagatacggacttgatcctctgagatattatttaatcaaagaaagtttccttggaaatgacg

SEQ ID NO: 296662 - DNA, 841 bp, Unknown
  Bacterial polypeptide expressing nucleotide sequence isolated from the Sargasso Sea
gatttttttgctagatttaaaaaaattgatggctattcaattttttttttaacaggtactgatgaacatggtctaaaaattcagagagcagcagagaaaaaaggtattgaaccacaagaattttgtaatcaaataagtaaaacttttaatgatctatccaaaactttaaatttatctaatacagattttattcgaactactgaggatagacataaaaagtctgtaagatttttatggaaagaacttgaaaaaaatgacgacatatatttatcaaaatattctggctggtattcagtttcagatgaagctttttacaatgaagatgaaatcgaagaaattgatggaaaaaaaattgcaatttcatcaaaatcttctgtcgaatgggtagatgaagaatcatatttttttagattatctaaatggcaaaaaccattattagatttttacaaaaataatccaaaatttatacaacccgaatctagaagaaatgaagttattagctttgtagaaagaggcttaaaagacctatcgataagtagaaaaagtttttcgtggggaataaaagttcctggcaatgaagagcatgtaatatatgtatggttagatgcattaactaattatattagcgctctttgttatcctgatactgaaaatacactgtttaaaaaatattggccagcatccatacatttaattggcaaagatattttaaggtttcatgcaatttattggccagcctttttacttgcagcaaagatcaaattaccaaaaaaaatatatggccatggctggattctttctggtgatgaaaagatgtcaaaatctaaaggtaatatacttg

SEQ ID NO: 296663 - DNA, 171 bp, Unknown
  Bacterial polypeptide expressing nucleotide sequence isolated from the Sargasso Sea
aatgaaccctttttatattactacaccaatatattatgtgaatgacaagcctcacataggtcatgcttacacaactattgcctgtgatattattgctagatttaacaaactactaaataaagatgtatattttttaactggaacagatgaacacggtcaaaaagtggaaaa

SEQ ID NO: 296664 - DNA, 565 bp, Unknown
  Bacterial polypeptide expressing nucleotide sequence isolated from the Sargasso Sea
atgaataacagtttctatatatcgacaccgatttactacgtaaatgataagccacatataggtcatgcatatactaccatattagcagatgtgatcgcgcgtttttatcgtcagctcaattatgacacctttttcttaacagggttagatgaacatgggcaaaaggtgcaggaagcagcaagtaatcgaaaagtagagccacaagatcattgcaacgaaatggctccacgcttcacggagttatgggaaaaactacatatttcaaatgatgattttataagaacaacagaagaaagacacaaaaaagttgttcaagaatttttgcagcttgtttttgataaaggagatatttataaagatgagtatactggattatattcagtttcagaggaaaggttcataacggaaaaggaagctgaaagcggaatatttagggacataaaagagctaaaagaaattaattatttttttaaaatgagcaatttccaaacccaattgatagaacatattgaaaataataataatttcattcagcctgctcatcgaaaaaatgaaattctcggtt

SEQ ID NO: 296665 - DNA, 607 bp, Unknown
  Bacterial polypeptide expressing nucleotide sequence isolated from the Sargasso Sea
gttgttagttttattgagagtggtttgagagatttgtctatttccagaacaacttttacatggggtgttcctgttcctgacgataataaacatgttatgtatgtatggattgatgctttatgtaattaccttacatcaatcggatatccggatattaaaaataaaaattttgaaaaattttggcctgcaatacatgttgtgggtaaagatattttaagattccatgcagtttactggcccgcttttttgatggcagctgaattggatccacctaaaaaaatttttgcacatggttggtggactaatgaaggtaaaaaaatttccaaatccataggtaatgttattgatccttatgaaattattaataaatatggtttagatcaaattagattttttttgtttagagaagtgccttttggaaatgatggggatttttctaaaaatgctattgcaaatcgaatcaatgcagatttagcaaataattatggcaatctagtacagagaataacctcttttgcattcaaaaattgtaattcaactgtcaaaaaaagtgaagattttactgatgatgacaaaatcttattaaataatcttaataatcgatatg

SEQ ID NO: 296666 - DNA, 874 bp, Unknown
  Bacterial polypeptide expressing nucleotide sequence isolated from the Sargasso Sea
tttgttaaaagtggacttaaagatctttctgtaagtaggaaaactttttcatggggtattcaagttcctaatgataaaaaacatgttatttacgtttggcttgatgcactcactaactacttaagtgctttaaactatcccaacaaaaatgatgaattattcaaaaaattttggccagcttcaatacatttaattggaaaggatatattaagatttcatgcagtatattggccagcttttttattagcagctaaaattcaaccaccaaaaaaagtttacggtcatggatggatacttgcaggtgatgagaaaatgtctaaatctaaaggtaatattttagatccattacaaattattaaagaatatggcttggatcctttaaggtattatttaataaaagaagtctcttttggaaatgatggaaatatatctcaagatagacttgaggattgtataaatagtgatttagcaaataattatggcaatctatgtcaacgtgttactgcttttgcaataaagaattgtgatggaaaaattccagaaaaaataaaatttgaagaagatgatttaattattttagataaatttaaagataatttagataagatcagatctaagatagaccaacaaaatttaaattactacattgattatatagttaactcactttttgaggcaaataagtattttaatgatcaagaaccatggaaaaaaaagaatgatattactagattaaatacaatcgtttttacctctttagaaattattagaaaaataagttttttactctatccaataatccctggatcagtattaaaggctttaaaaatattcaatcttggtgaaaatgacattaagttagaagacatatcta

SEQ ID NO: 296667 - DNA, 868 bp, Unknown
  Bacterial polypeptide expressing nucleotide sequence isolated from the Sargasso Sea
taatgatgttttttttctaagtggtaccgatgagcatggacaaaaagtagaaaaagctgcaaaagttgcaaaaattgaaccaaaaatatttgttgataagttatctttaaattttaaaaaattaattccctttttaggttgtgaaatagatgattttataagaacaactgaagaaagacatataaaatctgcacaagctttatggaataaattaatagataatgatcaaatatatttatcaacttatgaaggatggtattctgtaagagatgaggccttttatcatgaaaatgaattaaaaaagactgacggtaaattagtaactgataatggttcatcggtagaatgggttaaagaagaaagctatttttttaaattatctaattgggaaaaaaaattaattgaattttatgaaaataacccagataatatttctccaaaaagtagatacaacgaagtattaagttttataaaaagtggtttaaaagatttatcaatttctagaacaacttttaaatggggtgttcctgtaccaaacaataacaaacatgttatgtatgtatggatagatgcactttgtaattatcttacagctataggatatcctgatacaaataacttaaattataaaaaatactggccagctatacatattgtaggcaaagatatattgagatttcatgcagtttattggcctgcttttttaatggctgctgaactagagcctccaaaaaaaatatttgctcatgggtggtggacaaatgaaggtcaaaaaatatccaaatctcttggaaatgtaattgatccttatgatataattcatgaatacggcttagatcaaattagattttttttatttagagaagta

SEQ ID NO: 296668 - DNA, 975 bp, Unknown
  Bacterial polypeptide expressing nucleotide sequence isolated from the Sargasso Sea
ggcacgacctatactcctgatgatttactaaatccagtatcatcattatcgaattctgagcttaccaagaaaaaaactgaacatgttttttttgatttacctcaaatgaaagattttcttgaggattatctcaaagacttaactcttcaagatccaataaaaaataaactaaatgaatggattgaggatgggttaaagccatgggacatatcaagagacaagccatactttggatttgaaatacccggagagaagaataaatatttttatgtttggcttgacgcaccgattggatatttagcttctgcaaaaaattgggcagaaaacaataatatggatatgaaagatttatggggtgaaagctctgattatgaaattcatcattttataggaaaagatattgcttattttcatgccctattctggccagcacttttaaagtcatcaaatattcgcttacctgagtcaattaatgttcatgggtttttaactattgatggtgagaagatgtcaaaatccaatggaacttttataaatgcagacgactttgctgaaaactatgatggtgagttattaagatattattttgctgataagtttaataattcaattgatgatatagattttaatgaagatgaatttattcaaaaaattaattcagatatcgtaggtaaatatctaaatattgctagtagagtttcaaaatttattgagaagaatggtaattatctctctgcagacttggatgaggactttattgagaaaaatctatcaatgatcgatgaagtgattgagcattatgaagacttaaatttttctaaatctgtaaaaattattatgaagatggcagatgaagttaataaatatattaatgagaatgagccttggaaatccagtgaagaaaaggctgtagaggtatcatcgacagcagttaactgttttagagttatctcaatattgcttaaccctgttcta

SEQ ID NO: 296669 - DNA, 577 bp, Unknown
  Bacterial polypeptide expressing nucleotide sequence isolated from the Sargasso Sea
tatgtccaaaaataaaagagaaatattagtaacatcagctttaccttatgctaacggagaattgcatttgggtcatatgttagaacaaacacaggctgatatatgggttagatatcaaaaacttataggtaatgagtgcacttatgtttgtgctgatgatgctcacggtactcccattatgttaagagcagaagagttaaatattgatcctgagcttcttatcagtaacgtttttaaaaatcacttaagagattctaatggttttttaattgaccatgataattactactcaactcatagtgatgaaaataaatatttttcagaattgatctttgaaagatgtaaagaaaaggggctgatcttagagaaagaaatagaccagctttttgacatcgagaaacaaatatttctttctgatagatatgtaaaaggaatttgtccttcgtgcggagcgaaagatcaatatggagataattgtgaagtttgtggtaaaacttatctagccactgacttgatcgatcaaatttctacacttagcgacacgattccagaagttaaaaaaagcctacatttattt

SEQ ID NO: 296670 - DNA, 895 bp, Unknown
  Bacterial polypeptide expressing nucleotide sequence isolated from the Sargasso Sea
ccaagtagatgaactctctaatcaaagcccaataaaacataaactcaaagaatggtttgatggagatttaaaagattgggatgtttcgagagatgagccttactttggttttaaagtgcccggagaagaaagcaaatacatttatgtatggatggatgctccagttggttatctatcatctataaaaaattggtgcgatgtcaacaaacatgactatgaaaaactattgtcagacaaagacaccaaactagtacactttataggtaaagatatagtttattttcatcttctattttggccagcaatgcttcatgcagcagacatagaaaatatagaagaagtctttgttcatgggttcttgacaatagaaggaatgaaaatgtctaaatctcgaggaaattttatacttgccgatgaagctcttgagtatgccaatgcagatttttacagatattacctatcatcaaaacttaatactgatatttctgatataaatttttcagttgatgattttgtgcaaaaaattaatagtgatttaattggcaaatatataaatatagcgagtagaactcagaactttcttacaaaacataacaattccgaagttaaacaaaactgtcaaaatgaaacaaataaatacaaagaactatatgctgaaattgtcaaccaaactaatgatagagaatattcaaaagcattaaaaaatattatgtcaattgctgatgaagcaaattcatacatatcatcaatggagccatggaacaaagcaaaagaaggcgatatagcttcctgcatagaaatatgctcagaagcactaaatatatttaaagatcttacaatcctgctgaatccttacattcctaatgttgctgaagatctttttgatttattgaat

SEQ ID NO: 296671 - DNA, 796 bp, Unknown
  Bacterial polypeptide expressing nucleotide sequence isolated from the Sargasso Sea
catgaatgaagttttctacataactactccaatatattatgtaaacagtcatccgcatatcggacatgcttacactacaattgtaacagatgttttgacgcgctacatgaagctgtttggagctgaaacttattttcttacggggacagatgaacatggacaaaagatcgctgaatcagcagccaattctggaattgagccaaaggaatttgttgacaaaatcagtcaagaatttcgagaattgtggccccatctgcatattgagcacgaccagtttattcgtacaactgattctaatcataaagcttgtgttcaggcaatactgcaaaaaatttatgaccaaggagagatatatctaaaagaatacgagggactttactgcataggatgtgaaaggttttttgatgagtcagagttagaaaacggtaattgccctgatcatcaaactcccccagaattttataaggagcaaaattacttcttcaagatgagctcttaccaggagtggctcactaaagagttaaatcaaaatgtagactggatttatcctggacgttacaggaatgagctaattcagttgcttaaagatcctctacaggatttatgtatttcaagacctaaaagtagggtaaagtggggtattgaactgccttttgacaacaaatttgtaacttatgtctggtttgatgcactgctaaattatgtcagtgctcttgactggcctgatggagaaaaatacaaaaaattctggccacatgttaaccataccattggtaaagatattcttaaaacacat

SEQ ID NO: 296672 - DNA, 904 bp, Unknown
  Bacterial polypeptide expressing nucleotide sequence isolated from the Sargasso Sea
tctggggtatacctgttccaatagtaaaaaccacgtgatatatgtttggcttgatgctttaacaaattatttaagttcattaaattatcctaatacagatgatgatttgtttaaaaaattttggccagcctcaatacatttaattggaaaagatatacttagatttcatgctgtttattggcctgcctttttattagcagcaagaattgatttaccaaagagagtttatgggcatggatggatattatctggggaagaaaaaatgtctaaatctaaaggtaatatacttgatccgcttgagataattaaaaagtatggtttagatcctttaagatactacttaattaaagaagtttcatttgggaacgatggaaatatatctcaagaaagactagaggattgtattaatagtgatttagctaacaattatggaaatttgtgtcagcgtgtaactgcttttacaataaaaaactgtaatggaaaaattccattagaaattaaatttcatgatgaagatttattaatactaaataagtataaagataatttagataatattaggtctcaaattgacaatcaaaatattaattcttacgtagattatatagtaaattcactttttgaagctaacaaatattttaatgatcaagaaccatggaaaaagaaagacgatacaattagattaaatactattatttatactaccttagaaattgtaagaaaaataagttttttactatatccaattattcctgaatcttctttaaaggcattaaagatttttgatattgaagaaaaaaatataaaactagactcagtttctaataatgagtatttaacaaaaggtaataatataaataaaatagacatactttttaaaaaaatagagaaaaacaatgattga

SEQ ID NO: 296673 - DNA, 607 bp, Unknown
  Bacterial polypeptide expressing nucleotide sequence isolated from the Sargasso Sea
aatgaataaaaatttttatattacaacaccaatatattatccatctgcaaaaccgcatatgggtcacgcatactcgagtattattgcagatttttttgccagatttaaaagaatttgtggttacaaagtattcttcctaactggaactgatgaacatgggcaaaaaattctaaaggcatccgaaaacgctaatttggaaccattggctttctgcgatctgataagtaaaaatttccaaaatctttccaaaatactaaatcttacaaatgatgattttattagaacaactgagaaaagacactttgactctgttagagcattatggaaaatactagagcaaaatgatgaaatatatttatctaaatattcaggctggtattctgtttctgatgaggccttttacagtgatgatgaagttgaaactaaagataaaaaaaatgttgcaatcacttcaggttcaaatgttgaatgggtagaggaggagtcatatttttttagactttcaaaatggcaaaataaattattagatttttataataaaaatcctaatttcatacttcctgaagctaggagaaatgaggttttgagttttgttaaaggtggttaa

SEQ ID NO: 296674 - DNA, 855 bp, Unknown
  Bacterial polypeptide expressing nucleotide sequence isolated from the Sargasso Sea
aattttatttaccatcaagcagaaaaaatgaagtaataaagttcgtagaaaaaggcttaaaagatctctcaataagtcgaacctcttttacatggggcattccagtacctaaaaatgataaacatataatctatgtatggttagatgcattaacgaattatcttagtgcaataaattttcctgatactaatgaaaaaaaattcaaagaattttggcctgcagatattcatattattgggaaagatatattaagatttcatgcaatttattggccagcttttttgttggctgcaaaattacctcctccaaaaaaaatttttggtcatgggtggattctttcagatgaaaaaaaaatgtcaaaatccctaggtaatattttagatccaattgaaataattgataaatatggaatagatcaactcagatattatttagttaaagaagtatctttagggaatgatggttcaatttctatggaaaatttaaaaaattgtattaataatgatttagccaataattatggtaatttgtgtcaaagagttttttcttttattaaaaaaaattgtaataataaaattccagaaaatccaaattttattaactcagataaaaaacttttagataatttagacaataatgtacccaagcttattaatttaatgaataatcaggatcttaatgaatatataaaaatagtggtaggtttttcttttgaagctaataaatactttaatgactcagagccatgggctgtaaaaaaaacaaatcctgaaaggatgaacactatattacatactataaccgagcaaataaaaaatattagcatacttttaaatcccaataattccccatagc

SEQ ID NO: 296675 - DNA, 999 bp, Unknown
  Bacterial polypeptide expressing nucleotide sequence isolated from the Sargasso Sea
aatgaccaaaaatttttatataacaacaccaatttattatccttctggaaaaccacatatgggtcacgcctattcaagtattattgctgatatttttgccagatttaaaagactagaaggttataatgttttatttttaactggcacagacgagcatggtcaaaagattcaaaaagaagctgataagcacaaaaaggatcctaaaaaattctgcgatgagatctctaaaacttttcgatcattaacaacaacgcttaatttatcaaatgacgactttataagaacaactgaactaagacattttaaatcagtgaaagagatatggaacaggctgataaaatctggagatatatatcttgataaatatagcgggtggtactcagtttctgatgaagcttattatgataaggatgaaattgaagaaaaaaatggaaaacaagtatccaaaacttctggttctttagttgagtgggttgaagaggagtcttatttttttaaattatcagcctttcaatcaaaattgttagagcactataaaaaaaacattgattttattttgccccaatcaagaagaaacgaagttgtaaagtttgttgagaaaggtttaaaagatctatcgataagtagaacatctttttcttggggaataccagttccagataataaaaaacacgttatttatgtttggcttgacgcattaacaaattatttaagtgcactcaatttccctgatattgaggataaaaagtataaatcattttggcctgcagatgttcatataattggaaaagatatactaagatttcatgctatttactggcctgctttcttatttgctgcagacttaccattgccaaaaaaaatatttgggcatgggtggatattatcagatgataaaaaaatgtcgaaatcgcttggtaatattttagatccgattgaagtaattaaagattatggaattgatcagcttagatattatttaataaaagaggtttctct

SEQ ID NO: 296676 - DNA, 1411 bp, Unknown
  Bacterial polypeptide expressing nucleotide sequence isolated from the Sargasso Sea
taaagttttttttttaactggaactgatgaacatggccaaaaaatacaaagagccgctgagaaatctaacaaagatcctttaaagttctgtgatgaaataagtaagacttttagaaacttatcttcattacttaatttatctaatgatgattttataagaaccacagaaaaaagacatgcttcagctgtaactaatctttggaatattttagaaaaaaaaaaagaaatatatctctcaaaatattcaggttggtattccgtctctgatgaagctttttataatgaggatgaaattgaagacttagatggaaaaaaaatatcaaaattatctggatctccggtagagtgggttgaagaagagtcttattttttcaaattatctaagtggcaagaaccacttttaaaattttattcggaaaatccaaaatttattttaccagagagccgaaaaaatgaggtaattagttttgtcaaaagtggattaaaagatttatccgttagtagaaaatctttttcttgggggattaaagttccatcaaataaagaccatgtaatatacgtgtggcttgatgctttaacaaattacctatctgctttaaattatcctaaagagacagaaaagttatataaagatttttggcccgctaatattcatattataggaaaagatattttaagatttcatgcagtatattggccggcctttttattagctgcaggtatcaaacctccccagagagtgtacggtcacggatggatactctcaggtgatgaaaaaatgtcaaagtctaaaggtaatattttagatcctattgaaataatcgatatctatggattagatgcattgaggtactatttgcttaaagaggtatcttttggaaatgatggaaatatttctaaggaaaaattagaaagttgtataaatagtgatttagcaaataactatggaaatttatgtcaaagagttattttgttttgtgaaaaaaatattggtcttaaagttccagaaaaatatgattttattaatgatgatcttaaaattctaaatgattttagagaaaatttagaaaatatagaaaaagaaattaatgaacaaaacataaattattacgttgagtatgttgttaatcagttatttaaagccaataaatattttaatgatcaagcaccctggactaagaaagatgatagtttgagattgaatacaattgtatttgtatctcttgaattaattagaaaaatttcaattctactctatccaattattcctaatacttcattaaaagttctgaatatcttttctattaaagaaaaagatattaaatttgacacaataagtaataatgaatatttaaaagataaaaaagaaattataaagctaggtattttgtttgaaaaaataaaaaaatga

SEQ ID NO: 296677 - DNA, 1492 bp, Unknown
  Bacterial polypeptide expressing nucleotide sequence isolated from the Sargasso Sea
atgaataaaaatttttatataacaacaccaatttactatccttcagcaaaaccacatatgggtcatgcttattcaagtatagtatctgatttttttgctagattaaaaaaaatacagggatatgaagtttttttcttaacgggtacagatgaacatggtcaaaaaatccaacgcgcagcagaaatagagaaaaaagatcctctaaaattttgtgacgaaataagcaaaacttttgaaaatctttgtaaaagtcttaatctctccaataatgactttatcagaacaacagaagagaggcataaaaaatctgttgaacatttatggaaagttcttgaagataaaaatgaaatctatttatcaaaatattctggctggtattccgtatctgacgaagccttttacagtaatgaggaaattgaagaaattgagggtataaaaaaatcaaaatcatctggatctaaagttgaatgggttgaagaagagtcttattttttcaaattatcaaagtggcaggagccgttattaaaattttataaagagaatccgaaatttattttaccagagtctagaaaaaatgaagtaattagttttgtgaaaagtgggctgaaagatttatctataagtagaaagtcctttacatggggcataaaggttccatctaatacagatcatgttatttatgtttggttagatgcattgaccaattatttaagtgcactcaattatcctgatataaatgataaattctacaaaaagttttggcctgcagatgtacatataattggaaaagatattttaagatttcatgctgtatattggcctgcatttctcttagctgcagatattaatcctcctaaaagagtttatggtcatggatggatactatctggtgatgaaaaaatgtctaaatctaaaggcaatattcttgatccacttgagataattgatcaatatggactagatccattgagatattatttacttaaagaagtatcttttggaaatgatggaaacatttccaatgaaaaactagaaaattgcattaatagtgatctagcaaataactatggaaatttatgtcaaagagttatttcattttgcgaaaagaacataggtttaaaaatacctaaaataaaagattttgatgttgaagatttaaaaattttagataattacaaaaataactttgaggatttaaaaatgaatattgataatcaaaatattaatttttatttaaattttattgttgatcaactttttaaagcaaataagtactttaatgatcaagaaccatggaaaaaaaaagatgacaaaaaaagattaaatacaatagtttacgtttcattagaaattattagaaaaatttcaatcttgctatatccaataataccacagactgcattaaaggtactaaatatatttagtattaaagagaaagatgtagagtttgcgacaattttaaataataaatatttatcatcagaagatagga

SEQ ID NO: 296678 - DNA, 1766 bp, Unknown
  Bacterial polypeptide expressing nucleotide sequence isolated from the Sargasso Sea
atcacctttcgataattatcacagcacccacagtgaagaaaaccgcgtgctggcgagcgatatttacttaaaactgcgcgctaatggctatatcaagagcaagagcatttcgcagttatttgaccctgaaaagtcgatgttcctgccagaccgcttcgtaaaaggcacctgccctaagtgtaagtcaccggatcaatacggcgacaattgtgatgcctgcggcgcaacttacagcccaactgaactgattaaccctaaatcggcagtatcgggcgcgacgcctgtgatgaaggacactgagcactttttcttcgacttacccgccttcgaagacatgctcaaagagtggactcgctcgggtgcactgcaaaccgaaatggccaacaaactcgacgaatggttcgaacagggactgcagcaatgggatattacccgcgatgcgccttactttggctttgagatcccagatgcaccgggcaaatacttctacgtatggttagatgcgcctatcggctacatgggctcattcaaaaacctctgtgacaaacgccccgagctgagctttgacgaattttgggcaaaggattctaaggccgaagtttaccactttatcggtaaagatatcgtttacttccacagcctgttctggccagccatgcttcatggctcgggctaccgtcaacctaacagcgtctacgcccacggttatgtgacagtgaacggcgctaagatgtctaaatctaagggcacctttattaaggcgcgcacctatttagaccacttagaccctgaatacttacgctactactacgccgcgaaattgagcagccgtatcgacgatctcgacctgaatttagaagacttcgtacaacgcgtaaactcagacttagtgggtaagttggtgaatcttgcgtctcgcaccgcgggctttatcactaagcgtttcgatggcaagttggccaaaattgccgacactacgctcacggatgcgtttttagctaagcaagaacaaattgccgagttctatgaaacccgcgaatacggtaaagcgatgcgcgaaatcatggcgctagccgatatcgccaacggttttgtcgccgatgcagcgccttggcagttagtgaagcaagacgatcaacaggaagcggcgcaccaagtgtgctcgaatgccctgaacctgttccgcattctggtcacttacttaaaacctgtgttaccacgtttagcgttggatgttgaagccttcttccaacagaccttaacgtgggatagcttgggccaagatatggcgggacacaaaattgcaccgttcaaagccatgatgcaacgtgttgaattagacaaggttaacgctatggttgccgactctaaagaaaacctgcaagccacgagcgagccagaagcacctaagggcccattggcgaccgttccaattagcgacaccatcaactttgaagatttcgctaaaatcgatctgcgtattgcgcgtatcgtcaaagccgagcatgtggccgaagccgacaaactgttaaaactgcaattggatatcggcggcgaaactcgtcaggtatttgcaggcattaaatcggcctactcgcctgaggatctcgaaggtaagctgacagtgatggtcgctaaccttgcgccacgtaagatgcgttttggcatgtcagaaggcatggtactggctgctggccctggtggcagtgatttgtggattttagaaccccacgaaggcgcacaacctggcatgcgtgtgaagtaag

SEQ ID NO: 296679 - DNA, 1255 bp, Unknown
  Bacterial polypeptide expressing nucleotide sequence isolated from the Sargasso Sea
actggagaaaagacattctaaatctgttgaaaatctctggagtattttagaaaaaaaaggtgaaatctatttatctaagtactctggttggtattctgtatcagatgaagcattttatacagaaagtgaaattgaagatttagatggtactaaaaaatcaattagttcaggttcaaaagtagagtgggtagaagaagaatcttatttttttaaattatcaaactggcaagataaattaattgagttttataataaaaatccagattttatactacctgaaacaagaaaaaatgaagttatcagttttgttaaatcaggattaaaagatttatcagtaagtagaaaatcgtttaattggggtataaaagttccatctaataagaaccatgttatttatgtttggttggatgctttaacaaattatctaagtgctttaaattacccaaatgaaaacgatgatttgtacaaatctttttggcctgcagatctacatctaattggaaaagacatattaagatttcatgctatttattggccagctttcttattggccgcagacatagaacctccaaaaagagtatttggtcacggatggatactttctggtgatgaaaaaatgtctaaatccaaaggtaacattttagacccacttgagattatagaatattatggtctagatcctttaagatattatttaatcaaagaagtttcatttggtaatgatggaaatatctcacaagaaaaattagagtcttgtattaatagtgatttagctaataattatggaaatttgtgtcaaagagttttggcattttgtgataagaatgctaatttagaagttcctgatatagataatctaacagaggatgataagattattttagatcaatactctaaatattatgatgatttaataatgtattcagattatcaagatgtaaattcatacatcaattttattgttgaacaactattttcagcaaataagtattttaatgatcaagaaccctggaaaaaaaagaatgataaattaaggatgaatacaattatttatgttgctttggaactaataagaaaagtaaccatattactttatcctattataccatcatcatcccttaaagttttaggtatatttggtataaaagaggaaaaaattaattttgaaactataaaagaaaacaattatctaaaaaaaggcctcaaattgaataaattagatattttatttaaaaagattgaaaaaaatgattga

SEQ ID NO: 296680 - DNA, 829 bp, Unknown
  Bacterial polypeptide expressing nucleotide sequence isolated from the Sargasso Sea
tatttcttcgacctgcctgcctttgagcaaatgctcaaagactggacccgcagtggttcattgcaggacgaaatggcgaacaaactgcaggaatggtttactgaaggcctgcaacaatgggacatcagccgcgacgcaccttattttggttttgaaattccaggcgcacccggcaagtttttttatgtctggctcgacgctcctattggctacttagccagctttaaaaactactgtgataaaaccggcgtcaactttgaccagttctggcaaaaagactcagacgctgagatttaccactttatcggcaaagacattatctatttccacagcttgttctggccggctatgttagatggcgctggttaccgtaaacctacttctgtgtatgcgcacggttttgttactgtcaacggcgccaaaatgtccaagtcacgtggcacctttatcaaagcccgtacttatctggaacatttaaacccggagtatctgcgttattactttgcgtccaagctcaccagcaatatcactgacttagacttaaatctggaagactttgcgcaaaaagtgaatgcagacttagtaggtaaagtggtgaatatcgccagccgctgcgccagctttatcagcaaaaaattcgatggcaagttaacagcagacattgcagaacctgctttattagctgaatttacggctgcaggcgaaaccattgccgaaagctttgagaaacgtgaatttgcccgtgctatccgcgaaattatggcgctggccgataaagccaaccagtatatagatgccaaagcgcccttgggtgctggcaaaaaatgaa

SEQ ID NO: 296681 - DNA, 1543 bp, Unknown
  Bacterial polypeptide expressing nucleotide sequence isolated from the Sargasso Sea
aatggataaaaattattatattacaacacccatttattatccctcagcaaaaccacatatgggacatgcttattcgagtattattgctgatttttttgccaggtttaaaagaatagatggatataaagtttattttctgactgggactgatgaacatggtttaaaaattcaaagagctgctgaaaaaaaaggagttgaacctctagcgttctgcgatgaaattagtaaaacattcaagaatttgtcaaaaactttgaatttaacaaataatgatttcataagaacaactgagtctcgacataaaaaatctgttcaatatttatgggaagaattaaaaaaaaatgatgacatttatttatcaaaatattctggttggtattcagtatcggatgaagcgttttacaatgaggatgaaattgaagatcttgataataaaaaagtggccatatcatctaaatctcctgttgaatgggttgatgaggaatcttatttttttagattatctaagtgggaaaaggcattattagaattttatgaaaaaaatcctgattttatttctccagcatcaaggaaaaatgaagtcataagttttgttaaaaatggattaaaagatttgtcagtaagtagaaaaagtttttcatggggtattaaagttccaaatgatgatgatcatgtcatatatgtatggttagatgctctcactaattatataagtgctttaaattatcccaataaagatgatgaattatataaaaaattttggccagcatctgttcacttgattggaaaggatatattaagatttcatgcaatatattggcctgcgttcctattggccgcaaaaattactcctccaaaaaaagtttacggacatgggtggatattatctaatgaggaaaaaatgtctaaatcaaaaggaaatatattggatccattagaaattataaaacaatatggattggatcctttgagatattatttaataaaagaagtttcatttggaaatgatggtaatatttctcaagaaagattagaggattgtattaacagcgatctagctaataattttggtaatttatgtcaacgtgtatctgcatttgctataaaaaattgtgatagtaaagtgccagaaaaaattaaatttgaaaatgatgatataaaaattttagatgaatatagtaaaaatttaaacaatttaagatcagaaatagataatcaaaatattaactattatattgattatattgtaaatcgattatttgaagccaataaatattttaatgaccaggagccgtggaaaaaaaaagatgataaaattaggttaaatacaatagtttatacaactcttgaaattgttagaaaagtaacttttttattatatccaattattccacaatcatctattaaagcactaaaaattttcaatcttgaagaaaaagatgtaacttttcagtcaattggaaataatgaatttttaaaaaaaggaagtgctattaataaaattgatatattatttaacaaaatagaaaaagagaatgattga

SEQ ID NO: 296682 - DNA, 820 bp, Unknown
  Bacterial polypeptide expressing nucleotide sequence isolated from the Sargasso Sea
atgtcaaataataacaatcttctaatcgtaacttctgctctcccttacgcaaatggaccacttcattttgggcatttgcttgaacacatacagactgatatttgggtaagaacaaatcgatcgcttaataaaaagtgtatctacttatgtgcaagcgatgcgcacggtactccgataatgcttaaggctgaagaagaaaatacaactccggaaactcttatcaagaaaattacaactgagcaaaaacaatctttaataaatttcaatatagttcatgacaattactacactactcactcagaagaaaataaatattttagcgagttaattttcaataaagcagatactaaaaaattaatcttaagaaaagaaatagaacaactttttgatgatgagaaaggattatttttagcagatagatatgtccaaggtatttgtcccaaatgtggggcaaaagaacaatatggggacaattgtgaagtttgtggcgcaacatatgaagcaacagagcttattgaaccagtatcaatctttacgggtaacactccttctgtaaaaaaaagtgaacatttattttttgatctggagtcttgtagcaaaagccttaaagattggatcaataaaaccggtcttcaatcagctgtcaaaaataaaataaaagagtggtttaccgacggtttaaagccttgggatattagcagagacaaaccttactttggctttatgattcctggctatgaagacaaatacttttatgtatggttggatgcgccccattggttatattgcgagcttagaaaattacttgaaacgtggtaaa

SEQ ID NO: 296683 - DNA, 1381 bp, Unknown
  Bacterial polypeptide expressing nucleotide sequence isolated from the Sargasso Sea
tcagaaaatagagcgcgctgcaaaacaaaataataaggagccaataaccttttgtgatgaaattagccaaacctttaaaaatttatctaaaactttaaatctatctaataatgattttataagaacaacagaaaccaggcataaaaaagctgttcaacatttatggaatatccttgaaaagaaaggtgaaatatatttatctaaatattctggatggtattcagtttctgatgaagctttttatagtgaggatgaaattgaagaagtcgataatattaaaaagtcaaaatcctctggatcattggtagaatgggtagaggaggagtcttatttttttaaattatccaattggcaggaaaggctattagatttttatgaaaaaaataaggattttattttacctatatcaagaagaaatgaagtaattagttttgttaaaagtggactaaaagatttgtcagtgagtagaaagtctttcaagtggggaataactgtaccaacaaatgaaaatcatgtcatttatgtttggttagatgctttgactaactacatcagtgcattaaactatcctgatacttctcatgatttatataagaaattttggccagctaatttacacataataggtaaagatattctgagattccatgcagtttattggcctgcttttttgttggcagcggatattaaaccaccattaagagtttatggtcatggatggattcttgcgggagatgaaaaaatgtcaaaatctaaaggtaatatacttgatccactagaaataattgataaatatggacttgatccattaagatattacctaattaaagaagtatcatttggtaatgacggaaatatctcaaaagaaaaattagaaaattgtattaatagcgatttagcaaataattttggcaacttcattcagagggtagtatcatttaatgaaaaaaatcttggattaaaaattcctgaaaaaggagattttactaaccaagatttaaaaatactttctgtttttgagaaagagtacaataatttagttaattttatagacactcaaaacttgaacctttatataaattttatagtggataatctttttgctgctaataaatattttaatgatgaagaaccttggaataaaaagaatgatctcaaacgattgaatactatagtttacgtagcattagaattaattagaaaatttgctttattattatatccaattacaccagagacatctttaaaagttttaaaaatttttgatatgaatgtaaatgatattcagcttgatacaattaaaaatcatgaattaaacaaaaaaaatgcaaaaataaataaaattggaatattatttaagaaaatagataaaaatgattga

SEQ ID NO: 296684 - DNA, 1405 bp, Unknown
  Bacterial polypeptide expressing nucleotide sequence isolated from the Sargasso Sea
atggataaaaatttttatattacaacaccaatttattatccatcagctagaccacatatgggtcatgcttattccagtataattgcagatttttttgctagatttaagagaatagacggttttaatgtttattttttaacaggaacggatgaacatggtcttaaaattcaaagagctgcagaaaaaaatggtattgagacatctaaattttgtgatgaaataagtaaaacttttaaagatttatctaaaacattaaatcttacaaacactgattttattcgaacaacagaacaaagacataaagaatcagttcaacacctatggaatgagttaaaaaaaaatgatgatatttatctttcaaaatattcaggatggtattctgtatctgatgaagctttttattcagatgaagaaatagaggaaatagacggaaaaaaacaatctatttcgtcaaaatcatcagttgaatggatggatgaagaatcatattttttcagattatctaaatgggaaaaacctttattggatttttataaagaaaatcctgattttatctctccggagtctagaaaaaatgaagtaattagttttgttaaaagtggtcttaaagatttatctgttagtcgaaaaagtttttcgtggggcatcaaagtgcctaatgataatgaccatgttatttatgtatggttagacgcattaacaaattatataagcgctttaaattatccaaataaagatgatgatctttacaaaaaatattggcctgcatcagttcatttaattggaaaagatattcttagatttcatgcaatttattggccagcttttttgttggctgcaaagatagagcctccaaaaaaagtttatggtcatggctggatactttcaaatgatcaaaaaatgtcaaaatcaaaaggaaatattttagatccgcttgagataattaatgaatatggattagatcctctaagatattatttaataaaagaagtatcttttggaaatgacggaaatatctcacaagaaagattagaagattgtattaacagtgacctagcaaataattatggaaatttatgtcaacgagttattacttttgctataaaaaattgcgaaagtaaaatccctgaaaaagtaaaatttgaaaaagaagatttagatattttagaaaaatttagtaaaaatttagctttaattagaaataagatagatgatcaagatataaatttttatatagattttattgttaattctttatttgaagccaacaagtattttaatgatcaagagccttggaagaaaaaggatgatattactcgattaaatacgatagtatacacaacattagaaattgttagaaaaattagttttttattatacccaattatacctgaatcaactttaa

SEQ ID NO: 296685 - DNA, 1499 bp, Unknown
  Bacterial polypeptide expressing nucleotide sequence isolated from the Sargasso Sea
aatgaacaaaaaagcaataatcacaagtgcactaccatattcaaacggtgaaatacatcttggtcatgttgcatccacatacctgcctgctgatgtcaccactcgtttcttaaaacaaaatggtgttgaagcctattacgtctgtgcatctgatgattttggaactcctatactaatacaatctgaaaaattaggtaaaactcctgaggaatatgttgaacattggaataaacgtgattatgaagatttcaccgcttttgatatcggatttgactttttctacaaaacaagttcggaagaaaatatagcatttgtccaagatgtcttcaaaaaaattgaaaaaaatggacatatctacgaaaaagaaattatccaatctttttgtacttcttgtgacaaattccttccagaccgatttgtaaagggaacttgcccattttgtaatgctgaagatcaatactctgatttatgtgaaaaatgtgggcgtattcctgaagaaattgacaatcctcattgttcaatatgtggtgaaacacctgtacaaaaatcaaccaatcattatttctttaaactgaaaaatttttctgaaccgcttttggaatatcttgaaaatgctccacatcttcaaaaagatgtaaaaaaatatgttgaaaattggattaaagaaggactagttgattgggatattactcgagatattccatggggagtgcctattccaattgatggattaaaagataaagtattctatggttggtttgataatcatctcgcgtacatttcttctacgttaaaatttcttaatgataaaaatattgacggcaaaagtttttggaatgatgctgacatttaccatttcattggtaaagatattgtctatcaccattatctgtttttacctgcaatgagattggggcttgaaaaagaattcaaattacctgattacattccaactcgtggtcatcttactcttgaaggcaaaaaaatatcgaaaagccgaaattggtatatcggcctaaaagatttcttagaaaaattccctgctgattatttacggttttatcttatatccataaatccatattctcaagacgatcttaattttgattgggaacaattttcaactaagattaattccgaattaattggtaatttgggaaatttggttaaccgtgctcttggatttacaaacaaaacttttgatggtgttgttcctgagcctgaaaaatttgatgaaaaagactctgagtctgaacaaaaaataaagtctcttgctgaagatattggcaaactaatggaagaaaatcatctggatcgtgcattaaaacaactaatggaattttctgctcatttcaaccaatacttccaacataaggaaccttggaaaaaaggacctggaactaacgcttgcatatatctatctgttaatgctgttcgttcaattgcaatatgtttacattcatttttaccaaaattcttcacaaaaaatatggtctcaa

SEQ ID NO: 296686 - DNA, 604 bp, Unknown
  Bacterial polypeptide expressing nucleotide sequence isolated from the Sargasso Sea
tatgaaaaatttttatttaacaacacctatttattatgttaatgacaaaccgcatattggccatgcttatacaacaatcttggcagatgtcattgcaagatttcatcgtaatgcaggagaaaaagttttatttctaactggccttgatgaacatggacaaaaggttcagcaagctgcaaaagatcgaaatataaagccaaaagaacattgcgatgatatggcgcctaggtttctagatttatgggaaaagcttcatattaattatgatgattttcttcgaacaacggaaaaacgtcatgaaattgtagttaaaaacattctacaaaaagtatatgattcaggtgatatatacgaagatatttatgaaggattatattctgtttctgaagaacgatttattactgataaagaagcagaatctggtgattttagagatataaagaaacttaaagaaaaaaattatttttttaaaatgtcaaaatatcaagatcgcctgattgattatattaaaaataatccaaaattcattcaacctgaacataggaaaaatgaagttctaggttttttgaatcaacctttagctgatttatgtattctagaccca

SEQ ID NO: 296687 - DNA, 1048 bp, Unknown
  Bacterial polypeptide expressing nucleotide sequence isolated from the Sargasso Sea
gaaagttatttttttaaattatctttatgggaaaaaaaattattagatttctacgaaaaatatccagattctatacaacctaaaacacgttataatgaagttattagctttataaaaagtggtttaaaagatttatccatttctagaactacttttaaatgggggattcctgttccaaataattcaaatcacgtaatgtacgtatggattgatgctttgtgcaattacctgacttctattggctatcctgatgtaaatgatagtaattttgtaaaatattggcctgcaacacatatagttggtaaggatattctaagatttcatgcaatatattggcctgcttttcttatggctgcagatattgagcctcctagaaaaatatttgcacatggctggtggactaatgaaggtcaaaaaatttctaaatctataggcaacgtaattgatccctatgatataattaataaatacggacttgatcaaattcgctttttcttattccgtgaagttccttttggaaatgatggtgatttttcaaaaaatgcaatagctaatcgtattaatgcagacctttctaataattatggtaatttagtccaacgcatttgtttatttgcagttaaaaactgtaattctttagttgatgtctctaaaaaatatactgattcagataatgaattactaaaattttgtgaatttaacttttcaaattattcgaattatatggaatctcagcaaattgataaagcattaaaaagtatatttgaaatattatctaaaactaattactatgttgatgaacaagctccatgggaattaaagaaaactaatgctaatagaatgaatgatgtattatttataactcttaacattataaaatttacttctttgatgttaattccaattattccaaatagtgcaaataaagttttagatatacttaatattaatttaaatgaaagaaattttagttttatgaatattaaaaatcaaaataaatttcaaattttaaatccaaaacctatatttccacgaattgataagtgat

SEQ ID NO: 296688 - DNA, 1195 bp, Unknown
  Bacterial polypeptide expressing nucleotide sequence isolated from the Sargasso Sea
catgatatcaaacgacatagatcttattaaaagaggaacagatgaaattattgatgaacaatctcttaaagataagttaaataaaggcatcccactcacagtaaaagccggttttgatccaacagctccagaccttcatttgggtcatactatccttttaaataaaatgaaacaatttcaagatcttggacataatgtaatttttttgataggtgattttactgcaaccattggtgatccaactggcaaatcagagttgcgtccaatgatgactgatgatgaaattaaagagaattgtaaaacatataaaaatcaggttttttcaattttagacagaaaaaaaactaaaattgaatataactcaaaatggttgaagaaaatatcagcatctaaactaattgaaattagtagttcttatagcgtttcaagaatgttagaaagggatgattttaaaaaaagatttaaacaaaatattagtatttcgataagggagtttttatatcctatacttcaaggttatgactctgttgaaatgaacgcagacattgaattaggcggtactgatcaaaaatttaacttattaatgggtaggcatttgcaatctattttttcaaagactaaagaaaagcaggttgtaattaccttgcctttgattgaaggcttagatggtgtaaaaaaaatgtcaaagtcactgggaaactacattggtattaaagataagcctgaagaaatgtatggtaagttgatgagtataaatgatgaattgatgtggaaatattttgaattactatcctttaaggatttagaatatattgattctttaaaaaaagatgttctatcagagaagaagaatccaaaaagtgccaaaatggaattagccagagaaattgtagacagatttcatggaccaagtaaggcaaaaaaagctgaaaaaaatttcataagcgtttttcaaaataaagcaaatccaagcttagattcaattgaatcttttgagaccgcacaactcccattaccaaatattcttagggatgcaaaagttttggctagtacaagcgaggcaaggagattaattcagcaaaaagctataaaagttgatgataaggtctttaattcgccaacggagcttatttcccaaggaacgcatttaataaaggttggaaaaaagaaattcctaaaaataaaagttaaataa

SEQ ID NO: 296689 - DNA, 1441 bp, Unknown
  Bacterial polypeptide expressing nucleotide sequence isolated from the Sargasso Sea
atgaaacgccatttaattacatcagcaattccatatatcaatggcgttaaacacctaggaaacttagttggcagtcagttaccagcagacttatttgctagatatcagagagctaagggtaatgaagtactatttctatgcgcgacggacgaacatggaacgcctgcggagctagccgctgaaaaagccggcataccaataaccgaatattgtgatgaaatgcacactgttcaatctaatttagctaaaggtttccgactttcttttgatcattttggcagatcttcaagtcagcaaaaccatagattaactcaacactttgcagcaaaactggcggaacgcggattggtaaacgagaaaacagaaaaacaagttttttcaaaccaagatcaacgttttttaccggatagatatatcgaaggcatatgtccaaattgtggttttgaagaagctcgcggtgatcaatgtgataactgcactaagcaacttcaaccgaatgagcttataaatcctcggtcaactatttccggatcaacagacttagaggagcgcgaaacaaagcatcttcatttacgccagtcgttaatgaaagaagaactagaaagctggattgacagtaaatctgactggccaattctgactacctctatcgcaaaaaaatggctcaatgatggagacggtttgcaagataggggaataacaagagatttaaactggggtgttcccgtaaaaaaaggtcaggaaaattggccaggtatggacggaaaagtattctatgtgtggtttgatgctccaatcgagtacattgcgtgtgctgaagaatgggttgatgctggaaagggagaagactggcatcgatggtggaaaatcgacaaaggagcagatgacgttatttatactcaatttatgggaaaagataatgttccatttcacactttgtctttcccagctaccatcctaggatctggagagccttggaaattagtcgattacataaaaagttttaattacttaaattatgatggtgggcagttctccacatctcgcaatcgcggtatctttatggaccaagcgcttgaaattctgccgccggactattggcgctggtggctcttgagccatgctccagaaagttccgattcagaatttacttgggaaaattttcaacaaacagtcaataaagacttagctgacgttcttggtaattttataagccgcgtcactaaattttgcagaagcaaatttggtgaagttgtacccactgggggagtttggtctcaaaacgaaaagaaactggtaaatgaaattgaaaaacgtgtcatgaactacgaaagttacatggaaagtaaagaaattagaaagtccgctagcgaacttagagcaatctgggcatgtggtaatgaataccttcaatctgctgaaccttggtcaacatttaaaa

SEQ ID NO: 296690 - DNA, 1546 bp, Unknown
  Bacterial polypeptide expressing nucleotide sequence isolated from the Sargasso Sea
tatgtcaggtaaaaatttttatattacaactccaatatattatccatccggcaagcctcatatgggtcacgcatattcaagtattattgctgatatatttgctaggtttaaaagattagaaaattacaatgtaagatttttaactggtactgacgagcacggtttaaaaattcaaagggaagctgaaaaaaattctaaactacctaaagctttttgtgatgagttatccctcaaatttaaaagtctaagcaaaacccttaatctctctaataatgattttattagaactacagaaaaaagacatcataaagcagtcaatgaaatctgggatagattagtaaagtctaatgatatttatttatcaaaatatagtggctggtattcagtttcagatgaagcttattatgacaatgatgaaattgagtcaaaaaataatattaaagttgctaaagtttctggatcaagagttgagtgggttgaagaagagtcttttttttttaaattatcttcctgggaaaaaaaattgcttgaattctatcaatcaaatcccaattttattcttccaaaatcacgtagaaatgaagtcgttgaatttgtaaaaggtggtttaaaagatttatctgtaagcagaacatcattttcatggggtatacctgtaccgaaaaataataaacatgttatttatgtttggcttgatgctttgacaaattatttaagttctttagattttccagatcaaaaaaatataaaatacaaaaatttttggccagctgatgttcatattatcggaaaagatatcttacgatttcatgcaatttattggcctgcatttttgatggctgctaaacttcctttacctaaaagagtttatggtcacggatggatattatcggatgaaaaaaaaatgtctaaatctcttggaaatattctagatcctttagaaattataaatgaatatggaatagatcctttaagatattatttagttaaggaagtttccctaggaaacgatggaagcatttctttaaaaagtttacatgattgtattaataatgatttggcaaacaattatggaaatttatgccaaagagtattttcatttgttgaaaaaaattgtgattcaaaaattccaaattatacaaatctctcaaaagaagacgaaattattacaaaaaatctcataaagaaaattcctgatttacaaaatttaatgaataaacaagatttaaaccaatatattaaagaagttataaatttttcttttagtgctaataaatattttaatgatctaaagccctgggacttgaaaaaagttaatatagagaggatgaatgcagttatttatactgtactgaatcaaataaaatctattagtatactattatatccaataatacctgattcaacccaaaaagtattagactgtcttagggtaccaaagaatgagtttaatcttgattgtctattaaattttaaatatttaaaaatggatttaagtattaaaaaacccggtatcttgtttaagaaaattgaaaatgataattga

SEQ ID NO: 296691 - DNA, 1534 bp, Unknown
  Bacterial polypeptide expressing nucleotide sequence isolated from the Sargasso Sea
atgactgattcattctatattagcactgcaatatcttataccaatggctctcctcatataggccatgcttatgaggtaatagccgctgatgtaattgcaagatttaaaaaattggatggatatgatgtcttctttttaactggaaccgatgagcatggtttaaaggttcaacaaaaagcaaaagaattaggcattaaccctaaagattttgttgataaagtatcaaaagaatttattgaattagctaaatctttaaattgttcatataatgattttataagaacaactgatgacagacataaaaaaaatgtccattcaatttggaagaatctttccgataaaggggatatttatctcgatcaatattctggatggtattcaataagggatgaggcattttataacgaagaagaattggtaaagtctgataatgattcatatttgtcacctaatggcaatcccgttgaatggattgatgaagagagttatttctttaaattatccaaatatgaaaaacaattattagatctctatgaaaaaaataaaagttttatacttccaaattcgagaatgaatgaaataaaaaattttgttcaatccggtcttaaggatatttctatttcaagaaaaaatatttcttggggaattccagttgaagagaataatgagcactccatttatgtatggcttgatgcgttgactaattatatttctgcacttgattggtgtgaaggaagtaaatcttttgataaatattggcctgccgatattcaccttattggaaaagacatcactagattccatgcagtttattggcctgcatttcttttttcagctggacttgaagttcctaaaatgattttttctcatggctttcttcttaataagggtgaaaaaatatcaaaaagtgttggaaatactgttgatcctattaagttattagagttatacggtgttgatcaattaaggttttacttactttcagcaactccatttggaaatgacggtaattatagccatgaacttattgtcaatcattcaaatgcattattatcaaatgatttaggaaacctatctcaaagatgccttaaaatggtattttcaaaatgtaatggaagaatacctaataaaggtgatctagataacaatgatttatctctattaagtaatgcttatgatctatatcaaaagtctcttgaatgtatggctgattatcagatccatgcttatttaaattctatttttgatgttatttcgttggcaaataagtattttagtgaccaaaaaccctgggaacttgataaagataatcccgatagaatgcatactgttctatgggttacttgtgagatccttcgcattacttcaatattattgcaacccgttattgttgatggttccaataagcttttagatttcttgaatattgattcaaaagaaagatcttttatcaatttaaattctagttttgcagttaaatcaggattggagattaaggagccagaagttattttccctaaaattaatttgtaaa

SEQ ID NO: 296692 - DNA, 1057 bp, Unknown
  Bacterial polypeptide expressing nucleotide sequence isolated from the Sargasso Sea
atatttttttagactttcaaagtgggaaaaaccgttattagaatattatgaagctaatccagattttattgctccacaatctaggaaaaatgaagttattagttttgtaaaaagtggtcttaaagatctttctgttagtagaaaaagtttttcatggggcatacctgttccaaataataaaaaccacgttatatatgtttggctcgatgctttaacaaattatttaagtgcattaaattatcctaatataaatgatgatttgtttaaaaaattttggcctgcatcaatacatttaattggaaaagatatacttagattccatgctgtttattggcctgcctttttattagcagcaaaaattgctttaccaaagagagtttacgggcacggatggatattatcaggggaagaaaaaatgtctaaatctaaaggaaatattcttgatccacttgaaataattaaagagtatggtctagatcctttaagatactatctaattaaagaagtttcttttgggaatgatggaaatatatctcaagaaagactagaagattgtatcaatagtgatttagccaacaattatggaaatttatgtcagcgtgtaacagcttttgcaataaaaaattgtaatggaaaaattccatcagaggttaattttcatgatgaagatttattaatactaaataagtataaagataatttagataatattaggtcacaaattgacaatcaaaatatgaatttttacattgattatattgtaaattcactttttgaagctaataaatattttaatgatcaagaaccatggaaaaagaaagacgataaaattagattaaatactattgtttacactactttagaaattgtaagaaaaataagttttttactatatccaattattcccgaatcttctttaaaggcattaaagatttttaacattgaagaaaaaaatattaaattaaactcagtttcaaataatgagtatttaacaaaaggaaataatattcataaaatagacatactttttaaaaaaatagagaaaaacaatgattga

SEQ ID NO: 296693 - DNA, 757 bp, Unknown
  Bacterial polypeptide expressing nucleotide sequence isolated from the Sargasso Sea
gatggctgatccattctacataagcacggcaatatcatatacaaacggccccccacacattgggcatgcttatgaagttattgcagcagatgctatcgcaagatttaaaagattggatggatatgatgtttttttcttaactggaacggatgaacatggcttaaaggttcaaaaaaaggcacaagaactgggtattgatcctaaaaaatatgtagatgaaatatctaaagaatttattcaattgtctttatctttaaactgctcaaatgatgatttcataagaactacagatgaacgccatgtaaaaaatgttcaatcaatttggaaaattcttttcgataaaggtgatatttatcttgatcaatattcaggttggtattcgattacggatgaagctttttataacgaagaagaattaataaaaaccgagagtaattcgttcttatctcctgatggaaacccagttgaatgggtagatgaagagagttattttttcaaattatctaaatatcaaaatgacttattagaactttatgaaagaaataaaaaatttattcttccaagctcaagaatgaatgaaattaaaaactttgtaagatcaggtcttaaagatatttcaatatcaagaaaaaatatttcatggggaattcctgttaaaggaaataaagatcactcaatttatgtttggcttgacgcactaactaattatatctctgcgcttgattggtgtgataacaatgagtcatttaaaagattt

SEQ ID NO: 296694 - DNA, 2032 bp, Unknown
  Bacterial polypeptide expressing nucleotide sequence isolated from the Sargasso Sea
atggcaacttcacaacgtaaaattctcgtgaccagcgcacttccctacgcgaacggaccgattcatttaggtcacatgctggaatacatccagacggatatctggtcgcgttatcaaaaacttcgtggacatgagtgccactatatttgtgccgatgatgcccacggcacaccgattatgctcaaggcgcagcaattaggtatggcgcctgaagaaatgattgctcaagtcaacaaagagcatcagcaggatttcgccgattttaatatcgccttcgataattatcacagcacccacagtgacgaaaaccgcgtgctggcgagcgatatttacttaaaactgcgcgctaatggctatatcaaaagcaagagcatttctcagctatttgaccctgagaagtcgatgttcctgccagaccgcttcgtcaaaggcacctgccctaagtgtaaatcgcccgatcaatacggcgacaactgtgatgcctgcggcgcaacttacagcccaactgagcttatcaatccaaaatcagcggtatcgggtgccacgccagtgatgaaagacactgagcacttcttcttcgacttacccgccttcgaagacatgctcaaagagtggactcgctccggcgcactgcaaaccgaaatggccaataaactcgacgaatggttcgaacaaggcctgcaacagtgggatatcacccgtgatgcaccttactttggttttgagatcccagatgcaccgggcaaatacttctacgtttggttagatgcgcctatcggctacatgggctcattcaaaaacctgtgtgacaaacgcccagagctaagctttgacgaattttgggcgaaggattctaaagcagaggtttaccattttatcggtaaagatatcgtttatttccacagtctgttctggcctgcgatgctccatggatcaggctatcgccagccaaacagcgtctatgcccacggttatgtaacggtgaacggcgctaagatgtctaaatctaaaggcacctttattaaagcccgcacctatttagatcacttagatcctgaatatttacgctactactacgcggccaaactcagtagccgtatcgacgatttagatttaaatctggaagatttcgcccagcgcgtaaattcagatctagtcggtaagctagtgaacttagcctctcgcaccgcaggttttatcactaagcgattcgatggcaagctcgcaaaaattgcggataccacgctaactgaggcgtttttagccaaacaagaacaaatcgctgagttttatgagacccgtgaatacggtaaagcgatgcgtgaaatcatggcactcgcggacatcgccaacggttttgtcgccgatgcagcgccttggcagctagtgaagcaagatgatcaacaggaagccgcgcaccaagtgtgttcaaacgcgctgaacctgttccgcattttggtgacgtacttaaaacctgtgttaccacgcttagcgcaagacgttgaagccttcttccaacaaaccttaacgtgggatggcttaggccaagatatggcgggccatgaaattgcgccatttaaagccatgatgcaacgtgttgagttagacaaagttgaagctatggtggccgactctaaggaaaacttgcaagccacgagcgagccagaagcaccaaaagggccattagcaaccgatcccattagcgataccatcaactatgacgatttcgctaaaatcgatctgcgtattgcgcgtatcgttaaagccgagcatgtagccgaagccgacaaactgttaaaactgcaacttgatatcggcggcgaaacccgtcaggtatttgcaggcattaaatcagcctattcgcctgaggatctcgaaggcaagctgactgtgatggttgccaaccttgcaccacgtaagatgcgttttggcatgtcagaaggcatggtcttggcagcaggccctggtggcagcgatttgtggattttagaaccccatgaaggtgcacagcctggtatgcgggtgaagtaat

SEQ ID NO: 296695 - DNA, 1981 bp, Unknown
  Bacterial polypeptide expressing nucleotide sequence isolated from the Sargasso Sea
atgagaagaatagttgttacaagcgccctaccttatgctaatgggtctatccatttaggtcatcttgtagagtatatccaaacagatatttgggctaggagccaaaaaatggctgaaaatgaatgtctgtatatctgcgcagacgattctcatggaaccccaattatgctcaaagccaaagaacttgaggtcactcctgaagaattaataaaaaaaacatatgatgagcatgtaaaagattttaaagattttcaaatcgaatttgataactttcacacgactcactctgatgagaataaaaagatatccgaagaaatatataaatccctcaaagataaaggaaatatcataagtaaagaaattgaacaattctatgataatgaagctaagatgtttttgcctgatagatttattaaaggtgagtgcccaaagtgtggtgctaaagatcaatatggtgattcatgtgaagaatgtggcgctacatactcaccaaccgatgtaaaaaatcctatctcaacagtttcaaatacaacacctgttagaaagaaaacggaacacgtcttttttcagttgagctcatatgagtcatttttaaaagattggatgcaaaataatgatattcaaagagagattaaaaataagcttagtgagtggcttgagggcggattagttgattgggacataactcgtgataagccatattttggatttgaaattcctgaccttaaagataaatacttttatgtatggcttgatgcgcccattggatacatagcatcacataaaaactattgcgataaaaatgaaaaaaattatctagatgattggaaagaagattctaaaactgagctctatcatttcataggaaaagatattgcctattttcatggactgttttggccagcaatgcttgaaggagcaggtcttaaaaaacccaatggggtcttttgtcatggttttcttacaattgatggcgagaagatgtctaaatcacgcggaacatttttcaatgcaagaacttatctaaatcatctccaacctgattatttaagatattatttctcaagtcgtctcacaagcaaaattgaagatattgatttaagttttgatgatttcatgacacgtgtaaattctgatctagttggcaaaataataaatatcgggagtcgctgcgcaaaattcattaataaagattttaatgaccaactttcaaaggagattggaaataagttattgcttgattcattgctatctaaaaaagatgaaattattgctaattatgaatcaaggaacttcgcaactaatatcagaatcattacaagtttaagtgacgaagtgaataaatatcttgatgaagaaaaaccttgggtaaaaataaaagatcaagatactaaagagtcagtccaaaccatttgttcagatggtattaatgcatttcgtatgatcatgacttatctaaaaccagttcttccagagattgcaagtaaagttgaatcgttgctgaatgcagatccgttcaactatcaaaatatttgcaatataattttagatcataaaattaatgcatttgaaccattgataactagaattgaaaaagagagtatagagaaaatgaaagatgaaaataaacaagaaagtactgtatctgaaggtacagataaaatcactatcgatgattttataaaagttgatttgcgtattgcaaaagtcataaatgtaaaagaaattgaagattcaagaaaactactagaacttgaggtagatttaggtgacgagactaggacggtttttgcaggtataaaaaaatcctatagcccagatgaattaattggaaaatcagttgtcgttattgctaatttgaaaccaagaaagatgaaattcggtgtatcaaatggaatggtcctagcaacacagcatgatggtgaaatcattatacttcagcctgaaaaagatgttcctcccggttcaaaaatttcttgaa

SEQ ID NO: 296696 - DNA, 1069 bp, Unknown
  Bacterial polypeptide expressing nucleotide sequence isolated from the Sargasso Sea
atgtcaaaaaatgtattagtttgtgtggcttggccatatgcaagcgggtcaagacatctaggccatattggtggagcatatctgcctgctgatatttttgcaaggtaccacagagctgttggtaacaatgttttaatggtgtcaggaagcgacgttcacggtaccccaataactgtaagagctgatgcagaaggtgttcaaccaatagatattgtcaataagtatcacaatgaatttttggggtattgggaaaaacttggtatttcttgggataactatacaacaacaatgactgataatcataaagaagttactcaggaaatgttcttaaaaataaaacagaatggctttattgaaaaaaataaaagtatccaggcttttgatccacaagaaaaaaagtttttacctgatagatatgtagagggcacttgtccttgtcctgttgcttatagtgaagcaagaggtgaccaatgtgatagctgtggtaaaactcttgatccagaagagttaataaatcctataagtaaaatatctggaaacaaagcagaatttaaagagactgaacattattttttaaagttaagtgctctaaatgagagactttctgattggttaaatagtaaagaaggttggagacctcacgttataaacttttctaaatcatttgttgaagaaggtctacaagatagagctataacgagagatttagactggggaatcgacattccagaaaatgaattaggtgatggaaaaaaaatatacgtatggtttgaagctgtaattggttatttatctgcagctaaagagtgggcaataaacaatggcacacctgatgcatggaaagatttttggatgaatgaggatgcagagtcttattattttgttggaaaagataatgttccttttcatgcaataatatggcctgccatgttacttgcatatggtgatttgaacctaccaacaaatgttccggcaaaccagtacatattgattaaaggtgaaaaggcatctgcaagtaggggtgttggaaaaactttgaacgattatcttgatgaatggaatccagatt

SEQ ID NO: 296697 - DNA, 1543 bp, Unknown
  Bacterial polypeptide expressing nucleotide sequence isolated from the Sargasso Sea
aatgggtaaaaatttttacatcacaacaccaatatactacccctctgcaaggccacacatgggtcatgcttattcaagtattattgctgattttttttcacgatttaaaactattgatggttacaaagtttatttcctaactggaactgatgagcatggacttaaaattcaaagatcagcagagaaagaaggtctagatcctcttaatttctgtgatcaaattagtaaaacttttagagatttatctaaaactttaaatttatccaatacagattttatacgaactactgaagagcgacataagaaaacagttcaacatttgtggaaagaactagaaaataatgatgatatttatctttccaattattcgggatggtactctgtttcagatgaagctttttataatgaagatgaaatagaagaagtagaaggtaaaaaaatttcaattagttctaaatcaacggttgaatggatagaggaggagtcatatttttttagactttccaaatgggaaaagcccttattagatttttatgaaaaaaaccctaattttatttcacctgcatcaagaaaaaatgaggtaataagttttgttaaaagtggtcttaaagatctttcagtaagtagaaaatctttttcatggggaattaaagtccctgggaatgataaacatgttatttatgtttggcttgatgcacttactaactatataagtgctttaaattaccccaataaagaagatgaattgtttaaaaaattttggcctgcctcaatacatttaattggtaaagatatattaagatttcatgctgtatattggccagcgtttttattagctgctaaaattgaactaccaaaaaaagtttatggtcacggatggatactttcgggggatgagaaaatgtctaaatcaaaaggcaatattttagatccattgcaaattattgatgaatatggtctagatccattaagatattatttaataaaagaagtctctttcggcaatgatggaaatatatcccaagatagattagaggactgtataaatagtgatttagcaaataattatggaaatttatgtcaacgtgttactgcttttgcaataaaaaattgtgatgggaaaataccagaaaaaataaaatttgaagtagatgatttaaatattttaaataaatttagggacaatttagaaaatattagatctaatatagaccaacaaaatttaaatttttatattgactatatagttaattcactttttgaggctaataaatattttaacgaccaagagccatggaaaaagaaagacgatattattagattaaatactatcgtatttactgccttggaaattattagaaaaataagttttttactctatccaataatcccaggatcagtattaaaggctttaaaaatatttaatcttggtgaaaatgacattaaattagaagacatatctaaaaatgaatttttaattaaaggaaatagtataaataaaatagacatactttttaaaaaaatagaaaaagataatgattga

SEQ ID NO: 296698 - DNA, 1042 bp, Unknown
  Bacterial polypeptide expressing nucleotide sequence isolated from the Sargasso Sea
atgcccaaaacccgccgaatactgattacttcggctctcccgtacgccaacggtcatattcatcttgggcatctagtcgaatatatccagacagatatcttcgcacgattccaacgacttcgtgggaatcaagcggtttacctgtgtgctgacgacacgcatggtacagccatcatgatcagagcgcagaccgaaggacgtactgaacacgacctcatcgcttcaatgcgagatgcccatttggctgacttcgaaggcttccacatcacctttgatcattatggatctaccgacagtgaagaaaatcgttggttgtgtagccacatctggcaatctcttcgaaagcacgatttaattgttcagcgagaggtgagtcagctcttcgatctcaaagccggcatatttcttgctgatagatttgttcaaggtagttgtcctcggtgccacgctcctgatcaatatggcgattcatgtgaaacctgtggcgcaacatactcgcccgccgaactcataaaccctgtcagcactctctctggcacaacacctgagatacgaaaagcggagcacctctttgtcacgctggaaagccttcggcctttcctcacgaaatggacacaggaatctggatctcttgatccaaaaatctcaaattatcttgcagggcattttcttaatgagcctctgcgagactgggacatctcacgtccatctccgtattttggttttgaaattccggatgcgcctggccattattggtatgtctggttcgatgcacctattggctatatcgccaccaccgaacaatgggccaaaaaacatggcgggtcatttgcagactggtggtgctcgggtgatacaaaccagcccaatgcagaaattcaccatttcattggaaaagacatcacctactttcacacactgttctggccagcaatgcttaaaattgcagatatgaacctgccaacaaaggttcgtgtccatggttttctgactgtgaatggtcaaaaaatgtcgaaaagtcgtggcacattcctcttggctc

SEQ ID NO: 296699 - DNA, 1501 bp, Unknown
  Bacterial polypeptide expressing nucleotide sequence isolated from the Sargasso Sea
atgaagccattttatattactacaccaatatattatgtaaatgacaagcctcatattgggcatgcatataccaccattctggcagatgtattagctagacactatcgaaatattggcagggatgttttccttcttacgggccttgatgagcatggacaaaaggtgcagcaggcagcagaatcaagaaatataaaccccaagcaacattgcgatgaaatggcgccacgatttttaaaactgtgggataagcttcacataagctacgatgatttcattcgcactacagaaaaacgtcataccgatatcgttaaatattttcttcaaaaagtttacgacaaaggagatatttatgaagacagttatgaaggcctttattcggtatccgaagagcgatttattactgaaaaagaggctgagtccggagactttcgagatattaaagaattaaaagaaaagaattatttttttaaaatgtcaaaatatcaaaataaactgataaaacacattgaagaaaacccaagttttattcagcctaaatttcgaagaaatgaagtacttggttttttaagatctcccctacaagacctatgtatttcacgtccaaaatctcgtttgagctggggtattgaaatgccttttgattcaaattatgttacctatgtttggtttgatgctcttatcaattatgtatctgcaataggacttaatagtgacgaaaaaaaatataaaaccttctggccagtaaattatcatttgataggaaaagatattttaaccacccattcagtttattggcctacaatgctaatgtcagctggaattaaactacctaagagtatttttgctcatggatggtggttaagtgatcaatcaaaaatgagcaaatcattggggaatgttattgatccattaaaactaattgaaacctatggcgttgatcctgtcagattttacctgatgaaagaaatggttcttggtcaagactctaatttcagtttggattcatttgtaaaatgttataatagcgaccttgcaaatgattttggaaatctgttaagcagggtaacaaatttgataaataaattttatgataggaaaatacctaatggagaagataattctgaagcaggtaaagcggttagaaaaagcgccagagaaatggttgcttgcgttttaaacctcattgatgaaatgaaaataaatgatgccattaaccatacttttaaatttataagagaggtaaataaatatcttgagattacagcaccctggaagcttcttaaaaaagatatagatagcgcaggcaagattttatataccgcagctgaatccttacgcataactgcattaattttatctccgattatgcctaatagagcgcaaactattttcgatatttttcatattgattcgaatgaaatagaatggggtggtttaattgcgggcacaaaaatagaagttcacaaacctctttttcctagaattgaaacaaattcataaa

SEQ ID NO: 296700 - DNA, 445 bp, Unknown
  Bacterial polypeptide expressing nucleotide sequence isolated from the Sargasso Sea
gatgtcaaataatactgaaaaaagaaatattttagttacaagtgccttgccttatgcaaatgcaccgctccatcttgggcatattttagaacatacacaaacagatatatgggtaagatatcagaaattgattggaaataattgcacttacgtttgtgctgatgatgctcacggcacgccaattatgttaaaagccgaagagttaaataaaactcctgaagagttaattgaagaaatctatgtaaatcatgtaaatacatttagttcatataatattggtcatgataattttcataccactcatagcgaagaaaatagaattctttctgaaagaatatttaatgctttagatgaaaaagggttaattgaagttaagacgattgaacaactctatgacacttcaaggaatatgtatctttctgatcgttatgtcaaaggcaaatgt

SEQ ID NO: 296701 - DNA, 1492 bp, Unknown
  Bacterial polypeptide expressing nucleotide sequence isolated from the Sargasso Sea
tatgaataacagtttctatatatcgacaccgatttactacgtaaatgataagccacatataggtcatgcatatactaccatattagcagatgtgatcgcccgtttttatcgtcagctcaattatgacacctttttcttaacagggttagatgaacatgggcaaaaggtgcaggaagcagcaagtaatcgaaaagtagagccacaagatcattgcaacgaaatggctccacgctttacggagttatgggaaaaactacatatttcaaatgatgattttataagaacaacagaagaaagacacaaaaaagttgttcaagaatttttgcagcttgtttttgataaaggagatatttataaagatgagtatactggattatattcagtttcagaggaaaggttcataacggagaaggaagctgaaagcggaatatttagggatataaaagagcttaaagaaattaattatttttttaaaatgagcaatttccaaacccaattgatagaacatattgaaaataataataatttcattcagcctgctcatcgaaaaaatgaaatcctcggttttttaaaacagccactatctgatttatgtatttctcgacctaaatcaagattgaattggggtattgaattgccttttgacgatgaatatgtaacgtatgtttggtttgatgcattaattaattatcttactgcaactggttatggagaagatgacttgtcctacaataagtggtggccagctgattgtcatcttatcggtaaagatatcttaactactcatgcagtatattggccaacaatgttgttatctgcagggattccacttccaaaaacaatttttgctcatggctggtggttaagtgattcatcaaagatgagtaaatcagtgggaaatgtagttaaccctcttgaccttatagaagaatatggtgtggaccccgttagatattatttgatgagagaaatggttttagggcaagatgctaattttacaatggaatcttttattaagagatataatagcgatctagcaaatgattatggcaacttattaaaccgagtctctactctaatcaagaaaaattatgatggtttaattcctgataaaggagaacaaacttcaagtgaggaagaaattataaaatcagcagaagcattattaaatggtatgagtaataagattaaagaaatgaaaattaatgattccattgaagatataatgaaatttgtaagaagtataaacaagtacatggaagaacaaaagccatggaagcttgttaaagacgataaagtaggcgctggaaccgtactatatacagctggagaatcaatgcgtgttgctaccattttattatcacctgttatgcctaataggtgtgcagaggtactgcatacatttaattctggaaagtcattagaatggggaggattaaaaccaggagtaaagttgaatgatcatgaaacactatttccccgcattcaataa

SEQ ID NO: 296702 - DNA, 1618 bp, Unknown
  Bacterial polypeptide expressing nucleotide sequence isolated from the Sargasso Sea
catgccaaaaaatattttagtttcggtagcttggccatatgctagcggttcaagacacctaggacatattggtggagcatatttgcctgcagatatttttgcaagatacaacagaatgattggaaacaatgtaatcatggtctctggaagtgatgtccatggaacacccataacagtaagagctgatgatgaaggtgttgagccaattgaaatagtaaatagataccatgcagaatttcttagctattgggaaaaacttaatattcaatgggataactacacaaccactatgaccgataatcacaaagaggtcacgcaggaaatgtttctaaaaataaaggaaaacggatatattgaaaaaaataaaagcattcaagcatttgatccaaaagaaaataagtttctaccagatagatatgttgaaggtgagtgcccaaaatgtaattaccttgaggctagaggtgaccaatgtgacagttgtggaataactttagatccagaagaattaattaacccaaaaagcaaaataaatggaaatcctgcagagtttaaagaaacagaacattattttttaaaattaagtgctttgaacgacaaactcgcagattggcttaatactaagaatggttggaggccacatgttattaacttttcaaaatcctttgttgatgaaggtttgcaggatagggcaattaccagggatttagattggggtatagagataccagataatgaacttggagatggaaaaaagatttatgtttggtttgaagctgtaataggttacttatctgcttcgaaagagtgggcagtgaacaatgggactccagaggcttggaaagatttctggctagatgaaaatgcagagtcttattattttgttggcaaagataacgtcccatttcatgcaataatctggcctgcaatgcttttggcttatgggggtttaaacttacctactaatgttccagccaatcaatacattttaataaaaggagaaaaggcatctgctagtagaggtgtagggaaaactctcaatgattatcttgatgaatggaatcctgattcgttaagatattctctcgcaagtattctcccagaacaaaatgattcagagatttctgaagacgaaatgataagaagaaataacgaagaacttgtggcagcatgggggaatcttgttcaaagagtcttttcacagtacataaataattttgatgatctagatacaacttttgagtatgaaaaaatagatgtagatcttatggaaggtgcaaaaaattgttttaagacaacaggagagatgattgaaaaagtagaacttaaatcttcacttcaaaatgtaatggcatatgtgaattcaataaatgcatatttaactgagactgaaccatggaaagttataaaagaagataaaaaaagagctagtgggatcttacattgtgcaatcacatcaattgatgcttgtgcaactatgtttaccccttttatgcctactacttcaaaaattgtaagcgatgctattcaaaaagaagatcaaaatagttgggggataaatgaaattaaaaaaggtgccccattaaagaatataggacacctttttaagaaatttgattag

SEQ ID NO: 296703 - DNA, 1257 bp, Unknown
  Bacterial polypeptide expressing nucleotide sequence isolated from the Sargasso Sea
aatgtcaaaaaataaagaaacttttacaattacagcagcacttccatatgcaaatggcccaatacatattggccatttagcaggtgtttatattcctgctgatatttttgctagatacaaaagacttacaaataatgatgttgcatttatctgtggaagtgatgaacatggggttgcgatttcattagcatctaaaaaagcttcaatctctccaaaagagttaattgataaatatgataaaatgatcaaggattcatttgatgaatttggaattttatttgataattattcaaggacatcaagtaaagtccatcatgaaacttctctaaatttttttgagaatcttaaagaaaaaaatcttttttcattaattaaatcagaacagtttttcgatgttaatgagaatcaatttttggctgatagatatatctctggtacttgtcctgtttgtggttttgatgaagcgtatggagatcaatgtgaaaagtgtggatcaactctgagtcctgaggaattaataaatcctaaatcaacaatctctaattcatctccaattcttaaagagaccaaacactattatatcaaacttgatgaatttgaggaatttattagaaactggataacggtggaaaataaagataaatggaagacaaatgttgttgggcaggttaagtcatggttagatagtgggttaaaaccaagggcagttacaagagacttggattggggtatacctgtaaaaatagatgatgaagatggaaaggtattatatgtttggtttgaggcacctattggatatatctcatctacaattgaatgggctaatgcaaatgacaaagattggcagcaatattggaaaaatccagaaactaatcttattcactttattggtaaagacaatattgtttttcattgtataatttttccaattatgcttcgaatgtttggtgattttattctacccaaaaatgttccagcaaatgaattcctaaatcttgaaggcaataagatttcaacttctaaaaactgggcagtttggcttcatgaatatttaattgattttccaaacatgcaagatgtattaagatatgtattaacatctacatgtcctgaaacaaaagacaatgatttcacttggaaagactttcaaattaggaacaacagtgaattagtagctatttatggaaatttcaccaatagagttctttcattaataaataaatattatcatggtaaaataccaaatccaaatcaaaa

SEQ ID NO: 296704 - DNA, 1537 bp, Unknown
  Bacterial polypeptide expressing nucleotide sequence isolated from the Sargasso Sea
aatgagccaaggttccgaaaaaagatcaattttagtgacaagtgctttgccttatgcaaatgcacctttgcatctgggtcatattttagaacatacacagacagatatctgggttaggtttcaaagacttttaggtaatgagtgtatctacgtttgcgctgatgatgcccacggtactccaattatgcttaaagcggaagagcttgatattactccagaaaatcttattgaagatatatacaaagaacataaatctacatttgaagactatagaatttctcatgataactttcatacaacacatagtgaagaaaacagaatattatctgaaagaattttcaatgctctgcaaaaaaatgacttaattgaacaaaagaaaataaatcaattgtttgatactaccaaacaaatgtttctttccgataggtatgtaaaaggcagttgtcctgtttgtcatgaaaaagatcagtatggagataattgtgaaaaatgcagcgcaacttatgatgcagtagaattaatagaccctgtatcggttatctctggtactaaaccaattattaaagaatcagaccatctcttctttaagctaagctctttgaaagaacagataattaattggttaaataactcaaacatacaagatcctgtaagaaacaaactcaatgaatggctcgaaggcgatttaagagattgggatataagcagggacagtccttatttcggatttgaaatacccaattttcaagataagtttttttatgtttggttggatgcacctattggttacctcgcaagtcatttaaattatctaaaaaaaaatgatcaagaagcagaatttgaagagttttggaattcaaaatcaaaaggagaagtgtttcatttcatagggaaagacataatgtactttcatacccttttctttcctgtgatgttatcagaatcaaacctcaaaacacccaatggagtttttgttcatggttttctaactttgaatggtgacaagatgtccaaatcaagaggaaactttatttctgctgaaaattatattaatacattagatgcagattacttacgttacttttttgcttctaaattaggaaccggagtagatgatattgatcttaatttagaagactttaggcaaaaaagtaactctgatttggtaaacaaatatgcaaatatagccagtagaacagcaaaatttttaaataaaaattacgatggggttctttcaaacgaactagatcaaccagaattaattcaagagttcctagataaatcagaaattatatctggcttatttgaagatcttgaatttagcaaagcaattaaagaaattatgtctttggctgatagagctaaccagtatattgattcaaaagaaccatgggtgcttgtaaaagacgaaaataataaagataaagttcactcgatttgcactacatctttgaatttatttagaataatcactattatgttgcagcccgtaatacagggattcacaaaaaaagcttttgtatttctaaatgaaaaa

SEQ ID NO: 296705 - DNA, 2158 bp, Unknown
  Bacterial polypeptide expressing nucleotide sequence isolated from the Sargasso Sea
atgtccgcatccgacctcacttccgtgcaggctgcggcgccgcaaggcagccgccagatcctcgttacgtccgcactgccctatgccaacgggcagatccacatcggccacatggtcgagtacatccagaccgacatctgggtgcggacgctgcgaatgcatggccacgaggtctactacatcggcgccgacgacacgcacggcacgccggtcatgctgcgcgcggagaaggaaggcctgacgccgaagcagctgatcgatcgcgtgtggaccgaacacaagcgcgacttcgacagcttcggcgtgtcgttcgacaacttctactcgaccgattcggacgagaaccgcgtgctgagcgagaagatctatctcgcgctgcaggaagccggcttcatcgccgaacgcgaaatcgagcaggcctacgatccggtcaaggaaatgttcctgccggaccggttcatcaagggcgagtgcccgaagtgccacgcgaaggaccagtacggcgacagctgcgaagtgtgcggctcgacgtacctgccgaccgaactgctgaacccgtattcggtcgtgtcgggcgcgacgccggtgcgcaagacctcgaagcactacttcttccgcctgtccgacccgcgctgcgaatcgttcctgcgcgaatgggtgagcggcctcgcgcagcccgaagcgaccaacaagatgcgcgagtggctcggcgatgccggcgaagccaagctcgccgactgggacatctcgcgtgacgcgccgtacttcggcttcgagatcccgggcgcgcccggcaagtatttctacgtgtggctcgacgcgccggtcggctactacgcgagcttcaagaacctgtgcgaccgtaacggcatcgatttcgatgcatggatccgcccgggctcgaaggccgagcagtatcacttcatcggcaaggacatcctgtacttccacacgctgttctggccggcgatgctcgagttctcgggccaccgcacgccgaccaacgtgttcgcgcacgggttcctgaccgtcgacggcgcgaagatgtcgaagtcgcgcggcacgttcatcaccgcgcagagctacatcgacacgggcctgaaccccgaatggctgcgctactacttcgccgcgaagctgaacgcgacgatggaagacatcgacctgaacctcgacgacttccaggcgcgcgtgaacagcgacctcgtcggcaagtacgtgaacatcgcgagccgcgcggcaggcttcctgatcaagcgcttcgacggccgcgtgcaggacagcgcgatgaaccatccgctcgtcgcgaagctgcgcgaggcgattccgcagatcgccgcaagctacgaagcccgtgaatacggccgcgcgctgcgccacacgatggaactcgcggacgaagtgaacgcgtacgtcgacggtgcgaagccgtgggatctcgcgaaggatccggccaacgcggtcgcgctgcacgaaacctgcagcgtgagcctcgagtcgttccgcctgctgtcgctcgcgctgaagccggtgatgccgcgcgtggccgaagccgtcgagtcgttcttcggcatcgcgccgctcgcctgggccgatgccgcgaagccgctgtcgtcggaacagccgatcaaggcgtaccagcacctgatgacgcgcgtcgacccgaagcagatcgaagcgctgctcgccgcgaaccgcgattcgctgcaggccgaagccaccggcgcggctgccgcgagcgcgaacgccgcgaaggaggcgaagagcaacgtcaaggcgaacgcgaagcaggctgccgtgaacggcgcggacgacgcaccgatctcgatcgacgatttcgcgaagatcgacctgcgcatcgcgaagatcgtcgcgtgccaggccgtcgagggttcggacaagctgctgcagctcacgctcgacgtcggcgaggaaaagacccgcaacgtgttctcgggcatcaagtccgcataccagcccgagcagctcgtcggcaagctgaccgtgatggtcgcgaatctcgcgccgcgcaagatgaagttcggcctgtccgaagggatggtgctcgccgcgtcggccgccgacgagaaggccgagccgggcctctacatcctcgagccgcacagcggcgcgaaaccgggcatgcgcgtgaagtaag

SEQ ID NO: 296706 - DNA, 826 bp, Unknown
  Bacterial polypeptide expressing nucleotide sequence isolated from the Sargasso Sea
aatgcaacataaacaacgccaaattttagtcaccagtgccttaccttatgctaatggacctatccatattgggcatatggttgaatacatccaaactgacatatgggttcgctttcataaaatgagggggcaccaatgtttttacgtttgtgccgatgatgctcacggaacaccaatcatgttacgagcagaggaaaaaaatatatcccctgaaactttaatcagtgaaatgcaacaagaacatcaaaatgattttaatgattttgtgataaattttgataactaccatactacacattcttcggaaaaccagatatttgcaaatactatttacgaaaagctagacaatgatgggcatatttcaaaaaaaacgataaagcaattttatgatcctaataaagaaatgtttctaccagatcgtttcatccgtggtgaatgtccgaaatgccatgcaattgatcaatacggtgataattgtgaggtttgtggcgccacctattccccaactgatctaaaaaatccggtttctgttatttctggcgaaaaacccgtggaaaaagaatctgagcactacttctttaaactcagtaattttgaggaaatcctgcacaggtggacgcgtgccggtcatttacaaaaggaagttgtcaataagcttgatgaatggttcgaggccggattgcaggaatgggatatatcacgtgatgtgccttattttggttttgaaattccaaatgcgccaaataaatatttttacgtatggctagatgccccaattggttatttagcaagctttaaaaatttttgcgataagaaagaacttgat

SEQ ID NO: 296707 - DNA, 1651 bp, Unknown
  Bacterial polypeptide expressing nucleotide sequence isolated from the Sargasso Sea
aatgaataaaaaagcaataatcacaagtgctcttccatattccaatggtgagatacatctgggtcatgttgcatccacatatctccctgctgacgttaccactcgtttcttaaaacaaaatggtgttgaagcatattatgtatgtgcatctgatgattatggaactccaattttaatacaatctgaaaaattaaaacaaactccacaagaatatgttgcacattggaataaacgtgattttgaagattttacagcttttgatataggatttgactttttttataaaacaagttcagaagaaaatatctcatttgtccaagatgtctttaaaaaaattgaaaaaaatggacatatctacgaaaaagaaatcatccaagctttttgtacttcttgtgacaaatttcttccagaccgatttgtaaagggaacttgcccattttgtgatgctgaagatcaatattctgatttatgtgaaaaatgtgggcgtattcctgaagaaattgaaaatcctcattgttcaatatgtggtgaaacacctgtacaaaaatcaaccaatcactatttctttaaactgaaaaatttctctgaaccacttttggaatatcttgaaaatgctccacatcttcaaaaagatgtaaaaaaatatgttgaaaattggattaaagaaggactagttgattgggatatcactcgagatattccatggggagtgcctattccaattgatggattaaaagataaagtattctatggttggtttgataatcatcttgcgtacatttcttctacgttaaaatttctgaatgataaaaatattgatggcaaaagtttttggaatgatgcagacatttatcatttcattggtaaagatattgtttatcaccattatctatttttacctgcaatgcgattgggacttgaaaaagaattcaaattacctgattacattccaactcgtggtcatcttacccttgaaggtaaaaaaatatcaaaaagccgaaattggtatattggtttaaaagatttcttagaaaaattccctgctgattatttacggttttatcttatttccataaacccatattctcaagatgatcttaattttgattgggaacaattttcaactaagattaattctgaattaattggcaatcttggaaatttggttaatcgtgctcttggatttacaaacaaaacttttgatggtgttgttcctgagcctgaaaaatttgatgagaaagactctgaatctgaacaaaaaataaaatctctcgctgaagatattggcaaactaatggaagaaaatcatctagatcgtgcattaaaacaactgatggaattttctgctcatttcaaccaatacttccaacacaaggaaccttggaaaaaaggaccaggtactaatgcttgcatatacctgtctgtcaatgctgttcgttcaattgcaatatgcttacattcatttttaccaaaatcttcacaaaaaatatggtctcagttgggactggatggaaatgtttctgatgtacattggaatgaaatgtctaatttagaattgaaatctggtcataaaattggaactactgagccaatattttcgaaaattgaacaatctgtaatagacgaagaacaatctaaactaggaaactaa

SEQ ID NO: 296708 - DNA, 2032 bp, Unknown
  Bacterial polypeptide expressing nucleotide sequence isolated from the Sargasso Sea
gatggcaacttcacaacgtaaaattctcgtgaccagcgcacttccctacgcgaacggaccgattcatttaggtcacatgctggaatacatccagacggatatctggtcgcgttatcaaaagcttcgtggacatgagtgccactatatttgtgccgatgacgcccacggcacaccgattatgcttaaggcgcagcaattaggcatggcgcctgaagaaatgatcgctcaagtaaacaaagagcatcagcaggatttcgccgattttaatatcgccttcgataattatcacagcacccacagtgaagaaaaccgcgtgctggcgagcgatatttacttaaaactgcgtgccaacggctatatcaagagcaagagcatttcgcaattatttgaccctgaaaagtcgatgttcctgccagaccgcttcgtcaaaggcacctgccctaagtgtaagtcaccggatcaatacggcgacaactgtgatgcctgcggcgcaacttacagcccaactgaactgattaaccctaaatcggcagtatcgggtgcgacgcctgtgatgaaggacactgagcacttcttcttcgacttacccgccttcgaagacatgctcaaagagtggactcgttcgggtgcactgcaaaccgaaatggccaacaaactcgacgaatggttcgaacagggtctgcagcaatgggatatcacccgcgatgcgccttactttggttttgagatcccagatgcaccgggcaaatacttctacgtgtggttagatgcgcctattggctacatgggctcattcaaaaacctctgtgacaagcgccccgagctgagctttgacgaattttgggcgaaggattctaaggccgaagtttaccactttatcggtaaagacatcgtttacttccacagcctgttctggccagccatgctctatggctcgggctaccgtcagcctaacagcgtttacgcccacggttatgtgacagtaaacggcgctaagatgtctaaatctaagggcacctttattaaggcgcgcacctatttagaccacttagaccctgaatacttacgctactactacgccgccaagctgagcagccgtatcgacgatctcgaccttaatttagaagacttcgtacagcgcgtaaactccgacttagtgggtaagctggtgaatcttgcgtctcgcaccgctggctttatcactaagcgtttcgatggcaagttggccaagattgccgacaccacgcttacggatgcgtttttagctaagcaagagcaaatcgccgagttctatgaaacccgcgaatacggtaaagcaatgcgcgaaatcatggcattggccgatatcgccaacggttttgtcgccgacgcagcaccttggcagttagtgaagcaagacgatcaacaggaaacggcgcaccaagtgtgctcgaatgccctgaacctgttccgcattctggtcacttacttaaaacctgtgttgccacgtttagcgttggatgttgaagccttcttccaacagaccttaacttgggatgcgctaaaccaagatatggctggccatgaaattgcaccattcaaagccatgatgcaacgtgttgaattagaaaaggttaacgctatggttgccgactctaaagaaaacctgcaagccacgagcgagacagaagcacctaagggcccattggcgaccgatccaattagcgacaccatcaactttgaagatttcgctaaaatcgatctgcgtattgcgcgtatcgtcaaagccgagcatgtggccgaagccgacaaactgttaaaactgcaattggatatcggcggcgagacccgtcaggtatttgcaggcattaaatcggcctactcgcctgaggatctcgaaggtaagctgacagtgatggtcgctaaccttgcgccacgtaagatgcgttttggcatgtcagaaggcatggtactggctgctggccctggtggcagtgatttgtggattttagaaccccacgaaggcgcacaacctggcatgcgtgtgaagtaa

SEQ ID NO: 296709 - DNA, 392 bp, Unknown
  Bacterial polypeptide expressing nucleotide sequence isolated from the Sargasso Sea
tatggcaactgatcctcgtacaatgctggtaacctgcgcccttccctatgccaatggctccatccatcttggccacatgctggaacacatccaggccgatatctgggttcgttatcagcgaatgcgcggtcaccaggtgcactttgtctgtgccgacgatgcccacggcaccccgatcatgctcaaggcccaacagctggggatcaccccggaagagatgatcgcggccgtctccaaggagcaccaggccgacttcgccgggttcaacatcagttttgacaactatcactccacccacagcgacgaaaaccgcgagctggcggagctgatctacggccgtctgcaggccggcggcaagatcaagagccgcaccatctcccagctgttcgacc

SEQ ID NO: 296710 - DNA, 994 bp, Unknown
  Bacterial polypeptide expressing nucleotide sequence isolated from the Sargasso Sea
tatgtcagcacccgccaccgatctctccgcaggcgcgccgtcaggccgtcgccagattctcgtcacgtcggcccttccgtatgcgaacgggcaaatccatattggccatctggtcgaatatatccagacggacatctgggtccggacgttgcgaatgcacgggcacgaggtctactacgtgggcgccgacgacacacacggcacgccggtcatgctgcgcgcggaaaaggaaggtttgacgcccaagcagctgatcgaccgcgtctggcaggaacacaagcgcgatttcgacaacttcgggatttcgttcgacaattactactcgaccgattccgaagagaaccgcgtgctgagcgaatcggtctatctggcgctcaaggaagccggcctgatcgacgcccgcgatatcgaacaggcatacgatcccgtcaaggaaatgttcctgccggaccgcttcatcaagggcgaatgcccgaagtgcggcgcaaaggatcaatacggcgacagctgcgaggtatgcggttcgacctatctgccgaccgaactgatcaatccgtattcggtcgtctccggcgccacgccgattcgtaagacctcgacgcattacttcttccgtctgtccgatccgcgctgcgagaatttcctgcgcgcgtgggtcagtggtctggcgcagccggaagccaccaacaagatgcgcgaatggctcggcgacgccggcgaagccaagctcgccgattgggatatttcacgcgacgcaccgtatttcggcttcgaaattccgggcgcgccgggcaaatatttctacgtgtggctggacgcgccggtcggctattacgcgagcttcaagaacctcgctgacaagcgcggcctcgacttcgacgcgtggatccgcaaaggctcgaccgccgagcagtaccacttcatcggcaaagacattctgtatttccacacgctgttctggccggccatgctcgaattctcgggccaccgcacg

SEQ ID NO: 296711 - DNA, 529 bp, Unknown
  Bacterial polypeptide expressing nucleotide sequence isolated from the Sargasso Sea
atgagtgaaaccttttacatcaccaccccgatttattatgtcaacagccatccccacataggccacgcatacaccaccatcgttaccgatgtttttgtccggtaccgaaagttattcggggaggaaacctattttcttaccggaacagatgagcacgggcagaaaattgcggaatctgcccaggctgcgaatctcaaaccccaggagtttgtggaccggatgacctcggagttcagggatatgtggcctcatcttcacatccagcaggaccagttcatccgcaccaccgatttctttcacaagtctgcagtccaggcagtgttgcagaagatttatgatcagggtgagatttacctcaaagattatgaaggactctactgcgtgggttgtgaacgatttctagaccaggaggagttgaccgaggaggggaattgtccggatcaccagaaacctccccaggtccgccaggagaagaattattttttcctgaatgagtgcataccaggagtggcttattggactccttgaa

SEQ ID NO: 296712 - DNA, 941 bp, Unknown
  Bacterial polypeptide expressing nucleotide sequence isolated from the Sargasso Sea
catgagatatttaataactagcgccttaccttatgccaacgctccgttgcatattggacatgtgcttgaaatagttcaaacagatgtgtgggtacgttcattaaaattggctggaaatgaggttttctattattgtgcaagtgacactcatggaactccaattatgcttaaagcacaagaacttaatactactcctgaggaattatctaaaaaatataaaaaacttcattcagatacctataagagttataacgttgatttgaataattttcatacaactcacagcaaagagaataaagagcttacagaacatttttttaattctgcttatgaaaaaggtgatatttatacaaaagaaattgagcagctattcgatgaacaaaaaaatatcttcttatctgatagatttgttaaaggtgaatgtccatcttgtggagcaaaagatcaatatggtgatgcctgcgaagtttgtggaaaaacctatgatgctcttgatcttaaaaatccttactctactctttctaattcaaaacctgtaataaaaaaatcaaaacattacttttttaaacttaataattttaaagaatttcttaatgatacagtctctgaaatctcaaatcaggatcctatcaaagaaaagcttaaagaatggtttgattcaggtttaaaagattgggatatctcaagagatgaaccatattttggttttaaaattccaaatgaagactcaaaatatttatatgtttggttagatgcacctattggttatctatcatctataaaaaactggtgtgatagtaacgatatagattttaatgattttattaatgattcgaagatagttcattttattggtaaagacattgtctattttcatttactattctggcctgcaacattaaaagcagctaactttccaatacctaatgaagtatacgtgc

SEQ ID NO: 296713 - DNA, 989 bp, Unknown
  Bacterial polypeptide expressing nucleotide sequence isolated from the Sargasso Sea
tcaaaactcaaaagaatggtttgatgttggattgagggattgggatatttccagagatgcgccctactttggcttccttattccagaggaagaagataaatatttctatgtttggctcgatgcgccaattggatattttgcatctctaaaaaatctatcggaaaaatccgatcttcagtttgaagaatacttcaaagatggctcagatacacacatggttcattttattggtaaggacatcatatatttccatgcgcttttttggccagctgttttggaaggttcggacgttaagaaaccagatgcaatttatgtcaatggtttcctcacagtcaatggtgaaaaaatgtctaaatccagaggcactttcatcaaggcgagaacatatttagatcatctagatccagaatatctgcgttattattttgcatataagagttctgcaggtgtggatgactttgatctcgatacagaagactttcaaaacagaataaatgcagatttaattggaaaatggatcaatattgccagtcgaagctctaagttcattagagagcattttgaaaataacttatctgcagatgtagataaggatttaatggaaacatttgactcaggggccgatgagataaaagcgcattatgaaaaacgcgaatttggtcaatcaatgaggaaaatcatgcttttagctgacaacgcaaatcaatatttggatcaagaaaaaccttggataatgattaaaaatgaagaaaagaaagatgaggttcagaaggtctgtaccaatgccctcaatatgttcttaaaattaaccattatgttaaaacctgtgatgcctgatgttgctagcaatgtagagtcattcatgaacttatcggatctcaattggtcaaatattcatgatgtgatcaatgatcataaaataaacaattatgaaaacctcatgtatagaattcgtgaggaagatattgaaaggataattaaaaaatgag

SEQ ID NO: 296714 - DNA, 1185 bp, Unknown
  Bacterial polypeptide expressing nucleotide sequence isolated from the Sargasso Sea
tgatatattagctagatattataaattaaaaaattttaatgtttattttttatcaggaacagatgagcatggtcaaaaagttgaaaaagcatctacagtatcaaagatggatactcaagattttgtcgataagatgtcagtatcttttagagaattaatcccttttttaggttgtgaaattgatgattttattcgtacaacagaaagtcgtcatataaaagccgcccaagctttgtggaataaattagaagaaaataatcaaatttatttatctaattatgaaggttggtattctattagagatgaagctttttatttagaatctgaacttgtaaaaaaaggagattctttttttactcaatctggagatcctgtagaatggattaaagaagaaagttattttttcaaactatcatcttgggaaaataaacttttagaatattataagaataatcctaattctattgctcctaaatcaagatttaatgaagtaataagttttattaaaggaggtttaaaagatctatcaatttcaagaactaccttcaagtggggtgttaaagttcctaataatgaaaatcatgttatgtatgtttggattgatgcattatgcaattaccttacttctattggttatcctgatttagataataaaacatttaaaaacttttggcctggttttcatatggtaggtaaagatattttacgttttcatgctgtttactggccagcttttttgatggctgcagaaatagatcctcccaaaagaatatttgcacatggttggtggacaaatgaaggcaaaaaaatttcaaaatctgttggaaatgtaattgatccttatgaaataattaataaatatggattagatcaaattaggttttttttatttagagaagttccatttggtaatgatggagatttttcaaaagatgctatatctaatagattaaatgctgacttatcgaacaattatggaaatttagttcaaagaattacaactttttgtgtcaaaaattgtaattcaaatattaaagttaattcaaattttactaaagaagataaaaatttaatagaatatatgaatttgaaatatgatgaatatactaaattcatgagtgaagaaaaaatagataaatcgattaaatgtgtttttgaattattatctgacactaatgcttatat

SEQ ID NO: 296715 - DNA, 1618 bp, Unknown
  Bacterial polypeptide expressing nucleotide sequence isolated from the Sargasso Sea
atgtcaaaaaacgtattagtttgtgtagcttggccatatgcaagcggatctagacatttaggtcatataggtggagcttatttgccggcagatatatttgcaagatataacagactgataggcaataacgtaattatggtatctggaagtgatgttcacggaacgccaataactgtaagagcagatgatgaaggtgttgagccaatcgagatagtaaatcgatatcataatgaatttctcggctattgggataaattgaacattcaatgggataactacacaacaacaatgaccgataatcataaagaagttactcaggaaatgtttttaaaaataaaagaaaatggcttcattgagaaaaacaaaagcattcaagcttttgatccacaagaaaaaaagtttttacctgatagatatgttgagggtgaatgtccaaaatgtaattatttagaggcaagaggtgaccaatgtgactcttgcggtacgactcttgatcctgaagagcttataaatcctaaaagtaaaattaacggaaataatgccgagttcaaagagaccgaacattattttttaaagttaagtgctcttaatgacaagctttccgaatggctaaatagtaaagaaggttggagacctcacgttataaatttctccaaatcatttgtagaagaaggcttacaagatagagcaataacaagagatcttgactggggaatagatataccagaaaatgaattaggtgatggaaaaaaaatatatgtatggtttgaagcagtaattggttatttatcagctgctaaagagtgggcagtaaataatggcacgccagatgcatggaaagatttttggttaaatgaggatgcagagtcttattattttgttggaaaagacaacgttccttttcatgcaataatatggcctgcgatgttacttgcatatggtgatttaaacctaccaacgaacgttccggcaaaccagtacatcttaataaaaggtgaaaaggcatctgcaagtagaggtgttggaaaaaatttaaacgattatctcgatgaatggaatccggactcattgagatacgctctagcaagtatcctgcccgagcaaaatgattctgaaatctcagaggatgaaatgataagacgcaataacgaagaacttgtagcagcatggggaaatttagttcaaagagtattttcccaatatataaacaattttgaaaatttagaattcgattttgaattaaatgatgttgataaaaaaataatcaatgaaggcaatgattgttttgaaaagactggtgaattaatcgaaaaggtcgaactcaaatcatcacttcagtcagttatgggctatgtaaataaaattaatgcttatctgaatgaaacagaaccatggaaagttataaaagaagacagctctagagcaacagcaatacttcatacatcgcttacagcaatagaagcatgtgcatcattatttactccttttatgccaacaacatctgagattgtaaagggtgcaattgaaaagaatacaaataataattggtccgtaaacgacataaaaaaaggtgccccattacaagacataggacacctttttaaaaaatttgattagc

SEQ ID NO: 296716 - DNA, 1468 bp, Unknown
  Bacterial polypeptide expressing nucleotide sequence isolated from the Sargasso Sea
cagtattattgctgatttttttgccaggtttaaaagaattgatggatataaagtctattttctgactgggactgatgagcacggtttaaaaattcagagagctgctgaaaaaaaaggagttgaacctttagcgttctgcgatgagattagcaaaacattcaagaatttatcaaaaactttaaatttaacaaataatgattttatacgaacaactgaatctcgacacaaaaaatctgttcaatatttatggaaagaattaaaaaaaaatgatgatatttatttatcaaaatattctggttggtattcagtatcggatgaagcgttttacaatgaagatgaaattgaagatgttgataataaaaaagtagccatatcatctaaatctcccgttgaatgggttgatgaggaatcttatttttttagattatctaagtgggaaaggccattattggaattttatgaaaaaaatcctgcttttatttctccagcatctaggaaaaacgaagtaataagttttgttaaaaatggattaaaagatttgtcagtaagtagaaaaagtttctcatggggtattaaagttccaaatgatgatgatcatgtcatatatgtatggttagatgctctcactaattatattagtgctttaaattatcccaataaagatgatgaattatataaaaaattttggccagcatctgttcacttgattggaaaagatatattgagatttcatgcaatatattggcctgcgttcttattggctgcaaaaattactcctccaaaaaaagtttacggacatggatggatattatctaatgaagaaaaaatgtctaaatcaaaaggaaatatattggatccattagaaattataaaacaatatggattggatcctttgagatattatttaataaaagaagtttcatttggaaatgatggcaatatttctcaagaaagactagaggattgtattaatagtgatttagctaataattttggtaatttatgtcaacgtgtatctgcatttgttattaaaaattgtgatagcaaggttccagaaaaaattaaatttgaaaatgatgacataaaaattttagatgaatatagtctgaatttagacaagttaagatcggaaatagataatcaaaatatcaactattatattgactatattgtaaatcgattatttgaagccaataaatattttaatgaccaggagccgtggaaaaaaaaagatgataaaattaggttaaatacaatagtttatacaactcttgaaattgttagaaaagtaacttttttattatatccaattattccgcaatcatctctcaaagcacttaaaattttcaatcttgaagaaaaagatgtaattttaaattcaattggaaataatgaatttttaaaaaaaggaagtgctattaataaaattgatatattatttaataaaatagaaaaagaaaatgattga

SEQ ID NO: 296717 - DNA, 1954 bp, Unknown
  Bacterial polypeptide expressing nucleotide sequence isolated from the Sargasso Sea
aatggacaattctaaaaaaactaaaagaaaaatacttgttactcaagctttgccttatgcaaatgcaccactgcacttaggacatattcttgaggctgttcaaacagatatttggactagatttcaaaactttaatgataacgaatgcctcttcttttgtgctgatgatactcatggaacacctgttatgttgaaagctaatgaaatgggtataaaaccagaagaattaatttctgatgtttataaagaccataaatcctcatatgaactttatggaataaattttgcaaatttttactcaacacatagtgatgaaaatagaaaatattcagaatatatatatgaatgcgccaaaaataataatttaatttctaaagcaaatattgaacaatactatgacgaaaaagaagaaatgtttctttccgataggtttataaaaggaacatgcccaaaatgtggtgctgaagatcagaatggtgacaattgtggtgtatgtggggcttcttacaacgtacttgatgttaagaaaccaatatcgattatctcaaatacagttccaattaaaaaagaaagcgagcatatattttttgatctacctcaaaagaataaaatgcttaaagattttttaaaaaatgtagaccttcaagaatcaattaaaaataagttaaacgaatggctaaatgatgacttaaaaaaatgggatatttctagagatgcgccctattttggttttgaaatacctggagaagagaataaatacttttatgtgtgggtagatgcacctataggttatttagcatcaatctctaactgggcagaaaaaaataaattgaatatgcaagatttatggtcagaaaattccaaatatgagatttatcattttattggaaaagatattgcttattttcatggattattttggccagcgttattaagtgcagcaaaccttaaattaccaagtggaatcaatgttcatggttttttaaccataaatggtgaaaaaatgtctaagtcaaaaggtacaggtatattagcaaaagaatttgctgagattacaaatcctgaaactttgagatattactttgcagctaaacttaataacaaagttgaggatatagatttaaactttgatgattatgttcaaaggataaattcagatttagttggcaagtacttaaatattgcatcaagatctgcgtcattcttaaagaaaaataataatatcttatcaacaaatattgataaaaatattcttgacaatttggcgtctaaaaagaatgaaattgtttccttttatgaatctagagaatactcaaaattagttagaattattatggatttggctgatgatgttaataaatatataaatgagcaaactccatggaaaaaagaaaaagatgaagcagttgatataagttcaactgcaataaaagctttttatatgttatctttatatctacatccaatcatacccagtattaccaatgaagcatttaaattcttaaatattaaaaaagtttcaattaataatgttgatgaagcaataacaaaaataaatgattacaaaccattgctaaatagacttgaaaaaataataattcctgaggaagaaaatatggataatgtaaatttaattaatattgatcaattttcagctgttgatttaagagttgctaaaattatcaaggcagatgacgttgaaggagctgataagctgcttcaactaactttagatgttggagatttaggaacaagaaatgtatttgctggaattaaaagtgcttacaaacctgaagatcttactgataagtatattgttttagtcaataatttagagccgagaaaaatgaaatttggaatatctgagggaatggtgcttgcctctagtaatgatgaaggtatttatttagtttcaccagatgaaggtgcaaaacctgggatgaaggtaagataa

SEQ ID NO: 296718 - DNA, 1193 bp, Unknown
  Bacterial polypeptide expressing nucleotide sequence isolated from the Sargasso Sea
tatggcaactgatcctcgtacaatgctggtaacctgcgcccttccctatgccaatggctccatccatcttggccacatgctggaacacatccaggccgatatctgggttcgttatcagcgaatgcgcggtcaccaggtgcactttgtctgtgccgacgatgcccacggcaccccgatcatgctcaaggcccaacagctggggatcaccccggaagagatgatcgcggccgtctccaaggagcaccaggccgacttcgccgggttcaacatcagttttgacaactatcactccacccacagcgacgaaaaccgcgagctggcggagctgatctacggccgtctgcaggccggcggcaagatcaagagccgcaccatctcccagctgttcgaccctgaaaagtccatgttcctgccggaccgcttcgtcaagggcacctgccccaagtgcaagtccccggagcagtatggcgacaactgcgacagctgcggcgcgacctacagcccgaccgagcttatcgatccgaaatccgccgtctccggcgccaccccggtgatgaaggactccgagcacttcttcttcgacctgccgcagtttgaaaaatggctggcagagtgggtgcgcggctccggcgccatccaggaggagatggccaacaagatgcaggagtggttcgaaagcggcctgcagcagtgggacatcacccgtgacgccccctacttcgggttcgaagttcccggcgccccgggcaagtacttctacgtctggctggacgcccccatcggttacatggcgtcgttcaagaacctgtgcaacaagcgcggcgacatcgatttcgacagctactggaaagcggactctgaggccgagctctatcacttcatcggcaaggacatcgcctacttccactgcctgttctggccgtccatgctggaaggcgccggtttccgcaagccgaccaaggtcaatgtgcacggctacgtgaccgtcaacggtgccaagatgtctaagtccaagggcaccttcatcaaggcttccacctatctcaatcacctggatccggagtgcctgcgttactactacgccgccaagctcaacagccgcatcgacgatctggacttgaacctcgatgacttcgtcgcccgcgtccacgccgacgtggtcaacaagctggtcaacctggcgtcgcgcaacg

SEQ ID NO: 296719 - DNA, 325 bp, Unknown
  Bacterial polypeptide expressing nucleotide sequence isolated from the Sargasso Sea
atgactaattcattctatattagcactgcaatatcttatactaatggctctccccatataggtcatgcttatgaggtaatagccgctgatgtaattgcaaggtttaaaagattggatggttatgatgtcttttttttaactggaaccgatgaacatggtttaaaggttcaacaaaaagcaaaagaagtaggtgttaaacctaaagactatgttgataaagtatcaaaagaatttattgaattagctaaatatttaaattgttctaataatgattttataagaacaactgatgatagacataaaaaaaatgttcactcaatttgga

SEQ ID NO: 296720 - DNA, 1474 bp, Unknown
  Bacterial polypeptide expressing nucleotide sequence isolated from the Sargasso Sea
catgcgtaaatcaaatcacgaggtccttagcttttgtgcagatgatgctcacggcgctccaattatgatgaaagcagatgagctaaaaataaagccaacagattttattgatcaaatgaaaaaagatcatcaagattcactaaaaaaatttggaattgaatatacaaattaccactcaactcattcaaacgaaaatgaaaaattggtatcggaaatattccttgatgcaaaaaattcgggtcatatatataaagaagatgttgagcaatgctttgatgaagaaaagaaaatgttccttgcagatcgatatgttactggtgattgtccaaaatgtggtgcagaaaatcaatatggggatgggtgtgattcttgtggagcaacatattctgctacagagataattaatccaaaatcatcgttatctggaactaagccaatcacaaaaatatctgaacatattttctttgatctcaaaaagtccaaatctaatcttaaaaaatttttaaaaactgcatctattcaggattcagtggtaggtaaactttctgagtggctagagggtgatttaagaagttgggatatttctcgtgatgcgccctattttggttttaaaatacccaatgaagtagataagtatttttatgtatgggttgacgctccaattggatatatagcatcagcaaaaaattgggccgaaaaaaataatttaaatattgatcatctatggggtaaaagttctgaatatgaggtacatcattttataggcaaggatattatctattttcatggtttgttttggccagctcttttgaataattctaactacaaacttcctgatagcattcatgttcatggctttgtaagtgtaaatggtgagaaaatgtctaaatcaaagggaacattcattacagcagaccaattcgcggatgtatgcgatccagaaatactcagatattattttgcaagtaagcttaattcaaaaattgaggatctcgatttaaatctagaagatctagctcaaaaaataaactctgatttagttggaaaattttcaaatatatttagtcgctcagctccattcatttcaaaaaataataatcgtctatctaattcaattaatgaagagcatttatcagcttgcatgaaagatatagataaaattcttaattattatgaaaacaaagaattctctaaagcagtaaaacttataatgcaaattgcagataacgccaacaaatttataaacgaaaatacgccttggaagatagatcaaaacgatgcattagtcattgcatcaacagcattaaatgtatttaaaaatctatgcatattgctttctccaataatgccaaatttgtgcgatcaaatgctcaagatgttaaaaattaatagctttagtattgataatcttgaggataagatgattgattcagagattaatgaatttaagccaattatttcaagaatcgaacca

SEQ ID NO: 296721 - DNA, 1540 bp, Unknown
  Bacterial polypeptide expressing nucleotide sequence isolated from the Sargasso Sea
aatgagtaattcattttacataacaacaccaatctattatgtaaatgatattccccatataggtcatgcgtatacaactattttagcagatgtattatctagatatcaaaaacaagttggcaatagaccatttttccttactggattagatgaacacgggcaaaaagtacaagatgctgctaaggatagagggattgaaacacaggatcattgtgatgaaatgtccaagagatttatatccttatgggaaagattacacatatcaaatgatgattttattagaacaactgagattagacacaagaatgtagtaagggaaatattaaaaactgtttttgatgttggcgatatttatgaagatgaatatcaaggcctttactcagtttctgaagagcggtttattacagaaaaagaagctgatacgggggaatttcgcgatataaaaacattaaaagagaaaaactacttttttagaatgagcaaatatcaggataggctaataaatcatatagaagctaatcctaacttcattcagccagatcatagaaaaaatgaaatacttggatttttaaatcaacccttaaatgatttatgtatttcaagaccaaagtcaagattgaactggggtatagaattaccctttgattcggaatatgttacgtatgtgtggtttgatgccttaattaattatatcactgctgctggatatttagatgataaaagtttatttaaaaaattttggccagcagatatacatttaattggtaaagatatattaactacgcatgctgtttattggcctacgatgcttatgtctgcaggaattgagctgccgaagatgatttttgcacatggttggtggcttatggataaagaaaaaatgagtaagtctagtgggaatgtggttaatcctatggatttaattgatgactatggtgtagaccctgttcgttattatctaatgcgggaaatggtactcggtcaagatgcaaacttcactgccaaatcttttataaatagatataatagtgaccttgctaatgatttaggaaatcttttaagccgaatttctacgttaattaaaaaaaactataatagtgaaataccggaaggatgttctccaggaaataaggagaaagaaataaaagatgaatcgattgaattagtcaaaaactttgataaaaatatgtcaagcttatcaattaatgatgcgattgaggaaacacttcagtttgttcgcagtattaatagatactttgagcacaaggcgccttggaaacttgtaaaggaagatatgaaatctgcaggaacagttttatatactggtgctgaagcattaagaatatgtgctattttattatctcctataatgccgaaaagaatgaaattgctactgtctgttttaaatgcagaatcatctgatagaacctgggggaacctagagccagggaagattttaggacagcataaaccattattccctagaataaactcgaaaatatttaatgatagtcgatactcattgtcacctctactttga

SEQ ID NO: 296722 - DNA, 1357 bp, Unknown
  Bacterial polypeptide expressing nucleotide sequence isolated from the Sargasso Sea
aatgaataaaaattactatataaccacaccaatatattatgtaaatgataaaccgcatattggtcatgcgtatacaagtattgcttgtgacgttttagcaaggtttaaaagattagacggatacaatgtaaagtttttaacaggaacggatgaacatggtcaaaaagttgaaaaagcagctaaattaaaaaacaaatctccattagagtacgcaaattttattagtaaagattttaaatctttaacaaaaaccttaaacctttctaatgatgattttataagaaccacagaaaagagacatatattagccgcacaaagtttatggagtaaattatatgaaaataaacatatttatttagataaatatgcaggatggtatgctttaagagatgaagctttttattctgaaaaagaaatcataaatggcaaagctccatctggagctgatgtatcctgggttgaagaggaaagctatttttttgatttatcaaaatggcaggataaattattagaattttacaataaaaatcctaatttcattcttccaaaaagcagaatgaatgaagttaaaagttttgtcaaaggaggtttaagagacttgtctgtgagtaggacaagttttgaatggggggttaaagttcctaataatgataaacatataatgtatgtatggttagatgctttgactaactacctttccgcaataggataccctgacaccttagaaaatgaatatgttaatttttggccagcagatattcatatggttggaaaagatatactaagatttcatgccgtatactggccagcatttttgatggcagctgaattacctctgccaaagcgaatttttgctcatggttggtggacaaatgaaggtaaaaaaatatcaaaatctgaaggaaatgttattgatccattagaaattataagctcttacggacttgatcagataagatattttcttctaagagaagtgccatttggaagtgacggagatttttctaaaactgctctattagcaagaataaatggagacctttcaaatgatttagggaacctttgtcaaagagtaatttcaatgatttataaaaattgcaatggttttataccaaacaagtgtgaaaaattaaatgatagagatattattttttataataaatctaatgctttatatgaaaaggttaagaatgaaattgataaacaatcatttcatgaagctataaaattaatttgggcatttatttcagatgctaataaatatgtagatgaacaggcaccatggaagcttagaaaaactgatggaaaaaggatgaatgatgttctctggattctagctgatacaataagaaaaatt

SEQ ID NO: 296723 - DNA, 1378 bp, Unknown
  Bacterial polypeptide expressing nucleotide sequence isolated from the Sargasso Sea
aatgaataaaaattattatataacaacgcccatctattatccttcggcaaagcctcatatgggtcatgcatattcaagtatagtggttgatttttttgcaagatttaaaagaatagaaggttataaagttttttttcttaccggcacagatgaacatggattaaaaatacaaagagcagctgaaaaaagtaaaaaaaaacccttagaattttgtgatgaaattagcaaaacatttaaagatttatctaaaatattaaatttatctaataatgatttcattagaacaactgaaaagcgacatcaaaagtcagttcaaaatttatggaatgtactagaaaaaaaaggggaaatttatttatcaaaatattctggctggtattctgtgtcagatgaagctttttatttaaatgatgaaattgaaacaaaaaatggaataaaagtatctaaattatcaggatcagtggtagaatggcttgaagaagaatcgtatttttttaaattatcaaattggcaaaataaacttcttgaattttatgaaaagaatccaaattttattttacctaaatcaagaaaaaacgaggtagttagttttgttaagagcggccttaaagatttatctgtcagtagaaaatctttttcatggggcatcaaggttccttcaaataaagaacatgtcatttatgtgtggcttgacgctcttacaaattatttaagtgccttaaattatcctgacattgatagcaatatgtacaaaaattattggcctgctgatgttcatatgattggtaaagatatattgagatttcatgctgtttattggcctgcttttttattagctgcagatttacctgctccaaaaagagtttatggtcatggatggatactctcaggtgaagaaaaaatgtctaaatctaaaggcaatattttagatccaattgaaattataaatgaatacggtctagattcactaagatattatttattaaaagaagtttcatttggaaacgatggtaatatttctaaggataaattaatttcctgtattaatagtgatttagcaaataactttggaaatctttgtcaaagagttttagcttttactgacaaaaatcttggtttggttgtgccaaaaacagaatctttaaataaagatgatttgataatattaaattatttctcagagaattatcaaaatttaatagactttattaatgatcaaaacattaattcatatatgaattttattgttgagcaaatgtttatagctaataaatattttaacgatcaggaaccgtggaaaaaaaaagatgacgtcaaaagattgaatgaaattatttatacttctttagaacttattagaaaaatttctattctttta

SEQ ID NO: 296724 - DNA, 1611 bp, Unknown
  Bacterial polypeptide expressing nucleotide sequence isolated from the Sargasso Sea
aatttttgcctgataggtatgtagaaggaacatgtccacactgtgattacgaatccgctagaggggatcagtgtgataattgcgggaagacattggattcaaaagaattgaaaaatcctcgttctaagttaaatcctgatgcaaaaattgaatttagagaaactgagcatttattctttaaattatcagaatttagagacccacttcttgaatggctttcaagtggtaaagatcattggcgttcatctgtaatcaatttcacacgtaattggcttcaagaaggtttgattgatagacccataactcgtgatttggaatggggaatcgatatccaaagagaaggatatgaaaagaagagaatgtatgtatggtttgaagcagtaatgggttactattcagcttcacttcattgggctaaaaacgaaggtaaaccagatttgtggaaggattggtgggaaaatgattctgctgagcattattatttcatggctaaagacaatattccattccacacaattatttggccagcaatgttgtcaggatgtggtttacatttaccacatgatgtaccagctaatgaatatttgctattagattcaacacaattttctaaatctcgtcgtcatgcagtttggatgcctgattatttggagagatatgaccctgaattgttacgctattatctcgcatcaattatgcctgaacaaaaagatgcaaatttcacgtgggaagattatgtaactagaattaataatgaattaatcggtaattttggaaacttaatgcatagagtaatctcttttgctcataaaaatttcccagatggattaagctctagcgaatctacaattccagcacttaatgataaaatatcagaagttcaccaaagagttgcagaagcactcgaagcatgtaaattcaagcgagcacttcaagcgattatggaattatcacaagctggaaatatagaattgaatgacgcagcaccatggaagcaagtcaaagatgatcgtgatgcttgtgaagcttcattagttacatttttgaatttatgtcgaagtttatctgtgatgatgacaccattccttcctaaatcatcgcagaaagcatgggaatatttgaaccaggaaggaaaaattgatagtcatggttgggattcagctttggaattcaaaactgaattcaaactacaacaacctttaccattgtttagcaaactgaacatggaagaaatattggagaaagaaatgcccccagaggaagaaaacgagctagctaatgtcaaaccagaaataacgtttgatgatttcaagaagttggatatacgaattggaactgttgaaaaagttgaagagcatcctaatgctgacaagctttggctattggatgtaaactttggcggccctataaggagaatcgtaactggactccgtggaatatatgaatctgacgatttactaggcaaaaaaattgccgttttagttaacttagctccagctaaatttagaggagaagagtcaaacggaatgttgttagctgctgaaggaaatgatatagttagtttgcttcaacctgataaggaaatagaagacggtagcgaagtacattagc

SEQ ID NO: 296725 - DNA, 1615 bp, Unknown
  Bacterial polypeptide expressing nucleotide sequence isolated from the Sargasso Sea
catgacaaaaaatattttagtttctgtagcctggccatatgccagtggttctagacatctaggacatattggtggtgcatatttacctgcagatatctttgctagatatcaccgtatagttggcaataaagtgttgatggtatccggtagtgatgctcatggtactcctatcactgttcgagcagatgaagaaggggttactccaatagatatagttgaaaaatatcataaagaatttttaggatattgggataaattatctatttcatgggataactacacaacaacaatgacagaaaatcataaagaagtcactcatgacatatttttaaaattgttagaaaaagaatatatctataaagcaaaaactcttcaggcttatgatccaagtgaaaatagatttttaccggataggtatgtagagggcaaatgtccaaaatgtgattatgaatctgctcgtggagaccagtgtgatagttgtagttcaacactagatccagaggagttaattgatcctaaaagtaagatatcgggaaataaagccgagtttaaagaaactgaacatttctttttgaagttaagtgctttaggggaagacttaattccatggcttgagacaaaagaagattggagaccgcatgttataaactgggcaaaatcttttgttaaagaaggattgcaggatagagccattacgagggatctcgattggggtatagatatacctgttgatgacctaggagatggaaaaaagatttatgtatggtttgaagcagtaataggttatctgtcagcatctatagagtggtcaaacaatgatgagtcaagaaactgggaagattggtggaaaaataaagatgcagaatcatattattttatcggaaaagataatgttccgtttcattcagtaatttggccggcaattttagctggatatggtgacctgaatttaccaaccaatgttcctgctaaccagtacatattaataaaaggtgaaaaagcttctgcaagtagaagcgttggtaaatcactttccgaatatttagaagagtgggagccagatgcaattagatatacactagcttctgtcttgccagaacaggctgattctgaacttagtgagagtgaaatgattagaagaaacaatgaggaacttgttgctacatggggcaatttagtacaaagagtatttacacaaattgaaaataatattgataatatcaacgaagcctcagatgagactgaagtagataccactcttctaaaatcaggagaagaagcttttaataatgttggggaacatatagaaaaagtagaactaaaagcagccctacaagaagcaatgcgttatgtatcaaaagtaaatatttatcttaatgaaacagaaccttggaaaattattggagaagacagtaagagagcttcccgtattttatatacctcattgactgccatagatgcatgttctaatttactctctccatttatgccatctactagtgaaaaagttagtaatgctattccaaaagagagtaataatcaatggagtttgaattcaataaaaataggcacccaaatagaaactattgggcacctatttaaaaagtttgattaa

SEQ ID NO: 296726 - DNA, 1269 bp, Unknown
  Bacterial polypeptide expressing nucleotide sequence isolated from the Sargasso Sea
ttttttgcaagatttaaatcaattgatgattataatgttcattttttaactggtacagatgagcatggtttaaagatacaaagatcagctgaaaaagcgggtaaggatcctaaggaattctgtgatcaaattagtcaaacatttaaagatctttcaaaaacattaaatttatctaatacagattttataagaactactgaggatagacataaaaaaacagtccagcatctctggtcacttcttgaaaaaaatgatgacatctatttatcaaattattctggatggtattcagtctcagatgaagctttttacaatgaagatgaaatagaggaaatagggggaaaaaaaattgcaaaatcttctaaatccactgttgaatggatagaggaggagtcttatttttttcgactctctaaatggcaaaaacctttattagaattttatgaaaataatccagattttatattgcctgagtctagaaaaaacgaggtaataagttttgtaaaaagtggtcttaaagatctttctgtaagtcgtaaaacttttaaatggggaattccagttccaagtaatgataaacatattatttacgtatggctcgacgcactaacaaattatttaagtgctttaaattatccagatacaaataatgaactttttaaaaaattttggccagcatctatacatttaattggtaaagatatcttaagatttcatgcagtttattggcctgctttccttttagctgccaaaattgagctaccaaaaaaagtttatggacatggttggatattatctggtgaagaaaaaatgtcaaaatctaagggaaacattttagacccattaaagattattgaagaatacggtttagaccctttaagatattatttaattaaggaagtttcatttggaaacgatggtaatatttctcaagatagacttgaagattgtataaatagcgatttagcaaataattacggtaatctatgtcaaagagttactgcatttgcgatgaaaaattgtgatggaaaaattcctgaaaaaattgattttcaaccagatgatttaaagatattaaataaatttcaagaaaatttagatacaataaggtctaaaataaatgatcaaaatataaatttttatatagatttcattgttaattcactttttgaggcaaacaaatactttaatgatcaagagccatggaaaaaaaagaataatttaattaggttaaatactatagtttatacaacattagaaatagttagg

SEQ ID NO: 296727 - DNA, 919 bp, Unknown
  Bacterial polypeptide expressing nucleotide sequence isolated from the Sargasso Sea
atgaaaaaaagtaaagaaacttttacaattacagctgccttaccatatgcaaacgggcctattcatattgggcatttagcaggtgtttatatacctgctgacatatatgcaagattcaagagactcactaaaaacgatgttgcatttatatgtggaagtgatgaacatggtgtagccatatctttagcctcaaaaaaagcatcaataagtccaaaacagttaattgataaatatgataaaattatcaaatcttcattccaagaatttggtatttcatttgataattattcaagaacttccaaaaaaattcatcatgagatgtctttagaattatttaatcttcttaaagagaaaaatctattttcattaaatgaatcagaacaatattatgatacaaaagaaaatcaatttcttgctgatagatatattacagggacttgtccatgtaaaaagtttgatgaagcatatggtgatcaatgtgaaaaatgtggcgcaacacttagtcctgacgagcttatcaaccctagatcagcaatttcagattcaaaaccaatactaaagaaaactaagcattactatataaagcttgacgaatttgaggaatttattagagaatggataactgttgaaaataaagaaaaatggaaaataaatgttgtaggacaagttaagtcatggttggatagtggacttaaacctagagccgttactcgagatttagattggggcattccagtaaaagttgatgatgaagatggaaaagttttatacgtttggtttgaggcacctattggttatatatcatctactaaagagtgggcagaaacgaataaaaaagattggaaaaattattggaaaagtcctaatacaaatctaattcattttataggtaaggataatatagtttttcactgtataa

SEQ ID NO: 296728 - DNA, 1832 bp, Unknown
  Bacterial polypeptide expressing nucleotide sequence isolated from the Sargasso Sea
tggtaatgaatgtctctacttttgtgcagatgatacgcacggaacgcctgtcatgctcaaagccaaagagcttggaatagatcctgaagagcttattaaaagaactagagaggagcacataaaaagttattcaagatttaatattaattttgataatttttatactactcattctgatgagaacaaaaaatatgctgaagatatttatcaaaagtgtaaagaaggaaatctaatctttaaaaaagaaattgaacagttttatgactcagaagaaggtttattcttatctgatagatttataaaaggtacatgtccaaaatgtggcgctgaagatcagtatggtgatggttgttctgtctgtggcacgacttatacacctgatgatttactaaatcccgtatcgtcattatcgaattctgagcttaccaagaaaagaactgagcatgtgttttttgatttgcctcaaatgaaagattttcttgagaattatctcaaagacttaactcttcaagatcctataaaaaataaactaaatgaatggattgaggatgggttaaagccatgggatatatcaagagacaagccatactttggatttgaaatacccggagagaaagataaatatttttatgtttggcttgatgcaccgattggatatttagcttctgcaaaaaattgggcagaaaacaataatatggatatgaaagatttatggggtgaaagctctgattatgaaattcatcattttattggaaaagatattgcttattttcatgccctattctggccagcacttttaaagtcatcaaatattcgcttacctgagtcaattaatgttcatgggtttttaactattgatggtgagaagatgtcaaaatccaatggaacctttataaatgcagacgactttgctgaaaactatgatggtgagttattaagatattattttgctgataagtttaataattcaattgatgatctagattttaatgaagatgaatttattcaaaaaattaattcagatatcgtcggtaaatatttaaatattgctagcagagtttcaaaatttattgagaagaatggtaataatctctctgcaaacttagatgtggactttattgagaaaaatctatcaatgatcgatgaagtgattgagcattatgaaaacttaaatctttctaaatctgtaaaaattattatgaagatggcagatgaagttaataaatatattaatgagaatgagccttggaaatccagtgaagaaaaggctgtagaggtatcatcgacagcaattaactgttttagagttatctcaatattgcttaatcctgttctaccaacaataacatcaaaggctttagaggtatttaatgatagtgctacaaatgattttaataatattaaggattatcttgtagatacaaaaattaatccatataagcccctattaaaaagattagaaaaagctaaaataaatgaggaaattgaaatggaagattcaaatttaattaatatcaaagattttgcaaaggttgagcttcgcgtagctaaaattgttaaagctgaaggtatagaagaagctgataagctcataaaattacatcttgatgtgggtgatcttggtgaaagaactgtttttgctggcataaaaagtgcatatgatcctgagagtcttaatggaagacatgttgtattagttgcaaatcttgagccaaggaaaatgaaatttggagtatcggaaggaatggtcttagcgtctagcaatgatgagggatcaatttatttaatatcaccagatgaaggtgcaaagccaggtcagttagttaaataat

SEQ ID NO: 296729 - DNA, 881 bp, Unknown
  Bacterial polypeptide expressing nucleotide sequence isolated from the Sargasso Sea
tggatatttagcaagcttcaaaatttcttgtgaaaagcaaaaaatagactttaattactggtgtaacccagatactagtaccgagatgtatcattttatcggaaaagatattatttattttcatgcattattctggcccgcaatgttacaaggaagtgattttagaaaaccttctgctatctatgctcatggatttttaacagtcgaaggacaaaaaatgtctaaatcacgtggaacatatataactgcccgttcatatttgaatcatctaaatcctgagtacctacgttactattttgcagctaaacttagtgcggggattgatgatattgatcttaacttggatgattttttaacaagagttaattctgatttaattggtaaagtaataaatattgcgagtagatgttctggatttataaataaaaattttgatggtaaattatctaataatattcatgatctagatatccaatcggaaattgcaaatgcaagtgacgtgattgctgatgcttatgaaaaccgtgaatattcaaaagctatgcgagaaataatgacactagcggataaggcaaatcaatacattgaccatcataagccttgggtaattgctaaacaagaaaatcgtgatgacgaactgcaaagtatttgtactactggcattaatttgtataggctattagcactatatttaaaaccagtgttaccaactatcgcaaaaaatacagaagaatttcttaacatagatccattagagtggaaagattcaaaaaaaatgttattaaatcacaaaatagaaaaatatagccctataatgacacgcatagaaaagaaaaaaatagaagatatgatcacggaaacgaaaaataataatcaataaa

SEQ ID NO: 296730 - DNA, 1045 bp, Unknown
  Bacterial polypeptide expressing nucleotide sequence isolated from the Sargasso Sea
ttggggcatgcatacacaacaattgcgacagatgtctttagacgatatatgaagctctttggagctgaaacttatttccttacagggacagatgagcatggacaaaagatagctgaatctgctgctaattcaggcgttagtcctcaaaagtttgctgacaaaattagtcaggaattccgtgaattgtggcctcatttgcatatagaaaataaccaatttattcgtacaactgattctaagcacaaagtctgtgttcagcaaatacttcaaaaaatttatgatcagggtgagatatatattaaagagtacgagggactttactgtattggctgtgaaagatttctagatgagacagaattagaaaatggaaattgtcctgatcatcaaaccccaccagaatttcataaagagcaaaattacttctttagaatgagctcttaccaagcgtggcttcttgaagaattaaatcaaaatgataattggatttatcctaggcgatacaggaatgagctaattcaactgcttaaaaatcctttacaggatttgtgcatttcacggccaaaaagcagattaaaatggggtattgagctaccttttgacaacaaatttgtcacttacgtctggtttgatgcacttcttaattatgtaagtgctcttgactggcctaacggattaaaattcaaaaaattctggcaaaatgtccaccacactattgggaaagatattcttaaaacacatggtatttactggccatgcatgcttaaagctgcaggaattccggtttttaagaaacttatagttcatggacactgggtggttgaaggcaataaaatgagtaagtctctagggaatgtagttgatcccttagccatgaaagataagcttggggtagatgcgatgcgctattttttgttgcgtgatatgagttttggtgaagattcaaatttcaccgaagaacttgctatagttcgctataatggagatttagccaacaattttggaaatttaatgaaccgttcaatcagtatgatccgtaaaaattttc

SEQ ID NO: 296731 - DNA, 1084 bp, Unknown
  Bacterial polypeptide expressing nucleotide sequence isolated from the Sargasso Sea
gttgagtaattcttcgtttactgttactgcagcattgccatatgcaaatggccctttacatcttgggcatgtttcaggagtatacttgccagccgatatttttgtgcggtatttaaggatgaaccatcaagatgttctttttttatgtggaagcgatgagcatggtgcagcaatcacattacgtgccaaaaaagacaagacaagccctcaggaaattgtagataaatacaaccaacaaattagtagttcgtttactgattttggaatttcatttgatgtttttcatagaacaagttcttctttacatcatcaaactgctcgcgatttctttaagaaattatgggatgacaatcgtttcattgaaaaaacatcagagcagtattatgataatgacttcaatcagtttttagccgatagatatattactggaagctgtccgaaatgtaaccatgatagtgcctatggtgatcaatgtgagaattgtggggctgttttaagtccgttggatttaatctctcctaaatctactttaagcggaaaggttcctgtacttaaaaaaacaacccattggtatcttcctctagaccagcatgaaaaatggttaaaggattgggtcaaagatggtattctagatgggaaaaaacaccacaacccacaagaatggagaaatcaagttgtgggccagtgcctctcatggattgaaggtggattaagacccagggcaatgacacgagatttagattggggagttaaggttcctattgaaaatgctgaagggaaggttttgtacgtttggttagatgcacctataggatatatttcggcaacaaaacattgggcagaaaaagaagggaaagattggaaaaaatattggtgtaaaaaagaagccggagacagaaaacttgttcattttattggaaaagataacatcgtttttcacaccattatattccctattttattgaaggatcatggtgaatttattttaccagataatgttccatcatctgaatttctaaacttagaaggcaataaattctcaacatcaagaaattgggcagtttggcttcatgattttttagaa

SEQ ID NO: 296732 - DNA, 1263 bp, Unknown
  Bacterial polypeptide expressing nucleotide sequence isolated from the Sargasso Sea
tatgtcagaaaaacgccgaattctggtaaccagtgcgttgccatacgcaaatggctctattcacttaggtcatttgctagaacacattcaaaccgacatctggactcgttttcagcgccttcgcggaaacgaatgttacagtgtttgcgccgacgatgcacacggtacgccggttatgcttaaagcccaagagcttggcattacaccagaagaaatggtggcaagaacgcgtgctgaacatcaccaagaccttgttgattttcacgtagattacgacaactactatgtaacccattcgccagaaaacaaggcgctgtgtgaagaaatttacacccgtttggataatgcgggttacatcagcaagcgcaccattaatcagctgttcgaccctgaaaaagaaatgttcttgccagaccgtttcgttaagggtacctgccctagctgtggcgcagaagatcaaaacggcgacagctgtgacgtatgtggcgcaacgtatagcccaacagaagtgaaaaaccctcgcagcgttgtatcgggtgctacaccagtgctacgtgagtctgagcacttcttctttgacctgccaaaatttgaaggcatgttaaaagagtggatccgctcaggtgccctgcaggaagaaatggctaacaagctgcaagaatggtttactgaaggtcttcaacagtgggacatcagccgtgatgcgccttacttcggctttgaaattccaggtgcgccgaacaaattcttttacgtgtgggtagatgcacctgttggctatatggcaagtttcaaaaacttctgcgatcaaaacaacttagagtttgatgatttctggaaagcagactcagaggctgagctttatcactttattggtaaagatattacctacttccactgcctattttggcctgccatgctagaaggtgcgggataccgtaagcccactggtgtaaatattcacggtttcgtaaccgtaaacggcgcgaaaatgtcaaaatcgcgcggtacgtttattaaaggccgtacttaccttgaccatctgaacccagaatatctgcgttactactttgcgtctaagttgggcgacggtgttaccgacatcgaccttaactttactgacttcgcacaaaaagtgaattcagacttggtaggtaaagtggttaacattgcaagccgctgtgcaagctttatcactaagcgtttcgacggcaaattgtctgacaatgtgattgagccagagcttattgcaaagttccaaaa

SEQ ID NO: 296733 - DNA, 796 bp, Unknown
  Bacterial polypeptide expressing nucleotide sequence isolated from the Sargasso Sea
atgaacactcctacagttaaatctagaaatattttaattacacaagcgctaccgtatgcgaatgcgcctttgcatcttggacatatgttggaagctgttcagacagacatatggtccagatttcaaaactttaacggtaacaaatgctactttttttgtgctgatgatacacatggtactccagtaatgctaaaagcaaacgaacttggtataaaacctgaagaattaatagctgatgtcctagaagatcataaaagcacttatgatctttatagtataaattttaataattattacactactcacagtgatgaaaataaacaattttcagaacaaatatatgaaagcgctaaaaagaataatttaatatctaaatcaagtgttgaacagtactttgatgaaaaagaagaaatgtttctttctgataggtttattaagggaacttgtccaaaatgtggtgctgaagatcaacatggcgataattgtggtgtttgtggagcttcatatgacattcttgatttgaagaatccaatttctataatttcaaactctgttcctgtaagaaaaaaaagtgatcatattttttttgatttacctcaaaaaaaagaaatgcttaaagagtttattaaaaatgttgaattacaaacatcaattaaaaacaagctaaatgagtggcttgatgatgatttaaaaaaatgggatatatcaagggatgcgccatattttggttttaaaataccagatgaaatagataaatatttttatgtttggcttgatgcaccaattggatatttag

SEQ ID NO: 296734 - DNA, 940 bp, Unknown
  Bacterial polypeptide expressing nucleotide sequence isolated from the Sargasso Sea
atgtctaacaaatactatataacaacaccaatttattatgtaaatgacaagcctcatataggccatgcgtatacctctgttgctacagattttattgcaagatttatgtctcttaaaggatatgatgtgagattccaaactggaacagatgaacatggactaaaaatacaaaaagcagctgaagccaaaaaaatagaacctatagaactttgtaatcaaaactcacagatttttagagatcttactgtcgtgttaaatttatcaaataatgattttataagaaccactgaagaaagacatattgatggagcctcatatttatggaaacgactttatgaaagaaatcaaatttatttaggggaatacactggatggtactcaataagtgatgaaacattttataatgagaaagatttagtaaaacagaatgatggctcttttaaaactatcaccggtggtcccgttgaatggattactgaaaaatcatatttttttaagctttcagaatggtctaataaattattagatttgtatagtagtaacccaaattttataagtcctgcttcaaaaagaaatgaagttattaaatttgtagagtcaggtttaaatgatctatctgtatcaagaacatcttttaaatggggaataaaaacaccaacagatgaatcacatattatgtacgtatggttagatgcattaacctgttacacaaatggaattaattatctaaatgaaaacgaaaatgccatgaaggaatactggaacaatgtagttcatatcgttggtaaagatattttaagacatcatgcagtatattggccagcatttttattggcagcagagttagatctaccaaaaaaaatatttgctcatggatggtggacaaacgaaggtaataaaatatcaaaatctttaggcaatgtaatagatccaattgaaa

SEQ ID NO: 296735 - DNA, 358 bp, Unknown
  Bacterial polypeptide expressing nucleotide sequence isolated from the Sargasso Sea
atggcacagcgaaagatcctgattaccagcgcattaccttatgcaaatggcccaacccacttaggtcatttattggaatatattcaaactgatatttggtcacgttttcaaaaacttcaaggccatgaaacgtattatgtttgcgcagacgatgcccacggcacaccaatcatgcttaatgcacagaagcaagggatcacacctgaagaaatggtaaaaaatgtgagcattgaacgccaacgcgactttgctgatttcaacattaagtttgacaattaccacagcacgcatagccaagaaaacaaagaatttagtgaattaatatacaaccgcttaaacgacgcgggccatataaaaa

SEQ ID NO: 296736 - DNA, 1316 bp, Unknown
  Bacterial polypeptide expressing nucleotide sequence isolated from the Sargasso Sea
aatggataaaaatttttatattactactccgatatattacccatctggaaaacctcatatggggcatgcatattcgagtattatagctgacttttttgcacgatttaaatcaattgataattatgaagttcattttttaactggtacagatgagcatggtttaaagatacaaagatcagctgaaaaagtgggtaagaagcctaaggaattctgcgatcaaattagtcaaacatttaaagatctctcaaaaacattaaatttatctaatacggattttataagaactactgaggatagacataaaaaaacagttcagcatctctggtctcttcttgaaaaaaatgatgacatttatttatcaaattattctggatggtattcagtctcagatgaggctttttacaatgaagatgaaatagaggaaatagatggaaaaaaaattgcaaaatcgtcaaaatctaacgttgaatggatagaggaggagtcttatttttttcgactttctaaatggcaaaaacctttattagaattttatgaaaataatccagattttatattacctgagtctagaaaaaacgaggtaattagttttgtaaaaagtggtcttaaagatctttctgtaagtcgtaaaacttttacatggggaattccagttcctagtaacgataaacatattatttatgtatggctcgatgcattaacaaattatttaagtgctttaaattatccagatacaaatgatgaactttttaaaaaattttggccagcatctatccatttgattggtaaagatattctaagatttcatgcagtttattggcctgctttccttttagctgctaaaattgaattaccaaaaaaagtttatggtcatggttggatattatctggtgaagaaaaaatgtcaaaatctaagggaaacattttagatccattaaagattattgaagaatacggtttagaccctttgagatattatttggttaaggaagtttcatttggaaacgatggtaatatttctcaagaaagacttgaagattgtataaatagcgatttagcaaataattatggtaatttatgtcaaagagttactgctttcgcgatgaaaaattgtgatggaaaaattcctacaaaaattgattttcaagcagatgatttaaagatattgaacaaatttcaagagaatttagataatataaggtctaaaatagatgaacaaaatataaatttttatatagatttcattgttaattcactatttgaggcaaataaatactttaatgatcaagagccatggaaaaaaaaggataatttaa

SEQ ID NO: 296737 - DNA, 1006 bp, Unknown
  Bacterial polypeptide expressing nucleotide sequence isolated from the Sargasso Sea
gctgaacagcacgatggaagacctcgacctgaacctcgacgacttccaggcacgggtgaatagcgatctggtcggcaagtacgtgaacatcgcgagccgcgccgccggtttcctgatcaagcgtttcgagggtcgtgtgcaggacagcgcgatgcaccatccgctgctcgccacgctgcgcgccgccgtaccgcaaatcgccgcgaactacgaagcgcgcgagtacaaccgggcgctgcgccagaccatggaactggccgacgcggtcaacgcgtacgtcgacaccgccaagccgtgggatcaggcgaaagacccggccaatgccgtcgcgctgcacgaaacctgcagcgtgagcatcgaggcattccgtctgctgtcgctggcgctcaaaccggtgttgccgaagctggcggaggcagtcgaagccttcctcggcatcgagccgctggtgtgggccgacgcgaacgtgccgctctcttccacgcgcccgatcaatgcgtacaagcacctgatgacacgcgtcgatccgaagcagatcgaggcgctcatcgcggccaatcgcgagtcgctgcaagccacgccggacgctgctgcagcaccagcggacgcgaagaccaagtcgaaggccgcgaaagcagccgctgccgggaaggacgaaacgcccggcattatctcgatcgacgatttcgccaaaatcgatctgcgcatcgcgaagatcgtcgactgcaaggcggtggaaggctcggacaaactgttgcagttgacgctcgacatcggcgaagaaaagacgcgcaatgtgttctcgggcatcaagtcggcttatcagccggagcagttgatcggcaagctgacggtcatggtcgcgaatctcgccccgcgcaagatgaagttcggcttgtccgaagggatggtgctggcggcctcggctactgacgagaaagccgaaccgggcctctatgtgctcgaaccggatagcggcgcgaagccgggcatgcgcgtgaagtaa

SEQ ID NO: 296738 - DNA, 1267 bp, Unknown
  Bacterial polypeptide expressing nucleotide sequence isolated from the Sargasso Sea
ttgtcgaaaagaccctcttattacattacaactgcaatttcctatgttaatggactaccccatttagggcatgcatatgaggcaatatccgccgacgccatggcaaggtttaagcggttggatggctataatgttttttttcttaccggtacagatgagcatggacaaaaagttgaaaagtcagctattcaagcgggagaggaccctctgatattttgtgatgggaatgctgatgcctttcgtcaaatgactcatctacttaatatttccaatgatgattttattagaactaccgagcaaaggcatataagagctagccagtcaatttggaataatttgtgggatgctggagatatttaccttggaaagtatgccgggtggtacagcgtaagagatgaggcgtactttgaggaagcagaactaattattgatccagatgatcctaaaaagaaaatagctccttcaggtgcctcggttgaatgggttgaagaaccaagttattttttcaaattatcttcgtatactcagcctttgcttgattactacgaggccaatccacagtttattttaccagaatcaagaaagaacgagattataaattttgtgaaacaaggtttacgagatttatcaatatcgagaactacgtttaagtggggggttccagtgccaagcgatgaggcacacattatgtatgtatggttggatgctctcaccaactatattacagctctaggttttcctgacaaatcccaaaacattaataaagatagtgaagtttttaccatggaaactcactggcctgccgacttacatattattggaaaggatattgtcaggttccatgcggtatattggccagctttcttgatgagtgcaaatttaccagtgcctaaacgtatatttggacatgggtttctgaatgtcgaaggtgaaaaaatgtctaaatctcttggtaatgtaatttcggcacaggacttggtggaggaatttgggttggacgaaattaggtactttttattgagggaggtgccttacggtcaggatggttcgttctctagagagagtattattcagagaattaatgcagatttagctaatgatttaggaaatctagcccagcgttgtctttcctttatttacaaaaattgtgatggagcaatcccttttccaggcgaatttaatggtgatgacaaaaagctgcttgagtcctctataattttattgtcagacataagaaattattttgagaaaccaggcgtttcataat

SEQ ID NO: 296739 - DNA, 964 bp, Unknown
  Bacterial polypeptide expressing nucleotide sequence isolated from the Sargasso Sea
gatacaattgaagtattaagtttcattaaaggtggattaaaagatctgtctatttcaagaacaacttttaattggggagtgccagttccaaataattctaagcatgtgatgtatgtttggattgatgcattatgtaactacctaaccgcaattggttatccagatacaaataataataattataagaaattttggcccgcaacacatattgtgggcaaagatatattaagatttcatgcagtttattggccagcttttttaatggctgctggtatcgagccccctaaaagaatatttgcacatggatggtggactaatgaaggacaaaaaatttctaaatcacttggtaatgtcattgatccttacgaaattattaatgaatatgggttggatcaaattaggttttttttatttagagaagtaccatttggaaatgatggagatttttcaaaaaaagcaatcgcaaatagaattaacgcagatttatcgaataattttggtaatttagtacaaaggatttcatcatttgctgtaaaaaataatgattctttactaaaaccaacagaaaatttaattaatgcagatcatgatttaattaatattcttcaaaataaatttgatgaatattgtaactttatgaataatcaacaaattgatagagcaattaagtctgtcctggagttaatatctgctggcaacgcatatgttgacactcaggcaccatggaccctaaaaaaaacaaataaaattagaatggaagaagttttatatattgttacaaatataattattaaatcagctattatgctctatccaataataccaacgagttctaaaaaaattcttaatatctttaattataatatggacaataataaatttgaggacttcaccaaactaataaatcaaaatataaaaataaataatccagaaccaatatttccaagaatattgaatgattgat

SEQ ID NO: 296740 - DNA, 1406 bp, Unknown
  Bacterial polypeptide expressing nucleotide sequence isolated from the Sargasso Sea
catgaatgaatttttctacataactactccaatatattatgtgaacagtcatccgcatatcggacatgcttacactacaattgcaacagatgttttgacgcgctacatgaagctgtttggagctgaaacttattttcttacagggacagatgagcatggacaaaagattgctgaatctgcagctaattccggaattgagccaaaggaatttgttgacaagatcagtcaagaatttcgagaattgtggcctaatctgcatattgagcacgaccagtttattcgtacaactgattctaatcataaagcttgtgttcagagaatactgcaaaaaatttttgaccaaggtgagatatatctaaaagaatacgagggactttactgcataggatgtgaaaggttttttgatgagtcagagttagaaaacggtaattgccctgatcatcaaacccccccagaattttataaggagcaaaattacttcttcaagatgagctcttaccagaagtggcttaccaaagagttaaatcaaaatgaggactggatttatcctggacgttacaggaacgagctaattcagtttcttaaagatcctctacaggatttgtgcatttcaaggcctaaaagtaggttaaagtggggtattgagctgccttttgataacaaatttgtaacttatgtctggtttgatgcactgcttaattatgtaagtgctcttgactggcctgatggagaaaaatacaaaaaattctggccacatgttaaccataccattgggaaagatattcttaaaacacatgggatatactggccctgcatgctgaaagcagcaggcatgcctgtctttaaaaaactagttgttcatgggcattgggtggttgaaggaagcaaaatgagtaagtcattgggaaatgtagttgatcccttagctatgagagatcagcttggtgttgatgcgctgcgttatttcttactgcgtgatatgagttttggtgaagattccaatttcacagaagaacttgctgtaactagatataatggagatttagcaaacaattttgggaatttaatgaaccgttcaataagtatgagccgaaaaaattttcagggatgtgtccctccatcaggtaaaacaggagatcaagagaaagaacttcatcaatcttttgccaatggcgtaaagaaatgccacgaatatattattaaattccagcctcatcggaccttagaacatgtggcattgcttagcagcaaggtgaataaatatatagatacatgtaaaccatggaaactaacaaaagaagaaaaagatcgtgagcgtctgggaacagtgctttacacagcacttgatatgtcaagaatcatagtgggattacttgatcctgttatgccaaaaaaaatgtgtgagg

SEQ ID NO: 296741 - DNA, 1699 bp, Unknown
  Bacterial polypeptide expressing nucleotide sequence isolated from the Sargasso Sea
aatgtcagagaaaaataaaacatttactataacagcagcactcccatacgctaacggcccccttcacatagggcatcttgcaggagtatatattcctgcagatattttttctagatatcaaagacttattaataatgatgtagcatttatttgcggaagtgatgagcatggtgtagcaatatctcttcaagctaaaagggaatctattacacctaaagaacttattgatagatatgacaaattaattagagactcatttgaggagtttggaatttcatttgataattattctaggacatcaagaaaaattcatcatgaaacctcaataaagatgtttaacgatttaaataaaaaaaatttattttcatcaaagataacaaaacaattttatgatgaagaggctaaacaattcttagctgacagatatattattggtacatgtccatgtggtaaatttgatgaagcctatggagatcaatgtgagaaatgtggagctacattaagcccagatgaattaaaaaaccctagatcagcaatctcaaaatctaaacctatcttaaaggatgctaaacattggtatataaatttagataagtttgaagattttataagggactggattataaaagaacataaagatgattggaaacctaatgttttaggtcaggtcaaatcatggcttgataatggtttaaaacctagagcggttacaagagatttagattgggggattccaattaacattgatggagaagaaggtaaagttctttatgtatggtttgaagcacctataggatatatatctgcaacaaaagaatgggcagagaaaaacaataaagattggaacaaatattggaaagataaagataccaaactagttcactttattggtaaagacaatattgtcttccattgtataatttttccaataatattaagaatgacaggagatcatattcttccatttaatgtacctgcaaatgaatttttaaatcttgagggaaataaaatttctacttccagaaactgggcagtatggcttcatgagtatctgaaagattttccagatatgcaagatgttttaagatatgtattaacagtaaatgctcctgaaacaaaagataatgactttacctggaaagaattccaaatgagaaataatagtgaattagttgctatctatggaaactttataaatagagtacttacactaattataaaatactatgatgggatattacctaatcctgaaagtattgatgaagaaaatcaaaaaattattaatgaagctaaaaccttcccaaaattaattggcaatttcttagacgaattcaaatttagagaggctatcaagtcacttatgaaccttgcaagaaatggtaataaatttctagctgagagtgaaccgtggaaactacagaagtctaatcctgaaaaggttaaagaaattttatatgtaggatatatcattagttgctatctgtctattctttctgagccatttcttccatttacttctaataaacttaaatcacaactaaatttaggtgagatagatagctggagtgaattagaaaatttagattctaaaatagatttttcttttaaaattaaatcagaaggggttctgtttagaaagattgaagatgatgagataataaaacaagttgagaagttaaacaaaatgtctagtcaataa

SEQ ID NO: 296742 - DNA, 1516 bp, Unknown
  Bacterial polypeptide expressing nucleotide sequence isolated from the Sargasso Sea
aatgagtttttatattacaactccaatttattatacaaatgatattcctcatattggccatgcctatactacaattgcatgtgatatccgagctagatataataatatagataatggcgaagtgttttttttatctggaactgatgaacatggtcaaaaagttgaaaaagctgcaaaggatgcaaatattgatccaaaattatttgttgataatttatcgattaattttgagaaattaattccatctttaggatgtgaaattaatgattttataagaactacagaaacacggcatattaaatcagctcaggcattatggagtaaacttgtagaaaataatcaaatttatttatcaaattatgaaggatggtattcgataaaggatgaggcgttttatcaagaaagtgaattacaaaaagtagatggtaaatttgtaactaaagatggctcagttgttgagtggattaaagaagaaagttatttttttaaattatctgaatggcaagataagttgctggaatattatgaaagttataatagacctatttctccagaaagtagaagaaatgaagtcatcagttttgttaaaagtggtttaaaggatctctctatatcaagaactacttttaaatggggtatacctgttcctaataataaagatcatgttatgtatgtatggattgatgctttatgcaattatttaagtgcaatagaatatcctgatacaaattctaataaattcaaaaaatattggcctgccttccatgttgtaggaaaagatatattaagatttcatgccgtttattggcctgcatttttaatggctgctgatctggagccaccattaaaaatttttgctcatggatggtggaccaatgaaggtaaaaaaatttctaaatcacttggaaatgtaatagatccctatgaaattatcaatgaatatggattagatcaaataagatattttttatttagagaagttccttttggtaaagatggtaatttttcaagaaactctatttcaacaagagttaatgcagatttatctaatacttatggtaatttaatacaaagaattgcaacgttcgttgtgaaaaattgtgactctaaaataacaccctctaataacttaactgataaagatagagaattacaagaaataatgcaaaatactgttgtaaattatcatcattcaatgggtgaaatgctttttgatttgtcattaaaaaatataatgggtttattgaacgaagcaaatgcatatgttgactcccaagcaccttggaagcttaaaacaacagatccagaaagaatgaaagttgttttatatattgttttaaatattattattaaatcctccattatgctttatccatttattccacaaagttcagaaaaggctctatctttttttaatatttcaaaagatcaaataagctttaaagatctagaactgttaattatgtctgatataaaaattaataatccaaaacctctatttcctagaattgattga

SEQ ID NO: 296743 - DNA, 1507 bp, Unknown
  Bacterial polypeptide expressing nucleotide sequence isolated from the Sargasso Sea
catgacgcttgaaaataaaaaaatttttgtgaccaatgctttgccctatgccaatggtccgattcatattggtcatatggttggttatatacaggcagatatttggtctagatttcagagaatgcaagggcatgatgtggttttcatatgcgcaagtgatgcacatggaacaccaataatgttgagcgctgaagatctgggtgttgaaccagtggagcttgctgctgaatatactcgtcaacatgagaatgatttcaatgactttcacgtatcatttgacaattaccacacgacccattcggaagaaaatgaagaattggtcggagagatataccaaagactgaaagaaaacgactgcattcgtacagaagtcattgagcaagcctatgatgatcaggaaaatatgtttcttcctgatcgttacgtcagaggtacatgccccaaatgcaatgcccctgatcaatatggagacaattgtgaaaagtgtggcgcaacatacaagccaacagatctgattgatccgatctccgccatatctggaaaagcaccgagtttaaaagaatctgagcattattttatgaaactgacaaagtttgaaaatatgctcgaggattggatcgaaacaattgatatacactcatctgtaaaatcaaaactcaaagaatggtttgatgttggattgagggattgggatatttccagagatgcgccctactttggcttccttattccaggggaagaagataaatatttctatgtttggctcgatgcgccaattggatattttgcatctctaaaaaatctatcggaaaaatccgatcttcagtttgaagaatacttcaaagatggttcagatacacacatggttcattttattggtaaggacatcatatatttccatgcccttttttggccagctgttttggaaggtgcgggcgttaagaaaccagatgcaatttatgtcaatggtttcctcacagtcaatggtgaaaaaatgtctaaatccagaggcactttcatcaaggcgagaacatatttagatcatctagatccagaatatctgcgttattattttgcatataagagttctgcaggtgtggatgactttgatctcgatacagaagactttcaaaacagaataaatgcagatttaattggaaaatggatcaatattgccagtcgaagctctaagttcattagagagcattttgaaaataacttatctgcagatgtagataaggatttaatggaaacatttgactcaggggccgatgagataaaagcgcattatgaaaaacgcgaatttggtcaatcaatgaggaaaatcatgcttttagctgacaacgcaaatcaatatttggatcaagaaaaaccttggataatgattaaaaatgaagaaaagaaagatgaggttcaaaaggtctgtaccaatgccctcaatatgttcttaaaattaaccattatgttaaaacctgtgatgcctgatgttgctagcaatgtagagtca

SEQ ID NO: 296744 - DNA, 946 bp, Unknown
  Bacterial polypeptide expressing nucleotide sequence isolated from the Sargasso Sea
aatggaaagcaaaagacgatatacaataacatctgctttaccatatacaaatggtaaaattcatattgggcacctagctggtgcttatattcctgccgatatatacgcaagattcaaaagggtaacggacaacgatgttgcatatatttgtggaagtgacgaacacggagttgctatttcaattcgagcaaaaaaagaggaaaaaacagcaaaagaaatcattgataaatatcatgatttaattaaaaaaagtttttctgattttggaatttcatttgataattattctagaacatcagctaaaatccaccacgagacagcgtcagaattttttaaattcttagaaaacaaaaaagtttttgaaataaaggattctaaacagctttatgatccaaaggaaaatcaatttttagctgatagattcgtcgagggagaatgtccaaagtgtaattatgaagctgcctacggagatcaatgtgaaaactgtggtagttcactaagtcctgaagaattaataaatccaatatcaaaaatcagtggcacaaaacctattgaaaaagaaactaaacattggtatttaccattaggtaattatgaagaatttttaaaggaatggttcttggaaggaaaaaaaaatacagcaaaaacaaacgtatatggacaagtaaaatcatgggttgatcaaggattagaatcaagagcaattaccagagatttggactggggtatacctgttcctagtgaagatggtaaaggaaaggtattatacgtatggtttgatgctccaattggatatatttcatcaacaaaagaatgggcaaaaagagaaaataaaaactgggaaccatattggaaagataaaaacacaaagttggttcatttcataggtaaagataatatagtctttcactgcataatttttcctattattttaaaagcacatgga

SEQ ID NO: 296745 - DNA, 337 bp, Unknown
  Bacterial polypeptide expressing nucleotide sequence isolated from the Sargasso Sea
aatgaatttttacataactacaccaatttactacactaatgatattcctcacataggtcatgcttatacaagtatagcttgtgatattattgctcgatataataaattattaggaaacaatgtattctttttaacaggtacagatgagcatggtcaaaaagtagaaaaagctgctattaattcaaatttaaaacctaaagaatttgtcgataaactttcagttaattttattaatttaataccttttttaggatgtgaaatagatgattttatacgaactactgaagaaagacatctaaaagcctctcaagaacttggacacaatagaaaaaaataa

SEQ ID NO: 296746 - DNA, 994 bp, Unknown
  Bacterial polypeptide expressing nucleotide sequence isolated from the Sargasso Sea
atgaaaaattatttttatatcactactcctatatattatgtgaatgataagcctcatatagggcatgcatatacaactattcttgccgatgttttagcacgctataatagaaatattggaagaaaaacattttttttaaccggacttgatgagcatggccaaaaagtacaacaggcagcagaagaaaatggaatagaccccaaaaagcattgtgatcagatggcaccgagatttaatgagctatggaaaaagctccatatttctaatgatgattttatccgtaccactgaagagcgacatcaaaaagttgtaaaagaatttttacagatcgtaatggataatggcgatatttatgaagccgaatatgagggcctgtactcagtgtcagaagaacggttcattacagaaaaagaagctgaaagtggtgagtttagagatataaaaaaattgaaagagaaaaactacttcttcaaaatgagtaagtaccaacaagaccttattgaacatattgagtctaatccaaatttcatccaaccagaacatcgaaagaatgaaattcttggttttttacgccagcctttaaacgatctttgtatctctaggccaaaatcaagattaagctggggaattgagttgccttttgattcggattacgtaacctatgtatggtttgacgcgctcataaattatataactgcagtaggctttaaagaagataaagatcaatttgattcttggtggcctgtgtcttaccatctaattggtaaagatatacttacgacacatgctgtatactggcctactatgttattatccgcaggtattcagctacctcaatccatctttgcgcatggctggtggcttatgggagaatcaaagatgagtaaatccctgggaaatgttattaatccgatggatttgatcgatgattatggagtagacccagttcgttattatcttatgagagaaatggtcttgggtcatgaatctagct

SEQ ID NO: 296747 - DNA, 1211 bp, Unknown
  Bacterial polypeptide expressing nucleotide sequence isolated from the Sargasso Sea
ttgtacgtatgtctggttcgatgcgttgctgaattatgtcaccgccttgggttggccggaggattcccgttatgagcagttttggaagcactgccatcatgtgatcggcaaggatattctcaaaacccacggaatctattggccctgcatgctcaaggctgggggtttcccggttttcaaaaaattggccgtccatggtcattgggtggttcgaggcagtaaaatgagcaagtctctgggcaacgtcgtcaatcccctggaaatgaaagacctgattggagtcgacgggttgcgctattttctgttgagagaaatgagttatggagaagacgcgaacttcaccgaagatctggtgttcgcacgttaccacggcgagctttcgaacaatttcgggaatctgctgaaccgttccatttcgatgtcacggaaaaatttcggatatgaggtacctccccggggtgagccaggaaaacaggaaatcgaactgtaccaaatgtttgagcaggaaacttctcagatcaaagcatgggtccaacagtttgagccgcatcgggctttggaacggattgccatgatgagcagtgccgtaaacaaatatctcgatgaaaacaaaccctggaaacttgccaaagaggaggatcaaaacgaacgtctcggaacagtactctatacggcattggatgcttcggcatggttggtttgtcttctggaaccggtgatgcctgaaaaaatgaaagcggcccgaatccaacttggacttggtgaatcaccgatgaccctggaaatgttgaaaccggggttggttcaatccggaactccacttccgcttccggaacccctgttcccaaggattcaactcaaacagaaggaacccgaaaaacctggcccaaccccaaaggcgaaacctcaatcggaagaaaagcaagaggcagaattggaaaacctggtcggtatcgagagcttccaaaaactcgatttcaggactggaaggattttggagtctaagaaagttacgggttcggacaaacttcttgtttcccaggttgatttaggagaatcaaaaccccgttcgatcgtctcgggtgttgccgagttttatcgccctgaggatcttcccgggatgaatgtggttgtggtcgctaaccttaaaccggtcaaacttcggggagaactgtcagaggggatgattctcgccaccgatgatggaaatt

SEQ ID NO: 296748 - DNA, 1409 bp, Unknown
  Bacterial polypeptide expressing nucleotide sequence isolated from the Sargasso Sea
tatgacttttgtcattactacacctttatactatgttaatgataaacctcatttaggaagtatatatacaacaataatttgtgactcaatagctaggtataaaaggcttgcaggtgaagatgttatgttcatcactggtgttgatgaacatggtttaaaaatacaaagaacagctaatgaaaagggtattgaaccaaaatcacattgtgatgaaatctcagaaatctttaaaaataattggaaaaattggaatatatcctttgataaatttataagaacaagctcaaaaaatcatgaatttgttgttaatgaattttatgaaagagtaaaagcatcagatgatatctatatgggggttcaaaaaggttggtattgtgtaggttgtgaagaatttaaagataatccagaaaactcacctacatacaagtgtccaatacatcaaaaaaatctagaatggaaaaatgaagagaatctcttttttaggctttcaaaatatcaaaaagaaattgagaaaataattaacaaaccttcttttatagagccaatagaaagaaagaatgaaattataaattttgtatctagaggtttaaaggatttttcaatttcaagaacgaatgtctcatggggaattcctgtccctggtaacgataaccataccttttatgtatggtttgatgccttacttggatatgtaagcgccattagctctgattcgacagaacattcattgaaaaaatcaattaagtgtggatggccagctgatgttcattttattggtaaagatattctgagattccatgctgtatattggcccgcaatgctcatttctgccaatatgaaagtccctcaaaaggtttttgggcatgggtttcttacaagagagggtcaaaaaatgggtaaaagtttgggaaatgtactcgaccctgatttattgcttacaaaatatggaaatgatcctgtaaggtggtacctcattaaagacatatcactaggaaatgatggagattttcaagataaaagatttgttgacattatcaataatgacttagctaatacaattggtaatttattaaatagaacatcatctatgtctagaaaatggtttgataataaagtaccaaataatgaaaaaattttaagtgataataaattagagaaatctgtaaaaattgcagtggaaaactatattaataactttgataattacaaattagatctagcagctaatgaaatccttagtttagcaattaatacaaatttgtatttgaatgataatcagccatggctgttaataaaagataaagataatctacctctagttaaacaaattatttacaatgtcttagaaagtacccgaataataggattgttattaatacctttattgcccgaattattctacaaaaatt

SEQ ID NO: 296749 - DNA, 1478 bp, Unknown
  Bacterial polypeptide expressing nucleotide sequence isolated from the Sargasso Sea
tgacaattgtggtgtatgtggagcttcctacaacgtacttgatgttaaaaaaccaatatcaattatctcaaatacagctccaattaagaaagaaagtgagcatatattttttgatctacctcaaaagaataaaatgcttaaagactttttaaaaaatgtagatcttcaggaatcaattaaaaataagttaaacgaatggttaaatgatgacttaaaaaaatgggatatttctcgagatgcaccctattttggttttgaaatacctggagaagaaaataaatacttttatgtgtgggtagatgcacctataggttatttagcatcaatctctaactgggcagaaaaaaataaattgaatatgcaagatttatggtccgaaaattctaaatatgagatttatcattttattggaaaagatattgcttattttcatgggttattttggccagcgttattgagtgcagcaaacctcaaattaccaagtggaatcaatgttcatggttttttaaccataaatggtgaaaaaatgtctaagtcaaaaggtacaggtatattagcaaaagaatttgctgagattacgaatcctgaaactttgagatattactttgcagctaaacttaataacaaagttgaggatatagatttaaactttgatgattatgttcaaaggataaattctgatttagttggcaagtatttaaacattgcatcaagatctgcgtcattcttaaagaataataataatatcttatcaacaagtattgataaaaatattcttgacaatttagtctctaaaaaagatgaagttgtgtccttgtatgaatctagagaatattcaaaattaattagaattattatggatttagctgatgatgttaataaatatataaatgagcaaactccatggaaaaaagaaatagatgaagcagttgatataagttcaactgcaataaaagctttttatattttatctttatatcttcatccaatcatacccagtattaccaatgaagcatttaaattcttaaatattaagaaagtttcaatgaataatgttgatgaagcaataacaaaaataaatgattacaaaccattgctaaatagacttgaaaaaataataattcctgaggaagaaaatatggataatgtaaatttaattaatattgatcaattttcagctgttgatttaagagttgctaaaattatcaaggcagatgacgttgaaggggctgataagctgcttcaactaactttagatgttggagatttaggaacaagaaatgtatttgctggaattaaaagtgcttacaaacctgaagatcttactgataagtatattgttttagtcaataatttagagccgagaaaaatgaaatttggaatatctgagggaatggtgcttgcctctagtaatgatgaaggtatttatctagtttcaccagatgaaggtgcaaaacctgggatgaaggtaagataat

SEQ ID NO: 296750 - DNA, 1957 bp, Unknown
  Bacterial polypeptide expressing nucleotide sequence isolated from the Sargasso Sea
gatggacatacctacaaaaaataatagaaaaatacttgttacacaggccttaccttatgcaaatgcgccattgcatcttgggcacattctagaagcggttcaaacagatatttggacaagatttcagaatctgaatggcaatgattgtcattttttctgcgctgatgatacacacggaacacctgtgatgcttaaagcaaatgagatgggtattacgcctgagaaattaattgaagatgtatatcaagaccataaatctacttatgaactttatgatattaattttgccaatttttattcaactcacagtgatgaaaataaaaaatattctgaatttatatataaatgtgcaaaagaaaacaaactaatatcaaaatcagttgtagaacaatactttgatgaaacagaaaagatgtttctttcggatagatttattaaaggtacgtgcccaaaatgtggtgctgaaaatcaacacggtgataactgtggagtatgtggtgcatcttacaatgttctagaaattgaaaacccactttctacaatttcaaatacaaaacctgttaaaaaagaaagtgagcacattttttttgatctgccagcaaagagagatatgcttaaagaatttatagagaaagtcgatattcaagaatctattaaaaataagttaaaagaatggcttggcgatgatttaaaaaagtgggacatctcaagagatgcaccttattttggttttgaaattcctggtgaagataataaattcttttatgtttgggtggatgcaccaataggatacatcgcctcgatctctaactgggcaaattcaaatcaaattgagatggaggatctatggtcagaaaactcagcatatgaaatttatcatttcattggaaaagatattgcatattttcatgggctcttttggccagctttgttaagctcagcaaaattgaaacttccaagtggcattaatgttcatggttttttaactataaatggagaaaagatgtcaaagtctcttggaactggaatattagcaaaggattttgcaaagattaccaatccagaaacattacgatattatttcgcagcaaaacttaataataaggttgaagatatcgatctaaattttgatgattatgtacaaagaataaattctgatttagtgggcaagtatctcaatattgcatcgagatcagcttcttttttaaaaaaaaataaaaataacttatcagacgacataaatgcagaaataattaattcattgcttaataaaaaagatgaaataattaatttatatgaaaaaagagaatactcaaaagtaataagattaattatggatttagctgattatgtcaataaatatattaacgaagaaacgccttggaaaaaagatgaagatgaagccgtaaaaataagcactaccgcacttaatgcatttaaaatcttatcgatttatcttcatccagtaataccaaacttaacaaatgaggcatttaattttttaaatattattgatcttacatttgatagcattgaaaaacccttaactaaaaaaataaataattacaaaccattgctaaatagacttgaaaaaataataattccagaggaagaagatatggataacgtaaatttaattgatattaatcatttttcatcagttgatttaagagtagctaaaatcactaaagccgatgacgttgaaggtgctgacaaactactacagctaactcttgatgttggtgaccttggaacaagaaatgtttttgcgggtataaaaagcgcttacaagccagacgagttaactgacagattagttgttcttgtaaataatctagagccaagaaaaatgaaatttggaatatctgagggaatggttctcgcttcaagcaataacgatggtatttatttagtttcacctgatgaaggtgctgaaccaggaatgaaagtacgataa

SEQ ID NO: 296751 - DNA, 706 bp, Unknown
  Bacterial polypeptide expressing nucleotide sequence isolated from the Sargasso Sea
aatggataaaaatttctatataactacacctatatattatccttctgcaaaacctcatatgggtcatgcttattcgagtattattgctgacttttttgcaagatttaaaaaaatggatgattttaatgtttgttttttaactggaacagatgaacatggattaaaaatacaaagagctgctgaaaaacaaaatattgatactttagaattttgtgatcaaataagtcaaacattcagggatttatcaaaaactcttaatttaactaacacagattttattcgaactactgaagaaagacataaaaaaacagttcagtatttatggaaagaacttgagaaaaatgacgatatttatctgtcaaaatattcaggttggtactcggtatctgatgaggcattttataatgatgatgaaattgagtctattgaaggaaataaagttgcaatctcttcaaaatcaaaagttgaatggatagaagaggagtcttatttttttcgtttatcaaaatgggaaaaaccgcttcttgattattaccaatcacatcctaattttattgctcctgagtcaagaagaaatgaagtaataagttttgttaaaagtggcttaaaagatctatctgttagtagaaaaagtttctcatggggtataaaagttccaaataacaatgatcatgtaatttatgtttggttggatgctttaactaac

SEQ ID NO: 296752 - DNA, 1080 bp, Unknown
  Bacterial polypeptide expressing nucleotide sequence isolated from the Sargasso Sea
tatgaatgatctatggtcagacaaatcagattatgaaatacatcactttatcggaaaggatattgcatatttccatggtctattttggcctgcactgttagattcagcagggtttagattaccagatggaattaacgttcacggatttcttacaattaatggtgagaagatgtctaaatctaagggtactggcattttagctagagattttgtaaatattacaaatcctgaaacgctgaggtattactttgcagcaaagttaaataataaagtagaagatatagatttaaattttgatgactatgtacaaagaattaattcagatttagttggaaaatatttaaatatcgcctccagatcagcgtcttttttaaaaaagaataaaaatgttatttctgaggatataaatcataacgttcttaaaaacttagttgaaaagaaaaatgtaattattgatttatatgactcaaaacaatattcaaaacttatcagaattataatggatttagcggatgatattaataaatatataaacgaggaaacaccttggaaaaaagataatcaagaggctgtgacaatagcatcaacagctattaatgcttttaaaatattaagtatttatcttcatccaataataccaaatataaccaaagaagcatttaaatttttaaatatagatttatcttcgattgatgatgtcgataaaatattaacaaacaaaataaataactataaaccattgctaaataggcttgataaaataataattcctgaggaagaagatatggataacgtaaatctaataaatattgatcagttttcagctgttgacttaagagttgcaaaaattatagatgccaaggatgttgaaggtgctgataaattattacagttaaatttagatgttggagatcttggaacaaggaatgtatttgcaggtattaaaagtgcatataaaccagatgaattaattgatagattagttgtattggtaaataatttagagccaagaaaaatgaatttggtctttcggaaagtatggttttggctttcagtaacgaaaatgggatttatttggtt

SEQ ID NO: 296753 - DNA, 1253 bp, Unknown
  Bacterial polypeptide expressing nucleotide sequence isolated from the Sargasso Sea
aagtattcaagcttttgatccaaaagaaaataagtttctacccgatagatatgttgaaggtgaatgtccaaaatgtaattaccttgaagccagaggtgaccaatgcgatagttgtggaataaccttagatcctgaagaattaattaatccaaaaagtaaaataaatggaaatccagcagagtttaaagaaacagaacattatttcttaaaattgagcgcattgaacgacaaacttgccgactggctaaataccaaagaaggctggaggccgcatgtcataaacttttcaaaatcatttgtagaagaaggtctacaggacagagcaataaccagagatttagattggggtattgaaattcctgaaaatgaacttggagatggaaaaaagatttatgtatggtttgaagctgtaataggttacttgtcagcttcaaaagaatgggcaatgaacaatggaacccctgaggcttggaaagatttttggttagataaagattcagagtcatactattttgttggcaaagacaacgttccttttcatgcaataatctggccggcaatgctgcttgcctatggagatttaaatttacctacaaatgttccagcaaaccaatacatattaatcaaaggagaaaaggcatctgctagtagaggtgtgggaaagacgcttaatgattatctagatgaatggaatcctgattcgctaagatattcacttgcaagtattcttccggaacaaaatgattcagagatttctgaggatgaaatgataagaagaaacaatgaagaacttgtagcagcatggggtaacctcgttcaaagagtgttttcacagtacataaataattttgatgatctagatacaagttttgaatatgaaaaaattgatgaagaactcatagaaggtgcaaaaaactgttttaaaacaacaggagaaatgattgaaaaagtagaacttaaatcttcacttcaaaatgtaatggcttatgtgaattctattaatgcttatttaaacgagacggaaccatggaaagtaattaaagaagataaaaaaagagctactggaattttacattgtgcaattacttccattgatgcttgtgcaactatgtttacaccatttatgcctacaacttccaaaatagtaagtaatgctattcaaaaagaagatgaaaatagttggggaataaatgaaattaaaaaaggtgccccattagaaaacattggacaccttttcaaaaaatttgattagc

SEQ ID NO: 296754 - DNA, 745 bp, Unknown
  Bacterial polypeptide expressing nucleotide sequence isolated from the Sargasso Sea
atgaaagataagcaacgtcaaattttggtcactagtgccttaccatacgcaaatgggccgattcatattgggcacatgcttgaatatatccaaaccgacatctgggttcgttttcaaaaaatgagaggaaaccagtgtttttatatatgtgcggatgattctcatggtacaccgataatgttaaaagcgcaggaaaaaaatgtgcccccagaaaccctaattgaacagatgaaaaacgagcatgaacgtgattttcatgatttcgcaatagattttgacaattactacagcactcattcaacagaaaatcagatgcttgcaaatattatttttgaaaaattaaatgagagagggcacataaaaaaaagggtaatcaagcaattatatgatcctgaaaaaaatatgttcctgccagaccgttttatccgtggaacatgtccaaaatgtaatgcaactaatcaatatggtgacaactgcgaggtatgcggcgcaacttattctccaactgatttaattaatccaatttctgcaataactgggaaagagcctattgagaaagaatctgaacactactttttcaaactctacgactttaatgaaattttgcataaatggacgcgtgaggggcacctacaaaatgaagtaactaacaaacttgatgaatggtttgaagcaggattacaagaatgggatatatctcgtgatgaaccttattttggcttaaaatacctaatacagaaaataa

SEQ ID NO: 296755 - DNA, 1216 bp, Unknown
  Bacterial polypeptide expressing nucleotide sequence isolated from the Sargasso Sea
tgatatattaaaaagattttatgattgtagaggcctcaattcttattttctaacaggaacagacgagcatggacaaaaggttgaaagagctgctcaagaaaaaaatatagatcctcaaaaatttacggatatggtttcagaaaattttaaagatttaagtaatttattaaatttatctaatgatgattttataagaacaacagaagaaagacataaaaagtctgttcaaaatctatggagagttctgttggaaaaagatgaaatttatttgtccaaatatagtggatggtattctgtaagagatgaagcttttgtagctgataatgaaatagttgaaaaaaatggtaaaaaatataacagttttggatctgaattatcttgggttgaagaagagtcatacttttttagactttctaaatggcaagacaaattgttagatttttataaaaataatccaaattttatagtcccaaaatctagatctaatgaagttattaaatttgttgagtcagggttgaaagatctatccgtttctagaacaacatttaaatggggaattgatgtccctacagatgaaaaacatattgtttatgtttggttagatgcactaactaactatatttcagctttagattatccaaataaaaattctgatttatataaaaaatattggcctgggatacatgtagtagggaaggatataataagatttcatgctattttctggcctgcttttttaatggctgcagagttagatccaccaaagcagatcgtagcgcatggttggtggacaaatgagggtcaaaaaattagtaaaagtcttggtaatgtaattgaccctaaagaattgattgatgaatacggtctagactcagtaagatattttctttttagagaggttccatttggcaatgacggtgatttttcaaagatggctatcaaaaatagaattaatggtgaattggcaaataactatggaaatttaatacaaagaatacttagtttcatttgtaaaaatttagaacaaaatattgatttaactaaagataattttaattttgaaattttaaaacaaattaatgactctgaaaaagagttgtttgactatatggaaaattacaaatatgacgaataccttaaaaaattattcttatttatgaatgatttaaataattatgtcgataaatctgctccctgggtattaaaaaaaacagat

SEQ ID NO: 296756 - DNA, 1606 bp, Unknown
  Bacterial polypeptide expressing nucleotide sequence isolated from the Sargasso Sea
atgaagtatttaataacaagtgctcttccctatgcaaatgcgccattacatctcggacatattttagaaataattcaaacagatgtttgggtgaggcatctcaatttaaaaggtttagaagcccattatttttgtgcaagcgatacccatggaactcctgtaatgcttaagtcaaaggaggagaatatcactccagaaaaactaatagaaaatatttatggaattcataaaaatacttttacaaactataacgttaacctagccaattttcattcaacacatagtgatgaaaataaacaactcacaattgagatatttaaaaaagcattagacaaggggtttgtgtatacaaaaaaaataaaacagctatttgataatgaggaaaatatgtttttgtcagataggtttgtaaaaggcacttgccctgcctgtggagcagcagatcaatatggagatgcatgtgaagtatgtggttcaacttatgatgcattagatctatcagatcctatatctacactttctgattcaaaaccatcaataaaagagtctgaacattatttttttaaattaaatgaattatctgggtacctaagctcgaaagtagatgagctttctaaccaaagcccaataaaacataagcttaaggaatggcttgatggagagttgaaagactgggatgtttctagagatgaaccttattttggtttcaaagtacctggagaagaaaataagtatatttatgtatggatggacgctccagtaggctacctttcgtcaataaaaaattggtgtgataaaaataaatatgattatgaaaaactattatcagataaagacacgaaactagtacactttataggcaaagatattgtttattttcatttattattttggccagcaatgcttcacgcagcagatatagagaatatagaagaagtctttgttcatggattcttgactatagagggaatgaagatgtcaaaatcacgtggaaattttatacttgctgacaaagctcttgaatatgctaatgcagatttttatagatattatctatcttcaaaactaaatactgatatttctgatataaatttctcagttgatgattttgtgcaaaaaattaatagtgatttaattggcaaatatataaatatagcgagtagaactcaaaactttcttacaaaacataataattccgaagttaagcaaaactgtcagaatgaaacaaataaatataaagatttatatgctgaaattatcggccaaactaatgacagagaatactcaaaagcattaaagaatattatgtcaattgctgatgaagcaaattcatatatttcatctatggagccatggagcaaagcaaaagatggcgatatagattcttgcatagaaatatgttcagaatcattaaaccttttcaaggatctcactatcctgttaagtccgtatataccaaacattaccgagagtttatttgagttgttaaatctgaaacaaacagactatgatcaaataagcaaagattgtctcacagaagtaaagccttttaaggctatcataacaagacttgaaaaatctgaatttgagggaatacttaactagt

SEQ ID NO: 296757 - DNA, 1537 bp, Unknown
  Bacterial polypeptide expressing nucleotide sequence isolated from the Sargasso Sea
tatgacttttgtcattactacacctttatactatgttaatgataaacctcatttaggaagtgtatatacaacaataatttgtgactcaatagctaggtataaaaggcttgcaggtgaagatgttattttcatcactggtgttgatgaacatggtttaaaaatacaaagaacagctaatgaaaagggtattgcaccaaaatcacattgtgatgaaatctcagaagtctttaataataattggaaagattggaatatatcctttgacaaatttataagaacaagctcaaaaaatcatgaatttgttgttaatgaattttatgaaagagtaaaagcatcagatgatatctatatgggagttcaaaaaggttggtattgtgtcggttgcgaagaatttaaagataatccagaaaattcatcaacatacaagtgtccaatacatcaaaaaaatctagaatggaaaaatgaagagaatctcttttttaggctttcaaaatatcaaaaagaaatcgagaaaataatcaacgaaccttcttttatagagccaatagaaagaaagaatgaaattataaattttgtttctagaggtttaaaggatttttcaatttcaagaacaaatgttacatggggaattccagtccctggttacgataaccataccttttatgtgtggtttgatgctttacttggatatgtaagtgccattagttctgatgcgacagaacattcattggaaaaatcaattaatggaggatggccagctgatgttcatttaattggtaaggatattctgagattccatgctgtatattggcctgcaatgctcatttctgccaaaatgaaagttcctaaaaaggtttttgggcacgggtttcttacaagagaggggcaaaaaatgggtaaaagtttaggaaatgtactcgaccctgatttattgcttacaaaatatggaaatgatcctgtaaggtggtacctcattaaagacatatcactaggaaatgatggagattttcaagataaaagatttgttgacatcatcaataatgacttagctaatacaattggcaatttattaaatagaacatcatctatgtctagaaaatggtttgataataaagtgccaaataatgaaaaaattctaagtgaaaataaattagagaattttgccaaaattgcagtagaaaaatatatttataactttgataactacaaattagatttagcagctaatgaagtacttagcctagcaattaatacaaatttgtatttgaatgataatcagccatggctgctaataaaagaaaaagataatctacctctagttaaagaaattatttataacgttttagaaagtacccgaataataggattattattacttcctttattgcctgaattatctacaaaaattaatgaacaacttggttcaacatataataaaaatgttccctggcaacaacaattaaaatggggattattaattggtgactcgtgtcttcctaaaccatttccaataattaacaaacttgagtatgaataa

SEQ ID NO: 296758 - DNA, 517 bp, Unknown
  Bacterial polypeptide expressing nucleotide sequence isolated from the Sargasso Sea
cctgggggaaaccctcagctgggacggtgtcgcccagccgctaaccaaccatcagctggccccgttcaaggcgctgttctcccgtatcgaaccggccaaaatcgaagccatgatcgacgcgtccaaggaagatctggccaaagagcaggcaccgaaagcgagcggcccgctggtagacgatcccatcagcgaaaccatcagctacgacgacttcgccaagattgacctgcgcgttgcgctgatcaagaaggccgaagcagtaccggaagcggacaaactgctcaagctgcagctggatatcggcggtgagacccgccaggtgtttgccggcatcaagtccgcctacaacccggaagatctggaaggcaagctgaccgtgatggtggccaacctggccccgcgcaagatgcgcttcggcatgtccgaaggcatggtgctggcggcaggcccgggcggcaaggatctctggatcctggagccgcaggacggcgcccagcccggcatgcgcgtcaagtaa

SEQ ID NO: 296759 - DNA, 799 bp, Unknown
  Bacterial polypeptide expressing nucleotide sequence isolated from the Sargasso Sea
aatgaatttttatataactacaccaatttactacactaatgatattcctcatataggtcatgcctatacaagtatagcttgtgatattattgcacgatataataaattattaggaaacaatgtattctttttgacaggtacagacgagcatgggcaaaaagtagaaaaagctgctattaattcaaacttaaaacctaaagaattcgtcgataaactttcagttaattttattaatttaataccttttttaggatgtgaaatagatgattttataagaactactgaagaaagacatattaaagctgcacaagaactttggaagcaattagaaaaaaataatcaaatatatctttcaaattatgaaggttggtactcagttagagatgaagcattttatttggaaaatgaattaaaaaagattgatggtaaatatgtgacggataatggatcgcctgtagagtgggtaaaggaggagagttatttttttaaactttcagaatggcagaataagttaatcgactattatgaaaaaaatccagaatcaatcttgccaaaaacaagatataatgaagtattaagttttattaaaagtggattaaaagatctttctatttcaagaacaacttttaactggggagtccccgttccaaataattcgaagcatgttatgtatgtttggattgatgcattatgtaactacttaactgcaattggttatccagatataaataataaaaattataaacaattttggcctgcaacacacattgtggggaaagacatattaagatttcatgca

SEQ ID NO: 296760 - DNA, 1279 bp, Unknown
  Bacterial polypeptide expressing nucleotide sequence isolated from the Sargasso Sea
gttgaaaccatgggatatatcaagagacaagccatactttggatttgaaatacctggagaaaaagataaatatttttatgtttggcttgatgcaccgattggatatttagcttctgcaaaaaattgggcagaaaacaataatatggatatcaaagatttatggggtgaaagctctgattatgaaattcatcattttattggaaaagatattgcttattttcatgccctattctggccagctcttttgaagtcatcaaatattcgcttacctgagtcaattaatgttcatgggtttttaactattgatggtgagaagatgtcaaaatccaatggaacttttattaatgcagacgactttgctgaaaactatgatggtgagttattaagatattattttgctgataagtttaataattcaattgatgatctagattttaatgaagatgaatttatccaaaaaattaattcagatatcgtcggtaaatatctaaatattgctagcagagtttcaaaatttattgagaagaatggtaataatctctctgcaaacctagatgagggctttattgagaaaaatctatcaatgattgacgaagtgattgagcattatgaagacttaaatctttctaaatctgtaaaaattattatgaagatggcagatgaagttaataaatatattaatgagaatgagccttggaaatccagtgaagaaaaggctgtagaggtatcttcgacagcaattaactgttttagagttatttcaatattgcttaatcctgttctaccaacattaacatcaaaagctttagaggtatttaatgaaagttctacaaatgattttaataatattaagggttaccttgtagatacaaaaattaatccatataagcccctattaaaaagattagaaaaagctaaaataaatgaggaaattgaaatggaagattcaaatttaattaatatcaaagattttgcaaaggttgagcttcgcatagctaaaattgttaaagctgaagctatagaagaagctgataagctcataaaattacatcttgatgtgggtgatcttggtgaaagaactgtttttgctggcataaaaagtgcatatgatcctgagagtcttaatggaagacatgttgtattagttgcaaatcttgagccaaggaaaatgaaatttggagtatcggaaggaatggtcctagcgtcgagtaatgatgagggatcaatttatttaatatcaccagatgaaggtgcaaagccaggtcagttagttaaataa

SEQ ID NO: 296761 - DNA, 1138 bp, Unknown
  Bacterial polypeptide expressing nucleotide sequence isolated from the Sargasso Sea
ttggcccgccatgctccacggggccggcttccgaactcccacggcggtatttacccatggtttcctcacaatcaatggacagaagatgtccaagtcacgtggcacttttattaccgcgcgcacctatctcgatcacttggatcccgattacctgcggtattacttcgccgcaaaacttaacaatcgcgtagaggatcttgatttcagcgttgaggattttgttacccgagtaaacgcagacctggtcggtaaagttgtcaatatcgccagccgttgctcaggcttcatcgagaaacatttttccggccaattgtctggcatagagcccgaggtcgcactcaatgaacagtttcgagagcggcacggggtcatttgccagcacttcgaacatcgagagtacagcagggccgtacgagagatcatgtcgctggccgatatggccaatcaatacattaacgatctcaaaccctggattatcgcgaaggacccggatcgacgggatgaactgcaggctgtgtgcacccatggtctaaatcttttccgcatgttgatcacctggcttgcacccgtggtgcccgaccttgctgagcgcagtgcccagttcctgcgtcacccggtttccgcgagagaggcgttcagtcagatccaatcgcccctgctcaatcaccaaatcggcccgttttcccgactattggaccgaattgatctcgaccaggcccaagccatgatggaggaaacccaactgatgaattctgacgccaccgactctgccgcgggaaaacacttgcgggacgagccgttatcccctcagatcactattgatgatttctcgaaagtggaccttcggatcgttcgcatcattgccgccgagcatgtcgagggggcagataaactcctgaagttcactttggaccttgggagtgaaacgcgagacgtgtttgcgggcattaagagcgcgtacgatcctcaggacctggtaggccggcaggtcgtcatggtggcgaatcttgccccccgaaagatgcgctttggggtatccaacggaatgatccttgccgcttcaggtgttgatgatgatggcgggatcttcgtgctctctcccgacgccggggcacaacccgggatgcgtgtacgctaa

SEQ ID NO: 296762 - DNA, 1654 bp, Unknown
  Bacterial polypeptide expressing nucleotide sequence isolated from the Sargasso Sea
atgtcgaataatactgaaaaaagaaatattttagttacaagtgctttgccatatgcaaatgcaccgcttcatctaggacatattttagaacattgccaaacagatatatgggtgagatatcagaaattgattgggaatcactgtacttatgtatgtgcagatgatgcacatggcacacccattatgttaaaagctgaggagctaaatattaaacctgaagaattaattaaagacatatatgacaatcatataaatacattcaatgcatataatataagtcatgataattatcatacgacccatagcgaagaaaatagaatactttcagaaagaatttttaatgctttagatgaaaaagggctaattgaagttaaagtaatcgaacaactatatgatacttctaggaatatgtttttatcagatcgctatgtcaaaggcacttgtcctaaatgtaacgcagtagatcaatatggagataattgtgaggtgtgtagctcaacttatgaagcaactgagttaatagaccccatttcagttcttagtaatactactcctataattaaagaatctgagcatctattctttaagttaagtgaattaaaatccgaaatcaatgactggctagaaacttctaagattcaaaaaccagtacataataaactttctgaatggttagaagaagatttaaaagactgggatattagtagagattcgccgtattttggttttgagataccgggtcataaagataagtttttttatgtatggttagatgcacctattggatacttagcgagtcatagtaattacctaaacaagcaaaattcaggacaatttgaagaattctgggatgcagatgcagattcagagatttatcactttataggcaaggatattatgtacttccacactttgttctttccggtaatgttatcgaatgctaattttaaaatgccatcaggtgtttttgcgcatggctttcttacgcttgatggagagaagatgtctaaatcgagaggaaatttcatatctgctgatgattttgtaaaggtagtagacccagaatacttgagatattattttgccactaaattaggtactggcgtagaggacattgacttaaatttagaagacttcaaacaaaaggttaactctgatttagtaaataaagttgtaaatattgcaagcagatcagctaattttttaaataaatattttgagaacgaattatcaaaaaaaattcataacaaagatctcattgaatcttttgttgataagtctgaattaattgctgagcattatgaaaatttagagctaagtaaagcgatgaaagaaattatgtcttgtgccgataaagcaaatcaatatgtagataaaatggaaccatgggttctgattaaaaatgaagagaatcgagaactagttcatgaaatatgcagtacggcgttaaatctatttagaatgcttgtaattatgatcgaaccagttaccccagaattatcgagaaactcatttcttttcttaaatgaagagccaacttggaaagatatcaataaacctttattgagtcataaaatagagtcatttcaacctttgttgtctaggattgaagatgatcaaattaatcagcttatggagtttaaaaatgcctgag

SEQ ID NO: 296763 - DNA, 217 bp, Unknown
  Bacterial polypeptide expressing nucleotide sequence isolated from the Sargasso Sea
tatgcgtaaaattctagtcacaagtgctctcccatatgcaaatggttctatacaccttgggcacctggttgaatatcttcagacagatatatgggttagaaaccaaaaaatgtccggaaatacatgctactacatttgtgcggatgatgctcacggaactccgataatgctgaaagctaaggagcttgatatcagacctgaggaattaattcaaaaa

SEQ ID NO: 296764 - DNA, 325 bp, Unknown
  Bacterial polypeptide expressing nucleotide sequence isolated from the Sargasso Sea
accatcagcattgatgactttgccaaactggatttacgggttgcccgcattatcaacgctgaacatgttgaaggcgctgacaaactggtgaaactgcagctggacttaggcaacgagcaacgtcaggtgttcgccggtattaaatcagcttaccagccggagcagttaattggtcgtttgacggtcatggttgccaacctggctccacgtaaaatgcgttttggcatgtctgaaggcatggtgatggctgcaggccctggtggcagtgatattttcctgttaacgccagatgatggtgcgacgcctggcatgagagtgaagtaaa

SEQ ID NO: 296765 - DNA, 843 bp, Unknown
  Bacterial polypeptide expressing nucleotide sequence isolated from the Sargasso Sea
caaattatttaagtgcattaaattatcctaatacagacgatgatttgtttaaaaaattttggccagcctcaatacatttaattggaaaagatatacttagattccatgctgtttattggcctgcttttttattagcagcaaaaattgatttaccaaagagagtctatggacatggatggatactttcaggtgaagaaaaaatgtctaaatctaaaggaaatatacttgatccattagagataattaaagaatatggtttagatcctttaagatattatttaattaaagaagtttcttttggtaatgatggaaatatatctcaagaaagactagaagattgtataaatagtgatttagctaacaattatggaaatttgtgtcagcgtgtaactgcttttgcaataaaaaattgtgatggaaaaattccatcagaagttaaatttaatgatgaggatttattcatactaaataagtataaagataatttagataatattaggtctcaaattgacaatcaaaatattaatttttacatcgattatattgtaaattcattgtttgaagctaacaaatattttaatgatcaggaaccatggaaaaagaaagataatataattagattaaatacaattgtttacactacattagaaattgttagaaaaataagttttttattgtatccaattattccagattcttctttaaaagccttaaagatttttaacattgaagaaaatgatataaaattagatacagtttcaaataatgactatttaaaaaaaggtattaatattaataaaataaacatactttttaaaaaaatagaaaaaaactatgattgac

SEQ ID NO: 296766 - DNA, 1138 bp, Unknown
  Bacterial polypeptide expressing nucleotide sequence isolated from the Sargasso Sea
tagagatgaagcattttatacagaatcagaattaattaaaaaagaaaataatttttttactgtttcaggttcacctgttgaatgggttaaagaggaaagttatttttttaaattatcatcatggagtgaaaaattaattgaatattatcaaaataatcctaactccatactaccaaaatctagatataatgaagttttaagctttattaaaagtggtttaaaagatttatcaatatctcgaactacatttaagtggggtgttcctgtaccaaataatccaaatcatgttatgtacgtatggatagatgctctatgcaattatcttacatcaatcgattatcccaatataaattctgataaatttaaaaaattttggcctgctactcatattattggaaaagacatattaagatttcatgctgtttattggcctgcatttcttatggcggcaaatttagagcctccaaaaacaattttcgcacatgggtggtggacaaatgaaggtaaaaaaatttcaaaatctataggcaatgttattgatccatatgaaattattaatgaatatggattagaccaaataaggttttttttgtttagagaggtaccatttggtaatgatggagatttttcaaaaaaagcaatttctcaaagaataaatgctgatttgtcaaataattatggcaatttagttcagagaattacatcatttgcagttaaaaatagtaattcgtttatagaaaaaacagaagattttactaatgatgataaaaatttattaaatttattaaatgaaaaatttttagaatattcaaattttatgtatacatatcaaattgataaagctttaaaatcaatttttgacttattgtctaaaacaaattcttatgttgataatcaagcaccttggaatttaaaaaagactgatattaagcgtatgaatgtagttttatttgtagcacttcttattattagaaatagtagcttaatgttaatgcccataataccagaaagtgccaataaagtactagatatactttcaataaaaaaagatgatagaaattttagtattttagaaaaatctattttacatgattttataataaaaaatcctaaaccaatttttcctagaatagattag

SEQ ID NO: 296767 - DNA, 1021 bp, Unknown
  Bacterial polypeptide expressing nucleotide sequence isolated from the Sargasso Sea
atgggaaaaacctttattagaattttatgagaaaaataaaaatttcatacttcctgaaagtagaagaaatgaagttattagtttcgtaaaaaatgggttaaaagatttatctgttagtagaaaaacttttacatggggtataaatgtaccaaatgatgaaaaacatgttgtgtatgtatggctagatgcgctgactaattatttaagttcattaaaatatccagatgaaaataatgatttgtttaagaattattggccagccgatatacatattattggcaaggatatattaagatttcatgcaatatattggccagcctttttattagcagcaaatattaaacctcctaaaagagtttatggccatggatggatattgtctggtgaagaaaaaatgtctaaatcaaagggaaatattttagatccattagaaattatcaatatatatggattggatccattaaggtattacttgctgaaagaagtatcttttggaaatgatggcaatatttccgaagaaaaattagaaagttgcataaacagtgatttggcaaataattttggaaacttatgtcaaagagttctttcgtttgctgaaaaaaattgttcatcaataattacagactataaatttaataaagatgatttaataattttagaatcattaactgatatagaaaaaataagagcttttattgatattcaagatattaatcaatatatgagttttattgtagatagactttttgcatcaaataaatattttaatgatcaggaaccctggaaaaaaaaaaatgacaaattaagacttaatacaattgtttatacaactctagaattaataagaaaaataactatcctattatatcctgtaatgcctcaaacatcgatcaaagtattaaacatatttaatattaaagaggatcaaattgatttttcatctctaaaaaataatgaaattttaaaaaaaggaattaaaattaataaattagatattttatttaaaaaaatattaaaatga

SEQ ID NO: 296768 - DNA, 316 bp, Unknown
  Bacterial polypeptide expressing nucleotide sequence isolated from the Sargasso Sea
atgaagccattttatattactacaccaatatattatgtaaatgacaagcctcatattgggcatgcatataccactattctagcagatgtattagcaagacactatcgaaatattggcagggatgttttccttcttacaggccttgatgagcatggacaaaaggtgcagcaggcagcagaatcaagaaatataaaccccaagcaacattgcgatgaaatggcgccacgatttttaaaactgtgggataagcttcacataagctacgatgatttcattcgcactacagaaaaacgccataccgatatcgttaaatatt

SEQ ID NO: 296769 - DNA, 499 bp, Unknown
  Bacterial polypeptide expressing nucleotide sequence isolated from the Sargasso Sea
atgttaaataaatattttacaactccaatttattatgtgaatgacaaacctcatataggacatgcatatacttccattgctgttgatattttaaaaagattttacaaatgtagaggattaaattcttattttttaacaggtactgacgaacatggacaaaaagtagaaaaagcagcattagaaaaaaatatagatcctcaacaatttactgataccgtatctgagaattttcgagatttgagtagtttattaaatctatctaatgatgatttcataagaacaactgaggatagacataaaaaatctgttcaaaatttatggaaagttcttctagagaaaaatgaaatttatttatctaagtatagtggttggtattctgttagagatgaagcttttgttgcagataacgaaataatagaaaaagatggaaaaaaatataatggttttggatctgaactgtcctgggtagaagaagagtcttatttttttagactttcta

SEQ ID NO: 296770 - DNA, 1360 bp, Unknown
  Bacterial polypeptide expressing nucleotide sequence isolated from the Sargasso Sea
catgagtgaaaccttttacgtcaccaccccgatttattatgtcaacagccatccccacataggccacgcttacaccaccatcgttactgatgtttttgtccgataccgaaagttatttggtgaagaaacctattttcttaccggaacagatgagcacgggcagaaaattgcggaatctgcccaggctgcgaatctcaaaccccaggagtttgtggaccggatgactgcggagtttcgggatatgtggcctcatcttcacatccagcaggaccagttcatccgaaccaccgatgcctttcacaagtctggagtccaggcagtgttgcagaagatttatgatcagggtgagatctacctcaaagattatgaaggactctactgcgtcggttgtgaacgatttctagaccaggaggagttgaccgaggaggggaactgtccggatcaccagaaaccgccccaggtccgccaggagaagaattattttttccgaatgagtgcataccaggagtggcttattggactccttgaagaaaacaaggatctggttcagcctgccaggtatcgcaatgaactgctgagttttctcaaggcacccctccaggacctctgcatttcaaggccgaaaagccggcttgaatggggaattgaccttcctttcgacaatgattttgttacctacgtctggttcgatgcgttgctgaattatgtcactgcattgggctggccggaggactcccgttatgagcagttttggaagcactgccatcatgtgatcggtaaggatatactcaaaacccacggaatctactggccctgcatgctcaaggctgcgggtttcccggttttcaaaaaattggctgtccatgggcattgggtggttaaaggcagtaagatgagcaagtctctgggcaacgtcgtcaatcctttggaaatgaaagacctgattggagtcgacgggttgcgctatttcctgttgagagaaatgagttatggagaagacgcgaatttcaacgaagatctggtgttcgcacgatatcacggcgagctttcgaacaatttcgggaatctgctgaaccgttccatttcgatgtcccgaaaaaatttcgaaaatgaggttcctcctcggggtgagccaggaaaacaggaaattgaactgtaccaaatgtttgagcgggaaacttctcagatcaaagcatgggtccaacagtttgagccgcatctggctttggaacggattgccatgatgagcagtgccgtaaacaaatatctcgatgaaaacaaaccttggaaacttgccaaagaggaggatcaaaaagaacctcttggaacagtactctatacggcattggatgcttcggct

SEQ ID NO: 296771 - DNA, 736 bp, Unknown
  Bacterial polypeptide expressing nucleotide sequence isolated from the Sargasso Sea
cgagagccgcgagttcagccgcgccatccgcgagatcatggcgctggccgacaaggccaaccgctacgtggatgacaaggctccctgggtcatcgccaagcaggaaggcgctgacgccgagttgcaggcggtctgctccgtgggcatcaacctgttccgggtgctgatggcctacttgaagccggtcatgccgctcttggccgagcgcgccgaagccttcctgggggaaaccctcagctgggacggtgtcgcccagccgctaaccaaccatcaactggccccgttcaaggcgctgttctcccgcatcgaaccggccaaaatcgaagccatgatcgatgcctccaaggaagatctggccaaagagcaggcaccgaaagcgagcggcccgctggtagacgatcccatcagcgagaccatcagctacgacgactttgccaagattgacctgcgcgtagcgctgatcaagaaggctgaagcggtaccggaagcggacaaattgctcaagctgcagctggatatcggcggtgagacccgtcaggtgtttgccggtatcaagtccgcctacaacccggaagatctggaaggcaagctgaccgtgatggtggccaacctggccccgcgcaagatgcgcttcggcatgtccgaaggcatggtgctggcggcaggcccgggcggcaaggatctctggatcctggagccgcaggaaggcgcccagcccggcatgcgcgtcaagtaa

SEQ ID NO: 296772 - DNA, 535 bp, Unknown
  Bacterial polypeptide expressing nucleotide sequence isolated from the Sargasso Sea
atgagtaaaaatttttatatcacgacaccaatatattatccgtcagcaaaacctcatatgggacatgcgtactcaagtattgttgctgatttttttgcaagaattaaaagaattcaaggatataacgttttttttttaacaggtactgatgaacatggtcaaaagatacaaagagctgctgaaaaagcaaataaagatcctctaaaattttgtgatgaaattagcaaaaccttcaaggatctatcatccatattaaacttatctaatgatgattttataagaacaaccgaaaaaagacatttcgtatctgttgaaaacctttggaacattcttgaaaaaaagggtgaaatatatctttcaaaatatgctggttggtattctgtatcagatgaagctttttataacgatgatgaaatcgatacagttgatggtaaaaaaatatgtaaaagttctggttcacctgttgagtgggtagaggaggagtcttttttttttaaactatcaaaatggcaagataaattattgaagttttatt

SEQ ID NO: 296773 - DNA, 715 bp, Unknown
  Bacterial polypeptide expressing nucleotide sequence isolated from the Sargasso Sea
atgacgcttgaaaataaaaaaatttttgtgaccaatgctttgccctatgccaatggtccgattcatattggtcatatggttggttacatacaggcagatatttggtctagatttcagagaatgcaagggcatgatgtggttttcatatgcgcaagtgatgcacatggaacaccaataatgttgagcgctgaagatctgggtgttgaaccagtggagcttgctgctgaatatactcgtcaacatgagaatgatttcaatgactttcacgtatcatttgacaactaccacacgacccattcggaagaaaatgaagaattggtcggagagatataccaaagactgaaagaaaacgactgcattcgtacagaagtcattgagcaagcctatgatgatcaggaaaatatgtttcttcctgatcgttacgtcagaggtacatgccccaaatgcaatgcccctgatcaatatggagacaattgtgaaaagtgtggcgcaacatacaagccaacagatctgattgatccgatctccgccatatctggaaaagcaccgagtttaaaagaatctgagcattattttatgaaactgacaaagtttgaaaatatgctcgaggattggatcgaaacaattgatatacactcatctgtaaaatcaaaactcaaagaatggtttgatgttggattgagagattgggatatttccagagatgcgccctact

SEQ ID NO: 296774 - DNA, 796 bp, Unknown
  Bacterial polypeptide expressing nucleotide sequence isolated from the Sargasso Sea
catgaacaattacttctatattactactcccatatactacgttaatgataaacctcatattgggcatgcctatacgactatacttgctgatgtcttaacacgctataatagaaatattggtcgaaaaacattttttttaactggactggatgaacatggccaaaaagtacaacaggcagcagaagaaaatggaatagacccgcaagagcattgtgaccagatggccccaaggtttaaggaactatggcaaaaacttcatatatctaatgatgactttataagaacgactgaagatagacataaaaaagttgtaaaagattttttacagatcgtaatggacaatggagatatatatgaatcagaatacgaaggactatattctgtttcagaggaacgtttcatcacagaaaaagaagctgaaagtggtgagtttagagatataaaaaaattaaaagaaaagaactacttttttaaaatgagtaaatatcaagataaactcattagtcatattgaaagcaatccaaaatttattcagccagaacatcgaaaaaatgagattcttggttttcttcgccagcctcttaatgacctatgtatttctaggcccaaatcaagattaaattggggaatagaattgccttttgataaggactatgttacctacgtatggtttgatgccctcataaattatattacagcggtaggctttaatcagggtactaaattatttgattcttggtggcccgtctcctatcatttgatcggaaaggatattctcacaacacatgccgtttac

SEQ ID NO: 296775 - DNA, 1735 bp, Unknown
  Bacterial polypeptide expressing nucleotide sequence isolated from the Sargasso Sea
ggaattaataaaagatgttcttaatgatcataaagaaacttatgacctatatggtattaaattcacaaatttttatactacccatagtgaagaaaataaaaaatactcagagaaaatatatttagaggcaaaaaaaaataacttaatatcaaaagaaatagttgaacaactttatgatgaaaatgaacaaatgtttttatcagataggtttattaaaggcagttgtcctaaatgcggagcagcagatcaacatggagataattgtggtgtatgtggcgcaagttatgatgttttagaaatcaaagaccctatatcaatattatctggaacaaccccaatcaaaaagaaaagtgaacacatattttttgacctaccccaaaaacttgagacattaagtaaatttttacatgaatcaaaacttcaaaaaccaattaagaataaattaaaggaatggctttcagatgatttaaaaaaatgggatatatcaagagatgaaccatactttggatttaagataccagaagaaaataataaatatttttatgtatgggtagatgcacctattggatatatagcttcaatggataattggtttaaaaagaataacttggatacagatactatatggtcaaacaaatctaattatgagatttatcattttataggcaaagatatttcatactttcatggacttttttggcctgcattattaagttctgccaatttaaaacttcctgatggtatttttgtacatggtttcttgactattaatggtgagaaaatgtcaaagtcaaaaggaacaggaatactcgcaaaagattttgcaaaaatatgtgatcctgaaacgttaaggtattattttgctgccaaattaaatgataaagttgaagatattgatttgaattttgatgattatgttcaacgaataaattcagatcttgttggaaagtacttaaatatagcatcaagatctgcatcattccttaaaaaaaataagaataatttatctgataatattaataaagaattaataacattattaattaatgaaaaacaaaatattattaatctttatgaagaaagagaatattcaaagttaataagattgataatggatttagcagataatgttaataaatatataaatgtacaaactccatggaaaaaagatttaaatgatgctgttgatatatgctcaacagcattaaatgcattcaaaatcataactatttatttaactccaataatcccaaaccttgctgaaaatgcatataaatttctaaacctaaaaaattgttcttttgatgatgtagacacattattgaatggacaaattaataactatgagtcattgctaaatagactagaaccattaataattccagaggaagataatatggaaaataaaaatataattgatataaaacaattctcatctattgatttaagagttgcaaaaataattaaagctgaagatgttgatggagctgataaattattacgtctaacattagatgttggtgagttaggtacgcgaaatgtatttgctgggattaaaagctcatataaacctgaagatcttactgatcgaatggtagttctagttaataatcttgctcctcgtgagatgaagtttggtgtttctgagggtatggtacttgcttctagtaatgataatggaatttacttaatatcacctgataaaggtgctgaagccggtatgaaaataaaataa

SEQ ID NO: 296776 - DNA, 1109 bp, Unknown
  Bacterial polypeptide expressing nucleotide sequence isolated from the Sargasso Sea
aaatacagttccaattaagaaagaaagtgagcatatattttttgatcttcctcaaatgaataaaatgcttaaagattttttaaaaaatgtagatcttcaagaatcaattaaaaataagttaaacgaatggctaaatgatgacttaaaaaaatgggatatttctcgagatgcgccctattttggttttgaaataccaggagaggagaataaatacttttatgtgtgggtagatgcacctataggttatttagcatcaatctctaactgggcagaaaaaaataaattgaatatgcaagatttatggtcagaaaattctaagtatgagatttatcattttattggaaaagatattgcttattttcatggattattttggccagcgctattgagtgcagcaaacctcaaattaccaagtggaatcaatgttcatggttttttaaccataaatggtgaaaaaatgtctaagtcaaaaggtacaggtatattagcaaaagaatttgctgagattacaaatcctgaaactttgagatattactttgcagctaaacttaataacaaagttgaggatatagatttaaactttgatgattatgttcaaaggataaattctgatttagttggcaagtacttaaacattgcatcaagatctgcgtcattcttaaagaaaaataataatatcttatcaacaaatattgataacaatattcttgacaatttagcgtctaaaaaagatgaagttgtgtccttatatgaatctagagaatactcaaaattagttagaattattatggatttagctgatgatgttaataaatatataaatgagcaaacaccatggaaaaaagatatagatgaagcagttgatataagttcaactgcaataaaagctttttatattttatctttatatcttcatccaatcatacccagaattaccaatgaagcatttaaattcttaaatattaaaaaagtttcaattaataatgttgatgaagcaataataaaaataaatgattacaaaccattgctaaatagacttgaaaaaataataattcctgaggaagaaaatatggataatgtaaatttaattaatattgatcaattttcag

SEQ ID NO: 296777 - DNA, 1464 bp, Unknown
  Bacterial polypeptide expressing nucleotide sequence isolated from the Sargasso Sea
aatgaaaaaaaacttttacataactacacccatctattatgttaatgacaaaccgcacattgggcatgcctacacaacaatccttgcggatgtattagctcgttttcatcgtgactcaggttatgatacattttttctaaccggcttagatgaacacgggcaaaaagttcaagaagcagctgagcagaaggatattgatcctcaaaaacactgtgatgcaatggccccaaggtttattaagctttggcaaaagctacatatttcgaacgatgatttcatccgtaccactgaagacaggcataaaagaattgtacagtatattttacaaagagttatggataatggagatatttatgaagcagaatatgaggggctatattctgtatctgaggaaagatttatcacagaaaaagaagcagaatcgggagaattcagaggcataaaaaaattaaaggaaaagaattatttctttaagatgagtaaatatcaagatcaattaatagatcacattcaatcaaatccaaaatttatccaaccagaacataggaaaaatgaaatcttagggtttcttcgaaagccgttaaatgatctatgcatatcaaggcctaaatcaaggttggaatggggtattgagctaccttttgataagcaatatgtaacctatgtttggtttgacgcgcttattaattacgttaccgccgttggttttaatcaatcaagtgaaaacttcaaaaaatggtggcccgcatcttatcatttaataggtaaagacatactaacaacacatgcagtctattggcctacaatgctattctctgctggggtctcattgccattatccatctttgcacatggctggtggcttactggggaatcaaaaatgagtaaatcgcttgggaacgtaattaatccgatggacctcattaaggattatggggttgatcctgtaagatattatttgatgagagagatggttttggggcatgattctagttttaccatagaatccttcatccagcggtataatagtgaccttgcaaatgactttggtaatctcctaagcagagtaacaacgctgataaagaaaaattatgatggtgtgatacctgaacctggagatttaagtgatcttgacctaagcattaagagaaaaggggaagctctatctaaaacagtccatcaatatgtagatgatatgcgattgaatgatgctattgaagaaataatgcaattcattcgcggggttaataaatacatggaagagaacgcaccctggaagatggtaaaagaagacaaggatggagctgggaggattttatataccgcaggagaagcattgagattaggcgctgtattattatctcctataatgcctaatcgaaccaaaacattactagatgcgcttaatgtaaaagagaataacttttcttggggaacgcttaaagcgggtactaggataaaaag

SEQ ID NO: 296778 - DNA, 1522 bp, Unknown
  Bacterial polypeptide expressing nucleotide sequence isolated from the Sargasso Sea
aatgaatttttatataactactccaatttactacactaatgatattcctcatataggtcatgcttatacaagtatagcttgcgatattattgcgcgatataataaattattaggaaacaatgtattctttttaacaggtacagacgagcatgggcaaaaagtagaaaaagctgctattaattcaaacttaaaccctaaagaattcgttgataaactttcagttaattttattaatttaataccttttttaggatgtgaaatagatgattttataagaactactgaagaaagacatattaaagcttcacaagaactttggaagcaattagaaaaaaataatcaaatatatctttcaaattatgaaggttggtactcagttagagatgaagcattttatttggaaaatgaattaaaaaagattgatggtaaatatgtgacggataatggatcacccgtagagtgggtaaaggaggagagttatttttttaagctttcagaatggcaagataagttaatcgactattatgaaaaaaatccagaatcaatcttgccgaaaacgagatataatgaagtattaagtttcattaaaggtggattaaaagatctgtctatttcaagaacaacttttaattggggagtgccagttccaaataattctaagcatgtgatgtatgtttggattgatgcattatgtaactatctaaccgcaattggttatccagatacaaataataataattataataaattttggcccgcaacacatattgtggggaaagatatattaagatttcatgcagtttattggccagcttttttaatggccgcaggtatcgagccacctaaaagaatatttgcacatggttggtggactaatgaaggacaaaaaatttctaaatcacttggtaatgtcattgacccttatgaaataattgatgaatatggtttggatcaaataagattttttttatttagagaagtaccttttgggaatgatggagatttttcaaaaaaagcaatcgcaaatagaattaacgcagatttatcgaataattttggtaatttagtgcaaaggatttcatcatttgctgtaaaaaataatgattctatactaaagccaacagaaaatttaactaatgatgatcaggatttaattaaaattcttcaaaataaatttgatgaatattgtaaatttatgaacaatcaacaaattgatagagcaatcaagtctgtcttagaattaatatctgctggtaacgcatatgttgacactcaagcaccatggacattgaaaaaaacaaataaaattagaatggaagaagttttatatattattacaaatataattattaaatcagctataatgctctatccaataataccaactagttcaaaaaaaatacttaatatttttaattataatatggacaataataaatttgagaatttaactcaactaatcaatcaaaatataaaaataaataatccagaaccaatatttccaagaatattgaatgattga

SEQ ID NO: 296779 - DNA, 1606 bp, Unknown
  Bacterial polypeptide expressing nucleotide sequence isolated from the Sargasso Sea
catgaagtatttaataacaagtgctcttccttacgcaaatgcgccattacatctcggacatattttagaaataattcaaacagatgtttgggtaagacatcttaatttaaagggtatagaggctcattatttttgtgcaagcgatactcatggaactcctgtaatgcttaagtctaaggaagaaaatattactccagaagaactaatagataatatttatagcattcataaaaatacttttaaaaactataacgttaatctagctaatttccactcaacacatagtgatgaaaatgaacagctcacaactgagatattcaaaaaagcactagataagggttttgtatatacaaaaaaaataaagcagctatttgatgataaggaaaatatgtttttgtctgatagatttgtaaaaggtaattgtcctgcttgtggtgccgcagatcaatatggcgatgcatgtgaaatatgtggttcaacttatgatgcattagatctatctgatcctatatctacactttctgattcaaaaccatcaataaaagagtctgaacattatttttttaaattaaatgaattgtctgactatttaagctccaaagtagatgaactttctaagcaaagtccaataaagcataagctcaaagaatggcttgatggagatttaaaagactgggatgtctctagagatgagccttactttggctttaaagtgcccggagaagaaaacaagtacatctatgtatggatggatgctccagttggttatctttcatccataaagaattggtgtgacaagaataaacatgactatgaaaaactattgtcagacaaagacacgaaactagtgcactttataggtaaagatatagtttattttcatcttctattttggccagcaatgcttcatgcagcagacatagaaaatatagaagaagtctttgttcatggatttttgactatagaaggaatgaagatgtctaaatcacgtggaaattttatactcgccgatcaagctcttgaatatgccaatgcagatttttatagatattatttatcttcaaagcttaatactgatatttctgatataaatttttcagttgatgattttgtgcaaaaaatcaatagtgatttaattggtaaatatataaatatagcgagcagaactcagaactttcttacaaaacataacaattctcaagttaagcaaaattgtcagaatgaaacgaataaatacaaagatttgtatgctgaaattgttagccaaactaatgatagagaatattcaaaagcattaaaaaatattatgtcaattgctgatgaagcaaattcatatatttcatctatggagccgtggaacaaagcaaaagatggagatatagattcctgcatagaaatatgttcagaggccttaaatctatttaaagaccttacaattctgttgaatccatatattcctaatgtggcagaagatctttttgatttactgaatatagaacaaacacattatgatcaattaggaaaagactgtcttaaagaaattaaaccttttaaaccaatcataacaagacttgaaaaatctgaatttgaaggaatactagactaa

SEQ ID NO: 296780 - DNA, 1609 bp, Unknown
  Bacterial polypeptide expressing nucleotide sequence isolated from the Sargasso Sea
tatgaatgacgttttctacataacaactccaatttattacgtaaatagtcatccacatataggacatgcatacaccacgattgctacagatgttttgacgcgctacttgaagctgtttggaaatgagacttattttcttacagggacagatgagcatggacaaaagatcgctgaatctgcagcaaattccggtattgaacctcaggaatttgttgacaaaatcagccaggaatttcgcgaattgtggcctcatctgcatattgagcacgaccagtttattcgtacaactgattctaagcacaaagcctgtgttcagcaaatattacaaaaaatatatgatcaaggtgagatatatctgaaagaatacgagggaatttactgcataggctgtgaaaggtttttggatgaggcagagttggaaaacggcaattgccctgatcatcaaactcctccggaattttataaggagcaaaattacttcttcaggatgagctcctaccaggagtggctcactgaagagttaaaggaaaatgagaactgggtttatcccggacgttacaggaatgaactgattcagtttcttaaagatcctctacaagatttgtgcatttcacggccaaaaagcaggctaaaatgggggattgaaatgccttttgacaaaaactttgtcacttatgtatggtttgatgcactgcttaattatgccagtgctcttgactggcctgatggagaaaaatttaaaaaattctggccgcatgttcaccataccattggaaaagatattcttaaaacacatggaatatactggccctgcatgctgaaagcagcaggaatgccggtttttaaaaaactacttgttcatggacactgggtggttggaggcagcaaaatgagtaagtcactggggaatgtagttgaccccttaaccatgaaagatcagcttggtgtggacgcgctacgttattttttgttgcgtgatatgagttttggtgaagattccaatttcacagaagaactcgccgtaacgcggtataatggggatttagccaacaattttgggaatttaatgaaccgttcaatcagcatgagccgcaaaaatttccagggatgtgttcctccatctggtaaagctggagatcaggagaaagaactgcatgaaacttttgccaagggagtacagaaattccgcgaatatatttttaaattccagcctcatcgtgccttggaacatgtggccctgctgagcagcaaggtaaataaatacatagatgaatgtaagccttggacactcacgaaagaaggaaaagacagtgaacggttggggacagtactttacacagcacttgatatgactagaatcatagttggattacttgatcctgttatgccaaaaaaaatgcacgaagcaagaaaaaatcttgggcttggagaaaaaattctcccatttcccagcctttctccaggactattaatgcctggtacggagcttccaaaaccaagtccattgttccctaaaatgcaagtttctcatgctgatgaagaaaatgagaaaaatcagaaaaaggataaatcatcaaataattctgcaactgaggagaatcaatggatt

SEQ ID NO: 296781 - DNA, 1172 bp, Unknown
  Bacterial polypeptide expressing nucleotide sequence isolated from the Sargasso Sea
aatggataaaaaaaaatgtattttagttactagcgcacttccatatgccaatggccctatacatcttggacaccttgtagaatatatacaaactgacatttgggttagattaaataaatttttatgccatgacgtaacgtatatttgtgcagatgatgcacacggtactcctattatgttaaaggcaaaagaggatggtatttctcctgaggaattaataaataaatctttagctgagcataaaaaggattttgaggattttttaattaaattcgatcactattcatccactcattcagaaactaatgaaaaatcttgtatcgaaatttttcaaagacttacggatgaaaaatatatatataaaaagaatattgatcaatactttgacgaaaaagtaaatatatttttgccagacagatatataaaaggaacatgcccaaaatgtggagcggaagaccaatatggagattcttgtgaaaaatgtggcgcaacttataattcaaccgagataattaatccaatatcatctatatctggctcaaaacctattattaaatcaactgaacacttttttttcgaattaaaaaaatttgaaaaatttcttagcgaatggcttgaaaatacagatatccaaccttcaataaaaaataagttgaatgaatggttgtctagtggcattcaggactgggacataacaagagactcaccatattttggttttaaaattcctggagaaaataataaatatttctacgtatggatggatgcgccaattggttatattgcatccttgaatgaatataaaaacatcaattcagaagtaaaggctattaattattggaatgaagacattgaaatctaccatttcataggaaaggatatagcctatttccactgcttattctggccagcaattttaagaggtattgattacaatctaccaacaaatattttctgccatggctttcttacaattaatggaatgaagatgtcaaaatcaagaaatacttttattcgtgcatcagattttgttaaaaaatttgatcctgaatttttaagatattatttcgctagtaagctaagcaatacaattgaagatattgacttaaattttgaagactttagaaaaaaaattaatagcgaccttataggtaaagtcataaatttactta

SEQ ID NO: 296782 - DNA, 406 bp, Unknown
  Bacterial polypeptide expressing nucleotide sequence isolated from the Sargasso Sea
gaagattcaaaagaaagcctagcgccagcagcaccggcaatcgacccagacagccgctttgctaaagaccctattagcgacactatctcgtttgatgagttcgccaaggtagatttacgtattgcgcgtatcgctaaagctgaacacgtggaaaaagccgataagcttctgcgcttagagctagatttaggcggcgaaaccaagcaagtttttgcaggtattaagtcggcctactcgcctgaagccctaattggtaagcacacagtaatggtggcgaacctcgctcctcgtaaaatgcgttttggcatgagtgaaggcatggtattagccgcgggccctggtggcgacgagctatacattcttgagccgcacgaaggtgcaaagccgggtatgcgtgttaagtaag

SEQ ID NO: 296783 - DNA, 1636 bp, Unknown
  Bacterial polypeptide expressing nucleotide sequence isolated from the Sargasso Sea
catgagtcttgaaaataagaaaatttttgtaaccaatgctttgccttatgccaatggccccattcatatcggtcatatggttggctatattcaggctgatatttggtctagatttctgagaatgcaaggacatgatgtggtttttgtctgtgcaagtgatgctcacggaactccaatcatgctgagtgctgaagatctgggggttgagccagaggaacttgcatcggaatatacccgtcaacatgaaaatgactttaaagattttcatgtgtcttttgataattaccatacgactcattccaatgaaaatgaaagcttggtcaaagagatttacgaaaaactcaaagagaatgactgcatacgaactgaagtgatcgagcaagcctatgatgaagaggaaggcatgtttctgcccgatcgttatgtcagaggcatatgtcctaaatgcaatgcgcctgatcaatacggtgacaattgtgaaaagtgcggtgcgacatataagccaaccgacctcattgatccaatttctgtcctgtctgggaaagcaccaagcttgaaagaatctgagcattactttatgaaactgggaatgtttgaaagcatgcttaagaaatggatcgaaacgatcgatatacactcatctgttaattcaaaacttaaggaatggtttgaagtcggattaagagattgggatatttcaagagacgacccctacttcgggtttctaattccgggtgaagagaaaaaatacttttatgtctggttggatgcgccgattggttattttgcatccctaaaaaacctatcggataattccgatcttgagttcgaagaatatatttatgatgatgcaaatacacacatggtccatttcatcggtaaagacatcatatatttccatgctcttttttggcctgctgtattggatggtgccggcctcaaaaaacctgatgcaatttatgtgaatggcttcctgacagtaaacggtgagaaaatgtctaaatcaagaggaacctttattaaggcaaggacatatcttgatcatctggatccggaatatcttcgttattattttgcatataagagttcctcgggtatcgatgactttgatctagatacagaggattttgaaaacaggataaacgcggatttgatcggaaaatggatcaatattgccagtcgaagttcaaagtttattagagaacattttgagaatcgattatctaaagatattgatcaggatctattgaaaacattcgatttaaaggccgatgaaataaaagcgcactatcaaaatcgtgaatttggtcaatcaatgaggaaaatcatgcttttggctgacaaagcgaatcaatatttagatcaagaaaaaccatggatcatgatcaaaaatgaagaggaaaaagaggatgtgcagagggtttgcaccaatgcgctgaatatgtttttaaaattatccatcatgctaaaacccgtgatgcctgatgttgcagataatgtagaatcattcatgaacttatctgatcttgactggtcaaatatctcagatgtgatcaaagatcatgaaatcaatgattacgaaaacctcctctacagaattcgtgaggaagatattgaaaggataataaaaaaatga

SEQ ID NO: 296784 - DNA, 1013 bp, Unknown
  Bacterial polypeptide expressing nucleotide sequence isolated from the Sargasso Sea
cgaaaataaggaatattcatcatacatttatgaaaagcttaaagaaaaaggagatatcgtcactaagactattgaacaattttatgataatgaagccaaaatgtttctgcctgatagatacattaaaggtgaatgccctaaatgtggagcgaaagatcaatatggagattcatgtgaagaatgtggcgcaacctattcatcaactgagattataaatccagtttcagtagttacaaattcacctcctattacaaaagaaacagagcattttttctttaaactaagtaattatgatgactttttaaaaaattggatctcagaagagacaacccagtctgaaatcaagaacaaattgagtgaatggctatcagaaggtctggctgactgggatattactagggataaaccttatttcgggtttaatatcccagatgctaaagacaaatttttttatgtatggctcgatgcgcctgtggggtacattgcttcatttaaaaactattgtatgaaacacaatgtaaattttgaagagttttgggataaggaaactacaacagagctttatcatttcattggaaaagatatcgcttatttccatgcgcttttttggcctgcgatgctagaaggtgctgactttagaaaacctaatgctatatattgccatggtttcttgacaattgatggtgaaaaaatgtctaaatctagaggaacatttttcaatgctaggacttatcttgattttcttgagccagaatacttaagatactattatgctagtagactaacatcaaagatcgaagatatagatttaaattttgatgatttccaatcaagagtaaactctgatctaattggcaaaataataaatattggaagcagatgtgctaaatttatcaataaagattttaacgatagtttagcgatatcttcagaaaataattctttaattgaagaatgtttatctcataaagaagaaatattcagaattatgaactcagaaatactctactaat

SEQ ID NO: 296785 - DNA, 1414 bp, Unknown
  Bacterial polypeptide expressing nucleotide sequence isolated from the Sargasso Sea
catatacaacaatactttgcagataccatttcaagatttagggctttagtaggagaaaaacccacttttttaactggattagatgagcatgggttaaaagtccagcaagcagcagaaaaaaatggaaaggcgcctcaggatcactgcgattcaatggcaccagcatttatagatttgtggaaaaaattaaatatcaactattctgatttcattaggactacggagcatagacatacaaagattgttcaaaaaattttaacaaaagttcatgaatcaggtgatatttatatggacgagtacgaaggatggtattcaatatctgaagaaaggtttattacagaaaaggagcttgattcaggtcaatttggtcaggtaaaacaaataaaggaaaaaaattattttttcagaatgagtaaataccaagcaaccttgatagataaaattgaaaaagatgaattgttaattcagccaaaaagtagaaagaatgaggtgcttggttttcttaaaaatgaattgtctgatctttgcatttccagaccaaaatctcgacttgagtggggaatagaactaccttttgatgataattttgtcacatatgtatggtttgatgcactaatcaattatatatcagctattggagcatatagcaatgatgagcagttttcttctttatggcctgcagatgttcatttaattggtaaggatattttaactacccattcggtttattggcctacaatgttgctatcattaggattgccattaccgcaaagaatttttgcacatgggtggtggctgactgatgatcagaaaatgagtaaatcattaggaaatgttgtaagtcccttaatgttaatagatgacttcggagttgattctgttagatattatctaatgtctgaaatggttttaggtatggatgcaacattttcatcagaatcttttgaaaaaaaatataatagtgacttagctaatgattttggcaatttagtgagcagagtttcaactttaataaagaataattttgatgaaaaaattccagaatgcagtttagcagaatctgatctttctaccaattttcagaaaatagttttaaaagaacaattagataatttagagattgataaagtaattaatgatataatgacttttattcgtagcattaatgtttttatggaacaaaacgaaccatggaaattagtaaaaagtgacaaagtgcaggctggaaatatactataccattgcgcagaatccttgaggttagctgctgtaatgttatctcctgtaatgccttcaaaaaccaaggatattttagatattctaggtactaatgatgtagaattagtttggggtaaattagaatcaggatcaaagatttctatttcaaagcctattttcccgagaatcagttaat

SEQ ID NO: 296786 - DNA, 658 bp, Unknown
  Bacterial polypeptide expressing nucleotide sequence isolated from the Sargasso Sea
atgattgatacaaattttataaaagataaccccaagttggtatttgataagttaagactgagaaattacaactttaatcttgatttatttgagtcgactgaagcaaaccgaaaaaaatatcaaactgaaactgaggatcttcaagctagaagaaatattctttctaaagaatatggaatgcttaaaaaagagggcaaggatgatccagctcttagtaaaaaaattgagtccatcaaagcagatcttgatgaatgttcaagccaattaaatcatattcaattaactttaaatgaatttttgcttgatgttccgaatcttcctgatgattctgtgccaaagggagagaatgaggaaaataatgtaaagatccgagaacacggggagccaagcattttaaagggaaaagatcatttagagattacatcaatgattgacactgatgcagctaactttttggctggttctcgttttgcagttttacgtggagacattgcaaaattacaacgagctttaataacatttatgcttgataaagcatctgagcatggttacacagagcattatttaccaatggtggccaacactgaatctttaacttcaaccggacaattgccaaagttttctgaggatttgtttcaattaactgaagattattacc

SEQ ID NO: 296787 - DNA, 595 bp, Unknown
  Bacterial polypeptide expressing nucleotide sequence isolated from the Sargasso Sea
gatggctccgattcttttcctgcgtgtttttctgccttttgccctcggctatttcatttcctattttttccggaacgtcaatgcgatcatcgaagcggatctggtcggtgatttgggtttcagcgcagccagtctcgggttactgaccagtgtttatttcatctccttcgcgtctttccagcttcccctgggattgctgctggatcgttttgggccccgtcggaccgaatccgtattgctcatctttgccgcactgggagcactgatcttttccatggcagaatctttgagcggactgatcctcgggaggctgctaatcggtttcggcgtttccgcctgtctgatggcctccttcaaagcctacgtcctctggtttcccccttatcgcctgccgttgatgaacggtctgcagatggtagcaggaggtttgggggcgatgagtgccaccgtacccctgaggactgcgttggaattcaccgactggcgcggagtattcctgatcctcagtggcttgaccctcttgtctgctttggtgctctggctcgtctatccggaaaaggagggatctgccggcccggttccaatgaaaaagcaa

SEQ ID NO: 296788 - DNA, 655 bp, Unknown
  Bacterial polypeptide expressing nucleotide sequence isolated from the Sargasso Sea
atgcatagtgttaaatttataagagaaaatttagaactttataaaaaaaaatttctagaaagaaatataaaggttaattttattgaattattggacttggataaaaaaattagagaatttattcaaaaaaaagaaaaacttgaacaagaaaagaagattatctcaaaaaataaagacaaaaggcaatttgaaagttctaaaaaaatttctaatgatatagagatacttgaattaaaattaaccggtttaaaaaaagatataaatagaatattaggatttttacctaatattgctcttgatgatgtacctgttggaaaagatgagtcttcaaataaaattattggtagttttggtaagattcctaaatttaactttgatattaaaacacattatgaaattggtcaaaatttggaactcatggactttgacctagctacaaaagtttctggaacaagatttgtatttctaaaaggtaaacttgccgaattagaaagggcaatatctaactttatgatcgatacgcatattagacattttggctataaggaaatatccccacccctcattgtttccgaagagacaatgtacggaactggtcaattaccaaaatttgaaaatgaccaatttgaaattaaacttgataatacaaaagatc

SEQ ID NO: 296789 - DNA, 178 bp, Unknown
  Bacterial polypeptide expressing nucleotide sequence isolated from the Sargasso Sea
aatgaagaccaaatatagaaacaacaaagataatgattttataggaactttaaatggctctggattagccactggaagattaatgatctctctaatggaaaattatcaaaattcagatggaagtataacaattccagacccattaaaaaaatacatggataataaggataaaatttaa

SEQ ID NO: 296790 - DNA, 802 bp, Unknown
  Bacterial polypeptide expressing nucleotide sequence isolated from the Sargasso Sea
aatggtaatttatggttcttcgtacgaggaactagaaaaaattcaaaaagaagttattaaaaaagttagatctaataagaatctctcaagaattgagtctgattacaaccgaaataaaccagaggtaaaattaattgttaataaaaacaaagctaaagatttaggtgtctctacaaaatcgataggtgaaactcttgaaactctttatgggggcaaaaaaataacaacttttaataaacttggaaaagaatatcctattatcgttcaacaatatttatcagacagaagaaataaagagggaatttcaaaaatatttgtacgttccgagactagtggaaaactaatttctttatctaatttagtaagttttaaagaagagggatctgctaaagaactagcaagatataatagacaaagggctgttactatatccgcaaatataaatgaagactataccttaactgaagctataaagttttttgaggatgtgatggtaaatttagcaccaaataatcaaattacatggaaaggaaaatcggaggaaattaaagaaacaagtaatgagttatttattatctttgctttagcattgattacagcatatttagtgatggccgcaaccttcaactcttttattcatccattcataataattttaacagtgcctttagctatttttggtggattagtatttattttatttcttaatagttcagttaatattttttctcaaattgcattaattatactaattggtatttccacaaaaaatagtattttgattgttgactatgccaaccaa

SEQ ID NO: 296791 - DNA, 943 bp, Unknown
  Bacterial polypeptide expressing nucleotide sequence isolated from the Sargasso Sea
aaatttattaaaccaaaatttacataaacctctaacttcaattccagacccttttaaaaaatataagagttttggagaccataataatgagatgttgaaaaaatttttagatagattcaaatttaaatacaattttaaaagttctactaatttatatacttcaggtttttttaactcgagccttcaaaaaattttagaaaattaccaagaaattatgaatattattttaccgactttgggcaaagagcgtcaaaaaacttacagcccatttttaccgatatgtccagaaagtggaattgttttagaaataccagttttagaaatttttaaggaaaaatctaaaatattatttgataacaatggtaaaaaacttgaggtgagtattttagatggcaagtgtaagctccaatggaaagttgattgggcaatgagatggtatgcgcttgatgtagattttgaaatgtatggaaaagatcttattgaaagtgcaatattatcctcgaaaataataaaattacttggaaaaaataatccatcaggttttgcttatgaattgtttctcgatgaaaaaggggaaaagatatctaaatcgaaaggaaatggaattacaatagagcagtggttggaatacgcatctcctgagagtctatctttgtttatgtaccaaaatccaaaaagagcaaaaaaattatacaaagaaattgtacctaaagcagttgatgaatatttagattttatccaaaaaagtaaatctcaaaatgaattacaaattttattaaatccagcctggcatgttcataatggtaaaattcccaaagaagaattgatcatgtctttttcgatgcttttaaacttagttgaagcgagtaatgctgattcaaaagaacttttatggaaatttgttaaaaaatataaaaaaaatattatagaaaatgagtttcca

SEQ ID NO: 296792 - DNA, 649 bp, Unknown
  Bacterial polypeptide expressing nucleotide sequence isolated from the Sargasso Sea
aatgcataatataaaagatataagagataatatagataattttattaaacttatatcaaaaagaaacgttaaaatagataaaaataatattattgatcttgataaaaataacagaaaacttattcaagaaaaagaaaagttagaaaaagaaaaaaaagacatatctaaatctaaagataaaactctttatgaaaaatcaaaaaaaatatctttagaaatagaaaaaataagtaagttacaatctgatactaaaaaaaaattggatgatatattttcatcgatacctaatgtaccattaagcgatgttccggagggtaaagatgaaagttcaaatgtagaaattgaaaaaaaaggaacaattaaaaattttacatttaagccaaaatcacattatgaactaggaaataaccttaatatgcttgactttgatttagccactaaaacgactggatctagatttgtttttattaaaaataaatttgctttattggaaagagcactttctaattttatgctagataatcatattaacaaaaatggttatactgaaatttctcctccattaatggcatcggagagcaccatgtatggaaccggccaattaccaaagttcgaaacagatcaatttgaagtaaaactcgatgataag

SEQ ID NO: 296793 - DNA, 538 bp, Unknown
  Bacterial polypeptide expressing nucleotide sequence isolated from the Sargasso Sea
catgctagaccctcaattacttcgtcgcgacctagagggagtgacttcggctttggcaaagagaggattcgccttgaacaccgaaacttttgctgccttggaaaaagaaaggcgaaaggtccagaccgaaacggaagaactgcgaagcgagagaaacaagcgtagccgattgataggagtcgcaaagcaacaaggcgaagatattgcgtctttaaaggaagctgtttccggactaggcgaacggctgcggcgacttgaagctcgtcttgtgaaagttagtttggatctagaaaacttttcattgctgataccgaacttgcccgatgagtctgtgccgcagggtaattcggaactagaaaacgaagaaatacgatactggggaagtcctagagaattcaattttgaaatccgagatcatgtcgaattgggacaaaaattaaatggaatagatttcgacactgcatccagattgtccggttcccgattcgtagtgttgaagggggcggtcgctagactgcatagagcgctgacgcagttc

SEQ ID NO: 296794 - DNA, 407 bp, Unknown
  Bacterial polypeptide expressing nucleotide sequence isolated from the Sargasso Sea
gatggctccgctgcttttcctgcgtgtttttctgccctttgcgcttggctatttcatttcctattttttccggaacgtcaatgcgatcatcgaagcggatctggtcggtgatttgggtttcagcgcagccagtcttggcctactgaccagtgtttatttcatctccttcgcatcattccaacttcccctaggattgctgctggatcgttttggaccacgcagaaccgaatccgtgctgctcatctttgccgccctgggagcgctgatcttttccatggcagaatccctgagcggactgatcctgggaaggttgttcatcggtttcggcgtttccgcctgtctgatggcctccttcaaagcctatgtcctctggtttccccctgaccgcctgcccttgatgaacggcc

SEQ ID NO: 296795 - DNA, 334 bp, Unknown
  Bacterial polypeptide expressing nucleotide sequence isolated from the Sargasso Sea
gaacttaaacttgattttagaattttaaatttatgtgcaggtgacctaggttttacatcttctataacatatgattttgaagttttttcaaagggtcaagaaaaatggcttgagataagctcagtttcaaactttaaaacatatcaatcaaatcgtcttaatttaaaatttaaagataaagacggtaaaaaatacacattacatactctaaatggtagttctttggctcttcccagagtaatggctggattaattgagaataatcaatctgaaaatggaattataattcctgatgttttagtcccatatactggatttgatataataaactaat

SEQ ID NO: 296796 - DNA, 808 bp, Unknown
  Bacterial polypeptide expressing nucleotide sequence isolated from the Sargasso Sea
gatgttcagggagaacgccgacgcaatcagggccgatcacgacaggagggggatcccccacgacagcatagacgaggtcatcaggctggacgaggagtggaggaggacccagtacgacgtcgaccagctccggcgcaagaggaacgaggcggccaggggcatagccgatgcgaagaagtcgggggacgaggacgctgccaaggcgataatggacgaggtcgcgacaatagggtcacagatagacgagctcacggcgcactccgaggagtgcctcgccaccagggacacgctcaggatgagcatcccgaacatcctgcacgaggacgtgccggtgggggaggacgaccagaagaataccctccacagcctgcacggcgagaaggccgagcttgccttcgagcccaggaaccacaacgagctcatcgagatgaacggctgggtcgaccaggccaggggcgcgaaggtcgcgggcagccggttctacttcatgcagggcgacctcgctcgcatggagatggccctgcagcagtacggtgcggacttcctcatggagcggggctacaccctggtccagccccccctgatgatgaacagggaggcgtacgagggggtgacagacctgagcgacttcgagaccgtgatgtacggcatagagcccgacaagtactacctgatcgcgaccagcgagcacccgctgaccgccatgaggatggacgaggtcatcgagccctccgagctgccgatcaagatggtcggggtgtcgccgtgcttcaggagggaggtcggtgcgcacggcctctcggacagg

SEQ ID NO: 296797 - DNA, 100 bp, Unknown
  Bacterial polypeptide expressing nucleotide sequence isolated from the Sargasso Sea
cgaaaattaccagcagtcggacggttcggtgataattcctaaagtgcttcggccctatatgggcgggatggaggtcgtcagccctgcggtagacgcataa

SEQ ID NO: 296798 - DNA, 511 bp, Unknown
  Bacterial polypeptide expressing nucleotide sequence isolated from the Sargasso Sea
atgcataacttaaaagatataaggaacaatacagaattttttaaaaaaaaaattaaagatagaaatgtatctgttaattttaaagaattacttaaattagatataaataatcgagatttaatcaaacaaaaagaaaaactagaacaagaaaagaagattttatcaaaaaataaagatccaaaaaattttaagaaatcaaaagatttatcaaataatataaaaaagtttgaagaaaagcaaaaaattttacaaaaaaaaattaatattattatatcatctattccaaatgtagcattagatgatgtgcctattggtgttgatgaaaaatcaaatataattataaaaaaaaatgggctagtaaaggaattcaagtttaaaattaaatcccatgatattttaggaaaaaacttgatggattttgaaattggatctaaattatcaggttcaagatttgttgttttaaaagataatttagctttattagagagagcccttataaacttcatgttag

SEQ ID NO: 296799 - DNA, 148 bp, Unknown
  Bacterial polypeptide expressing nucleotide sequence isolated from the Sargasso Sea
ttggaacttttaatgggtagtggactagctgtgggaagaacattaattgctattttagaaaattatcaaactgaagatgggtcaattattattccggatgttttaaaaccatatatgggaaatattgataaaatttctatcaattaag

SEQ ID NO: 296800 - DNA, 363 bp, Unknown
  Bacterial polypeptide expressing nucleotide sequence isolated from the Sargasso Sea
gatggctccggtgcttttcctgcgtgtttttctgccctttgccctgggctattttatttcctattttttccggaacgtcaatgcgatcatcgaagcggatctggtcggtgatttgggtttcagtgcagccagtctcgggttactgaccagtgtttatttcatctcatttgcgtctttccagcttccgctgggattgcttttggatcgttttgggccacgtaggaccgaatccatgctgctcatctttgccgccctgggagcgctgatcttttccatggcagaatccctgagtggactgatcctgggaaggctgctcatcggtttcggcgtttccgcctgtcttatggcctctttcaaagccta

SEQ ID NO: 296801 - DNA, 226 bp, Unknown
  Bacterial polypeptide expressing nucleotide sequence isolated from the Sargasso Sea
agaaatttctagctgttcttcatgtggccaatttcagtccaggagaatgaaggctaaattcaaagacactaaaaacaaatctgactttttagggacactcaatgggtccggattagctgtaggtagaactctaatagctataatggagaactatcaaaattctgacggaagcatcacaattcctgatgctttaagtccatacatgagaaatttaaagaaaatctaa

SEQ ID NO: 296802 - DNA, 709 bp, Unknown
  Bacterial polypeptide expressing nucleotide sequence isolated from the Sargasso Sea
aatgatttctataaaaaaactgcgtacagattttcaaaatattgaaaaagctctaaggtccaagggttatgaagattcaataaatgatattatttccttagatgaaaattttagaaaatcaactcatagcctagaacaattaagagcaaagaaaaatactgtttctgaacaggtcgcaaaagccaaaagaaatggtgaggaagctgctgaaaaaattaatgaaatgagagatttaggagaccaaattaaaattttagaaaatgaatcaaatagattcaagctaaatcttacatcattgctcgaacaaattcctaacttacctcataaatcagtaccaattggcactgatgaaaatgataatgtaattattagagaatggggtaagaagaagatttttgattttaatgaaaaaactcatttagaactgagtaaatcgcttaaacttttagatttagaacgaggtgctaaaatttcaggtagtggtttccctctttatgttggaaaaggggcagaactagagcggagattaattaactgtatgattgagcatcacgttagagaatataattttactgaaatgtttccaccagtgcttatgcttgaacagtcaatgaaaacgacaggtcaactaccaaaatttaaagaggatatgtatttaactgatttagatcagctttatttagcacctacagcagaggtcccaattacc

SEQ ID NO: 296803 - DNA, 229 bp, Unknown
  Bacterial polypeptide expressing nucleotide sequence isolated from the Sargasso Sea
cttgaagtttcatcgtgcagtaattttgaatcatttcaagcacgtcgagggaatataaggtttagagattcagataataatgtaaagtttttacatacactaaatggatccggagttgcaacacccaggctaatggttgctttaatcgaaacatatcaaaatcaaaatggtacgataagttttccagaaaaagttgctgaatttttaggtataaaggagattacataat

SEQ ID NO: 296804 - DNA, 664 bp, Unknown
  Bacterial polypeptide expressing nucleotide sequence isolated from the Sargasso Sea
aatgcataatattagatttataagaaaaaactccgaattatttataaaaaaaattaaaactagaaatgttgatttagattataaaatcattagtgatttagatgaaaaaaatagaaaactaattactgacaaagaaaacctagaaagagataaaaaagagatatcaaaaaaaaaagataagactttgtttcaaaaatcaaaagaaatttcaattgaaattgaaaatttaacaaaaaaacaatcagaaattcaaaatgagctaaataaaattttatctaacctaccaaatttacctcatgaagatgtgccaattggcaaagatgaaggttcaaataaagttgttaatacagttggtacgattaggaattttgattttaaagtgaaatctcattttgagttaggagagaagttaaatatgttagattttgatttagcaacaaaaactaccggatctaggtttgtatttataaagaatgatctagctatgctagaaagagcaatttcaaattttatgattgatttacatacaaaacataatggttatgttgaagtatctcctccattaatagctagttctgactcaatgtatggaaccggtcagttgccaaaatttgaaaatgatcaatttgaattaaagcttgatgacagcaatgagagaaaattt

SEQ ID NO: 296805 - DNA, 582 bp, Unknown
  Bacterial polypeptide expressing nucleotide sequence isolated from the Sargasso Sea
ggcagagcgcgctgtcgctgcacggcgatctgaaacaacgcgatcgcgatcagacgctggtgcgttttgccaacgggagctctcgcgtgctggtcgccaccgacgtcgccgcgcgcggcctcgatattaaatcgctggagctggtggttaactacgagctggcctgggatccggaagttcacgtgcatcgcatcggccgtaccgcccgcgccggcgagagcggtctggctatcagcctctgcgcgccggaagaggcgcagcgcgccaacatcctggccgagatgctgcagctgaagctgaactgggtgagcgcgccgacgaacggcaatgtcaaaccgcttcacgcagagatggcgacgctgtgcatcgatggcgggaagaaagcaaaaatgcgcgctggcgatgtgctcggcgcgttgaccggagatatgggctttgacggcgccgacatcggcaagattaacgtccatcctgcgcatgtctatgtggccattcgccagagcgtggcgcagaaagcctataagcagctgcagaacggcaagattaaaggcaaaaactgccgcgtccgcctgctgaaataag

SEQ ID NO: 296806 - DNA, 550 bp, Unknown
  Bacterial polypeptide expressing nucleotide sequence isolated from the Sargasso Sea
aatgctcgatcctcaattattgcgtaccgaagctgaatcggttgcggaacgtctcactgtcaagaaatatattctggatgtcgaccaactcaggtcccttgaggaacagcgaaagggactgcaatccgggctgcaggacctccaagctgagcggaatcggtcagcgaaggaagtcggtcagcgcaaggcagcaggcgaagatgtatcagacctgattgagcagacctcggggctttctgggaaaatttctgcaatcgaaaatgatcttgagggcgtacgctcggctttggacgaactgatgtatgggatcccgaatatcccgcacgaatctgtgcccgtcggcgatagcgacacagacaatgaagaggtgcgtcgatggggggatcccacagcctttgcgtttgagcctggagaccacgtgagcttgggatccgggcttgggatgatggacttcgaactggcagcaaaagatcaccggcagccggtttgtcgtcatgtccggcgcaatcgctcggcttcatcgggcactggttcaattcatgctggatct

SEQ ID NO: 296807 - DNA, 177 bp, Unknown
  Bacterial polypeptide expressing nucleotide sequence isolated from the Sargasso Sea
atattaggtttaaaaattctgatggtaatactgattttatacacactttaaatggatcaggattagcaacaccaagaatttttgctgcttttattgaaacgcaccaaagagaagatggaagtattcgtattccaaaaagtctccagccttacatggaaatttcggagataaaataat

SEQ ID NO: 296808 - DNA, 664 bp, Unknown
  Bacterial polypeptide expressing nucleotide sequence isolated from the Sargasso Sea
atgttcgatatcaaactcattcgcgatgacccagctgcctttgatgcagcccttgcaaggcggttcatggagccgcaatcatcccgcattcttaaacttgatgccaagcgccgagaggtcgtggccgcgatgcaggacgcccagtcgcgccgaaacgccgcctccaagcagattggagcggccaagggcaaaggggatgatgaaacggcaaatgccttgatggcgcaagttgccgaactcaaaaccaaaattcaagacggcgaggaagaagagcggcagttggacgcggctctgaaagacattctctccggcctgccaaacctgccccatgaagatgtaccgctgggcgcagatgaagaagccaatgtagaacgccataaagttggtgaacctcgacagtttaatttcgaacctagagagcatttcgacattggagaggcgcttggcctcatggatttcgaaacagctgcaaaactgtccggctcgcgttttgtcatcttgcggaaaaaccttgcacgcctggagcgtgccatcggcaatttcatgctcgacctgcacacaacaaagtttgggtatcaggaaatcgcgccgcctttgctcgtcaaggacgatgcgatgtttggcacgaaccagcttccgaaattgccgaggaagccttccatac

SEQ ID NO: 296809 - DNA, 709 bp, Unknown
  Bacterial polypeptide expressing nucleotide sequence isolated from the Sargasso Sea
tatgatttctatagatttaatcagaactaatcctcaattagtaatagatgctttagcaaacagaggcgaatcaaatagcctagaagatattttgtcccttgacgagtctcgaaggaaaaacatcattgaaaatgatgaactcaaacggcatagaaacgaagtgagtaagagcattggtgaacgcagagcaaacggacaagatatagatccatccgaaatggaagtaatgaaaaccgtaggcgaaaaaatttcttctttggataatgatatcaaagaactagaaaccactatcaacgatttactaagccgaatacctaacttgccagacacacaagttcctataggcaaagacgaaaatgataatcctataactagacaacacggggaaatacctcaatatagctttgacctagaaccccattgggatataggagagaggttagatattattgatttgccaaggggcgctaaactgtctggcagtagattttattcactcaaagggcttggctcaaaactagaaagagctctgattgcctggatgctagactatcacacagacaaacatgggtatacagaagtaagtgtgccatacatggttagacaagacatcatttttggatctggcaaccttcctaaatttggagataacctctatcacgacgacgaagatgatctatggctcattcctactgctgaagtccaatta

SEQ ID NO: 296810 - DNA, 533 bp, Unknown
  Bacterial polypeptide expressing nucleotide sequence isolated from the Sargasso Sea
actcaacattgcccttgtacatggcaaaatgaaagccgacgaaaaacaagccgtgatgcaacagtttaaagccaatgaattacaactcttgattgcgaccacagtgattgaagtgggagtcgatgtaccaaatgcctcgatcatggtgattgaaaatgcggaacgtttaggactctctcaattacaccaattacgtggtcgtgtcggtcgaggcgccaaggctagcttttgcgccctattatataaaagcccactgtctcaaaatggacaagaacgcctacgcatcatgcgtgaaaccaatgatggctttttaattgccgaaaaagatttggaaatccgcggtcccggtgaattgctcggtaccaaacaaacaggcgatatgggctttcgtgtagcgaaactggaacgcgatgatcatttgctcaatcaagcacattttgtcgcagcgcagattttaaaggactatcctaaaaacgctgaagccttactgaaacgctggctacctgaagcaccacgctatgcctatgtttagt

SEQ ID NO: 296811 - DNA, 379 bp, Unknown
  Bacterial polypeptide expressing nucleotide sequence isolated from the Sargasso Sea
tgagtctcttttagaagacgcagaaaaagtcttacagtctttaggtttacactatagagttattgaattatgtacaggtgacttatctttttctgcagccaaatgttatgatatagaagtttggtcaccatatgaaaataaatatttagaagtttcaagttgcagtaactttgaatcctttcaagcaaatagaggttctataagatttagatcatcaaagacaggaaaaatggagtttgtacacacattaaatggttcaggtgttgcaactccaagattacttgtcgccctaattgaaaattatcagcaaaaagatggaacaatccaattacctaaggcattgcaaagatatatgaatatctcagcaataaaagactaa

SEQ ID NO: 296812 - DNA, 895 bp, Unknown
  Bacterial polypeptide expressing nucleotide sequence isolated from the Sargasso Sea
cgggcaggctgtagttggtgggtcatcttcttcaaattaatccgtcttggtcagaaatttgctgtttctaccactagcgactatggcggtggttcatttacgggctttaacggaactacggcaggtgagggtccaatcattgacatacaaagatccagaggaacaacaacagtcggtaccgctgtggccactaatgatcgtttaggttctattgtttttaggggagatgatggaactgacttcgctgacgccgcttacatccttggcgaagttgatggcactccatccggtggttttgtccccggcagacttactttttatacaggcacaggttctgccgctccaactgagcggatgcgaatccactcttctggatatttaacgcttgatggcaattcaaacacaagcggtattcaacttaaggcaaacggcactgtagctggatatgttgctccggctggatttctcggaggttcagactctgatttggggttccgaagtgaagcaggtagcaattatgtcttttatgttggtacaggagagaagatgcgcctcgacagctcgggcaggctaggtcttggattttcatcaccagcacgagccctttctgttcatgctactggtacagactcagttactggttaccttcaaagtggtgtagctaatgtataccttcagttaggcaatagcgttgatggtaatggatatattggctaccaatcaacttcgttgactttttatactaataatgatttgaagatgctcatcgacaataatggaaacctaggcttgggaacatcaagcctttctaattctagcggttataacactatgactttgggcgatggatcctccactggagggcaaatagtgctgaaaaatagttcgaatcatc

SEQ ID NO: 296813 - DNA, 1213 bp, Unknown
  Bacterial polypeptide expressing nucleotide sequence isolated from the Sargasso Sea
ctggcgtggaaggcggcgatcgatttcaagtacgtgcgagacaacgcggcggcggtgcagagcaacgccaaggtgagaaatgtcgacgtcaacgtgcaagaaatcatcgaaaagtacgaagcgttgaacgctttgaacttcaagtgcgatgagattcgggaaaagagaaacgcgaacgccaagagtatgaagggaaagatggagaaggaggttcgtgataagctcatcgccgaaggaaaggcgctcaaggatgagctcgctgtgattgaagtcgatgtcgtggctctcgaaagtgaattgcagacgatggcccagaggttgccgaatctgacgcatccagatgtgccgatcgggagcgaagaaaacacggtgaccatcgctgcggtgggtgaaaaacgcgctttcacattcccagtgcagaaccacgtcgacgtcggcgagaagctcggtatgtttgattttgagactggtagcaaggttagtggcagccgtttcgtgtatctcactggagttggagctatgcttgaactcgctttaattaactgggcgtttgcaaaggtggtgagcaagggttttaagccgatgatggtgcctgatatggttcgtagcagtgtcgtggaaaagtgtggattccaacctcgcgcagagaacacgcaggtctatagcatcgaaaactctgaactatgcatggcgggtacagccgaacttttgttgggtggtgtttacatggatgaagtcgtagaagaatcgcaattacccatcaaaatggcagcttttagtcattgcttccgcacggaagcgggcgccgctggtgcgcagactcgcggcatgtatcgattgcatcagtttagcaaagtggaaatgtttgtcgtggcgacgccagaacaatctgacgcgcttcatgacgaactgatcaatattgaaaaggaaatgttcgaggagcttgggttccacttcaaggttttagatatgccgacggaggatttgggcgctccggcgtaccgcaaattcgatatcgaagcttggatgcctgcccttgaacgatacggcgaaatctccagcgcttcgaactgtacagattatcaagcgcgccggctcaacatcaagtacagaccgaatgcggtggatggtaagaaacagccgttggtgcactgccacacgttgaacgcaaccgcgtgcgccattcctcgaatgatcgtgacgattctcgaga

SEQ ID NO: 296814 - DNA, 1027 bp, Unknown
  Bacterial polypeptide expressing nucleotide sequence isolated from the Sargasso Sea
atgcttgatatcaaactgatccgttccgaacctgaattaatagctgaaaactgtcggaagagaaacgtcagtgttgatattgataaattattgaaacttgatgaaaaggtaagacaaactacaacggaagttgattcatttaggcagattcgaaacgacatcagtaacaaaatgaaaggcaatctttcagcagaggagcggcaaccgcttatagaagaatcaaaacagttaagagatcaagagggagaaaaagaatcctttcttcgagaactgactgatcaacgtcttgatctgttgaaacaggttccaaatcttactcatccagattctcctgaaggactgactgatgaagagaatcagcccataagaaaggtgggagaaatacctgagtttgattttcagccaaaagaccatgtggaattgatggaatctcttgatttgattgactttgatggtggggcaaaagtttctggacaaaagttttatttcctaaaaaaccaagcagtatttctggaactagctctggcaaattatgccctaaatttgttgcaaaaagaaggctttacagtacacatgacacccgatcttgcaagaaatcaaattttggatgggattggattcagtccacgcggaacggaaacacagatatattcagttgaagattctgacctttgccttattgcaacagccgaaattacccttgggggattgctttctgatcaagttttggatccagaacgattgccgattatgtatgctggattttcacattgttatcgcactgaagctggagctgcaggcagggaatctcgtgggttatttagggtgcaccaattttctaaagttgaaatgtttgccttcacccatccagatcagtctgaagtaatgcatcaaaaaatgctaacaattgaagagcagatttatcagaatcttggaattccataccaggtagttaacatctgctgtggtgacctgggaggcgctgcttatcgcaagtatgaccttgaagcctggatgccgggacgtg

SEQ ID NO: 296815 - DNA, 1843 bp, Unknown
  Bacterial polypeptide expressing nucleotide sequence isolated from the Sargasso Sea
atggattccgcattcgaccgggcgtatgccgcacaccgcgcgggccgcctcgccgaggccgagcacggctatcgcaacgcgctcgcctccaatcccgccgacgccgacgcgctgcatctgttcggcgtgctgcggcaccagcagggccagcacgccgaggcggccgatctcgtcggtcgcgccgtcgcgctgcggccgggcgatgccgcgctgcagctcaatctcggcaacgcgctgaaggcacttggccggctcgacgaagcagtcgaccgctttcgcaacgcgctgacgctcgcgcccgaatttccgctcgcgcactacaacctcggcaacgcgtatgcggcgttgcagcgccacgacgatgcgatcgacgcattcggccgcgcgctgcggctcacgcccgacgatgcatcgatccacaacaatctcggcaatgcgctgaacgcgctcggccgccacgacgacgcgctcgccgcgttccatcgcgcgctcgagctgcggcccggacatgcgggggcgcacaacaacctcgcgatggcgctgaacgcgatgggccgtgccgacgacgcgatcgcgcacttccaggccgcgatcgccgcgcagccgggcttcgtcgccgcccatttcaatctcggcaacacgttcgacgcggtcggccggcatgcggaggcggccgccgcgttcgaagccgcgctcgcgctgcatccgtcgtttccgctcgcgctgttcgggctcgcgaacgcactgggcgcgcagggccgccaccgcgacgcgctgccctactacgagcgtgccgtcgggctcgatccgtcgttcagcctcgcctggctgaatctcggcaacgcacatcacgcgctcggtgcgcacgagatggcgctgcgcgccttcgaccaggcactgcgcgtcgcgccggatctcacgctggcacggctgcaccgcgcggtcacgctgctgacgctcggcgacttcacgcgcggcctgcccgcctacgaagcgcgccacgacacgccgggcgcgacgccgctcggcacgctgccgcgctggcaaggcgagccgattgcgtcgcgcacgctgctgatccgcgcggaacagggcttcggcgacacgctgcagttcgtccgtttcgtgccgctcgcccgcgcacgctgcgcgcgcgtcgtgctcgaagtccagccggaactcgttacgctgctggcgccggccgcggcacgctggcgcgtgacgctcgtcgccctgggcgcggcgaagccgcctgcggcggatgtcgcgtgcacgctgatgagcctgccgttcctgctcgggcttcagacgcaagaggacatcgtcgcgggcgcgcgctacctcgacgtccccgacggcgccggccggcgctttcgcggctcgctcggcgggcggtcgaagcgcaagttcggccttgcgtggtcggggcgccggcaggcgcaggaaaatcgctcgatgccgttcgacgcactcgctccgctgctcgcgctaccgggcatcgactggatcgtgctgcaacccgcactcgacgacgacgagcgagcgcgcgtcgacgcacatccgcgcgtgcatcggctcgacggccggctgaacgactttgccgacacggccgcgctgatcgatcggctcgacggcgtcgtcacgatcgatacggcggtcgcgcacctcgccggcgcgctcggcaaaccgctgtgggtgatgcttccgttcgcgccggactggcgctggttcaccggcgacgactgcccgtggtatccgcaggccaggctcgcccgccagcccgcgccgggcgaatggcacgacgtggcggccgcggtcgccggcatgctgcgcgaagcctgac

SEQ ID NO: 296816 - DNA, 580 bp, Unknown
  Bacterial polypeptide expressing nucleotide sequence isolated from the Sargasso Sea
aatgcataatttaaaagaaataagaaaaaacattgcactgtttgaaaaaaaaattaaagaaagaaattcaactgttgatttaaagtctctaattaagcatgataaagaaaatagagaattaatacaaagaaaagaaaaattagaacaagaaaaaaaattattatcaaaaaaaaaagatcctaataattttgataaatcaaaaaatttaacaaaccaaataacagaattagaaaattctcaaaaagaaatacaaggaaaaattcatactatactatcctcagtaccaaatttagctttagatgatgtcccagtcggtaatgatgaaaaatcaaataaaattataaaaaaatccaccgaaattaaaaaatttaattttaaagttaagtcgcatattgaattgagtaaaaattacatggattttgaaactgctacaaaattatctggttctagatttgttgtgttaaaagataaactggctcttttagaaagagcactaataaactttatgatagatatccatacaaaaaagtttggatatgtcgaaatatcaccgcctttaatagttaatgaaaaaattatg

SEQ ID NO: 296817 - DNA, 1093 bp, Unknown
  Bacterial polypeptide expressing nucleotide sequence isolated from the Sargasso Sea
atgttaaataacataacatctgttgctcctgcaagaatttgtctttatggtgatcaccaggattatcttaatctaccaattattgcaattgcaattgatagatatattaaagttgaagcaataccaaatcttgctgaaagtttttatataaacaaaattgacattaagaaaaaagatataattgattataatttagattacaattataaaggtaaagctgaatttttgagaatttcattaaacgtattgaagagatacggctgtatccctaatagaggatatgatatttctatttcaagtaatattcctatcaattcaggcctatctagctcttcagcacttactgttgcatggattcaattcttattaaagtcctttttacctgaagaaaaaattgagtataaaactttagcagaacttgcttatcaaacagaggttgttgaaacaggaagttccggaggcaatatggatcagtataccatatcacacggaggtactatttttttaaatactttaaatagcaatatacactcttataaatataatttttcagatgttgacctagtagttggggtttcagctgctgggaaagatacaagaggaatgctcaaaaagttaaaatcaaatcaaatcctcgcattagaaactattaaaaatttcgctcctgaatttgacttatatgataaagattcatatgactataactcttgttatgactctttagatcaaaacctaaaaccatattttaaagctgcaattaaaaattttgacattacaaaggcagctgataatgaattaagaaaggataatccggacatgaaaattttaggaagtttgatgacagatcatcataatttgctaaaagatgagctaaagaatacaactgatgagattgataagatgattgatatatgtaattctatgggtgcatatggttcaaaaatagttggttctggtggaggtgggtcaatagttgctatatttgataaaaatatatcggaaagtgtagttagcaaattaaaagagaatggggccaaagatgcttttatagcaagtcaaagtaatggtccagaaataaaagcaaatgagtaaa

SEQ ID NO: 296818 - DNA, 1534 bp, Unknown
  Bacterial polypeptide expressing nucleotide sequence isolated from the Sargasso Sea
ctggccttttgtagaagcaaaaaaaattctcagagagagaaaaaaaaatatagaagataaaggaaaaatagttcttcaaactggctatggcccaagtggacttcctcatataggaacattcggtgaagttgcaagaacttctatgctagtcaatgcccttaaccatcttaccgatgttccgaaagaaataataacattttctgatgatatggatggtttaagaaagattccagaaaatattcctaattcagaaaaacttcaagaaaatttacataagccactaactcaagttccagatccttttgaaaagttcagtagttttggcgaacataataatgagatgttaaaaaaatttttaaataattttaaatttaaatatacttttaaaagttcaacagaattatataaatctggtttcttcaatccaactttaaaattaattttggaaaattaccaaggagtaatggatataataatccctacacttggaaaagaaagacaaaaaacttattctccatttttaccaatttgtccagatacaggttatgtcttagaaataccaattatagaaatcgatactaaaaattctaaaatagtttttgataataatggaaaaaaacttgagcaaagcatattagatggaaattgtaaattacaatggaaagttgattgggcaatgagatggtatgctcttgatgtagattttgaaatgtatggaaaggatcttatagaaagtgcaattttgtcgacgaagattataagattgcttggaaaatcaaatccatctggatttgcttatgaattatttttagatgaaaaaggagagaagatatccaaatcgaaaggaaacggtataaccattgatcaatggttagaatatgcatcacctgaaagtttatcattatacatgtaccaaaatccaaaaagagctaaaaaactttataatgaagttgtgccaaaagctgtagacgaatatttagactttatagaaaaaggcaaaagccaaaatgagttacaaaaattaatgaatccagtctggcatgttcataacggaaaaatacctaatgaaaatcatattatgtctttttcaatgttactaaatttagttgaaacgagcaatgcggactcaaaagaattactttggaagtttgtaaaaaaatataaaaaggatattttggaaagcagttatccaatatttgataatttaattgagtatgcaattaaatattttaatgatgtaataaaatcaaagaaagtctacaaaaaaccaaatgagaatgaaaaagctgcattagatgctttaattgtagttcttgacaagtgtaatgacagtatgaaaccagaagatatacagacgaatatttatactgttggaaaagaaaatggttacaaagaaaatcttagagattggtttaagcttatttatgaagttgttttcggagatgaaaatggaccaagaatgggttttttcataagcttttttggagtgaaagaaactaaggagttaataaaaaataaattaagaaatgtttaa

SEQ ID NO: 296819 - DNA, 1300 bp, Unknown
  Bacterial polypeptide expressing nucleotide sequence isolated from the Sargasso Sea
atgcttgacctgaaactgattcgctcccaaagcgaaaccattgcggaaaactgtaaaaaccggaacctggatctcgatattcccgaactgcttcgtcttgatgaagaagttcgggcgatgaacacccaactcgataccattcgccagcagcgtaacgagatcagtaaaacaatgaagcagccgctttcccaggaggaacggcagcctttgatcgaatcatccaaatcacttcgtgacgaagaaagcaagctcgaggaaaacttccgggaattgaaggaaaaacgggacgatctccacaggatgattccgaatctgacccatcctgattcaccgatcggcttgaccgatgaagacaacctccctttgcgggaggtgggcaaggtccctgagttcgaatttgaacccaaggatcatgtggatctgatggaatccctcgacctggttgattttgaaggcggggccaaggtggcgggacagaagttttattacctcaaaaaccaggcggttttcctggaactggctctcgcgaattacgcattgaacctgctccgagaggagggcttcactccgttcatgaccccggatctcgcacgaaaccagattctggacggcatcggtttcaacccaaggggtgaggaaactcagatctactccgttgagaacagtgaactatccctgatcgccaccgcggaaatcactcttgggggactgttggcgaaccagatcatcgacgcggaccaactccccctgctttacgcaggactgtctcattgttaccgaaccgaagctggagccgccggacgtgaatcgaggggtttgtaccgggttcatcaattttccaaaatcgaaatgttcgccttcacccaccccgatcgatcggaagaaatgcatgagcggatgcgtgaaatcgaagaacgtatctaccaggatcttgaaattcctttccgggtggtcgatatctgcaccggggacctgggttctcctgcctatcgcaaatatgatctcgaggcatggatgcccggtcgggggaaatggggggaaatcacttcaacttcgaactgtagcgattatcagtccaggaggctgaacatccgtttcaaggacaagcagaccggcaacaaccgattcgtccatatgctcaacggaactgcgattgccgtctcccgggctttgattgccttgatcgaaaacggtcagcgtgctgacggttccataaaacttccgtcatgccttgggataccggacattccagctcccaggcttaacacttcatgttttccattgcgcaggtctgaatgat

SEQ ID NO: 296820 - DNA, 1114 bp, Unknown
  Bacterial polypeptide expressing nucleotide sequence isolated from the Sargasso Sea
tcggatggagttcatccaggttatggctttctctcagaaaatcctgattttgcagaaaaagtggaaaaaagtggttttgattttgtaggcccttcagcttcagtcattagaatgatggggaataaagtttctgcaaaggaatttgccttaaaatctggcctgcccattgttcccggttcttccggagcagtagatgagaatgtccacgaggaagcagaaaaacttggttatccagtaataattaaagctgcttcaggtggtggcggtagaggaatgaagatagtttactcgccagaagaattagatagtgcaattgaattaactcaacaggagtctgcagtagcttttggggattcaacagtttatctggagaagtttttagaaaatcctaggcatattgaagttcaagttctggctgacagacatggaaatataattcaccttggagatagagattgctctttgcaaagaaggcatcagaaagtgattgaagaagctcccgcccctggaattaaagaggaaaaaagacaagaaatatatgagcagtgcatagaagcatgtcgtcaattagattatgtaagtgccggtacttttgagtttctctatgaaaatgataatttttattttattgagatgaatacaagaatccaagtagagcatccagttacagaaagtgtcacgggaattgacttagttaaactccagctaaggatagcaagagatgaagaaattaaaattaaacaagaagatattatcttaaaaggtcatgccatagagtgtagaattaatgcagaaaactctgaaacatttttgccctcccccggtaaaattcttgaatatcatgcacctggaggaatcggagttagaatggattctcatttgtacaaagattatgtagtgcctccatattatgactctcttattgcaaaagtaatctgtcgagccaatgaccgtgaagacgcaagagccagattagaaagagctctagatgaaatgtatgttctaggtatagatacaaatttagaaatgcatagaaaattaataaatgatcctaattttattaatggtactttcaatataaattatctagaaaatcttaataaggaaaattaat

SEQ ID NO: 296821 - DNA, 601 bp, Unknown
  Bacterial polypeptide expressing nucleotide sequence isolated from the Sargasso Sea
atgcatgacattaagaaaataagagagaatccctcagatttagatgagttattagccaaaagaaaacatccgccagtttcaaatcaaataattgaattagatgaaaagaacaggaaaattattggtgagcttcaagttattcaagaagagagaaacaccaagtcaaagctcataggagaatatgcagctaatggaaaaaatgatgaagccgctaagttaaaggcggaagttgcaagcttaaaagataaaatgcaagatttagagaatagtcaaagagaaaaacaagaagaacttaatactgttttatcttctttgccaaataatccagcagatgatgtgccagttggtgatgaaagtttaaataaagagattaagttggaaggtactaaaaaagaattttcttttactccaaaagaacacgatgaattaggcgaaaacctcaacatgatgagttttgagcaagctgcaaaaatctctggatcaaggtttgttgtacaaagtggcttgattgctagaatggaaagagcaatatctaattttatgttagatcttcatacaaatgaatttggatatatagagatgaatgttcctatacttgtta

SEQ ID NO: 296822 - DNA, 1525 bp, Unknown
  Bacterial polypeptide expressing nucleotide sequence isolated from the Sargasso Sea
gtagaagcaaagaaaattttaaaagaaagaaagaagaatattgaaaataaaggaaaaattgttcttcaaactggttatggtccaagtggtttgccacatataggaacttttgcagaggttgcccgaacctcaatgattgttaacgcgcttaatcaacttacggaaattccaaaacaaataatcacattctcagatgatatggatggacttagaaaaattccagaaaatattcctaatccagaaaaacttgaaataaatttacataagccacttactcaagttccagatccatttgaaaagtataacagttttggtgagcataataacgaaatgcttaaaaaatttttaaataattttaattttaattatacatttaaaagttcaactactttatataaatctggattttttaattctactctaaatttgattttagaaaattatcaaggaataatggatataattattccaactcttggaaaagaaagacaaaaaacttattcaccgtttttaccaatttgtcttgaaacaggtcatgtattagagatacccgttatagaaattgataaaaaaaattctaaaatagtttttgacaacaatggaaaaaaacttgagcaaagtattttagacggtaattgcaaattacaatggaaagtagattgggcgatgagatggtatgcactagatgttgattttgaaatgtatggaaaagatcttattgaaagtgcgattttatctacaaaaattattaaattgttaggaaagccaaatccttcaggttttgcatatgaactatttttagatgaaagaggagagaagatatctaagtctaaaggaaatggaattacaatcgatgaatggcttgaatatgcttcaccagaaagtttatctttatatatgtatcaaaaccctaaaagagctaaaaaactttaccgtgaagttgttcccaaagctgttgatgaatatttagattttattgaaaaaagcaaaactcaaaatgaattacaaaaattgatgaatcctgtttggcatgttcataatggcaaaataccagaggaaaattctataatgtctttttccatgttgctaaatttagttgaaactagtaacgctgactcaaaagaactactatggaaatttgtaaaaaaatataaagataatatttctcaatctaatcaaactatattcgataatttaattaagtatgccattaaatattttaatgacgtaattaaatcaaaaaaagtttataaaaaaccaaatgaaaaggaaaaggtagctttaaatgcattagttcaagctttagataattgtaatgacaaaatgaaaccagaagatatacaaaccaatatatatacagttggtaaagaaaatggttataaagaaaatcttagagaatggtttaaactaatatatgaagttgtttttggtgatgaaaatggaccaagaatgggtttttttataagcttttttggtgttaaagaaacgaaggagttgatagaaaataaattaagagatgtttaat

SEQ ID NO: 296823 - DNA, 541 bp, Unknown
  Bacterial polypeptide expressing nucleotide sequence isolated from the Sargasso Sea
tctggtcccagaacgtttaccaattatgtatgccggtttttctcattgttatcgcacggaagctggagctgcaggcagagaatctcgaggattattcagggtgcatcaattttctaaaattgaaatgtttgccttcactcatccagaccagtctgaagaaatgcatcaaaaaatgctcgctattgaggaacagatttaccaagatcttggtattccatatcaagtggtaaatatctgcagtggtgaccttggaggacctgcttacagtaagtatgatcttgaagcctggatgccgggacgtggaaagtggggtgaagttacatcaacttcaaattgcactgattaccagtctagacgcatgaatatacgtttcaaggattcagagacgggcaaaaatagatttgtgcacatgctaaatggaaccgcaatcgccgtttcaagaactttaattgctctgatcgaaaatggacagcagaaagatggctctatcaaacttccgtcctgtttgaatcttcccgacattccagcacccaataactaa

SEQ ID NO: 296824 - DNA, 865 bp, Unknown
  Bacterial polypeptide expressing nucleotide sequence isolated from the Sargasso Sea
atgcatgatattaaatatattagaaataatttttctgaatttaaaaaacaagtaaataataggaatacagaagttaatcttgataaaattttagaattagatactaaaaacagatctttgatacaagaaaaagaaaaacttgaatcagaaaaaaaaaccctttcaaaacaaaatgacaaaagtttatttgcaaaatcgaaagatttatctaaaaaaatagataaaattagtgaggatcaattaaatgaaagtaaaaagctaaatcaaattttatctcaaattcccaatatagctcttgaagatgtacctgttggcaaagatgaaaaatctaataaagaaataaagaaaagtggcaacattcctaattttaaatttaaacctaaatcacattacgaattaggagagaatttagatatgcttgattttgaactagcaaccaagacaactggatcaagatttgtatttgttaaagataaattagctcaattggaaagagcaatatcaaattttatgattgatacacatataaatgaaaatggttataaagaaatttctcctccattatttgcaagtgaaaatagtatgtttggtacaggacaaatgccaaaatttgaggatgatcaatttgaaataaaacttgataataaatctggaagaaaatttctaataccaactgctgaagtaatattaacgaatatggttaatgatactatactaaatcattctgatttacctttaagatttgtagcatcaacgccatgttttagaaaagaagctgggagttacggaaaagacaccaaaggcatgataaggcagcatcaattttataaagttgagttagttagtattgttgaccccagttaat

SEQ ID NO: 296825 - DNA, 361 bp, Unknown
  Bacterial polypeptide expressing nucleotide sequence isolated from the Sargasso Sea
ctctcagttgaagaagagattttacaagagctagaaattccttacagagtcgttgatgtttgtactggtgatctaggttcatctgctgctaaaaaatttgatatcgaagcatggataccaagtcagaatacatatagagaagtaacatcttgttcaaacacaacggattttcaggccagaaggttaaatattcgtacaaaagttgaaaaagatacagctttactccatacattaaacggtactgctattgcagtgggaagaatattgatagctctactcgaaaataatcaaaccgaagacggaggagtagaattttctgatagcttggggaatattttagggattgaaaagttaagctaaa

SEQ ID NO: 296826 - DNA, 695 bp, Unknown
  Bacterial polypeptide expressing nucleotide sequence isolated from the Sargasso Sea
aaaagaagaggctatgtttttgatgaatcactgtggaatgagcttgaagaaaaaagaaaaaagttacagggctttactgaagagcaacaatcagaattaaacgatctatctaaagctattggtattggaaagaagaattctgaagatactagtcttatacagaatcaggctacaaaactaactgctcaaattaaagaacttagcgctgaattagaaagtttattagaagaaattgataatttcgtattatctattccaaatttaattgatgaggatgtaccagacggagcagatgagacagaaaatatcgaaattagaaaagagggaaagcccagggcatttgcatttacagtcaaagatcatctcgaaattggaagaaatcatgaaatagacatggaggctggagtcagaataactggttcaagatttaaggtacttagaagtgacattgctcaccttcaaagggctctaatcaatttcatgattgatactcatgtagatgaacatggatacgaagaagtctatgttccttatatagtaaacaaagattcattattaggaacaggacaactccctaaatttgaagaggatttatttaagattaataatgaaagtaatttttatttaacttcaactgctgaagttcctgtaacaaatctctttagagatgagattttagaatcgaaaaacctccc

SEQ ID NO: 296827 - DNA, 145 bp, Unknown
  Bacterial polypeptide expressing nucleotide sequence isolated from the Sargasso Sea
aaataaccaaggaagcaagcctaagtttttacacactttgaacggatctggattagcaattccacgagttatgattgcaattatggaaaattaccaagaagaagacgggtcaattgttgttcctgaagttttaagaccatatacc

SEQ ID NO: 296828 - DNA, 689 bp, Unknown
  Bacterial polypeptide expressing nucleotide sequence isolated from the Sargasso Sea
aatgcataatattaaagatttgagaaataattttgaagaatttaataatttaatcaaaacgagaaatgtaaaaattaatatagatgaaattcgtgatttagatcaagataacagaaaattaattcaagaaaaagaaaatttagagaaagaaaaaaaagaaatttcaaaaaaacaagataaatcattatttgaaaagtcaaaaaaaatttctgttgaaatagaatctttaaatgaaaaacaaatcataataaaaagaaaattaaatcttatattatcgtcgatacccaatttaccattaaaggatgttccagttggcaaagatgaaaattcaaataaggaaataaaaaaatctggtgaaataaaaaaatttaatttcaaaccaaaatcacattatgaaataggtgaaaatcttaaaatgcttgattttaatttagcaacaaaaacaacaggttccagatttgtttttgtaaaaggcaaactagctcaacttgaaagggctatatctaattatatgattgatactcatactaatttaaatggctataaggaaatttcaccacctttaatggcttccgacgaaactatgtatggaactggtcaattaccaaaatttgaaaatgatcaatttgaaatcaaaattgatgaaaaaaactctagaaaatttttaataccaactgccgaagttatat

SEQ ID NO: 296829 - DNA, 608 bp, Unknown
  Bacterial polypeptide expressing nucleotide sequence isolated from the Sargasso Sea
aatgcataatctaaaagatattagaaaaaatttagaacattttaaaaaaaaattaaataatagaaatacggacataaattttgatattttaattaaattagacaaagaaaatagagattttatacaaaaaaaagaaatattagagcaagaaaaaaagtctttatccaagacaagaaaagaagaaaattttaaaaaatcaaaaaaaatttctcaggagttagataaaattatcgacaaacaattatctgttcaagaaaaaattaataatctgctagcttccttaccaaatttgcctttagatgaagttccagaaggcatagatgaaaaatccaataaagttataaggaaagagggtgaaattaaaaattttaatttttctattaaatctcattttgaacttggtgaaaaaaataatcaaattgattttaggacttctacaaagttatctggttcaagatttgtagtattaaaagacaaaatagctttattagaaagagctctaattaattttatgattgatactcatactcaaaaatttgaatatacagagatttcaccaccacttttagtcaatgaaaaaatcatgtttggcactggtcaacttccaa

SEQ ID NO: 296830 - DNA, 124 bp, Unknown
  Bacterial polypeptide expressing nucleotide sequence isolated from the Sargasso Sea
actaagtgcttttcatagaaatgatattattgatttcaagcaattaccccttaagtatgttgcatatagcccatgttttaggagagaagctggaagttatggaagggatacaaaaggtttaata

SEQ ID NO: 296831 - DNA, 745 bp, Unknown
  Bacterial polypeptide expressing nucleotide sequence isolated from the Sargasso Sea
agaaataattttgaaaattttaaaaagttattaaaaaatagaaatgtgcaatttgatttagatcttattttaaatttggatgaaaaaaatcgtgatttaattgaaaaaaaagaaaagcttgaaaaagaaaagaaagatatctcaaaatctaaagataaatcactatttgcaaaatctaaggaattatcagttaaaatagaggatctcttaaaaaaacaagttcaaactcaagatgagttagatgatattctttcatcattaccaaatctaccattagacgatgttcctattggtgaaggtgaaagttcaaacaaagagataaataaatttggtaatctgcctaaatttgattttaaacccaaatctcatactgaattaggcaataacttaaatatgcttgattttgatttagctactaaaactactggttcacgttttgtatttgttaaggataaactagcattattagaaagagctctatctaatttcatgttagatattcatacaaaagttaatggatataaagagatatcacccccattaattgcttcagacaatactatgtttggcactggacaacttcctaagttcgagaacgatcagtttgaaataaaatttgatgacaaaggcaggaaatttttaattcctacagctgaagtaatattaactaatatggttaaaaatcaaattctatcagttaatgatcttccgataaggaattggttgcatcaacaccagcttcgaa

SEQ ID NO: 296832 - DNA, 136 bp, Unknown
  Bacterial polypeptide expressing nucleotide sequence isolated from the Sargasso Sea
taatggaagtggtttagctgtaggtagaacgcttattgcaatattagaaaactatcaaaattcagatggatcaataacaattcccgatgctttaaaaccctacatgaataatctagaaaaaatttcaaatatttag

SEQ ID NO: 296833 - DNA, 513 bp, Unknown
  Bacterial polypeptide expressing nucleotide sequence isolated from the Sargasso Sea
acgcaggactgtcccattgttaccgaaccgaagcaggtgctgccggacgtgaatcgaggggtttgtaccgggttcatcaattttccaaaatcgaaatgtttgccttcacccaccccgatcgctcggaggaaatgcatgagcggatgcgtgaaatcgaggaacgcatctaccaggatcttgaaattcctttccgggtggtcgatatctgcaccggggacctgggttcacctgcctatcgcaaatacgatctcgaggcatggatgccgggccgggggaaatggggggaaatcacttcaacctcgaactgtaccgattatcagtccaggaggctgaacatccgctttaaggacaagcagaccggcaacaaccggttcgtccatatgctcaacggaactgcgattgccgtctcccggactttgattgcactgatcgaaaacggtcagcgtgctgacggttccataagacttccgtcatgtcttgggattccggacattcctgctcccggggcttaac

SEQ ID NO: 296834 - DNA, 769 bp, Unknown
  Bacterial polypeptide expressing nucleotide sequence isolated from the Sargasso Sea
gatgcataatataaaagatataagacagaatcctgatcaatttatcgaaaatataaaaaatagatttgtaaatatagatcttaaaaaaattctagagcttgatgaaaataatagaaaattaattcaaaaaaaagaatccctagaaaaggaaaaaaaagaaatatcaaaaaaaaaggataaatcattatttgaaaaatcaaaagaaatatcagaaaaaatttccaaatacactaatgagcaaacagttattaaaaatgaactagaaagtattttaagctcaattcctaatattgctttaaaagatgtgcctattggtaaggatgaaagtttcaataaagaagtttttaaaaaaggtgaaatccctaagttttctttcaaacctaaatctcactatgaacttggagaagatcttaaaatgttggattttgatttagcaactaaaactacaggttcaaggtttgtttttgttaaagataagcttgctcaattagagagagcaataacaaactttatgttggatacgcacataaaaaacaatggatataaagaaatatcacctccacttatggcatcagatactactatgttcggcacaggacagctacctaaatttgaaaatgatcaatttgaaattaaatttgatgcatctagtggaagaaaatttttgattccaactgctgaagttatattaacaaatatggttaaagaacaaattgttaatcataaagatcttccaatgcgttttgttgcttcaaccccttgctttaga

SEQ ID NO: 296835 - DNA, 810 bp, Unknown
  Bacterial polypeptide expressing nucleotide sequence isolated from the Sargasso Sea
gatgttcagggagaacgccgacgcgatcagggccgatcacgacaggagggggatcccacacgacagcatcgacgaggtcatcaggctggacgaggagtggaggaaggcccagtacgacgtggaccagctccggcgcaggaggaacgaggcggccaggggaatagccgatgcgaagaagtcgggggacgaggacgctgccaaggcgataatggacgaggtctcgaccatagggtcgcagatagacgagctcacggcgcactccgaggagtgcttggccaccagggactcgctgaggatgagtatcccgaacatcctgcacgaggacgtgccggtgggtgaggacgaccagaagaacacgctccacagcctgcacggagagaagggcgagctctccttcgagcccaagaaccacaacgagctcatcgagatgaacggctgggtcgaccaggcaaggggagcgaaggtcgcaggcagccggttctacttcctgcagggcgacctcgcccgcatggagatggcgctccagcagtacggcgcggacttcctgatggaccggggctacaccctggtccagccaccgctgatgatgaacagggaggcatacgagggggtgaccgacctgagcgacttcgagaccgtgatgtacggaatagagccggacaagtactacctgatcgcgaccagcgagcacccgctgaccgccatgaggatggacgaggtcatcgagccctccgagctgccgatcaagatggtcggggtgtcaccgtgcttcaggagggaggtcggtgcgcacgggctttcggacagggg

SEQ ID NO: 296836 - DNA, 568 bp, Unknown
  Bacterial polypeptide expressing nucleotide sequence isolated from the Sargasso Sea
caaaagaaagaaaatttagaaaaagaaaaaaaagatatttctaaatctaaagatgaaagtttattcaaaaaatctaaagaactatctactgaattagaaaagattgctgagcaacaaaaaattactaaaattgaattagataaaattttatcaattataccaaatatacctcatcaagatgttccaaatgggaaagatgaaaatgataatgtagaagttttaaaagctggaaaacttccagagtttgattttaaacctaaatctcattacgaacttggtgaaaatttaggtatgcttgatttcgatcttgcaacaaaaacgactggatcaagatttgtatttgttaaaaaagagctagcattactggaacgagcattatctaactttatgttagacacccacattattaaaaatggttatcaagagatttcacctccattgattgcttccgataatacgatgtatggaacaggccaattaccaaaatttgaaaacgatcaattcgaaataaaatttgatcaaggatctgatagaaaatttttaattccaaccgctgaagtaattttaa

SEQ ID NO: 296837 - DNA, 697 bp, Unknown
  Bacterial polypeptide expressing nucleotide sequence isolated from the Sargasso Sea
aataacgatattaaagatcttaaagaaaaatcctcagaaataaaagataaaagcaaatccacgggagaagaattaaaaactatagaaaaagaaattcaaaatatactggtgaatatccctaatattccagatagcaaagttcctgaaggaaattctgagaatgaaaacatagaaattttaaagaatgaagttgatatagatgaaaatcaaaaactaaaacctcattgggaattaattaaagatttcaatcttattgactttgaaaatggaaataagataacaggcgctggttttcctatttatacaaataaaggagcaaaattacagagagcgcttattaattattttttagatgaagctgagaaaaacggatatattgaaattcaacctcctattttaataaatgaacagtctgggtttggaactggtcaacttcctgataaggagggcatgatgtataaaatagaagatgaaaatttatttatgataccaactgcagaggttccaataactaatatgtacagaaaaaatattatagaaaataaggatttacctatcaaaaatgttggttatactccatgttttagaaaggaagctggttcgtggggagcacacgttagaggactcaatagattacatcaatttgacaaggttgagattgtacatattgaaaaacaagaaaattcagaaaaagcat

SEQ ID NO: 296838 - DNA, 775 bp, Unknown
  Bacterial polypeptide expressing nucleotide sequence isolated from the Sargasso Sea
ttcatatatttttggtgacttggtaaagattgaatttaatttagtttcttatgtacttgataaactttcaaataatggatttcttccgacagttccacctgttttagttagagaaaatgctttatttggcacaggatttttccctgatgatgcagagcaagtttatgagataccaaatgatgacctttacctagttggtacatctgaagtttctttagcagcgttacatggagaagaaatacttgaacacaagtctttacctataagatatgctggattctcaacatgctttcgaagagaagcaggaacatatggaaaagatacgacgggaatatttagagtacatcagtttgataaagttgaaatgttttctttttgtgattctgacaactcgaaagaagaacatgagtatcttttatcactagaggaagagatacttcaagatttagaaataccatatagagtcgttgacgtatgttcaggggacttgggtgcttccgcttctaaaaaatttgatatagaagcatggataccaagtcaaaataactatagagaagttacgtcatgttcaaatacaactgattatcaggcaagaagattaaatattagaacaaaaaaagaaaaagaaatggaattaattcatacgttgaacggaacagcgttggctgttggaagaatattaatagctctaattgaaaacaatcaacaagaagatggatctgttaaattttctgacagcttatctaaaataattggagttgaaagtttaagctaa

SEQ ID NO: 296839 - DNA, 568 bp, Unknown
  Bacterial polypeptide expressing nucleotide sequence isolated from the Sargasso Sea
aatgcataatttaaaagatattagaaaaaatttagacttttttaaaaaaaaaataaaggaaagaaatgtagaagtaaattttgaaaacttgattaatttagataaacaaaatagagatttaatatcaaataaagaaaaattagagcatgaaaaaaaacttttatctaaaacaaaagatgaaagtaattttaaagactcaaaaaaacttacaaaggatatagaaattatcgacacgaaacaaaaagagttacaaaagaaaattaagtcaatagtttcatcaataccaaacattgcattagatgatgtacctataggaaaagatgaaaaatctaacaaattgattaagaacactggaaatattaaaaaatttgattttaaagttaagtcacatgtagagataggtgaaaaaaataaatatctagattttgatagcgctacgaaaatttcaggatcaagatttgttgttttaaaagataaatttgcattattagaaagagcgttaattaattttatgctagatatccacactaaaaaatttaactacatagaaatttcaccaccaataata

SEQ ID NO: 296840 - DNA, 637 bp, Unknown
  Bacterial polypeptide expressing nucleotide sequence isolated from the Sargasso Sea
ttttcctgatgacgcagagcaagtttatgagataccaaatgatgacctttacctagttggtacatctgaagtttctttagcagcgttacatggagaagaaatacttgaacataaatctctacctataagatatgctggattctcaacatgttttcgaagagaagcaggaacatatggaaaagatacgactggaatatttagggtgcatcagtttgataaagttgaaatgttttctttttgtgattctgatacctcgaaagaagaacatgaatatcttttatcactagaggaagagatacttcaagatttagaaataccatatagagttgttgacgtatgttcaggggacttaggtgcttccgcttctaaaaaatttgatatagaagcatggataccaagtcaaaataactatagagaagttacatcatgttcaaatacaactgattatcaggcaagaagattaaatattagaacaaaaaaagaaaaagaaacggcattaattcatacgttgaacggaacagcgttagctgttggaagaatattaatagccctaattgaaaacaatcaacaagaagatggatctgttaaattttctgacagcttatctaaaataattggagttgaaagtttaagctaa

SEQ ID NO: 296841 - DNA, 766 bp, Unknown
  Bacterial polypeptide expressing nucleotide sequence isolated from the Sargasso Sea
atgcataacatcaattatataagagaaaaccctgtaaaatttgataattttatgaaaactaggggtgaacctcctattgcagataaaattatagaaattgataaagaaaaaagagaaacacaaactattttgcaaaatttattagcagaaagaaattcactatcaaaaattattggtaaattaaaaagtgaaaaaaaagatcctgtaaatgaaatgactaaagtagaagatttaaaaaaagaattaaataccttaaaagagcttgaaacaataaaagatgatgaattgaaagctatattaagtagattgccaaatattccagattctactactcctattggaaaaaatgaggaagataatattttatataaagattggggaagtaaaccctcttttgattttgagccaaaatctcattttgatattggtgaaaatttgaatttaatgaattttgaaactgcaactaagctatctggatcaagatttgttattttaaaaggtcagatggctaaacttgaaagagctattgctaattatatgcttgataaacatacttcaactaatggttatgttgagatgcacgttccttatttagtaaaagaagaaaccttatatggaacaggacagttacctaaatttgcagaagatttatttacagctggagaaaatcactggcttataccaactgctgaaattccgcttacttcactttgtagtaatgaaattttgaatgttaatcaactccctaaaagagttacttcatata

SEQ ID NO: 296842 - DNA, 324 bp, Unknown
  Bacterial polypeptide expressing nucleotide sequence isolated from the Sargasso Sea
aatttccttatagagtcgttgatgtttgcactggtgatctaggttcgtctgctgctaaaaaatttgatatcgaagcatggataccaagtcaaaatacatatagagaagtaacatcatgttcaaacacgacagattttcaagctagaagattaaatattcgaacaaaagtagataaagattcagctttactccatacattaaacggtacagctattgcagtaggaaggatactgatagctctacttgagaacaatcaagccgaagatggagtagaattttctgataacttgggaaatattttaggggttgaaaagttaagctaaa

SEQ ID NO: 296843 - DNA, 663 bp, Unknown
  Bacterial polypeptide expressing nucleotide sequence isolated from the Sargasso Sea
gatgcataatttaaagcatattagacagaatccagatttctttaaaaaaaaaatttctcaaagaaattcaaaatttaatataaacgatttactcgatcttgatgaacaaaatcgtaagttaatacaaaaaaaagaaaagctagagcaagaaaaaaaaattatttcaaaaaataaaaataaaacacaatttgaaaaatcaaaaaatatatctaaagaaatcgaaaatcttgtgaactctcaaaatttattacaaattaagattgacgctatcctaaattcagcacccaatattgcattagatgatgttcccgttggtgaaaatgacaaatctaataaagatcttaaaacttacggaaaaatttcaaaatttaattttaaaatactatcgcattttgaaataggtaaacaaatgaatttaatggattttgatttagcaacaaaaacttccggatcaagatttgtttttttaaaaggtaaactagctgaattagaaagagcaatttcaaattttatgatagatatccatacaaaagaatttggttatctggaaatatctcctcctcttatagcatctgaatcaactatgtttggaactggacagctaccaaaatttgagagcgatcaatttgaaattaagttggataataaacaaaaaaaattttt

SEQ ID NO: 296844 - DNA, 454 bp, Unknown
  Bacterial polypeptide expressing nucleotide sequence isolated from the Sargasso Sea
acgaccggaatatttagagtgcatcagtttgataaagttgaaatgttttctttttgtgattctgaaaattcaaaagaagaacacgagtatcttttgtcattagaggaagagatacttcaagatttagaaataccatatagagtcgttgatgtatgttcaggagatttaggtgcttctgcttctaaaaaatttgatatagaagcatggataccaagtcaaaataattatagagaagttacgtcatgttccaatacaacggattaccaggcaagaagattaaatattagaacaaaaaaagaaaaagaaactgaattaattcatacgctgaacggaacagcgttagctgttggaagaatattaatagctctaattgaaaacaatcaacaagaagatggatctgttaaattttccaatagcttatctaagataattggagttgaaagtttaagctaac

SEQ ID NO: 296845 - DNA, 688 bp, Unknown
  Bacterial polypeptide expressing nucleotide sequence isolated from the Sargasso Sea
atgcttgattcaaaattactcaggaaagaaacaaaagaggtcatatctaatctgaaaaggagaggtttcgaattcgatgagactctctggaccaaacttgaatctaaaagaaaagatttacaaggctcaactgaaaatcagcaagctaagttaaacgagctctcaaaaaatataggaattgctaaacaaaattctgaagatacaaaagatcttgaaaaaatggcttcagaacttacagcaacattgaaagagcagagtaatgagctagataacttactggaacaaatagaaaattttgttttgtcgattcctaatctaattgaccatgatgttcctgatggtgaagacgaaacttccaacttggagttaaaaaagattggctcacctagagtatttgattttcctattaaagatcacttagacattggaagatcttatgaaattgacatggaagcgggggtaaaactgactggttcaaggtttaaagttcttagaaatgatatagcacaccttcaaagagccttaataaactttatgattgatacacatgtacaggagcatggatatgaagaagtttatgttccatacatagtcaataaagagtctatgatcggtacaggtcaactccctaagtttgaagaagatctttttaagatcgataacaaaaatgatttttatttaacctcca

SEQ ID NO: 296846 - DNA, 163 bp, Unknown
  Bacterial polypeptide expressing nucleotide sequence isolated from the Sargasso Sea
ggtaaagtggaattagtccatacgctcaatggttctggacttgctgtggcagggacactcgttgcgattttggaaaattatcaggatgccgacgggaatattcagattccctctgttttgaggccctatcttaatggagtttcgttgctggagctgggatgaa

SEQ ID NO: 296847 - DNA, 658 bp, Unknown
  Bacterial polypeptide expressing nucleotide sequence isolated from the Sargasso Sea
atgcataatcttaaagaaatacgtaaagactttaaaacttttaaagaacttattaaaaatcgtaatatagatattgatatagaaaatctaaaaaaattagatgaattaaatagagaacttattcaaaaaaaagaaagttttgagaaagaaaaaaaagatatttctaaatcaaaagatgaaagcttatttaaaaaatctaaaaaaatttcaattgaactagataagatttatgaagaacaaaaaaagattaaaaatgaattagatgacattttatctaatattcccaatattcctcataaagatgtaccaaatggaatagatgaaaatgacaatgttcaaatatctaaatctggtgaaatacctgtattcgactttgagccaaaaactcactacgatttaggcgaaaaactagccatgctagatttcgatttagctactaaaacaactggatcaaggtttgtatttgtaaaagataaattagctttattagaaagagctttatcaaattttatgcttgataaacatattatcaataatggatatcaagaaatttcacctccattaattgcctcagaaaatactatgtttggcacaggccaattaccaaaatttgagactgatcaatttgaaattaaatttgatgaaggatctgacagaa

SEQ ID NO: 296848 - DNA, 568 bp, Unknown
  Bacterial polypeptide expressing nucleotide sequence isolated from the Sargasso Sea
gatgcataatattaaagatttaagaaagaatattgaaaattacaaaaaaaaattttctgaacgaaattttgattttaaaataaacgaatttaaaaaatttgatgatgaaaacagaaaattgatttatgagaaagaaaaattagaacaagaaaaaaaaatcttatcgaaatcaaaagataaatctaattttgaaaaatctaaaaaaatttcagaagaaatttcacaattagcaatgcaacaaactctcacacaaaaaaaacttaatgatttattatatataatgccaaatcttgctttagaagatgttccaattggaaaagatgaacgatctaataaacttattagtaaaaacggtagaataaaaagtttttcatttaaaacaaaatctcatgcagagataggtttgaaaaataatcaaatagattttgatacatctataaaattatcaggatctaggtttgttgttttaaaagataaatttgctttattagaaagagcactcataaattttatgttagatattcattctaaagagtttgagtatgttgaagtatctcctccattaata

SEQ ID NO: 296849 - DNA, 723 bp, Unknown
  Bacterial polypeptide expressing nucleotide sequence isolated from the Sargasso Sea
aataataagaaaagattttgatgcatttaaaaaagcattagaaaaaagatctattgatatagattatgataaattaaaaattttagatgagcaaaatagagagtttatacagaggaaagaaaaattagaaaaagaaaaaaaagatatttcaaaatctaaagacaaatctttattctctaaatcaaaagaaatttcattaattattgatgatataataaaaaaacaaaaaaaaattaaattagatttaaataagatattatcaaatataccaaatattcctcatatagatgttccaaatggtaaaaatgaaaatgacaatgttgaaattatcaaatctggaaaaatacctgaattcgattttaaacctaaatctcattatgaattgggtgagagtcttgagatgcttgattttgatcaagcaacaaaaacaactggatctagatttgtttatgtaaaagataaattagcattactggaaagagcaatttctaattttatgttggatattcatattaataaaaatggatatcttgaaatttctccacctcttttagcatctgaaaatactatgtttggtactggtcagcttcctaaatttgaaaatgatcaatttgaagtaaaactcgaagatacaaatgatagaaaatttttgatacctacagctgaagtaattttaactaatattgtaaaagataaaattattgatttaaaaaatttacctat

SEQ ID NO: 296850 - DNA, 256 bp, Unknown
  Bacterial polypeptide expressing nucleotide sequence isolated from the Sargasso Sea
gcaccggggcaggggggctatctggaagttagcagcgtttccaataccgaggactttcaggcgcgccggatgaaaacgcgtttcaaggcagagcagggcggcaatcaactgccgcatattctgaacggtagcggcgtcgccttggcccgtttgtttgtggctctgatagaaacgcatcagcaaaacgacggctcaatcaagattcccgagccgctacagccgtacttacgggcagacaccattccggccgcctagc

SEQ ID NO: 296851 - DNA, 262 bp, Unknown
  Bacterial polypeptide expressing nucleotide sequence isolated from the Sargasso Sea
tgatattgaagcatggataccatcagaaaataaatatagagaaatatctagctgctcatcatgtggaacattccagtcaagaagaatgaatgctaagcacagaggtcaaaaagggttagaatttgttggaacattaaatggttcaggcctggcagttggtaggttgcttatcgctttagtagaaaataatcaaaatgaagatggttccatttctatacctgctcctttaaaaaaatacatgaataacctagataaaatttaa

SEQ ID NO: 296852 - DNA, 280 bp, Unknown
  Bacterial polypeptide expressing nucleotide sequence isolated from the Sargasso Sea
aacttatgatatagaggtttggcttacttcagaaaacaaatatagagaaatctcatcctgttcttcatgctctactttccaagcaataagaatgaaatcaagatatagagatagtaaaaaggaaattctttataccggcactttaaatggtagtggactagctgtaggaagaactttaattgcaattatggaaaattatcaacaaaaggatggttctataataataccaaaagttttaagaccttatatgaatgatttagaaaaaatttcgatcaattaa

SEQ ID NO: 296853 - DNA, 628 bp, Unknown
  Bacterial polypeptide expressing nucleotide sequence isolated from the Sargasso Sea
atgcatgatattaaaataattagaaaagattctgaaacattttcaaagaaacttttagaaagaaatatcaaattcgatttaaagaactttttaaaattggatgagaaaaataggaaattaatacaagaaaaagagaaattagaacaagaaaaaaaaattatttctcaaaaaagggatgaaaaacaatttaaaaaatctaaagatatttctttaaaaattgaagagttaataaaagaacaatccgaaataaaaaataaaattgattcaattcttgtatcaatacctaatatagctcaaaaagatgttcctgtaggaaaagatgaaaattctaataaagaaataaataaatttggtcaaattactaaatttaaatttaacccactctcacatgatgagatcggaaaaaaacttaaacaaatggattttgatacagctactaaaacatcaggtgcccgttttgtttttttgaaagacaaacttgccttgttagagcgtgccatttctaattttatgcttgatgttcacactcgtgaatttggttataaagaaatatcaccacctttaattgtaagcgcagataccatgtttggtacaggccaattaccaaaattgaaactgatcagttgaa

SEQ ID NO: 296854 - DNA, 756 bp, Unknown
  Bacterial polypeptide expressing nucleotide sequence isolated from the Sargasso Sea
aatgatttcgattgaagaaatacgaaaaaataccagtctagttaaaaaaaaattagccaaaaaaggagataaatcttcaattgataatttgctcgagctcgataaagaataccgctctctcattacaaacgctaataaattgagatctgaaagaaatattgtttcaaaaaaaattgcttctttaaaaaaagataggctatctgctaaaactgaaattaatcaaatgaaagaagttggtgaatcaatttcaaatatagaaaaagaatcaaataaaattaaaaaattaattgatactatattacttaacatacctaatctaccacatgattcaactcctaatggcattggctctaaagataataaattagttcgtgaatttggtaaattaaaaaaaactgactataaaattaaaaatcatattgaattgggacgagatctcaatttatttgattttgatagagcagcaaaaatttcagggtctggattcccgttatatacaaatagaggagctaaattagagagagctctgattaactatatgttagacttacattcattagaatttggatatgttgaaattttccctccttttctggttaattcaaaatcacctaaaacaactggtaatttgccaaagtttagtgaggatatgtatcaaattgaaaatgataatttgtggttaattcctactgctgaagttcctattacaaatatacataaagacgaaataatatctgagaaaaacttgcccataaa

SEQ ID NO: 296855 - DNA, 842 bp, Unknown
  Bacterial polypeptide expressing nucleotide sequence isolated from the Sargasso Sea
aatgaagaaaaagaaaattctcttgaaaaaagccgcagacctaagtgaaagctttaagagtttatctgaaaaggcagaaaaacaagaaaaactctttttagatttatggataaaaatcccaaatattgtggacccttcttctccagttgggaaaacagaccaagataacaaggaaattaaaaaagttggagaaataaaagagtataaaagtgtcaaagatcatttagagattggggagtctctagggttaataaatgtagagaaagcatctgaagtctcaggttcacggttttcatatatttttggtgacttggtaaagattgaatttaatttagtttcttatgtacttgataaactttcaaataatggatttcttccgacagtcccacccgttttagttagagaaaatgctttatttggcacaggatttttccctgatgatgcagagcaagtttatgagataccaaatgatgatctttacctagttggtacatctgaagtttctttagcagcgttacatggagaagaaatacttgaacataagtctttacctataagatatgctggattctcaacatgctttcgaagagaagcaggaacatatggaaaagatacgactggaatatttagagtacatcagtttgataaagttgaaatgttttctttttgtgattctgacaactcgaaagaagaacatgagtatcttttatcactagaggaagagatacttcaagatttagaaataccatatagagtcgtcgacgtatgttcaggggacttaggtgcttccgcttctaaaaaatttgatatagaagcatggataccaagtcaaaataactata

SEQ ID NO: 296856 - DNA, 408 bp, Unknown
  Bacterial polypeptide expressing nucleotide sequence isolated from the Sargasso Sea
agtttgttgaacctgaaaactcaatggatcatttagaaaaaatggttgagaatgcaagaacattgtgcgacagacttggattgtcttcaaaactaatacaattatctactggagatataggatttcaatcaggtataacgtttgatattgaggtttgggctgcaggatcaaaagagtggcttgaagtatcatctatatctaactgttttgattttcaaactagaagaaataatacaagatataaatcaaatcaatcttctccaactagttttcctcatactttgaatggatctggtttagctcttccaagaatttgggttgcaataattgaaaatggacagaaagctgatggatcaatcgaaattcctgaagttcttgtaccatatactggttttgaatatatctaat

SEQ ID NO: 296857 - DNA, 757 bp, Unknown
  Bacterial polypeptide expressing nucleotide sequence isolated from the Sargasso Sea
aatgcacaatattaaagatatcagaaatgacttcgaaaactttaaggaaagacttaaaaatcgaaacattgatataaatcttgataatatattaagtttagatgaggaaaatagaaaacttattcaagaaaaagaaaaatttgaaatggaaaaaaagtctatttcaaaatcaaaagaccaaagtttatttgaaaaatcaaaagagctctctttaaagattgaagaaattaacaaaaatcaaatcaaattacagaaccggattaccgatattttatcttctataccgaatatacctttaagtgatgttccagtaggacaaaatgaaaattctaataaagaaatagaaaaaaagggagaaataaaagaatttaattttgtgcctaaatctcattatgaactaggagataaattaaatatgcttgattttgacttagcaacgaaaaccactggttctagatttgtatttgttaaaaaagaattagctcaattggaaagagcaatatcaaattttatgattgatacacatactcaaaaaaatggttatacagaaatatcgcctccattaattgcaaccgctgaaacaatgtttggcactggacaattaccaaaatttgaaaatgatcagtttgaaattaaattagacgaaggtgatggaagaaagtttttaataccaaccgctgaagtaattttgacaaatattgtaaaaaatcaaattttagaaaagaatgaattacctattagagtagttgcgtcaaca

SEQ ID NO: 296858 - DNA, 810 bp, Unknown
  Bacterial polypeptide expressing nucleotide sequence isolated from the Sargasso Sea
ggcagatggacgtcgacgatctgcgatgcacgatgctgaagaagctcgagccgctcagaatgcagcctcaaaagaaattggtcaagctgaaccgagtgaccgggaatcaaaaatagctgaagcaagcaggctgaaagccgaactcgaaaagctcgaggaagtggaagctgcggctgtcgaagaaatgcgagagttagctctgcagattccgaacccagcgcacgaatcggtccctgtcggaggtgaagatgattttgtcactgagaaggaggtaggagagcagacgccaccgagattgcatgatcacgcggaactgggtgaactacttggactagttgatagtgaaagggctggcaggaatagtggaagcaggttcgcatacctgatgggccccgctgtacggcttgaatttgcactcgttcaatttgctttcgacatcctcgaagagcacagctttgtgccagtagttcctccagtattagtgcgtgaagagatgatggtcgatgctgggttcttccccaccgacagacatcaggtctatgaaatagctggtgatgacctttttcttatagggacttctgaagtagcgctagcaggcctgcacaggggtgaacgccttgaaagagactccctgccggtccgctacgccgggttttcttcatgttttcgacgagaagcggggacgtacggcaaagatacgagaggcatcttccgcgtccaccaattcgacaaagtagaaatgttttcgttctgcgaccctgaggtgagttgggatgaactcgaaatgcttcgctctatccaagaacagat

SEQ ID NO: 296859 - DNA, 175 bp, Unknown
  Bacterial polypeptide expressing nucleotide sequence isolated from the Sargasso Sea
acacgttataaaaataatgaaaaaaatactcatgtacacacattaaatggttcaggattagcagttggaagaactttgattgctatattagaaaactatcaaacagaagatggaaatattaaaattcctgatgtattaaaaaagtattttgattatcaagatactcttttatagt

SEQ ID NO: 296860 - DNA, 254 bp, Unknown
  Bacterial polypeptide expressing nucleotide sequence isolated from the Sargasso Sea
ttcagaaaaaaaatatagagaaatatcaagctgctcttcttgtggaaccttccaagcaacaagaatgaaggctagatataaaaataaatctaatgaaacaacatttgtaggaactttaaatggaagtggtctagctgtaggaagaacattaattgcagtattagaaaattatcaaaattccgatggatcagtaaatattccagatgtattaaagccttacatgaataatcttgataaaatatcaaataattaag

SEQ ID NO: 296861 - DNA, 497 bp, Unknown
  Bacterial polypeptide expressing nucleotide sequence isolated from the Sargasso Sea
aatgttagatattaaattgcttagatcaaaccccgaggacttgcgtgacagactcgcaataaaggggtacgcattggatgtgaacgaattcttgtccttggacaatcaaaggcgcctagctcaagaagaaaccgagagtcttcaaaacgaacgaaacgttaaatcgaaatcgataggtcaggccaagtcaaaaggagaggacgtcgatggtttgataaaggaagtcggcgatctcggtgaccgcctggaaaaggcgaaaacaacattagccactgtccgagaaaaatttgacttaattcttcatgggattccgaatattccagatgagtcggttcccgcaggagacaatgaactcggaaataaggagatcaagcgttttggggaaccgctgcaatttgattttgaaccaaaagatcacgttgatttgacctcggcaggcgagttggactttgagagagccgcaaaaatcacgggctctcgttatgttgtgatgcgag

SEQ ID NO: 296862 - DNA, 759 bp, Unknown
  Bacterial polypeptide expressing nucleotide sequence isolated from the Sargasso Sea
taaaagaaattaggaaagattttttaaaatttgaaaaaaatcttgaaaaacgttcagtaaaaattgattttaataatttaaaaaaacttgatgagttaaatagagatttaattcaaaaaaaagaaaatttagaaaaagaaaaaaaagatatttcgaaatctaaagatgaaagtttattcaaaaagtctaaagaaatttctacagaattagagaagatttctgagcaacaaaaaaaaactaaaaatgaattagataatattttatcaagtataccaaacttacctcatcaagatgtcccaaatggaaaagatgaaaatgataatgtggaagttttaaaagctggaaaagttcctgaatttgattttaaacccaaatcccattacgaacttggtgaaaatttaggcatgcttgattttgatcttgcaacaaaaacaactggatcaagatttgtttttgttaaaaaagagctagcgttattggaacgtgctttatctaattttatgctagatactcatattattcaaaataattatcaagaaatctcgcctccattgatagcttctgaaaatacaatgtatggaactggtcagttaccaaaatttgaaaatgatcaatttgaaataaaatttgatcaagggtctgatagaaaatttttaattccaacagcagaagtaattttaaccaatatagttaaagataaaatcgttgaccaaaaagatctacctatgagatttgttgcttcaaccccatggttttaga

SEQ ID NO: 296863 - DNA, 742 bp, Unknown
  Bacterial polypeptide expressing nucleotide sequence isolated from the Sargasso Sea
atgcatgatataaaatatattagagaaaactttgatatttttaaaaaaaaaatttcaaagagaaataatgcaactgatatcgacaaatttcctgagcttgataaaaaaaatagagaattaattcaagagaaagaaaaattagaacaagaaaaaaaaataatttctaaatctaaagatgaaaagatgtttatcaaatctaaagatatctcttcaaaaataaaaaaaatttctgacaatcaactcaaaattaagaccgagttaaataatctcctttcttcaattccaaatattgcgcatgaagacgtacctgagggaaatgatgaaaagttaaataaaataatcgaaattaaaggtgaaattaaatctaaaaattttaagattaaatcacattatgaattgggagaaaatttaaaaatgttagattttgatttagcaacaaaaacaactggctctagatttgtttttgtaaaagataaattggccatgatggaaagggctttatcaaattttatgttagatgttcataccttggaaaatggatatagagaaatttcacctccattaattgcatcagaatccaccatgtatggtacaggtcaattgcctaaattcgaaaatgatcaatttgaaattaagttagacactgatgatggcagaaaatttcttattcctactgctgaggtaatattaaccaatatagttaaaaatcaaataatcaaatcaagtgaattaccattacgtt

SEQ ID NO: 296864 - DNA, 856 bp, Unknown
  Bacterial polypeptide expressing nucleotide sequence isolated from the Sargasso Sea
aaagaagtcgaggctgcccttctcaagcgaatggacgaaatcagctttgacgagctgctcgcctgggaccaacggcgcagggacattattcccgagatcgacggactcagagggaagcgcaacaaggtgtctgccgagatcccggccctgaagaaggagggcaaggacaccattgcggtgcgggaagagatgcgtgaagtctcgactcgaataaaggaccttgagtcaacgctcactgacgttgaggcatcaattagggagtttctcgagagtctgccgaacattcccgccgccgacgtgccggccggagacaaggagaacaacgaggtcatccggacattcggtgagaagcctgatctcagtgggctggcccctaaagaccacgtcgatctcgcaaccgatctaggcctaatcgactatgaacgcggcgtcaagatgggcggcaatggcttcgtcttgtatcgaggtgatggtgcgctcctcgagtgggcgctcttgaactacttcgttgacgagcacgtcaaggacggctatgagttcgtcctgccgccgcacctcctgatcgaagagtgcggattcgccgcgggtcagttcccgaaattccgggatgacgtgttccacatccggggagacggagacgagccatcgaagcactttctgttgcccacttccgagacggctttgatcaacttccatcgcggcgaaatcatcccggaggcagaacttccgaagaagtatttcgcctacacaccctgctaccggaaggaagccggaagctaccgggcaaacgaacgtgggatgatccggtcacaccagttcaacaaagtcgaaatcttccagtttacgcgcccccaag

SEQ ID NO: 296865 - DNA, 331 bp, Unknown
  Bacterial polypeptide expressing nucleotide sequence isolated from the Sargasso Sea
gctagaaattccctatagagtcgttgatgtttgcaccggcgatctaggttcatctgctgctaaaaagtttgatatcgaagcatggataccaagtcagaatacatatagagaagtaacatcttgttcaaacacaacggattttcaggccagaaggttaaatattcgcacaaaagttgaaaaagatacagctttactccatacattaaacggtactgctattgcagtgggaagaatattgatagctctacttgaaaataatcaaactgaagatggaggagtaaaattttctgatagcttggggaatattttaggggttgaaaagctaagctaa

SEQ ID NO: 296866 - DNA, 536 bp, Unknown
  Bacterial polypeptide expressing nucleotide sequence isolated from the Sargasso Sea
gcggctataccctcgacggggcggcctctaccgcgctcgaagcggaacgcccgacacccagacccgtaccgaagagaagcaggcgcgcctttttttcttgtcgaagcagatcggcgggatgaaagggcggggcgaggacacctcggcgctgatggccgaagtgggcggtatcggcgacgaaatgaaggcgtcggcggccaggctcgacgacatccagaagcgtttgtccgacctgctgctcggcgtgccgaacctggcgcacgaaagcgtgccggtcggtacggacgaagccggcaacgtcgaagtgcgccgttggggcacgccgcgccagttcgatttcgaggtgaaggatcacgtcgacatcggcacggccgcttggcctcgacttcgaaaccggcgcgaagctgtcgggtgcgcgcttcaccttgctgcgcggccagattgcccggctgcatcgcgcgctggcgcagttcatgatcgacacgcacacgctgcaccacggctacaccgaggtgtacacgccgtacatcgtgaat

SEQ ID NO: 296867 - DNA, 676 bp, Unknown
  Bacterial polypeptide expressing nucleotide sequence isolated from the Sargasso Sea
atgttagatataaaaaaattaagagatagttttgaagaagttaaggtagctttaaaaaagcgtggttttgatatagatcaagaaaagttccaatctttagataaaaaaagaaaggtgcttcaagtagatgttgaaaatcttcaagctgaaaaaaataaactttcttcagaatttggaaaacttaaatcagcaggagaaagcactgattcattaaaagaaactatagacaaaaaaactcttgagctaaatgagaaagatagtgagcttaaaattattttagataaaattgaaagtttcttattaagaataccaaacatttcagatgattctgttcctgagggtaaaaatgaagaagataatgtagttgttagcactcatggttcaatagattctacaaatacacttgatcatttagaaataactggattaatagatgttgatttagctgtaaaacttgctggagcacgtttttcagttttaaaaggtgatttagcaaaacttcaaagagctttaattacatttatgttagataaagcaaccggtcatggttacgaagaatactatctaccatttatggctaatagaaattcattaattggaacaggacaactacccaagttcgaagaagatctatttaagacaaaggataaattatatttaataccaactgctgaag

SEQ ID NO: 296868 - DNA, 615 bp, Unknown
  Bacterial polypeptide expressing nucleotide sequence isolated from the Sargasso Sea
aatgttagatccaaaagttatccgcaatgaattagaggtagtagcgaaacgccttaaagtcaaaaattttgagcttgatatagagcaattaaaagagtgggagggagcacggaaggatctgcaactggatacagaaaaactgcaaaacaagcgtaacagtaaatcgaagttaatcggcgaagcaaagtctcagggaaaagatgtatctgcaattttaactgacatggagaatttaaagtctagtcttgataagaaaaaaaatgaattaagtgaaattcaatcaaggttacacgaatatttgttaaatgttcctaacattcctgataaagaagttcctcccgggaaagatgaatccgataacgaagtcatcagtacatggggttctttgcctaaatataatttcgacgttaaggatcactctgaattaggcgaacaattggaacaagggttggattttgcagcagccgttacactttcgggttctaggtttgttgtgctcgaagggagacttgcaaaattacacagggcactgtctcaattcatgttggacgttcatacagaagagcacggatacctagaatttaacttgccattaattgttaataatgaatcctt

SEQ ID NO: 296869 - DNA, 333 bp, Unknown
  Bacterial polypeptide expressing nucleotide sequence isolated from the Sargasso Sea
ggattacatatagggttgttgagttgtgtacaggcgatttaagttttgcagctgccaagtgttatgatattgaaatatggtctcctggagagcaaaaatggctcgaagtttcttcatgtagcaattttgaagatttccaggcaaggagaggaaagataaggtacaggaaagacgaagataaacgagttgatttgcttcatacattaaatggttcggggctagcaacacctagattaatggtttcacttcttgaaacatttcaaaccaaaaatgggactattgaattttctgactcggctgctgaatttattggaataaaagaaatttcataat

SEQ ID NO: 296870 - DNA, 703 bp, Unknown
  Bacterial polypeptide expressing nucleotide sequence isolated from the Sargasso Sea
gctggatcagcgcctgctgcgcgaaaaccctgagctgatcagtcagcagctagggcgccgcggcatgacggtcgatctcaccaagctgcaattgatcgccaagcaggagcgcgacctcgaagagcagcgcagcaatctgcaagccgaaggcaaccgcaccggcaaagaggtggggatgctgatcaaaggaggcgccgcccccgatagcgatgaagtgaaggccctcagggaaaagggcaaccgcatcaagcagcaggtggcggtgctcgaagaagaggaaaaaagtcttgaggtgaagctgcgtgatcagctgctagcgctgcccaatctgccttcagctgaggctcctgatggcaagagcgaagccgacaacgttgaggtgaaacgctggggtgaaccccgccagggcaaagattttgaagagcactggcaattggctgatcgccttggcctgtttgaaaccgagcgttccgttcggattgcccagagccgtttcatcaccttgatgggcgatggcgcccgccttgagcgtgccctgatcagcttcatgctcgatctacacagcaccaagggctacaccgaggtgatgccaccgatcctggtgaacagcgccagcctcacaggatcaggccagctgcccaaattcgccgaggagagcttccgctgcgctgacgacgacctctggctcacacccaccgctgaa

SEQ ID NO: 296871 - DNA, 720 bp, Unknown
  Bacterial polypeptide expressing nucleotide sequence isolated from the Sargasso Sea
gatgcataatttaaaagaaataagaaaagatttttcaaaatttgaaaaagatcttgaaaaacgttcagttaaaattgattttgataatttaaaaaaacttgatgagttaaatagagatttaatacaaaagaaagaaaatttagaaaaagaaaaaaaagatatttctaaatctaaagatgaaagtttattcaaaaaatctaaagatatatctacagagttagaaaagattactgagcaacaaaaaaatactaaaaatgaattagatactattttatcaagtataccaaacatacctcatcaagatgttccaaatggggaagatgaaaatgataatgtagaagttttaaaagctgggaaagttcctgaatttgactttaaacccaaatcacatcatgaacttggtgaaaatttaggcatgcttgattttgatcttgcaacaaaaacaactggctcaaggtttgtatttgttaaaaaagagttggcattattggaacgagctttatctaactttatgctagatactcatattgttcaaaatggttatcaggaaatttctcctccattgattgcttctgataatacgatgtatggaacagggcaattaccaaaatttgaaaacgatcaatttgaaataaaatttgatgaaggatctgatcgaaaatttttaattccaactgccgaagtaattttaacaaacattgttaaagataaaattgttga

SEQ ID NO: 296872 - DNA, 207 bp, Unknown
  Bacterial polypeptide expressing nucleotide sequence isolated from the Sargasso Sea
gcattgattttcaagcacggagatcatcaataagatcaaaaattaataaaaaaaatatatatttgcataccttaaatggcagtgggcttgctattggaagaacaatggctgcaattcttgaaaatgggcaacaaacagatggcagcgttaagattccggatgcactagttccatattttggatcaaattttttaaaaacttcttaat

SEQ ID NO: 296873 - DNA, 865 bp, Unknown
  Bacterial polypeptide expressing nucleotide sequence isolated from the Sargasso Sea
atgttcagggataacgccgacgcaatcagggccgaccacgacaggagggggatcccccatgacagcatcgatgaggtcatcaggctggacgaggagtggaggaaggcacagtacgacgtggaccagctccggcgcaggaggaacgaggccgccaggggaatagccgatgcgaagaagtcgggggacgaggacgctgccaaggcgataatggacgaggtctcgaccatagggtcgcagatagacgagctcacggcgcactccgaggagtgcctgacaaccagggactcgctcaggatgagcatccccaacatcctgcacgaggacgtgccagtgggggaggacgaccagaagaacaccctccacagcctgcatggcgagaaggcagagcttcccttcgagcccaggaaccacaacgagctcatcgagatgaacggctgggtcgaccaggcaaggggagccaaggtcgcgggtagccggttctacttcctgcagggcgacctcgctcgcatggagatggcgctccagcagtatggcgcggacttcctgatggagcggggctacaccctggtccagccccccctgatgatgaacagggaggcgtacgagggggtgaccgacctgagcgacttcgagaccgtgatgtacggcatagagccggacaagtactacctgatcgcgaccagcgagcacccgcttacggcgatgaggatggacgaggtcatcgagccctccgagctgccgatcaggatggtgggggtctcgccctgcttcaggagggaggtcggcgcgcacggcctctcggacaggggcatctggagggtccaccaattcaccaaggtcgagcagatagtcatctgcgaccccc

SEQ ID NO: 296874 - DNA, 790 bp, Unknown
  Bacterial polypeptide expressing nucleotide sequence isolated from the Sargasso Sea
tgaaggactgactgatgaagacaatcagcctatcaaacaggtaggggaaatacctgagtttgattttgagccaaaagaccatgtgaaattgatggagaatctcgatctgattgactttgatggtggagctaaagtttccggacaaaagttttattttctcaaaaaccaggcagtatttctagaactggctcttgcaaattatgctctgaatttgcttcaaaatgaaggatttaccgtacacattacaccagatcttgcaagaaataagattttggatgggattggatttagtccacggggagatgaaacacagatttattccgttgaagattctgaactttgccttattgcaacagcggaaattacccttgggggattgctttctgatcaagttttggatcctgaacgattgccgattatgtttgcaggattgtcacattgttatcgcacggaagcaggagctgctggcagggaatctcgaggattgttcagggttcaccaattttctaaagttgaaatgtttgcattcacccacccagataaatctgaaaaaatgcatcaaaaaatgctcgaaattgaagaaaaaatttatcaggaccttggaattccatatcaggttgttaatatatgtagcggtgatctgggaggacctgcttatcgcaagtatgaccttgaagcctggatgccgggacgagggaagtggggtgaagtaacctccacttcaaactgcactgattaccaatctagacgaatgaacatacgctttaaggattcagatacaggcaaaaac

SEQ ID NO: 296875 - DNA, 712 bp, Unknown
  Bacterial polypeptide expressing nucleotide sequence isolated from the Sargasso Sea
atgcatgacataaaatttattagagataattttgacattttcaaaaaaaaaatttctaaaagaaataatacaactaatatagaaaacttaataaacttagataaaacaaatagaaagctaattcaagagaaagagattttagaaaaacaaaaaaaagatatttcaaaatcaaaggatgaaaaattgtttgaaaaatcaaaagaaatttcttcaaaaataaaagaaatatctgaccaacaaattaaaataaaattagagttagaaagtattctttcatcaattcctaatattcctcattcagatgtgccagaaggagaagatgaaaattcaaacaaagttattgatactcaaggcgaaataatttctaaaaaatttaaggaactatctcactttgaattaggtgaaaaattggggatgttagattttgatttagcaacaaaaacaacaggatctagatttgtatttgttaatgataagttagctttattggaaagagcgatatcaaattttatgttagatgttcatacattggaaaataaataccaagaggtttcacctccattgatggcttctgaaaatactatgtatggcactggtcaattaccaaaatttgaaaacgatcaatttgaaataaaatttgaaaaaaacgaagatagaaaatttcttattcctactgcagaagttatcctcacaaaatattgtgaaaaataaa

SEQ ID NO: 296876 - DNA, 691 bp, Unknown
  Bacterial polypeptide expressing nucleotide sequence isolated from the Sargasso Sea
gaaaaattaaaaaatctagatgttaaaaatcgggaattaatacaaaaaaaagaaactcttgaaaaagaaaaaaaagaaatttctaaaataaaagataaatctttattcgaaaaatctaaaattatttcaaaaaaaattgaaactattataagtgagcagaggaatgtaaaaaatgaattaaataatatcctatcaaatttaccaaatattgctttagagaatgtccctataggaaaagacgagacgtttaatgaagttgtaagtactcatggtgaaattaaagaatttgactttaaaccaaaaacacactttgagttaggtgagaaactaaaaatgttagattttgatcttgctacaaaaacaacctcatctagatttgtatttgtaaaaagtgaacttgcttctttagaaagagccatttctaattatatgatagatttgcacacaaaaataaatggttatttagaaatttcacctccattgatagctaatgaaagcactatgtttggtacaggacaattacctaaatttgaaaatgatcaatttgagttactattagatgataaatcagatagaaaatttttaattccaactgctgaagtaattttgacaaacatggtaaaaaataaaatattaaatatcaaagatttacctataagattggtggcttcaacaccttgtttcagaaaag

SEQ ID NO: 296877 - DNA, 638 bp, Unknown
  Bacterial polypeptide expressing nucleotide sequence isolated from the Sargasso Sea
aatgcataacatcaaagatataagacaaaatccagaaaaattcaaaaaagatttgataaatagattagtagattttgatttaaaaaaaattctttctcttgatgaaaaaaatagaaagttaatccatgaaaaagaaaaattagaaaaagaaaaaaaagatatttctaaaataaaagatgctaaaatgtttgaaaaatcaaaaaaaatttctgaattaatttctaaatattcaaaagatcaagttaatattaaacttgaacttgatagtattttatcatcattgccaaatattgctcttgcagatgttcctgttggcaaagatgatacttttaataaggaaatttcaaaaaaaggtgaaatcagaaaatttaattttaaaccgaaatcacattttgaaattggagaaaaattaaatatgttagattttgatttagctacaaaaactacaggttctaggtttgtttttgtaaaagacaaacttgcacaattggaaagagctttgtcaaattttatgattgatactcatataaaagtaaattcttataaagaaatatctccaccattaatggcatcagaaaacaccatgtttggtactggacaattgcctaaatttgaaaatgatcaatttgaaattaaac

SEQ ID NO: 296878 - DNA, 681 bp, Unknown
  Bacterial polypeptide expressing nucleotide sequence isolated from the Sargasso Sea
aatgcatgatattgattttattagaaaaaatcctgttgaatttgataatttaataaatgtaagaggtgaaaagtccttatcttcaatcataattaaaattgatgaagaaaaaagaaacactcaaacaattttacaaaatattttatcggaaagaaatactatatctaaagaaattggtatattaaaatcaaaaaatcaagaatcttcaaatttaattaataaggttgaagaattaaaaaaacaaatatcaaatttaaaagaacttgaaaaaataaaagaagaggaattgaatgctattttaactagaatacctaatttagcctcaaaagatgttcctataggaaataacgaaaaagataatactgtatataaaacctggggcaaaaaacctgattttaattttacaccaaaaagacactttgaaattggcgaaaatttaaatcttatgaattttgaaactgccaccaaattatctggatcacgatttgttgtattaaagggcatgttatctaaactagaaagagctattactaattttatgcttgaaaaacatacaactgaaaatggatatactgaaatgaatgttccttttttagttcgtaatgaaactctatttggaacaggacaattaccaaaattttctgaagatttgtttactgctggtgaaaacttatggttaat

SEQ ID NO: 296879 - DNA, 157 bp, Unknown
  Bacterial polypeptide expressing nucleotide sequence isolated from the Sargasso Sea
aacaatttttgtaggaactttaaacggaagtggtttagctgtaggcagaactttaattgctattttagaaaattatcaacaaaaggatggatcaattgttgtgccgaaaattttaagatcatatatgaataatttggaattaatttcattgaaataa

SEQ ID NO: 296880 - DNA, 907 bp, Unknown
  Bacterial polypeptide expressing nucleotide sequence isolated from the Sargasso Sea
cgaggagtggaggaaggcccagtacgacgtagaccagctccgacgcaagaggaacgaggctgccagaggcatagccgatgcgaagaagtcgggagacgacgcagcggccaagtcgataatggacgaggtctcgaccatagggtcacagatagacgagctcacgaagcactcggaggagtgcctggccaccagggactcgctcaggatgagcataccaaacatactgcatgaggacgtgccggtgggggaggatgaccagaagaacacgctgcacagcctgcacggcgagaagacggagcttcccttcgagcccagaaaccacaacgagctcattgagatgaacggctgggtcgaccaggccaggggggccaaggtcgcaggcagccggttctacttcctgcagggcgacctcgcccgcatggagatggccctgcagcagtatggcgcggacttcctgatggagcggggctacaccctggtgcagccgccgctgatgatgaacagggaggcctacgagggcgtgaccgacctgagtgacttcgagaccgtgatgtacggtatagagccggacgagtactacctaatcgcgaccagcgagcaccctcttacggcgatgaggatggacgaggtcatcgagccgtcggagctgccgatcaagatggtcggggtgtcaccgtgcttcaggagggaggtcggcgctcacggcctctcggacaggggcatctggagggtgcaccagttcacgaaggtcgagcagatagtgatatgcgacccggaggactcctggggccaccacgaggacctgctcaccaacgcggtcgacatgtgggacagtctggggctgcactacagggtggtcaacatctgcaccggtgacatgggcacggtggctgcgaagaagtacgat

SEQ ID NO: 296881 - DNA, 751 bp, Unknown
  Bacterial polypeptide expressing nucleotide sequence isolated from the Sargasso Sea
catgcataacattaaagatattagagataatctcgataattttaaaaagttaatatctaagagaaacgttaaagtagagacaaataatatcagtgaattagataaacaaaataggactttaattcaaaataaagaattactagaaaaagaaaaaaaagatatttccaaaaaaaaagatcaaaatttatttgaaaaatcaaaagaaatatcaaaaaaaatagaaaaaattagctctgaccaatctcaagttaaatttaaattagatgaaattttatcttcgataccaaatatacctttagatgatgtgcctgagggaaaagatgaaaattcaaatttagaaattgaaaagtcaggagaaattaagaatttcgattttaaaccaaagtcacatattgatcttggagataatctaaaaatgcttgattttgatctagcatccaaaacttctggttctagatttgtttttgttacaaaaaaactggccatgttagagagggccttatcaaactttatgatagatacacatgtaaataaaaataattacttggagatatcgccacccttgattgctaatgaaaatactatgtatggcactggtcaattgccaaaatttgaaaatgaccagtttgaactagtgttagaagataaaaatgatcgtaaatttcttatacctacagcagaagttattttaacaaatatggttaaggatcaaattttagatataaaaaatttaccgcttcgatttgttgct

SEQ ID NO: 296882 - DNA, 925 bp, Unknown
  Bacterial polypeptide expressing nucleotide sequence isolated from the Sargasso Sea
ttaaaaaaaagaaatcttccaccatgtagttctgaaatagttacgattcataatgagtatttagagcatctaaacttaaaacaaaaattattagaggaaaaaaactcattatcgaaattgtttgtaaataaaaagttaaaagaagaggaaataaaaacgtcagtttatgaattaaaaacaaaaattgataagttaagtaatttagctgaatcaaaattaaaagagttaaataaattaatattgcttctacctaatattctgtcaaaaaatgttcctgatggtgagtctgaaaaagataacaaaattataaaaacatgcggtataattaaaaattttaactttaaaccaaaaaatcatttggagttagctgaaaatctcaatctattagattataaaaaagctataaagatttcgggaagtagattttcaatcataaaaaatgatttggctaagcttcatagagggttaattaattttttacttgataacaattcattagaatttggttttgaggaatatattgttccagaactcgttaaaggtgaagctcttgaaggaacaggccaacttcctaaatttgaagaagatttatttaaaacaaattttaacgatctatatctaattccaacttcagaagttccccttacaaatctcaacagagattcaattattaataaaaaagatataccattaaaatatacaacatatacaaattgctttagagcagaagcaggtgcatcagggatagacactaagggattaatgagagagcaccagtttggtaaggttgaactagtaacaatttctgaacctgatcaatcagatgcggaattgaataacatgataagctgtgttgaaaatatattaaaaaaattatctataccttacagaattgtcgagctttgttctggtgatattggcttct

SEQ ID NO: 296883 - DNA, 522 bp, Unknown
  Bacterial polypeptide expressing nucleotide sequence isolated from the Sargasso Sea
gatgcataatttaaaagaatttaggaaaaatttagataaattagtccaaaaatttaaggataggaatgttaattttgacataaatgattttaaaaaaaaagatgctttaaatagagatttaattagtaaaaaagaaaaacttgaacaagaaaaaaaatccttatctaaatcaaaagacaagtcaaattttgagaaatctaaaaagatttctcaagaaatatctaatatagaaaaaaaacaaactattagtcaaggtgaagtagataagattattttttctcttcctaatttacctagtgatgatgttccggttggaagcgacgagaaatctaataaattaataaaaaaaaatggcgatatcaaaaatttttcatttaaagctaaatctcatgttgaattaggagcaaaagatcaaaacattgattttgatacttcaatcaaattatctggatcaagatttgtagtattaaaagataaatatgcaacactcgagagagctttaataaattttatgctagatac

SEQ ID NO: 296884 - DNA, 784 bp, Unknown
  Bacterial polypeptide expressing nucleotide sequence isolated from the Sargasso Sea
tttatttcctcaaaatcaggcagtatttttggagctagctcttgcaaattatgctctttatttgctgcaaatggaaggtttcaccgtacacatgacacccgatcttgcaagacatcaaattttggatgggattggattcaatccacggggagaggagacacagatatattcaattgaagattttgaccttagccttattgctacagctgaaattaccctcggtggattgctagttaatcaagttttggaaccggatagtttgcctattatgtatgcgggtttttcccattgttatcgcacggaagcaggagctgcaggcagagaatctcgaggattattcagggtacatcaattttctaaagtagagatgtttgccttcacccatccagataattctgaagaaatgcatcaaaaaatgctcgccattgaggaacagatttatcaagaactcaggattccataccaggttgttaatatctgcagtggtgatttgggaggtcctgcttatcgtaagtatgacatagaagcttggatgcccggacgtgggaagtggggtgaagtgacgtctacctcaaactgtactgattaccagtctaggcgtatgaacatacgtttcaaggatccaaagactagcaaaaacagatttgttcacatgctaaacggaactgcggtcgcagtttcaagaactttaattgctctaatagaaaacggccagcaggaagatggatcaatcaaacttccaccctgtttaaatcttccagacattcctgcaccaaaaaaatga

SEQ ID NO: 296885 - DNA, 112 bp, Unknown
  Bacterial polypeptide expressing nucleotide sequence isolated from the Sargasso Sea
agaactcttatagcaatattagaaaactatcaaaattcagacggatcaataacaatacctgatgctttaaaaccttacatgaataatctagaaaaaatttcaaataattaga

SEQ ID NO: 296886 - DNA, 181 bp, Unknown
  Bacterial polypeptide expressing nucleotide sequence isolated from the Sargasso Sea
aactctcgttataaagaaggcaaagaaagtaaatttttgcatacattaaatggatctgggctggccgtaggacgaactttaatatcaattttagagaactatcaaaatgaagatgggactattcaggtgccagacgctcttattccatacatgggtggaataaatcaaatttcaaattaat

SEQ ID NO: 296887 - DNA, 321 bp, Unknown
  Bacterial polypeptide expressing nucleotide sequence isolated from the Sargasso Sea
acttaaatttaatggattttgatgtagcagctagaacttcaggagcaagatttgtgtttttgaaaggtaatttagcaaaacttgaaagagcgatatctgattttatgcttgatacacatacaaaaaaatttaactatcttgaaatttcaccaccgttaatagcttcttccgatgctatgtttgggacaggtcaattgcctaaatttgaaaatgatcaatttgaaattaaatttgatgaagaaaaaaatagaaaatttttaattccaacagctgaagtaatcttaactaacatgataatgggaaaaacaattaccatatgag

SEQ ID NO: 296888 - DNA, 733 bp, Unknown
  Bacterial polypeptide expressing nucleotide sequence isolated from the Sargasso Sea
atgcataatattaaggatattagaaaagatatcgataattttaaaaatacaattaaaaatcgaaacgttgatgtagactttgatcaaatattaaatctcgatgaagaaaatagaaaattaattcaagaaaaagaaaaattagaaatggaaaaaaaatctatttctaaatctaaagatgaaaccctttttgaaaaatctaaagaaatttcaaataaaatagatgatttaagtaaaaatcaaaaaagtgttaaagaccaacttgatcagatattaagtaatattcctaatttaccattgaatgatgtccccgtaggtaaggatgaaaatagcaataaagaggttgtaaaatctggtgaaattaaagaaatgagttttaaaccaaaatctcattatgaaattggtgaaaaactgaatatgttagattttgatttagcaacaaaaacaactggatcaagatttgtttttgttaaagacaaattagcatcattagaaagagcaatttcaaattttatgattgatacacatgttaataataatggctacactgaaatttctccacctttaatggctacagacaacactatgtttgggactggccaattgcccaaatttgaaaatgatcaattcgaaattaagtttgatgataaaaatgatagaaagtttttaattcctactgcagaagtgatcttaactaatatggttaaaaatcagatattgaacataaaatcattgc

SEQ ID NO: 296889 - DNA, 328 bp, Unknown
  Bacterial polypeptide expressing nucleotide sequence isolated from the Sargasso Sea
acttgattacagagtcattgaattatgctctggagatctaagctttgctgctgctaaatgttttgatcttgaagtatggtctccaggagaagaaaagtggcttgaagtttcttcatgtagcaattttgaagattttcaatctagaagaggtaacataagatttaagaattcagatggtgacattgattttgttcatacattgaatggttcagggttagccacaccaagaatttttgttgcactgcttgaaacacatcaaaataaagatggaagcattagaattcctcagtgtctacagccatatatgggaatttcggagataaaataa

SEQ ID NO: 296890 - DNA, 1489 bp, Unknown
  Bacterial polypeptide expressing nucleotide sequence isolated from the Sargasso Sea
gatgaaacccttctccctgccccgccgccctgcgctcacgctgtgcgcggccgcgtgcctgctcgccggctgcacggtcggccccgactaccgcggcgcgcccgccgcaccggatgcgccgaccttcgtgcgcgcgcctgcctccggcgtcgaccccgctgcgcccgcgccgagcgcatggtggcatgcgctcaacgatcgccagctcgacgacctgatcaccgccgcgctcgcgtacaaccccgatctgcacgcggcgcaggcccgcttgcgcgcctcgcgcgcgcagctctcgcaacaacgtgcggcccagttgccgaagtcgtcggccaccgtcgccgccatccgcatgcgcgagccggacgtcagcgcgctcggttcgctgctgccgtcgaacggttcgagccaatcgagcggcacctcgccgtcgctgggtggctcgggcccgctacagctgtattcggcaggcttcgacgcaacctgggaaatcgacctgttcggcggcacgcgccgcgcggtcgaagcagcatccgcgcaggcggaagcggtcgatgccgatctcgccgacacgcaggtgtcgatcgcggccgaagtcgcgaatgcatacgtcgacctgcgcgaccagcagcagcggcttgcgctgtcgcggcgcaccgccgagttgcagcaacggatgctcgaactcacgcagcagcgccgtgcgcgcggcgtcgcggccgacgtggatctcgagcgcctgaccacacaggtcgaaaccacgcgcgcgtcgctgatcccgcttgacgctcaagtcacggagtcgctcgaccggctcgcgatcctgacgggccgcgcgcccggtgcactcgacgcagcactgtcgacaccggacgcgccgctgccgacactgcccggcagcgtcgcgatcggcgatccggccacgctgctgaagcagcgccccgacattcgcgcggccgaacgccggcttgcatcgagcaacgcgcaaatcggcgagcacgtcgccgattatttcccgaaggtgacgctgctcggcgatctcggcttcagcgcgaccgaccccggccacctgttccgcaagcagaatttcacgtgggtcggtgcaccgtatctgcaatggaacattctcgacttcgggcgcacgcgcggagcggtgcgcgcggccgaagcgtcgcgcgacgaagcggaagcgaattatcagaaggcggtgctcggcgccctgcaggatgccaacacggcgttacagcgttacgggcaccagcgcgaacacgtcgttgcgctcaccaaggtgcagacgtcggccgtgcattcccgggcgctgatggacgagcgctatcgcgcgggcgtcgcatcgatgatcgacctgctcgatacgcagcgcgaagcgctgtccgcgcaacagaacgtgatcgccgggcaggccgagctgatcaaggactacgtgtcgctgcagaagaacctggggctcgggtggcaagcgggcgcgggttga

SEQ ID NO: 296891 - DNA, 730 bp, Unknown
  Bacterial polypeptide expressing nucleotide sequence isolated from the Sargasso Sea
atgcacaatattaaagatatcagaaatgacttcgaagactttaaggaaaaacttaaaaatcgaaatattgatataagtcttgataatataataagtttagatgaggaaaatagaaaacttattcaagaaaaagaaaaatttgaaatggaaaaaaaagctatttcaaaatccaaagaccaaagtttatttgaaaaatcaaaagagctctctttaaaaattgaagaaattaacaaaaatcaaataaaattacagagccagattactgatattttatcttctataccaaatatacctctaggcgatgtcccagtaggacaagatgaaaattctaataaagaaattgaaaaaaaaggtgaaataaaagaatttaattttaagcctaaatctcattatgaactaggagataaattaaatatgcttgattttgacttagcaacgaaaactactggttctagatttgtatttgttaaaaaagagttagctcaattagaaagagcaatatcaaattttatgattgatacacatactcaaaaaaatggttatacagaaatatcgcctccattaattgcaaccgctgaaacaatgtttggcactggacagttaccaaaatttgaaaatgaccagtttgaaattaaattagacgaaggtgatggaagaaagtttttaataccaaccgctgaagtaattttgacaaatattgtaaaaaaatcaaattttagaaaaaaatgaa

SEQ ID NO: 296892 - DNA, 923 bp, Unknown
  Bacterial polypeptide expressing nucleotide sequence isolated from the Sargasso Sea
aatgttagattcacaaatattaaagaacaacattgaagaatttaatgaaaatctaaaaaaaagagacattgatgtcgacactaatcttttaatagaacttgatgaaaagaggagaaaagcaaaatttgaagctgagcaagtaagagctgagcaaaataaattaggtaaagagattgcaaaagctgaaaataaagaaaaagaaaatctcttgaaaaaagctgcagacttaagtgaaagttttaagaatttatcagaaaaggcagaaaaacaagagaaactatttttggattcatggataaaaattccaaatattgtcgacccttcttctccagttggtaaaacagatcaagacaacaatgaaattaaaaaagttggagaaataaaagagcataaaaatgttaaagatcatttagaaattggagagtctttaggtttaataaatgtagagaaagcatctgaagtctcaggatcacgcttttcctatatttttggtgatttggtaaagattgaatttaatttagtttcttatgtacttgaaaagctttcaagtaatggatttcttccaacagttccacctgttttagttagagaaaatgcattatttggtacaggatttttccccgatgacgcggagcaagtttatgagatcccaaatgatgacttgtatttagttggtacatctgaagtttctttagcagcgttacatggagaagaaatacttgaacataaatcgctacctataagatatgctggattctcaacatgttttcgaagagaagctggaacatatggaaaagatacgaccggaatatttagagtgcatcagtttgataaagttgaaatgttttctttttgtgattctgaaaattcaaaagaagaacacgagtatcttttgtcattagaggaagagatactcaagaata

SEQ ID NO: 296893 - DNA, 750 bp, Unknown
  Bacterial polypeptide expressing nucleotide sequence isolated from the Sargasso Sea
aatgcacaatattaaagaaataagaaaaaatttcgataattttaaaaaacttttaaaatcaagaaatgtagaaataaatttggatgaaataattacattagataaagaaaatagagatttaatacaagaaaaagaaaatcttgaaatggaaaaaaaaaaaatatctaaatctaaggatgagtctttattttctaagtctaaagagatttcaaaaaaaattgatgaactaaataaaaaacaatctttaataaacaataatttaaataatattctctcatctttgccaaatattcctttgtctgatgttccaattggaaatgatgagagtagtaacaaagaaatattaaaagtaggaaatattaaaaacttcaattttaaagctaaatctcattatgaaataggtgagaaattaaatatgttagattttgatttagctacaaaaactaccggttcaagatttgtttttgtaaaagataaacttgcaacattagaaagagcaatatcaaattttatggttgatactcacactaaaataaatgattatacagaaatatcacccccattattggctaccgatgatagcatgtttggcacaggacaattaccaaaatttgaaaatgatcaatttgaaataaagatagatgaaaaaagtgatagaaaatttcttatacctacagcagaagtaatattaactaacatggtaaaaaatcaaattattgatttaaattctttacctatgagattggtgcc

SEQ ID NO: 296894 - DNA, 1252 bp, Unknown
  Bacterial polypeptide expressing nucleotide sequence isolated from the Sargasso Sea
aatgttagattcacaaatattaaagaataacattgaagaatttaatgaaaatctaaagaaaagagacattgatgtcgacactagtcttttaatagaacttgacgaaaataggagaaaagcaaaatttgaagctgagcaaataagagctgagcaaaataaactaggcaaagagattgcaaaagctgaaaatgaagaaaaagaaaatctcttgaaaaaagccgcagaccttagtgaaaactttaagagtttatccgaaaaggcagaaaaacaagaacaactatttttagatttatggataaaaattccaaatattgtcgacccttcttctccagttggtaaaacagatcaagataacaaagaaattaaaaaagtcggagaaataaaagagtacaaaagtgttaaagatcatttggagataggggaatctctaggtttaataaatgtagagaaagcatctgaagtctcaggttcacggttttcctatatttttggtgatttggtaaagattgaatttaatttagtttcttatgtacttgataaactttcaaataatggatttcttccgacagttccacctgttttagttagagaaaatgctttatttgggacaggatttttccctgatgacgcagagcaagtttatgaaataccaaatgatgacctttacctagttggtacatctgaagtttctttagcagcgttacatggagaagaaatacttgaatataaatctctacctataagatatgctggattctcaacatgttttcgaagagaagcaggaacatatggaaaagatacgacgggaatatttagagtacatcagtttgataaagttgaaatgttttctttttgtgattctggcaactcgaaagaagaacacgagtatcttttatcactagaggaagagatacttcaagatttagaaataccatatagagttgttgacgtatgttcaggggacttgggtgcttccgcttctaaaaaatttgatatagaagcatggataccaagtcaaaataactatagagaagttacgtcatgttcaaatacaactgattatcaggcaagaagattaaatattagaacaaaaaaagaaaaagaaacggcattaattcatacgttgaacggaacagcgttggctgttggaagaatattaatagctctaattgaaaataatcaacaagaagatggatctgttaaattttctgacagcttatctaaaataattggagttgaaagtttaagctaa

SEQ ID NO: 296895 - DNA, 165 bp, Unknown
  Bacterial polypeptide expressing nucleotide sequence isolated from the Sargasso Sea
ataacgaaaatgaatttgttggtactttaaatgggagtggacttgccgttggtagatctttaattgcgatattagaaaattatcaaactgaggatggttcaataattattcctgaaaaactaagaccatatatgaacaatattgagaaaataggtatcaattaag

SEQ ID NO: 296896 - DNA, 259 bp, Unknown
  Bacterial polypeptide expressing nucleotide sequence isolated from the Sargasso Sea
agaggtatggctaccctcagaggaaagatatagagagatttcatcatgttcaaattttaaagatttccaaacgagaagagccaatattaagataaaatcaaacaataaggtcgagtttgctaatacacttaatggatcagggctagctataggtagaacattagttgcaataattgaaaatttccaacaaaaagatggaagtatcaagattccaaataaacttcaaccttatcttgataacaaaacacatatcaaataa

SEQ ID NO: 296897 - DNA, 757 bp, Unknown
  Bacterial polypeptide expressing nucleotide sequence isolated from the Sargasso Sea
aatgcataacattaaagatataagaaataatattgaaagtttcaaatcatcattaaaaaatagaaaaacaaatataaactttaatgaattattagatcttgaccaaaaaaacagaaaaattattcaagaaaaagagtctttagaacaaaaaaaaaaggaaatatctaaaaaacaagataaatctttatacgaaaaatctaaagaaattactaaaaaaatttctgaattaagcgatgatcaagttgtagttaaagaaaaattaaatagtattttgtcatctattccaaatgtagcaatcaatgatgtacctgaaggagctgacgaaagttccaatagtgtgattgaaaaaaaaggatctatcaaaaatttcgattttaatcctaaatcacattatgagttaggtgaaaatcttaacatgcttgattttgaattagctacaaaaaccactggatcaagatttgtatttgttaaaaaagaacttgctttacttgagagagcaatttcaaattttatgttagatacacatacaaaaattaatggttatagtgaaatttcaccaccacttatggcaacagataatagtatgtttggtacaggtcaacttcctaaatttgaaaatgatcaatttgaaataaaattagactcaagctcagataaaaaatatcttatcccaacagctgaagttatcttaacaaatatggtcagagaaaaaattttaaataaaaatgatcttccactaagatttgttgcatctact

SEQ ID NO: 296898 - DNA, 184 bp, Unknown
  Bacterial polypeptide expressing nucleotide sequence isolated from the Sargasso Sea
gatgaactctcgttacaaagaaggtaaagaaactaaatttttacatacattaaatggatcaggtttagccgtgggacgaaccttaatatctattcttgaaaattatcaaaatgaagatggtactattcaggttccagatgctcttattccatacatgggtggaataaatcaaatttcaaattaa

SEQ ID NO: 296899 - DNA, 424 bp, Unknown
  Bacterial polypeptide expressing nucleotide sequence isolated from the Sargasso Sea
gatggttagtattgtagaaaaagaaaattgcctagaagaattagagcgaatgacaaactgtgcaacagatatactggataagttagaattaccttatagaaaagtaattttgtgttcaggtgatatgggtttcagtgctgaaaaaacctatgatattgaagtgtggttaccatcagaaaacaagtatcgcgaaatatcatcatgctcttcttgctcaacatttcaggcacaaagaatgaaatcaagatataaaaataaaaacaaggaaactgtttttgttggaacattaaatggaagcggtttagctgtgggtagaactttaattgctgtactagaaaaccaccaacaaaaagatggttcgattattgttcctaaggtactgcgaccgtatatgaataatttggaattgatttcagttaaataa

SEQ ID NO: 296900 - DNA, 745 bp, Unknown
  Bacterial polypeptide expressing nucleotide sequence isolated from the Sargasso Sea
tttgattttaatcctaaacttcatttggaaatcggtgaaattactaattcaatgaattttgaaactgcaacaaaattatcaggctcaagatttgttattttaaaaggtcaactctctaaattagagagagctattgcaaactttatgattgataaacatacttcaataaatggatatattgagatgcatgttccttatttggttaaagaagacacattatatggtactggacaattaccaaagttttcagatgatttatttactgcaggtgatgatcattggttaattcctacagctgaaataccacttacagcacttcatagtaatgaaatattaaatgttgatcaattacctatgcgagttacttcttatacaccttgttttagatctgaggctggagctgctggaaaagatactaggggtatgctgagacagcatcaatttactaaagttgaacttgtttcattagtagagcctcaacaatcaaaagatgaattagagagaatgctcaattgtgctgaaggaattcttcaagatttagatcttcattacagagtaatgacattatgtactggagatatgggttttaatgctaataaaacctacgatatagaggtatggctccctggtgaagataagtatagagaaatttcaagttgttcaaattgtggagattttcaagcaagaagaatgaacactcgatataaacaaaaaatgatacaaatacttatatacatactttaaa

SEQ ID NO: 296901 - DNA, 981 bp, Unknown
  Bacterial polypeptide expressing nucleotide sequence isolated from the Sargasso Sea
ttttattaaacttaacaaagaagttcaaaaaattaaggaatcaatttcaaaaaatgatgtgacaagggctgaaattgaattagagcttaatggtattttatcttcattaccaaatattccatcaaaagatttacctatcggtaatgatgatagctctaatttagaaataaaaaaagaaggagaggtagctaaaaataaaacgccacatcattatgaaataggcgaagaaatgaatgcacttgattttgaaacagctgcagaactatcaggctcaagatttgttatttcatctggaagtattgctagacttgaaagagctctagcaaactttatgattgatgttcacataaatgaacatggttataaagaaataaacatcccatatcttgtaaaagaagactctatgtatggcactggccagctaccaaaatttagtgatgatcagtacaaaactgataatgacttgtggctgattccaactgctgaagttcctctcactaatcttgtaagaaaaaaaattcttgatgaagaagatttaccgcttaggttcacagcattttcacaatgttttagaaaagaggcaggagcagcaggtagagatactagaggtatgattagacttcaccaatttccaaaagttgagttagttagtgttacaaaaccagatgagtcagaagatgaattggaaagaatgctctcttgtgcagaaaaaattcttcaattactcgagttaccttacagggttgttttgctttctacaggcgatataggtttttcagctcataaaacatatgatttggaagtttggtttccatctgaagaaaaatatagagaaatttcgtcatgttctaattgtttggattttcaggctagaagaatgaattcaaagtttaaaagtaaaaatgataataaaaatatctttttacacactttaaatggttctggcgttgcagttggaagagctctagctgctattttaga

SEQ ID NO: 296902 - DNA, 514 bp, Unknown
  Bacterial polypeptide expressing nucleotide sequence isolated from the Sargasso Sea
ccgacagttcctccagttttggttagagaaaatgcgctatatggtaccggattttttccagatgacgcagaacaggtttatgaaattccaaatgatgatttatatttagtaggaacttctgaagttcctctcgctgcactacatacaaatgaaattataaatatggaagaattgcctgtaaggtacgcagggttttcaacatgttttagacgagaggccggtacctatggaaaagacacaacaggaatatttagagttcatcaatttgataaagttgagatgttttcattctgcagtcccgaaaaatctgaagaggaacatgaatttattctctcagtagaagaagaactcttacagtctttggagattccatatagagttgtagatgtttgctcaggagatttaggtgcttctgccgctaaaaagtacgatattgaagcatggataccaagtcaaaatacatacagagaggttacttcgtgctctaacacaacaagctttcaagcaagaaggc

SEQ ID NO: 296903 - DNA, 878 bp, Unknown
  Bacterial polypeptide expressing nucleotide sequence isolated from the Sargasso Sea
aaacatggtagagattattagtactaatactcttgatcatctagaaataactaaaaaaatagatactgaactagctgctaaattatctggatcgagatttgcagtcttagaaggagatttagccaagcttcaacgctcattaataacttttatgctcgattgcgccattcaaaatggatacaaggaatattatgttccatttatggcaaatgaagagtctttaacagggacaggacaattaccaaaatttgaagaagatttatttaaaacctcagataaactataccttattcctactgctgaagttcctctgactaatctattcagaaatgaatttctaaatgaaaaagattttccaatcaaagtaacatctcatactccatgttttagatctgaggctgggagttatggcaaggatacaaggggccttataagacaacatcaatttgaaaaaattgaacttgtgcaaattacccacccaaacgattctatggattgtttagaaaatttgcttaataacgcttgcgaaattcttaataaattagaacttccttatcaaattgttgaattatgtactggcgatttgggcttttcatctgctaaaacatttgatattgaggtttggatgcctagtcaaaataaatatagagaaatttcatcatgctcaaacttcacagatttccaggccaggcgctctaatataaaatttaaatctaaagagggaaatagttttgcacatacaattaatggatctggacttgcagtcggcagatgcctaattgcacttattgaaaataattttgacggtaaagatactattaatattccaaattgtcttgagcaatattttgggtcaaacgaaattaaaataagttgaa

SEQ ID NO: 296904 - DNA, 523 bp, Unknown
  Bacterial polypeptide expressing nucleotide sequence isolated from the Sargasso Sea
gagcttcctaagagatttgttgctgcaactccatgtttcagaaaagaagcaggaagttatggcaaagatacaaaaggaatgatgaggcaacatcaattttataaggttgaacttgtaagtattgtagaagctgaaaattgtcttacagaattagacagaatgttaaattgcgctgaagaaatattaaaaagattagaaattccatatcaagtagttcttctatcatctggagacatgggttttagtgctgaaaaaacttttgacttagaggcatggattccatctgaaaaaaaatatagagaaatttcaagttgttcatcctgtgggtcttttcaagctagaagaatgggcgctaaatataaaacatcagatggaaataagtatgttggaactttaaatggctctggtctagcagtaggaagattaatgatagctttattagaaaattatcaaaatgcagacggatcgattagcattccaactattttaaaaaaatatatgaataatttggataaaatctgat

SEQ ID NO: 296905 - DNA, 217 bp, Unknown
  Bacterial polypeptide expressing nucleotide sequence isolated from the Sargasso Sea
ttgctcgaactgcacagacttccaagctagacgaactagcttaaggtacaagccagatgctaaagcgagaccgcaatttgttcatacattaaatggttcaggtctagctatacctagaatattaattgcaattttagaaaattatcaacaagaagacggaaccatactaattccggaagtactaagaccgtacactggcttcgacactatatcttaa

SEQ ID NO: 296906 - DNA, 325 bp, Unknown
  Bacterial polypeptide expressing nucleotide sequence isolated from the Sargasso Sea
gttgttttgctttctacaggcgatataggtttttcagctcataaaacatatgatttggaagtttggtttccatctgaagaaaaatatagagaaatttcatcatgttctaattgtttggattttcaggctagaagaatgaactcaaagtttaaaagtaaaaatgataataaaaatatctttttacacactttaaatggttctggcgttgcagttggaagagctctagctgctattttagaaaattactatgatgaaaaagggcatataaatattccaaaggctcttcaaccctatatgaatgatgaaacaacaattaaaatataag

SEQ ID NO: 296907 - DNA, 822 bp, Unknown
  Bacterial polypeptide expressing nucleotide sequence isolated from the Sargasso Sea
gatgcataatcttaaggaaattcgtaaagacttcgatactttcaaaaaagcgttaaaaaaaagaaatatagatattgatttcagtaaattagaaaaattagatcatcaaaatagagaacttattcaaaaaaaagaaaatttagaaaaagaaaaaaaagatatatcaaaatcaaaagataaatcattgtttaaaaaatctaaaaaaatttctattgagattgaaaaattatctgaagaacaaaaaactattaaatcagaattagataagattctattcaacatcccaaatataccacaccctgatgttccgatcggaatagatgaaaataacaatatagaagtatctaaagctggaaaaatacctacctttgattttaaacctaaaactcattacgaattaggagaaaatttgaaaatgttagactttgatttagctacaaaaacatctggttcaagatttgtatttgttaaagataaattagctttactcgaaagagccttatctaatttcatgttggacactcatattttaaaaaatagttataaagaaatttcaccaccattattagcatctgctgatacaatgtttggaactggtcaactacctaaatttgaaaatgatcaatttgaaataaaacttgaagaaggatcggatagaaagtttttaattccaacagcagaagtaattttaactaatattgtaaaggataaaataattgacaaaaaagatttaccaatgaggtttgtagcatcaacaccatgttttagaaaagaagccggtagttatggaaaagatacaaaaggtagattagacaacatcaa

SEQ ID NO: 296908 - DNA, 1114 bp, Unknown
  Bacterial polypeptide expressing nucleotide sequence isolated from the Sargasso Sea
cagaaaaaaatgcacaatattaaagatatcagaaatgacttcgaaaactttaaggaaaaacttaaaaatcgaaacattgatataagccttgataacataataagtttagatgaggaaaacagaaagcttattcaagaaaaagaaaaatctgaaatggaaaaaaagactatttcaaaatccaaagaccaaagtttatttgaaaaatcaaaagaactctcattaaaaattgaggaaattaacaaaaatcaaataaaattacaaaggcagattactgatattttatcttctataccgaatatcccattaagtgatgtcccaataggacaagatgaaaattctaataaagaaattgaaaaaaagggtgaaataaaagattttaattttaaacctaaatctcattatgaattaggagataaattaaatatgcttgattttgacctagcaacaaaaacaactggttctagatttgtatttgttaaaaaagaattagctcaattagaaagagcaatatcaaattttatgattgatacacatactcaaaaaaatggttatacagaaatatcgcctccattaattgcaactgctgaaacaatgtttggcactggacaattaccaaaatttgaaaatgatcagtttgaaatcaaacttgatgaaggtgaagaaagaaagtttttaataccaacagctgaagtaattttgacaaatattgtaaaaaatcgaattttggataagaaagaattacctataagagtagttgcggcaacaccatgttttagaaaagaggcgggtagttatggtaaagataccaaaggtatgattagacagcaccagttttataaagtggaacttgtaagtattgtagaaaacgataaatgtttagaggagttagaaaggatgtctaactctgctacaatgatattggatgcgttaaaacttccttatagaaaaattgttttatgtactggtgatatgggttttagtgcagaaaaaacttatgacattgaagtttggcttccatctgaaaataagtatagagagatttctagctgttcatcttgtggttcattccaagcaaggagaatgaaagctagatacaaaggacaaaacaattcaa

SEQ ID NO: 296909 - DNA, 676 bp, Unknown
  Bacterial polypeptide expressing nucleotide sequence isolated from the Sargasso Sea
tatggcaaatgaagagtctctaacaggaacaggacaattaccaaaatttgaagaagacttatttaaaacctcagataaactataccttattcctactgctgaagttcctctgaccaatctattcagaaatgaatttcttaatgaaaaggatttaccaattaaagtaacatctcatactccatgttttagatctgaggctggaagttatggcaaggatacaaggggtctcataagacaacatcaatttgaaaaaattgaacttgtgcaaattacccacccaaatgattctatggattgtttagaaaatttgcttaataatgcatgcgaaattcttaataaattagaactgccataccaaatagttgaattatgtactggtgatctgggtttttcatctgcaaaaacatttgatatcgaggtctggatgcctagtcaaaaaaaatatagagaaatttcatcatgctcaaacttcacagatttccaggccaggcgctctaatataaaatttaaatccaaagagggaaatatttttgcacatactattaatggatctggacttgcagtaggtagatgcctaattgcacttattgaaaataattttgacggtaaagatactattaatattccaaattgtcttgagcaatattttgggtcaaacaagataaaaataagatga

SEQ ID NO: 296910 - DNA, 956 bp, Unknown
  Bacterial polypeptide expressing nucleotide sequence isolated from the Sargasso Sea
agatcctgaaaaggtaaaaaatattctaacaattaaaaactataatttagattctgtcttatttactgaaattgattccaataggaagagtttacagactgaagtagaggatctaaaaagtttaaagaacaatctatcaaaagactttggagaacttaaaaaaaataatcaagatacatctaaattatccaagcaattagataaaattaaaaaaaacctctcagaaaaggaggagttatttaataaaacactttctcgactaaatgatttcttattagatattccaaatattcctcatcaggatgtagaaccaggaaatagtgaagaagacaataaagtaattaaaacatttggtgaagtacaaaaaaaagattcaattgatcatcttgaaattacatcagatattgatactgaatctgctgttaagcttgccggcactagatttgcagttttaaatgatgatatagctaagcttcatagagcacttatttcattcatgcttgatgttgccgaaaaaaatggttatgaagagagatatgttcctttcatggcaaattcacaaagccttactggtacaggccagctaccaaaatttgaagaagatcttttcaaaataacagaagatttatttttaattcctactgcagaagtcccattaaccaatctttatgctgattcgatattagagcagggcagtctcccaattaaggtaacatcacatactccctgcttcagatcagaagcagggagttatggaaaagatacaaaaggtctcataaggcaacatcagttcgaaaaagtagaaatagttcagattgttcatcctgataagtcagattctgctcttgagggtttattgaataatgctgaggaaattctccagctgttaggattgccatatcaagttgttcaattatgtggaggcgatttaggattttcgtcagcaaaaacctatg

SEQ ID NO: 296911 - DNA, 439 bp, Unknown
  Bacterial polypeptide expressing nucleotide sequence isolated from the Sargasso Sea
gcagcatcaatttactaaagttgaattagtatcaattgtagaaccccagcattcagaaaaagaattagagcgaatgctagaatgtgctgaaagtattcttaaggatttaaacttacattatagagtaatgactctgtgtaccggagatatgggtttttcagctaacaaaacatatgatattgaagtttggttacctggtgaaaatgcatatagagaaatatcaagctgctctaactgtgactcatttcaggcaaggagaatgaatacaagatacaaacatgataataaaaatatttttgtacatactttaaatgggtcaggtttagctgtaggcaggacattaatagcaattctcgaaaactatcaaacagaagataataatattgaaatacctcaagttctaagaaagtatttgaataataaaaaaacacttttgtag

SEQ ID NO: 296912 - DNA, 829 bp, Unknown
  Bacterial polypeptide expressing nucleotide sequence isolated from the Sargasso Sea
atgcataatttaaaagaaataagaaaagatttttcaaaatttgaaaaagatcttgaaaaacgttcagttaaaattgattttaataatttaaaaaaacttgatgaattaaatagagatttaatacaaaagaaagaaaatttagaaaaagaaaaaaaagatatttctaaatctaaagatgaaagtttattcaaaaaatctaaagaaatatctacagaattagaaaagattactgagcaacaaaaaaatactaaaaatgaattagataatattttatcaagtataccgaatatacctcatcaagatgttccaactgggaaagatgaaaacgataatgtagaagttttaaaagctggaaaagttcctgaatttgaatttaaacccaaatcacattacgaacttggtgaaaatttaggtatgcttgattttgatcttgcaacaaaaacaactgggtcgaggtttgtatttgttaaaaaagagttagcattattggaacgagctttatctaactttatgctagatactcatattgctcagaatgattatcaggaaatttctcctccattgattgcttctgataatacaatgtatggaactggccaattaccaaaatttgaaaacgatcaatttgaaataaaatttgatggaggatctgatagaaaatttttaattccaactgctgaagtaattttaacaaacattgttaaagataaaattgttgaccaaaaagatttacccatgagatttgttgcttcaactccatgttttagaaaagaagctggcagttatggcaaagatacaaaaggaatgattaggcaacatcaattttata

SEQ ID NO: 296913 - DNA, 587 bp, Unknown
  Bacterial polypeptide expressing nucleotide sequence isolated from the Sargasso Sea
ggccgaagttattttaacaaatatggccaaagataaaatatttcaattaaatgaattaccattaagattagttgcttctactccttgctttagaaaagaagctggaagttatgggaaagataccaaaggtatgattaggcagcatcaattttacaaggttgaacttgtaagtattgttgagcaagaaaattgcttatcagaacttgatagaatgacaaactgtgctactaaaattttagacttgcttaaactgccatatcgaaaaattattttatcttctggagatatgggttttagcgctgaaaaaacttttgatattgaagtttggttaccatctgaaaataagtatagagaaatttcaagctgttcatcttgtggatcttttcaagcaagaagaatgaaagctagatataaaaataaaataaatgaaaccgtttttgtaggaactttaaatggaagtggtttagcagttggtagaactttaattgctattttagaaaattatcaagagtctgatggttcaataaaaattccgagcgctttaaaaccttatatgaataatcttgataaaatagctaagaaataga

SEQ ID NO: 296914 - DNA, 952 bp, Unknown
  Bacterial polypeptide expressing nucleotide sequence isolated from the Sargasso Sea
gatgcataatttaaaagatttaagaaaaaatttagaaagttttaaaaaaagattgaaagaccgaaacacagattttgatataaaaaatttcagcttaaaagacactctaaacagagatttaattagtaaaaaagaaaaacttgaacaagaaaaaaaatctttatcaaaatctaaagataaatcaaattttgataagtcaaaaaaaatttctaaagaaatctcagaattaacaaaaaaacaaaattttactcaaaaagaattagacaagataattttctcacttcctaatttagcgcatgacgatgttccaatcggaaaagacgataaatcaaataaaataataaaaaaaaagggagatattaaaaatttttcatttaatataaaaactcatgttgagcttggtgctaaaaatggaaatattgattttgatacttcaataaaactatctggttcaagatttgtagttttaaaagataaaatcgctttgcttgaaagagcactcataaattttatgcttgatacgcacgtgaataattttcaatatacagaaatttcacctccattaattgttaatgaggatgttatgtttggaacaggacaacttcctaaatttgaggaagatcaatttgaaataaaatttgataattccgatcaaagaaaatttttaataccaacagctgaagttgttttaacaaatctagtaagaaaatcgataattgaaaaaaatacattaccaaaaagatatgttgcttcaacgccatgttttagaaaagaagctggtagttacggcaaagacacaaaggggatgattaggcaacatcaattttataaagttgaacttgttagtatcattgaacctaataaatgtttagaagaattagagcgaatgttaagttgtgcagagagtatacttgaaaaactagaaataccctatcaagtggttttactttcc

SEQ ID NO: 296915 - DNA, 583 bp, Unknown
  Bacterial polypeptide expressing nucleotide sequence isolated from the Sargasso Sea
agaagttattttaaccaatattgttagagaaaaaattttaaataggaatgaattaccattaagatttgttgcttctacaccatgttttagaaaagaagcaggaagctatggcaaagatacaaaaggcatgattagacaacatcaattttataaagttgagttagttagtatagtagaaaaagaaaattgcataaatgagttagaaaggatgacaaattgtgcaatgatgattctagataaactaaaattaccatatagaaaaattcttttgtgcactggtgatatgggtttcagcgcagaaaaaacatatgatttagaaatttggcttccttcagaaagtaaatatagagaaatatctagctgttcatcttgcggaagttttcaagcacgccgaatgaatgcaagatataaaaatgaaaaaaatatatctgaatatgtgggaactttaaacggtagcggtttagccgtaggtcgtactttaattggaataatggaaaattatcaaaattctgatggatctattacaattccagacgttctaagaccttacatgaataatctagaaaagatttcaaaaaattaa

SEQ ID NO: 296916 - DNA, 895 bp, Unknown
  Bacterial polypeptide expressing nucleotide sequence isolated from the Sargasso Sea
tctcgatgatatagttgaacttgataaagaaaacagaaaacttattcaagaaaaagaaaagtacgaaatggaaaaaaaaactatttctaagtctaaagatgaaagcttattcaaaaaatctaaagaaatttctataaaaattgatgaattaactaaaaaacaaaaaatagttaaagataatcttgataatatattaagtttaatacctaaccttcctataaaagatgtgcctcatggcaaggatgaaaaaaataataaagaaataataaaagttggtaatataaataaatttaattttaaacctaaatctcattatgaaattggtgaaaaacttaatatgctagactttgatcttgcaacaaaaacaactggatcaaggtttgtgtttgttaaagataaacttgcatcattagaaagagctatttcaaattatatgattgatacacatacaaaatttaatggatatttagaaatttcacctcctttaatggctacagaaaatactatgtttggcactggtcaattaccaaaatttgaaaatgatcaatttgaaataaaactcgatgataaaaacgatagaaaatttttaattccaacggctgaagtcattttgacaaatatggttaaaaataaaattgttaatattaattctttaccaatgagattagttgcttcaactccttgtttcagaaaagaagcgggtagttatggaaaagacacgaagggaatgattagacagcatcaattttataaagttgaactagttagtatcgttgaaaatgataaatgccttgatgaacttgaaagaatgacaaattgtgcaactaaaattttagatgatttaaaacttccatatagaaaaattatattaagtactggagatatgggttttagt

SEQ ID NO: 296917 - DNA, 901 bp, Unknown
  Bacterial polypeptide expressing nucleotide sequence isolated from the Sargasso Sea
aatgcccgttgaaaaagaaaaagaagaattattaaacaaagcgtcagacttaagcaatgaagtcaagttgttatttgaacaagttgatgaaaaagatgaagagttcctaaatctatggataaaaattcctaatttaatttctaatacttctccagatggaaaatcagaccaagataatttagaaattaaaaaagttggaaatgttaaagacatatctaatccaaaaaatcacttagaaatcgcttctaagttaaatttaatagacgtcgaaaaagcttcagaagtttcaggttcaagatttgcgtatttatttggagacttagtaaaaattgaatttaatctagtctcttgggcattagataaattatcagaaaaaggatttactccgaccgttccgccagttttagttagagaaaatgctttgtatggtacaggtttttttccagatgatgcagagcaggtttatgaaattccaaatgatgatttgtatctagtgggcacttctgaagttccccttgctgcactgcacacaaatgaaataattaacatggatgaattacctataaggtatgcaggtttttcaacatgttttagaagagaagcaggcacttatggaaaagatacaacaggaatatttagagttcatcaatttgataaagttgagatgttttccttttgtaatcctgaaaaatctgaagaagaacacgaatttattctctcagtagaagaagaacttttacagtccttggagatcccctatagggttgtagatgtttgcgcaggagacttaggtgcttctgcagctaaaaaatatgacattgaagcatggataccaagtcaaaatacatatagagaggttacctcttgctctaacacaactagctttcaagcaagaaagctg

SEQ ID NO: 296918 - DNA, 850 bp, Unknown
  Bacterial polypeptide expressing nucleotide sequence isolated from the Sargasso Sea
aaattattaatttcaaggaatataaaattagattttgatgaaattttatctttagataaaaataatagaaatttaatacaaaaaaaagaaaatcttgaaaaagaaaaaaaaaacatttcaaaatcaaaagataaatcgctatttgctaaatcaaaaaaaatttcattagagatagaaaaattggttaacgaacaaaataattttaaaaataaattagattcaattatgtcttcactacctaatttaccattaactgatgttccaataggagaaaatgaaaattttaataaagaaattgaaaaatttggtgaaataaataagtttagttttaaacctaaatctcattatgaaattggtgagaaattaaaaatgctagattttgatctagctactaaaacaactggttcacgatttgtctttgttaaagaacatttagcttcattagaaagagcaatatctaactttatgattgatgtgcatattagagaaaatggatatacagaaatatccccaccattaatggcttcagatagcacaatgtttggtacaggacaattacctaaatttgaaaatgatcaatttgaagtaaaactagatggagatgatagaaaatttttaattccaactgcagaggttattttaactaatatggtaagaaaccaaatattgaatttacaagatttaccaatgagattagttgcatcgacaccgtgctttagaaaagaagccggtagctacggtaaagatactaaaggcatgataagacaacatcaattttacaaagttgaactagtgagtattgttgagaatagtaaatgtgaagaggagcttgaaagaatgacaaattgtg

SEQ ID NO: 296919 - DNA, 869 bp, Unknown
  Bacterial polypeptide expressing nucleotide sequence isolated from the Sargasso Sea
attggagattggagaaaaacttaaaatgcttgattttgatttagcaacaaaaacaacaggctcgcgatttgtatttgttaaagatcaattagcattgttagaaagagctttatctaattttatgctagataaacatataactaaaaatggatatcatgaggtttcaccaccacttatagcatcagaaaatacaatgtttggcactggtcaattacctaaatttgaaaatgaccaatttgaaattaagcttgaggaaggttcagataaaaaatatttaataccaacagctgaagttattctaactaatattgttaaagataaaattctagatatcaaagaactacctatgagatttgttgcttcaactccttgttttagaaaagaagctggcagttatggaaaggatactaaaggaatgattagacaacaccaattttataaagttgagttagttagtatagttgaaaaagataagtgtttagaagaattagaaagaatgacaaattgtgctagtgaaattttagatgatctaaagataccatatagaaaaatgattctgtgcactggcgatataggcttcagtgctgagaagacttatgatttagaggtatggcttccatctgaaaataagtatagagaaatttcctcatgttcatcttgttcaactttccaggctgtaaggatgaaaacaagatataaaaatcaaagtaaagaaatagttaatgttggtactttaaatggtagtgggttagcagttggaagagctttaattgcagtattagaaaattatcaacaaaaagatgggtcagtaattgttcctgaagttttgcgtccttatatgaataatttagaaaaaatttcatctaatt

SEQ ID NO: 296920 - DNA, 574 bp, Unknown
  Bacterial polypeptide expressing nucleotide sequence isolated from the Sargasso Sea
aaattatctaggctcccgatttgttgttttaagtggcgccataccacgtctccacagagcattggcgcagttcatgttagatgtacacatcaatgaacatggtctaacagagaccatgacacccgtattggttagagaagaagccatgtttgggactaatcagcttccaaaattttcggatgatagctaccaaactaccaacggttggtggcttatacccacctcggaagttacattgaccaacatttgcgcaaacgaggtaacaccagaagaaaatttacctctaaggatgacggcacacacacagtgttttagatccgaagcaggttctgccggtaaagatactgcgggaatgctacgacagcatcaatttgaaaaagttgaaatggtttcaataactcatccagaccaatcaattcaagagcatgaaagaatgacgaattgcgcaaaagcaattttagaaaaattagaattaccctatagggtagtaatgctttgttctggagatacaggatttggcgcgaagaaaacttacgacctagaagtttggctacctggacagaaatcctttaga

SEQ ID NO: 296921 - DNA, 799 bp, Unknown
  Bacterial polypeptide expressing nucleotide sequence isolated from the Sargasso Sea
aatgatagatataaaaaaattaagagataatccagaattcgttaaacaagctttaaaaaaacgtggttatgatctggatgtatcttcattctctaaattagacagctcaagaaagtccttacaagttaatgtagaaaatcttcaagcagaaagaaaaaaactttcagctgaatttggaaaattaaaatcatcaggcgattcaatcgatgaactaaaaaaaattattgatagtaaaaatgatgaattatcttcaaaagacttggaactacaagaaataatgactcaaattgattcgcttatgttagatatgcctaacattcctgataacagtgttccagagggtaaagatgaaagtgagaatgtcgtaattaaagaatatggaaaaattatttccaaaaatgagcttgatcatttggagattgctgctgacattgatactgatctagcatctaaacttgcaggatctagattttctgtcttaaaaggcgatatggcaaaacttcagagatctcttattagttttatgttagataatgcaattaagaatggttatcaagaatattatgttcctttcatggcaaactcagaatcattgacaggaactggacagttacctaagtttgaagaagatctttttaagacaagtgaaaaattatatttaataccaacagctgaagttcctttaacaaatctttttagaaatgaatttgtaattgaagaagaattaccaattaaagtaacctctcatacaccatgttttagatcagaagcaggtagctatggtaaagatacgaaggga

SEQ ID NO: 296922 - DNA, 835 bp, Unknown
  Bacterial polypeptide expressing nucleotide sequence isolated from the Sargasso Sea
aattttgtttgataatataatgaagcaaagaggagaaaatatttcttccaaaaaaattttagaaatcgatgcagaaaaaagaaatacacaaacaattcatcaatctcttttagctgaaaaaaatttattatctaaaactattggtcaattaaaaagtaaaaaacaggattcttcaaaagaattaaagcaagttgaaaacttaaaaactaaaatatctagtttaaaagaattagaaactcttaaagatgaagaactttattcaattttatctcgtttaccaaatattcctgatgaatctattccaataggtaataatgaaaatgataatattttatataaagattggggaaataaacctaagtttacgtttaaccctaaaaaacatttcgaagtaggcgaaaatattaatttgatgaattttgatatagcttctaaattatcaggttctagatttgtagttcttaaagggcagttatcgcgcttagaaagagcaattacaaattttatgttagacaaacatactgcagaaaatggatacacagaaatgaatgttcctattttggtaaaaaataatgccctttttggtacaggtcagttaccaaaattttctgaagatttatttactgcaggtgatgaacattggttaataccaaccgctgaagtacctttaaccaatttagtagctgatcaaattttaaacattaattcacttcctatgagagtaacctcttatactccttgtttccgttctgaagcaggagctgcgggtaaagataccaggggcatgctccgacaacatcaattcactaaagttgaattagtatcaatagtagag

SEQ ID NO: 296923 - DNA, 625 bp, Unknown
  Bacterial polypeptide expressing nucleotide sequence isolated from the Sargasso Sea
agaagatttatttaaaacctcagataaactgtaccttattcctattgctgaagttcctttgactaatctattcagaaatgaatttctaaatgaaaaagattttccaatcaaagtaacatctcatactccatgttttagatctgaggctgggagttatggcagggatacaaggggtcttataagacaacatcaatttgaaaaaattgaacttgtgcaaattacccacccaaacgactctatggattgtttagaaaatttgcttaataatgcttgcgaaattcttaataaattagaacttccttatcaaattgttgaattatgtactggcgatttgggcttttcatctgctaaaacatttgacattgaggtttggatgcctagtcaaaataaatatagagaaatttcatcatgctcaaacttcacagatttccaggccaggcgctctaatataaaatttaaatccaaagagggaaatagttttgcacatacaattaatggatctggacttgcagtcggcagatgtttaattgcacttattgaaaataattttgacggtaaagatactattaatattccaaattgtcttgagcaatattttgggtcaaacgaaattaaaataagttga

SEQ ID NO: 296924 - DNA, 707 bp, Unknown
  Bacterial polypeptide expressing nucleotide sequence isolated from the Sargasso Sea
tatgattgatattaatttcataaaagaatatccagaaaaattttctaaattaatgcaacaaagaaatacaaacatttcaatagaaaatatactcaagttagataaggataaaaagctaaaaatatttgagctacagaaactccagactgaaagaaactctatgtcaaaacttataggactttataaaagagataaaaaagacactattgatctagagaagaaggtaactgatataaaaagaactaccatagatatagaaaaatcacttaaagcaatagaagaaaaactaaatgaaattatgctcagattaccaaatatacctgatgaagatgttcccataggtgaaaatgaaagtcataataaagaaattttaaaaaagtttactccaattgattttaaatttaatccggtttctcatgatattcttggaaaaaatttaaataagatgatggattttgatttggggtcattaatttcaggagcacgatttgtagtattgaagtcagatctagcattattggaaagagcattaattaattttatgttagatttacatattcataagcataactatacggaggtaagtgctcctcatatagttaaaaaagatgcattaattggaacaggacagttaccaaagtttgagggtgatttgtttaaagttggtgatgaaaagtggcttatacccactgcagaagttacactta

SEQ ID NO: 296925 - DNA, 934 bp, Unknown
  Bacterial polypeptide expressing nucleotide sequence isolated from the Sargasso Sea
tgataatgtaaaagttttaaaagctggaaaagttcctgagtttaattttaaacctaaatctcattacgaacttggtgaaaaattaggcatgcttgattttgatcttgcaactaaaacaactggatcaagatttgtatttgttaaaaaagagttagcattactagaacgagctttatctaactttatgctagatactcatattgttcaaaatggttatcaagagatctcacctccattgattgcctctgataatacaatgtatggaacaggccaattaccaaaatttgaaaacgatcaatttgaaataaaatttgatgaaggatctgatagaaaatttttaattccaactgctgaagtaattttaacaaacattgttaaagataaaattgttgaccaaaaagacttaccaatgagatttgttgcttcaactccatgttttagaaaagaagcaggtagttatggaaaagataccaaaggaatgattagacagcatcaattttataaagttgagatggtcagtattgttgaaaaagaaaattgccttgaagaattagagcgaatgacaaactgcgcaacagatattctggataagctagaattaccttatagaaaagtaattttatgttcaggtgatatgggtttcagtgcagaaaaaacttatgatattgaagtatggttaccatcagaaaacaaatatcgtgaaatttcatcttgctcttcttgttctacatttcaggcacaaagaatgaaatcaagatacaaaaataaaaacaaggaaactgtttttgttggaacattaaatggaagtggtttagctgtgggtagaactttaattgctgtcctagaaaactatcaacaaaaagatggttcgattgttgttcctaagttactgcgaccgtatatgaataatttggaattgatttcagctaaataa

SEQ ID NO: 296926 - DNA, 759 bp, Unknown
  Bacterial polypeptide expressing nucleotide sequence isolated from the Sargasso Sea
tgaagaagataataaggtgattaaaacttttggaaatgtgcaaaaaaaagattcaattgatcatcttgagataacatcagatattgatactgaatctgccgttaagcttgccggaactagatttgcagttttaaaagatgatatagccaaacttcaaagagcgcttatttcattcatgctcgatgttgctgaaaaaaatggttatgaagagcgatatgttcctttcgtggcaaactcgcgaagcctaactggtaccgggcaactaccaaaatttgaagaagatcttttcaaaataacagaagatttatttttaattcctactgccgaagtcccattaacaaatctttatgccgattcaatattggagcagagcagtctcccaattaaggtaacatctcatacaccttgttttagatcagaagcaggcagttatggcaaagatacaaaaggtcttataaggcaacatcaatttgaaaaagttgaaatagtccaaattgtccatcctaatgagtcagaagctgctcttgagagtttattgagtaatgcagaagaaattcttcaactcttagaattaccctatcaggttgtccaattatgtggaggcgatttaggattttcgtcagcaaagacctacgatattgaagtatggataccaagccaaaataaatatcgagagatttcatcgtgctctaactttactgattttcagtctagaagatcaaaaataagattaaatgaagatgaaaataaaattcttcc

SEQ ID NO: 296927 - DNA, 541 bp, Unknown
  Bacterial polypeptide expressing nucleotide sequence isolated from the Sargasso Sea
agtggatgcagctgaactacctaaacgatatgtttctcatacaccctgtttcagatctgaagcaggagccgccgggaaagatactcgaggaataatgcgccaacatcagttctacaaagttgaattagtaagtttagcatctgaagaaaattcagctgatgaacatgaaagaatgctgagttgtgccgaggaggtgctaaaaagattaggtttacactatcgagttgtaattttatccacgcaagatatgggtttttcagctcagaaaacatatgatattgaggtttggcttccagggcaaaacgcatatagagaaatttctagttgctctaattgtggtgattttcaagcaagaagaatgaattcgagatataaagaaaatgatgcaattaaatatctgcatacgcttaatgggtcaggactggcagtagggagaactttaattgcgattatggaaaattatcaaaaccaagatggatctattaatattccagaagtattaattccctacatgagtggaataacaaaaatttcaaactaa

SEQ ID NO: 296928 - DNA, 856 bp, Unknown
  Bacterial polypeptide expressing nucleotide sequence isolated from the Sargasso Sea
ggaaataaattaaacttaatggatttcgacacagcaagcaaagtttctggaagtagatttgtttttttaaaaggagacttggcaaaattagagagagctatatcaaattttatgctagatacacatgttaaagaatttggatatcaagaaatatctccacctttgattgtttcagacaaaactatgtttggaacaggacaactccccaaatttgaaaatgatcaatttgaattattgttaaagaaagaagaaaatgatagaaaatttttaatacctacagccgaagttgtcttaactaatattgtaagagaaactaatgtaaaaaaaaatttattacctttaagatttgttgcctcaacggtatgctttagaaaagaagccggtagttatggaaaagatactaagggtatgattagacagcatcaattttataaggttgagttagtaagtatagttgaaaaagaaaaatgctctgaggaattagaaagaatgactaactgtgcggaaaaaattttaaaggaaattaaattgccatatagacaagttctattatccacaggagatatgggctttagtgctgaaaaaacatatgatttagaagtgtgggtaccatcagaaaataaatatagagagatttccagctgttcatcttgcggacaatttcaagcaagaagaatgaaggctaaatataaaaatggaaaggaatctgattttgtaggaacgttaaatggatcaggtttagctgtggggagaactttaattgcaattattgaaaactatcaacaaaaagatggaaccataaaggtacctgatgttttaaaaccatacatgaacaacgttcaatatataaaataat

SEQ ID NO: 296929 - DNA, 856 bp, Unknown
  Bacterial polypeptide expressing nucleotide sequence isolated from the Sargasso Sea
atgattgatgtcaatttacttaaaaatcaaggtgatctaattgccaaaaaaatacattcacgtggagagaatattaatatttcatcgctggtgactttaaatgaacaaaaaaataaattgcaagctgaactagatgttcttaaaaatgaaaaaaatcagctttcagatactattggaaaattagcaaaaactggaagagatatctcagacaagaaaaatctatctctagaattaaatcaaaaaatagaaacccttttaaaatcttacgaacaaatatcgggggagtttaaacaaaagttactagaaataccaaatattcctgataatgacgtacctgaaggctctagcgaacaagacaacattgaactaaatagaaaaatttttaatcaagaccaagggttagaccatattgaaattggaaataggttagggtgtcttgatatcgaaactgcttcaaaactctcaggatcaaggtttatgatcttgaaaggaaggctagcacagctccacagggcactcattaatttcatgttagatgaggctaaagacaatggctacgaagaaaattatgtcccatatattgtaaatcgtgatgcgctcataaatactggacaactacctaaatttgaagatgatcaatttaaactaaccaatgagaagtttctaattcctacggcagaggtaccactcacaaacttttttagtaacagtacaatcaattcaaaacaactcccaataaatgtttgcgctcatactccttgttttagagcagaggcaggaagttatggtaaagatacaaaaggaattattagacaacatcaatttgataaaatcgaacttgttaagctcgttgatc

SEQ ID NO: 296930 - DNA, 735 bp, Unknown
  Bacterial polypeptide expressing nucleotide sequence isolated from the Sargasso Sea
cttggaaaaaaaacaaaatattatccaaagtgaaatcgataaaataattttctcgcttccaaatttagctcatattgatgttccagttggaaaagatgcaaaatctaataaatttataaaaaaaaagggggatattaaaaaattttcatttgttgctaaatctcacgttaaattaggagcaagagatcaaaatattgattttgaaacttcaactaaattatcgggttcaagatttgtagtattaaaagataaatatgcgatgctcgagagagctttgataaactttatgttagatacacatgtaaatgaattcaaatacacagagatttcaccgcctctgatcgtaaacgaagatgtaatgtttggaactggacaactaccaaaatttgaagaagatcaatttgaaataaaatttgataattctgatcaaagaaagtttttaatacccacagccgaagtagttttaactaatttagtaagggaatcgataattgaaaaaaaattgttgccaaaaaggtttgttgcctcaactccatgttttagaaaagaggcaggaagttatggtaaagatacaaaaggcatgattaggcaacatcaattttataaagttgaacttgtgagtatagttgaaccaaataaatgtctagaagaattagaacgaatgttaagttgtgcagagagaattcttgaaaagttagaaattccttatcaagtagtattactctccaccggaga

SEQ ID NO: 296931 - DNA, 494 bp, Unknown
  Bacterial polypeptide expressing nucleotide sequence isolated from the Sargasso Sea
cttgtttagatcagaagctggttcagcaggtaaagatactaaaggaatgctaaggcagcatcaatttaataaagttgaattagtatcaattacaactcctgaacaatctgaaaaagaattagaaagaatgctgagttgtgctgaaagtattttacaagatttaaatattcactacagagttgttactctttgcactggcgatatgggtttttcagctaaaaaaacttatgacattgaagtatggcttcctggagaaaatgcatatagagaaatatcaagttgttcaaattgtggtgattttcaatcaagaagaatgaattctaaatttaaaagagataaatcaaatttatatgttcatactttaaatggatcaggacttgcagttggaagaacattaatatctattttagaaaattatcaaacacaagatggaaacataattattccaaaagttctaagaaaattttttgataataaagaaaaattaatttagt

SEQ ID NO: 296932 - DNA, 898 bp, Unknown
  Bacterial polypeptide expressing nucleotide sequence isolated from the Sargasso Sea
ccaaatttagcaaaaaatgatgttccaataggaaaagatgaaaaagcaaataaactaattaaaaaggtaggaaaaataaaaaattttacctttgatataaaatcacatgttgagcttggcaaaaagaacaatggtatagattttgatacatctacaaaattatctggatcgaggtttgttgttttaagagataaatttgctttattagaaagagccttaattaattttatgcttgatacacacattaatgaatttaaatataccgaaatttcacctccactaattgtaagtgatgaagttatgtttggaactggccagcttcctaaatttgaagatgatcaatttgaaattaaactaagcgatacttctgaaagaaaatttttaatacctactgccgaagtggtgcttactaatttagtaagaaaatcaaatcttgaaaagaatgaacttccacttcgatttgtcgcctctactccatgttttagaaaagaagctggaagttacggaaaggacacgaaagggatgatacgacagcaccaattttacaaagtagagcttgttagcatagtagaggaaaaaaattgtacaagtgaacttaatagaatgctaaattgtgcagaggaaattttaaagaaattggaaattccttatcaagttatcctgctgtcttctggagacatgggatttagtgcagaaaaaacgtttgatatagaatgttggataccatcagaaaaaaaatatcgagaaatttctagctgttcatcttgcggaacttttcagtcaagaagaatgggggcaaaatgtaaaacttctaatggaaatgaatttgtaggaactttaaatggctctggtttagctgtcgggaggttaatggttgctttattagaaaataatcaaa

SEQ ID NO: 296933 - DNA, 812 bp, Unknown
  Bacterial polypeptide expressing nucleotide sequence isolated from the Sargasso Sea
actgggcgaaagtaacggcggtattgattttgaatctgctgcgaaattatcgggttcaagattcgtagttatgaaggatggatatgcaagacttcatagggctttgaagcaattaatgctcgatgttcaaactgaagagaacggctatactgaaatgtatgtcccaaatattgtcagatcagattgcttggagggcactggccagttaccaaagtttgcagaggatcaatataagattgaaaatgaggagggtttgtacctaattccaacagctgaagttcctcttacaaatttaatcagagaaagtattcttgaagagaatgaattgccaatcaagatgaccgcacatacaccatgtttcaggcaagaagccggttcttatggaaaagataccaagggaatgattaggcaacatcaatttgaaaaagtagagcttgttcatatcgtcaagccggatgaatcttacgaagctcttgaggaacttacaaaaaatgcagaatccattctgcagaaacttaaattgccatatagattgatgctcttgtgctctggagatacaggcttctcagcagcaaaaacttatgatctagaagtatggctcccgtcacaggagacttatagagagatatcatcttgtagcaattgcgagtcgtttcaatcaaggcgaatgaaagctaggtataaaaactctaaatccaagcaaaccgattatcctcataccctcaatggttcaggggtgggctatggaagaacccttatcgctgttctagagaactatcaaaatgaggatggctccgtcaccattctgatgt

SEQ ID NO: 296934 - DNA, 685 bp, Unknown
  Bacterial polypeptide expressing nucleotide sequence isolated from the Sargasso Sea
aatgcataacattaaagacttaagaaataatttaaatatttataaaaaaaaattatcagatagaaattttgattttaaaattaatattttcgatgatttagataaaaataatagaaaattaattagtgaaaaagaaaatttagaacaagaaaaaaaatctttatcaaaaactagagacaaaactaatttcgataaatctaaaaaaataacagagcaaataattaaaatttcaaaagaccaaactattgctcaaaacaaacttgatcaacttatgcatattttacccaatttagctcgagatgatgtacctgttggtaaggatgaaaaatcaaataaaataattaataaattcggaaaaataaaaaaatttacttttaaaacaaggactcatgtcgaaattggctctaaaactaaggatattgattttgatacagcttccaaaatatctgggtccagatttgtgatactaaaaaataaaattgctttactagaaagagcgctcataaattttatgttagatatacatactacaaaatttgaatatattgagatttcacccccgttaatagttaacgaggatgtgatgtttggcacaggccaactaccaaaatttgaagaagatcaatttgagataaaatttgaaaatgctgatcaaaggaaatttttaatacctactgcagaagtt

SEQ ID NO: 296935 - DNA, 738 bp, Unknown
  Bacterial polypeptide expressing nucleotide sequence isolated from the Sargasso Sea
gctttagatgatgttcctgtaggtaaagatgaaaaggcaaataaaataattaaaaaagttggcaatataaaaaagattaatttcaaaccaaaatctcacatagaaataggtgaaaaaaataacgatatagattttgaaacatcaattaaattatctgggtcaagatttgttgttttgaaaaataaaattgctttattagaacgagctttgataaattttatgttagatattcatacgattaattttaactattctgaagtttctccgccgttaattgtaaatgaggatgtaatgtttggaacaggtcaactacctaaatttgaagaggatcagttcgaaattaaatttgagaactcagaacaaagaaaatttttaattccaacagctgaagttgttttaactaatttagtaagaaaaacgatacttaataaagatcaattacctctccgctttgttgccgcaacaccctgctttagaaaggaagctggcagttacggaaaagacacaaaagggatgataagacaacatcaattttacaaggtagaattagttagtattgtaaacccaagagaatgtgattcagaactcaaaagaatgctaaattgtgctgaagaaatattaaaaaaattagacttaccgtatcaagtaattttattatcatctggtgatatgggattcagtgctgaaaaaacttttgatattgaagtatggataccatcagaaaataagtttagagaa

SEQ ID NO: 296936 - DNA, 887 bp, Unknown
  Bacterial polypeptide expressing nucleotide sequence isolated from the Sargasso Sea
acacgaattgactgttaggaaaaaagatatcgatatacaaatatccagtcttcaatctgagagcaaaaagttaagcaaattaattggtcaagaaatcagaaaatctaaaaacaatgattctcctgaactaatttctttaaaaaaaaagggaaacgaatacagaattaaaatttctgaacttgaagagaaacaaagaatattagataaagaagttgatgatgagatttataacttgccaaatttccctagcaaagatgcacctattggaaaagatgaaagtgataatgttcacataaaaagttggggagatcctttaacagaggagaatcttaaatcccactgggaaataggtgagaatcttaatttattcgactctataaattcaacaaaaatatcaaaaagtcgttttattacacttattggtaatggcgcaagattagagcgggcattgattaatttcatgctggatattcatagtaaaaatggttatttagagttaatgcctccagctttagtaaattcagaaagtcttcagggatcaggacaattacctaaattttcaaatgaaagttttaagtgttctaatgacgatctttggctttctccaactgctgaagttccaattaccgcttttcataaacatcagataattgactcaaagcaattgcctcttaaatatgttgcatatagcccatgcttcaggagagaagctggaagttatggaagggatactaaaggtttaatcagacttcatcaatttaataaggtagagctttattggttttgtgatcccagcaaatctattgaagctcatgaaaaaattacttcagatgcggaaagtattttaaaaaagctaaacctaccctaccgattagtagatatttgta

SEQ ID NO: 296937 - DNA, 634 bp, Unknown
  Bacterial polypeptide expressing nucleotide sequence isolated from the Sargasso Sea
tccagatgacgctgaacaggtttatgaaatcccaaatgatgatctctacttagtaggaacttccgaagttcctcttgctgcactgcatgcaaatgaaattatcaatatggaagaattgccaataaggtacgcaggattttcaacatgtttcagacgagaagctggtacttatggaaaagacacaacaggaatatttagagttcatcaatttgataaagttgagatgttttcattctgcaatcctgaaaaatctgaagaggaacacgaatttattctctcagtagaagaagaactgttgcagtccttagagattccatatagggttgtagatgtttgcgctggagacctgggtgtttctgcagctaaaaaatatgacattgaagcatggataccaagtcaaaatacatatagagaggttacgtcttgctctaacacaactagctttcaagcaagaagactaaatataagagcaaagtcagaaggagaaaccagtatattacatactcttaatggaacagctattgctgttggaagaattttaatttctttgattgaaaataatcaaactgaagatggaaaagttgagttttccgataaagttgctgagattattggatttaaaaacctaggctaa

SEQ ID NO: 296938 - DNA, 528 bp, Unknown
  Bacterial polypeptide expressing nucleotide sequence isolated from the Sargasso Sea
atttacctattaaagtaacatctcatactccatgttttagatctgaggctggaagttatggtaaggatacaagaggtcttataagacaacatcaatttgaaaaaattgaacttgtacaaatcactcatccaaacaattccatggattgtttagaaaatttgcttaataatgcttgtgaaattcttaataaattagaactgccataccaaatagttgaattatgtgctggtgatctgggtttttcatctgctaaaacatttgatattgaggtctggatgccaagtcaaaaaaaatatagagaaatttcatcatgctcaaactttacagatttccaagctaggcgctccaacataaaatttaaatctaaagaaggaaatagttttgcacatacaattaacgggtcaggacttgctgtcggtagatgcttaattgcacttattgaaaataatttcgacggtaacgatactattaaaataccaagttgtcttgagcaatattttgaatcaaacaaaataaaaataagttgat

SEQ ID NO: 296939 - DNA, 799 bp, Unknown
  Bacterial polypeptide expressing nucleotide sequence isolated from the Sargasso Sea
attactgagctaattgatactgatttggctgctgttttggctggagctagattttctgttttaaaaaaccaaatagccaaacttcaaagatcacttatagcgtttatgttagaccaagcaattgagaagggttatgaagaatattatgttccctttgttgcaaacactcaatcattgataggtactggacaactcccaaagtttgaagaggacttatttaaagtttctgataatcaatacttaataccaactgctgaagttcctcttactaatataaatagagataaagtaattcctttaagtgaattaccgtcaaaattaacatctcatacgccttgtttcagatcagaagctggcagttacggcaaagacactaaaggattaattcgacaacatcaatttgaaaaaattgaattagttcaaataacagactcaaaaagttcttttgattgtttagaaaccctattaagtgacgctgaaaatatccttaagttacttgaattgccatatcaagttgtagagttatgtgcaggtgatttaggctttagttcttgtaaaacttatgacatagaggtttggataccaagccaagaaaaatatagagaaatatcatcatgttcaaatttttcagattttcaggcaaggagatcaaatattaaaattgataccggcaaaaataaggaatttgctcataccatcaatggctcaggccttgctgtaggtagaacattggttgctttaaatgaaaataattatgatcatgatacaaatactattagtatccaaaagttcttagaag

SEQ ID NO: 296940 - DNA, 706 bp, Unknown
  Bacterial polypeptide expressing nucleotide sequence isolated from the Sargasso Sea
aaatcaatatgaagagatagatcctccttttttagttaaggaagaaactatgattggttcaggaaatttacctaaatttaaggaaaatttatatatggactcagagactgatttgtggcttattccaactgcagaagtggcattaaatgggatgaatcaaggtcaaattattaaacctggagagttaccaataaaatatgttgcaaaaacttcaagttttagaaaagagcatacggccgcaggaagagatgttagaggtataaagagggttcatcaatttgaaaaagttgaaatatttaggtttgttgaacctgcagattctattattgcacatgaggaaatgctagaagaagtggttgatttgtgtaaaaggttagggttaatatatagagttttgaagttgtctacgggtgatattggttttcaatcagcaaaaacatacgacattgaagtttggtcaaaaggaacaggtgagtggctagaagtaagttctgtttctaactgtttagattttcaaacaagaagaaataacacaaggtttaagagttctcagaacagttcgactaattttccacatacacttaatggatcgggtttagctttacctagaatatggattgcggtgctagaaaatggtttacagaaagatgggtcaattataattccagaagaattagttaagtatactggttgggaaaaaatataa

SEQ ID NO: 296941 - DNA, 676 bp, Unknown
  Bacterial polypeptide expressing nucleotide sequence isolated from the Sargasso Sea
tatggcaaatgaagattcgttaattggaacaggacaactaccaaagtttgaagaagatttatttaaaacctcagataaactataccttattcctactgctgaggttcctttgactaatttattcagggatgaatttcttaatgagaaagatttacctatcaaagtcacatctcataccccatgttttagatctgaggctggaagttatggcaaggatacaagaggtcttataagacaacatcaatttgaaaaaattgaacttgtacaaattactcatccaaacaattcaatggattgtctagaaaacttgcttgataatgcatgcgaaattcttaataaattagaattgccataccaaatagttgaattatgtactggtgatctaggtttttcatctgctaaaacctttgatatcgaggtctggatgccaagtcaaaaaaaatatagagaaatttcatcatgctcaaactttacagatttccaagctaggcgctctaacataaaatttaaatctaaagaaggaaatatttttgcacatacaattaacggatcgggacttgcagtcggcagatgcttaattgcacttattgaaaataatttcgatggtaaagatacaattaacattccaatttgtcttgagcaatattttggttcaaacgaaataaaaataagttga

SEQ ID NO: 296942 - DNA, 706 bp, Unknown
  Bacterial polypeptide expressing nucleotide sequence isolated from the Sargasso Sea
atgcataatattaaattattaagagagaatttggaaagatttaaacaaaaactttctgaaagaaattttgaatttaatccaaaagaatttgatgacctagataaaaaaaatagaaaattaataagccaaaaagaaaaacttgaacaggaaaaaaaaatattatctaaatcacaagataaatcaaattttgaaaaatctaaaaaaatttctaatgaaattgaaaaattgttagaagaacaattagtcattcaaaaaaaattaaataaaattttatattttttaccaaatttagctttagatgatgtgccagttggcaaagatgaaaaagcaaacaaattaattgggcaatttggtactattaaaaaattttcttttaagcctaaatctcacattgaaataggctccaacaataggcagattgattttgatacttcaattagattatctggatctaggttcgttatactaaaagataaaattgcacttcttgaaagagcgcttataaattttatgttagatattcacacaacagagtttgattacactgagatctctccaccattaatagttaatgaggatgttatgtttggaaccggacaactcccaaaatttgaacaagatcaatttgaaattaaatttgacaattctgagaaaagaaaatttttaattccgaccgctgaagtgccattaacaaatttagtaagaa

SEQ ID NO: 296943 - DNA, 857 bp, Unknown
  Bacterial polypeptide expressing nucleotide sequence isolated from the Sargasso Sea
caataaagagataatgaaatcaggtcaaatagcaaaatttgattttgaccctttgtcccattacgaaataggtgaaaaacttggaatgcttgattttgatcttgctactaaaactacaggatcacgtttcgtttttgttaaaaataaacttgctttacttgaacgagctatttcaaacttcatgttagacacacatgttttaaaaaatggttatgaggaaatttccccacctttattagcatcagaaagcacaatgttcggtacaggtcagttacctaaatttgaaaatgatcaatttgaggtaaaactagacaatgagactgatagaaaatttttgatacctacagcagaagtaattttaactaatattgtaaaagataaaattgtaaatcaaaaagatttaccaatgcgatttgttgcttctactccttgctttagaaaagaagcaggtagttacggtaaagatacgagaggtatgattagacaacatcaattttataaagttgaaatggtgagtgtagttgaacaagaaaaatgtttggatgaattagagagaatgacaaaatgtgcaacttctattttagatcttttagaactaccatatagaaaaataattttatgtagtggtgatatgggctttagtgccgaaaaaacttatgatattgaggtatggttaccctcagaaaatagatacagagaaatctcctcttgttcatcttgctcaacatttcaagcagtaagaatgaaggcgagatataagaatgaaaaaaaggaaactctttttgttggtactttgaatggtagtggtttagctgtaggaagaactctcatagctattttggaaaattatcaacaaa

SEQ ID NO: 296944 - DNA, 708 bp, Unknown
  Bacterial polypeptide expressing nucleotide sequence isolated from the Sargasso Sea
atggttatttggagttaatgcctccagctttagtaaattcagaaagtcttactgggtctggtcaattacctaaattttcaaatgaaagtttcaagtgttccaatgacgatttatggctttctccaacagctgaagttccactaactgcttttcatagaaacgagcttattgatcccaaacagttacctattaagtatgttgcatatagtccatgttttaggagagaagctggaagttatgggagggatactaaaggtttaataagacttcatcaatttaataaggttgaactctattggttttgtgatccaagtaaatctttagaagctcataaaaagattacttctgatgcagagagcattttaaaaaagctcaacttaccatacagattagtggatatttgtactggagacttaggcttttcttctagtagaacttttgatcttgaagtttggcttcccagtagtaaatgttatagagaaatttcaagttgcagtaattgccttgactttcaagcacgcagatcatcaataaggtcaaaaattgataaaaaaaatacatatatacataccttaaatggcagtggtcttgctattggaagaacaatggcagcgattcttgagaatggccaacaaacagatggtagcgtaaagattccagatgctctggttccatattttggatcaaattttttaaaaactgcttaat

SEQ ID NO: 296945 - DNA, 640 bp, Unknown
  Bacterial polypeptide expressing nucleotide sequence isolated from the Sargasso Sea
atttgaaaacgatcaattccaaattcaaatggatggaaatcaaaaaaaatatttaattcctactgctgaagtaatattaactaatatgtttaaggaaaatattattaatattaaaaatctaccacaaagattagtagcttcaactccttgctttagaaaagaagcgggaagttacggaaaagacacaaagggtatgttgagacagcaccaattttacaaagttgaattagttagcatagttgaaccaaataaatgtaatgaagagttaaatcgaatggtaacttgcgctgaagagattcttaaaagactgaaattaccttacagacaagttttactatgtactggtgacatgggctttagtgccgaaaaaacaatagaccttgaggtatggataccttctgaaaataagtatagagaaatttcaagttgctcatcttgtggacaatttcaatcaagacgaatgagagctaaatataaagattcaaaaaataaatctgattatcttggtactcttaatggatctggtttggccattggtcgaactttaattgcaattatggagaattatcagaattcagatggctcaattacaatacccaaagtcttaagggggtatatgaaaaatctagacaaaatttaa

SEQ ID NO: 296946 - DNA, 286 bp, Unknown
  Bacterial polypeptide expressing nucleotide sequence isolated from the Sargasso Sea
gtttttcggcagtaaaacatatgatatagaagtatggttaccaggtgagaatacttacagagaaatatctagctgctctaattgtggtgaatttcaagctagacgaatgaatacacgatataaaattgacaataaaaatgtttttgttcatacattaaatgggtcaggtcttgctgttggaagaacattaatcgctattcttgaaaactatcaaatgagagatggtaatataagaatacctgatgttttaaaaaaatattttaataatttagatactcttatctag

SEQ ID NO: 296947 - DNA, 442 bp, Unknown
  Bacterial polypeptide expressing nucleotide sequence isolated from the Sargasso Sea
ttataaagtagaattagttagcattgtagagcaacatgattgtttaaatgaccttgagagaatgacttcatgtgcaacatctatcttagataagttaaatctaccatatagaaaagtgattctatgttcaggtgatatgggttttagcgctgaaaaaacatatgatattgaaatatggttaccctctgaaaaaaaatatagggaaatatcaagttgttcatcatgtggaacttttcaatctagaagaatgaattcaagatacaaaaattcaaaaaatgaaaacgtttttgtaggaacattaaatggtagtggtctcgctgttggtagaacacttataggtattatggaaaattaccaagatgaagaaggcaatataactataccagaagcactgagaccatatatgaataatatggagaaaatttcatcaattagcagttga

SEQ ID NO: 296948 - DNA, 809 bp, Unknown
  Bacterial polypeptide expressing nucleotide sequence isolated from the Sargasso Sea
cttgataaaaaaagaagaagtactcaatctaaacttgatgaattgttttcccaacaaaacaaactttcaaaaaaaattggtgaatattatcagtcgggagatcatgcttctggaaatcaattaaaaaaagaagtcgaagcgttaaagcctgaccaaaaaaaattagaggaagatttaaataaaataaaagtagacttatttgagaatttaaataatgttccaaacgttccacacggactagttcgaaaaggtaaaaatgaagaagataatgagattatctatcaatcagatgatattaacaaactatcacccaaagcaaagccacattggaaattagcttctgattataatctgattagttttgaacttggaaataaaatttctggatcgggatttcctgcatacatagacaaaggtgcgaaactggaaagatcactcataaacttttttctagattataacattaaagctggttatacagaggttcaacccccaatattaattaatgagagttcgggtcatggcactggtcaattgccagataaggaaggtcaaatgtataaaattgaaaatgaaaacctttacttaatacctactgctgaagtcccaataacaaatttttatagaaacaaaacaatcagtaaaaataatcttccaataatgcttacaggttacacaccttgttttaggagagaggcaggaagttatggttctgatgtcaggggattgaacaggttgcatcaatttgataaagttgaaatagttagaattgaagagccaagtaaatcttatgaggttttagatgaaat

SEQ ID NO: 296949 - DNA, 616 bp, Unknown
  Bacterial polypeptide expressing nucleotide sequence isolated from the Sargasso Sea
aatttaaaattaaagtcaaagggtttggcagaggaattagatacagttaaaaataaaatatcagatttaataactacagtaccaaatattcttgattcaaaagttcctgatggactatctgaggaaaataatattgagatatttagaagctccaattttaaagagtctggatacaacctaaaaaatcactggaatctatcaaaagaatatgacattattgattttgaattaggaagtaagataacaggatcaggatttccagtatataaagataaaggtgccaaacttcaaagagcattaataaatttctttttagatagaaatagctccgcaggatacaatgagtctcaagttcctcacttggtaaactcagattctgcctatgcaacgggccaattacctgataaagatggtcaaatgtatcatgttacaaatgatgacttttatttaattcctactgcagaggttcctttaacaaatatttatagagataaaatcctagcagttgaccaagttccaattatgatgactggttataccccatgttttagaagagaagctggaagttatggatctgatgtgagaggactaaatagattacatcaatttgtataaa

SEQ ID NO: 296950 - DNA, 886 bp, Unknown
  Bacterial polypeptide expressing nucleotide sequence isolated from the Sargasso Sea
aaaagaaaaacttgaaaaagaaaaaaaagaaatctcaaaatctaaagataaatcactatttgcgaaatctaaggaattatcagttaaaatagaggatctttcaaaaaaacaaggtcaaactcaagatgagttagataatattctttcatcattaccaaatctaccattagatgatgttcctattggtgaaggtgaaagttcaaataaagagataaataaatttggtaatctgcctaaatttgattttaaaccaaagtctcatactgaattaggcaataacttaaatatgcttgattttgatttagctactaaaaccactggttcacgttttgtatttgttaaggataaactagcattattagaaagagctctatctaatttcatgctagatattcatacaaaaattaatggatataaagagatatcacccccattaattgcttcagacaatactatgtttggtactggtcaacttcctaagttcgagaatgatcagtttgaaataaaatttgatgacaatggtagaaaatttttaattcctacagctgaagttatattaactaatatggttaaaaatcaaattctatcagttaacgatcttccaataagattggttgcatcaacaccatgctttcgaaaagaggcaggaagttacggcaaggatacaaaaggcatgattagacagcatcaattttataaagttgaattagtaagtattgttgaaaacgataagtgtatagaagaacttgaaagaatgactaaaagcgctgtaatgatcctagataaattaaatctaccttatagaaaaattatattaagcactggcgatataggttttagtgcagaaaaaacatatgatattgaagtttggataccatcagaaaat

SEQ ID NO: 296951 - DNA, 747 bp, Unknown
  Bacterial polypeptide expressing nucleotide sequence isolated from the Sargasso Sea
aaagagctatagcaaattttatgctagataaacacactaatgaaaatggttatacagagtataatctaccttttttagtaaaagatgattctctttttggaacaggacaattacctaaatttggtgaagatttatttacagctggtgaaaaccattggctaatacctaccgcagaagtaactttaacaaatatggtaagagaagaaatactcaatcaaaatcaactaccaatgagatttacctcatacactccatgttttagatctgaggctggtgcatcaggtaaagatactagaggtatgttaaggcaacatcaatttacaaaggtagaattagtatctgtagtagagccacaaaattcagagcaagaattagaaagaatgcttgaaagtgcggaaagtattcttaaagatttaaatattcactatagagttatgaccttatgtactggcgacatgggtttttctgcatgtaaaacatatgatattgaagtttggttacctggtgaaaataattatcgagaaatatctagctgttcaagttgtagtgatttccaggctagaagaatgaacactaggtataaagtagaaaataaaaatatatttgttcatacacttaatggttcaggtttagcagttggaagaacattgattgctattcttgagaattatcaaatgcctaatggaaatattaaaatacctgaggtgttaaaaaaatatttaaataattcagatactctaatctagt

SEQ ID NO: 296952 - DNA, 490 bp, Unknown
  Bacterial polypeptide expressing nucleotide sequence isolated from the Sargasso Sea
atgttttagaaaagaagctggtagttacggcaaatacacaaaaggtatgattagacaacatcaattttataaagtcgaactcgtaagcatagttgaaccagataaatgtttaaaagaattagagagaatgttaagttgtgcagagagtattcttaaaaaattagatataccttatcaagtcgttctactttcttcgggagatatgggttttagcgctgagaaaacctacgatattgaagcttggataccatctgaaaaaaaatacagagaaatttcaagttgctcatcttgtggttcttttcaagccagaagaatgggagctaaatataaatctgacagcggaattgaatatgtagggactcttaatgggtccggtttagctgtcggaagacttatgattgctttgctagaaaacaatcaaaatgaagatggttcaatctctattccagatgtattaaaaaaatacatgaataatctagaaaaaatttaa

SEQ ID NO: 296953 - DNA, 530 bp, Unknown
  Bacterial polypeptide expressing nucleotide sequence isolated from the Sargasso Sea
tgtattatcaaatcaattagatgtaattaaaaaaaatctttctgaaaaggaggtattgttaagtaaaacactatctcatctaaatgattttttattagatattccaaatatccctcatcaggatgtagaggagggcaatagtgaagatgataatagggtaattaagacttttggcgaagtgcaaaaacaagattcaattaatcatctcaaaatcacatcaagtattgatattgaatcagctgttaagcttgccggtacaagatttgcagtcttaaaagatgatatagctaaacttcatagagcgcttatctcctttatgcttgatgttgctgaaaaaaatggctatcaagagcgttacgtaccctttattgctaattcacgaagcctcaccggtactgggcaactaccaaaatttgaagaagatcttttcaaaataacagatgatttatttttaatccctacagctgaagtacctctaactaatctttatgcagattcagtattggaacaaagcaatctccctaattaag

SEQ ID NO: 296954 - DNA, 292 bp, Unknown
  Bacterial polypeptide expressing nucleotide sequence isolated from the Sargasso Sea
tatgcagattcagtattggaacaaagcaatctccctaattaaggtaacatctcatacaccttgttttagatcggaagcaggaagttatggaaaagatacgaaaggtcttataaggcaacaccaattcgaaaaagttgaaatagtccaaattgttcatcctgatcaatccgataatgcacttgaggatttattaagcaatgccgaggaaattcttcagcttttagaattaccatatcaagttgttcaattatgtggaggtgacttaggattttcgtcagcaaaaacttatgat

SEQ ID NO: 296955 - DNA, 442 bp, Unknown
  Bacterial polypeptide expressing nucleotide sequence isolated from the Sargasso Sea
gatgagacaacatcaattttataaagttgaacttgtaagtatagttgaaccaaaaaattgcacctctgaattagatcgaatgttaaattgtgcagaagaaattttaaaaaaattagaaattccttatcaaatagtactattatcatcaggtgacatgggttttagcgctgaaaaaacttttgatattgaggtttggataccttctgaaaaaaaatatagagaaatctcaagctgttcatcttgcggatcttttcaagcaagaagaatgggagcaaaatataaaacatctaaaggaaacgattatgttggaactttaaatggttccggattagctgtaggaagattaatgatagctttattagaaaataatcaaaatgaagatggatcaattaacattccaactattttaaaaaaatatatgaataatttagataaaatttga

SEQ ID NO: 296956 - DNA, 760 bp, Unknown
  Bacterial polypeptide expressing nucleotide sequence isolated from the Sargasso Sea
atgcatgatattacttttataagagaaaatcctgatttttttgatgaattgttaaaaaagagatttattgatccaaaatcaaatgaaattatctctcttgataaaaaaaaaagagacattttaactaaatctcaagaattacgagcagaaagaaagaatttatcatcttcttttgcaaatcttaatgaaggtgataaagctgatttacaaaaaaaagtacaattaattaaaaacaagattgatgaactagaaaacgatatttcaataatagatgagcaattaaaaaataatttatctagtctgcctaacctcccacataaagatgtacctgtgggaaaagatgaaacctcaaacaaattaattaaacaagttggaaaaattccttcatttagttttactccaaaatcccactatgaacttggagagaatttagaaatgattgattttgagcaagctggaaaagtatcaggtacaaggtttgtatatttaaagaaaaagatggctcaattagaaagagctatagctaattttatgttagataaacacacaaatgaatttaattatacagaaattaatccacctaacttagttagagatgctgcagcttatggaactgggcaattgccaaaattttcagaagatttatttaaaactaacacaaatcattggttgataccaactgctgaggtacctttgactaatttagtattagatacaatcgtatctgataaaaatttgcccctgaggtacacggcttgac

SEQ ID NO: 296957 - DNA, 832 bp, Unknown
  Bacterial polypeptide expressing nucleotide sequence isolated from the Sargasso Sea
gaaaaattaggtttaattgatgtagaaaaagcctcaagtgtttcaggttctagattttcatacttatttggagatttggtgaaaatgcaatttaatcttgtttcttatgcgatgaataaattgtctgaaagaggattcaatccaacaattcccccagttttggttagagaaaatgctctttttggaactggtttttttcctgatgattcagatcaagtatatgagattccaaatgatgacctatttctagttggtacatcagaagtatcacttgctgctttacacggcgatgaaattctcgattttgacaaactacctatcagatacgcaggatattcaacttgctttaggagagaagctggaacctatggtaaagacacaacagggatatttagagtacatcaatttgataaagtagaaatgttttccttttgcactcctgaaaaatcagaagaagaacatgaatttattctctcagttgaagaagagattttacaagagctagaaattccttatagagtcgttgatgtttgcactggtgatctaggttcgtctgctgctaaaaaatttgatattgaagcatggataccaagccaaaatacatatagagaagtaacatcatgttcaaatacgacggattttcaagctagaagattaaatattcgtacaaaagtagataaagattcagctttactccatacattaaacggtacagctattgcagtaggaaggatactgatagctctacttgagaataatcaaaccgaagatggagtaatagaattttctgatagcttgggaaatattttaggggttgaaaagttaagctaaa

SEQ ID NO: 296958 - DNA, 400 bp, Unknown
  Bacterial polypeptide expressing nucleotide sequence isolated from the Sargasso Sea
ccccgatcactccgaagaggcgcaccaacagatcacggccgatgcagaggccgtgcttcaggcgctggagctgccctatcgggtcttggacctctgcaccgccgacctcggcttttccgcccgccggacctacgacctcgaggtttggctgccgggagcaggggcttaccgggaaatctccagttgcagcgtctgtggcgatttccaggcgcgacggtcctccattcgcaccaaggagggcaaggccacaaagttggttcacaccctgaacggcagtggcctggccgtcggcagaaccatggcggccctgttggaaaacggccaacagcccgacggcagcgtcctgctgcccaaagcgctggtgccctacgtcggccgcgagcgactccagccagaatga

SEQ ID NO: 296959 - DNA, 130 bp, Unknown
  Bacterial polypeptide expressing nucleotide sequence isolated from the Sargasso Sea
gaagaaacttacgtgccgtacctggttaaccgtcaggcgctcgagggcacaggtcagctgcctaagtttgaagaagatctctttaaaattccgcaggctcagggtgataaagatctgtatacgattccta

SEQ ID NO: 296960 - DNA, 712 bp, Unknown
  Bacterial polypeptide expressing nucleotide sequence isolated from the Sargasso Sea
agacagatttgcacttctagagagagctttgataaattttatgttagatatccacactacagagtttaactataaagaaatttcaccacctttaatagttaatgaggacgtaatgttcggtactggtcaattaccaaaatttgaagatgaccaatttgaaataaaatttgaaaaatcagaccaaagaaaatttttgattcctactgcagaagttgttcttactaatttggtgagaaaatctctattaaccaaggatcaattaccccagaggtatgtagcttcgacaccttgttttcgtaaagaggcaggtagttatggtaaagacaccaaaggaatcattaggcagcaccaattttataaagtcgaacttgtaagcatagtggagcctaaagattgtgaattagaacttaatagaatgttaaaatgtgcgagagagatattagagagactaaaaataccttatcaaataattttattatcttctggagatatgggatttagtgcagaaaagacattcgatattgaagcttggataccttccgaaaaaatataccgagaaatttcaagctgttcatcttgtggttcttttcaagcgagaaggatgggtgctaaatataaatcgcaaaatggtaacgattttgttggaacattaaatggatcaggtttagcagtaggtagattaatgatagctttacttgaaaataatcagaat

SEQ ID NO: 296961 - DNA, 751 bp, Unknown
  Bacterial polypeptide expressing nucleotide sequence isolated from the Sargasso Sea
aaatctaaagaaatatcagtggaattagaaaaaatttctgaacaacaaaaaaaaactaaaactgaattagataatattttatcaagaataccaaatatacctcatcaagatgttccaaatgggaaagatgaaaatgataatgtagaagttttaaaagatggaaaagttcctgagtttgattttaaacctaaatctcattacgaacttggtgaaaaattaggcatgcttgattttgatcttgcaacaaaaaccactggatcaagatttgtatttgttaaaaaagagttagcattactagaacgagctttatctaactttatgctagatactcatattgttcaaaatggctatcaagagatttcacctccattgattgcctctgataatacaatgtatggaacaggccaattaccaaaatttgaaaacgatcaatttgaaataaaatttgatgaaggatctgatagaaaatttttaattccaaccgctgaagtaattttaacaaatattgttaaagataaaatcgttgaccaaaaagatttacctatgagatttgttgcctcaacaccttgttttagaaaagaagctggtagttatggcaaagacacaaaaggaatgattagacaacatcaattttataaagttgaaatggttagtattgtagaaaaagaaaattgccttgaggaattagagcgaatgacaaactgtgcaacagatatactggataagttagaattaccttatagaaaagtaa

SEQ ID NO: 296962 - DNA, 853 bp, Unknown
  Bacterial polypeptide expressing nucleotide sequence isolated from the Sargasso Sea
tcttgagcatgaaaaaaaaaatatttctaaatcaaaagatgaaaaactattttctaaatctaaagaaattactaaaaatatagaacaaattagtaaagaacaaattcaatgtaaaatagatttagataaaatattatcttcaataccaaatttacctttaaatgatgttccattaggaaaagacgaaagtagcaataaggaaattaaaaaattaggtgaaataaaaaattttgattttactccaaaatctcactttgaaataggtgaaaaacttaagatgttagattttgaattggcttctaaaaccactggttctagatttgtttttgttaaagatcaatttgcagctttagaaagagcaatatctaattttatgattgatactcatacacaaaaaaatggatataaagaaatttcaccaccaataattgcttctgaacatagtatgtatggaactggccaactacctaaattcgaaaatgatcaatttgaaataaaatttgatgaaaaaagcgatagaaaatttcttattccaacagctgaagttattttaactaacatggtaagagatcaaatattaaatcataaagatctacctattagattagttgcatctacaccatgttttagaaaagaagctgggagttatggcaaagatacaaaaggaatgattagacagcatcaattttataaagttgaattagtaagtgttgttgaaaaccataaatgtctagatgagctagaaagaatgacagattgcgctacaatgattttagataaattaaaactaccttatagaaaaattatacttagtacaggagatatgggttttagtgcagaaaaaacttatgac

SEQ ID NO: 296963 - DNA, 698 bp, Unknown
  Bacterial polypeptide expressing nucleotide sequence isolated from the Sargasso Sea
ttggtcagagatgaagcaatgtatggaccaaatcaattaccctaaatttgctgaagacagctataaaacaacaaacggctggtggttaataccaacatcagaagtaactctaacaaatacagtctcaggccaaaacttaaacgaaaccgatttacctattaggctcactgcgcacactttgtgtttccgatcagaagcaggatccgcaggcaaggatacatctggaatgcttcggcaacatcaattcgaaaaggtcgagatggtatcaataacccacccagatcagtcactggaagaacactccagaatgaccaaatgtgctcaggctatattagaaaagctggggctcccctatagaactgttgtgttatgtacgggtgacatgggctttggcgctcgaaaaactcacgatttagaagtatggttaccaggacaaggtaagtatagggaaatttcgtctatttcggtttgtggagattttcaagccagacggatgcttgccagatttaaacctgctgaaggtggaaaacttcagtttgtccataccctgaatggatccggagtggcagttggtcggtgcttaattgcagttttagagaacggccaaaatgaagacgggtccgtgtccttacctccagtattaagtccttatttaggaaattgtacccgtataaattctaccgggggcttggaataac

SEQ ID NO: 296964 - DNA, 775 bp, Unknown
  Bacterial polypeptide expressing nucleotide sequence isolated from the Sargasso Sea
tcttataggaaatggtgccagattagagagggcattaattaattttatgctcgatatgcatactaaaaatggttacttggagttaatgccgcctgctttagtaaattcagaaagtcttaccggatctggtcaattacctaaattttcaaatgaaagttttaagtgttccaatgacgatttatggctttccccaacagctgaagttccactaactgcttttcatagaaacgagcttattgatcccaagcaattacctattaagtatgttgcatatagtccatgttttaggagagaagctggtagttatggaagggatactaaaggtttaataagacttcatcaatttaataaggttgaactctattggttttgtgatccaagtaaatctttagaagctcataaaaagattacttctgatgcagaaagcattttaaaaaatctcaacttaccctacagattaatagatatttgtactggagacttaggcttttcttctagtagaacttttgatcttgaagtttggcttcccagtagtaaatgttatagagaaatttcaagttgcagtaattgccttgactttcaagcacgtagatcatcaataagatcaaaaattgataaaaaaaatacatatatacataccttaaatggcagtgggcttgctataggaagaacaatggcagcgattcttgaaaatggccaacaatctgatggtagcgttaagattccagatgctctggttccatattttggatcaaattttttaaaaactgcttaa

SEQ ID NO: 296965 - DNA, 903 bp, Unknown
  Bacterial polypeptide expressing nucleotide sequence isolated from the Sargasso Sea
ccaaaataaattaaatgatcaaataaatccaattataaattttattcccaacattgctttagacgaagttccagttggtaaggatgaaaaatcaaataaggaattgaaaattgttggaaatgttccaaaatttgattttaaaattaaatcacattatgaaattggaaaaaatttagctttaatggattttgacacagcaacaaagacatcgggttctagatttgtttttttaaaaggtaaattggcccaattagaaagagccatatctaattttatgcttgatatacatacaaaagaatttggttacaatgaaatttcacctcctttaattgtaactgaagatactatgtttggtacaggccaacttccaaaatttgaaaatgatcaatttgaagttaaattagactcggaacagagaaagtacttaattccaacagcggaagtaattttaacaaatatggttaaagacaatttaattaataaaaaagatcttcctttaagattagtagcatctacagcctgcttcaggaaagaggcgggaagttatggaaaagatacaaaaggtatgctgagacaacatcaattttataaagttgaattggttagcatagttgagtcaacaaaatgtttggatgaactagaaagaatgatctcttgtgcggaagaaattttaaaaagattaaaacttccttataggaccgttcttttgtctactggcgatatgggttttagttctgaaaaaacagttgatcttgaagtatggattccttcagaaaacaaatatagagaaatttcaagctgttcttcttgtggtcaatttcaatctagaaggatgaaaggtaagtacaaagatgaaaaaaataaattggactttttaggaacgttaaatggttcaagattggc

SEQ ID NO: 296966 - DNA, 514 bp, Unknown
  Bacterial polypeptide expressing nucleotide sequence isolated from the Sargasso Sea
atcagatatgcaggatattcaacttgctttagaagagaagctggaacttatgggaaagacacaacaggaatctttagagtacatcaatttgataaagtagaaatgttttctttttgtaatcctgaaaaatcagaagaagaacatgaatttattctctcagttgaagaagagattttacaagagctagaaattccttacagagtcgtcgatgtttgtactggtgatctaggttcatctgctgctaaaaaatttgatatcgaagcatggataccaagtcagaatacatatagagaagtaacatcttgttcaaacacaacggattttcaggccagaaggttaaatattcgtacaaaagttgaaaaagatacagctttactccatacattaaacggtactgctattgctgtgggaagaatattgatagctctactcgaaaataatcaaaccgaagacgggggagtagaattttctgatagcttggggaatattttagggattgaaaagttaagctaaa

SEQ ID NO: 296967 - DNA, 751 bp, Unknown
  Bacterial polypeptide expressing nucleotide sequence isolated from the Sargasso Sea
gatgcataatattaaagatttacgaaaaaatatacaattatttaaaaaaaagtttcttgatagaaatttaaactttgatgaaaaattatttgaaaagttagatacgctcaatagaaaattaatttttgataaagaaaaattagaacaagaaaaaaaaatattgtcaaaaaataaagatagttcaaatttttcaaaatctagtgaaatttcacaaaaaatagaaaatgtttctaatgagcagatggatgtacaaaataaattaaataatatactttttttacttccaaatattgctcttgatgatgttcctgtaggaaaagatgacaaaatgaataaaaatattaaaaagattggtgaaattaaaaaatttccttttaaaattaaatctcatgttgatattggtttgataaacaagagtatagattttgatatttctataaaactatctggatccagattcgttgttttaaaagataaaatagctcttttagaaagagctttaataaattttatgttagatgttcatacaaaagaatttaaatacacagaaatatccccacctttgattgttaatgaggatgtaatgtttggaactggtcagttacctaaatttgaagatgatcaatttgaaataaattttgaaaattctgaaataagaaaatttcttatacctactgctgaagttgttttaactaacttagttagaaaaactttgttgccaaaagatcaattaccattacgatacgtagcc

SEQ ID NO: 296968 - DNA, 752 bp, Unknown
  Bacterial polypeptide expressing nucleotide sequence isolated from the Sargasso Sea
aatggaaaaaaaaaatatatcaaaaaataaagatgaaaaactttttgctaaatcaaaagaaatatcgtctaaaattgatgatttagataaaaaacaatctttaattaaaaaacagcttgatgatatattgtcgaccattcctaacataccgttaaatgatgttcctgttggtaaagacgaaaatgacaacaaagagattttaaaatcaggagaaataaaaaatttttcatttaatccaaaatctcattatgaaattggtgaaaagttaaatatgcttgattttgatttagctacaaaaacaacgggctcaagatttgtttttgttaaggataaactagcttcactagaaagagctatagcaaattttatgatagatacgcatacaaaaattaatggctatactgaaatatccccgcctttattggccactgatgaaactatgtttggtactggacaactaccaaaatttgaaaatgatcaatttgaaataaaacttgatgataaagaaggtcgtaaatttttaattcctacagcggaagtaattttaacaaatatggtaaaaaatcaaataattaacttaaatttattaccaataagagttgtagcatcaactccatgttttagaaaagaggctggtagctatggtaaagataccaaaggcatgatcagacaacaccagttttataaagtagaacttgtaagtatagttgaaaatagcaaatgccttgatgagttagaacgtatgactaact

SEQ ID NO: 296969 - DNA, 790 bp, Unknown
  Bacterial polypeptide expressing nucleotide sequence isolated from the Sargasso Sea
atttcttcaaaaattaaaaaattatcaaatgaacaggttaagacaaaatctgaattagacaatattctttcatcaataccaaatattcccaattctgatgttcccgaaggaagcaatgaagagtttaacaaagtaattaaaactagtggagaaattaaagctaaaaattttaaagaaaaatctcattacgagttaggtgaaaaattaaaaatgctagattttgatttagcaacaaaaacaactggctctagatttgtttttgttaaagataaattggctatgttggaaagagctttgtccaattttatgttggatattcatattttagaaaatggatataaagaaatatctccgccattgatggcctcagaaaatactatgtacggaacaggtcagttgccaaaatttgaaaacgatcaatttgaaatcaaattagacaaagatgatgatagaaaatttcttattcctacagctgaagtaatacttacaaatgtagtcaaaaatcaaatcttaaatttaagtgatttaccattaagacttgttgcctctacgccttgttttagaaaagaagcgggtagttatggaaaagataccaagggtatgatacgtcaacatcaattttataaagtagaattagtaagtattgttgaaaattctaattgtttagatgaattagaaagaatgactaactgcgcaactaagattttagataaattaatactaccttatagaaaaattattttatgtactggagatatgggattcagtgctgaaaaaacttacgatatag

SEQ ID NO: 296970 - DNA, 802 bp, Unknown
  Bacterial polypeptide expressing nucleotide sequence isolated from the Sargasso Sea
aagtcacactatgaattaggtgaaaaattaggaatgctagattttgacttggcatcaaaaactactggttcaagatttgtctttgttaaggatcaattagctttgctggaaagagcactttctaattttatgctagacacacatatttcagaaaatgggtataaagaaatttcaccaccattaatggcatcagaagagactatgtatggcacaggtcaattaccaaaatttgaaaatgatcaatttgaaattaagttagacaaaaatgatgaaagaaaatttcttattcctactgctgaagttattttaacaaatgtagttaaaaatcaaataatagaccaaaatgatttacctctaagattagttgcctcaacaccatgttttagaaaagaagcaggtagttacggtaaagataccaaaggcatgataaggcagcatcaattttataaagttgagttagtaagcattgttcaaaatgataaatgtttagatgagctagagagaatgactaactgcgctacgaaaattcttgacaaattacaactaccctacagaaaaataattttatgctcaggagacatgggctttagcgcagaaaaaacttatgacatagaagtttggttgccatctgaaaaaaaatatagagaaatatctagctgttcatcttgtggttcatttcaagcaagaaggatgaattcaagatatagaaatgcaaataatgaaaaaatttttacaggcacattgaatggtagtggcctagctataggaagaacattaattgcaataaggaaaacttcaagaa

SEQ ID NO: 296971 - DNA, 296 bp, Unknown
  Bacterial polypeptide expressing nucleotide sequence isolated from the Sargasso Sea
tggagatatgggttttagtgctgaaaaaacttacgatatcgaggcatggatcccatcagaagacaagtttagagaaatatcaagctgttcttcttgtggaacttttcaagccagaagaatgggagcaaaatataaatctgataatggaaatgaatttgttggaacactaaatggttctggcttagctgttggaaggctaatgatatctttactagagaacaatcaaaatgaggatggctcaattaatatcccaaatgtattaaaaaaatacatgaataatctagaaaaaatttaat

SEQ ID NO: 296972 - DNA, 490 bp, Unknown
  Bacterial polypeptide expressing nucleotide sequence isolated from the Sargasso Sea
ggttttcgtaaagaagcaggtagttatggcaaagatacaaaaggtatgattaggcaacatcaattttataaagttgaattagtgagtattgttgagccaaaagattgtaatgtagaactcgatcgaatgataaattgtgcaaaatacatattagaaaagttagaaataccttttcaaatcgtactattatgcactggagatatgggtttcagtgctgaaaaaacttacgatatcgaagcatggataccttcagaaaacaaatatcgtgaaatctcaagctgctcttcatgcggcacctttcaggctagaaggatgggtgctaaatataaatctcaaaaaggaaatgatttcttgggtactttaaacggctcaggattggcagttggtagattattaattgcattgatagaaaataatcaaaacgaagatggcacaattactattccaaacgtcttaaaaaaatatatgcataatcaagataaaatttgat

SEQ ID NO: 296973 - DNA, 940 bp, Unknown
  Bacterial polypeptide expressing nucleotide sequence isolated from the Sargasso Sea
aaaagataaaatcaatagagagcttattaataaaaaggaacttttggaacaagaaaaaaaagctttatcaaaatcaaaagaaaaatctaattttgaaaaatcaaaaaaactttcaaatgaaattgaaaagatcatatccaatcaaaaaaatactcaaagggagattaatcaaataatttttaatttgcctaacatcgcaacggaagatgtacctgttgctaaagatcaaacggggaacaaattaataaggaaatttggtaatataaaaaaatttgattttaaattaaaatctcatgtagagttaggacaaaaaaacaaaggtattgattttgatacatctacaaaattatcaggatcaagatttgtattgttacgagataattttgcaaaattagagagagctttgattaacttcatgttagatattcatgtgaaccaattcaaatatattgaaatctcacctccattaatagtgaatgaagatgtaatgtttggaaccggacaacttcctaaatttgaggaagatcaatttgaattaaaacttaataattctgatgaaagaaaatttcttattcctacggcagaagtcgtccttacaaatatagtaaaaaatagtaatttaaatttaaaagatcttcctatgagattcgtggcatctactccatgttttagaaaggaagctggaagttatggtaaagatacaagaggaataatgagacaacatcaattctataaagtcgaactagtaagtattgttgagccaaacaattgtaaagatgaattagagagaatgttaaattgtgctgaagaaattttaaaaaaattagagataccttatcaagtaatgctattatcctctggagatatgggatttagtgctgaaaaaactttcgatatagaagtttggataccttcagaaaataattatagagaaattcaa

SEQ ID NO: 296974 - DNA, 732 bp, Unknown
  Bacterial polypeptide expressing nucleotide sequence isolated from the Sargasso Sea
gatgcataatttaaaagaattaagaaaaaatttagatgtaactaaaaaaaaattaaaagatagaaatgcaaattttgatataaaaagattcaatgaaaaagacaaattaaatagagatttaattaataaaaaagaaaaattagagcaggaaaaaaaactattatccaaatctaaagataaatcaaattttgaaaagtctaaaaaaatttcaaacgacattatagatttgtcaaaaaaacaaaatataatccaaaatgaattggataaaattatcttttctctacctaatttagctcttgatgatgttccgatcggtaaagatgaaagcttcaataaattaattaaaaaaaaaggtgataaaaaaaaatttttatttaaagtaaaatctcacgtagagcttggagctaaagaaaataatattgattttgaaacttcaagtaagttatctggctcaagatttgtagttcttaaaggaaattatgcattactggaaagagcgcttataaattttatgttagacacacatgtaaataactttaaatatattgagatttctcctccactaatagttaatgaggatgttatgtttggtacaggccaacttccaaaatttgaagaagatcaatttgaaataaaatttgataattcagaacaaagaaaatttctaataccaactgctgaagttgtattaaccaatttagttagaaaatcgataattgaaaaaaaagaatt

SEQ ID NO: 296975 - DNA, 730 bp, Unknown
  Bacterial polypeptide expressing nucleotide sequence isolated from the Sargasso Sea
gtattctaacgatgaaaatctagagaatatgacaaaaaatacttttgttgatcatagtgaaattggaaaacttcttaatctttatgatcaggatatagcagtaaaaatgtcaagttcacgatttagcttattgtttggaagttttgcccaacttcatagagcattaggatcttttatgattgatgaacatataaataatcatggttatactgaagtaaacgtgcctttaattgttaattctgattcattgttaggaacaggccagttgccaaaattcaaagatgatctttttgagttaaaaaataaaaaaaatttctttttaatacctacagcagaggtgcccttaacaaatatttttcaaaataagatttttgacgaagatgaacttcccacaaaatatacatctttatcttattgtttcaggtcagaggctggctcatatggaaaagatacaaaaggattaattagacaacatcagtttgaaaaagttgagcttgttaatgctgttatgccttgtaagtctgatgaagcattagattcattattgaattgcgctgaaaaaattttacaactattagatcttccatatagaaaagttttattatgctctggagacacaggcttttcatcgtatattacatatgaccttgaagtttggatgccttcacaaaattcatatagagagatttcgtcgtgcagtaactttggagattttcaggcaagaaggctt

SEQ ID NO: 296976 - DNA, 346 bp, Unknown
  Bacterial polypeptide expressing nucleotide sequence isolated from the Sargasso Sea
gttgccgtaccgcaaagtgttgctttgtactggtgatatgggctttggtgcatgtaaaacctacgatcttgaagtatggctgcctgcgcaaaatacctatcgtgaaatttcttcatgttcaaacatgttggacttccaagcacgacgaatgcaggctagattccgtaacccggaaacgaataaaactgaacttcttcacacattgaatggctctggtttagcggtagggcgtacgcttgttgctattttagagaacaatcagcaggcagatggaagcgttacgattccaaaagcgcttgtgccttacatggcaggccaagaggttatcacagcgaatagcgtgtaa

SEQ ID NO: 296977 - DNA, 904 bp, Unknown
  Bacterial polypeptide expressing nucleotide sequence isolated from the Sargasso Sea
ggcggtggatgaggctaaggcacaggtggccgacgccctgcagaccattgatacagaactggataaggaagtggccagtgccaaggcgattcaggacgaaattcgtgaatacctgatgggcattcccaacgtcccgcaagaagccgtacctgcaggcaatgatgaagacgacaatgtggaagtgcgccgctggggcacaccgaaaacactgccgtttgagccgaaggaccatgtggatattggtgaagcgctggagggcgggctcgattttgaacgcgcggctaagctttccggtgcacgttttgcagtgatgagcggtggcctagcccgcatgcaccgggcgctgattgattttatgctggatatacacagcgacgagcatggctatcaggaagtgtacgtgcctttcctagtggggccggaagcgctacgaggaactggccagctacccaagttcgctgaagacctgtttaaaatagaaggtgagcgtgaactctatttgattcccaccgctgaagtgccggtgaccaatctggccgcggatgaaattctcgaagcgaacaccatgccccgtcgttatacctgtcatacaccgtgttttcgttctgaagcgggcagccacggtagagatacccgcggtatgattcgccagcatcagttcgaaaaagtggagctggtgcagatggttcgccctgaagagtccgatgcggcgctggaggcactgaccggccatgcggaagccattttacagaaactggatttgccatatcgagtggtgattctttgtggcggtgatttgggcttttcgtcttccaaaacctatgacatcgaagtctggcttcccagccagcagtgctatcgggaaatttcttcctgttccaacttccgtgattatcaatcacgt

SEQ ID NO: 296978 - DNA, 679 bp, Unknown
  Bacterial polypeptide expressing nucleotide sequence isolated from the Sargasso Sea
atgtttggtacaggacaattgccaaaatttgaaaatgatcaatttgaaattaaattagaagaagaaaatgatcgtaaatttttaattcctactgctgaagtaattttgactaatatggtaaaaaatcaaatattaaatactcaagatttgcctatgagattagttgcttcaacaccttgctttagaaaagaagctggtagttatggaaaagacactaaaggcatgatcagacaacatcaattttataaagtagaactggtaagtatagttgaaaatagtcagtgtataaatgagctagaaagaatgactaattgtgccagaatgatccttgataaattgaagttaccttatagacaaataattttaagcactggagacatgggctttagtgctgaaaaaacatatgatatagaagtttggttaccttctgaaaataaatatagagaaatatctagttgttcttcttgtggaacttttcaagctagaagaatgaaagcaagatacaaaaattcaaatagtgagactttatttcttggaactttaaatggtagcggtttagctgtaggaaggacacttattgctattttggagaattatcaaactcaagatggatcagttataataccagatgttttgaaaccttacatgggcaatattgataaaataggaattaattaac

SEQ ID NO: 296979 - DNA, 582 bp, Unknown
  Bacterial polypeptide expressing nucleotide sequence isolated from the Sargasso Sea
aagtaattttaactaatattgttaaagataaaatcatagatatcaaaaatcttccaatgagatttgttgcttcaaccccttgttttagaaaagaagcaggtagttatggaaaagatacaaaaggaatgattagacaacatcaattttataaagttgaaatggtgagcattgtagagcaagaaaaatgttttgaggaacttgaaagaatgactaattgtgcaactggtattttggatcttttagaattgccttatagaaagatgattttatgtagtggtgatatgggtttcagtgctgaaaaaacttacgatattgaagtttggctaccctctgaaaataaatatagagaaatttcttcttgttcatcatgcgccacattccaagcagtgagaatgaaagctaggtataagggaccaaataatgaaactctttacgcaggcactttaaatggtagtggcctagcagttggtcgaactcttattgcaattctagaaaattatcagcaaaaagacgggtcaataactattccaaaaatacttagaccttatatgaacaatttagaaaaaatttcactcaattaaa

SEQ ID NO: 296980 - DNA, 887 bp, Unknown
  Bacterial polypeptide expressing nucleotide sequence isolated from the Sargasso Sea
gggtaacaaacctacttttgattttattcctaaaccacacttcgaaattggggaaaatgctaattcaatgaattttgaaactgcaacaaaattatcaggctcaagatttgttattttaaaaggtcaactcgctaaattagagagagctattgcaaattttatgattgataaacatacttcaataaatggatatattgaattacatgtaccttatttggtaaaagaagatacattatatggcacgggacaattaccaaagtttgcagatgatttatttactgcaggtgaagatcattggttaatacctacagctgaaataccacttaccgcacttcatagtaatgaaatattaaatgttgagcaattacctatgcgagttacttcttatacaccttgctttagatctgaggctggtgctgctggaaaagatactagaggaatgctaagacaacatcaatttactaaagttgaactggtttcattagtagagcctaaacaatcaaaagacgaattggagagaatgctcagttgtgctgaaggaattcttcaagatctagatcttcattacagagtaatgacattatgtactggggatatgggttttaatgcaaataaaacttatgatatagaggtatggctacctggtgaaaataagtatagagaaatttcaagttgttcaaattgtggagattttcaatcaagaagaatgaatactagatataaacaaaatgataaaaatacatatatacatactttaaatggttcaggacttgcagtaggaagaactttgatagctatattagaaaattaccaaactactgatggaaatgttcaaattccaagagtattaaaaaaatattttgataatcaagataatctgttttagt

SEQ ID NO: 296981 - DNA, 706 bp, Unknown
  Bacterial polypeptide expressing nucleotide sequence isolated from the Sargasso Sea
atctcctccattattagctacagaaaatacaatgtatggtacagggcaactgcctaaatttgaaaatgatcagtttgaaataaaattagatggaaacgataaaaaatatttaattccaacggctgaagttattttaactaatatggttaaaaatcaaattttaaacattaatgatttacctatgagattagtagcttcaactccttgctttagaaaggaagctggtagttatggaaaagatacaaaaggaatgatccgtcaacatcaattttataaagttgaattagttagtattgttgaaattaatagttgtattgctgaacttgaacgtatgactgaatgtgcaacagacattttagatcaattaaaattaccatacagaaaaattattttatcaactggagacatgggtttcagtgcagaaaaaacttacgatttagaagtatggttaccttctgagaataagtatagagagatatcaagttgttcatcatgtggttcttttcaagcaagaagaatgaaagctagatataaaaacaaagataataaaacaataccagttggtactttaaacggaagtggtttagctgtcggaagaactttaatagcaataattgaaaattatcaaacagaggatggttctgtaattattccagatgttttaaaaccatatatgaacaatattgataaaatttctaacaattag

SEQ ID NO: 296982 - DNA, 548 bp, Unknown
  Bacterial polypeptide expressing nucleotide sequence isolated from the Sargasso Sea
tggtgatgaaatactagagcatgattcattgccattaagatatgctggattttcaacatgctttaggagagaagcaggaacttacgggaaagacacaacaggaatctttcgagttcatcagtttgataaagtagaaatgttttctttttgtgatcccgaaaaatcaaaagaagagcacgaatacctcttatctttagaggaggaaatattaaatgatttagagattccatatagggttgtagatgtttgttcaggagatttaggagcttctgctgcaaagaagtacgacatagaggcctggattcctagtcagaataactatagagaagtaacttcttgctcaaatacaactgattatcaagcaagaagattaaatattaggacaaaaaaagataaagaagtatctttgatacatacactcaatggaacagccttagcagttggaagaatattgatagctttaattgaaaataatcaacaagaagacgggaccgttaacttttcagataatctaacaaaaataatcggggttgaaaagttaagctaat

SEQ ID NO: 296983 - DNA, 804 bp, Unknown
  Bacterial polypeptide expressing nucleotide sequence isolated from the Sargasso Sea
tacaggttcaggtttgtttttgttaaaagtaaattggcactattagatttagctttatcaaattttatgttggatattcatatacaaaaaaatggttatgaagaaatttcaccacctttactcgcttcagaaaatactatgtttggtactggtcaattacccaaatttgagaatgatcaatttgaagttaaattagataaagaaactgaaagaaaatttcttatacctactgctgaagtaattttaaccaatattgttaaagacaaaattttagatgtaaaatctttacccttgagatttgttgcttcaaccccttgttttagaaaagaagctgggagctatggtaaggatacaaaaggaatgattagacagcaccaattttataaagttgaaatggttagtgttgtagagcaaaataaatgtcttgaggagttagaaagaatgactaactgtgccacaggcatattagatcttttagaattaccttacagaaagatgattttatgtagtggtgatatgggatttagttctgaaaaaacatatgacattgaagtttggttaccttcagaaaataagtatagagaaatttcatcttgttcatcatgctctactttccaagcagtaagaatgaaaactagatacaaagactcgaataaggagacactttatgtaggtactttaaacggtagtggactagctataggacgaactctcattgctatattagaaaattatcagcaaaaagatggctcaataactattccaaaagtactaaaaccttatatgaacaatttggaaaaaatt

SEQ ID NO: 296984 - DNA, 845 bp, Unknown
  Bacterial polypeptide expressing nucleotide sequence isolated from the Sargasso Sea
gaaaaaattaaattagaaattaacactttaaaagaattagaaaatttaaaaaacgatgaattgaaatctatattatcaagattacctaatattcctcatgaaactactccaatagggatttcagaaaatgacaatcagttatatagagaatggggtcaaaaaccacagtttgattttaaacctaagcagcattttcaaataggcgaggatattaatatgatgaattttgaaattgcagctaagctttcaggttcaagatttgtggtattaaaaaacaaactttctaaacttgaaagagcaatatcaaattttatgctagataagcatacaacagaaaatggatatagtgaatttagtttaccatacttggtaaaagatgatgctttgtatggaacagggcagttgccaaaattttctgaagacctttttacagcaggagaaaatcattggttaattcctactgcagaagttcctttaactaatttagtaagagaaaataatttaaatattaactctttaccgatgagagttacctcttacactccatgttttcgatctgaagcaggagctgcaggaaaagatacgagaggaatgttaagacagcatcaatttacaaaagtagagttagtttcaatagttgagccagagcaatcaaatcaagaattagaaagaatgcttgaaagtgctgaaagtattttaaaagatttaaatttacattatcgtgttatgactttgtgtactggtgatatgggttttgccgcacaaaaaacatatgatattgaagtatggttaccaggtgaaaataattatagagaaatatcaagttgctctaattgtggtgattt

SEQ ID NO: 296985 - DNA, 235 bp, Unknown
  Bacterial polypeptide expressing nucleotide sequence isolated from the Sargasso Sea
tttggtaaaagattctgctctttttggaacaggacaattacctaaatttggtgaagatttatttactgctggggaagatcattggttaataccaactgctgaagttcctttaacaaacatggttagagaggaaatacttaaccaaaatcaattacccattagagtaacttcttataccccctgttttaaatcagaggctggtgcagctggtaaggatactcgtggtatgttaaga

SEQ ID NO: 296986 - DNA, 917 bp, Unknown
  Bacterial polypeptide expressing nucleotide sequence isolated from the Sargasso Sea
gatgcataatttaaaagaaattagaaaagatttttcaaaatttgaaaatgatcttgaaaaacgttcagttaaaattaattttaatcatttaaaaaaactcgatcagttaaatagagatttaattcaaaagaaagaaaatttggaaaaagaaaaaaaagatatttcaaaatctaaagatgaaaatttattcaaaaaatctaaagaaatatccttagaattagaaaagatttctgagcaacaaaaaaattctaaaaatgaattggataatattttatcaagtataccaaacatacctcatcaagatgttccaaatggaaaagatgaaaatgataatgttgaagttttaaaagctgggaaagtccctgaatttgattttaaacctaaatctcattatgaacttggtgaaaacttaggcatgcttgattttaatcttgcaacaaaaacaacaggatcaaggtttgtatttgttaaaaaagagctagcattactagagcgagctttatctaactttatgctagatactcatattgttcaaaatggctacgaagagatttcacccccattgattgcctctgataatacaatgtatggaactggtcaattaccaaaatttgaaaacgatcaatttgaaataaaatttgatgaaggatctgatagaaaatttttaattccaacagctgaagtaatattaactaatattgttaaagataaaattgttgatcaaaaagatttacctatgagatttgttgcctcaacaccatgttttagaaaagaagcaggcagttatggaaaagacacaagaggaatgattaggcaacatcaattttataaagttgagatggttagtattgttgaaaaagaaaattgcctagaagatttagagcgaatgactaattgtgcgacggatattctgggtg

SEQ ID NO: 296987 - DNA, 314 bp, Unknown
  Bacterial polypeptide expressing nucleotide sequence isolated from the Sargasso Sea
aaaaaagacttatgatttagaagtttggcttcctggacaaaataatggaaagggagcctacagagagatttcttcatgttcaaattgtggagatttccaagcaagaagaatgaatgcaaaatttaaggataaagaaagtaataagatagattttttacatactcttaatggatctggattggctataggaagaactattattgctattttagaaaattatcaacaaattgatagttcaattttaattccagaagttcttgtgccttatatgaaaggcattaccaaaattgaaaatcctttcaatagcaaatgaa

SEQ ID NO: 296988 - DNA, 826 bp, Unknown
  Bacterial polypeptide expressing nucleotide sequence isolated from the Sargasso Sea
ctgggatagtgagaaatcttcagtaatagccaaaagtagatttgtcactcttttcaaccatgctgcaaaacttgagagatcactcatcaatttcatgcttgatttacatgtaaagaaaggatacttagaagttcttcctccagctcttataaacacagctagcctgactggatctggacagttaccaaaatttgcagaagaaagttttcgatgtgctgatgatgatttatggctaactcctactgctgaagttccaataacatctctccatcgtggagagatcatccctagagatttgctgccattaaaatacgcagcttatagtccttgctttagaagagaagctggaagttacggcagagatacgagaggtctaattagacttcatcaattcaataaagttgaactttattggttctctactccagaaaaatcctcagaagctttagaacaaatcacatctgacgctgaatccgttttgcaagaactcgaacttccatatcgagtcattcagctttgcacaggagacttaggtttctcatcaaaaaaaacttatgatttagaggtttggcttccaggggcaaatacttttagagagatatccagttgtagtaattgtggagactttcaagccagacgttcatcaatacgaacaaaagataacaataaaaaaaatatacttttgcataccttaaatggaagtggattggcaataggtcgtactatggctgcagttttagaaaatggtcaacaatctgatggaagtatcaatttgcccaaagccttaataccttacttcggttcaaacaaattacagccagaatag

SEQ ID NO: 296989 - DNA, 814 bp, Unknown
  Bacterial polypeptide expressing nucleotide sequence isolated from the Sargasso Sea
gctcaaaaaaataaactctcaaaaaattttggagaattaaaaaaatctggccaatcaacagacgaacttgctttagaacttgaagaaattaagtcgcaaacaaccgacctagaaaaaaatctctcagcactgcaaattgagatctcatcttttttaatggatatacctaacctgatttcagaggatacgcctatcggaacaagtgaggacgacaataaattaattgaagaatatttaaaaccccaaatccttaaatcagattctcatttagaaattacagatcaaataagcttagagcttggaaataaattgagtggatctagattttcagttttaaaaggcaatgtagcgaaacttcatcgatctttatgtacctatatgattagtgaagcaattaataatggttatgaagaaacttacgtaccttatattgttaattatgacgccttggagggtactggacagcttcctaagtttgaagaggatctatttaagttatccaatgatcaatacttaataccgacagcagaggtcccactcacgaatttatttcgagatcagataattgaccaagatctacttccaataaagctaacagcacacacgccatgttttagatctgaagcgggaagttatggcaaagatacaaatggacttataagacttcatcaatttgataaggttgaaatcgttcaaattgttaaacctcaggattctagcaaagctcttgaagatatcacatcccatgcaaaatctgttttagagaaacttgagctgccgcatagagtcgtccagctttgctctggagatgtag

SEQ ID NO: 296990 - DNA, 969 bp, Unknown
  Bacterial polypeptide expressing nucleotide sequence isolated from the Sargasso Sea
tttatcttcaattccaaaatttaccattgtcagatgttcctgttggtgctgatgaaaattctaataaagaagttaataaatcaggagcgattaaaggatttaattttaatccaaaatctcattacgaactaggtgaaaatttaaaaatgttagattttgatctagctacaaaaacgactggtgcaagatttgtttttgttaacgataagcttgctttattagaaagggcaatagcaaattttatgttagatactcatacacaagtcaatggttataaagaaatatctccgccattaatggcaaatgataattctatgtttggaacaggccagctacccaaatttgaagatgatcaatttgaaattaaaattgaggaaaaaagtggtagaaaatttctaattccaacagcagaagttatattaaccaatattgttagagataaaattcttaatattaaagacttcccaatgcgatttgttgcgctaactccatgttttagaaaagaagctggtagctatggaaaggatacaaaaggtatgattagacagcatcaattttataaagttgagcttgtcagtattgttgaaaattataaatgtattgatgaacttgaaagaatgacaaactgcgcaacaatgattttagataaattaaaattgccttatagaaaaataattctgtcaactggtgacatgggttttagtgctgaaaaaacttatgatatagaagtttggctaccatctgaaaacaaatacagagaaatttcaagttgctcttcttgtggaacttttcaagctagaagaatgaaagcaagatataaaaataaaaataatgaaaccgaatttgttggtacattaaatggcagtggtttagcagtaggaagaacacttattgcaatcttggaaaactatcaaaattctgatggatcaatatctatacccgatggttctaaaaccctacatgaataat

SEQ ID NO: 296991 - DNA, 656 bp, Unknown
  Bacterial polypeptide expressing nucleotide sequence isolated from the Sargasso Sea
ttaaataaagatcaaattaaaataaaaaatgaaattgattcattactcgcttctctacctaatcttgctttagaagacgttccgattggaaaagatgaaaaaacgaataaagaagttaacaaagttggagaaattattaaatttgattttaaaccagattcacatgaacaaattggaaaaaaaatcaatcaaatggattttgatgttgcgacgaaaacatcaggagccagatttgtttttttaaaagatcaactggctttacttgaaagagctatttctaatttcatgctcgacattcatacaaaagagtttggataccacgaaatatctcctccactaatagtaaacgatagtactatgtttggtaccggacagcttcctaaatttgaaagtgatcagtttgaaattaaatcagacgataaaaattctagaaaatttttaattcctactgcggaagttatattaacaaatattgttaaagattcatttgtgcaagaaaaagagttacctttacgactagttgcttctactgcttgcttcagaaaagaagctggtagctatggaaaagacaccaaaggaatgattagacagcatcaattttataaagttgaactcgttagtattgttgatccaaaaaaatctcttgaagaactaga

SEQ ID NO: 296992 - DNA, 908 bp, Unknown
  Bacterial polypeptide expressing nucleotide sequence isolated from the Sargasso Sea
ggataatagttcactatttgatgaaattttaaaaaaaagaaatatttcctcttcttcaaaggcaatacttctattgtacgaggattatttagaaaatttaaaaaaaacacaaaatttgcaagaaaagaaaaattatttttcaaaaaaattctctccaaaacttagtcaaaaagatttggaaaaaataaaaaatgatgttgctaaaattaaaactgaattggatgagttaaaaaaaataactgctgaaaaacaaaaaaagctcaatcaagttcttcttgaaattccaaatttagttgatgaaagagttccagttggtcagtctgaaaatgataacgtaattcttaaagaaagcggtaagattgataaacctaagtttgatgttaaaaatcatgttgaaattttagaaaaacataacctattagattatcataaagcatctaaactttctggtagtaggttttcaattttaagatcaagtctagcaactttgcatcgagcattagttaattttatgatagatataaatgttacggaatttcagtatgaagaatgtattgtcccagaattagttaaaagtgattgtttaataggaactgggcaactaccaaaatttgatgaggatttatttaaaacagattttaatgatttatggttaataccaactgcggaggtgcctttgactaattttcatagagaagaaattattgactccactttacttccacttcgttacacttctttcactaattgctttcgctcggaagctggtgctgcgggtaaagataccagaggattaatgagagaacatcaatttggtaaagttgaattagtatctattactgaacctattaattctatgtctgaaatggaaagaatgattggatgtgttgagatgattttagaaaaac

SEQ ID NO: 296993 - DNA, 472 bp, Unknown
  Bacterial polypeptide expressing nucleotide sequence isolated from the Sargasso Sea
aaagatactaaaggtatgatcagacagcaccaattttataaagtggaactagtaagtattgtagaaaacgataaatgttcagaggagttagagaggatgtctaactctgctacaatgatattggatgcgttaaaacttccttatagaaaaattgttttatgtactggtgatatgggttttagtgcagaaaaaacctatgacattgaagtttggcttccatctgaaaataagtatagagagatttcaagctgttcatcttgtggttcatttcaagcaaggagaatgaaagctagatataaaggacaaaacaattcaaaagaatttgttggcacacttaatggtagtggattagcagttggtagaactatgattgctattatggaaaattatcaaactgaagatggatctattttgatacctgatgttcttaagccatatatgccaaatatagataaaatttctatcaattaag

SEQ ID NO: 296994 - DNA, 688 bp, Unknown
  Bacterial polypeptide expressing nucleotide sequence isolated from the Sargasso Sea
aacaattccaccagttttggttagagaaaatgctctttttggaactggatttttccctgatgattcagatcaagtgtatgagattccaaatgatgacctatttctagttggtacatcagaagtaacacttgctgctttacacggtgatgaaattcttgattttgacaaactacctatcagatatgcaggatattcaacttgctttagaagagaagctggaacttatgggaaagacacaacaggaatctttagagtacatcaatttgataaagtagaaatgttttctttttgcaatcctgaaaaatcagaagaagaacatgaatttattctctcagttgaagaagagattttacaagagctagaaatcccttacagagtcgttgatgtttgtactggtgatctaggttcatctgctgctaaaaaatttgatatcgaagcatggataccaagtcagaatacatatagagaagtaacatcttgttcaaatacaacggattttcaggccagaaggttaaatattcgtacaaaagttgaaaaagatacggctttactccatacattaaacggaactgctattgcagtgggaagaatattgatagctttactcgaaaataatcaaaccgaagacggaggagtagaattttctgatagcttggggaatattttaggggttgaaaagttaagctaa

SEQ ID NO: 296995 - DNA, 740 bp, Unknown
  Bacterial polypeptide expressing nucleotide sequence isolated from the Sargasso Sea
aatgcataatttaaaagaaattagaaatgatgtagctttatttgaaaaaaaaataaaagaaagaaactcgacagttgatataaaatctttaattaaatatgacaaagaaaatagagaaataatccaaaaaaaagaaaaattagagcaagaaaaaaaaacgttatcaaaaaaaaaagatcctcaaaattttaacaaatcaaaaagtttaacagaacaaataggatctttagaagcttctcatcaaaagttacatgaaaagattaattcaatcttgtactcaataccaaatatagcctcagatgatgttccaataggcgctgatgagtcttcaaataaaattattaaaaagattggtgaaataaaaaaatttagttttaatgtgaagtctcatacagatcttggactaaaatatatggattttgatactgcaactaaattatcaggttcaagatttgtggtgttaaaagataaactagcacttttagagagagccttaataaattttatgattgatatacatacgaaaaaatttggttatgttgaaatttcaccaccactaattgtaaatgaaaaaacaatgtttggaactggtcaactaccaaaattcgaaaaagaccaatatgaaatacattctgaaaaaagtgaaggacgtaaatttttaatacctacagcagaggtacctttgtctaatctatttagagaaactataattgatcaaaaaaaccttcctttaagatttg

SEQ ID NO: 296996 - DNA, 940 bp, Unknown
  Bacterial polypeptide expressing nucleotide sequence isolated from the Sargasso Sea
aaagggaaacgaatacagaaccaaaatttctgagcttgaagaaaaacaaagaataatagataaacaagtagatgatgagatttacaatttgccaaattttcccagcaaagatgcacctattgggaaagatgaaagtgataatgttcaaataaaaacatggggcgaccctctcaaaaaagaaaatcttaaatctcattgggaaataggagaaagtctcaatctttttgactctgtaaaatcaacaaaaatatcaaaaagtcgttttattactcttttaggtaatggtgccagattagagagggcattgattaattttatgctcgatattcatattaagaatggttatttagagttaatgcctccagctttagtaaattcagaaagtcttcaaggatctggacaattacctaaattctcaaatgaaagttttaagtgctctaatgacgatttatggctttctccaacagctgaagttccacttactgcttttcatagaaacgagattattgaccccgagcatttacctataaagtatgttgcatatagtccatgttttaggagagaagctgggagttatggaagggatactaaaggtttaataagacttcatcaatttaataaggttgagctttattggttttgcgatccaagtaaatctttagaagctcataaaaagatcacttcagatgcagaaagcattttaaaaaagcttaacttaccgtatagattagttgatatttgtactggagacttaggcttttcttctagtagaacttttgatcttgaagtctggcttcccagtagtaggtgctatagggaaatttcaagttgcagtaactgccttgattttcaagctcgtagatcatcaattagatcaaaaattaataaaaaaaatatatatttacacaccctaaatggtagtgggcttgctattggtaga

SEQ ID NO: 296997 - DNA, 855 bp, Unknown
  Bacterial polypeptide expressing nucleotide sequence isolated from the Sargasso Sea
attaattggagagcatgcttctaacggcaaaaaagatgaagctggattactaaaaaatgaagttagttcaataaaagacaaaatgcaggaacttgaaaacaatcaacgcatcgcaaaagaagagttaaattcattacttgagtcactgccaaacataccagatgactcagttccaattggagatgaaagcgtcaacaaagaaattaaggttgaaggcaaaaagaaagaattttcatttactccaaaagaacattttgatttaggtgaagatctcggcaaaatgagttttgatcaagcagcaaaaatatccggtgcacgttttgtgatccaaaaaggtgaattagcaagacttgaaagagccatagctaattttatgctagatctgcatacaaatgaatttgggtatgaagaaactaatgttcctatacttgtaagagatcaagctgcatttggtacagggcaattgccaaaattcaaggatgatttatttaaaacgacggatgattactggcttataccaacagctgaagttcctttaacaaatatgacaagagagagtgtagtggatgtagttgaacttcccagacgatatgtctctcatacgccttgtttcagatctgaggcaggtgccgctggaaaagatactcgaggaattatgcgtcaacatcagttttacaaagttgaattggtaagcttaacgtcagaagaaaattcagacgatgagcatgaaagaatgcttagttgtgctgaagaggtgctaaaaagactaggtctgcactatcgagttgtaattttatccactcaagatatgggtttttcagctcagaaaacatatgatattgaagtatggcttcc

SEQ ID NO: 296998 - DNA, 886 bp, Unknown
  Bacterial polypeptide expressing nucleotide sequence isolated from the Sargasso Sea
atgcatagtttaaaagaaataagaaaagatttttcaaaatttgaaaaagatcttgaaaaacgttcagttaaaattgattttaataatttaaaaaaacttgatgaattaaacagagatttaattcaaaaaaaagaaaatctagaaaaagaaaaaaaagatatttcaaaatcaaaagatgagagtttatttaaaaagtcaaaagaaatatcttcagaattagaaaaaatttctgagcaacaaaaaaataccaaaaatgaactagataatattttatcaaatataccaaatatacctcatcaacatgttccaattggaaaagatgaaaatgataatgaggaggtattaaaagctggaaatattcctgaatttgctttcaaacctaaatctcattatgaacttggtgagaatttaggtatgcttgattttgatcttgcaacaaaaacgactggatcaagatttgtttttgttaaaaaagagctagcattactggaacgggccctatctaactttatgttagatactcatactattcaaaatggttatcaagaaatttcacctccattgattgcctcagacaatacaatgtatggaactggtcaattaccgaaatttgaaaacgatcaatttgaaatcaaatttgatgaaggatctgacagaaaatttttaatcccaactgccgaagtaatattaactaatattgtaaaagataaaattgtcgatcaaaaaaatttacccatgagatttgttgcctcaacaccatgtttcagaaaagaagctgggagttatggtaaagatacaaaaggaatgattagacagcatcaattttacaaagttgaattggtaagtatcgtggaaaaagaaaattgtttagaagaactagagagaa

SEQ ID NO: 296999 - DNA, 739 bp, Unknown
  Bacterial polypeptide expressing nucleotide sequence isolated from the Sargasso Sea
atgattgatccaaaacgaattcgtaatgatgaggttagtgttcgacaagggcttcaaaatagagggtgtgatcttcagttattggatcgctttgttgatctagatcgtaattggagacagaaacagactgagttagataagttaattaattatcgctcgacaatgatgcctaagggaaagccgtctcctgaaattttgattgaattaaaagaggtatctgagaagatcaagagtactcagatagaggttaatgattgttatgataagatgcgtgaggtttcgttgttactacctaatattccagttcagggagttcctataggggtgtctgaagaagataataaactggttagacaggaaggtgtcgttccttctttttcttttcagcctaaggcccatgaagagattggcgaggctttggggatattagattttgagacaggtgcaaagcttgctgggtcacgatttgtcctttacaaaggctggggggcacggttagagcgtgcattaattaattttatgttagatgttcatacttcagaacatggctatgaagagatattgccgcctgttattgttaatcaagatagtttgataggaacaggccaattgccaaaatttgcagatgattgttttaaaatttcggagtcagagtattggttaagtccaacagcagaagttcaaatgactaatattgctcgtgatacagttattgatgagtcagaactaccgattaatt

SEQ ID NO: 297000 - DNA, 789 bp, Unknown
  Bacterial polypeptide expressing nucleotide sequence isolated from the Sargasso Sea
tgaaaaaaaactaaatgaactattaaatattttaccaaacatagctcatgatgatgttcctattggaaaagatgaaaaatcaaataaattaattaaaaaatttggaaatattaaaaaacataaattcaaaccaaaatctcataatgatattggtttaaagtataatgaaattgattttgacacagcttctaaattatctggatctagatttgtgattttgaaaaataaaatggctttacttgaaagagctctgataaattttatgttagatattcacacttcagaattcaaatatactgaaatttcaccaccattaatagtaaatgaagatgttatgtttggcacaggacaacttccaaaatttgaagatgatcaatttgaaattaaatttgaaaattcagatcaaagaaagtttttaattccaacagctgaagtcgtattaacaaatatggttagaaattctttaattaataaagatcaattacctcaaaggtttgttgcttcaaccccttgttttcgtaaagaagcaggtagttatggaaaagatactaaaggtatgattagacagcatcaattttataaagttgaattagtaagtatagttgaacctgagaactgtatcactgaactagaaagaatgcttaaatgtgctcaacatattctagacagattagaaataccttatcaagttgttctattatcgactggagacatgggcttcagtgctgaaaaaacctatgatattgaggcatggataccatcggaaaataagtatagagaaatatcaag

SEQ ID NO: 297001 - DNA, 929 bp, Unknown
  Bacterial polypeptide expressing nucleotide sequence isolated from the Sargasso Sea
tatgcatgatataaaaaaaataaggaatgatccaaaagaattcgatcaaaaactaaaaaagagaaacgtaaatccactcagtagtagtattttaaaaatagactctaaaagaagaaaaaatattgaatcccttgagattttaaaagcttctgtaaattctttatcaaaagaatttggtaaaaacaagtcattaggaaaatccattaatgagaaaaaatttaagaatgaaattaaagaaaaaaaaataaaaatttcaaaacttgaagatgaatctcaaaagcttgaaacagatctaaaaactttactagaaaatattccaaatatttgcagtttggatgttccagtcggtgttggtgaagaagataatgttgaagtatataaatggggtaatattaaaaaaatgacttttgagcctaagcagcattttgatgtacttgcagcaaatgatattgattttaaatctgctgctaagatatcaggaagtcgtttctctgttttattaggcggaattgcaactttgcatagagcaatttctcaatttatgattgataaacatattaaagaccatgagttgaaagaagtatcagtacctgttttggttaaagataacatcatgtacggaactggacaactgccaaaattttcaacagaaagttataaaacttcaaatggttggtggttgattccaactgcagaggttcctttaacaaatttaatggctaattctatattaaactatgaagaattacctataagactttgtgcagttactcaatgttttcgttctgaagcaggaagtgctggcaaggatactactggaatgcttagacaacatcaatttgaaaaagttgagatggtcacattttcttcaccagagaatagtgcaaaagaacatttaagaatgactgattgtgctgaaaatatcctcc

SEQ ID NO: 297002 - DNA, 949 bp, Unknown
  Bacterial polypeptide expressing nucleotide sequence isolated from the Sargasso Sea
gcgcggatatgatctcgacattaatttatgggaaaaaatggagtcttcccgtaaagaacttcaaggtagtacagaagaattacagtctgaacttaatacaatctccaaagaaattgggattaaaaagtcccaaaaagaagattcatcagaattggaaagtaaggcttcaggtttaactcaaaaaataaagaaaagaaataaagaattggaagcagtcctaaagggtatagaggaatttttacttgatatcccaaatctacctgacaaagattgccctgtaggaaaaaacgaactggataatgttgaaataagaacttggggggatgttaccaatttttcttttgaaccaaaagaccaccagacattaggtgaagaaattaaattacttgatatggcggcggctgcaaaggtagcaggagcaaggttttcagttctaaaaggagatctagcaaaaatgcatagatcattaactcaatttatggttgatgttcatgtagaaaatggttatgaagagctttatgttccatatatagtaaataaagattctcttataggtacaggacagctaccaaagtttgaagaagatttatttaaacttaatgacgaaagagagctctatcttacttccacagcagaagttcctgttacaaatttaattaggaatgaaattttagaatctaaagagttaccaaaaaagtgggtttgtcatacgccaagctttagaagtgaagcaggaagttatggtaaagatactagaggcataatgcgtcaacatcaatttgagaaagttgagcttgttcagattgtagaagcacaagactcctcagatgcactcgaggcattgacttctgatgcggagatgattcttcagcaattagagcttccttacagagtagtttcgttgtgtacaggtgatttaggtttttcttcttcaaaaactatgacttag

SEQ ID NO: 297003 - DNA, 631 bp, Unknown
  Bacterial polypeptide expressing nucleotide sequence isolated from the Sargasso Sea
attcaagaaacattatttactgataaggataatgatttgtggctgattcctactggagaagtctcgttaaacaacatgtttggaaacgaaattataaaacatgaacttccattaaaatatgtaactcacactccttgtttcagagatgaaaaaagctcagctggcagagatactagaggtatcaaaagagtgcatcaatttgaaaaagtcgaactatatagatttgaacacccttcaaattctatgaatgcttttgatgaaatggtttctgaagtatccagattatgtgaggcattaaatttcacttatagaatagttgaactttgtacaggtgatattggcttccagtcagctaaaacttatgatattgaagtatggtctcctggttgtgaagaatggttagaagtgtcttcgatctcaatttgtacagacttccagtcacgtagaactaacacaagatttagagatcaattagatggcaaaataaagtttcctcatactttaaatggctctggattagctttgccaagagtgattattgctatattagaaaataatcttttggaagatggtaccattgagatccctgaagtcttaagagaatacacaaggtttgactcaattagttaaa

SEQ ID NO: 297004 - DNA, 724 bp, Unknown
  Bacterial polypeptide expressing nucleotide sequence isolated from the Sargasso Sea
atggtttatcagaatttggacaccagtcttggtaaactcacaatcaatgttaggaactggacagcttccaaaattctctactgatagttattctactaatcgcgatcattggttaattccaacctcagaggttagtctgactaatatgttttcagaaacaatcttggatgaacaagaattacctaaacgcttaacctgcttgagccaatgttttcgatcagaggctggaagcgctggaagagatactgcaggcatgttacgtcagcatcaatttgaaaaggtagaaatggtgtcaataactaagcctgaacaaagcttattcgagttgaataggatgactgagtgcgctcaaaatattcttgaggtgctcaatcttccatatcggaccatgcttctatcatccggtgacattggatttagcgcagctcaaactcacgacatcgaagtttggctgccaggacaacaaaaatatagagaaatttcaagttgttcaacgtgcgaggattttcaagccaggcgaatgaatgctagataccgtccaagtaatggttcaaaaccagaatatcttcacaccttaaacggctccgggttggcggtaggccggtgtctgatagctgtaatagaaaattttcaagaaaaggatggatcaataaatattccagatcctttaaaaccatatctgaacaacgcaagcaagattagcgctacaggagagtttcaatga

SEQ ID NO: 297005 - DNA, 856 bp, Unknown
  Bacterial polypeptide expressing nucleotide sequence isolated from the Sargasso Sea
aagattaaaacaaatttagataagattttatctaatctacctaatatacctcacaaagatgttccaaatggaaaagatgaaaatgacaatgttgaaataagtaaatctggaaaaataccaaaatttgattttaatccaaagtcacattatgaacttggtgaaaatttaggaatgcttgattttgatcttgctacaaaaactacgggatctagatttgtatttgtaaaaaaagaattagctttactagaaagagctttatcaaactttatgcttgatactcatactttaaaaaatggttatgaggaaatctctccacctttgttagcatcagatgatacaatgtttggaactggtcaacttccaaagtttgagaacgatcaatttgaggttaaacttgatgagggatcaggaagaaagtttttaataccaactgctgaggtaattttgacaaatattgttaaagatcaaattatagatcaaaaagttttaccaatgagatttgttgcttcgacaccatgttttagaaaagaagcaggtagctatggtaaagatactaaaggtatgatcagacaacatcaattttacaaagttgaaatggtcagtgtagttgaacaagaaaattgtttagatgagctagagagaatgactaattgtgcaactggaatattagatttattagagttaccgtataggaaaatgatattatgctctggagacatgggttttagtgctgaaaaaacctatgatattgaagtttggttaccttcagaaaataaatatagagaaatatcatcttgttcatcatgttctacttttcaagcagttagaatgaaagcaagatataaaaatcaaaaaa

SEQ ID NO: 297006 - DNA, 457 bp, Unknown
  Bacterial polypeptide expressing nucleotide sequence isolated from the Sargasso Sea
tatgattagacagcatcagttttataaagttgaattagtcagtgtagtcgaaaatgataaatgcttagatgaattagaaagaatgactaattgtgcaacaatgattttagataaattaaaattaccttatagaaaaataatactttctactggagacatgggttttagtgctgaaaaaacatatgatatagaggtttggcttccttttgaaaacaaatatagggaaatttcaagttgctcatcatgtggatcttttcaagcgagaagaatgaaatcaaggtacaaaaataataagaatgaaactttatttgttggaactttaaatggcagtggtcttgctgtaggtagaactttaatagctattttagaaaattatcaatctaaagatggttcagtaattattccagatgttttaagaccatatatgaacaatttaaataaaatatcaaataattag

SEQ ID NO: 297007 - DNA, 853 bp, Unknown
  Bacterial polypeptide expressing nucleotide sequence isolated from the Sargasso Sea
tgatgacaaaaatagaaaattaattagcgaaaaagaaaaattagaacaagaaagaggagttttatcaaaatcaaaagataaatcaaattttgaaaaatcaaaaaaaatttctgagaaaatatcaaaattatctcaggaacaattaattgctcagaataaacttaacgaactgatacatattttgccaaatatcgctcattctgatgtgccaattggtaaaaatgaaaagtcaaataaactaattaataaatttggaaaaattaaggaatttagttttatgcctaaatcacacattgagataggttcaaaatttaatgagatagattttgatatagcaactaaattatctggatcaaggtttgtaattttaaaaaataatatcgctaaattagagagagctctaataaactttatgcttgatattcatacaaatgaatttaattatgttgagatttcaccaccattaattgtaaatgaagatgtcatgtttggaactggacagcttccgaaatttgaagaagatcaatttgagataaaatttgaaaactctgatcagagaaaatttttgatcccaaccgcagaagtggttttaacaaatctagttagaaaatctttaattaataaagataaactgcctcaaagatttgtagcttcaacaccatgttttcgtaaagaggccggtagctacggaaaagacactaaaggaatgataagacaacatcagttttacaaagttgaattagttagcattgtagagccaaaaaattgtattactgagctagatagaatgttaaaatgtgcaaaaacaattctagataaattagaaatacctcaccaaagtagtattattatc

SEQ ID NO: 297008 - DNA, 728 bp, Unknown
  Bacterial polypeptide expressing nucleotide sequence isolated from the Sargasso Sea
gttggacgtacacacaaaagaaaatggttatatagagcattccatgcctgtaattgttaattctcaatctatgtttggcacatctcagcttcccaagtttgaaaatgatcaatataatttaggtgacgatttatggttaacaccaactagtgaagtttctttaacgaacatagtggctgggaaaattattgaatacgacaatttacctttaagattagttagcagtacacaatgtttcagaaaagaagctggagccgctgggaaagatactaagggaatgattagacagcatcaatttacaaaagttgaattagtatcaattattcaaccagaaaaaagactagaagaacttgaaaggttactgtcttgcgcagagtcaattttaaagaaattagaaattccgtatagagttattttattatgtagtggtgacatgggtttcagtgcagaaaaaacttatgacattgaggtttggttaccatcacaaaaaaattatagagagatatcaagctgttcgagctgtggaattttccaatctgtaagaatgaattctaaatacaaaactgtagatggaaaaaaagagtatctatctacattaaacggttcaggtttagccgttggcagaactattgttgcaatattagaaaactatcaaaattcagatgggtcaataactattccgaaagtgttagtaccttatatggatggttgtacaaaaataaattaat

SEQ ID NO: 297009 - DNA, 676 bp, Unknown
  Bacterial polypeptide expressing nucleotide sequence isolated from the Sargasso Sea
atgttagaccctaagcttattcgaactgacttaaatattttagctgaccgacttaaagttaaaaacttcgacttagatgttgcgctgctcgaagggttagaagacgcgcgcaaagtgttccagcttgaaacggagaaactccaaaacgaacgcaacaccaaatctaagtctataggaaaagcaaaagctttaggggaggacgttggagaaatactaaatgacatggaatccctaaagagccttttagagacaaagaaaaatcaattaaacgaggtacaagaaaagctaaaatcgtatttgctgacgatcccgaatattcctgacgatgaagttcctgaagggtatgacgagtccgataacaaaataataagctcttggggagaattgccagagttcacttttgacgtgaaagatcacgctgatttaggggaggctttggatcaaggattagacttctccaaagctgttaagctttcaggctcgcgtttcgtagttttgcatggtcggctcgcaaaattgcatagagcactcgcgcaatttatgttagatgttcatacgctagaacatgaatatgttgagtttaatttgcctttaatagttaacgatgactctttgatagggaccgggcagctcccgaaatttgaggaagatctatttaaattgcacaaagatgggg

SEQ ID NO: 297010 - DNA, 622 bp, Unknown
  Bacterial polypeptide expressing nucleotide sequence isolated from the Sargasso Sea
tacgagattaaaaattttaatgatgaaaaaaaatatctaataccaactgctgaggttgttttgactaacattatccgcaataaaatcttaaaacaagaagaactgccaattagatatgttgcatcaaccccttgtttcagaaaagaagcaggtagttatggcaaagatacaaaaggtttaatgagacaacatcaattctacaaagtagaattagtaagtattgttaagccagaagagacagataaagaattaatcagaatgatttcatgtgcggaagaaattttaaaaattttaaacttatcattcagaaaagttttattatctagtggtgatatgggttttagcgccgaaaaaactattgatttagaggtatggattcctagcgagaataaatatagagaaatttcaagctgttcatcttgtggcacatttcaagcaagaagaatgaatgctaaatttaaaaataatgaaaaaaaagaatttttagcaactttaaatggatctggtttagcagtaggacgattgataatcgcattattagagaacaatcaaaatgaggacggcactataaatattcctaaagaattacaaaaatatattgataataaagaaaaaatttagc

SEQ ID NO: 297011 - DNA, 727 bp, Unknown
  Bacterial polypeptide expressing nucleotide sequence isolated from the Sargasso Sea
aaatggttacgaggaaatctcgccacctttacttgcctctgaagatacaatgtttggtactggccaacttcctaaatttgaaaatgatcaatttgaagtaaaacttgaaaaaggttctgatagaaaatttttaatacctacagcagaagtaattttaaccaatattgtaaaagataaaattattgatcagaaaatgtttccaatgagatttgttgcatccactccatgttttagaaaagaagctggcagttacggtaaagatacaaaaggaatgatcagacaacatcaatttttcaaggttgagatggtaagtattgttgaacaagataaatgtctggatgagttagaaagaatgacaaactgtgcaactggaattttagatcttttagaattaccttacagaaaagtaattttgtgtagtggagatatgggttttagtgctgagaaaacttatgatatagaggtatggctaccttcagaaaatagatatagggaaatttcatcttgttcatcatgctcgactttccaatctgtcagaatgagagctcgatacaaaaatcagaataaagaaacactttatgcaggaacattaaatggaagtggtttagccattgggaggactttaattgctattttagaaaattatcagcaaaaagatggctcgataactattccaaaaatattaagaccctatatgagtaatttagaaaaaatttcaatcaattaa

SEQ ID NO: 297012 - DNA, 679 bp, Unknown
  Bacterial polypeptide expressing nucleotide sequence isolated from the Sargasso Sea
atggtatggaaccaaccaattacctaaatttgctgaagacagctataaaacaacaaacggctggtggttaataccaacatcagaagtaactctaacaaatacagtcgcaggccaaaacttaaacgaaaccgatttacctattaggcttactgcacacactttgtgtttccgatcagaagcgggatccgccggcaaggatacatctggaatgcttcggcaacatcaattcgaaaaggtcgagatggtctcaataacccatccatctcagtcgctggaagaacactccagaatgaccaaatgtgctcaggctatattagaaaagctcggcctaccctatagaactgttgtgttatgtacgggtgacatgggcttcggtgctcgaaaaactcacgatttagaagtatggttgccaggacaaggtaaatatagggaaatttcgtctatttcggcttgtggagattttcaagccagacgaatgcttgccagattcaaacctactgaaggtggaaaacttcagtttgtccataccctcaatggatccggagtggcagttggtcggtgcttaattgcagttttagagaacggtcaaaatgaagacggttcagtatccttacctccagtattaagtccttatttaggaaattgtacccgtataaattctaccgggggcttggaataa

SEQ ID NO: 297013 - DNA, 631 bp, Unknown
  Bacterial polypeptide expressing nucleotide sequence isolated from the Sargasso Sea
tttgaaattaaattagagaatgaaaaatcaagaaaatttttaataccaacagccgaagtagttttaacaaatattgttagagatacgtttttaaaatatgaggagctgccattaaggtttgtagcttctacagcatgttttagaaaagaagcaggtagttatggtaaggacactaaaggaatgattagacaacatcaattttataaagttgaacttgttagtattgttgatcccgagaagtgcatggttgagttggatagaatgttaaattgtgcacaagaaatattaaaaaagttaaagttaccatatagagttgttttattgtccagtggagatatgggttttagtgctgagaaaacttatgatcttgaagtgtggataccttcagaaaataaatacagggaaatttcaagctgttcatcttgtggtcaatttcaagctagacgaatgaaatcaaagtataaaaataaaaaaaatgaatctgattttttaggaacattaaatggatctggtctggccgtaggaagaactttaatagcaattatggaaaattatcaacaaaaagatggaactattactattccggatgttctaaaaccttacatggacggcgagaatagcattaagtaat

SEQ ID NO: 297014 - DNA, 286 bp, Unknown
  Bacterial polypeptide expressing nucleotide sequence isolated from the Sargasso Sea
tttcttcagcagaacttttgatattgaagtctggcttccaagcagtaaatgttatagggaaatttcaagttgtagcaactgtttagactttcaagcccgtagatcatcaataagagcaaaaattgacaagaaaaatacatatctgcacaccttaaatgggagtgggcttgcgattggaagaactatggctgctattcttgagaatggccaacaaacagatgggagcgtaaaaattccagatgctttagttccatattttggatcagatattttaaaaactgcttaa

SEQ ID NO: 297015 - DNA, 442 bp, Unknown
  Bacterial polypeptide expressing nucleotide sequence isolated from the Sargasso Sea
actccatcaattcaacaaagttgagctctattggttttgtgatccaaataaatctatagaagctcataaaaagatcaccttagatgcagaaagtattttaaaaaagctcaatctaccctatagattagttgatatttgtactggagacttaggtttttcttcaagtagaacttttgatcttgaagtctggctaccaagtagtaaatgttatagagaaatttcaagttgtagcaattgtttagattttcaagcacgtaggtcatcaataagaacaaaaattgaaaagaaaaatacatatttgcataccttaaatggtagtgggcttgcgattggaagaactatggctgctattcttgaaaatggccaacaaagtgatggaagcgtaaaaattccagatgctctagttccttattttggatcaaatattttaaaaacttcttaa

SEQ ID NO: 297016 - DNA, 910 bp, Unknown
  Bacterial polypeptide expressing nucleotide sequence isolated from the Sargasso Sea
ataactgttaaaattgaagaattaactaaaaagcaaaaagttgtcaaagataaacttgatagttatttgagctctatacctaatgttcctttaaaagatgttcctataggaaaagaggaaagtgataataaagagctaattaaagtaggaaatatcactaaattttcttttaaaccaaaatctcattatgaaataggagaaaaacttaatatgttagattttgatcttgccacaaagactacgggatcaagatttgtttttgtaaaagataaacttgcatcattagaaagggctatttcaaattacatgattgatactcatacaaagattaatggatatacagaaatttccccgcctttgttggcttcagaaaatacaatgtttggtactggtcaattgcctaaatttgaaaatgaccaatttgaagtaaaattggatgataaaaatgatagaaaatttttaattcctactgctgaagttattttaactaatatggtaaaaaatcaaattataaatattaaatctttaccgatgagattagttgcatcaactccttgctttagaaaagaagctggaagttatggaaaggatacaaaaggcatgattagacaacatcaattttacaaagttgaactagttagtgtagtcgaaaataataaatgtttagacgaacttgaaagaatgacaaattgcgccacaaaaattttagatgatctgaaactcccatatagaaaaatcattctaagcactggtgatatggggtttagtgctgaaaaaacatatgatatagaagtgtggcttccttcagaagaaaaatatagagaaatttctagttgttcatcttgtgggacttttcaagcaacaagaatgaaagccagatataaaaatgcaaacaataatattgaattct

SEQ ID NO: 297017 - DNA, 826 bp, Unknown
  Bacterial polypeptide expressing nucleotide sequence isolated from the Sargasso Sea
gagcgggcggcgaagctgtcgggctcgcgcttcacggtgctcaccggcgcgttcgcaaggctggagcgcgcgctcggccagttcatgatcgacatgcacaccagcgagcacggctacctcgaagtcagtccgccgcttctggtgcgcgatgaagcgctctatggcacggggcagttgccgaaattttccgaggacctgttcaaggcctccgaggatcgctggatgatcccgacggcggaagtgccgctcaccaatctggtggcgggcgagatcctgccggcggaggagctgccgctgcgctattcggcgctcacctactgcttccgttccgaggcgggctctgccggccgcgacacccgcggcatgctgcgccagcatcagtttctgaaatgcgagatggtgtcgatcaccgatgccgacagttcgcttgatgagctggagcgcatgacatcggcggccgaggacgtgctgaagaagctcggcctgcattaccgcgtcatggcgctttcgactggcgatatgggcttttcggcgcgcaagacctatgacatcgaggtctggctgccggggcagaacacctatcgcgaaatctcgtcctgctcggtctgcggcgatttccaggcccggcgcatgaatgcgcgctatcgcggcaaggaggagaagcagacccgcttcgtgcatacgctgaacgggtccggcgtcgccgtcggccgcgcgctgatcgccgtcgtcgagaattatctcaatgaagatggttccgtcacggttccggaggcactggtgccttatatgggcggcatgacccgcatcgagaaggcgaagtgag

SEQ ID NO: 297018 - DNA, 660 bp, Unknown
  Bacterial polypeptide expressing nucleotide sequence isolated from the Sargasso Sea
ttcctaaatttgaaaatgatcaatttgaaattaaacttgagagtgaaactgagagaaaatttctaataccaactgctgaagtaattctaactaatattgttaaagataaaattgtgaatttagattctttgccgatgagatttgttgcatctacaccttgttttagaaaagaagctggcagttacggtaaagacacaaaaggaatgattcgccaacatcaattttataaagttgagatggttagcatagttgagcagaataaatgtatagaagaactagaaagaatgactaattgtgcaacaggaattttagatcttttagaactaccatatagaaaaatgattttatgtagtggtgacatgggttttagcgctgaaaaaacatacgatattgaggtttggttaccctctgaaaataaatatagggaaatttcatcatgctcttcatgctcaacttttcaagcagtaagaatgaaagctagatataaagataaaaaacaagaaactcaatttgtgggcactttaaatggaagcggcttagctattggtagaactttaattgccattcttgagaattatcagcaaaaagatggttcaataattattccgaaaatattaagaccttatatgaataatttagaaaaaatttcactcaattaaa

SEQ ID NO: 297019 - DNA, 871 bp, Unknown
  Bacterial polypeptide expressing nucleotide sequence isolated from the Sargasso Sea
tatgatttcgctaaaaattcttcgcaacgagactgaactgtgtaaaagattaattgcatccaagcagggtgaggtagatttagaccatgttttatctcttgataaaaaattgcgtcaattaaaaacaatttccaacgaaatgagggcagagcgcaattctgcatcagaagctattggtaaactaaaaaaagaaggagaagatgcatctgactccataaagaaaactcgcgaattaggagatgatttaaaaaatatagaaaaagaattgcacactgtttcaaaagatttagaatcctacttatatactctaccaaatcttcctcatgaaagtgttcctgaagggttagatgaaaattttaatgtggaaattagatcgtatggtagtaaacctgaatttaattttgaaccaaaatctcatttagatcttggagaagcgcttggattatttgattttcaaaaaggtgcaaaactatctggaagtgggttccctttatacataggaaaaggtgctacacttgagagatatcttataaatgcaatgatagaacatcatatacaagaattcagtttcaaagaagtatttccaccagttttaatgaagaaggaatccatgattacaacaggtcaactgcctaagtttgaagaggatatgtatcacactgaagttgataatttataccttgcacctacagcagaggtcccagttaccaacatacatcgcaatgaaatcattagtgaagatgaattacctatctactacgttgcatactcaccatgttttagaagagagtctggttcatatgggaaggacactagagggttgctcagggtacatcaattcaataaggttgagctagtaagttacaacacc

SEQ ID NO: 297020 - DNA, 763 bp, Unknown
  Bacterial polypeptide expressing nucleotide sequence isolated from the Sargasso Sea
atatcaaattttatgattgatactcatacaaaaaaaaatggatacactgagattaatccacctttgatagcaaatgaaagtacaatgtttggcactggtcaattaccaaaatttgagagcgaccaatttgaaattaaactagatagtgaaagtgatagaaaatttctaataccaacagcagaagttattctaaccaatatggtgagagatcaaattctaaatgcaagcaatctcccaataagattagttgcatctacgccatgttttaggaaggaggcaggaagttacggaaaagatactaaaggaatgataagacagcatcaattttataaagtcgaattggtcagtattgttgatgagtctaaatgtgaagaagaattagaaagaatgacaaattgcgcaactgacatattaaatcaacttgagctaccttatagaaaagttattttaagtactggcgatatgggttttagtgcagaaaaaacttacgatatcgaagtttggataccttcagaaaacaaatacagagaaatttctagttgctcttcatgcggaacctttcaagcaaaaagaatgaaggccagatataaaaattctaaaaatgaaattaaatttcctggaacattaaatggcagtggtctagcgattggtagaactttgatagctatattagaaaattaccaaaattcagatggttctatttctatacccaataaattaaaaccttatatgaatggtttagacaaaatatccgtcaaatagg

SEQ ID NO: 297021 - DNA, 931 bp, Unknown
  Bacterial polypeptide expressing nucleotide sequence isolated from the Sargasso Sea
aagcttattcaagaaaaagaaaaatttgaaatggaaaaaaagactatttcaaaatccaaagatcaaagtttatttgaaaaatcaaaagagctctctttaaaaattgaagaaattaacaaaaatcaaataaaattacagagccggataaatgatattttatcttctataccgaatataccattgagcgatgttccagtaggaaaagatgaaaattctaacaaagaaattgaaaaaaagggtgaaataaaagaatttaattttaagcctaaatctcattatgaattaggagatagattaaatatgcttgattttgacttagcaacaaaaacaactggatctagatttgtatttgttaaaaaagaattagctcaattagaaagagcaatatcaaattttatgattgatacacatactcaaaaaaatggttatacagaaatatcacctccattaattgcaaccgctgaaacaatgtttggcactggacagttaccaaaatttgaaaatgatcagtttgaaattaaattagacgaaggtgatggaagaaagtttttaataccaaccgctgaagtaattttgacaaatattgtaaaaaatcaaattttagaaaagaatgaattaccaattagagtagtcgcatccacaccttgttttagaaaagaagcgggtagctatggtaaggatactaaaggcatgatcagacaacaccagttttacaaagtggagcttgtaagtattgttgaaaacgataaatgtccagaggaattagagagaatgtctaactctgccactatgatactggatgcgttaaaacttccatatagaaaaattgttttatgcactggtgatatgggttttagtgcagaaaaaacttatgacatcgaagtttggcttccatctggaaataagtatagagagatttcaagctgttcat

SEQ ID NO: 297022 - DNA, 300 bp, Unknown
  Bacterial polypeptide expressing nucleotide sequence isolated from the Sargasso Sea
gagatacaggcttctcagcagcaaaaacttatgatctagaagtatggctcccgtcacaggagacttatagagagatatcatcttgtagcaattgcgagtcgttcaaatcaaggcgaatgaaagctaggtataaaaactctaaatccaagcaaaccgattatcctcataccctcaatggttcagggttggctattggaagaacccttatcgctgttctagagaataatcaaaatgaggatggctccgtcaccattcctgatgttctaaggccgtatatgcaaaatcgagaaagaatctaat

SEQ ID NO: 297023 - DNA, 570 bp, Unknown
  Bacterial polypeptide expressing nucleotide sequence isolated from the Sargasso Sea
caaatatggtaaaagatcaaattttaaatgtaaaaaatttaccaattagattagttgcctcaactgcgtgttttagaaaagaggcaggaagttatggaaaagatacaaaaggaatgattagacaacaccaattttataaagtggaattggttagcattgttgaaaataacaaatgtattgatgaattagagagaatgactaaatgcgccacaatgattttagatttacttaaattaccatatagaaaagttattttatgtactggagacatgggatttagcgcagagaaaacttacgacattgaagtctggttaccgtctgaaaaaaaatatcgtgaaatctctagctgttcctcttgcggtacttttcaatcacgaagaatgaaagcgagatataaaaatagtaacaatgagacagtttttgttggtacattaaatggtagcggtctagctataggaagaacattaattgcaattcttgaaaattatcaacaaaaagatggatcaattttagtacccgaagttcttaaaccttatatgaataatatagataaaataataaagatttaga

SEQ ID NO: 297024 - DNA, 841 bp, Unknown
  Bacterial polypeptide expressing nucleotide sequence isolated from the Sargasso Sea
tttggacaaggaaaacagagaacttattcaaaaaaaagagaaattagaacaagaaaaaaaaataatctctaaacaaaaagataaaaaactttttgaaaaatctaaacaaatatcaaaaaatattttgtctttagaagagtctcaaaaaaaaactaaaaaaaaaattagtgagattttagattttctacccaatattgctttagaagatgtccctgttggaaaagatgataattctaataaagaattatcaaaagttggaaatatacctaattttaaattcattcctaaatctcactatgaaattggacaaaaaagcggattaatggattttgagactgctactaaaacttctggttcaagatttgtatttttaaaaggaaatttagcaaaactagagagagcaatatcagattttatgcttgatacacacactaaagaatttgactatcaagaaatatcaccaccccttttggtgtccgaagaaactatgtttggcactggccaactacctaaatttgaaactgatcaatttgaaataaaattggatggcgaaaaaaatagaaaatttttaattccgacagctgaagttattttaactaatatggtaagagaaaaaacattagctcacaatcaacttccattgaggtttgttgcttcgactgcttgtttcagaaaagaagcaggaagttatggaaaagatacaaaaggtatactaaggcaacatcaattttataaggttgagttagtaagtattgttgaacctaaaaaatgtttagaagaattaaagagaatgacctcttgtgccgagagtattcttaaaaaattaaagcttccttataga

SEQ ID NO: 297025 - DNA, 907 bp, Unknown
  Bacterial polypeptide expressing nucleotide sequence isolated from the Sargasso Sea
aaatgttgattactctaatgaaataaataaagtgattgagcttgatgaacaaagaaaaaaaatacaaacaaatctcgattctttactcagtgaatcaaatacaattgctaaaagtattggtaatctttttaaatctggtaagattaaagaagcaaatagtttaaaggaaaaatcaactcaaataaaaccaagaataaaggaattacaagaaaatttaagcagcattaaattagatcttgaatcagtactatatacaataccaaatataccacacccgctagtaaaacaagggaaggatgactctaataatgaaattgtttttgagagtgaagctgtagatcaaaatgtgaataatctattacctcactgggaattagctaagaatcttgatataattgattttgaactagggaataaaattactggtgctggctttcctttatacaaaggaaaaggtgccaaacttcaaagaggattaataaactattttttggataaaaataccgatgcaggttaccacgaaattcaacctcctatactcatcaatgaaaactcgggtttcggcactggtcaacttccagataaggaaggacaaatgtatcatgttacaaacgacaatttatatttaataccaacagctgaagttccaattactaatatttatagggataccatagttgataaaaacgaactaccaattaaattaacaggatatacaccatgttttagaagagaagctggaagctatggctctcatgtaagaggtttaaatagacttcatcaattcgataaagttgaaatagttagaattgaatcttctgaaaattcctacgagatattagatgagatggtagatcatgtaaaatctctcctttcggaattaaacctgccatttagaattttaaga

SEQ ID NO: 297026 - DNA, 736 bp, Unknown
  Bacterial polypeptide expressing nucleotide sequence isolated from the Sargasso Sea
gatgtataatttaaaagatataagaaatgatttcgatacatttgttaaaactttaaagaaacgaaatattgatattgacttaaataatattaaaaaattagatgatgaaaatagaaaacttattcaagaaaaggaaaatttagaaaaagaaaaaaaaattatatcaaaaactaaagatgaaaaattatttaaaaaatccaaagaaatttccaaccagttagaattaataatcaaaaaacaaaaaaaaataagttctagtttaaataatattttagctctgataccaaatatacctcataaagatgttcctgaagggaaagatgaaaatgataatatagagaaatctaaaactggaataattccaaattttgatttttcaccgaaatcccattatgaattaggagagaaacttaatatgcttgattttgatcttgccacaaaaactaccggttctagatttgtatttgttaaacatgagttggctctattagaaagagctttgtcaaattatatgctcgacaaacatataaatcataatggatataaagaaatttctccgccattaattgcatcagaaaatacaatgtttggtactggacaacttccaaaatttgaaaatgatcaattcgaaataaaattagaaaaggaaactgatcgaagatttcttatacctactgctgaagtgatattaactaatattgttaaggacaaaattatagatttaaaatctttacct

SEQ ID NO: 297027 - DNA, 751 bp, Unknown
  Bacterial polypeptide expressing nucleotide sequence isolated from the Sargasso Sea
atgcttgatacacatatcaacataaatgaatatcaagagatttctccgcctttaatagcttctgacaatacgatgtttggcacaggacaattgccgaaatttgaaaatgatcaatttgagattaaatttgatcaaggttctgatagaaaatttcttattcctactgctgaagttattttaacaaatattgttaaagataaaatcatagataaaaaaaatcttccaatgagatttgttgcttcaacaccatgttttaggaaagaagctgggagttacggtaaagatactaaaggtatgattagacaacatcaattttacaaagttgaattggttagtattgttgaaaaagaaaattgtttaaaagaattagagagaatgactgattgtgctacagacattctcgataaattaaaacttccatataaaaaaattatattatgttctggtgatatgggttttagcgctgaaaaaacatatgatatagaagtttggcttccgtcagaaaataaatatcgtgaaatttcttcttgttcttcttgttcaacatttcaggctcaaagaatgaaaacaagatacaaaaatgaaaataaagaaactgtatttgttggtacgttaaacggtagtggtttagctgttggaagaactcttattgctgtattagaaaattatcaacaaaaagatggctcaataattgttcctgaggtactgagaccatacatgaataatttagaaataatttcactcaaataaa

SEQ ID NO: 297028 - DNA, 315 bp, Unknown
  Bacterial polypeptide expressing nucleotide sequence isolated from the Sargasso Sea
tagatatttgtactggcgatttaggcttttcttcaagtagaacttttgatcttgaagtttggctccccagtagcaacagttatagagaaatttcaagttgcagcaattgtcttgactttcaagcacgcagatcatcaataagaacaaaaatcgataagaaaaatacatatttacacaccctaaatggtagtggccttgctattggaagaacaatggctgcgattcttgagaatggtcaacaaactgatgggagcgttaagattccagatgccctagttccttattttgggtcaaattgcctaaaaactgcttaat

SEQ ID NO: 297029 - DNA, 843 bp, Unknown
  Bacterial polypeptide expressing nucleotide sequence isolated from the Sargasso Sea
gcttgattttgatttagcaaccaaaacaactggagcaagatttgtttttgttaaaaataagttagcattacttgaaagagctatttcaaattttatgttagacactcatattttaaaaaatggttatgaggaaatttcaccaccattattagctactgaaaacacaatgtttggaaccggccaacttcctaaatttgagaatgatcaatttgaactaaaacttgatgagggtactgatagaaaatttttaataccaactgctgaagtaattttaacaaatattgtcaaagatacaattttagatcttaaatctttacccatgagatttgttgcatccactccatgttttagaaaagaagcaggaagctacggaaaagatacaaaaggaatgatcagacaacatcaattttacaaagttgaaatggttagtattgttgaacaagaaaaatgtttcgaagaattagaaagaatgacaaattgtgcaacaggtattttagatctcttagaattaccctatagaaaaatgattttatgtagtggagatatgggattttcagctgaaaaaacttatgacattgaagtttggctaccttcagaaaataaatatagagaaatttcatcttgctcatcgtgttctacattccaagcagtaagaatgaaagctaggtacaaggatcaaaaaaaagaaatacttcacgttgggactttgaatggtagtggtttagcagttggtcgaactcttattgctattttagaaaataatcagcaaaaagatggctcaatatctattccaaaagttctaagaccttatatgaacaatttagaaaaaatttcaatcaatta

SEQ ID NO: 297030 - DNA, 820 bp, Unknown
  Bacterial polypeptide expressing nucleotide sequence isolated from the Sargasso Sea
atgcagccgccgtacttcatgaacaaggacatcatggcgggcgtggcccagctggagcagttcgacgaggagctgtaccacgtcaaaggcgacgacgagaagtacctcatcgccaccagcgagcagcccatttgcgggttccacaaggacgagtggatccaggcaggcgacctgccgaaacggtacgctggtgtgtcgacgtgcttccgcaaggaggcaggcagctcaggccgagacgtgtggggtatcttccgcgtgcaccagttcgagaaggtcgagcagttcatgatcgtcgattcagacctcgagacgtcgcgcgcggcgcaagaagagatgctcgccgtcgctgaggagttctaccagtcgctgggcttgtcatatcgcgtcatcaacatcgtgtcgggcgagctgaacaacgcggcgatcaaaaagtacgacttggaggcgtggttcccgggctacgaggagtaccgcgagctcgtctcgtgctccaattgcaccgactaccagtcgcgcgctatgaacatccgcaccggggccaaggacgacaaaaagttcgtgcacatgctgaactcgaccctgtgcgccacgacgcgcacgctgtcgtgccttatcgaaaactaccagacgccgcacggcgtgcacgtgccggaggtgctggtgcccttcatgggcggcattacgcacatcccgttcgtgcgcgagctcagggcctctggcaagggtgacaaaaaggccaaggcggccaagggcaagggcggtggcggcagcggtgcggccaagaagaaagggggtggcgcggacgaaaagaagagcagca

SEQ ID NO: 297031 - DNA, 793 bp, Unknown
  Bacterial polypeptide expressing nucleotide sequence isolated from the Sargasso Sea
tttgatacagcatcaaaaatatcaggttcgggctttcctttgtatattggagaaggcgcaaagttagagagagcgttaattaattatatgcttgatttccaaacaaaaaatcatgattataaggagatatttccgccatttatggttcgctctcaatctcccctgacaacaggaaatcttccaaaattctcagaagatatgtatttcatagaaagtgacaatctttggatgattcctactgcagaagttcctattacgaatatacaccatgatgaaattttattagaggatcaacttcctattaaatatgcagcgtattccgcttgttttagaagagaggcagggtcacatggtaaagagaccaaaggcttattaagactccatcaatttaataaagtggagttggttcaatttgtcaaacctaaagagtcctataaaattcttgaagaattaaccaaacatgctgagtctattttgcaggatctaggtttacgatatagagtggttgagctatgtacaggtgatttaagtttctcagctgcaaagtgttatgatttagaggtttgggcacctggagaacagcaatggttagaagtatcttcatgtagtaactttgaatcatttcaagctaggcgtggaaatattcgttatagaaaagctaatgataattctgtagagtttgttcatactttaaatgggagcggtttggctacaccaaggttgatggttgcaattttggaaacctatcaaaaacctgatggatcaatttcaatcccaaaacctctaaaagatt

SEQ ID NO: 297032 - DNA, 911 bp, Unknown
  Bacterial polypeptide expressing nucleotide sequence isolated from the Sargasso Sea
ggtgggaggaaaaatcaaaggcggcgccgacccaaagagtgaagaagtggccgatctgcgtcggcagggcaacaccatcaaacaaaaggtggccgtgctggaagaggaggagaagcatctgtcaggccaactgcgcgagcagctgctcacctatcccaaccttccctcgccggaatgcccggatggacgcgacgagaacgacaacattgaagtgcgtcggtggggaacgcctcgagaggagacggatctcgaggagcactggcagatcgccgaccgtctcgggttgttcgataccgagcgatccgtgcgcattgcacaaagccgcttcgtcaccttgatcggtgcgggtgcccgcctggaacgggccctgatcaatttcatgctcgatctgcacaccagcaagggctacagggaagtgttgccaccggtgctggtgaacagcgcgagcctgactggctccggccagctgccgaaatttgctgaggaaagctttcgttgcgccgaggacgatctctggctgacacccaccgccgaggtgcccgtcacatccctgcatcgcgacgaaatcatccccctggaccaactgccgttgcgctatgcggcctacagcccctgtttccggcgggaagccggcagctacgggcgcgatacccgcggactgatccgcttgcaccagttcaacaaggtggagctgtactggttcagccatcccgatcaatcggaacaggcccatcaacagatcaccgctgacgccgaggcggtgttgcaggccctcgaacttccctaccgcgtgctggatctctgcacgggtgatctcggcttctccgcccaacgcacctacgaccttgaggtctggcttcctggtgcagggacttatcgagagatctccagctgcagcgtctgcggtgatt

SEQ ID NO: 297033 - DNA, 571 bp, Unknown
  Bacterial polypeptide expressing nucleotide sequence isolated from the Sargasso Sea
actaatatttgttaaagataaaattttaaatcataaagatcttcctatgagatttgtagcttcaactccttgctttagaaaagaagcaggaagttatggaaaagataccaaaggtatgattagacagcatcaattttacaaagttgaaatggtaagtatagtagaacaaacaaagtgtttagaagaattggaaagaatgacagactgcgcaacaggaattttagatcttttagaattaccttatagaaaagttattttatgctgtggtgatatgggttttagtgctgaaaaaacctatgatattgaagtatggctaccatcagaaaaaaagtacagggaaatttcgtcatgttcatcctgtgctacttttcaagctgtaagaatgaaggctaggtataaaaatcaaaaaaatgagactctattcactggcactttaaatggaagtggtctggcggtagggagaactttgattgctattttagaaaattatcaacaaaaagacggttcaattacaattccgaaagtattaaaaccttatatgaacaatttagaaaaaattttacccaattaa

SEQ ID NO: 297034 - DNA, 848 bp, Unknown
  Bacterial polypeptide expressing nucleotide sequence isolated from the Sargasso Sea
gatgcttgatcccaaattactgcgcaatgacctagattttgttgtttctgaactgcaaaaacgtaccttcactcttgatacaaaacactatcagtccctagaagacaagagaaaagcacttcaagttgaaacagaagagcttcagaataaacgcaatatattgtcaaaggaaattggggaagctaaagcaaataaaaaaaatgctgagagccttttaaaaaaagcggaaagtattggtgcaagcttagaggataaagagagactacttgaacagatcaacaatgagttaaggattatctttctcggtattccgaatatactgcatgaaagcgtccctccaggtaaaagctcagatgataataaagaaatcagtacgtatcagtcgagcttcaataaaacagaaaaagtcttagatcatgcagagctcgggcagagagctaagcaaatcaattttgatcaagcggcaaaaataaccggctcacgtttttccatcctgcaaggagaaattgcacaactacaccgagccttaactcagtatatgatgaatacacatatagaaaaacatggatatgaagaagtttatgtgccatatatcgttaatgaagattctcttattggcacagggcaacttccaaagtttgctgatgatttgtttaaattagatgttgatcaagagttttatctcataccaacggcagaagtatcaataacaaatattgttcgcgagaaagtattagactccgaagatcttccgcttaaatatgtatcgcacactccttgttttcgttcggaagctggaagccatggtaaagacacgagaggcttgattcgtcagcaccagtttgaaa

SEQ ID NO: 297035 - DNA, 265 bp, Unknown
  Bacterial polypeptide expressing nucleotide sequence isolated from the Sargasso Sea
tttgggttgccgttctgaaaataaatatagggaaatttcatcttgctcatcttgctcaacctttcaagctgtaagaatgaaaactaggtataaaaatgcaaagaaagaaacactttatgctggcacattaaatgggagtggtttagcaataggtagaactcttattgctattttagaaaattatcagcaaaaagatggctcaataactattccaaaaatacttagaccttatatgaacaatttggaaaaaatttcactcaattaa

SEQ ID NO: 297036 - DNA, 445 bp, Unknown
  Bacterial polypeptide expressing nucleotide sequence isolated from the Sargasso Sea
gattagacagcatcaatttactaaagttgaattagtttcattagtagaacctcaacaatcaaaagaggaattggagagaatgcttaattgcgctgaaggaattcttcaagatttagagcttcattatagagtaattacattatgcacgggagatatgggttttagcgctaataaaacttatgatatagaggtgtggcttcctggggaagataaatatagagaaatatcaagttgctctaattgtggagattttcaagcaagaagaatgaatactagatataaacaaaatgacaaaaatatttatatacataccttgaatggttcaggccttgcagtaggaagaacattaatagctatattggaaaattatcaaactgccgatggaaatgttaggattccaaaagtattgaaaaaatattttgataatcaagaacatcttttttag

SEQ ID NO: 297037 - DNA, 986 bp, Unknown
  Bacterial polypeptide expressing nucleotide sequence isolated from the Sargasso Sea
cagcattaaagatataagaaaaaattttatagaatttaaaaagttgatgaaactacgaaatgtagactctgatctagaaaatattttatctctagatgaaaaaaatagaaatcttatacaagaaaaagaatctcttgaaatggaaaaaaaaagtatatctaaaaaaaaagatgaaaaactttttgctaaatctaaagaaatatctttaaaaattgatgatttaagtaagaaacaatctctaataaaaaatgaacttgataatattttatctaatgttccaaatattccattaaatgatgttccttatggaaaagatgaaaatgataataaggaaattttaaaagctggtgaaataaaaaattttaattttaaaccaaaatctcattatgaaattggggaaaaattaaatatgttggattttgatttagctacaaaaactacagggtcaagatttgtattcgttaaagataaacttgctactttggaaagagctttatcaaattttatgatagatactcatactaaaataaatggttataaagaaatatctccacccttaatggctactgatgatactatgtttggtactggacaattgcctaaatttgaaaatgatcaatttgagataaaatttgatgaaaaagaaggtcgtaaatttcttattccgacagcagaagtaatcttaacaaatatggtaaaaaaccgaataattaatttgaataacttgccaattagacttgttgcatcaacaccttgttttagaaaagaggctggtagttacggaaaagacacaaagggtatgattcgacaacaccaattttataaagttgaacttgttagcatagttgaaaataacaaatgtctagatgaattagagcgtatgacaaattgtgctacaatgattttagataaattaaaactaccatatagaaaaataatcttaagcacaggtgatatgggttttagtgctgaaaaaacttatgaca

SEQ ID NO: 297038 - DNA, 262 bp, Unknown
  Bacterial polypeptide expressing nucleotide sequence isolated from the Sargasso Sea
tatggattccttccgaaataaatatagagaaatttctagttgttcttcttgcggaacctttcaagccagaagaatgaaggcaagatataaaaataaagataatgagacaaatttcgtcggaactttgaatggcagtggacttgctatcggaagaactttaattggtatacttgaaaattatcaaaatcaagatggctctgttattattccagatgttttaaaaccttatatgggcaatattgataaaatatcacctaattaa

SEQ ID NO: 297039 - DNA, 657 bp, Unknown
  Bacterial polypeptide expressing nucleotide sequence isolated from the Sargasso Sea
gccttttatatgtaataaacaaagttttgtaggaacaggtaatttaccaaagtttgaagaagatttatttaaaattagtggtaccgaaaactatctcataccaacagccgaagttccactaacaaatatccattcaaatcagattattaatgcttctgacttccctattaaatatgttgcatatagcgcttgttttagatctgaagctggttcatatggaaaagatgtgaagggtttgattagacaacaccaatttaataaaatagagctggtcaaaatcactgatgaattttcatcctctgatgaattagagaaattaacagaagacgcgtgttcgatactagataaactagagcttccatatagagttgtagcattgtcatctggagatatgagtttctcctcagcaaaaacatatgatatagaagtatggataccttcagaaaataaatatagggaaatttcatcatgtagtaactttggttcatttcaatctagaaggtctaacatcaagtataaagtaggtaataaatctagttttgctcatactcttaatggctctggacttgcagtcggcagaacgtttgtatctatactagagaactttcaaaactctgacggaacaattacaattcccaaggttttaagaccttattt

SEQ ID NO: 297040 - DNA, 700 bp, Unknown
  Bacterial polypeptide expressing nucleotide sequence isolated from the Sargasso Sea
ggtatctcctccacttattgtaaatgaagatgttatgtttggtacaggccaacttccgaaatttgaggatgatcaattcgaaattaaaacagataaattagaggatagaaaatttttaatacctaccgctgaagttgttctaactaatttagttagaaaatcaatgctcgccattgaaaatcttccattaagatttgttgcttcaactccatgttttagaaaagaagctggtagttacggaaaagacactaaaggaatgatgagacaacaccaattttataaagttgaacttgtaagtattgtggatccaaaagattgcatgacggagttaaatagaatgctgaattgcgctgaggaaattttaaaaaagcttgaaataccctatcaaatagtacttttgtcatcaggagatatgggatttagtgcagaaaaaacttttgatattgaagtgtggattccttcagaaaaaaaatttagagaaatttctagctgttcttcttgtggtactttccaggcaagaagaatgggagctaaatataagacatctaatggcacagaatatgtcggaactttgaatggatctggtttagccgtaggtagattaatgattgcattagttgaaaataatcaaaatgaagatggatcaattaccattccaaatattctaaaaaaatatatgaataatcaagataaaatttga

SEQ ID NO: 297041 - DNA, 838 bp, Unknown
  Bacterial polypeptide expressing nucleotide sequence isolated from the Sargasso Sea
aatcaaatatctaaatctataggacaattaaagagtcaaaaaaaagatgccactcatgaaatggaaaaagttgaagatataaaaaataaagttaacaccctgaaagaattagaaacattaaaagacgatgagttaaaatcaattctaagtagattgccaaatataccagactcgagtactccagcaggagctaatgaaactgaaaatgtgttttataaagattggggtgataagcctacttttgattttaatcctaaacttcacttcgaaatcggtgaaaatgctaattcaatgaattttgaaactgcaacaaaattatcaggttcaagatttgttattttaaaaggtcaactttctaaattagagagagctattacaaattttatgattgataaacatactttagtaaatggatatgttgagatgcatgttccttacttggttaaagaagagacattatatggcactggacaattaccaaagtttgcagaagatttatttactgccggtgatgatcattggttaatacctacagctgaaataccactgaccgcacttcatagtaatgaaatattaaatattgatcaattgcctatgcgatttacttcttatacaccttgttttagatctgaggctggggctgctggaaaagatactagaggtatgcttagacagcatcaatttactaaagttgaattagtttcattagtagaaccccaacaatcaaaagaggaattagagagaatgcttaattgtgctgaaggaattcttcaagatttagagcttcattatagagtaattacattatgcacaggagatatgggttttaacgcataat

SEQ ID NO: 297042 - DNA, 147 bp, Unknown
  Bacterial polypeptide expressing nucleotide sequence isolated from the Sargasso Sea
ccaactgctgaagtgcctttaacgaatttatttgccaactcaattattatatctgataaattacctattagactatgtgcagttagtcaatgctttcgatctgaggcaggtagcgcaggtaaagatacaaaaggaatgctaaggcag

SEQ ID NO: 297043 - DNA, 405 bp, Unknown
  Bacterial polypeptide expressing nucleotide sequence isolated from the Sargasso Sea
ttactacaccagatcaatctgaaaaagaattggaaagaatgctttcttcagcagaaagtatcttaaaagatttagaaattcattacagaattgtaactttatgtactggtgatatgggatttgcagcacaaaaaacatatgatattgaagtgtggttacctggtgaaaacgcatatagagaaatatcaagttgttctaattgctcagattttcaatcaagaagaatgaatactaaaatcaaaaagaatggtaaaaatatatttgcacatactctaaatggttcaggtctagctgttggaagaactcttattgctattctagaaaattatcaaacagaagatggaaatgtattaattcctaaatgtcttcaaaaatattttgataataaaaaaacattaatatagt

SEQ ID NO: 297044 - DNA, 407 bp, Unknown
  Bacterial polypeptide expressing nucleotide sequence isolated from the Sargasso Sea
aaataatgaatgtattaatgagttagaaagaatgacaaattgtgcaacaatgatacttgataaactagaattaccttacagaaaagtaattctatgctctggtgatatgggtttcagtgctgaaaaaacctatgatattgaggtatggataccctcagagaataaatatagggagatttcatcttgttcatcttgtggaagttttcaggcaagaagaatgaaaagcaggtataaaaatgaaaataatgaaactctttttaccggtactttaaacgggagtggtttagccattggcagaactcttatagctattctagaaaattatcagacaaataatggtgatatagttgttccagaaatattaaaaccatatatgaacaatttgcagaaaattagcgccaattaaa

SEQ ID NO: 297045 - DNA, 892 bp, Unknown
  Bacterial polypeptide expressing nucleotide sequence isolated from the Sargasso Sea
aggatcagatgaaaaatttaataaagttattgaaactagaggtgaaattaaaaataaaaactttaaagtaaaatctcatttcgaactaggtgaaaatttaggaatgttagattttgaattagcctctaaaacttctggctccaggtttgtgtttgtaaaggataagttagcaatgatggaacgggccctatcaaattttatgttagacatacatacaaaatataatggatataaagaaacatctccccctttgatagtgtcagaaaatacaatgtatggaactggacaactacccaagtttgaaaatgatcaatttgaaatcaaacttgacggtaatgaggacagaaaatttcttattccaacagcagaggtaattttaacaaatgtagtgaaaaatcaaattattaaacaaagtaatttgcctataagacttgttgcttcaacaccatgttttagaaaagaggcaggaagctatggaaaggataccaaaggtatgatacgtcagcatcaattttacaaagttgagttagtcagcattgtagaaaataaagattgtttagaagagttagaaagaatgactaactgtgctactatgatattagataagctaaaacttccatatagaaaagtaattttatgcactggtgacatgggatttagtgcagaaaaaacttatgatattgaagtctggcttccatcagaaaataaatatagagaaatatctagttgttcatcttgtggatcatttcaagctaggagaatgaattctcgttacaaaaactcagagaatgaaaaattatatatcggaacattgaatggtagtggtcttgctattggcagaacgttaattgcaattatggaaaattatcaagaagaggatggatcaataatt

SEQ ID NO: 297046 - DNA, 421 bp, Unknown
  Bacterial polypeptide expressing nucleotide sequence isolated from the Sargasso Sea
tcagctagttcatccagatgattcctggaaagcgctggatgagctgactggacatgcagaatctattttggagaaattaaatctaccataccgctcggtggttctttgcggaggcgatctgggtttctcatctgccaagacgatcgatttagaggtttggttgcccgggcaggcccagtaccgagagatctcttcatgttcgaatttcctagattttcaagcacgacgaatgcaagccagatttagaaatgaaagtaccggtaaagtggaattagtccatacgctcaatggttctgggcttgctgtaggcagaacacttgttgcggttttggaaaattatcaggatgccgaggggaatattcagatcccctctgttttgaggccctatcttaatggagtttcgttgttggaattgggatga

SEQ ID NO: 297047 - DNA, 502 bp, Unknown
  Bacterial polypeptide expressing nucleotide sequence isolated from the Sargasso Sea
actgcttgttttagaaaagaagctggaagttatggcaaagatacaaaaggcatgataaggcaacatcaattttataaagttgaacttgtaagtatagttgagccaaaaaaatgtttagaggaattagacagaatgactaattgtgctcaagaaattttaaaaagattaaagcttccatatagagttgttatattatcaacaggagatatgggttttagcgcagagaaaacatttgatatagaggtatggataccttccgaaaataaatatagagaaatttctagctgttcatcatgcggtcaatttcaatcaaggcgaatgaaagcaaaatttaaaaatgataagaatgaatctgattttttaggtacattaaatggctcaggactggcagtaggaagaacattaatagctattatggaaaattatcaacaaaaagatggaagtataataattccagatgttttacgatcttatatgctaggtgctgaaagaataggataat

SEQ ID NO: 297048 - DNA, 569 bp, Unknown
  Bacterial polypeptide expressing nucleotide sequence isolated from the Sargasso Sea
accactgaccgcacttcatagtaatgaaatattaaatattgatcaattacctatgcgatttacttcttatacaccttgttttagatctgaggctggggctgctggaaaagatactagaggtatgcttagacagcatcaatttactaaagttgaattagtttcattagtagaaccccaacaatcaaaagaggaattagagagaatgcttaattgtgctgaaggaattcttcaagatttagagcttcattatagagtaattacattatgcacaggagatatgggttttaacgctaataaaacttacgatatagaggtgtggcttcctggggaagataaatatagggaaatatcaagttgttctaattgtggagattttcaagcaagaagaatgaatactaggtataaacaaaatgataaaaatatatatatacataccttgaatggttcaggccttgcagtaggaagaacattaatagctatattggaaaattaccaaactgccgatggaaatgttaggattccaaatgtattgaaaaaatattttgataatcaagaacatcttttttagt

SEQ ID NO: 297049 - DNA, 337 bp, Unknown
  Bacterial polypeptide expressing nucleotide sequence isolated from the Sargasso Sea
gcttatttaccctacagattagttgatatttgtactggagatttaggtttttcttcaaccagaacttttgatcttgaagtctggctaccaagtagtaaatgttatagggaaatttcaagttgcagcaattgtttagactttcaagctcgcagatcatcaataagagcaaaaattgataaaaagaatacatatcttcataccttaaatggtagtgggctcgctattggaagaaccatggctgctattttggaaaatggccaacaaactgatggaagcgtaaaaattccagatgctttagttccatattttggatcgaattttttaaaaactgcttaag

SEQ ID NO: 297050 - DNA, 814 bp, Unknown
  Bacterial polypeptide expressing nucleotide sequence isolated from the Sargasso Sea
atgttagatataaaaaaggttcgcgagaatccagataaagttgataaattattagcaaaaagaaaccacccagctgtttcaaaagatcttttatcagctgatgagaaaaatagaagcttgatttctgagcttcaaaaaattcaagaagaaagaaatttaaaatctaaattaattggtgagtatactaccaagggaaatactgcggatgcagacaaacttaaagaagaggttggaaatttaaaaacaaaaatgcagaatttagaagaacagcaaagaaattcacaaaattcattggaaataatgttatctgaaattccaaaccttccagatgagtccgttcctgttggtgatgagtcaaaaaataaagaaattaaaatagaaggaaataaaaaagaattttcttttaatttaaaggaacattttgatcttggagaaaacctaaatgtaatgagcttcgaaaaagctgcaaatatttctggagcaaggtttgtaatccaaaagggtatacttgcgagactagaaagagcaatagctaactttatgctagatcttcatacaactgaatttgaatacgaagaaatgaacgttcccattcttgtgaaggaccaagctgtttttggtacaggacaattgccaaagtttaaagatgatctatttaaaacaaccaatgattattggctaattcctacggcagaagtgcctctaactaatatgacaagagaaactgtactagatattgctgaattacctaaaagatatgtggctcatactccttgcttccgatctgaagcaggagcagctggaagagatacgc

SEQ ID NO: 297051 - DNA, 996 bp, Unknown
  Bacterial polypeptide expressing nucleotide sequence isolated from the Sargasso Sea
acttgaacaatcacaaaaaatctattgagacaaattacagaaatcttgcattatcagtaccaaatatgattcataaatcagttccaattggacctgatgaatcagacaatgtagaggttagaaaatggggagatttaccaaattttgattttgatgtaaaaggtcatgaagaaattgctgaaaaactaaaccttcttgatattaagagggcgtctaaaattgcaggtgctaggttttactttctcaaaggtgatttagtaagacttgctcatgcagtgactgcatttgcatctgatttcttatcagaaaaaggatacaagttgatacagccaccatatatgattaataaaaaatccatggaaggagctgtaatagcagatgatatggcagatgtgatttacgagatacaggaagatgaacttttcctaattggtacatctgaacatgcaattgcatctatgtattcagatgaaatcatagatggaaaatcacttccagacagatttggctctattagtccatgtttcagacgagaagcaggtgaacatggaaaagatcagaaaggaattttcagagttcatcaatttgaaaaatttgaacaatttgtttttgcaaaaccagaagattcagaaaatgaacaagaaaaaatgattggatgcactgaagaattttatcagaaacttggaattccacaccgagttgttttactttcaagtggagatatgggcaaggttgctgctaaaacatatgatgtcgaggcttggatgccaggccaaaatgcgtacagagaaatctgctctgtctcaaactgtcttgattttcaagcaagaagattaatgataagatttcgtgataaaacgaacgaagaaacacaatacgtccatacattaaatggaacactggtagcaatagaaagaacgttagtagcaataatagaaaattttcaaacaagtgatggtcacataaaagtgccagaagtattacagaaatattaga

SEQ ID NO: 297052 - DNA, 352 bp, Unknown
  Bacterial polypeptide expressing nucleotide sequence isolated from the Sargasso Sea
attagatgcgctaaaacttccttatagaaagattattttatcttctggtgacatgggttttagttcagaaaaaacatatgacattgaagtttggataccttcagaaaataaatatagagaaatatccagttgctcctcatgtggaacttttcaatcaagaagaatgaaaggaaggtttaaaaatatcaataatgaaaccaaatttttgggaacattaaatggtagtggtttagcagtaggaagaactttaattgctgttttagaaaattatcaaaatgaagatgggtcaataagaattccggatgttctgagaccgtatatgaacaatcttgatgaaatcactagcaattaa

SEQ ID NO: 297053 - DNA, 261 bp, Unknown
  Bacterial polypeptide expressing nucleotide sequence isolated from the Sargasso Sea
ggctacctgcagaaaataaatacagagaaatatctagctgctcatcttgtggttcttttcaagccagaaggatgaaatctagatataaaaataaaaaaaacgaaactgtttttttaggaactctgaacggaagtggtttagctgtgggaagaactttaattgcaattttagaaaattatcagcaatctgatggatcaattaaaattccagaagtcttaaaaccatatatgaataatcttgataaaatagcaaagaaataga

SEQ ID NO: 297054 - DNA, 238 bp, Unknown
  Bacterial polypeptide expressing nucleotide sequence isolated from the Sargasso Sea
aatacttatagagaaatttcaagctgttctaattgtaatgatttcaaagctagaagaatgaatacaagatataaattagaaaataaaaatatttttgttcatacactaaatggatctggcttagcagtaggaagaacactgattgctattcttgagaattatcaaatgaaagatggaaatattaaaattccagaagttttaaaaaaatattttaataattctgatactcttatctagt

SEQ ID NO: 297055 - DNA, 697 bp, Unknown
  Bacterial polypeptide expressing nucleotide sequence isolated from the Sargasso Sea
taagattttagaaactgatagaaaaaaatttcaaacgcttacagaagagctgcaatcaaagagaaagcttctctctaaagagtatggagaccttaaaaagataggaactaccgaccctgatttaataaaaaaaatagaatcaataaagaatgagttaaatatttgctctgaaaatcttttaaatatacaaagtagtttaagaaattttttgctagatattccaaatattcctcataagtcagttccaaatggaaaaaatgaagaaaataatgttgtaattagggaatttggcgaaccaaaaatttcagggggcaaagatcacctagatataacttcaatgattgatcttgaaacagcaaatttactagctggatcaagattttctgtactcaacggcgaaattgctaaattacaccgttcgttaataacatacatgttagataaagcatctgaacatggatatttagagcactatttacctatgatagcaaatacagaatctctgacttccacaggtcaactgccaaaattttttgatgatttatttcagttaaccgatgactattatctgatacctactgctgaggttccattaacaaatatttttagagatcaaattatagattttgctgatcttccgctaaagctttcagctcacactagttgttttaggtctgaggctggtagttatggaaaa

SEQ ID NO: 297056 - DNA, 739 bp, Unknown
  Bacterial polypeptide expressing nucleotide sequence isolated from the Sargasso Sea
atgcttgatacacatattaatgagtttggctataaagaaatttcacctccattaatagtaaatgaagaagtaatgtttggcacgggtcagcttcccaaattcgaagatgatcagtttgaagttaagcttgaaaattcagaagatagaaaatttttaattcctacagcggaagtagttttaactaatttagtaagaaaatctagtttaagttctaaggacctccctttaagatttgtagctgccactccttgtttcagaaaagaagctggtagttatggaaaagatacaaaaggtatgatgagacagcatcaattttataaagttgaattagtaagtatagtggaaccaaaaaattgtatgtctgaactagatagaatgctaaattgtgctgaaagtattttgaaaaaacttgagttaccatatcaaataattttattatcatctggagatatgggatttagtgctgaaaaaacttttgatattgaagtgtggattccctcagaaaaaaaatttagagaaatatcaagctgttcttcttgcggttcttttcaagcaagaagaatggggacaaaatataaaggcgctagtggaagtgagtttgttgggactttaaatggctcgggtttagcagtaggaagattaatgatagccttgatagaaaactatcaaaataaagatggatcaattaacatcccaaaaaatttaaaaaaatatatgaataatttagataaaatttgaa

SEQ ID NO: 297057 - DNA, 899 bp, Unknown
  Bacterial polypeptide expressing nucleotide sequence isolated from the Sargasso Sea
ttcgtctaaggacgatgacaatttaaaagatcaggcttcatcgttatccacacttgtaaaacaagacaaggaaatacttcagacaatcaaacataatattgatgagtttcttctggatatccctaaccttttggatgactccgttcccgttggagaagatgaaacttcaaaccagattattgaggaaattggcaatattcctgaattttcttttgagcccaagtcccattctgattttattgaaaaaactgatcagggtaggggagtaaaaattgccaagagtcgatttactgttttaagtggaaaattagcaaaattacacagggtaattggacagtttatgattgatactcacgtaaaaattcatggttatgaggaactttatgttccctacatcgtaaataagtcttctttaattggtacaggacaacttcctaaatttgaagaagatttgtttaagctgactgaaacacctgatctctatttagctccaacagcagaggttcctgttactaatcttcacagagatgaaaaacttaaattggatcaattacctttaaaatatgtctgccattcaccttgttttagaagcgaggcaggtagttacggcaaagatacgaaaggtttaataaggcaacaccaattcgataaagttgaacttgttaaaatctgccatccagataaatccgaagttgaacataaaaaattaatagaggacgcgagtaaaattcttgagttacttgagttgccttatagaaaagtcattctgtcatcaggagatacaggattttctgccgcaaaaactgttgatctggaagtttggtttccaagtcaaaatacctatagagaaatatcatctttgttcaattttactgattttcaatcgagaagagctaatt

SEQ ID NO: 297058 - DNA, 772 bp, Unknown
  Bacterial polypeptide expressing nucleotide sequence isolated from the Sargasso Sea
atgttagacataaaaaaattaagagatgactttgataatgttaaatctgctttaaaaaagcgtggatatgaaattgatcaaaaaaaatttcagtctttagataaaaaaagaaaggttctacaagtagatgtagaaaatcttcaagctgaaaagaagaaactttcttcagagtttggcaacttaaagtcttctggtaaaaatactgactcactaaaagaaacgatagataaaaaaacacttgaacttaatgagaaagatagtgaattgaaaattattttagatcaaatagatagctttttattaaggatcccaaatatatgccatgattcagtccctgaaggacaaaacgaagatgataatgttgttgtaagccaacatggaaaaattgattcaaaaaatacattagaccatttggagataaccaaaaaaatagatgtagatttagcagttaaattggcaggagcacgtttttcagttttaaaaggagaccttgcaaaacttcaaagatcattaattacttttatgcttgataatgcatcggctaatggatacgaggaatattatctcccatttatggctaatagaaattcattagtaggaacaggacaacttcctaagtttgaagaagatctatttaaaacttacgataaattatatctaataccaacagctgaagtcccactgactaacttatttagaaatgaatttgttcaagaaagtgatcttccaatcaaggtaacatctcacacaccatgttttaggtctgaagcag

SEQ ID NO: 297059 - DNA, 703 bp, Unknown
  Bacterial polypeptide expressing nucleotide sequence isolated from the Sargasso Sea
caaaacaaactttcaaaaaaaattggtgaatattttcagtcgggagatcatgcttctggaaatcaattaaaaaaggaagtcgaagcgttaaagcctgaccaaaaaaaattagaggaagatttaaataaaataaaagtagacttatttgagaatttaaataatgttccaaacattccacacgcactagttcgaaaaggtaaaaatgaagaagataatgagattatctatcaatcagatgatattgacaaactatcacccaaagcaaagccacattgggaattagcttctgattataatctgattagttttgaacttggaaataaaatttccggttcaggatttcctgcatacatagacaaaggtgctaaactggaaagatcactcataaacttttttctagattataacattaaaggtggttacacagaggttcaacccccaatattaattaacgagagttcgggtcatggcactggtcaattgccagataaggaaggtcaaatgtataaaattgaaaatgaaaacctttacttaatacctactgctgaagtcccaataacaaatttttatagaaacaaaacaatcagtaaaaatagtcttccgataatgcttacaggttacacaccttgtttcaggagagaagcaggaagttatggttcagaagtgaggggattgaacagattgcatcaatttgataaagttg

SEQ ID NO: 297060 - DNA, 742 bp, Unknown
  Bacterial polypeptide expressing nucleotide sequence isolated from the Sargasso Sea
taaacatactatcgataacggatacacagaaatttcaccacctctaattgcttcggaaagtacgatgtatggaacagggcaaataccgaaatttatcgatgatcaatttgaaataaagcttgatgataaatctgagagaaagtttttaataccaactgctgaagttattttaacaaatatggttaaaggtaaaatattaaataaaaatgatttaccattaaggttagttgcatctaccccttgttttagaaaagaagctggcagttacggcaaagacacaaaaggtatgataagacagcatcaattctataaagttgaattggttagtattgtcgaaccgcaaaattgtaaaagtgaattagaacgaatgacaaattgtgcgactggaattttagactctttaaaattaccttacagaaaagttgtactgtgtacaggagatatgggttttagtgcagaaaaaacttatgatattgaagtatggattccctcagagaataaatatagggaaatttcaagttgttcctcttgtggctctttccaagctagacgaatgaagggtaggtataaaaatgataaaaaggaaactttatttttaggaactctcaatggaagtggtcttgctgttggtagaactttaatagccatattagaaaattatcagcttgaagacgggtctataaaaattcctaatgttcttagaccttacatgaataatttggataaaatttcaattaaatag

SEQ ID NO: 297061 - DNA, 894 bp, Unknown
  Bacterial polypeptide expressing nucleotide sequence isolated from the Sargasso Sea
agaaacgttgatgtagactttgaccaaatattaaatcttgatgaagaaaatagaaaattaattcaagaaaaagaaaaattagaaatggaaaaaaaatctatttctaaatctaaagatgaaacactttttgaaaagtcaaaagaaatttcaaataaaatagatgatttaagtaaaaatcaaaaaaatgttaaagaccaacttgatcagatattaagtaatattcctaatttaccattgaatgatgtccccgtaggtaaggatgaaaatagtaataaagaggttgtaaaatctggtaaaattaaagaaatgagttttaaaccaaaatctcattatgaaattggtgaaaaactgaatatgttagattttgatttagcaacaaaaacaacaggatcaagatttgtttttgttaaagacaaattagcatcattagaaagagcaatttctaattttatgattgatacacatgtcaataataatggctatactgaaatctctccacctttaatggctacagacaacactatgtttggaaccggccaattgcccaaatttgaaaatgatcaattcgaaattaagtttgatgataaaaatgatagaaagtttttaatccctactgctgaagtaatattaactaatatggttaaaaatcagatattaaattttaaatcattgccaatgagattagttgcatcaacaccttgttttagaaaagaagcaggaagttatggtaaagacaccaagggcatgattagacaacatcaattttataaagttgaattagtaagtattgtagaaaataataaatgcattgaagaactagagagaatgactaattgtgcaactaaaattttagatgatttacaattaccttacagaaaaattattttaagcact

SEQ ID NO: 297062 - DNA, 645 bp, Unknown
  Bacterial polypeptide expressing nucleotide sequence isolated from the Sargasso Sea
catgcttgatgccaaactcgttcgtacccaaccgcaactgctcgccgagcgcctggccacccgtggtttcgcgctggatctggcccagctcgatgcgctggagtctcgccgcaaggctgtgcagacccgcaccgaaaccctgcaggccgaacgcaacagtcgctctaagtcgatcgggcaggccaaggcgcgtggcgaagacattcagccactgctggccgacgttgaccgcatgggcactgagctggccgaaggcaagcaagagcttgaaggcatccagcaggagctggacgcgttgctgttgagcatgcccaacctgccggccgaatccgttccggtcggtaaggacgaggacgagaacgttgaagtgcgccgctggggcacgccgcgcagcttcgacttcgaggtcaaggatcacgtggcactgggcgaacagcacggttatctggactttgaaaccgcagccaaactctcgggtgcgcgctttgctctgatgcgcggcccgatcgcccggctgcaccgcgcgctggcgcagttcatgctggatctgcacgtcaacgaacacggttatgaagaggcctacacgccttatctggtgcaggccgaggcgctgcaaggcaccggccagctacccaaatttgaaga

SEQ ID NO: 297063 - DNA, 838 bp, Unknown
  Bacterial polypeptide expressing nucleotide sequence isolated from the Sargasso Sea
atcgacttcgaagctggggttaaagtttctggctcacgtttctttatactacgtgatcaaggggcaaagctagaaagagctttaatcaattggatgttagatacacatacaaatcagaacaaatttgaagaaattcaagtacctgctcttgttaaacaagaaactatgaccggaagtggaaatctaccaaaatttgaagaaaatttatatagagatacagacgatgatttatggttaataccaactgctgaggtaccactcactagtattcatcatgatgatattctaaatggaaatgaacttccaaaatactacgtctcatatgccccatcttttcgaaaagaaaaaacttctgcaggtagagacacccgaggtattaaacgagtgcatcagttcaataaagttgaattatataaaattgtcactccagaaacttctaagtcggaattacatagcctaataagtattgttgaaagtcttttacaagaattaggtttgcattatagattacttgaattatgttcgagtgatattggattccaatcagcccaaagttttgaccttgaagtttgggcgccaggttctaaagaatggttagaagttagctcttgttccaactgtctggattttcaatctagaagagcaaatattaaattcaaacgagaacaatctagtaggacagaatacccacatacattaaatggatcagctcttgctcttccacgcattatgatttctattttggaaacttttcaacaaattgatggaacagttgtcatacctgaagtattacacaaatatacaggatttacagaaattaaacctaataacctataaa

SEQ ID NO: 297064 - DNA, 235 bp, Unknown
  Bacterial polypeptide expressing nucleotide sequence isolated from the Sargasso Sea
tttacaaaggtagaattagtatcaatagtagaaccacaattttctgaagatgagttagaaagaatgttagtctgtgcagagagtattttaaaagatttaaacattcactatagagttatgactttatgtactggtgatatgggtttttctgctaataaaacttacgatatagaggtttggttaccaggtgaaaatacttacagagaaatatctagttgttcaaattgtggcgatt

SEQ ID NO: 297065 - DNA, 519 bp, Unknown
  Bacterial polypeptide expressing nucleotide sequence isolated from the Sargasso Sea
aatgttttaggtcggaggctggtagcgccggcaaagatacaacgggaatgattagacagcatcagtttgagaaagtagagatggttacatactgtaaaccagaatttgaaaatttagagcttgagaggatgacagaatgtgctgagagaatactaaaaaatctattaataccgtttagaagaatacttttatgctctggggatattggttttgcatcaaaaaaaacatatgacctagaggtttggttgcccggccaaaataggtttcgtgagatttcgagttgttcaatatgtggagactttcaatctagaagaattaatataagatataaaaataaaaaagaatccaaacctgagtttgtatctactttaaatgggtcgggacttgctgttgggcgttgtttgattgcaattattgaaaataatcaattaaaagatggatctgtaataattccagaagtattaagaccatatatgttcaattaccaaaaaattgataataaaggaaacctaaattagt

SEQ ID NO: 297066 - DNA, 937 bp, Unknown
  Bacterial polypeptide expressing nucleotide sequence isolated from the Sargasso Sea
attattttactaaaaaactcatgggagagaaatataaagataaatataaaaaaaatattagatcttgataaaaaaaatagagaattaattcaaaacaaagaaaagttagagcaagaaaaaaaagtaatttctcaaaaaaaggacaaaagtcaatttaataaatctaaggaactttcaatagagattgaggaaattaataaaaaacacaaagtagttaaagatgaaatttatacaatattaagctctctacctaatattgctttggatgatgtacccataggcaaagacgaaaaagcaaataaggaaataaataaatttggagaaataaaaaaatttgattttaaacccttatcacattatgaaattggaaaaaaaatgaacatgcttgattttgatatagctacaaaaacttcgggcgcaaggtttgtttttattaaatctaagctagcggttctcgaaagagctatttcaaattttatgttagatgttcatacaaaagaatttggatatacagaaatatctccaccattaatagttagtgataccacaatgtttggaactggacaattaccaaaatttgaaaatgatcaatttgagataaagtttgatgatagtgatagtagaaagtttttaattccaacggctgaggtagttttaacaaatatagtaagagattcttttgttaataaacaggacttaccccttagatttgttgcatctacggcttgttttagaaaagaagctggcagttatggaaaagacacaaaaggaatgattagacaacaccaattttataaagttgaacttgttagtattgtagagccaaaaaaaaatattgaagaattaaaaagaatgactagctgcgccgaagaaattttaaaaagattaaaactaccttatagaacgattttattatcttcaggagatatgggattta

SEQ ID NO: 297067 - DNA, 241 bp, Unknown
  Bacterial polypeptide expressing nucleotide sequence isolated from the Sargasso Sea
tatagagaaatttcatcttgttcttcttgctcaacttttcaatctgttagaatgaaaactcgatataaagatcaaagcaaggaaacaagatatactggtactcttaatggtagtggtttagccattggaagaactcttattgcaattttagaaaattatcaaaaaaaagatggctcaattacaattccaaaagtattgagaccttatatgaacaatttggaaaaaatttcactgaattaaa

SEQ ID NO: 297068 - DNA, 580 bp, Unknown
  Bacterial polypeptide expressing nucleotide sequence isolated from the Sargasso Sea
cctgtaacaaatattttaagggataagatcgttgaggcagatgaattgcccgtcaaatacgtttctcatactccttgctttagaagcgaagccgggagctatggccgtgacactaagggcatgatacgacaacaccaattcgaaaaagtagagttagtaatggtagtgaggcctgaagattcgcaggatgctcatgaagagctcacgtctcatgccgaacaaattttgaaaaagctaaacctgccttatcgtgttgtaaatctttgtggaaaagatctcgggtttgcttcagcaaaaacctacgacatagaggtttggttgcctggccaaagtgcgtatcgagagatttcatcatgcagtaatttcttggacttccaggcaagacggattagcgggagatggaggcagacttcatccagcaaaccagaactttttcacacccttaacggctccggacttgccgttggcaggactctagtcgccatactcgagaattaccaaaacgttgacggtagcttatcgattcctgaggctctgcatccttacatggacggagaagagaaaatttcgctaggttagt

SEQ ID NO: 297069 - DNA, 925 bp, Unknown
  Bacterial polypeptide expressing nucleotide sequence isolated from the Sargasso Sea
aatgtataaaaaaaaaagagtgttagatcaaaaattaataagagaaaatccaacgaccgttgaagagaatttatccttaagaggaaaaatttataagatatcccacatacacgaattaaccgttaagaaaaaagaaattgccatagaaatatcgagcctccaatctgagagtaaaaaattaagcaaattaatcggtcaagtaattaggaaatcacaagacaccaattcacaagaactaaatgatttaaagaaaaaggggaacgaatacagggtcaaaatttctgaacttgaagagaagcaaagaatattagataaaaaagtagatgatgagatttataatttgccaaattttcctagcaaagaggcacctgttggcaaagatgaaactgataatgtacaaataaaaacttggggagatccattaataaaagagaatattaaatctcactgggaaataggcgaaagtcttaatatttttgaatccgttaaatcaataaaaatatcaaaaagtcgttttattactcttattggaaatggtgcaagattagagagggcattgattaattttatgctggatatgcatagtaaaaatggttacttagagttaatgcctccagctttagtaaattcagaaagtctcacgggatctggacaattacctaaattctcaaatgaaagttttaagtgttctaatgacgatctatggctttcgccaactgctgaagttccacttaccgctttccataaaaatgagatcattgattccaagcaattacctctaaaatatgttgcatatagcccatgttttaggagagaagctggcagttatggaagagatactaaaggtttaataagacttcatcaatttaataaggttgagctttattggttttgtgatccaagtaaatctagtgaagctcataaa

SEQ ID NO: 297070 - DNA, 295 bp, Unknown
  Bacterial polypeptide expressing nucleotide sequence isolated from the Sargasso Sea
ttttagtgctcaaaaaacttatgacattgaagtttgggtgccttcagaaaaaaaatatagagaaatttctagttgttcaacatgtggaacttttcaagctagaagaatgaaagccaaatataaaaattcaaaaaatgaaaaaaattttataggtacattgaatggaagtggacttgcaatcggaagaactatgattgcgatcctggagaattatcaagacaaagatggatcaattataatacctgacgtattaaaaccatacatggataatataaataaaatcacatcgaattag

SEQ ID NO: 297071 - DNA, 606 bp, Unknown
  Bacterial polypeptide expressing nucleotide sequence isolated from the Sargasso Sea
tggttatgcgaaattgcacagggctctaaagcagttcatgcttgacgtgcaaaccgaagaaaatggttataccgaaatgtatgttcctaatattgttcgctcagattgcttagagggtactggccagttaccaaagtttgcagatgatcagtataaaattgaaaatgatgaggctttatatctgattcccacagcagaagtccctttaaccaatttaattagggaaagcattcttgatcaaagcgaattaccaataaaaatgactgctcatacaccatgtttcagacaagaggcaggttcttatggaaaagataccaaaggaatgatcaggcaacatcaatttgaaaaagtagagcttgttcatattgttaaaccagaggaatcttatgaagcccttgaagagcttacaaagaatgctgaatcaatcctacagaagctcaatcttccctatagagtgatgctgctatgctctggagatacaggtttctctgctgctaaaacatatgatcttgaagtttggctgccttctcagaacaccttcagggagatatcatcttgtagtaattgtgagtcattccagtctcgtagaatgaaggctcgatataa

SEQ ID NO: 297072 - DNA, 757 bp, Unknown
  Bacterial polypeptide expressing nucleotide sequence isolated from the Sargasso Sea
aggagcaaaacttcaacgagcactaattaacttttttctacaagaagcatctgaagcaggttacaaagaatacctctctcctattcttgtcaatgaagacagtgctttagcaacaggtcaacttcctgacaaagaaggtcaaatgtatcatgcctctgatgatgatttttatttaataccaactggagaggttccgctcacaaacatatatagaaatgttattcttcctgatgaaaatttttcaattaaaattaccggtcatactccttgcttcagaagagaagccggatcatatggaaaagatgttcgaggattgaataggttacatcaatttgacaaagtagaaattgttagaattgaacatccaaataatactgagaacgcactaaatgaaatggttgatcacattaaaaatctacttgaaaaattaaagttaccatacagaatattaagattatgtggtggtgatatgggtttcacatctgctatgacctatgattttgaagtgtactcagcagctcaggaaaaatggcttgaagttagttctgtatcaagatttgacacatatcaatctaatagattaaagcttaggtataaaggaaatgataagaagaatcatttgtgtcatacattaaatggatctgcccttgcacttccaagaattcttgcatcaattttagaaaacaatcaaaaagacaataaaattattgttcctgaagttttgcacgaattttgtggtttcagtgaaatatcataa

SEQ ID NO: 297073 - DNA, 796 bp, Unknown
  Bacterial polypeptide expressing nucleotide sequence isolated from the Sargasso Sea
cacagcctgcacggcgagaagggggagcttaccttcgagcccaggaaccacaacgagctcatcgagatgaacggatgggtcgaccaggccaggggagcgaaggtagcaggcagccggttctacttcctgcaaggcgacctcgcccgaatggagatggccctgcagcagtacggcgcggacttcctgatggagcggggctacaccctggtccagccgccgctgatgatgaacagggaggcctacgagggagtgaccgacctcagtgacttcgagaccgtgatgtacggcatagagccagacaagtactacctaatcgcgaccagcgagcacccgctgaccgccatgaggatggacgaggtcatcgagccctccgagctgccgataaagatggtgggcgtctcgccctgcttcaggagggaggtcggcgcgcacggcctatcggacaggggcatatggagggtccaccagttcacaaaggtagagcagatagtgatatgcgacccagaggactcctggggacaccacgaggacctgctcacgaacgcggtggacatgtgggacagcctcgggctgcactacagggtggtcaacatctgcactggcgacatgggcactgtggcagcgaggaagtacgacctcgaggcctggctgcccggcgcgggcgcgtacaaggaggtcgtctcctgctccaactgcaccgactaccaggcgaacaggctcaggatgaggtacaggaccccgcagggcaactcggcagtgcacaccctgaactcgaccgcgatcgcgaccagcaggg

SEQ ID NO: 297074 - DNA, 319 bp, Unknown
  Bacterial polypeptide expressing nucleotide sequence isolated from the Sargasso Sea
attttatctactggagacatgggttttagtgctgagaaaacttacgatttagaagtatggcttccatctgaaaatacctatagagaaatctcaagctgttcttcttgcggatcttttcagtcaacaaggatgatgacaagatataagaacgacaagaatgaaaccatatatcccggcacattaaatggtagtggattagctataggacgaactttaattgctataatggaaaattaccaaaatgaagatggatcgattaatatacccgatgtattaaaaccttatatgaataatcttgagaaaatagacatcaattaag

SEQ ID NO: 297075 - DNA, 250 bp, Unknown
  Bacterial polypeptide expressing nucleotide sequence isolated from the Sargasso Sea
gaaaacaaatatagagaaatatcaagctgttcttcttgtggaacttttcaagctaaaagaatgatggcaagatataaaaataatgaaaataaaacagaatatgttggaacattaaatggaagcggtttagcagtaggcagaacgttaatagctatattggaaaattatcaaactgaagaaggatccgttattatacccgaagtattaagatcctatatgggaaatttggataaaataactctcaattaag

SEQ ID NO: 297076 - DNA, 763 bp, Unknown
  Bacterial polypeptide expressing nucleotide sequence isolated from the Sargasso Sea
gacttggtgccaattagaacgagcgctaattaattttatgcttgatgagcattctaagagtaattatatggaaatcttcccaccttttatatgtaataagcaaagttttgtaggaacaggtaatttaccaaagtttgaagaagatttatttaaaattagtggtaccgaaaactatctcataccaacagccgaagttccactaacaaatatccattcaaatcaaattattaatgcttctgactttcctattaaatatgttgcatatagcgcttgttttagatctgaagctggttcatatggaaaagatgtgaagggtttgattagacaacaccaatttaataaaatagagctggtcaaaatcactgatgaattttcatcctctgatgaattagagaaattaacagaagacgcgtgttcgatactagataaactagagcttccatatagagttgtagcattgtcatctggagatatgagtttctcctcagcaaaaacatatgatatagaagtatggataccttctgaaaataaatatagggaaatttcatcatgtagtaactttggttcatttcaatctagaaggtctaacatcaagtataaagtaggtaataaatttagttttgctcatactcttaatggctctggacttgcagtcggcagaacgtttgtatctatactagagaactttcaaaactctgacggaacaattacaattcccaaggttttaagaccttatttgaataatttacatactatttcgtaa

SEQ ID NO: 297077 - DNA, 715 bp, Unknown
  Bacterial polypeptide expressing nucleotide sequence isolated from the Sargasso Sea
ctgcaccgcgctttagcgcaatttatgctggacttgcacacagagcagcacggctataccgaattgtatgtgccttatctggtgaatgctacatccttatatggcacaggccagttgccaaagtttggcgcggatttattccataccaaacctgcgaccgaagaaggtgtgggtatgtcgttgatcccaacggcggaagttcctgtcaccaacttagcccgtgactgcatttttgagctgtctgaactgccgcaaaaatacactgctcatacaccatgctttcgcagcgaagcgggctcttacggccgtgatacccggggtttaattcgccagcaccaatttgataaagtggaattagtgcagttagtacatccggaacaatcctttgctgcgctggaagagttaacaggtcatgccgaaaaagtactgcagctgttaggtttaccgtaccgcactatgctgctgtgcaccggtgatatgggctttggttctaccaaaacctatgatttggaagtctggttaccggcgcaaaatacttaccgtgaaatttcttcctgctcaaatatgggagatttccaggcccgtcgtatgcaggcacgcttccgtccgggcgaaggcaaaaagcctgaactgctgcataccttaaacggttctggtttagccgtcggtcgcaccttggttgctattttggaaaattatcagcaagctgatggtt

SEQ ID NO: 297078 - DNA, 632 bp, Unknown
  Bacterial polypeptide expressing nucleotide sequence isolated from the Sargasso Sea
gataaaacttgaagagggtacagacagaaaatttctgataccaactgcggaagtaattttaactaatatagtcaaagataaaatttttgatctaaaatctttacctatgagatttgttgcttctactccttgttttagaaaagaggctggtagttatggaaaagatacaaaaggaatgattagacaacatcaattttataaagttgaaatggtaagtattgttgaacaagaaaaatgtatggaggaactagaaagaatgacagattgtgcaacaggtattctggatcttttagagctgccttatcgaaaaatgattttgtgtagtggtgatatgggttttagtgctgaaaaaacttatgatatcgaagtttggttgccttcagaaaataaatatagggaaatctcctcatgttcatcatgttcaacttttcaatctgtcagaatgaaagctagatacaaaaaccaaaaaaaagaaattctctatcctggtactttaaatggaagtggtctcgctgtgggtcgaacacttattgctattttagaaaattaccaacaaaaagatggctcaataactatcccaaaagttctcaaaccttatatgaacaatttagaaaaaatttccctcaattaaa

SEQ ID NO: 297079 - DNA, 400 bp, Unknown
  Bacterial polypeptide expressing nucleotide sequence isolated from the Sargasso Sea
gaaccaaataaatgtactgaggaactaaaacgaatgattacttgcgctgaagaaattttaaaaaaattaaaacttccttacagatcagttcttttgtgtacaggagacatgggttttagtgctgaaaaaacagtagatcttgaagtatggattccgtcagaaaacaaatatagagaaatatcaagctgttcttcttgcggtcaatttcaatctagaagaatgaaaggtaagtataaagattcaaaaaataaatcagattttttaggtacccttaacggctctgggctggctgtaggcaggactctaatagcggttatggaaaactatcaaaattctgatggaagcattacaatacccgatgctttgagaccatacatgggaaatttagagaaaatctaat

SEQ ID NO: 297080 - DNA, 859 bp, Unknown
  Bacterial polypeptide expressing nucleotide sequence isolated from the Sargasso Sea
gaaaaattgaatatgctagattttgaattagcgaccaaaaccacaggatcaagatttgtttttgtaaaagataaactagctagcttggaaagagctttgtcaaacttcatgattgatactcatgttaatgataatggatataaagaaatatctccaccattatttgctacaaaagaaacgatgtttggcactggtcaacttcccaaatttgaaaacgatcaatttgaaataaaactagatgataatggtgaacgtaaatttttaattccaacggctgaagtaattcttactaatatggttaagaaacaaacacttcaaaaatctgaacttccattaagattagtagcatcaactccctgttttagaaaagaagctggaagctatggaaaagatacaaaaggaatgataaggcaacaccaattttataaggtagagttggtaagtatagtggataataatgattgtgaaaaagaacttcaacgaatgacaaaatgtgcttctttaattctagagaaattaaaattaccttataggaaggttttattatcgacaggagacatgggatttagtgcagaaaaaacttatgatatcgaagtttatttaccatcagaaaaaaaatatagagaaatatctagctgttcatcttgtggaacctttcaggcacaaagaatgaatgccaaatttaaaaacgaaaaaaatgaaactctttttttaggaacattaaatggaagtggtttggcagtaggaagaactttaattgccataatggaaaattatcaaactagcgatggatcgataattattcctgatgttttaaaaccttatatgaataatctggataaaatttcacttaattaag

SEQ ID NO: 297081 - DNA, 949 bp, Unknown
  Bacterial polypeptide expressing nucleotide sequence isolated from the Sargasso Sea
tagtaaatcaaaagaagtaggtatattaaagtcaaaaggagaatctgctgataatattttttctgatttaaaaattctttctgataaaattaaagagcttgaaaaagaacaaagagaattatcattatctttgaaagatgcattacaagaaatacctaacgtacctcattcatcatgtcctaaaggtttttcagataaagataatgtagttatcaaagaaaaaaagacaaataaagattttaatttcagcccaaaaaatcacatagagattggaaaacaattggatattcttgattttgaagtagctgcaaaaatgtcaggtagcggatttcctctttataaaggtaaaggtgcattgcttgaaagagcactaatcaattttatgatagattatcaccttaaaaactttaattatacagagattttcacccccttcttagtcaaaccagattcagctttaaccactggtcaacttccaaagttttctgaggacatgtatcatattgaaaaagatgatttgtacttgattccaactgcagaagtttcattaacaaacattcataaagatgatattttatctaaagacgatttacctaaatattaccttggatattctgcatgctttcgaagagaggctggatcttatggaaaagataccagagggcttttaagagttcatcaatttaataaagttgaattagtaaaatttgtagaaccagaaaaatcttatgctgaacttgattctttagtaaaacaagcatcagatattcttgatttgttggagcttcaatacagagtgattgaattatgcactggtgatcttagctttgctgctgcaaaatgttttgatcttgaagtatgggctccaggagaggaaaaatggttagaggtatcttcatgtagcaattttgaagattttcaatcaaggagaggaaatattaggttttaa

SEQ ID NO: 297082 - DNA, 430 bp, Unknown
  Bacterial polypeptide expressing nucleotide sequence isolated from the Sargasso Sea
ttataaggttgagctcgttagtatagtagagcctaagaaatgtgttgaagaatttgataggatgttaaattgtgctcaagaagttttaaaggagctaaaattaccttatagaattattttattatccacgggtgatatgggttttagtgccgaaaaaacttatgatcttgaagtgtggataccatcggagaataaatatcgtgaaatttcaagctgttcatcatgtggacaatttcaagcaagaagaatgcaggctaaatttaaagatgaaaaaaatgaaacagactttattggaactctaaatggatctggtttagccattggaagaactttaattgcaattatggaaaattatcaacaaaaagatggaagtatcaaaattcccgaagttttacgatcatatatgaatgatgaggaatacataaaataa

SEQ ID NO: 297083 - DNA, 465 bp, Unknown
  Bacterial polypeptide expressing nucleotide sequence isolated from the Sargasso Sea
tttgaaaaaagaaaatctaaaatctcacttggaaataggcgaaagtcttaatctattcgactctctaaaaacaacaaaaatatccaaaagtcgttttgttacccttattggcaatggagccagattagagagggcattgattaatttcatgctagatatacattcagaaaatggttacttagagttaatgcctccagcattaataaactcacaaagtcttcaaggttctgggcaattacctaaattttctaatgaaagttttaattgttccaatgatgatttatggctttccccaacagctgaagtgccactaactgctttccatcgagatgagataattgactccaaacttttacccattaagtatgttgcttatagcccttgttttaggagagaagcaggaagttatggaagagatactaaaggattaataaggcttcatcaatttaataaggttgagttata

SEQ ID NO: 297084 - DNA, 588 bp, Unknown
  Bacterial polypeptide expressing nucleotide sequence isolated from the Sargasso Sea
catgctcgacatccagttgctgcgcaaagacctcgacggcgtcgccaaacgcctcgccgaccgcggctataccctcgacgtggcggcctttaccgcgctcgaagcggaacgccgcgacacccagacccgtaccgaagagatgcaggcgcgccgcaataccttgtcgaagcagatcggcgggatgaaagggcggggcgaggacacctcggcgctgatggccgaagtgggcggtatcggcgacgaaatgaaggcgtcggcggccaggctcgacgacatccagaagcgtttgtccgacctgctgctcggcgtgccgaacctggcgcacgaaagcgtgccggtcggtacggacgaagccggcaacgtcgaagtgcgccgttggggcacgccgcgccagttcgatttcgaggtgaaggatcacgtcgacatcggcacgccgcttggcctcgacttcgaaaccggcgcgaagctgtcgggtgcgcgcttcaccttgctgcgcggccagattgcccggctgcatcgcgcgctggcgcagttcatgatcgacacgcacacgctgcaccacggctacaccgaggtgtacacgccgta

SEQ ID NO: 297085 - DNA, 565 bp, Unknown
  Bacterial polypeptide expressing nucleotide sequence isolated from the Sargasso Sea
aactgcttatcatagaaacgagcttattgatcccaagcagttgcctattaagtatgttgcatatagtccatgttttagaagagaagctggaagttatggaagggatactaaaggtttaataagacttcatcaatttaataaagtcgaactctattggttttgtgatccaagtaaatctttagaagctcataaaaagattacttctgatgcagaaagcattttaaaaaagctcaacttaccctacagattagtagatatttgtactggagacttaggcttttcttctagtagaacttttgatcttgaagtttggcttcccagtagtaaatgctatagagaaatttcaagttgtagtaattgccttgacttccaagcacgtagatcatcaataagatcaaaaattgataaaaaaaatacatatatacataccttaaatggaagtggtcttgctattggaagaacaatggcagcaattcttgagaatggccaacaaacagatggtagcgttaagattccagatgctctgattccatattttggatcaaattttttaaaaactgcttaa

SEQ ID NO: 297086 - DNA, 887 bp, Unknown
  Bacterial polypeptide expressing nucleotide sequence isolated from the Sargasso Sea
taagaaattaagtaaattaattggtttagaaatcagcaaatctcaaaacaagaattctcaagaactagatgaattaaaaagtaagggaaataaatacagaattgaaatttctgatcttgaagaaaaaaaaagaatcctagaaaaccaaattcataaagaaatttcaagcttacccaattttccaagtaaagaagcacctttagggaaagatgaaagtaataatgtccaaataaagtcttggggagatcctttgaaaaaagagaatctaaaatctcactgggaaataggtgaaagccttaatctatttgactctgcaaaaacaacaaaaatatctaaaagtcgttttattacccttactgggaatggggcgagattggaaagggcattgattaatttcatgctcgatgtacatgtacaaaatggttatttagagttaatgccacctgccttagttaattcagaaagtcttcaaggctctgggcaattacctaaattttcaaatgaaagttttaagtgttccaatgatgatttatggctttctccaacagctgaagttccacttaccgcttttcataaaagtgaaataattgattccaaacttttacctatcaaatatgtagcttatagcccttgctttaggagagaagcaggaagttatggaagagacaccaaaggattaataagacttcatcaatttaataaagttgaattatattggtttagtgatccaaataaatctccagaggcccataaaaatattactgctgatgcagaaagcatcttaaaaaaacttaaccttccttacaggttgatagatatctgtacgggagacttaggtttctcttcaagtagaacttttgatcttgaagtatggctacccaagtagt

SEQ ID NO: 297087 - DNA, 583 bp, Unknown
  Bacterial polypeptide expressing nucleotide sequence isolated from the Sargasso Sea
gaggtaattttaactaacattgtgaaagacaaaatagttgatcaaagtcatcttccgatgagattggtagcatcaacaccttgctttagaaaagaagcaggaagttatggcaaagatacaaaagggatgatcagacaacatcaattttataaagtagaactagtaagcattgttgaaaaagaaaattgtttagaagagttagaacgaatgacaaattgtgctactgatatccttgataaattagagctaccttatagaaaagttattttatgttccggagatatgggtttcagtgctgagaaaacttatgatattgaagtttggttaccatcagaaaataagtatcgtgaaatttcatcatgttcatcgtgctcaacatttcagtctcaaagaatgaaaactagatataaaaacaaaaataaagaaacagtctttgttggcactttgaacggaagtggtcttgcagttggtagaactttaatagctgtattagaaaattatcagcaaaaagatggatcgattgttgttcctaaagttcttagagaatatatgaataatttagaattaatttctcagaaataaa

SEQ ID NO: 297088 - DNA, 625 bp, Unknown
  Bacterial polypeptide expressing nucleotide sequence isolated from the Sargasso Sea
taatggttggtggctaatacctacctcggaagttacattgaccaacatatgcgcaaacgagataaccccagaagtaaatttacccttgaggatgacagcacacacccagtgttttagatccgaggcaggctctgccggtaaagacactgcaggaatgctgagacagcatcaatttgaaaaagttgagatggtttcaatcactcacccagatcaatcaatgcacgaacatgaaagaatgacgaattgcgcaaaggcaattttagaaaaattagaattaccttacagagtagtattgctttgttctggagatacagggttcggggctcaaaaaactcacgatttagaagtttggcttccaggacagcaagcctatagagaaatttcatctgtttcagtttgcggcgatttccaagcaagaagaatgaatgctcgatacaaaccaagtaatggcggaaaacctgaatttgtgcatactttgaacggctctggacttgcggtaggtagatgcctaatagcagttttggaaaatggccaacaagaggatggatcagttttgatcccacaagtgttgcacaattacatgggagggaacgttgtaatcgataatcaagggaacctttgctga

SEQ ID NO: 297089 - DNA, 841 bp, Unknown
  Bacterial polypeptide expressing nucleotide sequence isolated from the Sargasso Sea
aatagaaaaactttatcttcttcattttctaatttaaatgacattgataaaattgagttacaaaaaaaagttcaattaattaaaaatcagattgatgaattagaaaaggatatttttaatatagatgaacaattaaaaaataccttatctggtctaccaaatcttccacatagtgacgttcctgtaggagaagacgaaaatacaaataaattaataaaacaagtaggcattattccttcttttaaattttctccaaaatctcattatgaacttggtgagaatttagagatgattgattttgaacaagcaggaaaggtttcaggtactcgttttgtctatttaaaaaaaaatattgccagattagaaagagctatagctaattttatgttggataaacatacaaatgaatttggttatactgaaattaatccacctaatttagtaagagatgctgctgcttttggcacaggtcaattacctaaattttctgaagacttatttaaaacgaatactgatcactggttgatacccacagctgaggttccgttaacaaatttagtgttagatacaatagtatctgaaaaagatcttcctttaaggtatacagcgtggacaccttgctatagatctgaggctggtgctgctggaagagatacaaggggcatgataagacagcatcaattttccaaagtagaacttgtaagtataaccaatgaagatgaatctgaaatagaattagatagaatgttgaattgtgcttcttctatacttgatgatttagaaattccatatcaagttattctattatcatcaggggatatgggtttttcagccgaaaaaa

SEQ ID NO: 297090 - DNA, 838 bp, Unknown
  Bacterial polypeptide expressing nucleotide sequence isolated from the Sargasso Sea
tttttcatttacgcccaaagatcatgttgagttaggtgagaacctgaagctctttgattttgaagcgggcagtcgggtcgctgggcatggtttttattttcttaccaatgatggagttcttctcgagcttgcgttacagaagtatgcagtcgacttgttaatgcaagaaggctttacggtcatgacaaccccagatgttgctcgcgattcaatattggagggcacggggtttatgcccaggggtcctgagacccaaatttactcgatcagtaatagtgatttgtcgctcgttgcaactgctgagatcacccttgggggtgcaatgcacgaaaaaatatttaatatcaatgaactgccactcaaactctgcggaatcagtcattgtttccgaacagaagccggtgctcatggcagggcgactcgaggtctctatcgggttcaccaattcacaaaggttgaaatgtttgcttttacatcgcccgatcagagcgatgcgatgcatcaacaactgctcgatctcgaatgcaaaattttcgatggtttaggcataccataccgagtcgtcgacacagcaactggtgaccttggtggacctgcttacagaaaatatgacctggaggcttggatgcctggccgcggtgaaactggtgattggggcgaagtgacaagtacatcgaattgcaccgattatcaggctcgaaggttaggcatacggtttcgtaacccgagcgaaaaggggacgcaatttgttcatactttaaatggaacagcagtcgcaatcagtcgggcgattgttgcaattttagagaattatcaacagccggacggatctgtgaag

SEQ ID NO: 297091 - DNA, 547 bp, Unknown
  Bacterial polypeptide expressing nucleotide sequence isolated from the Sargasso Sea
attgtcgatgaagacgaattgccgattaagttaaccgcgcatactgcctgtttccgcagtgaagccggctcatacggtaaagatacccgtggtcttatccgtcaacatcaattcgataaagtggaattagtgcaactggttaagcctgaagactcaatggcggcactcgaagcgctaactggccacgcagaaactgtactgcaacgcctcggtctgccataccgcacagtgattttatgtactggtgacatgggctttggctcaagcaaaacctacgatatcgaagtgtggttaccaggccaaaacacttaccgtgagatctcttcatgttcaaacatgaaggacttccaagcccgtcgtatgcaagcacgttaccgcgttaaggcagataacaagcctgccttgctgcacaccttaaacggctcaggcctagcggtaggtcgtactttagttgcgattttagagaactatcaaaatgccgatggtagcgtgacgattcctgaagcactgcgcccatacatgggtggaatgactcagatcggttaat

SEQ ID NO: 297092 - DNA, 463 bp, Unknown
  Bacterial polypeptide expressing nucleotide sequence isolated from the Sargasso Sea
aaaagatacaagaggcatgttaaggcaacatcaatttactaaagttgagctagtatctgttactaccccagatcaatctgaaaatgaattagaaagaatgcttaattctgctgaaagtattttaagagatttagaaattcattatcgaattgttacactatgtactggtgatatgggtttcgctgctaaaaaaacatatgatatagaggtatggttgccgggtgaaaatgcttatagagaaatttcaagttgctcaaattgtggcgatttccaatcaaggagaatgaatactaaaataaaaaaagataataaaaatatttatgcacatacattaaatggatcgggtttagctgtaggaagaacattaattgctattttggaaaattatcagactcaagatggaaatgttttaattcctgaatgtcttcaaaaatattttgataataaaaaaacattaatctag

SEQ ID NO: 297093 - DNA, 182 bp, Unknown
  Bacterial polypeptide expressing nucleotide sequence isolated from the Sargasso Sea
gaattctaaatacaaaactatagatggaaaaaatgaatatctatctacattaaacggttcaggtttagctgttggtagaactattgttgcaatattagaaaactatcaaaattcagatgggtcaataactgttccaaaagtgctagtaccttatatgaatggttgtacaaaaataaattaat

SEQ ID NO: 297094 - DNA, 589 bp, Unknown
  Bacterial polypeptide expressing nucleotide sequence isolated from the Sargasso Sea
aataccaacagctgaagttccattaacgaatatgacaagggaaagtgtagtggatgcagctgaactacctaaacgatatgtttctcatactccttgtttcagatcggaagcaggagctgcggggaaagatactcgaggaataatgcgccaacatcagttctacaaagttgaattggtaagtttagcctctgaagaaaattcagctgatgaacatgaaagaatgctgagttgtgctgaggaggtgctaaaaagattaggtttacactatcgagttgtaattttatccacgcaagatatgggtttttcagctcagaaaacatatgatattgaggtttggcttccagggcaaaactcatatagagaaatttctagttgctctaattgtggtgattttcaagcaagaagaatgaattcgaggtacaaagaaaatgatacaattaaatatatacacacacttaatgggtcaggtttggcagtaggtagaactttaattgcagttatggaaaattatcaaaacgaagatggttctattgatgtaccagaagtattaattccctacatgagtggaataacaaaaatttcaaactaa

SEQ ID NO: 297095 - DNA, 245 bp, Unknown
  Bacterial polypeptide expressing nucleotide sequence isolated from the Sargasso Sea
tcaaaataagtatagagaaatatcatcctgttctaactttactgattttcaagctagaagagccaatattaaatataaaactaaaaatggtaaccattttgttcatacaatcaatggctcaggactggctgttggaagatgtttaatagctttaattgaaaataattatgatggcactgatattatcaaaatccctagctgtctagaaaagtactttggatctgatcaaattaagataaattaaa

SEQ ID NO: 297096 - DNA, 724 bp, Unknown
  Bacterial polypeptide expressing nucleotide sequence isolated from the Sargasso Sea
atgcatagtttaaaagaaattagaaaaaatacagaattatttaaaaaaaaaattaaggatagaaatacaaatgttgattttaagtctttaataaaccatgacaaggaaaatagggaattaatacaaaaaaaagagaaattagaacaagaaaaaaaattattatcaaagaaaaaagatccacaaaattttacaaaatctaaaaatttaactaaccaaattaaaaaacttgaagataatcaaaaaaatttacaagaaaaaattaacattatcatttcctcaattccaaatttaccattaagtgatgtccctattggaaatgacgaaaaagcaaacaaaataattaaaaagtcaggtgaaataaaaaaatttgattttaaaataaaatcacatacagaattaggaaacaaatacatggactttgacacggcaacaaaattatcaggctcaagatttgttgtcttaaaagataaacttgcatttttagaaagagcattaattaattttatgattgatgtacatgtaaaaaaatttggatatactgagatatcgccgccattaatagtaaatgaaacgacgatgtttggaactggccaattacctaaatttgaaaaagatcaatatgaattgatttctgaaaaaaatgaaggtagaaaatttttaatacctactgcagaagtacctctatcaaatttatttaaagattcaatcgtagatgcaaaaaaac

SEQ ID NO: 297097 - DNA, 601 bp, Unknown
  Bacterial polypeptide expressing nucleotide sequence isolated from the Sargasso Sea
tttcttataccaacagctgaggtaattttaacaaacattgttaaagataagattataaatcaaaaagatttaccaatgagatttgttgcttcaacgccttgttttagaaaagaggcaggtagttacggtaaagataccaaagggatgataagacaacatcaattttataaagttgaacttgttagtattgtagagcaagaaaattgtctagaggaacttgaaagaatgaccaattgtgcgactaatattttagatcttcttgaattaccttatcgaaaagttatcctttgtagcggtgatatgggatttagtgcagaaaaaacttatgatttagaagtatggttaccatcagaaaacagataccgtgaaatatcctcttgttcctcgtgttcaacattccaagcgagcagaatgaaagcaaggtataaaactcaaagcaaagatacaaagcatctcggtacgttaaatggtagtggtctagcaataggaagaactttgatcgcaattttagaaaactatcaacaaaaagatggctctattctaatcccaaaagtgttacgttcttatatgaataatttagaaaaaatttcatccaaataaa

SEQ ID NO: 297098 - DNA, 874 bp, Unknown
  Bacterial polypeptide expressing nucleotide sequence isolated from the Sargasso Sea
ccggaatgaacgatctaaagctattggacaggcaaaggctgcaggtaaggatatagaaccactaaaagctgaagttgaaaatcttggtagtatgctttctgcttcagaatcaagattacgtgatttacagattgagttagatcgttttctttcagaagtgcctaatttgctccatgagtctgtcccatctgggttagatgagggttctaatgaggttattagaagttggggtgatccgagagattttagttttaagccaaaagatcatgtggttctaggcgaagggcttggcttaatagactttgatgcagctagaaaaatatctggtagcaggtttgttgttctgaggggggtgttagctcgcttacatcgtgccttaactcagcttatgttagatattcacatcgatgatcacagctatatagaaaattatgttccataccttgtgaatgatgattccctatttggtactggccagttacctaagttttctgatgatcttttttctctctcaggtgaaaaagcattacggttaattcctactgctgaagttcctcttagtaatctcgtacgtgattgtatccttgagcctagggatattcccatgcgtttagttgcacacacaccatgttttcgttctgaagcgggttcttatggccgggatacacgaggaatgattcggcagcatcagtttgagaaagttgaacttgtccacattacttcttcagaggactcataccgttctttagaggagcttttatcccatgcagaggtaattcttcagcgactagagttaccctacagagttatgagtttatgtgcaggtgataccggattttcgtctgcaaaaacctacgatatagaagtctggtta

SEQ ID NO: 297099 - DNA, 376 bp, Unknown
  Bacterial polypeptide expressing nucleotide sequence isolated from the Sargasso Sea
ggaggttttaaagcagttaggtttaccgtttaggcgtgttttgctgtcaacgggtgatatggggttcagcgctatgaagacttatgatattgaggtttggttacctggccaaaataatggagagggacaatacagagaaatttcctcttgttctacatgtggtgattttcaggctatgagaatgaagtctcgttataaaagcaaaaataagaagggaactaatttcgttcatacactcaatggttctggtgtggcagtaggaagggctttagtagctattttagaaaattatcaagaaagtgatggttcagttcgtgtgcctgatgtactgattccatatatgaacggcctgaaattaatttccagctcctcataa

SEQ ID NO: 297100 - DNA, 808 bp, Unknown
  Bacterial polypeptide expressing nucleotide sequence isolated from the Sargasso Sea
ctggcgacaaaaacaacaggtgccagatttgtatttgttaatgacaaacttgctttattagaaagggcaatagcaaactttatgttagatacacatactcaaataaatagttacaaagaaatatctccaccattaatagctaatgatgcagcaatgtttggaactggtcaattaccaaaatttgaagatgatcaatttgaaattaaaattgaagaaaaaagtggaagaaaatttctaattcctacagctgaagttattttaactaatattgttagagataagattattaacattaaagattttcctatgcgtttcgttgcattaacaccatgttttagaaaagaagctggtagttatggcaaagatactaaaggcatgattaggcaacatcaattttacaaagttgaattagttagtattgttgaaaacaataaatgtattgaagaacttgaaagaatgacagcatgtgcaacaatgattctagataaattaaaattgccttatagaaaaatagttttatcaactggagatatgggttttagtgcagaaaaaacttacgatatcgaagtctggctaccatcagaaaaaaaatatagagaaatttctagttgttcttcttgtggaacatttcaagccagaagaatgaaagcaagatataaaaataaaaataatgaaactgaatttgtcggcacactcaacggaagtggtttagcggtaggtagaacgcttattgctatattagaaaactatcaaaattccgatggatcgataacaattccagatgttctaaaaccctacatgaataatc

SEQ ID NO: 297101 - DNA, 296 bp, Unknown
  Bacterial polypeptide expressing nucleotide sequence isolated from the Sargasso Sea
atatggtttttctgcacaaaagacatatgatctcgaagtttggatgcctgggcaacagacttatcgcgaaatatccagtatttcaaattgtggtgactttcaggcgaggagaatgaaggccagatatagagatggtaacaaaaatacaaaatatctacatacattaaatggttcaggagtagctgttggcagggctcttatcgctattcttgaaaactaccaaacgcctgatggtattcaagtccctgatgtattaaaaaaatatatgaataatttaagtaccataaaaatttgaa

SEQ ID NO: 297102 - DNA, 271 bp, Unknown
  Bacterial polypeptide expressing nucleotide sequence isolated from the Sargasso Sea
attgaagtttggataccaatctgaaaatagatatagagaaatttcaagttgttcctcatgttcgacttttcaatcaaagagaatgaaaactaggtataaaaatgataaaaaagaaattgtttatgcgggaactttaaatggaagtggcttagcggtagggagaacactaattgctatacttgaaaattaccaacaatcagatggatcaataaatattccagaagttctaaaaccctatatgaacaaagttgaaaaaattattaagaattaa

SEQ ID NO: 297103 - DNA, 454 bp, Unknown
  Bacterial polypeptide expressing nucleotide sequence isolated from the Sargasso Sea
catgttagatccaaagtgtttgcgaagcgatatagaacaaacagctaagcgattggctgcccgtggttttaacctcgatgtagcagcttttagttcgcttgaagaaaaaagaaaaacacttcagtccagaacacaggatctgcaaaacgagcgtaacgtacgaagtaaatccattggtaaagcgaaagcgcaaggcgaagacattgcgcctctgctggctgaagtgggtaagcttggtgatgagcttgatgccgctaaaacagagcttagcgaactgttagaagaaattaatacctttacccaaggcattccaaacttgcctcacgagtcggtaccagaaggtaaagacgaaaacgacaacgttgaaatttctcgttggggtgagcctcgcacgttcgattttgaagttaaagatcatgttgacttagctgaaggcttgaacaatgggttagat

SEQ ID NO: 297104 - DNA, 714 bp, Unknown
  Bacterial polypeptide expressing nucleotide sequence isolated from the Sargasso Sea
aaatatctcctccactaattgcttcagaaaatacaatgttcggtactggacagttaccaaagtttgaaaacgatcaatttgaaattaaatttgaagaggggacagataggaaatttttaattcctactgcagaagttattttaacaaatattgttaaaaataaaattttagatctgaaagatctaccaatgagatttgtcgcatcaacaccatgttttaggaaagaagccggtagttatggaaaagatacaaaaggcatgattcgacaacatcaattttataaagttgaaatggttagtatcgttgaaaaagataaatgtttaaatgaattagagagaatgacaaattgtgctaccagcattttagacgatttatgtttaccttacagaaaaatgattctttgtacaggtgacatgggttttagtgccgaaaaaacttttgatattgaagtatggattccatcagaaaataaatatagagaaatatcatcatgttcgtcttgttctactttccaggcaattagaatgaaagctagatataaaaataataatagagaaattattaatgtaggtactcttaatggtagtggtcttgctattggaagaactttgatagcaattctagaaaactatcagcaaaaagacggatctattattattcctgaaaaattaagatcttacatgaataatcttgaaaaaatttcattgaattaaa

SEQ ID NO: 297105 - DNA, 892 bp, Unknown
  Bacterial polypeptide expressing nucleotide sequence isolated from the Sargasso Sea
atgcataacattaattatattagagaaaatcctacagagtttgacaactttatgaaaacaagaggtgaaaatccaatagctaataaaattattgaaatagataaggtgaaaagagagacacaaacaattttgcaaaatttattagctgaaagaaatcaaatatctaaatctataggacaattaaagagtcaaaaaaaagatgccacgcatgaaatggaaaaagttgaagatataaaaaataaagttaatacattgaaagaattagaagcattaaaagatgatgagttaaaatcaattctaagtagattgccaaatataccagactctagtactccagtaggagctaatgagactgaaaatatattttataaagattggggtgataagcctacttttgattttaatcctaaacttcacttcgaaatcggtgaaaatgctaattcaatgaattttgaaactgcaacaaaattatcaggttcaagatttgttattttaaaaggtcaactttctaaattagagagagctattgcaaattttatgattgataaacatactttagtaaatggatatgttgagatgcatgttccttacttggttaaagaagagacattatatggcactggacagttaccaaagtttgtagacgatttatttactgccggtgataatcattggttaatacctacagctgaaataccactgaccgcacttcatagtaatgaaatattaaatattgatcaattacctatgcgatttacttcttatacaccttgttttagatctgaggctggggctgctggaaaagacactagaggtatgattagacagcatcaatttactaaagttgaattagtttcattagtagaacctcaacaatcaaaagagaattaga

SEQ ID NO: 297106 - DNA, 433 bp, Unknown
  Bacterial polypeptide expressing nucleotide sequence isolated from the Sargasso Sea
atttaataaagtggaaatggtaaaatttgtgaaacctgaatcgtcttatgatgagcttgaaaagcttacaaatcaagcggagagtattttacagaagcttggtttacattatagagtaatcgaattatgtacaggagatttaagtttttctgcagctaaatgttatgatttagaggtatgggctcctggtgaaaaaaagtggttagaagtatcttcctgtagcaattttgaagattttcaagcaagaagaggaaatatacgatatcgaaaatcttctgataaaaaagtaaactatatacacacgttaaatggttctggtttagcgacgcctagattaatggttgctttattagagacctatcagtcatctgaaggaaaaatattattgcctgaagtccttcaccagcaaatgggtatggaggttatcgactag

SEQ ID NO: 297107 - DNA, 739 bp, Unknown
  Bacterial polypeptide expressing nucleotide sequence isolated from the Sargasso Sea
tatgcttgatattcatacaaagcaattcggatatctggaggtctctccaccactaatcgcaacagaagagtccatgtttggaaccggacaacttccaaaatttgaaaacgatcaatttgaaattaagttagagggaaaccaaaaaaaatatttaattccaaccgcagaagtaattttaacaaatatggttaaagataattcaatcaaagtaaaagatttgcccttaagacttgttgcttctacagcttgttttaggaaagaagcagggagttatggaaaagatactaaaggaatgcttagacagcatcaattttataaagtcgaattggtaagcattgttgatccaaaaaaatgttttgaagaattagaaagaatgaaatcatgtgctgaagaaatattaaaaaaacttaaacttccttacagaactgtcctgttatcaactggggacatgggttttagcgctgaaaaaacaattgatctagaagtttgggttccatctgaaaacaaatatagagaaatatctagctgttcttcatgtggtcaattccagtcaagaagaatgaaagcaaagtataaagatgaaaaaaataagtcagactttttaggtactctaaatggttctggtttagctgttggaagaacacttatagctattatggaaaactatcagaattcagatggttctgtaacaatacctgactccttgcgaccttacatgaataatttagagaaaatttaa

SEQ ID NO: 297108 - DNA, 591 bp, Unknown
  Bacterial polypeptide expressing nucleotide sequence isolated from the Sargasso Sea
cagaagtaatacttacaaatatagtcaaaaatcagattattaaagcgaatgaattaccattaagactagttgcttcaacaccttgttttagaaaagaggctggtagttatggcaaggacactaaagggatgatacgccaacatcaattttataaagttgaacttgtaagcattgttgaaaactcaaactgtttgaatgaactagaaagaatgactaactgcgcaacaatgattttagataaattaaaacttccatatagaaaagtcattttatgcactggagatatgggatttagtgctgaaaaaacctatgatattgaagtctggcttccttcggaaaaaaaatatagagaaatttcaagctgttcatcttgtggaacattccaagcaagaagaatgaattctagatataaaaattctaaaaatgaaaatttatttgttggtactttaaatggtagtggccttgcggtaggaagaacacttattgccataatggaaaattatcaacaagaagatggaagtataattattccagatgctttaagaccttatatgaataatttagacaaaattttagcaattagcagttgag

SEQ ID NO: 297109 - DNA, 676 bp, Unknown
  Bacterial polypeptide expressing nucleotide sequence isolated from the Sargasso Sea
catgtttggtactggacaacttcctaaatttgagtctgatcaatttgaaattaagattgatgacaataatagaaaatttttaatcccaaccgcagaagttattttaactaatatggcaagagaaaaaactcttgatataaaagaattacctttgagatatgttgcatctaccccttgttttagaaaagaagctggtagctatggcaaagatacgaaaggaatgattaggcagcaccaattttataaagttgaacttgtaagcttagtagagcctcaaaaatgtgaagaggaattagagagaatgactaaatgtgcatcaggaattttagataaactgaaactgccttatagaattgtagagctatgtacaggagatatgggttttagtgcacaaaaaacttatgacattgaagtttgggtgccttcagaaaaaaaatatagagaaatttctagttgctcaacatgtggaacttttcaagctagaagaatgaaagccaaatataaaaattcaaaaaatgaaaaaaattttataggtacattgaatggaagtggacttgcaatcggaagaactatgattgcgatcctggagaattatcaagacaaagatggatcaattataatacctgaagtattaaaaccatacatggataatattgataaaatcacatctaattag

SEQ ID NO: 297110 - DNA, 718 bp, Unknown
  Bacterial polypeptide expressing nucleotide sequence isolated from the Sargasso Sea
acaaattaaaattaaaaatgagcttgacgatatattgaaaacgctaccaaatgtagcattatcagatgttcctattggaaaagatgaaacttctaatgtagaaattttaaaaagcggtgaaatcaagaatttcaaatttaaacctaaaacacattatgaaattggtgaaaatttaaaaatgcttgattttgaattggctacgaaaactacaggttcaagatttgtttttgttaaagataaattagcccaattggagagagccatctcaaattttatgattgatactcatacaaaatttaatggttataaagaaatctctccaccattaatggcatctgaccattcaatgtatggaacaggccaacttccgaaatttgaaaatgatcagtttgaaataaaacttgatgactctaatgatagaaaatttctgattcctacagctgaagttattttaactaatatggtcaaagatcaaattataaattataaagatttaccaatacgattagttgcttcaactccttgttttcgcaaagaagcaggaagctatggtaaagacactagaggcatgattagacaacatcaattttataaagttgaattagtaagtattgttgatccaaaagattgtatcagtgaacttgaaagaatgactaattgtgcaactaaattattagatttattaaaacttccttatagaaaaataattctttccaca

SEQ ID NO: 297111 - DNA, 787 bp, Unknown
  Bacterial polypeptide expressing nucleotide sequence isolated from the Sargasso Sea
ttgcctctaaatgatgttcctgtaggagttgatgaaaattttaacaaagaaattttaaaatctggattaattaaaaaattctcttttgaacccaaatctcattatgaattgggggaaaaattaaatatgttagattttgatcttgcagctaagactacagggtcaagatttgtatttgtcaaagataagcttgctcaattagaaagagcaatagctaattttatgctagatacacatactcaaataaatggatataaagaaatttcacctccattaatagctagtgacctatctatgtttggaacaggacaactaccaaaatttgaaaatgatcaattcgaaattaaaatagatgaaaaaaataatagaaagtttttaattccaacagcagaggttatattaactaacatggttagagatcaaatatttaatattaatgattttcctatgcgattagttgcattaactccttgttttagaaaagaagctggtagctatggaaaagataccaagggcatgattagacaacatcaattttataaagttgaacttgttagcattgtacaaaacaataactgtactgaagaacttgaaagaatgacaaattgcgcgactatgattctggataaattagagttaccttatagaaaaatagttttatcaactggagatatgggttttagtgctgaaaaaacctatgacatcgaggtttggttaccatcagataataaatacagagaaatttctagctgttcttcatgtgggtacttttcaagcaagaagaaga

SEQ ID NO: 297112 - DNA, 445 bp, Unknown
  Bacterial polypeptide expressing nucleotide sequence isolated from the Sargasso Sea
caacatcagtttgaaaaagttgaaatagttaaatttgctgaccctaaaaaatcagataaatgcctggatgagcttgtttcacatgcttcccaaattctcgataagctagagttgtcctatcgacatgtggtcctatgtactggtgatttaggattttcagcagcaaaaactatcgatatagaagtatggctacctagtcaaaattgctttagagaaatatcctcttgttcaaattttagagattttcaagcaagaagaataaatgcaaaagttaaggatggtaaagataagttttaccctcatactttaaatggttctgctttagcagttggaagaactcttttagcaattattgaaaatttctatgaaaatggattaggcgtacatattccaaaggttttggctgattatctagatttcgacctaatagaagagcaaaaataat

SEQ ID NO: 297113 - DNA, 727 bp, Unknown
  Bacterial polypeptide expressing nucleotide sequence isolated from the Sargasso Sea
tatgatagatgcggctttggaaaatggatatacagaggtttcgcctcctaatattgtaagaagcaatgctatgacaggctctggtcaattgccaaaatttagcgaagatgcttttcaaactaaggatgattattggctaattccaaccgcagaagtatctttggtgaatatggtttctggaaagatattaaaagaagagcagttgccacttcgatttgcagcatatactccttgctttagaagggaggcgggatctgctggtaaggatactagaggcatgattcgtcagcatcaattcaaaaaagtagagttagtgagtattacagacgatcaatcttctgcgcaagagcatgaaaggatgactggtattgcttgtagtgttttggagaagttaaagcttccttatcgaaaaatgttgctttgtagtggtgatatggggttctgcgcccaaaaaacatatgatttggaggtatggttacctagtgagaataggtatcgtgagatctcaagctgttctaattgtggtgattttcaggcccgaagaatgaaggcgagatataaaaaagataagaaaaacctatttgttcatagcttgaacgggtcttccttggcggtcggaaggacaatagtggctattttggaaaattatcaaaatgaagatggttctattgtaatacctgaagtgttgagaacctatatgtcaggtcaagagcttatctcgagatga

SEQ ID NO: 297114 - DNA, 221 bp, Unknown
  Bacterial polypeptide expressing nucleotide sequence isolated from the Sargasso Sea
taatttcgaagattttcaatctaggcgttcacaaatacgttataaacctgctcaagatagtaaacctgaatttgttcatacgattaatggttctggtcttgcagttggcagaactcttgtggcaattttggaaaattatcaaaatcaagatgggagcgtttcgattcctgaagctcttatcccttatatgggacaaataaaggaaattgccgcgcaataat

SEQ ID NO: 297115 - DNA, 682 bp, Unknown
  Bacterial polypeptide expressing nucleotide sequence isolated from the Sargasso Sea
catgttcgatattaaatggatccgtgataatccaaaggccttcgacgagggtttggcgcgccgttccttgccggcgcgcgctcaggagctgattatactcgacacgacgcgacgcgaggcccaaacccgggcccaggaaatccaaacgaagcgtaatgccttatcgaaggagattggtgcggcaaaatcccgtggtgaggacgccagcaacatcattgctaaggtttcggaaagcaaagccgcgcaggctgatgcagagcatatggcttccgaggcgatgctcgcgctggaaactgagctggcaagcattcctaacttgccctttgacgatgtccctgtcggtaacagcgaagacgacaacttggaactccgtcgttgggggatcccacgtgagttcgactttcacatcagagaccatgtagaattgggcgaagcactgggcatgatgaatttcgagcgggcagcgaagctgtctggctcacggtttgtagtgctgaccggcgctttagcacagctagagcgggccttggccaattttatgctcaatctgcacacccgtgagaatgggtatacggagatcaacccgccggccctggtcaatgacgccacaatgttcgggaccgggcagttgccgaaattcggtgaggatctattccgaacggaagaggggttatggatgatt

SEQ ID NO: 297116 - DNA, 835 bp, Unknown
  Bacterial polypeptide expressing nucleotide sequence isolated from the Sargasso Sea
gatcttgccacaaaaaccactgggctcacgatttgtttttgttaagaataaattggcattacttgaaagagcaatttcaaattttatgcttgatatacatacttcaaaaaatggatatgaggaaatttcaccgcctttattagcatcagaaaatacaatgttcggaactggtcaattacctaaatttgaaagtgatcaatttgaagtaaaactagaggagggaagtggtagaaaatttttaattcctacagcagaagttattttaaccaatattgtaaaagataaaattttagatctcaaaacattaccgatgagatttgttgcatctaccccatgttttagaaaagaggctggtagttatggtaaagatacaaaagggatgattagacaacatcaattttataaagttgaattagttagtattgtggaacaaaataaatgtcttgaagaattagagagaatgacaaattgtgctacaggaattttggatttgttagagttaccatatagaaaaatgattttatgtagtggagatatgggatttagtgcagaaaaaacttacgatatagaagtatggttaccttcagaaaacaaatatagagaaatatcttcatgttcatcatgttcaactttccaggcaacacggatgaaagctagatataaaaattcaaataaagaaacagtatttgttggaacgcttaatggaagtggtttagcggtgggtagaactcttattgctattttagaaaatttccaacaaaaggatgggtctataagtattccaaaagtgcttagaccttatatgaataatctagaaaaaattagtctgaattaa

SEQ ID NO: 297117 - DNA, 269 bp, Unknown
  Bacterial polypeptide expressing nucleotide sequence isolated from the Sargasso Sea
ggaggtttggctacccagccagaatatgtatcgggaaatttcatcctgtagtaactttacggattttcaggcacgtcgcgcaaaaattcgatgcaaaaagcggacagggggaaaaccggaattcgttcatactttgaacggatcaggtctcgcagtaggtagattgtttgttgcaattttagaaaactatcaaaatgccgatggaacggttacagtaccaaaaactttacgaccctatttaaaaggatgccaaatattatcgaaatgaa

SEQ ID NO: 297118 - DNA, 868 bp, Unknown
  Bacterial polypeptide expressing nucleotide sequence isolated from the Sargasso Sea
gatgcataatttaaaagaaataagaaaagatttttcaaaatttgaaacagatcttgaaaaacgctcagtaaaaattgatattaataatttaaaaaaacttgatgagttaaatagagatttaatacaaaagaaagaaaatttagaaaaagaaaaaaaagatatttcaaaatctaaagatgaaagtctatttaaaaaatctaaagaaatatctattgaattagagaagatttctgagcaacaaaaaaataccaaaattgaattagaaaatatattatcaagtataccaaacatacctcatcaagatgttccaaatggaatagatgaaaatgacaatgtggaagtctcaaaatctgggaaagtccctgaatttgattttaaacctaaatcccattacgaactcggtgaaaatttagacatgcttgattttaatcttgcaacaaaaacaactggatcacgatttgtatttgttaaaaaagagctagcattattggaacgtgctttgtctaattttatgctagatactcatattattaaaaatggttatcaagaaatttcacctccattaatagcttctgataacacaatgtacggaacaggccaattaccaaaatttgaaaacgatcaatttgaaataaaatttgatcaagaatctgatagaaaatttttaattccaacagcggaagtaatattaaccaatattgttaaagataaaattgttgatcaaaaagagttaccaatgagatttgttgcttcaactccatgttttagaaaagaagctggtagttatggaaaagatacaaaaggaatgattagacaacatcaattttataaagttgagctagtaagtattgttgaaaaaagaaaattg

SEQ ID NO: 297119 - DNA, 517 bp, Unknown
  Bacterial polypeptide expressing nucleotide sequence isolated from the Sargasso Sea
tcgacaccatgttttagaaaggaagccggaagttatggcaaggatacaaaaggaatgatacgccaacatcaattttacaaagttgaattggttagcattgtagaaaatgataaatgtttagatgaattagaaagaatgactaaaagcgcaactacgattttagataaattaaatctcccatacagaaaaataatattatgtactggggatatgggttttagtgctgaaaaaacttacgatattgaagtctggctaccatctgaaaaaaaatatagagaaatttcaagttgttcatcttgtggaacttttcaagcaagaaggatgaattcaaaatacaaaaatttagaaaatgaaaatgtatttacaggaactttaaacggtagcggtcttgcagtaggtagaaccttaattgcaataatggaaaactatcaagatgaggatggaagtataattattccaaaagctttaagaccatatatgaataatatgacgaaaatttcatcaattatcggttgag

SEQ ID NO: 297120 - DNA, 445 bp, Unknown
  Bacterial polypeptide expressing nucleotide sequence isolated from the Sargasso Sea
aatgataagacaacatcaattttataaagtagaacttgtaagcgttgtagaacctaaaaactgtatttctgaactagatagaatgcttaattgtgtaaaaaaaatattagaaaaattagaaattccttatcaagttatcttattatcatctggtgatatgggatttagtgctgaaaaaacttatgatattgaagcatggataccttcagaaaataaatatagagaaatctcaagttgttcctcatgcggttcatttcaagctagacgaatgggagcaaggtataaaactcagaatgggaatgagttcgtcggaacattaaatggctctggattagctgtaggaagattaatgattgcaatactggagaacaatcaaaatgaagatggatcagtgaaaattcctgatgctttaaaaaaatatatgaataatttagataaaatttaa

SEQ ID NO: 297121 - DNA, 661 bp, Unknown
  Bacterial polypeptide expressing nucleotide sequence isolated from the Sargasso Sea
aattttgagaatgatcaatttgaaattaaattagacaaaggtgatgagagaaaatttttaattccaacagccgaagtaatacttacaaatatagtaaaaaatcaaattattatgttaaatgatttacctttaagattagttgcttctacaccctgtttcagaaaggaagcgggcagttatggcaaagatacaagaggaatgatacgacaacatcagttttataaagtagaattagttagcatagttgaaaatacaaaatgtttagatgaattagaacgaatgacaaattgtgctactatgattttagacaaattaaatcttccatataggaaaattgtattatgcacgggtgacatgggttttagcgcagaaaaaacttatgatattgaagtttggctcccctctgaaagcaaatatagagaaatttcaagctgctcatcatgtggaactttccaatcaagaagaatgaattctagatataaaaattcaaagaatgaaaatgtttttactggaactttaaatggcagcggacttgcagtaggaagaactttgatagcaattatggaaaattatcaattagaagatggtagtataattattcctgaagtactaagaccatatatgaataatatggacaaaatttcatcaattagcagttgag

SEQ ID NO: 297122 - DNA, 518 bp, Unknown
  Bacterial polypeptide expressing nucleotide sequence isolated from the Sargasso Sea
acctgttttaacaacagcttacacaccttgtttccgtcgtgaagcaggttcatacggtgcacacgtgcgcgggttgaaccgtttgcatcaatttgataaagtagaaattgtacgcgttgagcatcctgataagtcatacgaagcgcttgacggaatggtagaacatgtaaaggatattttgagagacttaaaattaccataccgcgtgttgcgtctttgcggaggcgacatgggctttacatcggcattaacgtatgattttgaagttttctctaccgcacaagaccgttggttagaaattagttcagtttctaattttgaaacctttcaagccaatcgtttgaaattgcgtttcaaagacaaagacggaaaaaaccaattggctcatactttgaacggaagtgcattggctttgccacgagtactagccgggattttagaaaattaccaaactccagaaggaattgtaattccagaagtattgcgtccgtattgtgggtttgatattatagattaag

SEQ ID NO: 297123 - DNA, 823 bp, Unknown
  Bacterial polypeptide expressing nucleotide sequence isolated from the Sargasso Sea
gctgcgccgctggggcagcccaagacaggaggaagggctggaggagcactggcagatcgccgaacgactccacttatttgacaccgagcgatccgtccgcatcgcccagagccgttttgtcaccttgatgggacagggcgcccgattggaacgggcactgataaatttcatgctggacctgcacaccagcaagggctaccgggaagtgatgcctccggtgctggtgaacagcgccagcctcacgggatcggggcagctgcccaaattcgccgatgactgtttccgttgctcggaggacgacctctggctgacccccaccgccgaggtgccggtgacctcactgcatcgcgacgagatcatccccgccgatcagctgccgctccgctatgcggcctacagcccctgtttccgccgggaagccggcagttacggacgggatacccgaggcctgatccgtctgcaccagttcaacaaggtggagctctactggttcgcccacccggaccactccgcagaagcccacgctcagatcaccgccgatgccgaagccgttcttcaggcactggaacttccctacagagttcttgatctctgcacggcagacatcggcttctcagcgcaacgcacctacgacctcgaggtctggttgccgggcgcagcggcttatcgggagatctccagctgcagtgtctgcggagatttccaggcccggcgttctgccattcgcaccaaggaaggtaaatccaccaaactcgtgcacactctcaacggcaaaggtttagctgtcggccgcacgatggcggctgtgctgaaaccggccagc

SEQ ID NO: 297124 - DNA, 268 bp, Unknown
  Bacterial polypeptide expressing nucleotide sequence isolated from the Sargasso Sea
cgatctggaagtttggataccatcagaaaatagatacagggagatttcaagctgttcttcttgcggtcaatttcaagcaaggaggatgaaggctagatttaaaaataataaaaatgaaacagtttttctagctactttaaatggttctggtttagctataggaagaaccctaattgccattatggaaaattatcaacaaaaggatgggagtattattatccctgaagctcttatgccttatatggacaatcaaaaacgcattggataa

SEQ ID NO: 297125 - DNA, 528 bp, Unknown
  Bacterial polypeptide expressing nucleotide sequence isolated from the Sargasso Sea
tttcggacttaactttgtcttatgtttcacatactccatgtttcagatctgaagctggaagttatgggctagataccaaaggaattataagacaacatcagtttgaaaaagttgagttagttaagatttcacatcctgacgattctgacgaagagcttgaaaaattaacctctgatgcggaaaaaattttagatttacttgaacttccttttcgaaagataaaattatgcgctggcgatattggatttggtgcagctttaacctacgatttagaggtatggatgccgagtcagagttcttatcgagagatttcatcctgcagtaattatcgtgatttccaatcacgaaggctaaaaataagaacaaaagaaaatgaaaaaacaattctttgtcatactcttaatggctcgggcctggctattggaagaacaatcgcagcaattttcgaaaacttccaaaataaagacggaacaatttctattcctaatattttaagaccgtacatgggaaataaagaaattctatgag

SEQ ID NO: 297126 - DNA, 731 bp, Unknown
  Bacterial polypeptide expressing nucleotide sequence isolated from the Sargasso Sea
ggagacgaaaagattcgaaaaacttcgaaaattgtggctgataaaaagaccgaagttgctgacatgaatgcaaaggctaaagcattagatcaacaactaaatttagctttaatgtctttacccaatatacttgatccggatattccagatggtgaagacgaagaccagaatgtagaaatattttcttggggcgaaccgagagaaataaacagtcccaaggaacattttgagatttctgctgtaataccaggcatggactttgaaactgcagcaaaattatctggctctcgatttgttgttttgcgtggcgccatagcacgtctccacagagcattggcgcagtttatgttagatgttcacatcaatgaacacggcctaacagagaccatgacaccggtattggtgagagaagaagccatgtttgggactaatcagcttccaaaattttcagatgatagctaccagactaccaacggttggtggcttatacccacctcggaagttacattgactaacatttgcgcaaatgaggtgacaccagaggaaattttacctttaaggatgacagcacacacccagtgctttagatccgaagcaggttctgccggcaaagatactgcgggaatgctgaggcagcatcaatttgaaaaagttgaaatggtttcagtaactcatccagatcaatcaatgaaagagcatgaaagaatgacgaatttgcgcaaaagcaattt

SEQ ID NO: 297127 - DNA, 213 bp, Unknown
  Bacterial polypeptide expressing nucleotide sequence isolated from the Sargasso Sea
gtggaaattttcaagccagaagaatgagagcaagatacaaaaatcaagataaagaaactttatttataggaactctaaatggtagcggtcttgctgtaggacgaactttaattgcaatattagaaaactatcaacaaagtgatggatctattatagttccagaagttttacgtccttacatgaataatcttgctaaaatcgataagaattaga

SEQ ID NO: 297128 - DNA, 735 bp, Unknown
  Bacterial polypeptide expressing nucleotide sequence isolated from the Sargasso Sea
tgaattaagcaaagacctaagtttaattgatcttgatagaggcgctaaaatttccggcagcggattcccagtatatactgggcaaggagcaaagcttgagcgaagtttaattaattctatgatagatcatcatacggatcagtatggttttactgaaatttttccatcagttctgatattggaggaatcaatgagaaccactggacaactccctaaattcaaagaggatatgtatttatcagagttagataatctctatttagcgccaactgccgaggttccaataacaaatatgcatcgccatgaaatcattccagagtctgaattacctataaactatgtagcctattcgccatgctttagaagagagtctggttcttatggaaaagatactagagggcttttaaggctccatcaatttaacaaggttgaaatggtaaagtttgttaaacctgaagagtcatatgacgctttggaagacctagttttgcaagcagaatctattttaaaaatattaggtattacatatagagtagttgagctgtgtactagtgatttgagtttttctgcagcaaaatgttatgacatagaaatctggtctcctggagaaaagaaatggcttgaggtatcatcatgcagtaattttgaagattttcaagccagaagaggtaaaattaggtttagaggtgaaattgataaaaaggtaaacttattgcatactttgaatggctctgg

SEQ ID NO: 297129 - DNA, 880 bp, Unknown
  Bacterial polypeptide expressing nucleotide sequence isolated from the Sargasso Sea
atgcttgatataaaaaaaattagaaataatacagatgatgttttaaaagctctatcaaagaaagataatgacatttctttgaatgatattttaaatcttgattcaaaattaaaatccttaacaacgaaattaaacgaacttcaagctgaacaaaatagcaaatccaaagaggttggtcagttaaaatcaaaaggagaatcatccgataatatttttaaggatttgaaagttttatctgaaaaaattaaagcatttgaaaaagagcaaaaagagctttcatctgctcttaaaaaagctttacttgaaataccaaatattcctcactcatcttgccctgaaggagttagtgaaaaagataatattgtagtttcagagaataaaaataccagagattttaattttccgcttaaagatcatattgaacttggggaaaaattagatattctagattttgaagttgctgctaaaatgtctggaagcggttttccgctatataaaggaaacggagcattactagaacgtgcattaattaattttatgactgactatcatttaaagaatttcgattatacagaattttttactccatttttagtaaaacccgaatcagctttaactactggtcaactacctaagttttcagaagacatgtatcatattgagaaggatgatttatatttgattcctacagctgaggtatcattaacaaatattcataaagatgatatattgtcaagcaatgaattgccaaaatattatttaggatattcagcttgttttagaagagaagctggatcttatggaaaagatactcgaggtttattaagagttcatcagttcaataaagtggaattagtaaaatttgtagaaccaacttaaa

SEQ ID NO: 297130 - DNA, 340 bp, Unknown
  Bacterial polypeptide expressing nucleotide sequence isolated from the Sargasso Sea
attagaactgccttacaggaaagtcctgctctgtggtggagaccttggctttggtgcggcaaagacatacgatttggaagtttgggtcccttcacaaggaacctatcgagagatctcttcctgtagcttatttacagattttcaagctaggagaatgcaagctagatggagagaatctgatcaagggaaaccgcaatacgtgcacaccttaaatggatctggtttggcgattggtaggaccctagttgccatattagaaaattatcaagaccagtctggtcgagttcgtgtgccaagcgcgttactgccttatatgccaggccttgagtttcttgaataa

SEQ ID NO: 297131 - DNA, 751 bp, Unknown
  Bacterial polypeptide expressing nucleotide sequence isolated from the Sargasso Sea
gaagttgagaaaaaaggcaatatacctgaatttaattttaagccaaaatctcatagtgaattaggtgaccatctaaaaatgattgattttgatctagcatcaaaaacttctggatctcgatttgtatttttaaaaaataacttagcattactcgaaagagctttatctaattttatggtagataaacatacgagcgaaaatggctatacagaaatatcaccacctttaatagcttcagaaagtaccatgtttggtactggacaattaccaaagtttattgatgatcaatttgaacttaaacttgatgaaaaaaatgaaaaaaaatttttaattcctacagcagaagtaatattaacaaacatagttagggataaaattttaaatataaatgagttaccattaagatttgttgcatcaactccttgttttagaaaagaagctggtagttatggtaaggatacaaaaggaatgataagacaacatcaattttacaaagttgaattagtaagcatagttgaaatagaaaattgtaaaagcgaactagaaagaatgacaaattgtgctacaggaattttagatgcgctagaattaccttatagaaaagttgttttatgtacaggagatatgggttttagcgcagaaaaaacatatgatattgaagtatggataccttcagaaaataaatatagagaaatttccagctgttcttcttgtggatcttttcaagcaagaagaagaaagctagatacaa

SEQ ID NO: 297132 - DNA, 756 bp, Unknown
  Bacterial polypeptide expressing nucleotide sequence isolated from the Sargasso Sea
ttgattgctagaatggaaagagcaatatctaattttatgttagatcttcatacaaatgaatttggatatacagagatgaatgttcctatacttgttaaagaccaatcagtttatggtgtgggacagcttcctaagtttaaagatgatttatttaaaacaaccgatgactattggcttataccaacggccgaggttcctcttagtaatatgactagagagtcaattattgatattttagatttacctaaacgatatgtatctcatacgccatgtttcagatctgaagctggcgcagcagggaaagatacaagaggtattatgagacaacatcaattttataaagttgagcttgttagtttaacatcagaaagtcaatctaaggatgaacatgaaagaatgttaagttgtgcagaggaagttttaaaaagattaaatcttcattatagagttgtcatattgtcttctgaggatatgggttttgctgcacaaaaaacatatgatattgaagtatggttgcctggtcaaaaagcatacagagaaatatctagttgctctaattgtggagattttcaagcaagaagaatgaactctcgttacaaagaaggtaaagaaactaaatttttgcatacattaaatggatcaggtttagccgtaggacgaaccttaatatctattcttgaaaattatcaaaatgaagatgggactattcaggtgccagatgctcttattccatacatgggtggaataaatcaaatt

SEQ ID NO: 297133 - DNA, 810 bp, Unknown
  Bacterial polypeptide expressing nucleotide sequence isolated from the Sargasso Sea
gagcaaagctatctaaaacaagatttgttgttatgaaaggtgaaatcgctaaactccatagatctttgatttcttatatgatcagccaacatactaataacaataattatatggaatataatgtaccttatatcgttaatagcacatcaatgatgggtactggtcaactgcctaaatttgaagatgatctgtttaaggtcaaagatagcgatctttatttgatacctaccgccgaagtccctcttacaaatctctatagagataaaatattaaatgaaactgatctcccaatatatatggttgctcatacaccctgtttcagatcagaagctggctcttatggtaaggatacaaaaggtataataagacaacatcaattcgaaaaggttgagttagtccatatcacaaaacctgatgatgcagaaaggtctttagatctaattacagatcatgcagagaaaatcatggaaagtttagagataccatatcagagggtacttctttcaacaggtgatcttggtttttcgtcaagtaaaacttttgatattgaagcatggtttcctagtcaagattgttatagagaaatctcttcttgtagtttatttagtgatttccagtcccgacgattgaatataaaatttaaaaaccaattgactaagaagaaggaatttgtcgctactcttaatgggtctggtcttgctataggaagaacaatggcagcattgattgaaaatcacactgacgggaaagtaataaaaataccgaaggcgctccagccctttactggttttgaaattataaaattatgaa

SEQ ID NO: 297134 - DNA, 730 bp, Unknown
  Bacterial polypeptide expressing nucleotide sequence isolated from the Sargasso Sea
tgagcacggcctaacagagaccatgacacccgtattggttaaagaagaagccatgtttgggactaatcagcttccaaaattttcagatgatagctaccagactaccaacggttggtggcttatacccacctcagaagttacattgactaacatttgcgcaaacgaagtgacaccagaagaaattttacctttaaggatgacagctcacacccagtgttttagatccgaagcaggttctgccggtaaagatactgcgggaatgctgaggcagcatcaatttgaaaaagttgaaatggtttcagtaactcatccagatcaatcaatgaaagagcatgaaagaatgacgaattgcgcaaaagcaattttagaaaaattagaattaccctatagagtagtattgctttgctctggagatacaggatttggtgcgaagaaaacttacgacctagaagtttggctgcctggacagcaatcctttagagaaatttcatctgtttcaatttgcggcgattttcaagcaagaagaatgaatgcccgattcaaaccgagtagcggcggaaagcctgaatttgtgcatactttaaacggctctggattagcggttgggagatgcctgatagcagttttggaaaatggtcaacaagaagatggatcaattttagtcccagaagttttacgaaattatttgggagggaatgtcgttattgataatcaaggaaatctttgctaa

SEQ ID NO: 297135 - DNA, 245 bp, Unknown
  Bacterial polypeptide expressing nucleotide sequence isolated from the Sargasso Sea
agaaaaatatcgtgaaatttcttcttgttttaattttcgagattttcaagcaagaagaatgaaagctagatggaaaaacccttcatccaataagacagaaattctaaatactttaaatggttctggtcttgctttaagtagaactgttctggcattaatggaaaattttcaagaaaaagatggttctatatcaattcctgattcactaagaaactattttgggtccagtaaaataactctataaa

SEQ ID NO: 297136 - DNA, 448 bp, Unknown
  Bacterial polypeptide expressing nucleotide sequence isolated from the Sargasso Sea
aattagacagcatcaatttgaaaaagtagaaatagttcaagttgtccatccaaatgattctgatgccgcgcttgagagtttattagaaaacgctgaggaaatactccagttactagatctgccttatcaagttgttcaattatgcggaggtgacttaggcttttcatcagcaaaaacatatgacatagaagtttggatacctagtcaaaacaagtatagagaaatatcttcatgttccaatttttctgacttccaatcgagaaggtctaaaattagattaaatattggaggagaaaaaactctaccacacactttaaatgggtcagcattggcagtaggcagaacattagtggcaataattgaaaatttttatgatggaaaaaactctattatcattccaaaagtccttcaaaagtacctaaataaggaccttattaggactaattag

SEQ ID NO: 297137 - DNA, 853 bp, Unknown
  Bacterial polypeptide expressing nucleotide sequence isolated from the Sargasso Sea
atgcataatattaattatataagagataattctattgaatttgataatgcaatgaatctaagaggagaaaaatcaatatcatccaagttacttgaaatagataggataaaaagagaaacacaaactgttcttcaaaatttattatctgaaaaaaatattctctcaaaaaaaataggtaatttaaaaagcaaaaacgaagattcaaaaaaagaaatttctaaagttgaagaattaaaaattaaaattaattctttaaaagaactggaaactataaaagaaaatgaattaaatggtattttaattagattacctaatattcctcataaaactgtgcctaatggaaaagatgaaacagataataaattatatagagaatggggatcaaaacccaactttaattttaaaccaaaagtccattatgaaattggagaaaatttaggtttaataaattttgaaattgcttccaaattgtcaggttctagatttgtattactaaagaagcaaatttcaaaacttgaaagagctatttcaaattttatgttagataaacatactgaggaaaatggttatacagaatacagtgttccatttctggtaaaagaagagtcattatttggtactggacagttacctaaatttggagaagatttgtttactgcaggtgatgatcattggttaatacctacagctgaagttccccttactaacttagttcgaaacgaaattttaaatgttaaccagcttcctattagatcaacttcttatacaccatgttttaggtctgaagctggagcagctggaaaagacacaagaggcatgttaagacagcatcagtttacaaaagtagaattag

SEQ ID NO: 297138 - DNA, 880 bp, Unknown
  Bacterial polypeptide expressing nucleotide sequence isolated from the Sargasso Sea
aaatcaaaagataaatcaaagttttcaatatctaaagatttatcaactaaaattgaagatttaataattgaacaaaaaaaaattaaagataaattagaatcaattttatcttcaataccaaacataccattaaatgatgttcctgttggcatagatgaaaaatttaatacagaagtaataaaatctggcgaaataaaaaaatttaattttaaacctaaatcacaccatgaaattggtgaaaaattaaatatgttagattttgatttagcttctaaaacttcaggttctagatttgtttttgtaaagggtaaacttgcagcattagaaagagcaatttctaattttatgattgatacacatgttaaaaaaaatggttacactgaaatatctcctcccttattagttacagatgacacgatgtatggaactggacaacttccaaaatttgagaatgatcaatttgaaataaaattagatggcaatgatagaaaatttcttataccaaccgctgaagtaatattaaccaatatggttaaaaaccaaatattaaacgttaaaagtttaccaatgagattggttgcttctacaccttgttttagaaaagaagctggtagttacggaaaagataccaaaggcatgataagacaacatcaattttataaagttgaactagtaagcattgtagaaaataataattgtatagaagaacttgaacggatgactaattgtgctacagaacttctagatcaacttaaattaccatatagaaaaattattttatcaactggtgatatgggttttagtgctgaaaaaacgtacgatatcgaagtatggttgccctctgaaaataagtacagagaaatttcaagttgttcatctt

SEQ ID NO: 297139 - DNA, 694 bp, Unknown
  Bacterial polypeptide expressing nucleotide sequence isolated from the Sargasso Sea
ttctgaaattttagaaggtacaggacaattaccaaaattttctgatgatttattcaaaacagattcagataaatggcttataccaactgcggaagttccaatcacaaatgtaataagaaatgaaattttaaatgagaatgatttacctatgaactttgtggcttattcaccttgttttcgagcagaagcaggtgctgcaggaaaagatactaggggaatgattagacaacatcaattttcaaaagttgaaatggtttctattgttaaacctgaaaaatcagaggaagagttaataagaataactaattgtgctgaaagaattttacaaaaattaagtttaccttatagggtgatgctattatgtagtggtgacactgggttttctgcaagaaaaacttttgatattgaggtctggcttcctgggcaaaacaatggaaaaggcgaatatagagaaatctcatcatgttccaattgtggtgattttcaatcaagaagaatgaatgctagattcaggatacaatcatctaaagaattatcatatattcatacattaaatggctcatgtttagctattgggagaactatgattgctattttggaaaatcatcaaaaccgggatggaagtgttaacataccgattcctttgcaaccttatatgcatggaaaaaaaataattttaaatcaagatatatga

SEQ ID NO: 297140 - DNA, 524 bp, Unknown
  Bacterial polypeptide expressing nucleotide sequence isolated from the Sargasso Sea
tagatcagaagcaggtgccgctggggcagatacaagaggaatgataagacagcatcagttctctaaagttgaaatggtttttataactaaccctttagaatctaatcatgaattagatcgtttagtcatatgtgcagaaactatcctccaaaaattaaaattaccttatagagtaatgaaattatgttctggagatgtaggtttctctgcaaaaaagacatatgatttagaagtttggttgcctggtcaaaataaaggtaagggtgcctttagagaaatatcttcttgctctaattgtggagattttcaagccagaagaatgaatgcaaaatttaaggatagagaaactaataaaattgattttttacatactttaaatggctctggacttgctataggcagaacaataatagccatattagaaaattatcaacagatagacggatctgttttaatacctgatgtgttagtaccttatatgaaagggacacagaagattgacattccaaacagaaataaatgaa

SEQ ID NO: 297141 - DNA, 820 bp, Unknown
  Bacterial polypeptide expressing nucleotide sequence isolated from the Sargasso Sea
tatgggcgaagaattgggcatgttagatttcgatcttgcaacaaaaactactgggtcgcggtttgtttttgttaaaagtaaattggcgttattagaaagagctttatcaaattttatgttggatattcatatacaaaaaaatggttatgaggaaatttcaccacctttgctcgcttcagaaaatactatgtttggtactggtcaattacctaaatttgaaaatgatcaatttgaagttaaattagataaagatgctgagagaaaatttcttatacctactgcagaagtaattttaaccaatatcgttaaagacaaaattttagatatcaaatctttacctatgagatttgttgcatcaactccctgttttagaaaagaagctggtagttatggcaaagacactaagggaatgattagacagcaccaattttataaagttgaaatggttagtgttgtagaacaaaataaatgtcttgaggagttagaaagaatgacgaattgtgcaacaggtatattagatcttttagaattaccttatagaaaagttattctgtgcagtggagacatgggatttagtgctgaaaaaacatatgatatagaagtttggctcccttcagaaaataaatatagagaaatttcctcttgctcatcatgctctactttccaagcagtcagaatgaaaactagatataaagattctaataaagataccctttatgctgggactttaaatgggagtggattggcaataggaagaactcttattgctatcttagaaaattatcagcaaaaagatggctcaataactattccaaaagta

SEQ ID NO: 297142 - DNA, 664 bp, Unknown
  Bacterial polypeptide expressing nucleotide sequence isolated from the Sargasso Sea
attaatactgggtcaattacctaaatttaaggaagatcttttttatattcaagatcagaatttatacttaatacccacagctgagatacctgttactaacatagttaaagataaaattattgataagaataatttgcctttaaagtttgttagtcatactccgtgttttcgcagtgaagctggatcttatggtaaggatacaagaggcatgattaggcaacaccaatttgaaaaggtggagttagtacaaatcgtagaagctgaacaatcttataatattcttgaggaattaactcagcatgctgagtcaattttaaaaaaattaaatttaccgtatagagttgttaatctatgtacaagagatttaggtttttctgctgcgaaaacatatgacattgaggtttggttaccaagtcaaaatcaatatcgagaaatctcatcttgtagcaatttcgaatcatttcaaactcgtcgaatgaagacccggtgtcgcgatgaaaataattctaaacttgatctcttgcatacacttaatggttctgcacttgcaataggaagaactttaattgcaataatggaaaactatcagactgaaaaaggtgaaattgttatacctgatgtactgcagcaatatatgggcgataaaaaagtaattaagcaataa

SEQ ID NO: 297143 - DNA, 682 bp, Unknown
  Bacterial polypeptide expressing nucleotide sequence isolated from the Sargasso Sea
tattgtttttggcactggtcaattaccaaaatttgaaaatgatcaatttgaaattaagtttgatgaaggcttagataaaaagtttttaataccaacagctgaagttattttaactaatattgttaaagataaaattgttgatctcaaagatttacctataagacttgttgcttcaactccttgctttagaaaagaagctggtagttatggtaaagacacaaaaggaatgataagacagcaccaattttacaaagtagagttagttagtattgtcgaaaaagataagtgtttagaagaattagaaagaatgacaaattgcgcaactggaattttagacgatctgaaaattccttatagaaaaatgattttatgtactggtgatataggttttagtgctgagaaaacttatgacattgaagcatggataccatcagaaaacaaatatagagaaatttcatcatgttcatcttgttctacttttcaggcagtgagaatgaaaacaagatataaaaaccaaaataacgaaattctaaatgttggtactttaaatgggagtggtttggcagttggaagaactttgattgcagtattagaaaattatcaacaaaaagatggctcagtaattgttcctgaagttttacgtccttatatgaataatttagaaaaaatttcatctaattaa

SEQ ID NO: 297144 - DNA, 346 bp, Unknown
  Bacterial polypeptide expressing nucleotide sequence isolated from the Sargasso Sea
tcttttagaattaccatatagaaaaatgattttatgtagtggtgatatgggttttagtgctgaaaaaacttatgatatagaagtgtggttaccttcagaaaataaatatagagaaatttcatcttgttcatcatgctctacatttcaagctataagaatgaaagctagatacaaaaatcaaaataaagagacactttatgcaggtactttaaatgggagcggtttagcagtaggcagaactttaattgctatcttagaaaattatcaacaaaaagatggatcaataactattccaaaaatattgagaccttatatgaataaattagaaaagatttcgctcaattaa

SEQ ID NO: 297145 - DNA, 895 bp, Unknown
  Bacterial polypeptide expressing nucleotide sequence isolated from the Sargasso Sea
ggaaagcctaaagaatttaattttaagataaagtctcatgttgaattattagaaaataagaacatgatagattttgatatatcttctaaattatcaggatcaagattttccatgttgaaaggtaaattgtctcttttagagagagcattgataaattttatgttagacttacatacgattaaatttcattacgaggaaatttctccacccttaatagttaatgaggaggttatgtttggtacgggtcagttaccaaaatttgaaaatgatcaatatcaacttttaacggaaaaaaataaaagaaaatttttaatacccactgctgaagtcgtgttaactaatattgtgagagataaattacttgactcaaaaaaattaccgttaaggtttgttgcatcaactccttgttttagaaaagaggcaggcagttatggtaaggacactaaaggacttatgagacaacatcaattttataaagttgaactagttagcatcgttgagccctctaagtgtcaagaagaattaaatcgtatgcttggatgtgctgaagaaattttaaagatacttaaaataccttacagagtagtgctactttcaactggagatatgggatttagcgctgaaaaaaccttcgatattgaagtatggataccttcagagaataagtatagagaaatttctagctgttcctcatgtggaacatttcaagcccgtcgaatgaatgcaaagtataagagtaaggacaaacgcgattttgttggcacattaaatggttcaggtttggccgttggtagattgcttatagccttaattgaaaataatcagaatgacgatggttctataaatttgcctaaagaattaagcaaatatacaaataatttaactaatttttaat

SEQ ID NO: 297146 - DNA, 299 bp, Unknown
  Bacterial polypeptide expressing nucleotide sequence isolated from the Sargasso Sea
aggtttttcagctcataaaacatatgatttggaagtttggtttccatctgaagaaagatatagagaaatttcatcatgttctaattgtttggattttcaggctagaagaatgaactcaaagtttaaaagtaaaaatgataataaaaatatctttttacacactttaaatggttctggcgttgcagttggaagagctctagctgctattttagaaaattactatgatgaaaaagggcatataaatattccaaaggctcttcaaccctatatgaataatgaaacaacaattaaaatataag

SEQ ID NO: 297147 - DNA, 829 bp, Unknown
  Bacterial polypeptide expressing nucleotide sequence isolated from the Sargasso Sea
agattttgaaatgtcatcaaaactttcaggcgctagatttgtggttctcaaggataagtatgctttacttgagcgagctctaatcaattttatgatagatattcatacaacaaagtttggttatgtagaaatatcacctcctttaattgttaatgaaaatgttatgtttggaacaggtcagcttccaaaatttgaagacgatcaatttgagattaaaaaagaagattctggacaaagaaaatttttaatacctactgctgaagtagtcctttcaaatctttttagagaaagtattttagatgcaaaaaagttacctcttaggttcgtagcgggcacaccatgctttagaaaagaagcaggtaattacggaaaagacactaaaggcatgatacgacagcatcagttttataaggttgaacttgtaagtttagttgaccctttaaattgtaaagatgaattagaaagaatgctgaaatgtgcagaagaaattttaaaacaactttcaataccttatcaaattttacttttatctagcggagatatggggtttagttcagaaaaaacatatgacattgaagcttggattccttctgaaaacaaatacagagaaatttcaagctgctcatcttgtggaacatttcagtctagaaggatgggcactaaatttaaaacatcaaatggaacaaaatttgttggaacattgaatggatctggactggcagtgggaaggttgctcatcgcacttattgaaaatatgcaaaacaaagatggatctattttaataccagagcctttaaggaaatatatgaataatttagacaaaatataa

SEQ ID NO: 297148 - DNA, 900 bp, Unknown
  Bacterial polypeptide expressing nucleotide sequence isolated from the Sargasso Sea
ttcagcaataccaaatattccacacgcagatgttccagaaggaattaacgaagagtcaaatatagttattgaaaccaaaggtgaaatcaaatctaaaaattttaaagaaaaatctcattatgaattgggagaaaaacttggaatgttagattttgatttagctacaaaaaccacaggttctcgatttgtgtttataaaagataaattagccatgatggagagggcattatcaaattttatgttggatgttcatactttagaaaatggttatattgaaatatcacctccattgatggcatctgaaaataccatgtatggtactggtcagttaccaaaatttgagaacgatcaatttgaaatcaaattagataaaaacgaagaaagaaaatttcttattcctaccgctgaagtaattcttacaaatatagttaaaaatcaaattgtaagactaaatgatttaccgctaagacttgtagcttcaacaccttgttttagaaaggaagctggcagttatggaaaggatactaaaggaatgatacggcaacatcaattttataaagttgaattagtgagcatcgttgaaaatggaaattgcttaaatgaattagaaagaatgactaattgtgcaactatgattttagataaattaaatctaccatatagaaaaattatactatgcacgggagatatgggttttagtgcagaaaaaacttatgatatcgaagtttggttaccatcagaaaaaaaatatagagaaatctcaagttgttcatcatgtggaacctttcagtcaagaagaatgaactccagatataaaaattcaaaaagtgaaaatgtttttactggaactttaaatggtagtggtcttgctgtagggagaactttaattgcaattatgga

SEQ ID NO: 297149 - DNA, 487 bp, Unknown
  Bacterial polypeptide expressing nucleotide sequence isolated from the Sargasso Sea
ggcaggtagttatggaaaagataccaagggtatgattagacagcaccaattctataaagttgagttagtaagtatagtagaaaacgataagtgtgaagaggaacttattagaatgaccgattgtgcatccatgatattaagaaaattaaagttaccatttagaaaaattattctctcaactggtgacatgggatttagtgcagaaaaaacttttgatttagaggtttggttaccttctgaaaataaatatagagaaatttctagctgctcatcttgtggttcatttcaagcaagaaggatgcaggctaggtataaaaataattccaaggaaacattatcagttggaactttaaatggtagtggtttagctgttggtagaactttaatagcaattatagaaaactaccaaactgaggatggatctgtgattataccagatgcattaaaaccatatatgaataatatggacaaaattactaataattaa

SEQ ID NO: 297150 - DNA, 901 bp, Unknown
  Bacterial polypeptide expressing nucleotide sequence isolated from the Sargasso Sea
ggcattatctaaatcaaaagatgagtcaaattttaataaatctaaggtaatttcagaaaaaatattaaatatttctaaagaacaattaaaagttaaaactaaacttgatgaaatactaaattatttacctaatttagctttagatgatgttcccgtaggtaaagacgaaaagtcaaacaaacttattaagaaatatggcaatatcaaaaaattttcattcaaaccaaaatcacatgttgaaattggatctaaaaataatcgtatagattttgaaacctcgatcaaactttcaggagctagatttgtagttttgaaaaataatattgctttacttgaaagggcattaatcaattttatgcttgatattcatacaacacaatatagctatactgaaatttccccaccactaattgtaaatgaagatgtcatgtttggtactgggcagttaccaaaatttgaagaggatcaatttgaattaaagatcgataattctgatcaaagaaaatttttaatacccacttcagaagttgttctagctaatttggtaagaagatctcttctaaaaaaagaggaattgcctttaagatttgttgcttcgacaccatgttttagaaaagaggctggaagttatggaaaagatacaaaaggcatgattagacaacatcaattctacaaagttgaattagtaagtgttgttgaacctaaaaattgtatggaagaacttgatcgtatgttgaattgcgctcgacaaattttagaaaaattagaaataccccatcaagtaattttactatccaccggagatatgggatttagtgcagaaaaaacttatgatattgaggcctggattccatctgaagataagtatagagaaatttcaagttgctcatcatgtggtact

SEQ ID NO: 297151 - DNA, 345 bp, Unknown
  Bacterial polypeptide expressing nucleotide sequence isolated from the Sargasso Sea
taaaaaagctcaacttaccctatagattagtagatatttgtacaggtgatttaggcttttcttctagtagaacttttgatcttgaagtctggctccccagtagtaattgttatagagaaatttcaagttgcagcaattgcttggactttcaagctcgtagatcatcaataagatcaaaaattgataaacaaaatgtctatctacacaccttaaatggcagtgggctggctgtaggaagaacaatggcagcaattcttgaaaatggccaacagaaagatggtagcgttaagattccagatgctctgataccctattttgggtcaaatttcctgaaaactgcttaat

SEQ ID NO: 297152 - DNA, 385 bp, Unknown
  Bacterial polypeptide expressing nucleotide sequence isolated from the Sargasso Sea
gccttagatgagatcaccgctcacgctgaaaaagtgttgcaattacttggtttaccgcaccgtactatggtgttgtgtacaggcgatatgggctttggctcaagtaaaacctacgatattgaagtatggttgccagcacaaaatacttatcgtgaaatctcatcttgttcaaacatgagagacttccaagcgcgtagaatgcaagcaagataccgtagtaaagttgacaacaaaccagcgttattacacacattaaatggttcaggtttagctgttggccgtacacttgttgccgtgcttgaaaactatcaaaaccaagacggtaccatcacagtacctgaagtattacgtccttacatgggtggtttaagcgttattggttaat

SEQ ID NO: 297153 - DNA, 931 bp, Unknown
  Bacterial polypeptide expressing nucleotide sequence isolated from the Sargasso Sea
agacgaagatgacaatgttgagatttctcgatggggcgaaccacgcacgtttgattttgaagttaaagatcatgttgatgtggctggaggcttaaacaatggcttagatttcgccaccgcaagtaagcttacgggaagccgctttgtagtgatgcgcggtgatattgctcgcctaaatcgtgcaattgctcagttcatgctagatacccatacacaagaacacggctaccaagagatgtatgtgccttacttggttaatgctgacagcctttatggcacaggtcagctgcctaaatttggtgaggatctatttcacaccaagccagcaactgaagaaggacaggggcttagcctaattccaacggcggaagttccgctaacgaatattgcacgcgatgaaatattagatgcgaaaacactgcctgtgaaaatgacagcacatacgccttgcttccgctcagaagctggttcgtacggtcgtgatacccgtggccttattcgtcagcatcagttcgacaaggtagaacttgtacagttagttaagccagaagatagctttgacgcgctagaagcacttacaggacacgcagaagttattcttcaaaagctagagttgccgtaccgcaaagtgttgctttgtactggtgatatgggctttggtgcatgtaaaacctacgatcttgaagtatggctgcctgcgcaaaatacctatcgtgaaatttcttcatgttcaaacatgttggacttccaagcacgacgcatgcaggctagattccgtaacccagaaacgaataaaacagaacttctgcacacattgaatggttctggtttagcagtagggcgtacgcttgttgctattttagagaacaatcagcaggcagacggaagcgttacgattccaaaggcgctcgtgccttacatggcaggccag

SEQ ID NO: 297154 - DNA, 451 bp, Unknown
  Bacterial polypeptide expressing nucleotide sequence isolated from the Sargasso Sea
tagacaacatcaattttataaagttgagatggttagtattgtagaaaaagaaaattgtcttaaagaattagagcgaatgacgaactgtgcaactgatattctggataagttagagttaccttatagaaaaataattttgtgctctggggatatgggtttcagtgcagaaaaaacttatgatattgaagtttggttaccatcagaaaataagtatcgtgaaatttcatcatgctcttcttgttcaacattccaggcacaaagaatgaaatcaagatataaaaataaaaacaaggaaactgtttttgttggaacattaaatggaagtggtttagctgtgggtagaactttaattgctgtattagaaaactatcaacaaaaagatggttcgattattgttcctaaagtactgcgaccgtatatgaataatttggaattgatttcagctaaataa

SEQ ID NO: 297155 - DNA, 757 bp, Unknown
  Bacterial polypeptide expressing nucleotide sequence isolated from the Sargasso Sea
aatgcacgatttaaaggatatcagaaaaaatatagaaatctttaaaaaaaaaattaatcaaagaaatgttcaaattgatttagaaaaacttttaactatagataaagataatagggaaattatatttaaaaaagaaaaattagaacaagaaaaaaaattgttatcaaaaactaaagaccctaaaaattttgaaaaatcaaaaaaaatatctcttgatatatctaaattagaaaaaaatcatttagaattaaaaaaaaaaataaaagacatattgtcgagtgtgccaaacttagccctggacgatgtgcctatcggaaaagacgaaaaatcaaataaagtaattaaaaaaataggagaattaaaaaaatttaattttaaagttaaaccacatactattttaggtactacaaaaaaaaatatggactttgatttagcttcaaaattatctggtgcaagatttgtagttttaaaggaaaatctggctttacttgaaagagccctaattaattttatgatagatactcacacagaaaaatttaattacacagaaatttctccaccaattatagttaatgaaagtgcaatgtatggtacagggcagttaccaaaattcgaaatggatcaatatgaaattaaaacagacaaagaagatttaagaaaatttctaatcccaacagcagaagtttctttaacaaatttagtgagagaaactatattggatataaaagatttgcctttaagatatgtagccagcacc

SEQ ID NO: 297156 - DNA, 915 bp, Unknown
  Bacterial polypeptide expressing nucleotide sequence isolated from the Sargasso Sea
aaaaaggaaaatttagaaaaagaaaaaaaagatatttctaaatctaaagatgaaagtttattcaaaaaatctaaagaaatatctacagaattagaaaaaatttctgatcaacaaaaaaatactaaaaatgaattagataatattttatcaagcataccaaacctaccgcattcagatgtaccaaatggtaaagatgaaaatgataatgtagaagtattgaaagcaggaaaagttcctgagtttgaatttaaacccaaatcacattacgaacttggtgaaaatttaggcatgcttgattttgatcttgcaacaaaaacaactggatcaagatttgtatttgttaaaaaagagttagcattattggaacgagcattatctaactttatgttagacacccatattgttcaaaatggctatcaggaaatctcacccccattaattgcttctgataatacaatgtatggaactggtcaattaccaaaatttgaaaacgatcaatttgaaataaaatttgatgaaggatctgatagaaaatttttaattccaactgctgaagtaatattaactaacattgttaaagataaaattgttgatcaaaaagatttaccaatgagatttgttgcctcaaccccgtgttttagaaaagaagctggcagttacggaaaagatacaaaaggaatgattaggcaacatcaattttataaagttgagttggttagtattgtggaaaaagaaaattgtctagatgaattagaacgaatgactaattgtgctacagatattctagaaaagttagagctagcttacagaaaagtaattttatgctcaggcgacatggggtttagtgctgaaaaaacatatgatattgaagtgtggttaccatcagaaaataaatatcgtgaaatatcatcatgt

SEQ ID NO: 297157 - DNA, 931 bp, Unknown
  Bacterial polypeptide expressing nucleotide sequence isolated from the Sargasso Sea
aagtttattgaaaaatcaaaagagctctctttaaaaatgaaagaaattaacaaaaatcaaataaaattacagagccagattactgatattttatcttctataccgaatatacctctaagcgatgtcccagtaggacaagatgaaaattctaataaagaaattgaaaaaaaaggtgaaataaaagaatttaattttaaacctaaatctcattatgaactgggagagaagttaaatatgcttgattttgacttagcaactaagactactggttctagatttgtatttgttaaaaaagaattagctcaattagaaagagcgatatcaaattttatgattgatacacatactcaaaaaaatggttatacagaaatatcgcctccattaattgcaaccgctgaaacaatgtttggcactggacaattgccgaaatttgaaaatgatcagtttgaaattaaattagacgaaggtgatggaagaaagtttttaataccaactgctgaagtaattttgacaaatattgtaaaaaatcgaattttggataataaagaattacctataagagtagttgcatcaacaccatgttttagaaaagaggcgggtagttatggtaaagataccaaaggtatgatcagacagcaccagttttataaagtggaactagtaagtattgtagaaaacgataaatgttcagaggagttagaaagaatgtctaactctgctacaatgatattggatgcgttaaaacttccttatagaaaaattgttttatgtactggtgatatgggttttagtgcagaaaaaacttatgacattgaagtttggcttccatctgaaaataagtatagagaaatttcaagttgttcatcttgtggttcattccaagcaaggagaatgaaagctagatataaaggacaaaacaattcaaaagaat

SEQ ID NO: 297158 - DNA, 744 bp, Unknown
  Bacterial polypeptide expressing nucleotide sequence isolated from the Sargasso Sea
aatggaaaaaaaaactatttcaaaatctaaagaccaaaaattatttgaaaaatcaaaagaactttcagttaaaattgaagaaattaacaaaaatcaatcaaaactgcagagccaaattgataacatattgtcatcaataccaaacttacctttaagcgatgttccaattggtcaggatgaaaatgctaatgtagagattgaaaaaaaaggtgaaactaaagaatttgattttaaaccaaaaacccactttgaactaggtgaaaatctgaatatgcttgattttgatttagccacaaaaaccacaggctctaggtttgtatttgtaaaaaagcaattagcgcaactcgaaagagctctatctaattttatgatagatacacacacacaaaaaaatggttacacagaaatatcgcctccattaatagctaccgctgagactatgtatggaactgggcaattaccaaaatttgaaaatgatcaattcgaaattaaattagatgcagatgaaggaagaaagtttttgattccaaccgcagaggttattttaaccaatattgtaaataatcaaattataaataaggatgatctcccaattagggttgttgcgtcaactccatgttttagaaaagaggcaggtagctacggtaaagacacaaaaggtatgattagacaacatcagttttataaagttgaactagttagtatagttgaaaaagataaatgtgcggatgagttagaacgtat

SEQ ID NO: 297159 - DNA, 768 bp, Unknown
  Bacterial polypeptide expressing nucleotide sequence isolated from the Sargasso Sea
taaatttgcattattagaaagagctttaattaattttatgttagatccccatgtaaacaaatttaattattgtgaggtatcacctccacttattgtcaatgaggatgttatgtttggcacaggtcagcttccaaaattcgaggatgatcaatttgaagtcaaaatagataactcagaagagagaaaatttttaatacctactgctgaagttgttcttactaatttagttagaaaatcaattctcactattgaaaaccttccattaagatttgttgcttcaactccatgttttagaaaagaagctggtagttatggaaaagacactaaaggaatgatgagacaacaccaattttataaagttgaacttgtaagcattgtagatccaaaagactgtatgacggagttaaatagaatgctgaattgtgctgaggaaattttaaaaaaattagaaataccctatcaagtagtacttttatcatctggagatatgggatttagtgcagaaaaaactttcgatattgaggtgtggattccttctgaaaaaaaattcagagaaatttctagctgttcttcttgtggttcttttcaagcaagaagaatgggcactaaatttaagacatcaaatggaacagaatatgtcggaactttgaatggatctggtttagccgtaggtagattaatgattgcattagttgaaaataatcaaaatgaagatggatcaattaccattccaaatattctaaaaaaatatatgaataatctagataa

SEQ ID NO: 297160 - DNA, 658 bp, Unknown
  Bacterial polypeptide expressing nucleotide sequence isolated from the Sargasso Sea
gttaccaaaatttgaaaatgatcaatttgaaattaaatttgatagttctgatcgaaaatttttaattcctacagctgaggttattcttacaaatattgttaaagataaaatattagatttaaaggaattaccaatgagatttgtagcttcaacaccatgtttcagaaaagaagctggtagttatggcaaagatacgagggggatgatccgtcaacatcaattttataaagtagagatggtaagtgttgttgaaaataacaaatgcttagatgagctagaaagaatgactgattgcgcaacgggtatattaagcgatttaggtttgccttttagaaaagttatcttgtgtagtggagatatgggttttagtgctgaaaaaacatatgatattgaggtatggataccttcagaaaataaatatagagaaatatcttcttgttcgtcgtgctcaactttccaagcaattagaatgaaagctagatataaaaatgaaaataaagaaatagtcaatgttggtactttaaatggtagtggattagcaattggtcgaactcttattgctatattagaaaactatcaacaaaaagatggttctatagttattccagaaaaattaagaccatacatgaataatttagaaaaaatttcgttgaattaa

SEQ ID NO: 297161 - DNA, 577 bp, Unknown
  Bacterial polypeptide expressing nucleotide sequence isolated from the Sargasso Sea
attttgacaaatatggttaaaaatcaaattattaacattaaatcattaccaatgagactagttgcttcaacaccttgttttagaaaagaagctggtagttatggaaaagacacaaaaggtatgattagacaacatcaattttataaagtcgagttagttagtgtagttgaaaatgataaatgtttagaagaacttgaaagaatgacaaactgtgcaacaaaaattttggatgatttaaaattgccatacagaaaaattattttaagcactggcgatatggggtttagtgctgaaaaaacttatgatattgaagtttggctaccttctgaagagaagtatagagaaatttctagttgctcatcatgtggaacttttcaagctagaagaatgaaggctagatataaaaataaagataacaatatagagtttgttggcactttaaatggaagcggattagctgttggtagaacattaattgcaattttagaaaattatcaaactgaagaaggttcagttataattccagatgtcttaaaaccatatatgggaaatattgataaaatttctatcaattagg

SEQ ID NO: 297162 - DNA, 544 bp, Unknown
  Bacterial polypeptide expressing nucleotide sequence isolated from the Sargasso Sea
acttgatgaatctaaattaccagttaagtttgctgcatatagcgcttgctttagaagagaggctggtagctatggtaaagatactcgtggattgttaagattacatcagtttaataaagttgaattggttaagtttgcacatccagataattcttacaatgaacttgagtctcttttagaagacgcagaaaaagtcttacagtctttaggtttacactatagagttattgaattatgcacaggtgatttatctttttctgcagccaaatgttatgatatagaagtttggtcaccatatgaaaataaatatttagaagtttcaagttgtagtaactttgaatcctttcaagcaaatagaggttctataagatttagatcatcaaagacaggaaaaatggagtttgtacacacattaaatggttcaggtgtcgcaactccaagattacttgtcgctctaattgaaaattatcagcaaaaagatggaacaatccaattacctaaggcattgcagagatatatgaatatctcagtaataaaagactaa

SEQ ID NO: 297163 - DNA, 793 bp, Unknown
  Bacterial polypeptide expressing nucleotide sequence isolated from the Sargasso Sea
aagagccaaaaaaataacctttctaaagaaattggcacattagctagtaaaggtgaagatacaaaaaaattaaaagacgactcagaaaatttaaataaagatatcgatcaactacaaaatgattttgatctacttaagactgatattgatacgaccatgctacaaataccaaatttgccggattcagatgtgcctattggaggcgatgaatctaataataaggagattaataaaaagatttttacacagcacaacgatggcttagatcatgtcgaaattggagagaaacttggtttattagattttgatcttgctaataaattaagtggctctagatttgtagtcttaaaaggcaaattagctcaattacaaagggctctcatccaatttatgttagatgaagcaaaaaatagtggttatgaagaaatgtatgtaccatacatagtcaatgctgattcattgattggtactggacaattacctaagtttgaggatgatcaatttaaagttggtgacagcaaatatttaattcctacagcagaagttccgctgacaaatcttttaagagatcaagtaataacttcatctgaattaccaataaatttaactgcgcatacaccatgttttagagctgaagctggaagttatggaaaagatacaagaggcatgatacgacaacatcagtttgaaaaagttgaaatagttaaatttgctgaccctgaaaaatcagataaatgcctggatgagcttgtttcacatgcttcccaaattcttgaaaagctagagttgtcct

SEQ ID NO: 297164 - DNA, 745 bp, Unknown
  Bacterial polypeptide expressing nucleotide sequence isolated from the Sargasso Sea
gatgcataatttaaaagaaataagaaaagattttgacacttttaaaaggtcactagaaaaaagatctgtagatattaattttgacaaacttaaagatttagataaaaaaaatagagattttattcaaaaaaaagaagaattagaaaaagaaaaaaaagaaatttctaaatcaaaagataaatctttatttactaaatcaaaagaaatttccttaaatattgaacaaattgttgaaaaacaaaaattagttaaagatgaattagaaaaaattttatcaaatataccaaatatacctcatgcagatgttccaaacggtaaagatgaaaatgataatgttgaaattagtaaatctggtaaaatacctaaatttgattttactcctaaatctcattatgaattaggtgaaaatttaaaaatgcttgattttgatttggcaacaaaaactacaggttcaagatttgtttttgttaaaaataaattggccttgctagaaagagctctctctaattttatgctcgatacgcatgttcaaaaaaatgattatgaggaaatttcacctcctttattagcttctgaaaatacaatgtttggaaccggccaactccctaaatttgaaaatgatcagtttgaagtaaaactagaagaaagtactggtagaaaatttttaatcccaacagcagaagtgattttaaccaatattgtaaaagatagaattatagatattaaatctttaccattaagattt

SEQ ID NO: 297165 - DNA, 843 bp, Unknown
  Bacterial polypeptide expressing nucleotide sequence isolated from the Sargasso Sea
tatgaaacaaagaggggagcagccaatatctaataaaattttagaactagataaggttaaaagagaaactcagactgttcttcagaaccttttggctgaaagaaactctatttctaaaaatatcggtaaacttaaaagtgaaaataaagatgcttcttcagaaatgaaaaaagtagatgaaattaaaaataaaattaataatttaaaagaacttgagacaattaaggatgaagagttaaaaactatactctccagacttccaaatatagctgataagactgtacctgtaggaagtaatgaagaagataatacaaagtatagagaatggggtgaaaaaccagaatttcaatttaagcctaaaacacattttgaattaggggaagatttaggtttaatgaattttgaaactgcatctaaattatcaggatcaagatttgttttattaaaaaatcaactttctaaactggaaagagcaatagcaaattttatgttagataagcatacgaatgaaaatggttatattgaaatgcatgttccctatttagtaaaatcagatacgttatatgggactggccaattaccaaagtttgcagaagacttgtttaccgcaggagatgaccactggttgattcccacagctgaaataccacttaccgcacttcatagtaatgaaatactaaatattaatcagctccctatgcgtgttacttcttataccccatgttttagatctgaagctggtgcagctggaaaagatacgagaggtatgcttagacaacatcaatttaccaaagttgaattagtatcactagttgaaccagagcactctaaagatgagcttga

SEQ ID NO: 297166 - DNA, 782 bp, Unknown
  Bacterial polypeptide expressing nucleotide sequence isolated from the Sargasso Sea
aaaacttgctggagcacgtttttcagttttaaaaggtgatttagcaaaacttcaaagagctttaattacatttatgctagataatgcaatcggtcatggttatgaggaatattatcttccatttatggccaatagaaattcattaattggaacaggacaattacccaagtttgaagaagatctatttaagacttatgataaattatatttaataccaaccgctgaagttccattaacaaacttatttagaaatgaatttgttaatgaagtcgaacttccaataaaagttacatcacatactccatgctttaggtctgaggctgggagttatggaaaagatacgcgaggacttatgaggcaacatcaatttgaaaaagttgagcttcttcaagtgactcatcctgacaattctatgaaatgtttagatgaattattagctaatgcatgtgagattcttgataaattagaacttccgtatcaggtcgtagagttatgtactggtgatttaggtttttcatcttgcaaaacttttgatattgaggtttggatgcccagccaaaataggtatagagaaatttcatcttgttctaatttctcagattttcaagcaagaagagcaaatattaaatttaaaaataaagaaggtactcattttgctcatactattaatggatcaggtcttgctgtaggaagaacccttattgcacttatagaaaacaattataatggtaccgactcaattaaaattccaagttctttacaggaatattttggctcggata

SEQ ID NO: 297167 - DNA, 835 bp, Unknown
  Bacterial polypeptide expressing nucleotide sequence isolated from the Sargasso Sea
agcaagaaagaaggcactgactcatctaaattagaaaagaaagcaagtgaaatcacttctaaaataaaatcacaatctaaaattctcagttctattttattagatatagatgccttcgcattatctataccgaaccttatagatgatgatgtgcctgagggtaaagatgaatctgacaacattgaattaagaaactctggtaaggtaaggaaatttgattttacgcccaaagatcatttagaactaggctctaatcttagtggaatagatatggaatctggagtaaaaattactggatctaggttcgctgtatttaaaagtgacttagcaagacttcaaagatcacttataaattttatgatagatatccatgttcaagagcatagttatacagaagtgtatgttccttttatagttaatgaagaatcattgcttggaactggccaactccctaaatttgaggaagatctctttaaaattgaaggcaaagaaaacttttacttaacttctacagctgaagttcctgtaacaaatctatttagaaatgaggtgattgattctaaagaattacctaaaaaatacgtttgtcatactccatgttttagaagcgaggcaggtagttatggtctagatacaaaaggaattatgcgtctacatcaatttgaaaaagttgaattagttcaggctactgagagtaaagattcagataacgctcttgaagaattaactggacatgctgaagagatattaaaaagactagagctaccttatagagttgtttctttatgttcaggggatattggattttctgctgctaaaacttatgaccttgagg

SEQ ID NO: 297168 - DNA, 877 bp, Unknown
  Bacterial polypeptide expressing nucleotide sequence isolated from the Sargasso Sea
atgcataatttaaaagaaataagaaaagatttctcaaaattgaaaaaagatcttgaaagacgctcaataaaaatcgattttaataatttaaaaaaacttgatcaattaaatagagatttaatacaaaagaaagaaaatttagaaaaagaaaaaaaagatatttcaaaatctaaagatgaaagtctatttagaaaatctaaagaaatatctgtagaattagagaagatttctgaccaacaaaaaaataccaaaactgaattagataatattctatcaggtataccaaatatacctcatcaagatgttccaagtggaatagatgaaaatgacaatgtggaagtcctaaaatctgggaaagttcctgaatttgattttaaacctaaatcccattacgaacttggtgaaaatttaggcatgcttgactttgatcttgcaacaaaaacaactggatcaagatttgtatttgttaaaaaagagctagcattattggaacgtgctttatctaattttatgctagatactcatattgttcaaaatggttatcaagaaatctcaccaccattaatagcttctggcaatacaatgtatggaactggtcaattaccaaaatttgaaaacgatcaatttgaaattaaatttgatgaaggatctgatagaaaatttttaattccaacagccgaagtaatattaactaatattgttaaagataaaattgttgatcaaaaagatttacctatgagatttgttgcctcaacaccatgttttagaaaagaagcaggcagttatggaaaagacacaaaaggaatgattaggcaacatcaattttataaagttgagatggttagtattgttgaaaaagaaaattgtctagaagaat

SEQ ID NO: 297169 - DNA, 715 bp, Unknown
  Bacterial polypeptide expressing nucleotide sequence isolated from the Sargasso Sea
ttttaactacactgaaatttcacctccattaatagttaatgaggatgtaatgtttggaactggtcaacttcccaagtttgaagaagatcaatttgaaattcaaattgaaaacaacgaagatagaaaatttttaataccaactgcagaagtagttcttacaaatttagttagaaaatctaatttaaatttaaaagatcttcctttacgatttgtagcatcaactccatgttttagaaaagaagctggtagttatggaaaagatacaaaaggaatgatgagacaacatcaattttacaaagtagaacttgttagcattgttgaaccgaaagatcgttttgacgaattagaaagaatgttaaattgtgctgaagaaattttaaaaaaattggatattccataccaagtagttcttctatcttctggcgatatgggttttagcgcagaaaaaacttatgacatagaagcttggataccttcagaaaaaaaatatagagagatatctagttgctcctcgtgtggatcatttcaatctagaagaatgggagctaaatataaatctactaaagggacagaattcgttagcacattaaatggctctggtttagcagtaggtagactaatgattgctttattagaaaataatcaaaatgaagatggatcaattaatattccaaataatttaaaaaaatatatgaataatttagataaaatttag

SEQ ID NO: 297170 - DNA, 427 bp, Unknown
  Bacterial polypeptide expressing nucleotide sequence isolated from the Sargasso Sea
taaagttgaattatattggtattctgacccaagcaaatcattagaagcccataaccaattaacttctgatgcagagaatattcttagaaagctaaacctaccttacagggttgttgatatttgtactggagacttaggcttctcttctagtagaacttttgatcttgaagtttggctacctagtagcaaatgctatagagaaatatctagttgcagtaattgcctagactttcaggctcgtagatcatcaataagaacaaaaattgataaaaaaacttcatatatccatactttaaatgggagtggtctagctattggaagaacaatggcagcaattcttgagaatggtcagcgacctgatggaagtgtaaaaatcccagaagctttaattccatactttggatcaactttcataaaaactacctaa

SEQ ID NO: 297171 - DNA, 859 bp, Unknown
  Bacterial polypeptide expressing nucleotide sequence isolated from the Sargasso Sea
gaaaatttaggtatgcttgattttgatcttgcaacaaaaacaactggttcaaggtttgtatttgttaaaaaagagttagcattactagaacgagcattatctaactttatgttagatacccatattgttcaaaatgactaccaagagatttcacctccattgatcgcttctgataatacaatgtatggaactggccaattaccaaaatttgaaaacgatcaatttgaaataaaatttgatgaaggatctgatagaaaatttttaattccaactgctgaagtaattttaacaaacatagttaaagataaaattgtagaccaaaaagatttaccaatgagatttgttgcctcaaccccatgttttagaaaagaagccggcagttatggaaaagacaccaagggaatgattagacaacatcaattttataaggttgagatggttagtattgtagaaaaagaaaattgcttagaagaattagagcgaatgacaaactgcgcaacagatatactggataagttagaattaccttatagaaaagtaattttatgttcaggtgatatgggttttagtgcagaaaaaacttatgatattgaagtatggttaccatcagaaaacaagtatcgtgaaatatcatcatgctcttcttgttcaacatttcaggcacaaagaatgaaatcaagatataaaaataaaaacaaggaaactgtttttgtaggaacattgaatggaagtggtttagccgtgggtagaactttaattgctttattagaaaactatcaaaaaaaagatggttcgattattgttcctaaggtactgcgaccgtatatgaataatttggaattgatttcagctaaataaa

SEQ ID NO: 297172 - DNA, 805 bp, Unknown
  Bacterial polypeptide expressing nucleotide sequence isolated from the Sargasso Sea
gataattttatgaaatcaagaggtgaaaactctatttcacaaaaaattatagatatagataaggaaaaaagagaggctcaaacagcgttacaaaatttattagcagacaaaaatcaattgtcaaaaactataggtaaattaaaaagtgaaaaaaaagatgccaccaatgaaatggctcaagtagatgatttaaaaaataagatcaatgccttgaaagaattagaaaccctaaaaaatgatgagttgaatgcaattttaagtagacttccaaacataccagactctagcactccgataggagctaatgatgaagaaaatgtattctatagagattggggagaaaaaccctcttttgattttgacccaaaacaacattttgaaattggtgaaaatgctaacttaatgaattttgagactgcaacaaaactatctggatctagatttgtaattttgaaaggtaatctctctaaactagagagagcaattgcaaattttatgatagagaaacatacttcaataaacgggtatgtcgaactacatgtgccatatttagtaaaagcaaatacattatatggaactgggcagttaccaaaatttgcagacgatttattcactgcaggtgatgatcattggctcataccaactgcagaaatacctcttacagctcttcatagtaatgaaatattaaatataagccaacttccaatgagagttacttcttacactccttgttttagatcagaagcaggtgctgctggaaaagatacaagaggaatgctaagacagcatcaatttactaaagtcg

SEQ ID NO: 297173 - DNA, 844 bp, Unknown
  Bacterial polypeptide expressing nucleotide sequence isolated from the Sargasso Sea
cagaaaatcgttaaagataaacttgataatatattgacctcaatacccaatatacctttagacgatgtcccacgtggaaaggacgaaaataccaataaagaagtagtcaaagtcggcaatatacagaaatttaattttaaacctaaatctcattatgaaattggagaaaaactaaatatgttagactttgacttggctacaaaaacaacaggctctagatttgtttttgttaaagacaaacttgcatcattagaaagggcaatttctaattatatgattgatacacatacaaaaattaatggatatacagaaatttctccgcctttgctggcttcagaaaatacaatgtttggtactggtcaattgcctaaatttgaaaatgaccaatttgaaataaaattggatgataaaaatgatagaaaatttttaataccaactgccgaagttattttaactaatatggtaaaaaatcaaattataaatattaaatctttaccgataagattagttgcttcaactccttgcttcagaaaagaagctggaagttatgggaaggatacaaaaggcatgattagacaacatcaattttacaaagttgaactagttagtgtagtcgaaaataataaatgtttggatgaacttgaaagaatgacaaattgtgctactaaaattttagatgatctgaaactcccatataggaaaatcattttaagcactggtgatatgggatttagtgctgaaaaaacttatgatatagaagtttggctaccttctgaagaaaaatatagagaaatttctagttgttcatcttgtgggacttttcaagctacaagaagaaagccag

SEQ ID NO: 297174 - DNA, 575 bp, Unknown
  Bacterial polypeptide expressing nucleotide sequence isolated from the Sargasso Sea
tttaacaaatatggtgaaagataagatgattaatttaaatcaattaccactaaggtttgttgcctcaactccatgctttagaaaagaagctggtagttatggaaaagatacaaaaggaatgattagacaacatcaattttacaaggttgaactcgttagcatagtagaaaaaaacaaatgtcaagaagaactagaaagaatgaccaaatgtgcatgcaatattttagataaattaatgttaccttatagaaaaatattattatccacaggggatatgggttttagcgctgaaaaaacttatgatattgaagtttggttaccatccgaaaataaataccgagaaatttcaagctgttcttcgtgtggaacttttcaagccagaagaatgaaaactagatacaaagatgcaaataaggaaactcaatatgttggaactttaaatggtagtggattggcagtaggcagaacattaattgcaataatggaaaactaccaaaccaaagaaggatctataattattccagaagtgttaagaccatatatgaataatctagataaaatcgaaaagaattaag

SEQ ID NO: 297175 - DNA, 961 bp, Unknown
  Bacterial polypeptide expressing nucleotide sequence isolated from the Sargasso Sea
taatgataatcagaaaaaaattaaagatgaacttgatacgattttacacaacatacctaatatacctcattccgatgttccagatggtaaagatgaaaatgataacttagaaatttctaaatctggtaaaatacctagttttgactttaaaccaaagacacattatgaaattggggaaaaattaaagatgcttgatttcgatttagcgacaaaaacctcaggttcaagatttgtttttgtaaaaagtcacctatcattaatggaacgggctttatcaaattttatgttagatagacatgtatttaagaatggatatcaagaaatttccccacctcttattgcttcagataatacaatgtttggaactggtcaattacctaaatttgaaaatgatcaatttgaaattaaatttgatgaagaatcaaataaaaaatttttgattcctacagcggaagttattttaacaaatatggtaaaagataaagttgttgacttcaaagaattgcctatgcgatttgtagcctcaacaccttgttttagaaaagaagctggaagttacggaaaagacactaaaggcatgattaggcagcaccaattttataaagttgaattagttagtatagtcgaaaaagataaatgtttagaagaattagaaagaatgacaaattgtgcgacaggaatattggacgatctgggtctatcttatagaaaagtgattttatgtactggtgatataggttttagtgccgaaaaaacttacgacattgaagtatggcttccatcagaaaacagatatagagaaatatcttcttgttcatcttgctccacttttcaggctgttagaatgaaaacaagatataaaaataaaagtaatgagatggtaaacgttggtactttaaatggtagtggcttagcaataggaagaaccctaattgcaatattagaaaattatcagcaaaaa

SEQ ID NO: 297176 - DNA, 858 bp, Unknown
  Bacterial polypeptide expressing nucleotide sequence isolated from the Sargasso Sea
tatgaaatttggtgaaaaattaaatatgcttgattttgatttagcaactaaaacaaccggatcaagatttgtttttgtaaaagataaattagcaactttggagagggctatatcaaattttatgatagacactcatacaaaaataaatggttatactgaaatatctccaccgttaatggcaacagatgatactatgtttggcacaggacaattacctaaatttgaaaatgatcaatttgaaataaaatttgatgaaaaagatggacgtaaatttcttattccaactgccgaagtaattttaactaatatggttaaaaaccaaataatcaatttaaattcattaccaataagagtagtcgcatcgactccatgttttagaaaagaagcgggcagttatggaaaagatacaaaaggaatgattagacagcaccaattttataaagttgaattagtaagtatagttgaaaatgataaatgtcttgatgagttggagcgtatgactaattcagcaacaatgattttagacaaacttaaacttccatacagaaaaattattttaagcactggagatatgggttttagtgcagaaaaaacttatgacatagaagtgtggcttccatcggaagataaatatagagaaatttctagttgctcctcatgtggaacttttcaagcaagaagaatgaaggctagatataaaaataaagataacattactgattttgttggtactttaaatggaagcggtttagcagtaggcagaacattaattgctattttagaaaattatcaaactgaagatggatccgtgttaattccagatgttctaaaaccatatatggataatattgataaaat

SEQ ID NO: 297177 - DNA, 361 bp, Unknown
  Bacterial polypeptide expressing nucleotide sequence isolated from the Sargasso Sea
tatgagaaaagataccaaaggaatgattagacaacatcaattttataaagttgagatggtcagtattgtagaaaaagaaaattgccttgaagaattagaacgaatgacaaactgcgcaacagatatacttgataagttagaattaccttatagaaaagtaattttatgttcaggtgatatgggttttagtgcagaaaaaacctacgatatagaagtgtggttaccttcacaaaataagtatcgtgaaatttcatcatgctcttcttgttcaacatttcaagcacaaagaatgaaatcaagatataaaaataaaaacaaggaaactgtttttgtaggaacatatcaaatggaagtggtttag

SEQ ID NO: 297178 - DNA, 871 bp, Unknown
  Bacterial polypeptide expressing nucleotide sequence isolated from the Sargasso Sea
tatgaacttgggtgaaaatttaggcatgcttgattttgatcttgctacaaaaacaactggatcaagatttgtttttgttaaaaaagagctagcgttattagaaagagctttatctaattttatgctagatactcatattgttgaaaataattatcaagaaatctcacctccattgatagcttctgacaatacaatgtatggaaccggtcaattaccaaaatttgaaaacgaccaatttgagataaaatctgatgaaggatctgatagaaaattcttaatcccgaccgctgaagtaatattaactaacattgttaaggataaaattgttgaccaaaaagatttacctatgagatttgttgcttcaaccccatgttttagaaaagaagcaggtagttatggtaaagacacaaaaggaatgattagacagcatcaattttataaagttgagttggttagtattgtcgaaaaagaaaattgcttagaagaattagagcgaatgacaaactgtgcaacagatattctggataaactagagttaccttatagaaaagtaattttatgttcaggtgatatgggcttcagtgctgaaaaaacctatgatattgaagtgtggttaccatcagaaaataaatatcgtgaaatatcatcttgctcttcttgttcaacatttcaggcacaaagaatgaaatcaagatataaaaataaaaacaaagaaactgtttttgtcggaacattaaatggaagtggcttagctgtgggtagaactttaattgctgtactagaaaactatcaacaaaaagatggttcgattattgttccaaaggtactgcgaccgtatatgaataatttgggattgatttcagctaaataa

SEQ ID NO: 297179 - DNA, 601 bp, Unknown
  Bacterial polypeptide expressing nucleotide sequence isolated from the Sargasso Sea
tttcttatacctaccgctgaagtaatattaactaatatggtcaaagataagattttaaatcaaaaagatttaccaatgagactagttgcttccaccccttgttttagaaaggaagctggcagttatggcaaagatacaaaaggcatgattagacagcatcagttttataaagttgaattagtaagtattgtcgaaccacaaaattgtattgatgaattagaaagaatgactaattgtgctaccgatttattggatatgcttaaaataccatatagaaaagttatactatcaactggggacatgggttttagtgcagaaaaaacttatgatattgaagtttggttaccatctgaaaataaatatagagaaatttctagttgctcatcttgtggatcattccaagcaagacgtatgaaggcaagatataaaaatgataaaaaagaaactttatttgttggaacattaaatggtagcggcttagccgtaggacgaacactaatagctattttagaaaactaccaacaagaagatggttcaattattgttcctgatgttttaaaaccatatatgaataacttagaaaaaatctcaaacaattaga

SEQ ID NO: 297180 - DNA, 826 bp, Unknown
  Bacterial polypeptide expressing nucleotide sequence isolated from the Sargasso Sea
atgcagaaggtttctagtactattaaagagtatgatttggaattaaaacaaatagatgatgaattaaaaagtaaattgttatttatacctaatgtgccacatgaatccgttcccaaaggcaaagctgaagaggataatgtaaaagtaagagaatggggtgaaaaacctattttcctcttcccgcatagagatcatgtgtttttatcagaaaaacataatctaatagattttaaagcaggagcaaaaatatcaggatctggatatcctctttatatagatagaggtgcaagattggagcgtgctctaattaattatatgatggactaccattctaataatggatttacagaggtttttcctccgtttttagttaatgagtcttctgttttgacaacaggtcagcttccaaagtttaaagatgatatgtattatataaataaagatgacatgtactgtatttcaacagcagaggttcccgttaccaatatacatagagatgagatcttggatatgaattgttttcctgttcaatatgcagcttatagtgcatgttttagacgagaagctggaagttatggtaaagatacgaaggggctattgcgattacatcaatttaataaagtagaacttgttaaattttgtaacccaagcaattcatatcaagaattagaattattgctaaaaagcgcagaaaaaatactacaggagttaaaccttcattatagaattatagaattatgtacaggcgatttatccttttcagcagcaaaatgttatgatatagaagtgtggtccccatccgaacaaaagtatttagaagtttcaa

SEQ ID NO: 297181 - DNA, 889 bp, Unknown
  Bacterial polypeptide expressing nucleotide sequence isolated from the Sargasso Sea
caacaaaaacatactaaaatagaattagataatattttatcaagtataccaaacatacctcatcaagatgttccaaatggaaaagatgaaaatgataatgtggaagttttaaaagctgggaaagttcctgaatttgattttaaacccaaatctcattacgaactcggtgaaaatttaggtatgcttgattttgatcttgcaacaaaaacaacaggatcaaggtttgtatttgttaaaaaagagttagcattactggaacgagctttatctaactttatgctagatattcatatagttcaaaacggttatcaagaaatctcacccccattgatagcttctgataatactatgtatggaactggtcaattaccaaaatttgaaaatgatcaatttgaaataaaatttgatgaaggatctgatagaaaatttttaattccaacagctgaagtaattttaaccaatattgtaaaagataaaattattgatcaaaaagatttacctctgaggtttgttgcttcaacaccatgttttagaaaagaagcaggtagttatggaaaagacacaaaaggaatgataaggcaacatcaattttataaagttgaattggttagtattgtagaaaaagaaaattgtttagaagaattagaacgaatgactaattgtgctactgatatattagacaaattagaattaccttatagaaaagtaattttgtgctcaggtgatatgggttttagtgctgaaaaaacgtatgatattgaagtgtggttaccatcagaaaataagtatcgtgaaatatcatcttgttcgtcttgttcaacatttcaagcaccaagaatgaaatccagatataaaaataaaaataaagaaaccgtttttgttggaactc

SEQ ID NO: 297182 - DNA, 827 bp, Unknown
  Bacterial polypeptide expressing nucleotide sequence isolated from the Sargasso Sea
catgcataatattaattttataagagataaccctataatttttgataattttatgaaacaacgaggtgaattaccttgttctaaaaatataataaaaatagacgaagataaaagaaatactcaaactgttttacaaaatttattagctgaaagaaataaactttcaaaagaaattggaattctaaagtctcaaaataaagaatctgaagttgaaaatattttaaaaagagttgaaaaaattaaagaagaaacttctagtttgaaggaattagaaaagataaaagaagatgaattacatgcaattttatcaagattgcctaatattccatcaagtagcacccctcagggaaaaaatgaaaatgataatattttatatagagaatggggaaataaaactgattttcaatttaaaccaaaaaggcattatgaaataggtgaaaatttaaatctaatgaattttgatttagctagtaaattatcagggtcaagatttgttgtactaaaagggatgttatctaaattagaaagagctattgctcaatttatgctagataaacatacagatgaaaatggatatacagagatgtacgttccttttttagtaaaaaatgattctttatttggtactggacaattacctaagtttggagaggatttgtttactgctggtgaaaatcattggttaattcctactgcagaggttccattaacaaatttagtaagagataaaattttacaaactaacaatcttccaatgagagtcacatcttatactccttgttttagatcagaagctggagcagcaggtcaggacactcgtggaatgt

SEQ ID NO: 297183 - DNA, 751 bp, Unknown
  Bacterial polypeptide expressing nucleotide sequence isolated from the Sargasso Sea
tatgattgatgttcatactcaaacaaatggttataaagaaatatcaccacctttaatggccagtgatgattcaatgtatggtactggacaacttcctaaatttgaaaatgaccaatttgaagttaagttagatgagaaaaatgatagaaagtttttaattcccactgctgaagtaatactaactaatatggcaagagatcaaatactaaacataaaagatcttcccatgagattagttgcagcaaccccatgctttagaaaagaagctggtagctatggtaaagacactaaaggaatgattagacagcatcaattttataaagttgaattagtaagcattgtcgaaaatgataaatgtgaagaagagttaaatagaatgaccaattgtgcaacaatgatactagataaactaaaattaccttatagaaaaattatactttcaactggagatatgggttttagtgcagaaaaaacttacgatattgaagtttggttaccttcagaaaaaaaatatagagaaatatctagttgttcatcgtgcggaacatttcaggcaactagaatgaaagctagatataagaacaaatcaaatgaaacaacttttgttggaactttaaatggtagcggtttagcggtaggaagaacgcttattgcaatacttgaaaattatcaaaattctgatggttctgtatccattccagatgtattaaagccatacatgaataatctagataaaatatcaaataattaa

SEQ ID NO: 297184 - DNA, 709 bp, Unknown
  Bacterial polypeptide expressing nucleotide sequence isolated from the Sargasso Sea
agagaatttattcaaaaaaaagaatctcttgaaaaagaaaagaaagatatttctaaatcaaaagataagtctttatttgataaatctaaaaaaatatcaatatctttagatgaaatttctgaacaacaaaaaaagattaaatttgatttagatcaaatactatcaaatataccaaacactttacatccagatgttccaactggcaaagatgaaaatgataatgtcgaaatcatgaaatcaggtaaaatacctaacttcaagtttaagccaaaaagtcattatgaattaggtgaagatttaaatatgttggactttgaccttgcttctaaaacaacaggggcaagatttgtttttgtaaaagataagttagctttattggaaagagcactatcaaattttatgctagatattcatgttaataataatggttatcaagaagtttctccaccactaatggcattagaaaatacgatgtttggaacaggtcaacttcctaaatttgaaaatgatcaatttgagataaagattgaacatgaaagtgatagaaaatttttgataccaactgcagaagtaattttaactaacatagttaaagatatgataattgatttgaagaaactcccaatgagatttgtagcttctactccatgttttagaaaagaagctggtagttatggaaaagatactaaaggtatgataagacaacatc

SEQ ID NO: 297185 - DNA, 457 bp, Unknown
  Bacterial polypeptide expressing nucleotide sequence isolated from the Sargasso Sea
atgataagacagcatcaattttataaagttgaattagtaagtgttgttgaaccagaaaattgtaaaagtgagttagaaagaatgacaaattgcgcaactggaattttagactctttaaaattgccttatagaaaagttgttttatgtactggagatatgggttttagtgctgaaaaaacttatgatattgaagtatggattccctcagaaaataaatatagagaaatttcaagctgttcatcttgtgggtctttccaagcaagaagaatgaaagctagatacaaaaatgataaaaaggaaacagtatttttagggacacttaatggcagtggtcttgcagtaggcaggacattaatcgcaatattggaaaactatcaacttgaggacgggtcaataaaaattcccgaagttcttagaccgtacatgaaaaatttagatataatttcaatcaaataga

SEQ ID NO: 297186 - DNA, 556 bp, Unknown
  Bacterial polypeptide expressing nucleotide sequence isolated from the Sargasso Sea
ttataccgagacacaatcatagatcaaaattcactaccactaaagttagtatcacacactccatgttttaggtcagaagctggatcatatggtaaagatacaagaggtataattcgacaacatcagtttgagaaagttgaagttgttcaaattgtagagccgcagcattctctaaatgctcttgaagagattacttctcacgctgagcaattacttgagaatttagaagtaccttatcaaagagtatgtttgtctacaggtgatttaggattttcagcctcaaaaacatatgatattgaggcttggtttccaggagagcaaacgtatcgagaggtttcatcttgtagtttatttggagattttcaatctcgtagagctaacattaaatttaaatcttcagataaaaagaaatattatccacatactttgaatggctctgcgctagcaattggaagaactcttgcagctttaatagaaaatcatactaaagataatattatacatattcctgatgtactacgtgtatacactggctttgattcaataaaattatgaa

SEQ ID NO: 297187 - DNA, 796 bp, Unknown
  Bacterial polypeptide expressing nucleotide sequence isolated from the Sargasso Sea
gaatccgaaaaaaaaaaaatatctaaaacaaacgacaaatctttatttgaaaaatcaaaaaaactatctgcagaaattgaaaaattgaataatgatcagaataaaattgacgaggatttaaattcaattctatcaaatatacctaatatagcattaaacgatgttcctattgggctagatgataagtctaatgttgaaataaaaaaaattggtacaataccaagttttaatttcgagccaaaaccacactatgtgttgggtgaaaatttaaacatgcttgattttaatttagctacaaaaactagtggaagtaggtttgtcttcatgaaggataaacttgctttattagaaagagcattaaacaattttatgttagacactcatatttacgaaaatggatacaaggaaatatcaccaccattactagttaatgaaaattcaatgtttggtactggtcaactacctaaatttgaaaatgatcaatttgagctaaaaatggatttaaaatcagataaaaaatttttaatacccacagcagaagttattttaacaaatatggttagagaaaacatagttaattttaatgatttacctatgagatttgtagcgtcaacgccttgttttagaaaagaggctggaagttacggaaaagatactaaaggaatgattagacaacaccaatttcataaggtcgaattagtaagtattgtcgaacctgaaaattgtgtcgaagaattagatagaatgactaattcagcttcaaaaatattagataaattaaaattaccatatagga

SEQ ID NO: 297188 - DNA, 287 bp, Unknown
  Bacterial polypeptide expressing nucleotide sequence isolated from the Sargasso Sea
cttttctgcagctaaaacctatgatcttgaggtttggattccaagtcaagaatcctatagagagatatcatcttgctctaactgtactgattttcaagcgagaagagctaagatgcgattcaaggaagatggcgtatctaaatttgttcatacgcttaatggttctgctctagctgctggaagagctcttattgcaattatcgaaaataattttgatcaaaaaagtaaaattaccattccggaagttcttcaggattatacaaagttttcacatatcgaagtttgat

SEQ ID NO: 297189 - DNA, 904 bp, Unknown
  Bacterial polypeptide expressing nucleotide sequence isolated from the Sargasso Sea
gctgtgactgaacttcagacacttcaggaaaaaagaaataagatctcaaaagaggttgggaaagcaaggcgtgccggtcataagtcggaccatttggtggaagaggttagtaggttaaaaaatgcgatcactgaactggaacagatagatagagaattgtcagtaaaactcgaggaaagtctgagtgaattaccaaaccaattggctgaagatgttccagagggaagttctgatcttgataatatcgaattgagaagtgaaggaattattaaaccacggttatttcaacctaaggaccatgtcgagttaggtgaaaaacttgaggaaatagactttgatagtgcagtaaagatttctggtgctcgttttgttgttttacgaggacaattggcgcgcctggaaagggctttagctaattttatgatagaccaccaagtaaacgagtttggatatctggaagtttctcctccggctttggtaaattcagaggcactttttggaactggtcagcttccaaagtttagtgatcaacagtttaaaacagaagatgggttgtggttaataccgacagctgaagtcccattaacaaatcttgttagggactgtattctggaagagggagaattgccgcttaggtttaccgcttatacaccatgctttaggtctgaagctggtgctgcagggcgcgatacacgagggatgatcagggttcatcagtttggtaaagttgagatggtttccattactcaccctgaacactcggaggaggagcacgaaaggatgacgagttgtgcagaaaatatattaaaagccctagagctgccttttcggactgtcgtactctgcagtggtgatacaggattcagcgcggtgaaaacttatgacatagaagtttggttgccgg

SEQ ID NO: 297190 - DNA, 292 bp, Unknown
  Bacterial polypeptide expressing nucleotide sequence isolated from the Sargasso Sea
tatgagtttctcctcagcaaaaacatatgatatagaagtatggataccttcagaaaataaatatagggaaatttcatcatgtagtaactttggttcatttcaatctagaaggtctaacatcaagtataaagtaggtaataaatctagttttgctcatactcttaatggctctggacttgcagtcggcagaacgtttgtatctatactagagaactttcaaaactctgacggaacaattacaattcccaaggttttaagaccttatttgaataatttacatactatttcttaa

SEQ ID NO: 297191 - DNA, 292 bp, Unknown
  Bacterial polypeptide expressing nucleotide sequence isolated from the Sargasso Sea
tatggggtttaatgctaataaaacttacgatatagaggtatggcttcctggtgaagataagtatagagaaatttcaagttgctcaaattgtggagattttcaagcaagaagaatgaatactaggtataaacaaaatggaaaaaatatttatatacatactttaaatggctctggccttgcagtaggaagaactttaatagcaatattagaaaattaccaaactgatgatgggaatgtcaggattccaaaagtattaaaaaaatattttgataaccaagataatcttttttag

SEQ ID NO: 297192 - DNA, 784 bp, Unknown
  Bacterial polypeptide expressing nucleotide sequence isolated from the Sargasso Sea
tctagattttcatacttatttggagatttggtgaaaatgcaatttaatcttgtttcttatgcgatgaataaattgtctgaaaaaggattcaatcccacaattccaccagttttggttagagaaaatgctctttttggaactggattttttcctgatgattcagatcaagtatatgagattccaaatgatgacctatttctagttggtacgtcagaagtatcacttgctgctttacacggtgatgaaattcttgattttggcaaactacctatcagatatgcaggatattcaacttgctttaggagagaagctggaacttatggcaaagacacaacaggaatatttagagtgcatcaatttgataaagtagaaatgttttctttttgtagtcctgaaaaatcagaagaagaacatgaatttattctctcagttgaagaagagattttacaagagctagaaattccttacagagtcgttgatgtttgcactggcgatctaggttcgtctgctgctaaaaaatttgatatcgaagcatggataccaagtcagaatacatatagagaagtaacatcttgttcaaatacaacggattttcaggccagaaggttaaatattcgcacaaaagttgaaaaagacacagctttactccatacattaaacggtactgctattgcagtgggaagaatattgatagctctactcgaaaacaatcaaaccgaagacggaggagtagaattttctgatagcttagggaatattttaggggttgaaaagttaagctaaa

SEQ ID NO: 297193 - DNA, 370 bp, Unknown
  Bacterial polypeptide expressing nucleotide sequence isolated from the Sargasso Sea
atcacggccgatgcggaggccgtgcttcaggcgctggaacttccttacagggttcttgatctctgcacggcagacatcggcttctcagcgcaacgcacctacgacctcgaggtctggttgccgggcgcagcggcctaccgggagatctccagctgcagtgtctgcggagatttccaggcccggcgttctgccattcgtaccaaggacggtaaatccacaaaactcgtgcacaccctcaacggcagtggactggctgtgggccgcacgatggcggctctgctggaaaccggccagcaatccgatggcagcgttctgctgccgaaagctctggtgccctacgtcggctatgaacgactccagccagaatgac

SEQ ID NO: 297194 - DNA, 767 bp, Unknown
  Bacterial polypeptide expressing nucleotide sequence isolated from the Sargasso Sea
aaatcgaaaagtttttcaagttaaaatggaaagctcccaagcaaaacaaaataaaattgccaaagaaataggtttggctcaaaagaataaagagagtatcgaagatttaaagtccaaggcgactaaaatttcaagtgaactcaaagatgccaaggataaattccagactaataagattgagtatgaagattttttgttgaatattccaaatctgttagatccgtctgtgccttttggtaagtcagcagaagataatgaggttctaaaagaagccggaatgatttcttcatttgatttcactccaagggatcatcaagaattaggtatcttagcggaaggtatggattttgaggctgctgcaaaaatctcaaaatcaagatttgttatttttaaaaattcagttgcaaaattaagtagagctttaattcaattcatgttgaatactcacattaatgaacacggttatcaagaaatatacgtcccttacatcgttaataaagattctttattaggaacgggtcaattacctaaattcaaagaggatcaatttcaaatcaatgatgatgaaaatgagatgtatttaattcccacggcagaagtacccgtcacaaattatcacagagacgaaattttaaaccctaaagatctcacgttgtcttatgtatctcacacaccatgttttagatcggaggcaggaagctatgggttagatacaaaaggaatcattagacaacaccagtttgaaaaagtagagctcgttaaaatta

SEQ ID NO: 297195 - DNA, 847 bp, Unknown
  Bacterial polypeptide expressing nucleotide sequence isolated from the Sargasso Sea
ggagcagatgagacagaaaatatagaaattagaaaagagggaaagcccagggcatttgcatttacagtaaaagatcatctcgaaattggaagaaatcatgaaatagacatggaggctggagtcagaataactggttcaagatttaaggtacttagaaatgacattgctcaccttcaaagagctctaatcaatttcatgattgatactcatgtagatgaacatggatacgaagaggtgtatgttccttatatagtaaataaagattcattattaggaacaggacaactccctaaatttgaagaggatttatttaagattaataatgaaagtaatttttatttaacttcaactgcagaagttccagtaacaaatctctttagagatgaaattttagaatcgaaacaactccctctaaaatatgtctgtcacacaccttgttttaggagtgaggccggcagctatgggaaagatacaagaggtatcatgagattacatcaatttgaaaaggttgagctggtgcaagctgtagaggcaacagattccgatgatgccctagaagagcttacaaatcatgccgagaatattttaaaaaaactagagttaccttatcgagttgtttctttatgttctggagatataggattttcatcatccaagacatatgacttagaggtttgggttccatcacaagacgcctacagagaaatatcttcgtgctcaaatttcagggactttcaagctagaaggttgaaggcacgatggaaggacaataatggaaagaaaacgcaattgatcaatacattaaacgaatcaggtttagctttaagtagaactgtactagctatat

SEQ ID NO: 297196 - DNA, 840 bp, Unknown
  Bacterial polypeptide expressing nucleotide sequence isolated from the Sargasso Sea
tgcatctgaggcgattggtcaagcaaaaaaagcaggtcatgatgtttccgttgcaattaataccatgaaaaaattaggcgaaaatctaaagaaagttgaatatgacctagataagatttcaaaccaattaaatgatctattattcaaggttccaaaccctccacatgatagctcccctcaaggaacagatgagtcaggtaatgttgagatcagatcttggggtaaaaaacctgaaatagatttcgagctaaaaacacatactgaaattggtaaagatttagaattgtttgatttcaaaagaggggcaaaactttctggaagtggatttcccctttacattgggcaaggggctcaacttgaacgtgccttaattaattcaatgatggaacaccatcgaaaagaatatagttataaagaaatctttcctcctgtattgatgaaaaaaatgtcaatggttacaacaggacagttgccaaagtttgaagaagatatgtaccatactgaattagataatttatatctggctccaaccgctgaagtgccagttactaatattcaccgtgacgaaatcattgatgaatcagaactgcctattcagtatgtggcatattctccatgttttagaagagaatcaggttcttatggaaaagatacaagaggtttattgcgtgtccatcaattcaataaggtagaattagtcaatttcacaactcctgaaaattcctacaatgaattggaaaaccttactaaacaagctgaatcaattttgcagaaactaggcttacactatagagtgttagaattatgcactggtgacctaagctttgctgcggcaaagtg

SEQ ID NO: 297197 - DNA, 771 bp, Unknown
  Bacterial polypeptide expressing nucleotide sequence isolated from the Sargasso Sea
gggccttaatcaattatatgttagatatgcatacaaaaaaatttgaatatattgaagtttctcctccaattttagcaaattacgcaacgatgttcggtactggccagctaccaaaatttaccgaagatcaattcgaagtaaaattaaatgaagataataataaagatagaaaatttttaattcccacagccgaagttgttttaacgaatatggttagagaaagtgttctaaaatctgaatctttgcctttaagagttactgcgcacactccatgttttagaaaagaagctggaagttacggaaaagatacgaaaggaatgatgagacagcatcaatttcataaagttgaactggtaagcattgttcatccagaaaaaaggttggacgagttggatagaatggttaattgtgctgagcaaatattgaaagatctagatttgccttttagaaaagttttactttgctctggagatatgggcttcagtgcagaaaaaacatatgatttagaggtatggattccttcagaaaataaatatagagaaatatccagctgttcatcttgtggccagtttcaagctagacggatgaatgcaaaatttaaggataaagacaataaaaacgattttgtagccactttaaacggctctggtttagctgtaggaagaacaatgattgcaataattgaaaattttcaagaacaagacggaagcattaggataccgacgtcattaaggccctatatgcataatctagaaaaaataaaaatataaa

SEQ ID NO: 297198 - DNA, 520 bp, Unknown
  Bacterial polypeptide expressing nucleotide sequence isolated from the Sargasso Sea
cctctgcttccggtccgaggcgggcagcgcggggcgcgacacttccgggcatgtgcggcagcaccagttcgagaaagtcgagatggtctcgatcatccatcccgacgacagtcgggccgagctggaccggatgaccggttgcgccgaggccatcctggatcgactgggattggcctatcgcacgctggtgctgtgcaccggcgacatggggttcggcgcgcgccggacccatgacatcgaggtctggttgcccggtcagaacacctaccgcgaaatctcgtcctgctcgaccaccggcgattttcaggcccgccggatgaatgcccgctttcgccctgcgcagggcggcaagccggaattcgtgcacacgctcaacggctccggccttgccgtcggtcgctgcctgatcgcggtgctggaaaacggtcagcaggccgatggctccgtcaggctgcccgacgcgctggtgccgtatctgggtggcaagacgacgatcaccgcggatggcagctttggctaa

SEQ ID NO: 297199 - DNA, 1087 bp, Unknown
  Bacterial polypeptide expressing nucleotide sequence isolated from the Sargasso Sea
gctgatggccgaagtgggcggtatcggcgacgaaatgaaggcgtcggcggccaggctcgacgacatccagaagcgtttgtccgacctgctgctcggcgtgccgaacctggcgcacgaaagcgtgccggtcggtacggacgaagccggcaacgtcgaagtgcgccgttggggcacgccgcgccagttcgatttcgaggtgaaggatcacgtcgacatcggcacgccgcttggcctcgacttcgaaaccggcgcgaagctgtcgggtgcgcgcttcaccttgctgcgcggccagattgcccggctgcatcgcgcgctggcgcagttcatgatcgacacgcacacgctgcaccacggctacaccgaggtgtacacgccgtacatcgtgaatccggagattctgtacggcaccggccaactgccgaaattcgccgacgacatgttccgcgtcgagaagggcggtgaagagaatacggtcacccagtatctgatttcgacgtcggagatttcgctgacgaacacggtgcgcgacagcatcgtcgaagcggaaacgctgccgatcaaactgaccgcgcattcgccgtgcttccgttcggaagcgggctcgtatggccgcgacacgcgcggcctgatccgccagcatcagttcgacaaggtcgagatggtgcagatcgttgcgccggaaacgtcgtatgacgcgctcgagcagatggtcggccacgcggagacgattctgcagaagcttgaattgccgtaccgcgtgatcacgctgtgcacgggcgatatgggcttctcggctgccaagacgtacgacctggaagtgtgggtgcccgcgcagaacacctatcgcgagatttcgagctgctcgaatacggagtcgttccaggctcgccggatgcaggcgcgtttccgcaatgcgcagggcaagccggagctggtgcatacgctgaacggctcgggtctggcggttggccgtacgctggtggccgtgctcgagaacttccagaacgcggatggttcggtgacggtgccggcggcgctgcgtccttacctcggtggtgtggaacggctggaagtgccggcggcttga

SEQ ID NO: 297200 - DNA, 1015 bp, Unknown
  Bacterial polypeptide expressing nucleotide sequence isolated from the Sargasso Sea
gagtttgaagagaaaaaaagattattagataaaaaattacaaaatgaaatttataatttaccaaatttacctagcagagatgctcccattggaaaagatgaaaatcataatgtccaagtaaaaacttggggagatcctttagtagcagaaaatcttaaatctcactgggaaattggcgaaagtcttagtctttttgactctacaaaatcaactaaaatatcaaaaagtcgttttattacacttattggtaatggtgccagattagagaggtcattaataaattttatgctcgatatgcatactgaaaatggctatttagagttaatgcctccagcgttagtgaattcagaaagtcttaccggatctggtcaattacctaaattttcgaatgaaagttttaagtgttctaatgacgacctgtggctttctcccacagctgaagttccacttactgctttccataggaatgaaattattgattcaaagcaattaccccttaaatacgttgcatatagcccatgtttcaggagagaagctggaagttatggaagagatactaaaggtttaataagactacatcaatttaataaagttgaactatattggttttgtgatccaagtaaatctactgaagctcataaaaagatcactttagatgcagaaggtattttaaaaaaactcaatctaccttacagattagttgatatttgtactggagacttaggtttttcttcaagcagaacttttgatcttgaagtctggctcccaagtagcaaatgttatagggaaatttcaagttgtagcaactgtttagactttcaagctcgtagatcatcaataagagcaaaaattgataaaaaaaatacttatctgcacaccttaaatggtagtgggcttgcgattggaagaactatggctgctattcttgagaatggccaacaaaaagatgggagcgtgaaaattccagatgctctagttccatattttggatcaaatattttaaaaactgcctaat

SEQ ID NO: 297201 - DNA, 688 bp, Unknown
  Bacterial polypeptide expressing nucleotide sequence isolated from the Sargasso Sea
gatgaaactatgtttggtactggacaacttgcctaaatttgagaatgaccaatttgaaataaaattcgatgaaaaagaggatcgtaaatttttaattccaactgctgaagtaattttgaccaatatggtaaaaaatcaaatagttaatttaaattctttacccataagagttgttgcttctacaccttgctttagaaaagaagctggtagctatggaaaagatactaaaggcatgattagacaacatcaattttataaagttgaattagtaagtattgttgaaaatgataaatgtcttgatgaattagagcgtatgacaaaatctgctacaatgattttagataaattaaaacttccatatagaaaaataattttaagtacgggtgatatggggtttagtgcagaaaaaacttatgatattgaagtttggttaccatcagaaaataagtatagagaaatttctagctgctcatcatgtggaacatttcaagctagacgtatgaaggcgagatataaaaataaagataatgttaccgattttgttggaactctaaatggcagcggtttagccgttggaagaactttaattgctattttagaaaattatcaaactgaagatggatctgtattaattccagatgttctaaaaccttatatggataatatagataaaatatctaacaattaa

SEQ ID NO: 297202 - DNA, 1012 bp, Unknown
  Bacterial polypeptide expressing nucleotide sequence isolated from the Sargasso Sea
ttgaagaaaaaaaaagaatcctattacaaacaacttgaagatgaaatatcaaaattacccaatttcccaagtaaagatgcaccttttggagaaaatgaaaataataatgttcaaattaaaaaatggggcgatcctctaaaaaaagataatctcaaagctcactgggaaataggagaaaatttaaatctgtttgattccctgaaatcaaccaaaatttcgaaaagtcgttttattacacttacaggaaatggagcgaggttggagagggctctaattaatttcatgctagatgtgcattcaaataacgggtacttagaattaatgcctccatcattggttaattcagaaagtcttcgaggatctggccagcttccaaaattctcaaatgaaagttttaagtgtgttaatgatgatttatggctctctccgacagcagaagttcctctaactgcttttcataaaaatgaaattattgatccaaaaattctacctttaaaatatgtagcatatagcccttgttttagaagagaagcgggtagttatggaagggatacaaaaggtttaataagacttcatcaatttaataaggttgaattatattggttttgtcatccaaataaatcattagaggctcataaaaagataacggcagatgcagaaagtattttaaaaaaactaaacttaccctatagatcagtagatatttgtactggagatttagggttttcttctagcagaactttcgatcttgaggtttggctgcccagcagtaaatgttatagagaaatatctagttgtagtaattgcttagactttcaggctcgcagatcatcaataagaacaaaaattgataagaaaacttcatatatccacactttaaatggaagtggtttagctattggaagaacaatggcagcaattcttgaaaatggccaacaaagtgatggcagcgtgaaaattcctgatgctctagttccatactttggatcatctttcataaaaactgcctaat

SEQ ID NO: 297203 - DNA, 705 bp, Unknown
  Bacterial polypeptide expressing nucleotide sequence isolated from the Sargasso Sea
cacctttaatggcatctgctgaaactatgtttggaactggtcaattacctaaatttgaaacagatcaattcgagataaaatttgatgattctaatgatagaaagtttttaattcctacagccgaagtcatattaacaaatatggtaaaggatcaaattttaaattttaaagatttaccaataaggttagttgcttcaactccatgttttagaaaagaagctggtagctatggaaaagatacaaaaggaatgataaggcaacatcaattttataaagtcgaacttgttagcataatagagccaaacaaatgtattgatgagttagaaagaatgacatcttgtgcgactaaaatcttggatttattaaaacttccatatagaaaagttatattatcaactggtgatatgggtttcagcgctgaaaaaacatatgatatcgaagtgtggcttccatcagaaaataaatatagagagatatctagctgttcttcttgtggatcatttcaggctcgtagaatgaaagcaagatttaaaaatgataaaaatgttactgaatttcttggaacattaaatggtagtggacttgctgtaggaagaactttaatagcaatattggaaaactatcaaaatgaagatggttcaattaatattcctgacgctttaaaaccttacatgaataatcttgataaaattactattaattaaa

SEQ ID NO: 297204 - DNA, 1148 bp, Unknown
  Bacterial polypeptide expressing nucleotide sequence isolated from the Sargasso Sea
aatgcataatattaaagatattcgtaaaaactttgatgaatttgtaaattcaattgaaaaaagaaatcaagatttaaaattagaaaatatattagaattagacaaaaaaaatagaaatttaattcaaaataaagaaattttagaaaaagaaaaaaaagacatttcaaaatctaaagataaaagtttatttgaaaagtcaaaaaagatatcatctgaaattgatttattaaatactcaacaaaataaaattaaaactgaaattgaaaatattctttcatctttacctaacttagcattgaatgacgttcctgtaggtaaagatgaaaaatctaatgttgaagttgaaacaaaaggtgaaattagaaagtttgattttaaacccaagtctcattatgagttaggtgacagtttgaagatgttggattttgatgtagcaacaaaaacctcaggcacgaggtttgtttttgttaaggataaattggctcagttagaaagagctttatctaactttatgttagacattcatataaaagagaatggatatgaggaaatttctcctccattaatagccaatgaagattctatgtatggtacaggtcaactgcctaaatttgaaaatgatcagtttgaattaaaaattgacgaaaaaaatgatagaaaattcttaattcctacggctgaagttattcttacaaatatcgtaaaagataaaattttaaatattaaaaatttccctttgcgttatgttgcatcaacctcttgcttcagaaaagaagctggaagttacggtaaagatacaaaaggaatgatcagacaacatcagttttataaagttgaattagttagtattgttgaaaataacaaatgtgcagatgaactagaaagaatgacaaagtgcgcttctgcaattttggataaattaaagttaccttatagaaaagtattactttgcactggtgatatgggatttagcgctgaaaaaacatacgatctggaggtttggcttccgtcagaaaataaatttagagaaatttctagttgttcctcatgtggaacctttcaagctcgaagaatgaaaacaagatataaaaattcttcaaatgacacagaatttgtgggaactttaaatggcagtggtctcgctattg

SEQ ID NO: 297205 - DNA, 844 bp, Unknown
  Bacterial polypeptide expressing nucleotide sequence isolated from the Sargasso Sea
atgcttgattttgatttagcaacaaaaacctcaggcagtagatttgtttttgttaaaagtcaattggcccatttagagagagcaattagtaactttatgatcgatatacatacacaaaaaaatcaatacaaagagatatcaccaccgttgattgcttcatctaatagtatgtatggaactggccaactcccaaaatttgaaaatgaccaatttgagataaatttagattcggatgatagaaaatttttaatccctacagctgaggtaattttaactaatatagttagagataagattttggatgagaaaactttaccacagagatatgttgcttctacaccatgctttagaaaagaagctggtagttacggtaaagataccagaggtatgattagacaacatcaattttataaagttgaactagttagtattgtacaccctgataatagattagaagaactggaaagaatgacagattgtgcgacaggtattcttgaccttcttgaattaccttatagaaaaattattctgagctctggtgacatgggtttcagcgcagaaaaaacttatgatattgaagtatggcttccttccgaaaataattatagagagatttctagttgctcatcatgtggttcatttcaagcaagaagaatgaaatctagatttaaagataaaaataatgaaactcaatatgtttcaacattaaatggtagtggtttagctgttgggagaactttaattgcaatattagaaaattatcaaaatgaagatggatcaataaaaattcccaatatattgaagccttatatgaacaatattgagaaaatatctaaaaattaaa

SEQ ID NO: 297206 - DNA, 1261 bp, Unknown
  Bacterial polypeptide expressing nucleotide sequence isolated from the Sargasso Sea
aatgcataacattaaagatataagaaaaaatttcgatgattttaaaaatataattaaatcaagaaatatttctatagatttagaccaaatcttagatctagatcaaaaaaatagaaaacttattcaagaaaaagaaactctagagcaagaaaaaaaaagtatatcaaaaaagcaagataagtcattgttctcaaaatccaaagaaatttcagaaaagatcgtatcaataaataaagatcaatctttaactaaaatcaaacttgatgatttattatcttcaattccaaatttacccctaaaagatgtacctataggagctgatgaaaattctaataaagaaatttcaaaatcaggaacaataaaagaatttaattttaatccaaagtcacattatgaattaggtgagaatctaaaaatgttagattttgacttggcgacaaaaacaactggtgcaagatttgtatttgttaatgacaaacttgctttattggaaagagcaatagcaaactttatgctagatacgcatactcaaataaatagttataaagaaatatctcctccattaattgctaacgatgcagcaatgtttggaactggtcaattaccaaagtttgaagatgatcaatttgaaatcaaaattgaagaaaaaagcggtagaaaatttttaattccaacagcagaagttattttaaccaacatagttagagataagattgttaatatcaaagattttcctatgcgttttgttgcattaacaccatgttttagaaaagaagctggtagttacggaaaagacactaaaggcatgattagacaacatcaattttataaagttgaactagttagcattgttgaaaataataaatgtattgaagaacttgaaagaatgacaaattgtgcaacgatgattttagataagttaaaactaccctataggaaaataattttatcaactggtgatatgggttttagtgctgaaaaaacttatgatatagaagtatggcttccatctgaaaaaaaatatagagaaatttccagttgctcttcatgtgggacatttcaagctagacgaatgaaagcaagatataaaaatacaaataatgaaactgaatttgttggtacactcaacggtagtggtttagcagttggtagaacattcatagcaatattagaaaactatcagaattcagatggatcaataacaattccagatgttctaaaaccctacatgaataataaaaaaaaaatttcaaataattag

SEQ ID NO: 297207 - DNA, 823 bp, Unknown
  Bacterial polypeptide expressing nucleotide sequence isolated from the Sargasso Sea
attagctaccaaaacaactggttcaagatttgtttttgttaaagacaaattggccttgcttgaaagagctctttcaaattttatgctagatacacatattcttaaaaatggttataaagaaatttcaccacccttattagcttctgaaaattcaatgtttggtacaggtcaacttcctaaatttgaaaatgatcaatttgaggttaaacttgaaaaagacagtgaaagaaagtttttaattcctacagctgaagttattttaactaacatcgtgaaagataaaattattaaccaaaaagatcttcctatgagatttgttgcgtcaacgccatgctttagaaaagaggctggtagttatggcaaagacaccaaaggaatgattagacaacatcaattttataaagttgaaatggtaagtattgtcgaacaatcaaaatgtttagatgaattagaaagaatgactaattgtgctacaggtattttagatttgctagaactcccttatagaaaaatgattctttgcagtggtgatatgggttttagcgctgaaaaaacttatgatattgaagtctggctaccttcagaaaatagatatagagaaatttcttcttgttcatcatgctctacatttcaagcagtaagaatgaaatcaaggtataaaaatcaaaataaggaaattctctatgttggtacattaaatggaagtggtctagcaattggaagaacattaattgccatcatggaaaattatcaacaaaaagatggctctataactattccaaatgtattaaaaccttatatgaataatttggaaaaaatttga

SEQ ID NO: 297208 - DNA, 1000 bp, Unknown
  Bacterial polypeptide expressing nucleotide sequence isolated from the Sargasso Sea
aagttatagaaagctacttcaagaaaaagaaaatcatgaacaaaagaaaaaagaaatttcaaaatctaaagataaatcattattttcaaagtcaaaagaaatttcagagaaaatttctataattacaaaagatttaagtgttattaaaaaaaatctagacgatatattgcatacagtgccaaatattgctcttgatgatgtaccaattggcactgatgaaagctctaataaagaagttctcaaatctggtgaaattaaaaattttgatttcacacctaaagctcattatgatttaggagaaaatttaaaaatgctagattttgatttagcaaccaaaactacaggttcaagatttgtatttgtaaaagataaacttgctatgttagagagggcaatatcaaattttatgcttgatactcatattaacataaatggttataaagaaatctcacctccaattttggctaatgaaagtactatgtttggaactggtcagttgcctaaatttgaaaatgatcaatttgaaattaaatttgatgaaaaaagcggtagaaaatttttaataccaacagctgaagtaatacttactaatatggttagagatcaaattttgaaattaaatgaattaccaattaggttagtttctttaactccttgttttagaaaagaagctggaagttatggaaaagacaccaaaggaatgattagacaacatcagttttataaagttgaattggtaagtattgtagaagtaaatcaatgtttagatgaacttgagagaatgacaaattctgcaacaatgattttggacaaattaaaacttccatacagaaagattgttctttccactggagacatgggttttagtgctgaaaaaacatatgatatagaagtgtggataccatcagagaataaataccgcgaaatttctagttgttcatcttgtggatcttttcaatcaagaagaatgaaagcaagatataaaaaatcaaaaaaatga

SEQ ID NO: 297209 - DNA, 949 bp, Unknown
  Bacterial polypeptide expressing nucleotide sequence isolated from the Sargasso Sea
ctgcagagccaaattgatagcatattgtcatcaataccaaacttacctttaagcgatgttccaattggtcaggatgaaaatgctaatgtagagattgaaaaaaaaggtgaaattaaagagtttgattttgagccaaaaacccacttcgaattaggtgaaaatctgaatatgcttgattttgatttggccacaaaaaccacaggctctaggtttgtatttgtaaaaaaacaattagctcaactagaaagagctctatcaaattttatgatagatactcatacacaaaaaaatggttacacagaaatatcacctccattaatagctaccgctgagactatgtatggaactggccaattaccaaaatttgaaaatgatcaatttgaaattaaattagatgcagatgaaggaagaaagtttttgattccaactgcagaagtaattttaacgaatatagttaaaaaccaaataataaataaggatgatctaccgattagagttgttgcttcaactccatgttttagaaaagaagcaggcagttatggcaaagatacaaaaggtatgattagacaacatcagttttataaagttgaattagttagcatagttgaaaatgataaatgtgccgaggagttagagcgtatgtctaatgcagctactatgattttagatgagttaaagcttccatataggaaaatcattttatgtactggtgatatgggttttagcgctgagaaaacgtatgacattgaggtttggctcccttctgaaaatagatatagagaaatttctagttgttcctcttgtggatcattccaagcaagaaggatgaaagcaagatacaaagataaaaacaattcaaaagagtttttaggtacattaaatggtagcggattggcagttggacgtacaatgataacaataatggaaaattatcaaactcaagacggtt

SEQ ID NO: 297210 - DNA, 1261 bp, Unknown
  Bacterial polypeptide expressing nucleotide sequence isolated from the Sargasso Sea
atgcataatattaaagatataagaaacgattttgaaaacttcataaatattattaaaaatagaaatatagatactgatttaaaaaaaatattagatttagacaaagaaaatagaaaactaattcaagagaaagaaaaatatgaaatggaaaaaaaatcgatctctaaaactaaagacaagacccaatttgaaaaatctaaacaaatatcagtaaaaatagaagaattaactttaaaacacaaaaatgtaaaagatgaactcgatggcattcttgtttctatccctaatttaccgctaaaagacgtaccagtaggtagggacgaagaaagcaataaagaagtcagtaaaaatggcaatattaaagattttaattttaaaccaaaatcacattatgagcttggtgaaaaattaagtatgttagattttgatttagctaccaagaccacaggttcgagatttgtttttgttaaagacaaattggcatctttagaaagagcaatttcaaattttatgattgatagccatactaaaatgaacggatatactgaaatttcacccccattaatggctaccgatgatactatgttcggcacaggacaattacctaaatttgaaaacgatcaatttgaaattaaatttgacgacaaaaatgatagaaaatttttaataccaactgcagaagtaattttaacaaatatggttaaaaatcaaattttaaatcttaatgatttgccaatgcgtttagttgcttcaactccatgctttagaaaagaagcaggcagttacggtaaagataccaaaggaatgataagacaacatcaattttataaagttgagttagttagcattgtagaaaataataaatgtgaagaagaacttgaacgtatgacaaattgtgcaactaaaattttagatgatttaaaacttccgtatagaaaaataattttatcaactggtgatatgggttttagtgctgaaaaaacttatgatattgaagtttggctaccatcagaaaaaaaatatagagaaatctctagctgttcatcttgcggcatgtttcaagcaagacgtatgaaggctaaatataaagatcataataataacaacgaatttgttggaactttaaatggtagtgggttggctgtaggaagaaccttaattgctatacttgaaaattatcaaactgaagatggatcaattattattcctgatgtgttaagaccatatatgggaaatattgacattatatcagtcaattaag

SEQ ID NO: 297211 - DNA, 415 bp, Unknown
  Bacterial polypeptide expressing nucleotide sequence isolated from the Sargasso Sea
cattgtcgaaaagaaaattgtttagaagaattagaaagaatgacaaattgtgcaacagacatccttgaaaaattagaactaccttataggaaagttattttatgttctggagatatgggtttcagtgctgagaaaacttatgacattgaggtttggttaccatcagaaaataagtatcgtgaaatttcatcatgttcatcttgttcaacattccaggcccaaagaatgaaaactaggtataaaaacaaaaataaagaaactgtctttgtcggaactttaaatggaagtggtcttgccattggcaggactttaatagctgtattagaaaattatcagcaaaaagatggatcgattgttgttcctaaagttctaagagaatatatgaataatttagaattaatttcgcagaaataaa

SEQ ID NO: 297212 - DNA, 1270 bp, Unknown
  Bacterial polypeptide expressing nucleotide sequence isolated from the Sargasso Sea
atgttagacataaagaaaattagagatgatggaaaacagcttgatgaggctttagtaagtagaaagcatgaaccgtcttcttcattaataatagagcttgataagaaaaatcgagatttaattggtgaattacaggtacttcaggaggaaagaaatgctaaatctaaattgataggagaacatgcctcaaatggtaagaaagacgaagctgaattgcttaaaagtgaagttagttcaataaaaaataaaatgcaggagattgaaaacaaccaacgtatcgcaaaagaagaattaaattctttacttgagtcattgccaaacatgccagacgcatcagtccctgttggagatgaaagtgttaataaagaaataaagatcgaaggcaaaaagaaagaattttcattttcaccaaaagagcattttgatttaggtgaggatcttaataaaatgagctttgatcaagccgcaaaaatatctggagcaagatttgtcatccaaaaaggtgagctagcaagacttgagagagctattgcaaatttcatgcttgatttacacactaatgaattcgagtatgaagaaattaatgtacccattctagtaagagatcaggcagcgtttgggacaggtcaacttccaaagtttaaggatgacttattcaaaacgacagatgattattggttaataccaacagctgaagttccattaacaaatatgacaagagagagtgtagtggatgtagctgaactacctaaacgatatgtttctcatacaccctgtttcagatctgaagcgggagctgccgggaaagatactcgaggaataatgcgccaacatcagttctacaaagttgaattggtaagtttagcctctgaagaaaattcagctgatgaacatgaaagaatgctgagttgtgccgaggaggtactaaaaagattaggtttacactatcgagttgtaattttatctacgcaagatatgggtttttcagctcagaaaacatatgatattgaggtttggcttccagggcaaaacgcatatagagaaatttctagttgctctaattgtggtgattttcaagcaagaagaatgaattcgagatacaaagaaaatgatacaattaaatatctacacacacttaatgggtcaggtttggctgtagggagaactttaattgcagttatggaaaattatcaaaacgaagatggttctattgatgtaccagaagtattaatttcctacatgagtggaataacaaaaatttcaaactaaa

SEQ ID NO: 297213 - DNA, 818 bp, Unknown
  Bacterial polypeptide expressing nucleotide sequence isolated from the Sargasso Sea
tgctacaaagttatcaggttctagatttgttgtgttaaaggataaactggcacttttagaaagagcactaataaactttatgatagacgttcatacgaaaaaatttggatatgttgaaatatcgccgccattaatagttaatgaaaaaataatgtttggcacaggccagttacctaaatttgaaaaagaccagtatgaaattttttctgaaaaagacgaagagcgaaaattcttaatacctactgcagaagttcctttatcaaatttatttaataattctactatagatcaaaaaaaacttcctttaagatttgttgctggaactccttgctttaggcgtgaggcaggtagttacggtaaagataccaaaggtataatgagacaacatcaattttataaagttgaattggttagtttagtggaaccgagcaaatgtgacgctgaactaaatagaatgctaaattgtgcagaagaaatattaaagatgttagagctaccgtatcaaatagttcttttatcttctggtgatatgggttttagtgcagaaaaaacttttgatatagaaacttggataccttctgaaaataaatttcgagaaatttctagctgttcttcatgcggcacgtttcaagccagaagaatgaagactaaattcaaatcaggtaactcatctgattttattggcactcttaatggctcaggtcttgcgacaggccgattaatgatagctttgatggaatactatcaaaattctaacggttctataacaataccgacaccattaaaaaaatatatggataatatagaaaaaatttaat

SEQ ID NO: 297214 - DNA, 757 bp, Unknown
  Bacterial polypeptide expressing nucleotide sequence isolated from the Sargasso Sea
gttgcatctcttcatagagcgcttataaactatatgttaagtaagcaggttaaaaatggttatcaggagtataatgttccatatatttgtaactctgaaagtttgactggaactggtcaactacctaaatttgaggaggatttattcaaactatcaaacgctaatctttatttaatacctactgcagaggttcctctaactaatatataccgagatgtgacattaccctcagaagatctcccaataatgatgactgcgcatactccatgttttagatcggaggccggttcttatggtctggatacaaaaggattaataagacaacatcagtttgaaaaaattgaattagttcagctagtccatccagatcactcagatgaagctttagatgaaatcactctccatgccaggtctatacttgatgatcttgagctcccatatcaaattgttgagctatgcactggagatttagggttctcctctaaaaaaacctatgatcttgaggtctggtttccgagccaaaaaaaatatagagaagtctcctcatgcagtaattttggtgattttcaagctaggcgactgaacatcaagtttaaagaacataaacaaaagaatctcgttcataccttgaatggttctggacttgctgtcgggagaactctagcagcattagttgaaaataattttgatggtaaaaaaattaatattccaaactgtcttcataaatatttagattttaagaccattgaattgtaat

SEQ ID NO: 297215 - DNA, 1234 bp, Unknown
  Bacterial polypeptide expressing nucleotide sequence isolated from the Sargasso Sea
aaaagtttatctctaagaggaaaagtttttaatatttcccaaatacaagaattaactcttcaaaaaaaagaaattgatatagaaatatccagtctccaatctgaaagtaaaaagttaagtaaattgatcggtcaagaaatcagcaaatctaaaaacaatcattctccagaagtaaataatttaaagaaaaaaggaaatgaatacagaactaaaatttcagaatttgaagagaagaaaagaaccttagataaaaatatacataatgaaatttgtaatttaccaaatttacctagcaaagatgctcctattggaaaagatgaaagtaataatgtccaagtaaaaacttggggagatccgttagtaacagaaaatcttaaatctcactgggaaataggcgaaagtcttaatctttttgactctgtcaaatcaactaaaatatcaaagagtcgttttattacacttattggcaatggggccagattagagagagcattaataaattttatgctcgacatgcatactagcaatggttatttagagttaatgcctccagctttagtgaattcagaaagtcttaccggatctggtcaattacctaaattttcaaatgagagttttaagtgttctaacgacgacctatggctttctcccactgctgaagttccactaactgcttttcatagaaatgatattattgattccaagcaattaccccttaagtatgttgcatatagcccatgttttaggagagaagctggaagttatggaagggatacaaaaggtttaataagacttcatcaatttaataaagttgaactatattggttttgtgatccaaataaatctattgaagctcataaaaagatcactatagatgcagaaagtattttaaaaaagctcaatctaccctacagattaattgatatttgtactggagacttaggtttttcttcaagcagaacttttgatcttgaagtctggctaccaagtaataaatgttatagggaaatttcaagttgcagcaattgtttagactttcaagcccgcagatcatcgataagagcaaaaattgataaaaaaaatacatatcttcacaccttaaatggaagtgggcttgcgattggaagaactatggctgctattcttgaaaatggccaacaaacagatgggagcgtaaaaattccagatgctttagttccatattttggatcaaatattttaaaaactgcttaat

SEQ ID NO: 297216 - DNA, 1204 bp, Unknown
  Bacterial polypeptide expressing nucleotide sequence isolated from the Sargasso Sea
tatgaagggttcaataggtgatattatttctttagatgaaaatttcagaatgataccttatgatcttgagcagctaagagctaaaaaaaacactgtatctgagcaggtggcaatagccaaacgaaatggcgaagaatctgctgaaaaaattaaagaaatgagagatctaggtgatgaaataaaaattttagaaactaaatcaaataaattgaagctcgatctagcatcatcgcttgagcaagttcctaacttgcctcataaatcagtaccaattgggaatgatgaaaatgataatgtaatagttagagaatggggtgagaaaaagatttttgattttaatgaaaaaacccatttggaattgagtgcatcgcttaatttattagatctagagcgtggtgctaaaatttcaggcagtggatttcctatttatgtagggaaaggagcagagctagagcgaagattaattaattgtatgattgagcatcacgttcgagattataattttactgaaatattcccaccagtacttatgcttgaagattcaatgaaaacgacaggtcaactaccaaaatttaaagaagacatgtatttaactgatttagatcagctttatttagcgcctacagcagaggttccaattactaatattcacagaaatgaaatcattccagaatcagacctcccaattaattatgtcgcttactcaccttgttttaggagagaatccggttcctatggaaaagacactcgtggattattaaggcttcatcagtttaacaaggtggaaatggtaaaatttgttaggccagttaattcttacgaggcgcttgaagagctaacacttcaagccgaatcaatactgcaaaaattaggaattacatacagagtagttgagttatgtactggtgatttaagttttgcagctgccaagtgttatgatattgaaatatggtctccgggtgagaaaaaatggctcgaagtttcttcatgtagcaattttgaagatttccaagctagaagaggaaaaataaggtaccgaaaagatgaagataagaaagttgatctacttcatacattaaatggttcggggttagcaacacctagattgatggtttcacttcttgaaacatatcaaactaaaaatagtaccatagaattttctgattcagctgctgaattcattggaataaaagaaatatcatag

SEQ ID NO: 297217 - DNA, 1180 bp, Unknown
  Bacterial polypeptide expressing nucleotide sequence isolated from the Sargasso Sea
actgttaaggaaaaaagatattgatatagaaatatccaatcttcaatctgagagcaaaaagttaagcaaattgattggtcaagaaatcattaaatctaaaaatagtgattctccagaactaatttctttaaaaaagaagggaaacgaatacagaataaaaatttctgaactcgaagagaagcaaagaatatttgacagagaagtagatgataagatttataatttgccaaattttcctagtaaagacgcgcctataggaaaagatgaaagggataatttacaaataaaaacttggggagatcctctaataaaagagaatataaaatcacactgggaaataggagaaagtctaaatatttttgactctgtaaaatcaacaaaaatatcaaaaagtcgttttatcactctcattggcaatggtgccagattagagagggcattaattaattttatgctcgatatgcatactaaaaatggttacttggagttaatgccgccagctttagtaaattcagaaagtcttaccggatctggtcaattacctaaattttcaaatgaaagttttaagtgttccaatgacgatttatggctttctccaacagctgaagttccactaactgcttttcatagaaacgagcttattgatcccaagcagttacctattaaatatgttgcatatagtccatgttttaggagagaagctggaagttatggaagggatactaaaggtttaataagacttcatcaatttaataaggttgaactctattggttttgtgatccaagtaaatctttagaagctcataaaaagattacttctgatgcagaaagcattttacaaatgctcaacttaccttacagattggtagatatttgtactggagacttaggcttttcttctagtagaacttttgaccttgaagtttggcttcccagtagtaaaagttatagagaaatttcaagttgcagtaattgccttgactttcaagcacgtagatcatcaataagatcaaaaattgataaaaaaaatacatatatacataccttaaatggcagtggtcttgctattggaagaacaatggcggcgattcttgagaatggccaacaaaaagatggtagcgttaagattccagatgctctggttccatattttggatcaaattttttaaaaactgcttaa

SEQ ID NO: 297218 - DNA, 1279 bp, Unknown
  Bacterial polypeptide expressing nucleotide sequence isolated from the Sargasso Sea
atgcatgatattaagtacataagagaaaacccagaattatttgatgctaatttaaataaaagaggtattgatgcgtcttcaaaggaaatacttcttatagacaatgaaagaaggaaactccaaactcttattcaagaaaaacagaaatctaggaatgaaatttcaaaaaaaatacctgaaattaaatctaaaggtcaggatgcttcttctttgtttgatcaggtttccttaatcaaaaaagagatttctgaatttgaaaaaaatgaaactcaactctctgaaaaattgaatagttatttactagaattaccaaatttaatagataatgatttacctattggtactgaagagcaaaataaattaattaaaacatggggcacaattaaaaaacatgatttcacaccaaaagatcatgttgctctaggtgagaatttttcagaaatcgatttcccaagtgctgctaagttgtcaggtagtaggtttgtggttctttttgggaaaattgctaaattagagagagctcttaagagttttatgattgataggttaaccaattcatatggatatactgaggttatgccaccagttttagtaaatgagaaaacaatgactggaactggtcaattaccaaagttttctgaagatttatttaaaacaatcgataacagatggctaattccgacagctgaagttcctcttactaatttggtatcagatatgataacacctaaaaaaaatcttccgatgcgttttacagcttatactcagtgttttagagctgaagcaggagccgctggtagagacacaagaggaatgataagaaatcatcaattctctaaagttgaaatggtttctatttgtgatgaagatagctcagtagatgaattagacaggatgactggggccgcagagaatattcttcaaagtcttgaattaccttatcgagttgttttattggcttctaaagatataggtttttcggcaaaaagaacatatgacttggaagtatggttgccaggtcaaaatgacggccaaggttgttacagagaaatttcctcttgctctaattgtggttcttttcaaggaagaagaatgaaagcgaggtataaagatgaaaacaataataacaaatttgttcatacattaaatggttctggtttggccgtagggagaacaattattgctattttagagaatggacaattatctaatggagatattcagcttccaaaagtactccacgagtatatgggtgcagataagatatcaaaaggttaat

SEQ ID NO: 297219 - DNA, 1075 bp, Unknown
  Bacterial polypeptide expressing nucleotide sequence isolated from the Sargasso Sea
atgcataatttaaaagaaattagaaaagacttttcaaaatttgaaaaagatcttgaaaaacgttcagttaaaattgattttaataatttaaaaaaacttgatgagttaaatagagatttaattcaaaagaaagaaaatttagaaaaagaaaaaaaagatatttcaaaatcaaaagatgaaagtttatttaaaaaatctaaagaaatatctactgaattagaaaagattgctgagcaacaaaaaaatactaaaactgaattagataatattttatcaagtataccaaatatacctcatcaagatgttccaaatggcaaagatgaaaatgacaatgtagaagttttaaaagctggaaaagttccagagtttgattttaagcccaaatctcattacgaacttggtgaaaatttaggtatgcttgattttgatcttgcaactaaaacaactggatcaagatttgtatttgttaaaaaagagttagcattactagaacgagctttatctaactttatgctagatactcatattgttcaaaatggctatcaagagatttcacctccattgatagcttctgacaatacaatgtatggaacaggccaattaccaaaatttgaaaacgatcaatttgaaataaaatttgatgaaggatctgatagaaaatttttaattccaactgctgaagtaattttaacaaacattgttaaagataaaattgtagaccaaaaagatttaccgatgagatttgttgcctcaacggcatgttttagaaaagaagccggcagttatggaaaagataccaaaggaatgattagacaacatcaattttataaggttgagatggttagtattgtagaaaaagaaaattgcctagaagaattagagcgaatgacaaactgtgcaacagatattcttgataagctagagttaccttatagaaaagtaattttatgttcaggtgatatgggttttagtgcagaaaaaacttatgatattgaagtgtggttaccatcagaaaacaagtatcgtgaaatatcatcatgctcttcttgttcaacatttcaggcacaaagaatga

SEQ ID NO: 297220 - DNA, 1060 bp, Unknown
  Bacterial polypeptide expressing nucleotide sequence isolated from the Sargasso Sea
tataatttaaagaaaaaaggaaatgaatacagaaccaaaatttcagaatttgaagagaaaaaaagaaccttggataaaaatatacaaaatgaaatttgtaatttacctaatttacctagcaaagatgctcccattggaaaagatgaaacacataatgtccaagtaaaaacttggggagatcctttagtaacagcaaatcttaaatctcactgggaaataggagaaagtcttaatatttttgactctgccagatcaacaaaaatatccaaaagtcgttttattacacttattggtaatggggccagattagagagggcattaataaattttatgctcgacatgcatattaataatggttatttggagttaatgcctccagctttagtaaattcagaaagtcttaccggatctggtcaattacctaaattttcaaatgaaagttttaagtgttctaatgatgacttatggctttcgcccactgctgaagttccactaactgcttttcatagaaatgatattattgattccaagcaattaccccttaagtatgttgcatttagcccatgttttaggagagaagctggcagttatggaagggatactaagggtttaataagacttcatcaatttaataaagttgaactatattggttttgtgatccaagtaaatctattgaagctcataaaaagatcactttagatgcggaaagtattttaaaaaagctcgatctaccttacagaatagttgatatttgtactggagacttaggcttttcttcaagcagaacttttgatcttgaagtctggctaccaagtagtaaatgttatagggagatttcaagttgtagcaactgtttagactttcaagcccgcagatcatcaataagagcaaaaattgataaaaaaaatacatatcttcataccttaaatggtagtgggcttgcgattggaagaactatggctgctattcttgagaatggccaacaaacagatgggagcgtaaaaattccagatgctcttgtcccatattttggatcaaatattttaaaatccacctaat

SEQ ID NO: 297221 - DNA, 378 bp, Unknown
  Bacterial polypeptide expressing nucleotide sequence isolated from the Sargasso Sea
gaatgacaaattgtgcaacaatgattttagataaactaaaattaccttatagaaaaataattttatcaactggtgacatgggttttagtgctgaaaaaacttatgatatagaagtctggcttccttcagaaaataaatatagagaaatttctagttgctcatcttgtggaacttttcaagcaagaagaatgaaagctagatataaaaattcaaataatgaaactgaatttgttggtacactaaatggaagcggtttagctgtaggtagaacactaatagcaatattagaaaactatcaaaattcggatggatcaataacagtcccagatgctcttaaaccctacatgaataatctagaaaaaatttcaaataattaga

SEQ ID NO: 297222 - DNA, 868 bp, Unknown
  Bacterial polypeptide expressing nucleotide sequence isolated from the Sargasso Sea
gaaaacacactatgaactaggcatcaaatcaaacatgatggactttgaaagtgcaacccaaactttctggttcagattgttttttttaaagggcaggcttgctcagttagaaagagctatatcaaattttatgcttgatattcatacaaaagagtttggttatgatgaaatatcaccacctttaatagcatcagaagaaactatgtttggaactggtcagctaccaaaatttgaaagcgatcaatttgaaattcaaatagatgaaaatactaaaaaatatttaattccaacagcagaggttatccttacaaatatagttaagatgaacacgataaacttaaaaaatcttccgttaagaatggttgcatcaacagcttgttttagaaaagaagctggtagttatggcaaagataccaaaggtatgttgagacaacatcaattttataaagttgaattggtgagtatcgttgaaccctcaaattgtaataatgaattaaaaagaatgatctcttgtgctgaagaaattcttaaaagacttaaattgccttttagatctgttcttttatcaactggtgacatgggtttcagtgctgaaaaaacagtcgatcttgaagtttggataccttcagaaaataaatatcgcgaaatatccagctgttcatcatgtggtcaatttcagtcgagaagaatgaaggcaaaatttaaagatgaaaaaaataaatcagatttccttggcacattaaatggatcaggtttggctgtaggaaggacgcttattgcaatcatggaaaactatcaaaattctgatggaactataactatacctgagttactaagaccatacatgaataatttaaacaaaatttaa

SEQ ID NO: 297223 - DNA, 943 bp, Unknown
  Bacterial polypeptide expressing nucleotide sequence isolated from the Sargasso Sea
atgattgatataaatttacttagagcagatcctgaaaaagtaaaggataatcttaaaatcaaaaactatgatttagatactggtttgtttactgaaattgattctaagagaaagaccatacaaactgaagttgaagatttaaagagtcaaaagaataaattatcaaaagattttggagagcttaaaaaaagtaaccaagacacctctgaattatctgatcagctagataaaattaaaggaaatcttttagaaaaggaggatttactcaataaaatactatccgatttaaataatttcttattagatattccaaatattcctcatcaggatgtggaggagggaagtagcgaggaagacaataaagtgattaaaagttttggagaagttcaaaaaagagattcaattgatcatcttgaaataacaactgatattgatactgaatctgccgttaagctcgctggcacgagatttacagttttaaaagatgatatagctaagcttcatagagcgctaatctcatttatgcttgatgtggctgaaaaaaatggttacaaagagaggtatgtgcctttcatggcaaattcacgaagtctcactgggacaggacaacttccaaagtttgaagaggatcttttcaaagtaactgaagatttatttttaattcctacagctgaagttccattaacaaatatttatgctgattcaatattggaactagatagcttgccaatcaagataacatctcatacgccttgctttagatcagaagcaggaagttatggtaaagatacgaaaggtcttatacgtcaacatcaatttgaaaaagttgaaatagttcaagttgttcatcctgataaatcagataccgctcttgagagtttattaagcaatgctgaggaaattcttcagcttttagaattaccatatcaggttgttcaactat

SEQ ID NO: 297224 - DNA, 871 bp, Unknown
  Bacterial polypeptide expressing nucleotide sequence isolated from the Sargasso Sea
tttgattttaatcctaaaactcattttgaattaggggaaaatttaggtttaatgaattttgaaactgcatctaaattatcaggatctagatttgttttattaaaaaatcaactctctaagttggaaagagcaataacaaattttatgttagataagcatacgaatgaaaatggttatatagaatataatttaccttttttggttaaagattccgctctttttggaacagggcaattacctaaatttggtgaagatttatttactgctggtgaagatcattggttaataccaactgctgaagttcctttaacaaacatggttagagaggaaatacttaaccaaaatcaattacccatgagagtaacttcttatactccctgttttagatcagaggctggtgctgctggtaaggatactcgtggtatgttaagacagcatcaatttactaaagttgaattagtttcaatagtagagccacagcattcacaagatgaattagaaagaatgcttgaaagcgctgagagtattcttcaagatttaaatattcattataggattatgactttatgtactggtgatatgggcttttcagcatcaaaaacatacgatattgaagtgtggcttccaggtgaaaatacttatagagaaatttcaagctgctcaaattgtaatgattttcaagctagaagaatgaatacaagatataaattagaaaataaaaatatttttgttcatacacttaatggatccgggttagcagtaggaagaacactaattgctattcttgaaaattatcaaatgaaagatggaaatattaaaattccagaagttttgaaaaaatatttcaataattctgatactcttatctagt

SEQ ID NO: 297225 - DNA, 1010 bp, Unknown
  Bacterial polypeptide expressing nucleotide sequence isolated from the Sargasso Sea
aatcctgaaagataaagaagatgaacttaataattatcttgagaaattaaatgattttttaatgggtattccaaacatccctgatgatagtgtgccaaccggtagtgacgaaaatgataatgttgttataaataaatttggtgaaatatctacaaaaaatgatttagatcatttagaaattacaaatgaaatagatactgagttggcggctaagttggctggttcaagatttgctgttcttaagggagaaattgcaaaactgcaaagagctttaattacatttatgattgataacgctataaaaaatggatacaaagaattttatgtacctttcatggctaatgttgaatctttaacaggaacaggccaacttccaaaatttgaagaagatctattccaaagttctgataaattatttttgatacctaccgcagaagtaccattaacgaatttattcagagatgagtttctcaatccaaaagatctaccaataaaagtaacatcgcacaccccatgctttagatctgaagccggcagttatggcaaagatacgcgaggtttaataagacaacatcagtttgagaaaattgaattagttcaagtcacaagtccagaaaactctatggagtgtttagataatttattagcaaatgcttgtgaaattcttgaccttcttgaacttccataccaagttatagaactatgcacaggagatttaggatttagttcatgtaagacctacgatatagaagtctggatgcctagccaaaataaatatcgagaaatttcttcgtgttcaaacttctcagattttcaggctagaagagccaatataaagattaaggatgaaggaaaaaattattttgcacatactattaatggctcaggtctagcagttggtcggactttgattgctttaatagagaataattttgatgggtctgattctatcaaaataccaaaaaatcttgaaagttattttggttcaaacactatcaaaataaattgat

SEQ ID NO: 297226 - DNA, 1228 bp, Unknown
  Bacterial polypeptide expressing nucleotide sequence isolated from the Sargasso Sea
atgcacaatttaatctacattagagaaaatccaacagagtttgataactttatgaaacttaggggtgaagataatttatcatctaaaattttagaattagataaaataaaaagagaaacacaaactgttcttcagaatttattatcagataaaaacaaactatcaaaagaaataggtattcttaaggctcaaaaattagacgcaaatgcaaagattaaaaaagttgaggacttaaaaagtaagattgataacttaaaagaattagaagaaatcaaagataatgaattaaattctattctttctcgtttgcctaacattccagataaatctgttccatttggaaagaatgaaaatgataatattaaatatagagaatggggcaataaaccagaatttaattttaaaccaaaattgcattatgaaattggcgaaaatttgggattaattaattttgaattagcagcaaaattatctggttcaagatttgttgttttaaaaaaacaaatttctaaattggaaagagctatttctaattatatgttagataaacatactgtagaaaatggttatatagagtatactttaccttttctggttaaagataattctttatttggaactggacaacttcctaagtttggagaagatttatttactgctggtgaggatcattggttaattccaactgcagaggtacctttgacaaacttagtaagaaatgaaattttaaatattaaccaactaccaataagaactacatcatgtacaccttgcttccgatcagaagctggagcttcaggaaaagatactagaggtatgctaagacaacatcaatttactaaagtagaattagtttccattgtagaacctcaatattccgatcaagaattagaaagaatgcttgaatgtgctgaaagtattcttaaagatctaaatattcattatagaattatgactttatgctcaggtgatatgggtttttcagcaaaaaaaacatacgatattgaagtatggttacctggtgaaaatacttatagagaaatttcaagttgttctaattgtggtgattttcaatcaagaagaatgaatacaaggtataaaactgatggaaaaaatcaatatgttcatacattaaatggctcaggtttggcagtaggtagaacattaattgctattcttgagaattatcaaatggaagatggtaatgttaaaattcccgaagtttaaa

SEQ ID NO: 297227 - DNA, 1032 bp, Unknown
  Bacterial polypeptide expressing nucleotide sequence isolated from the Sargasso Sea
ataaaaatcaaaaaatagttaaagataagcttgataaaatcttatctactatacccaatatacctttaaaagatgttccgattggcaaagatgaaaatgataataaagagattgtaaaggttggaaatattaaagaattttcttttaaacctaagtcgcattatgaaattggagaaaaacttaatatgttagattttgaactagctacaaaaacaacaggttcaaggttcgtttttgtaaaagataaactggcatcattggagagagcaatatcaaattttatgattgatactcatactaaaaataatggatatactgaaatatcacctcctttaatagctacagacaatacgatgtttggtactggtcaattgccaaaatttgaaaatgatcaatttgaaattaaatttgacgataaaaatgacagaaaattcttaataccaactgcagaagtaatattaactaatatggttaaaaatcaaattgttaatattaaatcattaccaatgagattggttgcttctactccatgttttagaaaagaagcaggaagttatggaaaagataccaaaggcatgattagacaacatcaattttataaagttgagttagtaagcattgttcaaaacgataaatgtttagacgaactagaaagaatgactaattgtgcaacaagaatattagaagatctaaaacttccgtatagaaaagttattttgagctctggtgatatgggtttcagtgctgagaagacttatgatattgaagtttggcttccatcagaaaaaaaatatagggaaatttcaagttgttcttcttgcggaacatttcaagccaagagaatgaaagctagatacaaaaataaagataataatatagagtttgttggaacattaaatggaagcggacttgctgttggtagaactttaatagcaattttagaaaactatcaaacagaagagggatcaattataattccagatgtactaaaaccatatatgggaaatatcgataaaatttctatcaattaag

SEQ ID NO: 297228 - DNA, 757 bp, Unknown
  Bacterial polypeptide expressing nucleotide sequence isolated from the Sargasso Sea
attgttaaaaaagagatttattgatccaaaatcaaatgaaattatctctcttgataaaaaaaaaagagatattttaactaaatctcaagaattaagagcagagagaaagaatttatcatcttcttttgcaaatcttaacgacagtgataaagctgatttacaaaaaaaggtacaattaattaaaaacaagattgatgaactagaaaacgatatttcaataatagatgagcaattaaaaaataatttatctagtctgccaaacctcccacataaagatgtacctgtgggaaaagatgaaatctcaaataaattaataaaacaagttggaaaaattccttcattcagttttccaccgaaatcccactatgaacttggagagaatttagaaatgattgattttgagcaagctgggaaagtatcaggtacaaggtttgtatatttaaagaaaaagatagcaaaattagaaagagctatagctaattttatgttggataaacacacaaatgaatttaattatacagaaattaatccacctaacttagttagagatgctgcagcttatggaactgggcaattgccaaaattttcagaagatttatttaaaactaacacaaatcattggttgataccaactgctgaagtacctttgactaatttagtattagatacaatcgtatctgataaaaatctgcccctgaggtacacagcttggacaccatgttatagatctgaagctggagcagcaggaagagataca

SEQ ID NO: 297229 - DNA, 1267 bp, Unknown
  Bacterial polypeptide expressing nucleotide sequence isolated from the Sargasso Sea
gatgatatcgattaaaaaactccgaaacgataaagattcttttaaatcaaaattagctttgaagaatgataatgcagatttagatcttatattatctctcgatgcaaaattacgtgaattaaaaacagcatctagcgaaatgagagcagaaaggaatagtgcctccgatgcaattggtaaagcaaaaaaagcaggtgatgatgcttctgctgcaattagcaccatgagagagttaggagaaaatatcaaagagatagaaagtgatcttcaagatgtttcaatccaattggatgacctactatataaaataccaaaccctccacatgacagttctcctaaaggaaaggatgaatcagataatgttgaagttaggtcttggggtagcaagcctgaatttgacttcacaccaaagactcatactgagattggagagagcctagaattatttgattttattagaagtgcaaaactttctggaagtggcttccctctttatactggccagggtgcccatcttgaacgttccctaattaattcaatgatgagccaccaccataatgaatatgattttaaagagatattcccaccagtattaatgaaaaagaagtccatgataacaacaggacagctgccaaagtttgaagaggatatgtatcatactgaagtagataatctatatcttgctccaacggctgaagtccccgtaaccaatatacatcgtgatgaaattattgatgaatcagaacttccgattaactatgtagcgtattcaccatgctttagaagagagtctgggtcatatgggaaggatacaagaggtttattacgtgtccaccagtttaacaaggtagaattggtcaaattcacaagtcctgaatcgtcttatgatgaactagaagctcttactcatcaggctgaatcgatcttacagaagctagggctatgctatcgtgtggtggagttatgtacaggtgatttaagttttgcggcagcaaaatgttatgatatagaaatctgggcacctggcgaaggtaaatggcttgaagtttcatcgtgcagtaattttgaatcatttcaagcacgtcgagggaatataaggtttagagattcagataataatgtaaagtttttacacacactaaatggatccggagttgcaacacccaggctaatggttgccttaatcgaaacatatcaaaatcaaaatggtacgataaggtttccagaaaaagttgctgaatttttaggtataaaggagattaaataa

SEQ ID NO: 297230 - DNA, 1261 bp, Unknown
  Bacterial polypeptide expressing nucleotide sequence isolated from the Sargasso Sea
gatgcataatttaaaggaaattagaaaagatttccctggttttgaaaaagctttagaaaaaagatctttaaaaattgattttaaaaaattacaaaaattagatgaagaaaatagaaatttaattcaaaaaaaagaggccatcgaaaaagaaaaaaaagatatttcaaaatctaaagacgaaactttatttaaaaaatctaaagaactcacatttgaattagataaattaactgattcacaaaaaaaaataaaaacagagttggacaatctactatctaatatacccaatattccccatgaagatgttccaaatggtaaagatgaaaatgataatgtagaggtattaaaaacaggaaacatacgaaaatttgattttaaacctaaatctcattatgagcttggtgaaaaccttggaatgctggattttgatctagcaactaaaactacaggatctcgatttgtttttgtaaaaaaccacttagctttattagagcgagccttatctaattttatgttggatactcatattaataaaaatggatatcaagaaatatcacctcctttgattgcttcagataacacaatgtatggaaccggtcagttacctaagtttgaaaacgatcagtttgaaatcaaatttgatgaaggatcagatcgaaaatttttaatacctacagctgaagtaattttaacaaatattgtcaaagataaaatagttgatcaaagtcatcttccgatgagatttgtagcatcaacaccttgttttagaaaagaagcaggaagttatggcaaggatactaaaggcatgattagacaacatcaattttataaagttgaactagtaagcattgttgaaaaagaaaattgtttggaagagttagaaagaatgacaaattgtgcaactgatattcttgataaactagaactaccttacagaaaagttattttatgttctggagatatgggttttagtgctgaaaaaacatatgatattgaagtttggttaccatcagaaaataagtatcgtgaaatttcatcatgttcatcttgttctacattccaggctcaaagaatgaaaactagatataaaaatacaaataaagaaactgtctttgttggtactttaaatggaagtgggcttgcagtcggtaggactttaatagcgatattggaaaattatcagcaaaaagatggatcgattgttgttcctaaagttcttagagaatatatgaataatttagaattaatttcacagaaataa

SEQ ID NO: 297231 - DNA, 1261 bp, Unknown
  Bacterial polypeptide expressing nucleotide sequence isolated from the Sargasso Sea
atgcacaatattaaggatattagaaaagatatcgataattttaaaaatacaattaaaaatcgaaacgttgatgtagactttgaacaaatattaaatcttgatgaagaaaatagaaaattaattcaagaaaaagaaaaattagaaatggaaaaaaaatctatttctaaatctaaagatgaaaccctttttgaaaagtcaaaagaaatttcaaataaaatagatgatttaagtaaaaatcaaaaaaatgttaaagaccaacttgatcagatattaagtaatattcctaatttaccattgaatgatgtccccgtaggtaaggatgaaaatagcaataaagaggttgtaaaatctggtgaaattaaagaaatgagttttaaaccaaaatctcattatgaaattggtgaaaaactgaatatgttagattttgatttagcaacaaaaacaactggatcaagatttgtttttgttaaagacaaattagcatcattagaaagagcaatttctaattttatgattgatacacatgtcaataataatggctacactgaaatctctccacctttaatggctacagacaacactatgtttggaactggccaattgcccaaatttgaaaatgatcaattcgaaattaagtttgatgataaaaatgatagaaagtttttaatccctactgctgaagtgatcttaactaatatggttaaaaatcagatattaaatctaaaatctttgccaatgagattagttgcatcaacaccttgttttagaaaagaagcaggaagttatggtaaagatacaaagggcatgattagacaacatcaattttataaagttgaattagtcagtattgtagaaaataataaatgcattgaagaactagagagaatgactaattgtgcaactaaaattttagatgatttacaattaccttacagaaaaattattttaagcactggtgatatgggttttagtgcagaaaaaacttatgacatagaggtttggcttccatctgaaaataaatatagagaaatatcaagctgttcttcatgtggaacatttcaggctaaaagaatgaaagctagatataaaaataataataacgaaaatgaatttgttggtactttaaatgggagcggacttgccgttggtagaactttaattgcgatattagaaaattatcaaactgaggatggttcaataactattcctgaaaaactaagaccatatatgaacaatatggagaaaataggtatcaattaag

SEQ ID NO: 297232 - DNA, 1076 bp, Unknown
  Bacterial polypeptide expressing nucleotide sequence isolated from the Sargasso Sea
tatgatttctatcgaatacttaagaaataattatgaagaggcaaaaaagagcctttcatctaaaggcgctatagatggccttgatgaaataatttcaatagataaagactaccgcaagattcttatgactgtcaatgatttacgcgctgatagaaataagacttcagatgaaattgctgaactaaaaaaatcaggtgaagatgcagatgataaaataatatcgatgcgaagagttagtgaaaaaatcaaagatatcgaaaatgaattatcaactaaaaaagaaaaaattgatgagctattgctaaatcttccaaatattcctcatgaatcagttcctgaaggcataaatcaagatgataataaaatagtatctacctggggcgaagatccaaaaaaagattttacattaaaaacacatattgagattggcaaatcactaaatttgtttgattttgagcgttctgcaaaaatttctggatctggcttcccattattaattgggaaaggagctttgctggaaagagcgctaataaattttatgctagacactcaaactgtcgaaaacaattatattgaaatattccccccatttcttgttaattcagattcagttttaaccactggaaatttaccaaaattttcagaggatatgtaccactctgaaatagataatctttggctaatacctactgcagaagtgccgattacaaatatacataaaaatgaaattttaagcgaagatgacttgccaaaaaaatacacagcttactcggcatgctttagaagagaagcgggttcttacggcaaagaagcaaaggggtttttacgattacatcagtttaataaagttgaacttgttcaatttactcatcctaaagattcctataaaatcttagaagatttaacttttcacgcagaaatgatacttcaagctttaaatctaaagtacagaaaagttgagctttgtactggagatttaagtttttctgctgcaaaatgttatgatttagaaatatgggcaccaaccgagaaaaaatggcttgaagtttcatcttgtagtaattttgaggattttc

SEQ ID NO: 297233 - DNA, 1273 bp, Unknown
  Bacterial polypeptide expressing nucleotide sequence isolated from the Sargasso Sea
atgcacgatattaataaaataagacaagaacccgatctgttttgcgatggtttaaaaaaaagaggcttggaagttgatatcgaaaagatattaaagattgatagcagtttaagagaaagtatttctgaaattcaaagttttcaagaacgaagaaatcagatttccaaagatgctggaaaagcgaagtcagaaggtaatgagtctgaatttcttaaacttaataaagagtcccaagaaataaaagattcaattagcaaaattgaagagagtaaattagaaaccgaaaaagaacttaaagatattttgtcttcactgccaaatattccttcaaatgatttgcctgttggagatgatgaaagttttaatgttgaaataaaaaaagaaggagagttaataaacaaaaaatctcctcatcattctgaaataggtggagaattgaacgaacttgattttgaaactgcagctgagttatctggatcaagatttgttatatcatctggaaaaattgctaaactagaaagggcgttatcaaattttatgatagatatccatacttctgagcatggctataaagaaataaacattccttatttggttaaggaggattcaatgtttggaacaggtcaattaccaaaatttagtgaagatcagtataaaacagataatgatttatggttaatacctactgcagaagttcctcttacaaatcttgttagaaaaaaaattataagtgaagaggagctacctttgaggtatacggcattttctcagtgtttcagaaaagaagctggtgcagctggaagagatactcgaggaatgattaggcttcatcaatttcctaaggttgagctagttagcataacaaaaccagaggactctaatgatgagttagaaagaatgttatcttgtgctgagaagatactacaattacttgaattaccttatagagttgttttgttagcaactggtgatattggtttttcagctcataaaacatatgatttagaggtttggtttccttccgaaaagaaatacagagaaatttcatcttgctcaaattgtttggactttcagtcaagaagaatgaatgcaaaatataaaagcaaaaatgataaaaaaaatatctttttacatactttgaatggatctggtgttgctgttggaagggcgttggctgcaattttagagaataattatgatgaaactgggcatataaatattcctaaagttttacaaccatatatgaatggtgaaaaggtattaaaaatataaa

SEQ ID NO: 297234 - DNA, 934 bp, Unknown
  Bacterial polypeptide expressing nucleotide sequence isolated from the Sargasso Sea
gatgcataatttaaaagaaattagaaaagattttttaaaatttaaaaaagatcttgaaaaacgttcagttaaaattgattttaataatttaaaaaagcttgatgagttaaatagagatttaattcaaaaaaaagaaaacttagaaaaagaaaaaaaagaaatttcgaaatctaaatatgaaagtttattcaaaaaatctaaagaaatatctacagaattagaaaagatttctgagcagcaaaaaaatactaaaacagaattagataatattttatcaagtataccaaatatacctcatcaagatgttccaagtggtaaagatgaaaatgataatgtagaagttttaaaagctgggacagttccagagtttgattttaaacctaaatcacattacgaaattggtgaaaacttaggcatgcttgattttgatcttgcaactaaaacaaccggatcaagatttgtatttgttaaaaaggagttagcattattggaacgagcattatctaactttatgttagatacccatattacacaaaatggctatcaagagatttcacccccattgattgcctctgataatacaatgtatggaacaggccaattaccaaaattcgaaaacgatcaatttgaaataaaatttgatgaaggaactgatagaaaatttttaattccaactgcagaagtaattttaacaaacattgttaaagataaaattgttgaccaaaaagatttaccaatgagacttgttgcctctacaccatgttttagaaaagaagcaggcagttatggtaaagataccaagggaatgattagacaacaccaattttataaagttgagatggttagtattgtagaaaaagaaaattgtcttgaggaattagagcgaatgaccaactgtgcaaaagatattttggataagttagagttaccttat

SEQ ID NO: 297235 - DNA, 1021 bp, Unknown
  Bacterial polypeptide expressing nucleotide sequence isolated from the Sargasso Sea
catgcatgacattaagaaaataagggagaatccctcagatttagatgagttattagccaaaagaaaacatccgccagtttcaaatcagataattgaattagatgaaaagaatagagaaattattggtgagcttcaagttattcaagaagagagaaacgccaagtcaaagctcataggagaatatgcggctaaagaaaaaaatgatgaagccgctaagttaaaggccgaagttacaagtttaaaagataaaatgcaggagttagagaatagtcaaagagaaaaacaagaagaactcaatactgttttatcttctttacctaataatccagcagatgatgtgccagttggagatgaaagtttaaataaagaaattaagctggaaggcaacaaaaaagaatttacttttactccaaaagaacacgatgaattaggcgaaaacttaaatatgatgagttttgaacaagccacaaaaatctctggagcgaggtttgttgtgcaaagtggcttgattgctagaatggaaagagcaatatctaattttatgttagatcttcatacaaatgaatttggatacacagagatgaatgttcctatacttgttaaagaccaatcagtttatggtgtgggacagcttcctaagtttaaagatgatttatttaaaacaaccgatgactattggcttataccaacggccgaggttcctcttagtaatatgactagagagtcaattattgatattttagatttacctaaacgatatgtatctcatacgccatgtttcagatctgaagctggcgcagcagggaaagatacaagaggtattatgagacaacatcaattttataaagttgagcttgttagtttaacatcagaaaggaaatctaaggatgaacatgaaagaatgttaagttgtgcagaggaagttttaaaaagattaaatcttcattatagagttgtcatattgtcttctgaggatatgggttttgctgcacaaaaaacatatgatattgaagtatggtgc

SEQ ID NO: 297236 - DNA, 1173 bp, Unknown
  Bacterial polypeptide expressing nucleotide sequence isolated from the Sargasso Sea
aatgttagatataagaaaattgagagataattttgaagaagttaaggtagctttaaaaaagcgtggttttgatatagatcaagaaaagttccaatctttagataaaaaaagaaaggtgcttcaagtagatgttgaaaatcttcaagctgataaaaataaactttcttcagaatttggaaaacttaaatcagcaggagaaagcactgattcattaaaagaaactatagacaaaaaaactcttgagctaaatgagaaagatagtgagcttaaaattattttagataaaattgaaagtttcttattaagaataccaaacatttcagatgattctgttcctgagggtaaaaatgaagaagataatgtagttgttagcactcatggttcaatagattcttcaaatacacttgatcacttagaaataactggattgatagatgttgatttagcagtaaagcttgctggagctcgtttttcagttttaaagggtgatttagcaaaacttcaaagagctttgattacatttatgttagataatgcaacgagccatggctatgaagaatattatcttccctttatggcgaataggaattcattaattggaacaggacaattacctaagtttgaagaagatctttttaagacttatgataaattatatttgatacctacagctgaagtcccattaacaaacttatttagaaatgaatttgttaatgaagacgaacttccaataaaagttacatcacatactccatgttttaggtctgaggctggcagttatggaaaagatacgcgtggacttatgaggcaacatcaatttgaaaaaattgagcttcttcaggttactcatcctgacaattctatgaaatgtttagatgaattattagctaatgcatgtgagattcttaataaattagaacttccgtatcaggtcgtagagttatgtactggtgatttaggtttttcatcctgcaaaacttttgatattgaggtatggatgcctagccaaaatagatatagagaaatttcatcttgttctaatttctcagattttcaagcaagaagagcaaatattaaatttaaaaataaagaaggaactcattttgctcatactattaatggatcaggtcttgctgtaggaagaacccttattgctcttatagaaaacaatta

SEQ ID NO: 297237 - DNA, 1261 bp, Unknown
  Bacterial polypeptide expressing nucleotide sequence isolated from the Sargasso Sea
aatgttagatataaaaaagattatagaaaataaagaaattttttctgaaggcttatcaaatagaggctatgatatttccaatctggatatattagtagaactagacactaaaagacgtaattatatttctgatggtgacgataaaagatcaacaagaaatgaaatttcaaaaaaaattggacaagagaaaagaaaaccaacatctgaagaaagtttattcataaaaaagctatctggagaattaaaaaaagtagatgaagagcttgctgttataaatgaaaaaataaaagaaattatgcttaatattccaaatttaccagataaaaatgtccccataggagaggatgagaattcaaatatagaaaaagatgtaattggagtacaaagagatgaaaattatataaaacctcattgggacataggcccagagaaagatattttagacttagaagcaggtgcaaatatatcaggtgctagattttttgtatttaaagggaaaggtgcacgactacatagagctttgatgaactggatgatggacgtacatacggatgaatttgggtatgaagaaattgatcctccttatttagtaaagcaagaaacaatgataggatctggaaatttaccaaaatttaaagacaatttatatagagatgatgaaactgatctttggctaatacctaccgctgaagtttcattaaatggtctacatcaaggtaaaattataactccagctagtttaccaaaaagttatgtcgcaagaaccccaagttttagaaaagaacatacttctgcaggtagagatattagaggtataaaaagggtacatcagttttataaagttgagatgtttaagtacgttcatccagatgattctgaagaacatttagaatcaatgatagataatgcaagaactctttgcgatagattagagttaagctctaaattgattcaactatcaaccggagatataggttttcaatctgctataacatttgatattgaagtttgggctgctggttctaaggaatggctagaagtttcatctatatctaattgttatgattttcagtctagaagaaataatactagatataaagaaactcaggcttcatcaacaattttccctcataccttaaatggatcaggtctagctctcccaagaatttgggtagctataatagaaaatggtcagcaagaagatggaagtattaaaattcctgaagttttgataccctatacaggttttgaaagtatctaa

SEQ ID NO: 297238 - DNA, 829 bp, Unknown
  Bacterial polypeptide expressing nucleotide sequence isolated from the Sargasso Sea
cttgccacaaagacttcaggatcaagattttgtatttgtaaaaaacaaacttgcaaaattagaaagagctttatcaaattttatgattgatgttcatacaaaagaaaatggttatgaggagatatctccaccattactcgctaactttgatacaatgtttggcactggacaacttcctaaatttgagtctgatcaatttgaaataaaaattgatgataacaatagaaaatttttaatcccaactgcagaagttattttaactaatatggcaagagaaaaaacaattgatataaaagaattaccctcaagatatgtagcatctactccttgctttagaaaagaagctggtagctatggcaaagatacaaaaggaatgattaggcagcaccaattttataaagttgaacttgtaagcttagtagagcctcaaaaatgtgaagaggagttagagagaatgactaaatgtgcatcaggaattttagataaactgaaactgccttatagaattgttgaactatgtacgggtgatatgggttttagtgctcaaaaaacttatgatattgaagtttgggtgccttcagaaaaaaaatatagagaaatttctagttgttcaacatgtggaacttttcaagctagaagaatgaaagccaaatataaaaattcaaaaaatgaaaaaaattttataggtacattgaatggaagtggacttgcaatcggaagaactatgattgcgatcatggaaaattatcaagacaaagatggatcaattataatacctgacgtattaaaaccatacatggataatattgataaaatcacatcgaattag

SEQ ID NO: 297239 - DNA, 736 bp, Unknown
  Bacterial polypeptide expressing nucleotide sequence isolated from the Sargasso Sea
atgctcgatgttcaaactgaagagaacggctatactgaaatgtatgtcccaaatattgtcagatcagattgcttggagggcactggccagttaccaaagtttgcagaggatcaatataagattgaaaatgaagagggtttgtacctaattccaacagctgaagttcctcttacaaatttaatcagagaaagtattcttgaagagaatgaattgccaatcaagatgaccgcgcatacaccatgtttcaggcaagaagctggttcgtatggaaaagataccaagggaatgattaggcaacatcaatttgaaaaagtagagcttgttcatatcgtcaagccggatgaatcttacgaagctcttgaggaacttacaaaaaatgctgaatccattctgcagaaacttaaattgccatatagattgatgctcttgtgctctggagatacaggcttctcagcagcaaaaacttatgatctcgaagtatggctcccctcacaggagacttatagagagatatcatcttgtagcaattgcgagtcgtttcaatcaaggcgaatgaaagctaggtataaaaactctaaatccaagcaaaccgattatcctcataccctcaatggatcagggttggctattggaagaactcttatcgctgttctagagaattatcaaaatgaggatggctccatcactattcctgatgttctaaggccgtatatgcaaaatcgagaaagaatctaat

SEQ ID NO: 297240 - DNA, 1120 bp, Unknown
  Bacterial polypeptide expressing nucleotide sequence isolated from the Sargasso Sea
catgattgacgctaattatataaaagctaatttagaacaagttaaaaagaatttagctaagaaaggttttaaccttgaacaatctaaatttgaaaaactatattcaaatagaaagggattaattactaaacatgagtctcttctaagcgaaaaaaatataatatccaaagatataggtttattaaaatctaataacaaagatgcttcaagcttattattaaaagttgaatcaattaacaaagaaattgataaaatatctaaatctgaaactaaagcagagaaagatcttcatgattatttattatctataccaaacttattagacgatagtgtgccggagggaaaaagcgaggactcaaataaaattatttatgaaacgaaacttcaaaaaaatagtttaagtattgatcacttagatattataaataacataaaactttcttttaatcatgatgtaacttctatatcgggttcacgtttttctttactgtttaaagatattgctaaacttcatagagtattaggtcaatatatgatcaattatcacgttgaaaacaataattaccttgaagtatacgtgcctttaattgtgagtgagaagtctctaataggtactggccaattaccaaaatttaaggatgatctttttgagattaaaaataaagaaaattcttttttaataccaactgcagaagttccattaacgaatatttgcaataatcaaattattgacttaaatacacttccattaaagtttgtttctttaactccttgttttagatcagaagcagggtcatatggaaaagatacaaaaggtttaataaggcagcaccagtttgacaaagttgaattagtacaaatagctgaaccttcacaatcaaatgatgcattaaataacttagtatctgatgctgaaaaaatattaattaatttgtctttaccgtatagaaaagttttattatgttctggagatacaagcttttcgtcatctataacatatgatttagaagtatggctaccatcacaaagtaagtatagggaaatttcgtcttgtagtaattttttgtcttttcagtctagaagattgaatattagatatagaaatgaaaagaaaaaagaa

SEQ ID NO: 297241 - DNA, 1303 bp, Unknown
  Bacterial polypeptide expressing nucleotide sequence isolated from the Sargasso Sea
catgctcgacatccagttgctgcgcaaagacctcgacggcgtcgcccagcgcctcgccgatcgcggctacaccctcgatatcgccgccttctccgcgctcgaagcggaacgccgcgcgatccagacccgtaccgaagagctccaggcgcgccgcaacagcctgtcgaagcagatcggcgcgatgaaggggaagggcgaggacacgtcggccgtgatggccgaggtcggcgggatcggcgacgaaatgaaggcgggggaagccaagctcggcgagatccaggcgcgcctgtccgacctgatgctgggcatgccgaacgtcgcgcatgagagcgtgccggtcggcaaggacgaagccgacaacgtcgaggtgcgccgctggggcacgccgcgccagttcgatttcgaagtgaaggatcacgtcgatgtcggcacgccgctcggcctcgatttcgagaccggtgcgaagctcgccggcgcgcgcttcacgatgctgcgcggctcgatcgcgcgcctgcaccgcgcgctcgcgcagttcatgatcgatacgcacacgctgcagcacggctataccgaagcgtatacgccgtacatcgtgaaccccgagatcctgtacggcacgggccagctgccgaagtttgcggacgacatgttccgcgtcgagaagggcggcgaggagaacaaggtcacgcaatacctgatctccacgtcggaaatctcgctgacgaacaccgtgcgcgagtcgatcgtcgacgcgtccgcgctgccgatcaagctgaccgcgcattccccgtgcttccgctcggaagccggttcatacggccgcgacacgcgcggcatgatccgccagcaccagttcgacaaggtcgagatggtgcaggtcgttgcgccggaaacgtcgtacgccgcgctcgacgagatggtcggccatgcggaagcgatcctgcagaagctcggcctgccgtaccgcgtgatcacgctgtgcacgggcgacatgggtttctcggccgcgaagacgttcgacctcgaagtgtggctgcctgcgcagaacacctatcgcgagatctcgagctgctcgaacaccgaagcgttccaggcgcgccggatgcaggcgcgtttccgcaacgcgcaaggcaagccggagctcgtgcatacgctgaacggttcgggtcttgccgtcggccgcacgctcgtcgcggtgctggagaactaccagaacgcggacggctcggtcacggtgccggaagtgctgcgtccgtacatgggcggcatcgagcgtatcgacgcgccggcacaggcgtcgtaa

SEQ ID NO: 297242 - DNA, 1249 bp, Unknown
  Bacterial polypeptide expressing nucleotide sequence isolated from the Sargasso Sea
catgattgatcctaagattctcaaagaaaatatacaaagttgcaaagataatttagccaaaagaggttatagcctcgatgataaaaaattcttattactagagaaccagcgcaaagatcttcaaacaagagttgaagatctccaatcccaaaaaaataaactctcaaaaaattttggagaattaaaaaaatctggccaatcaacagacgtacttgctttagaacttgaagaaattaagtcgcaaacaactgatctagaaaaaactctctcagcactgcaaattgagatctcatcttttttaatggatatacctaatctgatttcagaggataccccaactggaacaagtgaagacgacaataaattaattgaagaatatttaaaaccgcaagtacttaaatcggattctcatttagacattacagatcaaataagcctagagcttggaaataaattaagcggatctcgattttcagttctaaaaggcaatgtggctaaacttcatcgatctctttgcacctatatgattaatgaagcaattaataatggttatgaggaaacttacgtaccttatattgttaattatgatgctttagagggtacaggacagctccctaagtttgaagaggatctttttaagttatccaatgatcaatacttaattccaacagcagaggtcccacttactaacttatttcgagatcagatagttgatcaagatctacttccaataaagctaactgcgcacacgccatgctttagatccgaagcgggaagttatggtaaagatacaaatggacttataagacttcatcaatttgataaggttgaaattgtacaaattgttaaacctcaagattctgataaagcacttggagagataacatcccatgcgaaatctgttttagagaaacttgagttgccatatagagtcgtccagctttgctctggtgatgtaggattttcagctagcaaaacttttgatatagaggtctggatgccaagtcaagaaaaatatagagagatctcatcatgctctaattttttagactttcaggccagaagatcaaagattagatttaaagaaaacggaaagaatcactttgtgcataccttaaatggttcagccttggcagttggtaggactttgatagctgtaattgaaaataattttaataaaaaattaaagttaattaatatcccaaaagagcttcaaaaccttatggatgctgacattatagagttgtaa

SEQ ID NO: 297243 - DNA, 562 bp, Unknown
  Bacterial polypeptide expressing nucleotide sequence isolated from the Sargasso Sea
aatatgtttagagatagaattttagatgataaagagttgcctattaaagtaactgctcacacctcatgttttagatctgaagcaggaagctacggcaaagatactagaggactaataagacagcatcaattggaaaaaattgaactggtacaaattactcatcccactaattctatggattgccttaacgatttattaaaaaatgcatgtcaaattctcgacaagcttgaattaccatatcaagttattgaactatgcactggtgatttagggttctcatctgcaaagacatttgatattgaagtttggatgccaagtcaaaataagtatagagaaatttcttcttgctcaaacttttcagattttcaagcaagaagagcgaatataaagttcaaagataaaaaagggaatacttatgcccacaccatcaatggttctggtttggcagtaggcagaactttgattgcattattggagaataggtttaacggtaatgatgaaatcgatcttccagaatgtctagtctcgtatttcggtgcaaaaaaagttaaattaaaataat

SEQ ID NO: 297244 - DNA, 1261 bp, Unknown
  Bacterial polypeptide expressing nucleotide sequence isolated from the Sargasso Sea
gatgattgatttaaatgaattaaaagaaaatttagctctttataaaaaagggcttagtgcaaagggttgtaaagttgatcttgaagatctgataaacaaaaattcaaaaaaaaataccattcaaacaaaattagatgaattaaaaagccaaaaaaataacctttctaaagaaattggcacattagctagtaagggtgaagatacaaaaaaattaaaaaacgactcagaaaatttaaataaagatattgatcaactacaaaatgattttgatctacttaaaactgatatcgatacaattatgctgcaagtaccaaatttgccggattcagatgtgcctattggaggcgatgaatctgataataaagaaattaataaaaagatttttacacagcacaacgatggcttagatcatgtcgaaatcggagaaaaacttggtttattagattttgatcttgctaataagttaagtggttctagatttgtcgtcctaaaaggcaaattagcgcaattacatagagcacttatccaatttatgttagatgaggcgaaagacaacggttatgaagaaatgtatgtaccatacatagttaatgctgattcattgattggtactggacaactacccaagtttgaagatgatcaattcaaagttggtgagagcaaatatctaattcctacagcagaagttccgctgacaaatcttttaagagatcaggtaataacttcatctgaattaccaataaatttaactgcacatacaccatgctttagagctgaagctggaagttatggaaaagatacaaaaggcatgatacgacaacatcagtttgaaaaagttgaaatagttaaatttgctgaccctaaaaaatcagataaatgcctggatgagcttgtttcacatgcttcccaaattctcgataagctagagttgtcctatcgacatgtggtcctatgtactggtgatttaggattttcagcagcaaaaactatcgatatagaagtatggctacctagtcaaaattgctttagagaaatatcctcttgttcaaattttagagattttcaagcaagaagaataaatgcaaaagttaaggatggtaaagataagttttaccctcatactttaaatggttctgctttagcagttggaagaactcttttagcaattattgaaaatttctatgaaaatggattaggcgtacatattccaaaggttttggctgattatctagatttcgacctaatagaagagcaaaaataa

SEQ ID NO: 297245 - DNA, 1270 bp, Unknown
  Bacterial polypeptide expressing nucleotide sequence isolated from the Sargasso Sea
atgatatcaattgaacaaattcgtaataattctatttatataaaagagaggctttctcttaaaggagaaattgactctattgattcaattctttcattggataaatcttataggtcacatatttctaaatcaaatgaattacgcgcaaaaaggaatcaagtctcggataaaattgcagaagcaaaaaaatcagggaaaaatgctgatagcgatattaaagacatgcgtgaggttggagataaaattaaatctttagaagataaaggtagtaaaataaagaatgaattaaatgaactattacttagattgccaaatttgccacatgaatcagttcctaagggtaaagatagcgctgagaatcaagttgtccgtgagtatggtcagaatctagatcaagattttgaattaaaatcacatcttgaattaggtaaaaaattaaatttatttgattttgataaagcatcaaaaatatcaggttcgggttttcctttgtatactggagaaggtgcaaaattagaaagagcattaattaattatatgcttgatttccaaacaaaaaatcatgattatacggagatttttccaccatttatggtccgctctcaatctccactgacaacaggaaaccttccaaaattctcagaagatatgtatttcgtagaaaatgacaatctttggatgattcctactgcagaagttcctattacgaatatgcaccaagatgaaattttattagaggatcaacttcctattaaatatgcagcgtattccgcttgttttagaagagaggcagggtcacatggtaaagagaccaaaggcttattaagactccatcaatttaataaagtggagttggttcaatttgtcaaacctaaagagtcctataaaattcttgaagaattaaccaaacatgctgagtctattttgcaggatctaggtttacgatatagagtggttgagctatgtgcaggtgatttaagtttctcagctgcaaagtgttatgatttagaggtttgggcacctggagaacagcaatggttagaagtatcttcatgtagtaattttgaatcatttcaagctaggcgtggaaatattcgttatagaaaagctaatgataattctgtagagtttgttcatactttaaatgggagtggtttggctactccaagattgatggtcgcaatcttagaaacttatcaaaattctgatggttccatttcaatcccaaaacctctaaaggattatgttggtgtggaggtatttaattaat

SEQ ID NO: 297246 - DNA, 912 bp, Unknown
  Bacterial polypeptide expressing nucleotide sequence isolated from the Sargasso Sea
aatttggtaatctgcctaaatttgattttaaaccaaagtctcttactgaattaggcaataacttaaatatgcttgattttgatttagctactaaaaccactggttcacgttttgtatttgttaaggataaactagcattattagaaagagctctatctaatttcatgctagatattcatacaaaaattaatggatataaagagatatcacccccattaattgcttcagacaatactatgtttggtactggtcaacttcctaagttcgagaatgatcagtttgaaataaaatttgatgacaatggtagaaaatttttaattcctacagctgaagttatattaactaatatggttaaaaatcaaattctatcagttaacgatcttccaataagattggttgcatcaacaccatgctttcgaaaagaggcaggaagttacggcaaggatacaaaaggcatgattagacagcatcaattttataaagttgaattagtaagtattgttgaaaacgataagtgtatagaagaacttgaaagaatgactaaaagcgctgtaatgatcctagataaattaaatctaccttatagaaaaattatattaagcactggcgatatgggttttagtgcagaaaaaacatatgatattgaagtttggataccatcagaaaataaatacagagaaatctctagctgctcatcgtgtggtacatttcaggctagaagaatgaaggcgagatataaaaattctaataaagagactgtgcctgtgggcacattaaatggcagtggtttagctattggaagaaccttaatagctataatggaaaattatcaacaatctgatggatcaattttaattccaaaagcacttaaaccttatatggataatcaagataaaataacaaagaattaga

SEQ ID NO: 297247 - DNA, 1249 bp, Unknown
  Bacterial polypeptide expressing nucleotide sequence isolated from the Sargasso Sea
ccaattacattattaataatagaaaggtttgttttagagaagcttgttaataaaaattataatttagacttcacaaagttttcagatttatatatgtctcgaaaagaatctatccaaaaagaggaagatttaaaggcaaaattaaatgatttcaacaagaaaataactaaagaaaaaagaaaaccaaacaaggatgaattatcagagataaaaaagttttctaatcaaagcaaagatgctgaaaaagctagaaaggatatagaattaaagcttaatgaattattattagaaatccctaacttacatgacgattcggtcccaattggtgaagatgaatcttttaataaagaaataactagaaagggtaaaataagggactttgattttaaaattcttgatcatgtaactctaggaacaaatctccaactctttgatttagaggttgcagctaaaattactgggactagatttaatctttataaaggacttggtgccaaattagaacgagcgctaattaattttatgcttgatgagcattctaagagtaattatattgaaatcttcccgccttttatatgtaataaacaaagttttgtaggaacaggtaatttaccaaagtttgaagaagatttatttaaaattagtggtaccgaaaactatctcataccaacagccgaagttccactaacaaatatccattcaaatcagattattaatgcttctgacttccctattaaatatgttgcatatagcgcttgttttagatctgaagctggttcatatggaaaagatgtgaagggtttgattagacaacaccaatttaataaaatagagctggtcaaaatcactgatgaattttcatcctctgatgaattagagaaattaacagaagacgcgtgttcgatactagataaactagagcttccatatagagttgtagcattgtcatctggagatatgagtttctcctcagcaaaaacatatgatatagaagtatggataccttctgaaaataaatatagggaaatttcatcatgtagtaactttggttcatttcaatctagaaggtctaacatcaagtataaagtaggtaataaatttagttttgctcatactcttaatggctctggacttgcagtcggcagaacgtttgtatctatactagagaactttcaaaactctgacggaacaattacaattcccaaggttttaagaccttatttgaataatttacatactatttcgtaat

SEQ ID NO: 297248 - DNA, 1258 bp, Unknown
  Bacterial polypeptide expressing nucleotide sequence isolated from the Sargasso Sea
atgttagacataaatctaatcataaatcattcaagtgatataaaaaataaacttctttcgaggggttatgaactatccctcaataaacttgaggatctatattttagacgaaaagatattattaaaaaaaaggaagatttagcggcaaataaaaatcaaatatcagatcaatttaaaacttgtaaagatgaatccgaaagagaaaaattaagaactagctcagagaaccttgaaaatgagattcaattaaataaagatcaacttttagaaattgaaaataatctaaaaaatattttattagagattcctaacataccacttgacgatgttcctaaaggcaaagatttttcagataatcaaattattaaaaaatggggtgaaccaagtaaagagattgtaaatgatcactcggagttatttgaatctaataaactgttagatttcgagttatctgttaaggtttccaaatcaagattttctgtattaaagggaaaacttgcacgtttgagtagatctttaatatcttattgtttgaaccatcacatagaaattaatggttatacagaatactatacaccctatattgttaataaaaattctttgattgggacaggtcagttacctaaattcgaagaggacctatttaaaatacatggtgaggaattatatcttataccaaccgctgaagttcctttaacaaatttataccgagacacaatcatagatcaaaattcactgccactaaaattagtgtctcacaccccatgttttaggtcggaagctggatcgtatggtaaggatacaagaggtataattcgacaacatcagtttgagaaagttgaagttgttcaaattgtagagccggagcattctctaaatgctcttgaagagattacttctcatgctgagcaattacttgagaatttagaagtaccttatcaaagagtatgtttgtctacaggtgatttagggttttcagcctcaaaaacatatgatattgaggcttggttcccaggagagcaaacgtatcgagaggtttcatcttgtagtttattcggtgattttcaatcacgcagagccaacattaaatttaaatcctcagataaaaagaaatattatccacatactttgaatggttctgcgctagcaattggaaggacccttgcagccttaatagaaaatcatactaaagataatattatacatattcctgatgcactacgtgtatacactggctttgattcaataaaattatgaa

SEQ ID NO: 297249 - DNA, 634 bp, Unknown
  Bacterial polypeptide expressing nucleotide sequence isolated from the Sargasso Sea
ttctctgaagatatgtatcactcagaaatagatgatttgtggttaatacctactgcagaagttcccctaacaaatattcattacaatgaaatactaaatgaatctgatttgccaataaaatatactgcgttctcagcctgctttagaagggaggctggctcatatggtaaagatacaaaaggctttcagcgattacatcagtttaataaagttgaactagtacagcttgtaaaacctgacgaatcctataaagtattagaaagcttgacatcgcatgcagagatgattcttaaggctcttaatttaaaatatagaaagattgagctttgttcgggtgacttaagtttttctgctgcaaaatgttatgatcttgagatttgggcacctgcagaaagaaaatggcttgaagtgtcttcatgtagcaattttgaagacttccaatctagaagaggcaatattagatatagaaaagaagttgataataaagttgactttgtacatactcttaacggtagtggcttagcaaccccaagacttttaattgctatacttgaaacctatcaaaatgctaatggaaccattactgttcctgaaccattgcaagattatactaagttaaaaataattgattaag

SEQ ID NO: 297250 - DNA, 853 bp, Unknown
  Bacterial polypeptide expressing nucleotide sequence isolated from the Sargasso Sea
atgcatgacattaaatcaattcgaaataatcccaaaaagtttgatcagactttaaaagatagaaatttgaaaccagtttcagaaaaggttttaaaattagatgcagaaataagaaaatttaaaacaaaacttcaagaagtacaagaaaataggaatttaaaatcaagaaaaattggtcttttgataaaagaaaataaagatccaatttctttacaaaatgaggttaaagaacttaaaaataaattaactttattggaagaaaatattagaaatgctgaattagatcttaataagattttaatgtctttacctaacattctagacgaagatgttcctattggattttcagaggatgaaaataaattagttaaaaaatggggaaaaattaaaaactttggctttattcctcaggatcatgtcaaattaggcgaacgaaataatgagatggattttaaaactggtgcaaaattgtctggttctaggtttgtgttaatgagaaatgatttagcccttttagaaagatcattgattacttttatgctggacacaaatataaaagagtttggtcatcaagaaatttcaccaccttatttagttaatagtgctgctttaactggtactgggcaacttcccaaattttcagaagatctatttgaaactaatgatggcaaatggttaattcctacatctgaagttccacttacaaatattgtaagtaatgaaatattaaaagaacaagatttaccttttaactttgtgtcatatagcccttgttttcgttcagaagctggagcagctggaaaagatactagaggtatgataaggcaacatcagttttctaaagttgaaatgg

SEQ ID NO: 297251 - DNA, 883 bp, Unknown
  Bacterial polypeptide expressing nucleotide sequence isolated from the Sargasso Sea
aataaagaaatttctagcagtgggagaaataataaaatttaaatttaaacctaaatctcattatgagcttggtgaaaaccttaaaatgcttgattttgatttagcaactaaaacaactggttctagatttgtttttgttaaaggtaaacttgcaatgcttgaaagagcaatagcaaattttatgctagatactcatacaaaagttaacggctataatgaaatatctccaccattaatggcttctgaaaatactatgtttggaactggtcaattacctaaatttgaaacagatcaatttgaattaaagttagatgaatctaatgatagaaaatttttaattccaacggctgaagtaattcttacaaatatggtgaatgatcaaattttaaattacaaagatttgccattacgtttggttgctgcaacaccttgctttagaaaagaagcaggaagttatggaaaagacacaaaaggaatgattagacaacatcaattttataaagtcgaattagttagtatagtagatccaaatgagtgcttaaatgaacttgaaaggatgacaaattgtgcaacaaaaattctagatgacctaaaacttccttatagaaaaattgttttatctactggagatatgggtttcagtgcagaaaaaacttatgatattgaagtttggttaccttcagaaaacaaatatagagaaatatcaagctgttcatcttgtggttcatttcaagctcgcagaatgaaagcgagatttaaaaataataaaaatgaaacaaattatctaggaactttaaatggtagcggacttgctgttggtagaacactgatagcaatattagaaaactatcagcaagaagatggttcaattaaaattccctga

SEQ ID NO: 297252 - DNA, 1199 bp, Unknown
  Bacterial polypeptide expressing nucleotide sequence isolated from the Sargasso Sea
ctcagttaaaattgattttgctaatttaaaaaaacttgatgagttaaatagagatttaattcaaaaaaaagaaaatttagaaaaagaaaaaaaagatatttcgaaatctaaagatgaaagtttattcaaaaagtctaaagaaatttccacagatttagaaaagatttctgagcagcaaaaaaaaactaaaactgaattagataatattttatcaagtataccaaacatacctcatcaagatgttccaaatggaaaagatgaaaatgataatgtggaagttttaaaagctggaaaagttcctgaatttgattttaaacccaaatcccattacgaacttggtgaaaatttaggcatgcttgattttgatcttgcaacaaaaacaactggatcaagatttgtttttgttaaaaaagagctagcgttattggaacgtgctttatctaattttatgcttgatactcatattattcaaaatggttatcaagaaatttcacctccattaatagcttctgataatacaatgtatggaacaggccaattaccaaaatttgaaaacgatcaatttgaaataaaatttgatcaaggatctgatagaaaatttttaattccaacagcagaagtaatattaaccaatatagttaaagataaaatcgttgatcaaaaagaattacctatgagatttgttgcttcaactccatgttttagaaaagaagctggtagttatggaaaagatacaaaaggtatgattagacaacatcaattttataaagttgagctggtaagtattgttgaaaaagaaaattgtttagatgaattagagcgaatgactaattgtgcaacagatattctagataagttagagctaccgtatagaaaaataattttatgctctggtgatatgggtttcagtgctgaaaaaacatatgatattgaagtatggttgccatcagaaaataagtatcgagaaatatcatcatgctcttcttgttcaacctttcaggcgcaaagaatgaaatcaagatataaaaataaaaacaaagaaactgtttttgttggaacactaaatggtagtggtttagctgtgggtagaacactaattgctgtactagaaaactatcaacaaaaagatggttcgattattattcctaaggtactgcgaccgtatatgaataatttgaaatcgatttcagctaaataaa

SEQ ID NO: 297253 - DNA, 641 bp, Unknown
  Bacterial polypeptide expressing nucleotide sequence isolated from the Sargasso Sea
atttgaagatgatcaatttgaaataaagtttgaaaaatcagaacaaagaaaatttttaattccaacagcagaagtttcattaacaaatctgataagaaaatcattaattaaaaaagaggatttacctcagagatttgtagcatctacgccctgttttcgtaaagaggcaggaagttatggtaaagacacaaagggtatgattagacagcatcaattttataaagttgaattagtaagtatagttgaaccaaaaaattgtaattctgaacttgataggatgttaaattgtgcaacaagtattttaaaaaaactttcgataccattccaaaccattttattatctaccggtgatatggggtttagtgctgaaaaaacattagatattgaagtttggattccatctgaaaataaatttagagaaatttcaagctgttcatcatgtggttcgtttcaagctagacggatgagcgctaagtatacaacagagaaaggtaatgaatttgtaggtaccttaaatggctccggtttagctgttggaaggctaattgtagccttattagaaaataatcaaaatgaagacggttctgttacaattccaaatgtattaaaaaaatacatgaataatttggataaaatttaat

SEQ ID NO: 297254 - DNA, 1270 bp, Unknown
  Bacterial polypeptide expressing nucleotide sequence isolated from the Sargasso Sea
atgctatccttaaaccgtattcgaaaaaatcctgatgatattaaaactggtgttcaatctaaaaatgaatcaattcatttagatgagatcttaaaaacagatactcattatagagaaaaagttcatgaattagatgaacttcgggcaaaaagaaataaatcttctgatgcaattgcccaggcaaagagagatggagttaattctgataaagctatagctgaaatgagggcagtgtcagatactataaaaagtattgaaaaagaagtaaatgatattaaaaatcttctagatacaaaattagaattaataccaaatattcctcatagtaatgttccagttggaaaagatgaatcgtctaatgttattattagagaatggggtgagccaaagaatgtagaatataaattaaaatctcatgttgatttaggtacgagtcttgaattatttgatctagaaagaggttctaaaatatctggctctggctttccattattaacaggtcttggttctaaattagaaagggcattaattaattttatgttagattttcatgtttcagaacatggatataaagaaatattccccccttttttaacaaggcctaattctccttatacgtgtggtcaacttccaaagttttctgatgatatgtactatattgaaaaagatgaattataccttattccaactgcagaagtcccattaacaaatttatttgctgatgaaataattgatgaaaataatttaccaaaaaaatacgccgcatattctgcatgttttcgtagggaagcagggtcctatggtaaagataccaggggccttttacgtttacatcagtttaataaagtagaaatggtaaagtttgtcaaacctgattcatcctatgatgagcttgaaatgctaactaaacaagcagaagctatacttcagcaacttggtttgcattatagggtggtagaattatgcactggtgatctaagttttgcagcagcaaaatgttatgatctagaagtttgggctccaggtgagggtaaatggttggaagtatcttcctgtagtaattttgaagactttcaagctagaagagggaatatacgatatagaagatctgaagataaaaaagttgattatgtacatacactcaatggctctggtcttgcaactcctagacttatggttgctttgttagaaagttatcaaacatctgatggtaaaattgcactgcctaaagtacttcataagccaatgggtatggaggtccttgattagt

SEQ ID NO: 297255 - DNA, 1276 bp, Unknown
  Bacterial polypeptide expressing nucleotide sequence isolated from the Sargasso Sea
tatgttggattcaaaaaaattaaataaagatcctcaagctgtagctgataacttacaaaaacgtggatatatacttgatatagataattgggataatttagaaagctcaaggaaagaccttcagtccgatacagaaaatatgcaggctgaacttaatgacctttctaaacaaattggaatctataagaaagacggtaaggattcatctaaattagaaaaacaagcaactgaagtaacttcaaaaattaagtcacaatctaaaaaattaaataccatattagaagatatgaataattttatttcttctattccaaatatgattgatgacgatgtcccagagggacagaatgaagaagacaatgtcgagataaggactgtaggaaaaataagagattttgcattcgctcctaaagatcacttggagctaggttctgcgttaggcggcatagatatggaatctggagtaaagataactggcgctaggtttacagtattaaatggtcagttagctaaacttcaaagatctcttatcaattttatgcttgatattcatactaaagaacatcagtaccaagaagtctatgtaccatacgtggttaatagcgagtcactatttggaactggtcagttacccaaattcgaagaagacctttttaaactgaatggaaaagaggacttttatttaacttcgacggccgaagttcctgttacaaatttatttagaaatgagatattagattcaaagtcattaccaattaagtatgtctgccacacgccttgttttagaagtgaagcaggaagttatggtcttgatacaaaaggcattatgagattacatcaatttgaaaaagttgaattggttcaagctgttgaagctcaagactcagaaaatgctcttgaagaattaacgagacatgcagaagagatactcaaaagactagagcttccatacagggttgtatctttatgttctggagatataggtttttcggcagctaagacttacgacatcgaagtttggataccttctcaaaataaatacagagaaatctcctcttgctctaactttagagattttcaggcaagaagaatgaaagctagatggaaagacccttctacaaaaaagaatcaatatctgaacacgctcaacggttcgggtcttgctttaagcagaacccttttagctttattagaaaattttcaagaaaaagatggttctataataattcctgatgctcttagaaattactttggtgcagatattataaatttataa

SEQ ID NO: 297256 - DNA, 952 bp, Unknown
  Bacterial polypeptide expressing nucleotide sequence isolated from the Sargasso Sea
aacggaaaagatgaaaatgataatgtagaagttttaaaagctgggaaagttcctgagtttgattttaaacccaaatctcattacgaacttggtgaaaatttaggcatgcttgattttgatcttgcaacaaaaactacaggatcaagatttgtatttgttaaaaaagaattggcattactggaacgagctttatctaattttatgcttgatactcatattgttcaaaatggttaccaagaaatctcacctccattgattgcttctgacaattcaatgtatggaactggtcaattaccaaaatttgaaaacgatcaatttgaaataaaatttgatgaagggtcagatagaaaatttttaattccaactgctgaagtaatattgacaaacattgtaaaagataaaattgttgatcaaaaagaattacccatgagatttgttgcatcaaccccatgtttcagaaaggaagctgggagctatggtaaagatacaaaaggaatgattagacaacatcaattttataaagttgagatggttagtattgttgaaaaagaaaactgccttgatgaattagaaaggatgactaattgcgctacagatatattggataagctagaattgccctatagaaaagtaattttatgttcaggtgacatgggttttagtgcagagaaaacctacgacattgaagtctggttaccgtcagaaaataaataccgtgaaatctcatcatgttcatcttgctcaactttccaagcacaacgaatgaaatcaagatataaaaataaaaacaaagaaactgcttttgttggcacacttaatggaagtggattggctgtagggagaactttaattgctgtattggaaaactatcaacaaaaagatggctcaattattattcccaaggtactgcgaccctatatgaataatttggaattgatttcagttaaataaa

SEQ ID NO: 297257 - DNA, 1165 bp, Unknown
  Bacterial polypeptide expressing nucleotide sequence isolated from the Sargasso Sea
ttagatgttgaaaatagagaactaatcttaaaaaaagaaaccttagagaaagaaaaaaaagaaatttctaagtccaaagacaaatctttgtttgaaaaatccaaggaaatttcttcagaaattgatgaaataacaaagaaacaaaaattagtaaaagaaaatttggataatattctatctaatttacctaacgtcccccatccagatgttccgatcggaaaagatgagaacgacaatattgaaattggaaaatttggcaaaatacctaattttgaatttgaacctaagtctcattatgaaataggtgaaaatttaaaaatgttagattttgatcttgcaactaaaacaactggtgcaagatttgtttttgttaaaaatagattagctttactagagcgagccttatcaaattttatgttggatactcatatcttaaaaaatggatacttagaaatttcaccaccattactagcatctgataatacaatgtatggtacaggccaacttcctaaatttgaaaatgatcaatttgaggtaaaacttgaaaaaggatcagatagaaaatttttaatcccaactgctgaggtgatactaactaatattgttaaggacaagatagtagaaaatagctctttacccatgagattcgttgcttcaacaccttgcttcagaaaagaagcaggtagttatggcaaagatacaaagggaatgattagacaacatcaattttataaagttgaattggtaagtatagttgaacaagaaaagtgtcatgaggaattagaaagaatgacaacttgtgcaacaggtatattagatttattggaattaccttatagaaaaatgattctatgtagtggtgatatgggttttagtgctgagaaaacttatgatattgaagtttggcttccatcagaaaataaatatcgtgaaatttcatcttgttcatcttgctcaacatttcaagctgtgcgaatgaaatcgagatacaaaaattcaaaaaaggaaaccctttatgttggaaccttaaatggaagtgggttagctattggcagaactctgattgctattctagaaaattatcagcaaaaagatggctcagttacagttccaaaagttttgagaccttatatgaataatcttgaaaaaatctcattgaattaaa

SEQ ID NO: 297258 - DNA, 538 bp, Unknown
  Bacterial polypeptide expressing nucleotide sequence isolated from the Sargasso Sea
tcatccaaagatctaccaataaaagtaacatcgcatactccatgttttagatctgaatccggcagttatggcaaagatactagaggtttaataagacaacatcagtttgagaaaattgaattagttcaaatcacaagtccagaaaactctatggagtgtttagataatttattagcaaatgcttgtgaaattcttgaccttcttgaacttccataccaagttatagaactatgcacaggagatttaggatttagttcatgtaagacctatgatatagaagtctggatgcctagccaaaataaatatcgagaaatttcttcgtgttcgaacttctcagattttcaagctagaagagccaatataaagattaaagatgaaggaaaaaattattttgctcatactattaacggctcaggtctagcagttggtcggactttgattgctttaatagagaataattttgatgggtctgattctatcaaaataccaaaaaatcttgaaagttattttggttcaaacactattaaaataaattgat

SEQ ID NO: 297259 - DNA, 467 bp, Unknown
  Bacterial polypeptide expressing nucleotide sequence isolated from the Sargasso Sea
aaaagataccaagggaatgattaggcaacatcaatttgaaaaagtagagcttgttcatatcgtcaagccggatgaatcttacgaagctcttgaggaacttacaaaaaatgcagaatccattctgcagaaacttaaactgccatatagattgatgcttctgtgctccggagatacaggcttctcagccgcaaaaacttatgatctagaagtatggctcccctcacaggagacttatagagagatatcatcttgtagcaattgcgagtcgtttcaatcaaggcgaatgaaagctaggtataaaaattctaaatccaagcaaaccgattaccctcataccctcaatggttcagggttggctattggaagaacccttatcgctgttctagagaattatcaaaatgaggatggctcagtcaccattcctgatgttctaagaccgtatatgcaaaatagagaaagaatctaat

SEQ ID NO: 297260 - DNA, 914 bp, Unknown
  Bacterial polypeptide expressing nucleotide sequence isolated from the Sargasso Sea
catgttagattcaaaaacacttagaaaagaaaccaaaaaagttagtctctcattgaaaaagagggcttctgattttgatctcgattcttatttaaaaatggatcagaaaatgagagatctaatctcaactgttgaggagcttaggtcatcaaaaaataacatcaataaaagtattgccagtcctgaaatttcagaaaatgacaagtctgacctaatttctgaggttggaactattaataaaaaacttaaagaatcagagcaatcactcaacgaactctctgagcaaactaaaaagatgagcttagagattcctaatattcttgatgaatccgttcccgaaggatctagtgaaaaagagaatgtggaagtaaggtcatggggtaaattaccaaaatttgattttgaaccaaaagatcattccgaactgggcgaaagtaaaggcggtattgattttgaatctgctgccaaactttcgggttcaagatttgttgtcatgaaagatgggtatgctaaattgcacagggctctaaagcagttcatgcttgacgtgcaaaccgaagaaaatggttataccgaaatgtatgtacctaatattgttcgttcagattgcttagagggtactggccagttaccaaagtttgcagatgatcagtataaaattgaaaatgaagaggctttatatctgattcccacagctgaagtccctttaactaatttaattagagaaagcattcttgatcaaagcgaattaccaattaaaatgactgctcatacaccatgtttcagacaagaggcaggttcttatggaaaagatacgaaaggaatgatcaggcaacatcaatttgaaaaagtagagcttgttcatattgttaaaccagaggaatcttatgaagcccttgaagagcttacaaaga

SEQ ID NO: 297261 - DNA, 196 bp, Unknown
  Bacterial polypeptide expressing nucleotide sequence isolated from the Sargasso Sea
aagcgcgccgcctgcagcccgcttcaagaacgcccaaggcaagaacgagctgctgcacaccctgaacggttccggcctggccgtgggccgcacgctggtggcggtgctggaaaactaccagcaggccgatggcagcgtgacggtgcccgaggtgctgcgcccctacctgggcggcaccgccgtgctcaagccctga

SEQ ID NO: 297262 - DNA, 1152 bp, Unknown
  Bacterial polypeptide expressing nucleotide sequence isolated from the Sargasso Sea
aatgcacaatattaaagatatcagaaaagacttcgaaaactttaaggaaagacttaaaaatcgaaacattgatataagtcttgataacatattaagtttagataaggaaaatagaaaacttattcaagaaaaagaaaaatttgaaatggaaaaaaagtctatttcaaaatcgaaagaccaaagtttattcgaaaaatcaaaagaactttctttaaaaattgaagaaattaacaaaaatcaaataaaattacagagccagattacttatattttatcttctataccgaatataccattaagcgatgttccagtaggacaagatgaaaattctaataaagaaattgaaaaaaaaggtgaaataaaagaatttaattttaagcctaaatctcattatgaactaggagataaattaaatatgcttgattttgatttagcaacgaaaactactggttctagatttgtatttgttaaaaaagaattagcgcaattagaaagagctatatcaaactttatgattgatacacatactcaaaaaaatggttatacagaaatatcacctccattaattgcaactgcagaaacaatgtttggtactggacaattaccaaaatttgaaaatgatcaatttgaaattaaattagacgaaggtgatggaagaaagtttttaatcccaaccgcagaagtaattttgacaaatattgtaaaaaatcaaattttagaaaagaatgaattaccaattagagtagtcgcttcaacaccatgttttagaaaagaggcgggtagttatggtaaagataccaaaggtatgattagacaacatcaattttataaggtggaattagtaagtattgtagaaaatgataaatgttcagaagagttagaaagaatgtctaactctgctacaatgatattagatgcgttagaacttccttatagaaaaattgttttatgtactggcgatatgggttttagtgcggaaaaaacttatgacattgaagtttggcttccatctgaaaataagtatagagagatttcaagctgttcatcttgtggttcattccaagcaaggagaatgaaagctagatataaaggacaaaacaattcaaaagaatttgttggcacacttaatggtagtggattagcggttggtag

SEQ ID NO: 297263 - DNA, 388 bp, Unknown
  Bacterial polypeptide expressing nucleotide sequence isolated from the Sargasso Sea
atgaaatgcttagacattttattgagcaatgcttgtgaaatattagatcttcttgatttaccatatcaggtagttgagctttgtacaggtgatttaggcttttcttctgcaaagacatttgatatagaggtatggatgcctagccaaaacaaatatcgagaaatatcatcttgctcaaattttactgatttccaagcaagaagagcgaacataaaatataaatccgaatccggaaacagttatgttcatacgatcaacggctccgggcttgctgtaggacgatgtttaattgcattaattgaaaataattttgatggcagcaattctgtaaaaataccaaaatgtttacaagaatattttggatcagactcattaaaagttaattgaa

SEQ ID NO: 297264 - DNA, 904 bp, Unknown
  Bacterial polypeptide expressing nucleotide sequence isolated from the Sargasso Sea
gatgcataatttaaaagaaattagaaaagactattcaaaatttgaaaaagatcttgaaaagcgttcagttaaaattgattttaataatttaaaaaagcttgatgagttaaatagagatttaattcaaaagaaagaaaacttagaaaaagaaaaaaaagatatttcaaaatctaaggatgaaagtttattcaaaaaatctaaagaaatatctacagaattagaaaagatttctgagcaacaaaaaaatactaaaactgatttagataatattttatcaagtataccaaacatacctcatcaagatgtaccaaatggaaaagatgaaaatgacaatttggaagttttaaaagcagggaaagtacctgaatttgattttaaacccaaatctcattatgaacttggtgaaaatttaggcatgcttgattttgatcttgcaacaaaaacaactggatcaagatttgtatttgtaaaaaaagagttagcattactagaacgagctttatctaactttatgttagatacacatattgttcaaaatggctatcaagagatttcacctccattgattgcatctgataatacaatgtatggaacaggccaattaccaaaatttgaaaacgatcaatttgaaataaaatttgatcaaggatctgatagaaaatttttaattccaactgctgaagtaattttaacaaacattgttaaagatagaattgttgaccaaaaagatttaccaatgagatttgttgcctctacaccttgttttagaaaagaagccggtagttatggaaaagacaccaagggaatgattagacagcatcaattttataaagttgagatggtcagtattgtagaaaaagaaaattgccttgaggaattagagcgaatgacaaactgcgcaaca

SEQ ID NO: 297265 - DNA, 361 bp, Unknown
  Bacterial polypeptide expressing nucleotide sequence isolated from the Sargasso Sea
ttaaattgtgctgaagaaatacttaaattattagatttaccttatcaggttactttattatcaactggggatatgggctttagtgctgaaaaaacatatgatgttgaagtatggatgccattcgaaaaaaaatatagagagatatctagctgttcctcatgtggaaccttccaatctagacgaatgtcggcaaaatataagacgcaaaaaggtgtagaattattgggtacgttaaatgggtcaggattagcagttggtagattattgattgctcttatagaaaacaatcaaaataacgatggttcaataaatattcctgatgttttaaaaaaatacatgaataacattaccaaaatttaaa

SEQ ID NO: 297266 - DNA, 678 bp, Unknown
  Bacterial polypeptide expressing nucleotide sequence isolated from the Sargasso Sea
tgtatggaactgggcaactaccaaaatttgagaatgatcaatttgaaattaaattagatgctgatgaaggaagaaagtttttaattccaactgcagaggttattttaactaatattgtaaaaaatcaaatcttaaataaggatgatttgccaattagggtagttgcgtcaactccttgttttagaaaagaggctggtagttatggcaaagacacaaagggcatgattagacaacatcaattctacaaagttgagctagtaagtatagttgaaagtgataaatgttctgatgagctagaacgaatgactaattcagcaacgatgattttagattacctaaaacttccatatagaaaaataattttatgtactggagacatgggtttcagtgcagaaaaaacttatgatattgaagtttggcttccttctgaaaatagatatagagaaatatcaagctgttcttcatgcggctcatttcaagctagaagaatgaaagctaggtacaaagataaaaataatgcaaaagagtttttaggcaccttaaatggcagtggattagcagtcggacgtacaatgatagcaataatggaaaattatcaaactaaagatggttcaattttaattcctgaagttctgaagccatatatgccaaatattgataaaatttctgtcaattaag

SEQ ID NO: 297267 - DNA, 250 bp, Unknown
  Bacterial polypeptide expressing nucleotide sequence isolated from the Sargasso Sea
cctagtcaaaacaaatatcgagaaatatcatcctgctcaaattttactgatttccaagcaagacgtgcaaacataaaatataaatctgagagcggaaataattatgttcataccatcaacggttctggtcttgctgttggacgatgcttaatcgcattaattgaaaataatttcgacggcagcaattctgtaaaaataccaaaaagtttacaagaatattttggttcagacacattaaaagttagttgaa

SEQ ID NO: 297268 - DNA, 1082 bp, Unknown
  Bacterial polypeptide expressing nucleotide sequence isolated from the Sargasso Sea
agatgtgtcagcaattttaactgacatggaggatttaaagtctagtctagataagaaaaaaaatgaattgggtgaaattcaatcgaagttacacgaatatttgttaaatgtgcctaacattcctaatgaagaagttcctcccggcaaagatgaatccgataatcaagtcatcaacacatggggctctttgcctaaatatgattttgacgttaaggatcactctgaattaggcgaaaaattggaacaaggattggattttgcagcagccgttactctttcgggttctagatttgttgtgctcgaggggagactagcaaaattacacagggcactttctcaattcatgttggacgtccatacagaagagcatgggtacttagaatttaacttacccttaattgttaattatgaatccttgctcggtactggtcaattaccgaaatttgaagatgatctattcaaagttaatcatgagggcaacttctatttgattccaactgctgaagtcccattaaccaatttagtacgtggcaaaattttagaagcagacgccttaccgcttaagtatacagctcatactccttgctttcgctcagaggctggtagttacgggaaagatacgaaaggaatgatcaggcaacatcaattcgaaaaagttgagcttgtccaagtcgtcaagccagagagctcggataatgcactgaacgaattaacgggtcatgctgagtcaattttgcgaaaattgggtttaccatataggaaagtgctgctctgcggcggcgatttaggttttggtgcatcaaaaacatatgatttagaggtttggttgccgtcacagaacacgtatcgggaaatttcttcttgcagttcgttcactgattttcaggcgagacgcatgcaagcgagtgggagatcaccaaccatgcaaaaacctcaatttgtgcatacgataaatggatctggtatggcaataggaagggctctggtagcagttatggagaactatcaggacgaaaccggtcgcattcaaattcctagcatcttgcgtccttacatgggaaatgcagagttcctcgagtaat

SEQ ID NO: 297269 - DNA, 1111 bp, Unknown
  Bacterial polypeptide expressing nucleotide sequence isolated from the Sargasso Sea
catgttagatccaaagtgtttgcgaagcgatatagaacaaacagctaagcgattagctgcccgtggttttaacctcgatgtagcagctttcagttcgcttgaagaaaaaagaaaaacacttcagtccagaacacaggatctgcaaaacgagcgtaacgtacgaagtaaatccattggtaaagcaaaagcgcagggcgaagatattgcaccgctattggctgaagtgggtaagcttggtgacgagcttgacgccgctaaagcggaacttagcgaactgttggaagaaattaacacccttacgcaaggcatccctaatttgccgcacgagtctgtaccagcgggtaaagacgaagatgacaatgttgagatttctcgatggggcgaaccacgcacgtttgattttgaagttaaagatcatgttgatgtggctgaaggcttaaacaatggcttagatttcgccaccgcaagtaagcttacgggaagccgctttgtagtgatgcgcggcgatattgctcgcctaaatcgtgcaattgctcagttcatgctagatacccatacacaagaacacggctaccaagagatgtatgtgccttacttggttaatgctgacagcctttatggcacaggtcagctgcctaaatttggtgaggatctatttcacaccaagccagcaactgaagaaggacaggggcttagcctaattccaacggcggaagttccgctaactaatattgcacgcgatgaaatattagatgcgaaatcactgcctgtgaaaatgacagcacatacgccttgcttccgctcagaagctggttcgtacggtcgtgatacccggggccttattcgtcagcatcagttcgacaaggtagaacttgtacagttagttaagccggaagagagctttgacgcgctagaagcactaacaggacacgccgaagttattcttcaaaagctagagttgccgtaccgcaaagtgttgctttgtactggtgatatgggctttggtgcatgtaaaacctacgatcttgaagtatggctgcctgcgcaaaatacctatcgtgaaatttcttcatgttcaaacatgttggacttccaagcacgacgcatgcag

SEQ ID NO: 297270 - DNA, 1258 bp, Unknown
  Bacterial polypeptide expressing nucleotide sequence isolated from the Sargasso Sea
atgattgatccccaacttttaaaaacaaatattgaagcaatcgaagaaaatataagaaaaagggatcttgatattgatttagataaattaaaacttcttgatgaaagtagaagaaccttaaagtttgaatctgaaaaactacgagctgaacaaaaaatattgggcaaagaaattgcatcagcatctgaaaaagaaaaagctatcctcttagaaaaggcagagaagattagcaataaagtaaaaagtctctccgaagaaacacagcaaaaagatgaagaattttttgatgcatggataaaaattcctaacatagtcaactcttcttcaccagtgggtaaaactgatgaagataacaaagaaataaagaaggttggagagccaaggaacattaaaaaccccatgacacatttagaaataggtgaaaaccttggattaatagatgtagaaagggcttctaaaatatcaggttcaagattttcttatttattcggagatttagtaaaaattcaatttaatttagtttcgtatacattaaataaattatcggaaaaaggctttaacccaacaatacctccagttttagttcgtgaaaatgccttatttggaacagggttttttcctgatgactctgatcaagtttatgaagttcaaaatgatgacctatatttggttggcacatctgaagtttcattagcggctctacatactgacgaaatcatagacataaagaacctaccactaagatatgccggttattcaacttgtttcagaagagaagcaggaacttatggcaaagatacaagtggtatttttcgagttcatcaatttgataaagttgagatgttttccttttgtgatccagaaaaatcaaatgaagaacatgaatacattctcgcaactgaagaagaaatactccaagatcttgaaatcccatacagagttgtagatgtttgcacaggagacttaggagcttctgcagcaaaaaaatatgacatcgaggcatggataccaagtcaacaaaagtatagagaagtaacctcttgttcaaatacaaccgattttcaagcaagaagattaaatatgagaacaaaaattgaagatggaaatactatattgcatactctaaatggtacagctttagcagtaggaagaatattaattgccttacttgagaacaatcagcaacttgatggaagtgtaatgttttcagatgatttaggacagatacttggaattaataaattaagcaaggaataaa

SEQ ID NO: 297271 - DNA, 311 bp, Unknown
  Bacterial polypeptide expressing nucleotide sequence isolated from the Sargasso Sea
gttatgtactggtgatttaggtttttcatcctgcataacttttgatattgaggtatggatgcctagccaaaatagatatagagaaatttcatcttgttctaatttctcagattttcaagcaagaagagcaaatattaaatttaaaaataaagaaggaactcattttgctcatactattaatggatcaggtcttgctgtaggaagaacccttattgctcttatagaaaacaattataatggcactgactcaattaaaattccaagttgtttacaggaatattttggctcggatacacttaagaccagttgat

SEQ ID NO: 297272 - DNA, 1267 bp, Unknown
  Bacterial polypeptide expressing nucleotide sequence isolated from the Sargasso Sea
aatgcttgatataaaaaaaattagaaataataaagatgatgttttaaaagctctatcaaagaaagataatgacatttctttgaatgatattttaaatcttgattcaaaattaaaatccttaacaacgaaattaaacgaacttcaagctgaacaaaatagcaaatccaaagaggttggtcagttaaaatcaaaaggagaatcatccgatgatatttttaaggatttgaaagttttatctgaaaaaattaaagtatttgataaagagcaaaaagagctttcatctgctcttaaaaaagctttacttgaaataccaaatattcctcactcatcttgtcctgaaggagttaatgaaaaagataatattgtagtttcagagaataaaaataccagagattttaattttccgcttaaaaatcatattgaacttgggaaaaaattagatattctagattttgaagttgctgctaaaatgtctggaagcggttttccgctatataaaggaaacggagcattactagaacgtgcattaattaatttcatgactgactatcatttaaagaatttcgattatacagaattttttactccatttttagtaaaacccgaatcagctttaactactggtcaactacctaagttttcagaagacatgtatcatattgagaaagatgatttatatttgattcctacagctgaggtatcattaacaaatattcataaagatgatatattgtcaagcaatgaattaccaaaatattatttaggatattcagcttgttttagaagagaagctgggtcttatggaaaagatactcgaggtttattaagagttcatcagttcaataaagtagaattagtaaaatttgtagaaccaactaaatcttatgaagagcttgattctttagttaatcaggcctcaaatattttagatttattggagcttgattacagagtaattgaattatgctctggagatcttagctttgctgctgctaaatgttttgatcttgaagtatggtcgccaggagaagagaagtggcttgaagtttcttcatgtagcaattttgaagattttcaatctagaagaggtaatataagatttaagaattcaaatggcgaaatcgattttgttcacacattgaatggttctggcttagccacaccaagaatttttgctgccctgcttgaaacacatcaaaatgaagatggaagtgttagaattccacagtgtcttcaaccatttatgggaatttcggagataaaataa

SEQ ID NO: 297273 - DNA, 679 bp, Unknown
  Bacterial polypeptide expressing nucleotide sequence isolated from the Sargasso Sea
atacttgttaaagaccaatcagtttatggtgtaggacagcttccaaagtttaaagatgatttatttaaaacaactgatgactattggcttataccaacggccgaggtccctcttagtaatatgactagagaatcaatcattgatattttagatttgcctaaacgatatgtatctcatacgccatgtttcagatctgaagctggtgcagcagggaaagatacaagaggtattatgagacaacatcaattttataaagttgagcttgttagtttaacatcagaaagtcaatctaaggatgaacatgaaagaatgttaagttgtgcagaggaagttttaaaaagattaaatcttcattatagagttgtcatattgtcttctgaggatatgggttttgctgcacaaaaaacatatgatattgaagtatggttgcctggtcaaaaagcatacagagaaatatctagttgctctaattgtggagattttcaagcaagaagaatgaactctcgttacaaagaaggtaaagaaactaaatttttgcatacattaaatggatcaggtttagccgtaggacgaaccttaatatctattcttgaaaattatcaaaacgaagatgggactattcaggtgccagatgctcttattccatacatgggtggaataaatcaaatttcaaattaat

SEQ ID NO: 297274 - DNA, 1270 bp, Unknown
  Bacterial polypeptide expressing nucleotide sequence isolated from the Sargasso Sea
atgctacaagttgactttataaaagaaaacttctcaaaagttattgatagtcttaaaaaaagaaataaggactactcctctgatttaaaaaaaattattgattttaatgaaaataggaaaaagcaacaaacaaaattagatgctttgctttcagaggttaataatttatcaaaacaaatcggtgaattatttaaaaatggtaaagttgaggaagccaatgaattaaaaaagagtgttgaaaaaataaagcctgaagttaaactattgcaggatttgttaaatagtaataacgaagatcttcaagaattactttgctcaataccaaatatcccgaatgagctagtaaaaaaaggtacaagtgaagaagataatgaaattatatttgaaagcactttcaaaataagtgatgaaaaactcaatgagcactgggatatttgtgaagaatataatattgttgattttgaattaggaaataaagtaactggatcaggttttcctgtctataaaggtaaaggggctgccttgcaaagagcattaattaattatttcttagataaaaatacatcatcaggatatactgaagttcaacctccggttttggttaatgaagattctgctttcgcaactggacaattaccagataaagaaggacaaatgtatcatatcagtaatgataatctatatttgattccaactgctgaggttccaataacaaacttctatagagacagtataattaattcctctgatttaccaattaagcttacaggctatacaccatgttttagacgtgaagcaggaagttatggaaaagatgttagaggccttaatagattacatcagtttgacaaagttgaaattgtcagaattgaaaaaccggaagattcatataaagtattagatgaaatggttgaacatgtaaaaaatattcttgaagaattagaattgcctttcagaatactgagactatgtggaggtgatttaggttttacatcagcactaacttatgattttgaagtatattcaaaaggacaaaaaaaatggcttgaagttagttctgtatcaaattttgaaacttatcaatccaatcgtttaaaattgagattaagaattaatgaaaaagaaaaaaaacttgctcatactctgaacggtagtgcattagctcttccaagaatagtagctgctattattgaaaacaacaactcacctgaggggataaaaattccaaaaattctacataaatacacaggttttaaatttatatcttagg

SEQ ID NO: 297275 - DNA, 745 bp, Unknown
  Bacterial polypeptide expressing nucleotide sequence isolated from the Sargasso Sea
tgcattaataagatttatgcttgatgaagcagcatcaaatggctatgaggaatactatgtcccctatatagtgaattcagaaagtttgattggtactggtcaactaccaaagtttgaagatgatcaattttcagtagatgagggtaaatatctaattccaactgccgaagtaccgttaactaatgtatttagaaatgaagcgatttcagttgatgatattcccatcaaaatgactgctcacacaccatgttttagagctgaagcaggtagttatggtaaagataccagaggaatgattcgccaacatcaatttgaaaaaattgaattggttaagtttgttcacccaaatgagtcagaaaaagcacttgatgaattggttagtcatgcatcaaaaattctagacaaattagaactctcgtacagaaaagttgtcttatgtacaggtgatttagggttttcggcggctaaaacaattgatctggaagtatggctgccttcacaaaaatgttttagagaaatttcgtcatgtagtaacttcagagactttcaaactcgaagaatgagtacaaaaataactgatggttcaaccaaaacttatccccacactctaaatggttcagctttagcagttggaaggacgcttttagctattttagaaaattattttgaaaatggagtaggtgttcatataccaaaggttttgagtgcttatttaacttttgacttaattgaaattaaaaaatag

SEQ ID NO: 297276 - DNA, 739 bp, Unknown
  Bacterial polypeptide expressing nucleotide sequence isolated from the Sargasso Sea
atgattgatataaatttacttagaacagatcctgaaaaggtaaagaataatctcaaaaccaaaaactatgacttagatactgagttgtttggtgaaatagaatctaaaagaaaaactctacaaacagaagttgaagatttgaaaggtctcaagaataagttatctaaagattttggggaactcaaaaaaaataatcaagacacagctgaattatccaaccaattagaagaaattaaagaaaatcttcataaaaaggaagaattactagataaaacatttattgatttaaatgattttctattggatatcccaaatattcctcatgaagatgttcagcctggaaatagtgaagaggacaataaagttattaaaacccatggagaagtactcaagagagattccattgatcatcttgagatagcatctgatatagacacagaatctgctgttaaacttgttggtgcaagatttacagttttaaaaaatgacatagccaaacttcatagagcgcttatttcatttatgcttgatgttgctgaaaaaaatggttatgaggagcgatatgttccctatattgcaaattctcaaagtcttaccgggacaggtcaacttccaaaatttgaagaagatcttttcaaagtatctgaagatttatttctaattccaacagctgaggttccattaacaaacctttttgctgattcaatacttcaagatgatgaactgccaattaaggtaa

SEQ ID NO: 297277 - DNA, 1134 bp, Unknown
  Bacterial polypeptide expressing nucleotide sequence isolated from the Sargasso Sea
aaaaagaaaaatttgagatggaaaaaaagtctatttcaaaatcgaaagaccaaagtttattcaaaaaatcaaaagagctttctttaaaaattgaagaaattaataaaaatcaaataaaattacagagtcagattactgatattctatcttctatacctaatatcccattaagtgatgtcccaataggacaagatgaaaattctaataaagaaattgagaaaaagggtgaaataaaagattttaattttaagcctaaatcccattatgaattaggagaaaaattaaatatgcttgattttgacttagcaacaaaaacaactggttctagatttgtatttgttaaaaatgaattagctcaattagaaagagcaatatcaaattttatgattgatacacatactcaaaaaaatggttatacagaaatatcgcctccattaattgcatctgctgaaacaatgtttggcactggacaattaccaaaatttgaaaatgatcagtttgaaattaaacttgatgaaggtgaagatagaaagtttttaataccaacagctgaagtaattttgacaaatattgtcaaaaatcgaattttggagaagaaagaattacctattagagtagttgcatctacaccatgttttagaaaagaggcaggtagttatgggaaagataccaaaggtatgattagacagcaccagttttataaagtggaactagtaagtattgtagaaaacgataaatgtatagaggagttagaaagaatgtctaactctgcaacaatgatattagatgccttaaaacttccttatagaaaaattgttttatgtactggtgatatgggttttagtgcagaaaaaacttatgacattgaagtatggcttccatctgaaaataagtatagagagatttcaagctgttcatcttgtggttctttccaagcaagaagaatgaaggctagatataaaggacaaaacaattcaaaagaatttgttggcacacttaatggtagtggtttagcagttggcagaactatgattgctattatggaaaattatcaaactgaagatggatcaattttgatacctgaagttcttaagccatatatgccaaatatagataaaatttctatcaattaag

SEQ ID NO: 297278 - DNA, 1276 bp, Unknown
  Bacterial polypeptide expressing nucleotide sequence isolated from the Sargasso Sea
atgctttcaattgattacatcacaaactcaaaagatgacgcaattataggccttaaaaaaagaggtttcaagaatctagatgtattagatagcataatagagctcaataataatcgaaaaaaaatacaacaagaacttgataatattctttttaagtctaatacaatttcaaaagacatagcagaagcatttaaatcaggcaataatgatattgacattgatagtctcaaatctgagtcttcaaatttaaaattaaagtcaaagagtttaacagaagaattagatgcagttaaaattaaaatatcggatctaataacttcagtacctaatattcctgattcaaaagtgcctgatggactttctgagaaaaataatattgaagtatttagaagctctaattttaaagagtctggatataatctaaaaaatcactgggatttatcaaaagaatatgacattattgattttgaattaggaagtaagataacaggatcaggatttcctgtatataaagatagaggagcaaaacttcaaagagcattaataaacttctttttagatagaaatagctctgcaggatacaatgagtttcaagttcctcacttggtaaactcagactctgcttatgctactggccaattgcctgataaagatggtcaaatgtatcatgttatcaatgatgacttttatttaattcctacagcagaggttcctttaacaaatatatacagagataaaatcttagcagttgaccaggtcccagttatgatgacaggttataccccatgttttagaagagaagctggaagttatggatctgatgtaagaggactaaatagattacatcaatttgataaagttgagatagtaagaattgaacatcctgacaagtctgatgatgcattaattaaaatgaaagagcatataaaagaaattctaaccgaacttaaacttgattttagaattttaaatttatgtgcgggtgacctaggttttacatcttcgataacctatgattttgaagttttttcaaagggtcaagaaaaatggcttgagataagctcagtttcaaactttaaaacatatcaatcaaatcgtcttaatttaaaatttaaagataaagacggtaaaaactacacattacatactctaaatggaagttctttggctcttcccagagtaatggctggattaattgagaataatcaatctgaaaatggaattataattcctgatgttttagtcccatatactggatttgatataataaactaat

SEQ ID NO: 297279 - DNA, 850 bp, Unknown
  Bacterial polypeptide expressing nucleotide sequence isolated from the Sargasso Sea
atcgcatttagatattggagaaagattaggtttaattgatgtagaaaaagcctcaagtgtttcaggttctagattttcatacttatttggagatttggtgaaaatgcaatttaatctagtttcttatgcgatgaataaattgtctgaaaaaggattcaatccaacaattccaccagttttggtaagagaaaatgctctttttggaactggatttttccctgatgattcagatcaagtgtatgagattccaaatgatgacctatttctagttggtacgtcagaagtatcacttgctgctttacacggtgatgaaattcttgattttgacaaactacctatcagatatgcaggatattcaacttgctttagaagagaagctggaacttatgggaaagacacaacaggaatctttagagtacatcaatttgataaagtagaaatgttttctttttgtaatcctgaaaaatcagaagaagaacatgaatttattctctcagttgaagaagagattttacaagagctagaaattccttacagagtcgttgatgtttgtactggtgatctaggttcatctgctgctaaaaaatttgatatcgaagcatggataccaagtcagaatacatatagagaagtaacatcttgttcaaacacaacggattttcaggccagaaggttaaatattcgtacaaaagttgaaaaagatacagctttactccatacattaaacggtactgctattgcagtgggaagaatattgatagctctactcgaaaataatcaaaccgaagacggaggagtagaattttctgatagcttggggaatattttaggggttgaaaagttaagctaa

SEQ ID NO: 297280 - DNA, 385 bp, Unknown
  Bacterial polypeptide expressing nucleotide sequence isolated from the Sargasso Sea
ttagagagaatgactaaatgtgcatcaggaattttagataagctgaaactgccttacagaattgtagagctatgtacgggagatatgggttttagttcacaaaaaacttatgacattgaggtttgggtgccttcagaaaaaaaatatagagaaatttctagttgttcaacatgtggaacttttcaagctagaagaatgaaagccaaatataaaaattcaaaaaatgaaaaaaattttataggtacattgaatggaagtggacttgcaatcggaagaactatgattgcgatcctggagaattaccaagacaaagatggatcaattataatacctgacgtattaaaaccatacatggataatattgataaaatcacatcgaattagg

SEQ ID NO: 297281 - DNA, 544 bp, Unknown
  Bacterial polypeptide expressing nucleotide sequence isolated from the Sargasso Sea
gatgaaattatagacatagagaacttaccactaagatatgctggttattcaacttgtttcagaagagaagcaggaacttatggtaaggatacaagtggtatttttcgagttcatcaatttgataaagttgaaatgttctccttttgtgatccagagaaatcgaatgaagaacatgaacatattctcgcaatcgaagaagaaatactcaaagatcttgaaattccttacagagtagttgatgtttgtaccggagacttaggagcgtctgcagcaaaaaaatacgatatcgaggcatggataccaagtcaacaaaagtatagagaagtaacctcttgctctaatacaaccgattttcaagcaagaagattaaacatgagaacaaaaaatgaaaatggaaatactatattgcatactctaaatggtacagctttagcagtaggaagaatcttaatagccctacttgaaaacaatcaaaactctgatggaagcgtaacgttctctgatgatttaggaaagatacttggagtaaataaattaagctagg

SEQ ID NO: 297282 - DNA, 924 bp, Unknown
  Bacterial polypeptide expressing nucleotide sequence isolated from the Sargasso Sea
tatgattgatttaaagctacttaaaaacaatcttaaagacattgaaaagaaaattaactctagaggtgagagtttcgatctaagcactattgttttagattatgaaaagaagaattcattacaaattgagattgaagatcttagaaatcaaaagaaacaagtttcaaaagaaattggtgagttaaaaaaaaataaatctaattcatcagaacaagaaaaaaggtcagatgaattatctactaatctatccaaattagaaaaatcgtttgaagaagtagatgaaaaagtaaataaaaatctttcattgatcccaaatataccccacgagaaatgtccgaatggaagtagtgaagaagataatattgaagtccatagaaaagagtacaagaacccaaaaactaatttagatcacgttgaaataggtgaaaaaattgattgtataaattttgatgatgcaacaaaagtcgcagggccaagatttgtagttctaaagaacaaactggcgcaaatgcatagagcattaattcaattaatgttagatgaagctatgaaaaataattatcaagaatgttatgttcctcatattgtaaattcgaattctttatttggaactggtcaactgcctaagtttgccgatgattcttttaaagtagaaaatgaagaaaaatatttgatccctactgcagaagtacctttaacaaatctttttagagataaacaattagcagtagatgaattgccggtaatggttactgcacacactccatgctacagatcagaagcagggagttatggaaaggatactagaggcatgatcagacaacatcaatttgaaaaagttgaattagttcaaattgttcatccaagtaaatctaacaacgcattaaataatttaatctctcatgcatcctctattctagatat

SEQ ID NO: 297283 - DNA, 1141 bp, Unknown
  Bacterial polypeptide expressing nucleotide sequence isolated from the Sargasso Sea
atgcacaatattaaagatatcagaaatgacttcgaaaattttaaggataaacttaaaaatcgaaatattgatataagccttgataacataataagtttagatgaagaaaatagaaagtttattcaagaaaaagaaaaatttgaaatggaaaaaaaatctatttcaaaatctaaagaccaaagtttatttgaaaaatcaaaagacctttctttaaaaattgaggaaattaacaaaaatcaaataaaattacaaaggcagattactgatattttatcttctatacccaatataccattgagcgatgtcccagtaggacagaatgaaaattctaataaagaaattgaaaaaaaaggtgaaataaaagaatttaattttaagcctaaatctcattatgaattaggagataaattaaatatgcttgattttgacctagcaacaaaaacaactggttctagatttgtatttgttaaaaaagaattagcgaaattagaaagagcaatatcaaattttatgattgatacacatactcaaaaaaatggttatacagaaatatcgcctccattaatcgcaaccgctgaaacaatgtttggcactggacaattgccaaaatttgaaaatgatcaatttgaaattaaacttgatgaaggtgaagaaagaaagtttctaataccaaccgctgaagtaattttgacaaatattgtaaaaaatcgaattttggagaagaacgaattaccaattagagtagttgcatcaacaccatgttttagaaaagaggcaggtagttacggtaaagatactaaaggtatgatcagacagcaccaattttataaagtggaactagtaagtattgtagaaaacgataaatgttcagaggagttagagagaatgtctaaatctgctacaatgatattggatgcgttaaaacttccttatagaaaaattgttttatgtgctggtgatatgggttttagtgcagaaaaaacctatgacattgaggtttggcttccatctgaaaataagtatagagagatttcaagctgttcatcttgtggttcattccaagcaaggagaatgaaagctagatacaaaggacaaaacaattcaaaagaatttgttggcacacttaatggtagtggattag

SEQ ID NO: 297284 - DNA, 960 bp, Unknown
  Bacterial polypeptide expressing nucleotide sequence isolated from the Sargasso Sea
ggttaaaaattccaaatttaatttcgtcgacatctcctgatggtaaaaccgatgaagacaatgcagaaataaaacaagtcggtgatataaaaaatatagataatccaaaagaccacctagagattgcagaaaaattaggcttaattgatgttcaaaaagcatctgaagtatctggttcacgtttttcttacttgtttggcgatttagtaaaaattgaattcaatcttgtttcttgggctttagatattctctcaagcaaaggcttcacacctactgtgccaccagtgctagttagagagaatgcattatatggaaccggatttttccccgatgatgctgagcaagtgtatgaaattccaaatgatgatttatatttagttggaacttcagaagtaccattggcagctttgcatagcgatgagattttagacatagaaaatttaccaattagatatgcaggattttctacatgctttagacgcgaagctggaacatatggaaaagatacaacaggaatatttagagtacatcaattcgacaaagttgagatgttttccttctgcaatcctgaaaaatctgaagaggaacatgaatttattctctcaattgaagaagaacttttacaggctttagagattccatatagggttgtagatgtttgcgcaggagacttaggcgcttctgctgctaaaaaatatgacattgaagcatggataccaagtcaaaacacatacagagaggttacttcttgttccaacacaacaagctttcaagcaagaaggcttaacataagagcaaaatcagatggagaaacaaatatattacatactctaaatggaaccgcaattgcagtgggaagaattttaattgccttaattgaaaataaccaaactgaagacggtaaagtcgagttctctgatacagttgctgaaattattggtgttaaaaacttaggctaat

SEQ ID NO: 297285 - DNA, 1249 bp, Unknown
  Bacterial polypeptide expressing nucleotide sequence isolated from the Sargasso Sea
aatgcacaatcttaaattaataagggagaatttaggtgattttaaaaacaaaatttctaaaagaaatataaaagtagattttgacaaattaatacagttagacaaaaaacatagagaaataataggcaataaagaaaagttagaacaacaaaagaaaataatctccaaatcacaagacaaaaaacaatttgagaaatcaaaaaatatttctaacgagattaatcaattaataattgaagaaaaaaaaattggtaaaaaaatttctcaaattttagatgtaatacccaatataggtttagatgatgttccagttggttctgatgaaaagtcaaacaaaattataaattctactggtgaaattcccaagttttctttcaaagtccaatcacattatgatttaggtaaaaaaaaaggtttactagattttgatctagcatctaaaacaacaggtgctagatttgtttttttaaaaggtaaattagctgaattagaaagagcaatttctaattttatgctcgatgttcacacaaaagaatttggctatgaagaagtatcacccccattaattgcatctgaaagtaccatgtatggcacaggtcagttacctaaatttgaaaacgatcaattccaaattcaaatggagggcaatcaaaaaaaatatttaattcctactgcagaagttatattaacaaatatgtttaaggaaaatactcttaatattaaaaacctgccaaaaagattagtagcttcaactccttgctttagaaaagaagcgggaagttacgggaaagatacaaaaggaatgttgagacaacaccaattttataaagttgaattagttagcatagttgaaccaaacaaatgtaatgaagagttaaatcgaatgataagttgtgctgaagagattcttaaaagactaaaactaccttacagacaagtgttattatgtacaggtgatatgggttttagtgctgaaaaaactattgatctagaagtatggataccatctgaaaataagtttagagaaatttcaagttgttcatcttgtggacaatttcagtcaagacgaatgagagctaaatataaagattcaaaaaataaatctgattttcttggtacacttaatggatctggtttagctattggacggactttaattgcaattatggagaattatcagaaatcagatggcacaattataatacctgaagctttgagggggtacatgaaaaacctagacaaaatttag

SEQ ID NO: 297286 - DNA, 1200 bp, Unknown
  Bacterial polypeptide expressing nucleotide sequence isolated from the Sargasso Sea
aatgcataatattaattttatcagagaaaatccaacagagtttgataattatatgaaacaaagaggtgagcatccaatatcaaataaaatattagaactagataaagttaaaagagaaactcagactgttcttcagaaccttttagcagaaagaaactctatttctaaaaatattggtaaacttaaaagtgaaaataaagatgcttcatcagaaatgaataaagttgatgaaattaaaaataaaattaataatttaaaggaacttgagactattaaagacgaggagctaaaaactatcctctcaagacttccaaatatagctgataagactgtacctataggaagcaatgaagcagacaatacaaaatatagagaatggggtgaaaaaccaggatttgattttaatcctaaaactcattttgaattaggggaaaatttaggtttaatgaattttgaaactgcatctaaattatcaggatctagatttgttttattaaaaaatcaactttctaagttggaaagagcaatagcaaattttatgttagataagcatacgaatgaaaatggttatattgaatataatttaccttttttggttaaagattctgctctttttggaacagggcaattacctaaatttggtgaagatttatttactgctggggaagatcattggttaataccaactgctgaagttcctttaacaaacatggttagagaggaaatacttaaccaaaatcaattacccatgagagtaacttcttatactccatgttttagatcagaggctggtgctgctggtaaggatactcgtggtatgttaagacagcatcaatttactaaagttgaattagtttcaatagtagagccgcagcattcacaagatgaattagaaagaatgcttgaaagtgctgagagtattcttcaagatttaaatattcattataggattatgactttatgtactggtgatatgggcttttcagcatcaaaaacatacgatattgaagtatggcttccaggtgaaaatacttatagagaaatttctagttgttctaattgtaatgattttcaagctagaagaatgaatacaagatataaattagaaaataaaaatatttttgttcatacacttaatggatctgggttagcagtaggaagaacactaattgctattcttgaaaattatcagacgaaaga

SEQ ID NO: 297287 - DNA, 1195 bp, Unknown
  Bacterial polypeptide expressing nucleotide sequence isolated from the Sargasso Sea
tatgttggatttaaaaaaactaaaaaaagactctaagtctgtagctgacaacctaaaaagaagaggttttaagcttgatttggatacatgggataaattggaagcttctagaaagtccttacagtctgatacggaaagtatgcaagccgaacttaatgaaatttctaaagaaattggaatccataaaaaggaaggtagtgattcatctaagttagagaagaaggctagtgaaataaccttaaagattaaatcccaatctaaagatttagcacccattttggaagacttaaataactttatctcctctataccaaatttaattgatgatgacgtgcctgaaggtaaagacgaagaagaaaacttagaattaagaacttttggaaatataagaacttttgattttactcccaaagatcatttagaactcggttcaaatctgaatggcatagatatggaagccggtgtaaaaatagcaggtgctaggttcgcagtacttaacggagatttagcaaaacttcaaagatccctgattaattttatgcttgatgtacataccaatgagcatcaatataaagaagtttacgttccatatatagtcaataacgaatctttatttgggacaggccaactacctaaatttgaagaagatctttttaaattagaaggaaaagagaatttttatctagcctctactgccgaggttcctgtaacaaatctatttagagacgagattttagattccaatatgcttccagctaaacttgtttgccacaccccatgttttagaagtgaagctggtagctatggtttagatacaaaaggaattatgagattacatcaatttgaaaaagttgaattggtacaagcagtagaagaaaaagactctaacaatgcccttgaagaactaacagtacatgcagaagaaatcttaaaaagactagaacttccatatagagtggtaagtctatgctcaggagacatcgggttctctgctgctaaaacctatgacatagaagtttggattccttctcaagataaatatagagaaatctcttcttgttccaattttcgtgattttcaagcaagaagaatgaaggcaagatggaaaaatccttcaaccaacaagactgaatttttgaatacattaaacggctccggccttgctcttagtagaactgtccttgctattatggaa

SEQ ID NO: 297288 - DNA, 535 bp, Unknown
  Bacterial polypeptide expressing nucleotide sequence isolated from the Sargasso Sea
tcaaagcgaattaccaataaaaatgactgctcatacaccatgtttcagacaagaggcaggttcttatggaaaagatacaaaaggaatgatcaggcaacatcaatttgaaaaagtagagcttgttcatattgttaaaccagaggaatcttatgaagcccttgaagagcttacaaagaatgctgaatcaatccttcagaagctcaaccttccctatagagtgatgctgctatgctctggtgatacaggcttctctgctgctaaaacatatgatcttgaagtttggctgccttctcagaacacctacagggagatatcatcatgtagtaattgtgagtcattccagtctcgtagaatgaaggctcgatataagaactcagatactaaacaaactgattatccacatacactcaatggctccggattggcaattggaagaacatttattgctgttcttgagaattatcaaaatgaagacggctcaattaccatccctgacgtcttgataccttatatgcagaaccgagaaagaatctaa

SEQ ID NO: 297289 - DNA, 742 bp, Unknown
  Bacterial polypeptide expressing nucleotide sequence isolated from the Sargasso Sea
aatgctagacatcaaaaatttaagagataattttaaggatattcaaatttccttgaaaaagcgtggttatgatttaaatgaagcttcttttaaatctttagatgattctagaaaagagcttcaaattgaagttgagaatcttcaagctgaaagaaaaaaactttcatcagaatttggaaaacttaaagcatctggtgaagagacctcagatttaaaaaaagttattgataaaaaaaattctgatttagaaaaaaaagattcagagcttcaagatgttttaaaaaatttaaataacttactactagatatgccaaacattccccacgattctgttcctgagggatcatcagaagaagataataagattgtaagtaaacatggtgagattattagtactaacactcttgatcatctagaaataactaaaaaaatagatactgaactagctgctaaattatctggatcgagatttgcagtcttagaaggagatttagccaagcttcaacgctcattaataacttttatgctcgattgcgccattcaaaatggatacaaggaatattatgttccatttatggcaaatgaagagtctttaacagggacaggacaattaccaaaatttgaagaagatttatttaaaacctcagataaactgtaccttattcctaccgctgaagttcctttgactaatctattcagaaatgaatttctaaatgaaaaagattttccaatcaaagtaaca

SEQ ID NO: 297290 - DNA, 1240 bp, Unknown
  Bacterial polypeptide expressing nucleotide sequence isolated from the Sargasso Sea
catgttagatccaaaaataattagaaaagattccgatagggtaagaggttctctcaagaagagggcatctgattttgatcttgattcttatctagaaatagatcagaaaaacagagacttgatctctgcagttgaggagcttaggtcatcaaaaaatgcgataaataaaagtattgcaaatcctgatctttcagatgaggaaagatctgatctcatttctcaggttggtgagatcaataaaaaactaaaggattcagaggaatctctcaatgatctctctagtcagagtagagaaatgagcctagagattcctaatattcttgatgattctgtaccccaggggttaaacgaagaagataatatggaaatcagatcatggggagaaccacgtaagtttgatttccaacctaaagaccattctgaacttggagagaacaatggtggcattgattttgaatctgctgccaaactatcgggttcaagatttgttgttatgaaagatggttatgcgaaattacacagggctctgaagcagttcatgcttgacgtgcaaaccgaagaaaatggttataccgaaatgtatgttcctaatattgttcgttcagattgcttagagggtactggccagttaccaaagtttgcagatgatcagtataaaatcgaaaatgaagaggctttatatctaattcccacagctgaagtccctttaaccaatttaattagggaaagtattcttgatcaaagcgaattaccaataaaaatgactgctcatacaccatgtttcagacaagaggcaggttcttatggaaaagatacgaaaggaatgatcaggcaacatcaatttgaaaaagtagagcttgttcatattgttaaaccagaggaatcatatcaagcccttgaagagctgacaaagaatgctgaatcaatcctacagaagctcaatctaccatatagagtaatgctgctatgctctggagatacaggtttctctgctgctaaaacatatgatcttgaagtttggctgccttctcagaaaacctacagggagatatcatcttgtagtaattgtgagtcattccagtctcgtagaatgaaggctagatataagaactcagatacaaaacaaactgattacccgcatacactgaatggctccggattggcaattggaagaacacttattgctgttcttgagaattatcaaaatgaagatggctcaattaccatccctgacgtcttg

SEQ ID NO: 297291 - DNA, 772 bp, Unknown
  Bacterial polypeptide expressing nucleotide sequence isolated from the Sargasso Sea
gatgttagataaaaagcttttaaatcaatccccggaattagttaaaaataatttatcttccagaggttatgtgctcaatattgatcaatggaaaaagcttgaagaagatagaaaaattgctcaagttaatttagaaacaaatcaagagaatttaaataaattatcaaaagaaatttctaagtctaaggatgatgctaacttaaaagatcaggcttcatccttatcaacacttgtaaaacaagataaggaaatacttcaatctattcaagataatattgatgagtttcttctggatataccaaatattttggatgagtctgttccaattggagaggatgaaacttcaaatcaaattattgaagaaataggcgctatacctaatttttcttttgagccaaagcctcactctttttttatagaaaaaactgatcagggtaggggagtaaaaatcgccaaaagtcgttttacagttttaagcggagagcttgcaaaattacatagagttattgggcagtttatgatcgatacacataccaaccttcatgggtatgtggaattatatgtcccttatatcgtaaataagacttcattgattggcacaggacaacttcctaaatttgaagaagatttatttaaactgaccgaaagttctgatctttatttagcaccaacagcagaagtaccagttactaatctccatagagatgaaaaacttaattttgagcaattacctattaaatatgtgtgtcattcgccgtgtttccgaagtgag

SEQ ID NO: 297292 - DNA, 655 bp, Unknown
  Bacterial polypeptide expressing nucleotide sequence isolated from the Sargasso Sea
tctttttggaacagggcaattacctaaatttggtgaagatttatttaccgctggggaagatcattggttaataccaactgctgaagttcctttaacaaacatggttagaggggaaatattaaacataaatcaattaccaatgagagttacttcttatacaccttgttttagatcagaggctggtgccgcaggtaaggatactagaggtatgttaagacaacatcaatttactaaagttgaattagtttcaatagttgagccacatcattcacaaggtgaattagaaagaatgcttgaaagtgccgaaagtattcttaaagatttaaatattcattatagagttatgactttatgtactggtgatatgggtttttcagcatcaaaaacatatgatattgaagtttggcttccaggtgaaaatacttatagagaaatttcaagttgttctaattgttatgattttcaagctagaagaatgaacacaagatataaattagaaaataaaaatatttttgttcatacacttaatggatctggtttagcagtaggtagaacattaattgcaattcttgaaaattatcaaatgaaagatggaaatattaaaattccagaagttttgaaaaaatattttaacaattctgataccctcgtctag

SEQ ID NO: 297293 - DNA, 392 bp, Unknown
  Bacterial polypeptide expressing nucleotide sequence isolated from the Sargasso Sea
aatgaccaaatgtgctcaggctatattagaaaagctcggcctaccctatagaactgttgtgttatgtacgggtgacatgggctttggtgctcaaaaaactcacgatttagaagtatggttgccaggacaaggtaaatatagggaaatttcgtctatttcgatttgtggagattttcaagccagacggatgcttgccagattcaaacctggtgaaggtggaaaacttcagtttgtccataccctcaatggatccggagtggcagttggtcggtgcttaattgcagttttagaaaacggtcaaaatgaagacggttcagtatctttacctccagtattaagtccttatttaggaaattgtacccgtataaattctactggaggcttggaataac

SEQ ID NO: 297294 - DNA, 883 bp, Unknown
  Bacterial polypeptide expressing nucleotide sequence isolated from the Sargasso Sea
aatgcataacttaaaagaaataagaaaaaatttagattattataagaaaaagattaaagatagaaatgtagatgtagactttgaaaatttactaaatttagacaaaataaatagagatttaattttaaataaagaaaagtttgaacatgaaaaaaaattattgtccaaaacaaaagatgaaaaaaattttcaaaaatctaaaagactcacagaagatatagccgatattgaaattaaacaaaaagaattacaaaaaaaaattaggtcaatcatttccataatgccaaatattgcaatggatgatgttcctgtaggagaagatgaaaagtcaaataaacaaattaaaaaattaggtgaaccgaaaaaatttgaatttaaaattaaatcgcatgtagagattggtgaaaacctaaaatatttagattttgatagtgctacaaaaatatcaggatcaagatttgttgttcttaaagataaatttgctctactagagagagcattaattaattttatgctagatattcatacaaaaatgtttaactacaaagaaatatcacctccaataatagttaatgaagaaactatgtttggtactggacaattgccaaaatttaaaaatgatcaatatgaattgagtactgaaaaaaatgaagtaaaaaaatatttaatccctacagctgaagtttctttgacaaatttagcacgtgactcaattattgactcaaaaaatttaccattaagatatgttgctagtactccttgttttaggaaagaagcgggaagttacgggaaagacactaaaggcatgatgcgacagcatcagttctataaagtagaattagttagtttagttgaaccaaaagactctattaatgaattaaaa

SEQ ID NO: 297295 - DNA, 904 bp, Unknown
  Bacterial polypeptide expressing nucleotide sequence isolated from the Sargasso Sea
atgcttgattcaaaattactcaggaaagaaacaaaagaggtcatatctaatctcaaaagaagaggtttcgaattcgatgagactctctggaccaaacttgaatctaaaagaaaagatttacaaggatcaactgaaaatcagcaagcaaagttaaacgaactttcaaaaaatattggaattgcaaaacaaaattctgaagatacaaaagatcttgaaaaaatggcttcagaacttactgcaatattgaaagagcagaacaatgagctagataacttacttgaacaaatagataattttgttttatcgattcctaatctaattgaccacgatgttcctgatggtaaagatgaaacatctaacttggagttaaaaaagattggctctcctagagtatttgattttcctattaaagatcatatagaaattggaagatcttacgaaattgacatggaagcgggggtaaaactaaccggttcaaggttcaaggtttttagaaacgaaatagctcatcttcaaagggccttaataaactttatgattgatacacatgtacaggaacatggatatgaagaactgtatgttccttacatagtcaacaaagagtctttgatcggaacaggtcaactccctaaattcgaggaagatctttttaagatcgacaataaaaacgatttttatttaacttccacagctgaagttcccgtaactaatttattcagagatgaaattttaaattcagaaaaattacctatcaaatatgtttgtcatactccatgctttcgaagcgaagctggaagttatggaaaagacacaaaaggcataatgagactgcatcaatttgaaaaggtagagttagttcaggctgttgaatcttcagattctgatgaagcattagaagaatgac

SEQ ID NO: 297296 - DNA, 746 bp, Unknown
  Bacterial polypeptide expressing nucleotide sequence isolated from the Sargasso Sea
taactttatgctagatgttcatgtgaatcagtttaaatataccgagatatcaccgcccttaattgttaatgaagatgtaatgtttggtacaggtcaactccccaagttcgaggaagatcaatttgaaattaagctcgataattctgaagagagaaaatttttaattccaacagctgaagttgtccttacaaatttagttagaaaaacaaatttagatattagtgaacttcctcaaagatttgttgctgctacgccatgctttaggaaagaagcaggtagctatggaaaagacacaaaaggaatgatgagacaacatcagttttataaagttgaacttgttagcatagtcgaaccaaaacattgcattacagagttagataggatgctcaattgtgctgaagagattttaaaaaaactagaaattccctatcaagttgtccttttgtcatctggagatatgggttttagtgctgaaaaaacttttgatattgaggtttggataccttcagaaaaaaaatacagagaaatttcgagctgttcatcttgtggatcttttcaggccagaagaatgggagcaaaatataaaacatctagtggcaatgagtatgttggaactctaaatggatctggtttagccgcaggaagattaatgatagccttgatagaaaataatcaaaatgaagatggatcaattaccattccaaatattttaaaaaaatacatgaataatttagataaaatttgat

SEQ ID NO: 297297 - DNA, 1264 bp, Unknown
  Bacterial polypeptide expressing nucleotide sequence isolated from the Sargasso Sea
atgttagatccaaaaataatcagagacaaacctgaactgataaaacagatgttaaaagatagggcagtagaatttgattttgaaaaaatgttagaattgaataaaacacgaaaagaaatgatgatgcaatctgatgaattaaaacaaaaaagaaatcaaatgtcagtgaagattggaagtgagaaaaaagcgggaaatgatgcttcagaattattaagagagatgggagaaatatcaaagaagttagatgatttagagagtttacgaaaaacagttgatgaaaattatcataatttgtctttttcaataccgaatttagtacatgattctgttccaaagggagcagatgaatcatttaacaaacaagttagaacgtggggagaaattccaaagtttgatttcgaggtaaaagatcacatcgatttgggattggagttagatattgtagatatagagagagcatcaaaaactgccggagcacgattttattatctaaaagatgggctcgtaaaacttggacaagctctaactgcatttgcattagattttgtttcgaacaaaaattacaacttgattcaacccccatacatgataaacaggcaatctatggaaggagctgtgattgcagatgattttgaggacgtaatctacaaagtacaagatgaagatttgtttttaattgggacatcagaacatgcaattgcatcaatgtattatgatgaaattttagaaggttccaagattccgttaagatatgcatcaattagtccatgttttagaagagaggcaggagcacatggaaaagatcaaaaaggaatttttagagttcatcaatttgaaaaaattgaacaatttattttttgtagaccagaagaatcatgggaagaacatgaaaaaatgattaaaaacacagaagaattttatcagcaattagagatcccgtatagattgatgttgctatcaagtggcgatatgggaaaagtatcagctaaaacatatgatattgaagcatggatggcaggtcaaaatgcgtatagagagatcgtatcctgttccaattgcatcgattatcaatcaagaaggttgaagatcagatttagagaaaagagcaatgaagatacaaaatacatacacactttgaacagtacactagtagcaatagaaagaactatggttgcaattttagagaataatcaaactaaagatggacatatagaaattccaaaagttttacaaaaatattttggcgacaatatgatataat

SEQ ID NO: 297298 - DNA, 298 bp, Unknown
  Bacterial polypeptide expressing nucleotide sequence isolated from the Sargasso Sea
tttagggttctctgcagccaaaacaatagatatagaagtctggctgcctagccaaaattgttttagagaaatatcctcttgttcaaattttagagattttcaagcaagaagaataaatgcaagagttaaggatggtaaagataagttttaccctcatactttgaatggttcagctttagcagttggaagaactcttttagcaattattgaaaatttctatgaaaatggattaggagtgcatattccaaaggttttggctgattatctagatttcgacctaatagaagaacaaaaataa

SEQ ID NO: 297299 - DNA, 1116 bp, Unknown
  Bacterial polypeptide expressing nucleotide sequence isolated from the Sargasso Sea
tatgttagatataaaaaaaattcgagagaatccagatcaaatagataaagcattagaaaagaggaaccaccccgctgtttcaaaagacctcttatctgctgatgagaaaaataggaacttgatttctgaacttcaaaaaattcaagaagaaagaaatgcaaaatctaaacttattggagagtatactgccaaagggaatgtcgatgacaccaacaaacttaaagatgaagttggaaatttaaaaacaaaaatgcaagacttagaagaacaacaaagaagttcacaaaattcattagacctaatgttatctgaaattccaaaccttccagatgagtcagtgcctgttggagatgaatcgcaaaataaagaaattaaaactaaaggaaaaaagaaagaattttcttttgatttaaaggaacattttgatcttggagaaaaccttgatgtaatgagctttgaaaaggcagtaaatatttctggagcaaggtttgtaattcaaaagggcaaacttgcaaacctagaaagagcaattgctaattttatgctagatcttcatacaactgaatttgaatacgaagaaatgaatgttcctattcttgtaaaggaccaagctgtttttggtacaggacaattgccaaagtttaaagatgatttatttaaaacaacaaatgattattggctaattcctacagcagaagtacccctaactaatatgacaagagaatcagttctagacgttgctgatctacctaaaagatatgtcgctcatactccttgcttccggtctgaagcgggagcagctggaagagatacacgcggcattatgcgtcaacatcaattttacaaagtggagcttgttagcttaacttctgaagaccaatctaaacaagaacacgaaagaatgcttaattgtgcagaagaggtattaaaacgtcttgatttacattatagagtagtcattttgtcctctcaagacatgggattctctgctcaaaaaacatatgatattgaagtttggttgccaggacaaaaagaatatagggaaatttctagctgttcaaactgtggagattttcaagcaagaagaatgaattctcgatataaggataataatac

SEQ ID NO: 297300 - DNA, 857 bp, Unknown
  Bacterial polypeptide expressing nucleotide sequence isolated from the Sargasso Sea
tatgctctcaattgacacaatttctaacaataaagaagaaacactcataggtttaaaaaaacgaggttttaaggatctaaaaataattgataagattattgatcttaatctctctagaaaaaaaattcaacaagaattagatcaaattttatttgagtcaaataatatttcaaagaaaatttcagaaatatttaagtctggaaataatgatgatagtgtctctaatttgaaagagaaatcaagtgatttaaaattaaaatctaagaatttatctgaccaacttgaaaaaacaaaatcagatatttttgaattattaacaactattccaaatattccagataatgaagtacctgaaggtttatctattgatgataatattgaagtttacagaagcaatgaaaaaatagaatctgataagaatctaaagactcattgggatcttgcaaaagagtatgatataattgattttgaacttggaagtaagattaccggatcaggctttcctgtatacaaagggaaaggagctaaacttcaaagaggacttataaactattttctagataaaaacacatctgcaggatacactgagttccaagttcctcatctagtaaactctgattcagcttttgctactggacagttaccagataaggatggccaaatgtatcacgtaaatgaagataacttttatttaattcctactgccgaagtacctcttacaaatatttacaaagataaaattttatcttctgatgaaatcccagttctacttacaggatacacaccatgctttagaagagaagctggtagttatggatcagaagtcagaggcctaaatagactacatcagtttgata

SEQ ID NO: 297301 - DNA, 1261 bp, Unknown
  Bacterial polypeptide expressing nucleotide sequence isolated from the Sargasso Sea
aatgcataacttaaaggaaataagaaaaaattttgatgattttaaaaacgctctgaaaggtagatttcttaaaatagattttaatgaacttaaagacttagatatcaaaaatagaaattttatccaaaaaaaagagtctttagaaaatgaaaagaaagaaatttcaaaatctaaagatgaaaaattatttaaaaaatctaaagaaatttcaaatgagatagacgaaatatcaaaacagcaaaaaataataaaagaccaactagataaaattttatcatttatcccaaatattcctcataaagatgttccgaatggaaaagatgaaaatgataacgtagaaataatgaaatcaggtcaaataccaaattttgattttaaacctttatcacattatgaattaggtgaaaaacttggaatgcttgattttgacctagccactaaaactacaggtgcacggtttgtattcgtaaaaaataaactggccttattagaaagggctatttcaaatttcatgctagatacgcacatattaaaaaatggttatgaagaaatttcaccacctttgttcgcttctgaaagtacaatgtttggtacaggtcaacttcctaaatttgaaaatgatcaatttgaaatcaaactagatgataatggggaaagaaagtttttgatacctactgcagaagtgattttaactaatattgttaaagatcagatgattaatcaaaaagatctaccaatgagatttgttgcatctacaccatgcttcagaaaagaggcaggtagttatggcaaagatacaaaaggtatgattagacagcatcagttttacaaagttgaaatggttagtatcgtcgaacaagaaaaatgtctagaagaacttgagagaatgacgaaatgtgcaacatcaattttagatctattagaattaccatacagaaaaatgatcctatgcagcggtgacatgggatttagtgctgaaaaaacttatgacattgaagtttggctaccttcagagaaaaaatatagagaaatttcttcttgttcatcttgttcaacttttcaagctgtgagaatgaaagcgagatataagaatcagaaaaaagaaactctttatgttggtactttaaatgggagtggtctagctgtgggtagaactttaatagcagttatagaaaattatcaacaaaaagatggttcaataataattccaaaagttttaagaccgtatatggacaatttggaaaaaatttctgtcaaataa

SEQ ID NO: 297302 - DNA, 946 bp, Unknown
  Bacterial polypeptide expressing nucleotide sequence isolated from the Sargasso Sea
cctgccgagcgacaccaccccggtcggtcgtgacgagaacgacaacgtggaagtgcgccgctggggtaccccgcgcgagttcagcttcccggtgcgcgatcacatcgatctgggtgaagcggccaagggcgttgacttcaagaacggcgtcaagctctccggctcccgcttcgtggtgatgaagggccagattgcccgtctgcaccgcgccctggcccagttcatgctggacctgcacaccctgcagcacggttacaccgagtgctacgtgccctatctggtcaacccggacagcctgtacggcaccggccagctgccgaagttctcccaggacctgttcaataccggcatcgacggagaaggggaagaagagggcaaagtacgcaagttctccctgatcccgacctccgaagtgccgctcaccaacatggcccgcgacgagatcttcgacgagcaggaactgccgatcaagatgactgcccacagcccctgcttccgttccgaagcgggctcctacggtcgtgatacccgtggtctcatccgcatgcaccagttcgacaaggtcgagatggtccagctggttcacccggaaaaatcctgggaagcgctggaagagatggcgggtcacgccgagaaggtgctgcagttgctggagctgccgtatcgcgtgatggcgctctccactggtgacatgggcttctgcgccgccaagacctacgatctggaagtgtggctgccggcccagaacacttaccgcgagatctcctccgtctccaactgcaccgacttccaggcgcgccgcatgcaggctcgcgtgcgcatcgatggcaagccgcagctgctgcacaccctgaatggctccggcctggcggtgggtcgcactctggtggcggtgatcgagaactaccagcaggaagacgggcgcatcgccattccggcggcgctg

SEQ ID NO: 297303 - DNA, 493 bp, Unknown
  Bacterial polypeptide expressing nucleotide sequence isolated from the Sargasso Sea
gttttagatctgaagctggatcatatgggtttagatacaaaaggtgtaattagacaacatcaatttgagaaagttgagcttgttcaaattgtccacccaaatcattctcaacaagcactagaagatattacattacaagcaagatctatattagatgaactagaacttccttatcaaatagtagaactatgtactggagatcttggtttttcatcacaaaaaacttatgatcttgaagtttggtttcctagtcagaataaatatagagagatatcgtcttgtagtaattttggtgattttcaatctcgtaggcttaatattaaattcaaagaagataagaaaaaaaactttgtacatactttaaatggttctggacttgcagtaggtagaacactagctgcacttgttgaaaactgctttgatggtaaagaaattattattcctagtgtcttacataaatatttagattttaagaccattgaattgtcataat

SEQ ID NO: 297304 - DNA, 892 bp, Unknown
  Bacterial polypeptide expressing nucleotide sequence isolated from the Sargasso Sea
atgcataatattaattatataagggacaatcctgtagaatttgataattatatgaaatcaagaggcgaaaactctatttcacaaaaaattatacatatagataaggaaaaaagagaggctcaaacagcgttacaaaatttattagcagatagaaatcaattgtcaaaaactataggtaaattgaaaagtgaaaaaaaagaagccacaaatgaaatggctcaagtagatgatttaaaaaataagatcaatgccttgaaagaattagaagctctaaaaaatgatgagttgaaggcaattttaagtagacttccaaacataccagactctagtactccgataggagctaatgaggaagaaaatgtattatatagagattgggggcaaaaaccctcttttgattttgatccaaaacaacattttgaaattggtgaaaatgctaacttaatgaattttgatactgcaacaaaactatctggatctagatttgtaattttgaaaggtaatctctctaaactagaaagagcaattgcaaattttatgatagagaaacatacttcaataaatgggtatgtcgaactgcatgtgccatatttagtaaaagcaaatacattatacggaactgggcagttaccaaaatttgcagatgatttattcactgcaggcgatgatcattggcttataccaactgctgaaatacctcttacagctcttcatagtaatgaaatattaaatataaaccaacttccaatgagagttacttcttatactccttgctttagatctgaagcaggtgcggcaggcaaagatacaagaggtatgcttagacagcaccaattcaccaaagttgagcttgtctcacttgtggaacctgaacattcaaaagagagctaga

SEQ ID NO: 297305 - DNA, 1249 bp, Unknown
  Bacterial polypeptide expressing nucleotide sequence isolated from the Sargasso Sea
aatgattgatataaatttactaagagcagatcctgaaaaggtaaaaaatattctaaaaatcaaaaactatgatttagattctggcttatttgctgaaattgactctaataggaagactttacagaccgaagtagaggatttaaagagtttaaagaacaatctatcaaaagactttggagaacttaaaaaaaataatcaagatacatctaaattatctaatcaattagatgaaattaaaaaaaatctctctgaaaaggaggagttacttaataaaacactttctcatctaaatgatttcttattagatattccaaatattcctcatcaggatgtagagccaggaaatagcgaagaagataataaagtaattaaaacatttggagaagtccaaaaaaatgattcaattgatcatcttgagattacatctgatattgatattgaatctgctgttaagcttgccggcactagatttgcagttttaaaagatgatatagccaaacttcatagagcacttatttcattcatgcttggtgttgccgaaaaaaatggttatgaagagagatatgttcctttcatggcaaattcacgtagcctaactggtacaggtcaactgccaaaatttgaagaagatcttttcaaagtaacagaagatttatttttaattcctactgcagaagttccattaacaaatctatatgccgattcgatattggagcagggcagtctccctattaaggtaacatcacatacaccttgcttcagatcagaagcaggcagttatggaaaagatacaaaaggtctcataaggcaacatcagttcgaaaaagttgaaatagttcaagttgtccatcctgataagtcagatttagctcttgaggatttattaagtaatgctgaggaaatattgcagctcttagaattgccatatcaagttgttcaactgtgtggaggtgatttaggattttcgtcagcaaaaacttatgatatcgaggtctggattcctagccaaaacaaatatagagagatttcatcatgttctaactttacagactttcaatcaagaagatcaaaaataagattaaatgaagatgggactaagatttttcctcataccctaaatggatctgcattagcagttggtagaactcttgttgcaattgttgaaaatttttatgatggaaataataaaattcatgttccaaaatctcttcaaaagtatctaaataaagaagttatcacctgtaaatag

SEQ ID NO: 297306 - DNA, 655 bp, Unknown
  Bacterial polypeptide expressing nucleotide sequence isolated from the Sargasso Sea
agtttgaaaatggatcaatttgaaataaaaatagatgaaaaaagtggaagaaaatttttaataccaacagctgaagtaattttaacaaatatggtaagagaacaaataataaatttaaaagatctacctttacgtttagttgctttaactccttgttttagaaaagaagcaggaagttatggtaaagatacaaaaggcatgattagacaacatcaattttataaagttgaactcgttagtatagttgaaaataatgagtgtattaatgaattagaaagaatgacaaaatgtgcaactatgattttagaaaaacttaatttaccatacagaaaagtcattttatcaacgggtgatatgggttttagtgctgaaaaaacttacgatattgaagtttggttgccatcagaaaataaatatagagaaatatcaagctgttcatcatgtggaacctttcaatccagaagaatgaaggcaagatataaaaatagaaataatgagacagtatttttaggtactctgaatggtagtggtttagcagtaggtaggactcttattgcgatattagaaaattatcaaaattctgatggatcaataaatattccagatgtattaaaaccttacatgaataatttacaaaaaattacaaataattaga

SEQ ID NO: 297307 - DNA, 1261 bp, Unknown
  Bacterial polypeptide expressing nucleotide sequence isolated from the Sargasso Sea
aatgattgatttaatagacttaaaagaaaatttagagctctacaaaaaaggactttctgcaaaaggttgtgatgttgatcttgcagatctattaaaaagaaattcacaaaaaaattctattcagactgaattggataaactaaaaagccaaaaaaataacttgtctaaagaaataggagccttaactagcaaaggtggagatacaaaaaaattaaaagatgaatcagagagcttaaataaaaaaattgatgctcttcagaatgaatttgatctgcttaaatctgatcttgattccattatgcttcaaatacctaacttacctgataaagatgttcctattggccaagatgaatctatgaataaggaaatcaacacaaaaatatttacacaatctaatgaaggtttagatcacgttgagataggtgaaaaaattggtttattagattttgatttagccaataaattaagcggttctaggtttgttgttttaaaaggcaaattagcagaattacaaagagctcttatccaatttatgctagatgaggcaaaaaataacggttatgaggaaatgtatgttcctttaatagtaaattctgactcacttataggaacaggacagttgccaaaatttgaagaagatcagtttaaagttggtgatggtaaatacttaattcctactgctgaagttccactaacaaatttattaagagatgaggtaatagcagactctgatttaccaatcaatttaactgctcatactccatgttttagagcagaagcgggaagctatggaaaagatacaagaggaatgattagacaacatcaatttgaaaaaattgaaattgttaaatttacgcatccagataaatcagatgaaagcttaaatgagcttgttgctcatgcctctcaagtgctagataagcttgaattatcctatcggcatgtagtcttatgcactggagatttagggttttctgcagctaaaacaatagatatagaagtctggttgcctagtcaaaattgttttagagaaatatcatcttgttcaaattttagagactttcaatcaagaagaattaatgcaagagttaaaaaaggtaaggacaaattttaccctcatactttaaatggttcagcattagctgttggaagaactcttttggctattatcgagaatttttacgaaaatggtgtaggagtgcatattccaaaggttttaaaagattatctagattttgatctaatcgaagaaaaaaaataa

SEQ ID NO: 297308 - DNA, 274 bp, Unknown
  Bacterial polypeptide expressing nucleotide sequence isolated from the Sargasso Sea
tgatttagaaatatggataccatctgaaaataaatatagagaaatatcaagttgctcatcatgtgggtcgtttcaagcaagaagaatgatggctcgatataaaaatgaaaagaatatcacagaatttgtaggtacattaaatggaagcggtttagcagttggcagaacattaataggcatcatggaaaattatcaaaattcagatggatcaataacaattcctaatgttctaagaccatacatgaataatttagaaaaaattcaaaaaaattaa

SEQ ID NO: 297309 - DNA, 895 bp, Unknown
  Bacterial polypeptide expressing nucleotide sequence isolated from the Sargasso Sea
aatgattgatgcaaacttaataaaaaacaattctcagattgttattgagaatctaaaatctagaaattatgacttagattatgaattgtatgaaagtttagagtctgatcgaaaaaaatatcaaacccaagctgaagatttacaatctcagcgtaaaatactttcacaggaattcgggatactaaaaaaagaaggtaaggatgatccagagcttagcaaaaaaattgaatctgttaataatgatctagaaatttcttcaactaagttaaatgaagtccagcaagctttaaaggaatttttattggacatacccaacctatcagataaatctgttcctataggaccaaatgaggcgaaaaatgtaaaaatcagggagcaaggtgagccaaacatattaaaaggaaaagatcatctagatataacatcaatgattgatacagaatcagcaaatctacttgccggatctcgttttgcagtacttaaagcagaaatagccaagttacaacgagcattgatagcttttatgttagataaagcttcagagtacggatatacagaacattatttacctatggttgccaatacatcatctttaacttctacgggtcaattaccaaaattctctgatgatttatttcagttaagtgacgattactatttaataccaactgctgaagtgcctctaacaaatttattcagaaatcagattctagatattgataaattacctttaaagttaactgctcatacaagttgttttaggtccgaggctgggagttatggaaaagataccaagggattaatcagacaacatcaatttgaaaaagttgagttggtacaaatttgtcacccagagaactcttttaaagcattagaagaacttacttctcatgct

SEQ ID NO: 297310 - DNA, 550 bp, Unknown
  Bacterial polypeptide expressing nucleotide sequence isolated from the Sargasso Sea
aattttagagaagacgaatttaccaattagagtagtggcatcaacaccatgttttagaaaagaggcgggcagttacggtaaagatactaaaggcatgatcagacagcaccaattttataaagtggaactggtaagtatagtagaaaacgataaatgttcagaggagttagagaggatgtctaatgctgctacaatgatattggatgcgttaaaacttccttacagaaaaattgttttatgtactggtgatatgggttttagtgcagaaaaaacctatgatattgaagtttggcttccatctgaaaataagtatagagagatttcaagctgctcatcttgtggttcattccaagcaaggagaatgaaagctagatataaaggacaaaacaattcaaaagaatttgttggcacactaaatggtagtggattagcggttggtagaactatgattgctattatggaaaattatcaaactgaagatggatctattttaatacctgatgttcttaagccatatatgccaaatatagataaaatttctatcaattaa

SEQ ID NO: 297311 - DNA, 1054 bp, Unknown
  Bacterial polypeptide expressing nucleotide sequence isolated from the Sargasso Sea
tcaaaaaaaatttccgaagaaatatctaaaatttcaaaaaatcaattaatttcacaaagaaacataaataatgtcttaaatataataccaaatttggctttggatgatgttccggttgggaaagatgaaaattctaataaattaattagtcaaaatgggaatattagaaaattttcttttaaacctaagtcacatgttgaaataggtttaattaataatgaaatagattttgatacttcaaccaaattatcaggagctagatttgttgttttaaaaaataggatagctttacttgaaagagctttaattaatttcatgttagatgttcatacaactgaatttaaatacactgaaatttctcctccattaatagttaatgaagatgtaatgtttggcacaggacaattacctaaatttgaagaagatcaatttgaaattaaatttgaaaattctgaacaacgaaaatatttaatacctacagcggaggtcgttttaactaatttagtgagaaaatcgattttaaacaaagaacaattacctttaagatatgtagcatctaccccttgtttccgtaaagaggcaggtagttacgggaaagatactaaagggatgattagacagcatcaattttacaaagttgaattagtaagtattgtggaacctaatgattctacttctgagcttgacagaatgttaaattgtgcaaaaaagattttagaaaaattagaaataccttatcaagtcattttactttcaacaggagatatgggatttagtgctgagaaaacttttgatttagaagcatggataccgtcagaaaatagatatagagaaatttctagctgttcttcgtgtggtacatttcaagctaggagaatgggggcaaaatttaaaggattaaataataatgaatttgtaacaaccttaaatggatcaggactagctgtaggaagattaatgatagctttattggaaaataatcaaaacgaggatggctcagtagctattccaaatattttaaaaaaatatatgaataacctagataaaatttgat

SEQ ID NO: 297312 - DNA, 1288 bp, Unknown
  Bacterial polypeptide expressing nucleotide sequence isolated from the Sargasso Sea
atgttagatcctaaatttttgcgcaacgaattagcagttaccgctgagcgattagctacccgtggtttcattttagatgtcgctcatctcactcaattagaagaaaaacgtaagtcactgcaagtggcgactgaagagttacaagcttcgcgtaatgctatttccaagtccatcggacaagcaaaagcccgcggcgaagatgtggatgccatcatggcgcaggttggcgatttaggtgcgcaattagatgcgaagaaagtcgagctggccgcggtacttgaagaagtgaacgcgattgctatgtcgatgccaaacctgccagatgagtctgcgcctatcggtgctgatgagactgaaaacgtcgaaatccgtcgttggggcacaccacgcagcttcgatttcccagttaaagatcatatcgatttaggtgaaggcctaaacggtttagattttaagagtgcagtaaaaatcacaggctcacgctttatcgtcatgaaaggccaaatcgcccgtttaaaccgtgcattaggtcagttcatgttagatctgcacactactgagcacggttataccgaagcttacgtgccattactggttaacgaagcaagcttactgggtactggccaattacctaagtttggtgaagatttattccacactaaacctgcgaccgaagaaggccaaggcttaagcctgatcccaaccgcagaagtgccattaacgaacctagtgcgtgatagcattgtcgatgaagacgaattgccgattaagttaaccgcgcatactgcctgtttccgcagtgaagccggctcatacggtaaagatacccgtggtcttatccgtcaacatcaattcgataaagtggaattagtgcaactggttaagcctgaagactcaatggcggcactcgaagcgctaactggccacgcagaaactgtactgcaacgcctcggtctgccataccgcacagtgattttatgtactggtgacatgggctttggctcaagcaaaacctacgatatcgaagtgtggttaccaggccaaaacacttaccgtgagatctcttcatgttcaaacatgaaggacttccaagcccgtcgtatgcaagcacgttaccgcgttaaggcagataacaagcctgccttgctgcacaccttaaacggctcaggcctagcggtaggtcgtactttagttgcgattttagagaactatcaaaatgccgatggtagcgtgacgattcctgaagcactgcgcccatacatgggtggaatgactcagatcggttaat

SEQ ID NO: 297313 - DNA, 1249 bp, Unknown
  Bacterial polypeptide expressing nucleotide sequence isolated from the Sargasso Sea
atgttagatataagaaaattaagagataattttgaagaagttaaggtagctttgaaaaaacgtggttttgatatagatcaagaaaagttccaatctttagataaaaaaagaaaggtgcttcaagtagatgttgaaaatcttcaagctgaaaaaaataaactttcttcagaatttggaaaacttaaatcagcaggagaaagcactgattcattaaaagaaactatagacaaaaaaactcttgagctaaatgaaaaagatagtgagcttaaaattattttagatcaaattgaaagcttcttattaagaataccaaacatttcagatgattctgttcctgatggtaaaaatgaagaagataatgtagttgttagcactcatggttcaatagattctacaaatacacttgatcatttagaaataactggattaatagatgttgatttagcggtaaaacttgctggagcacgtttttcagttttaaagggcgatttagcaaaacttcaaagagctttaattacatttatgttagataatgcaaccggtcatggttacgaagaatactatctaccatttatggctaatagaaattcattaattggaacaggacaactacccaagtttgaagaagatctatttaagacttatgataaattatatttaataccaaccgctgaagtcccattaacaaacttatttagaaatgaatttgttaatgaagacgaacttccaataaaagttacatcacatactccatgctttaggtctgaggctgggagttatggaaaagatacgcgaggacttatgaggcaacatcaatttgaaaaagttgagcttcttcaagtgactcatcctgatagttctatgaaatgtttagatgaattattagctaatgcatgtgagatccttgataaattagaacttccgtatcaggtcgtagagttatgtactggtgatttaggtttttcatcctgcaaaacttttgatattgaggtttggatgcccagccaaaataggtatagagaaatttcatcttgttctaatttctcagattttcaagcaagaagagcaaatattaaatttaaaaataaagaaggtactcattttgctcatactattaatggatcaggtcttgctgtaggaagaacccttattgcacttatagaaaacaattataatggtaccgactcaattaaaattccaagttctttacaagaatattttggctcggatacacttaagaccagttgat

SEQ ID NO: 297314 - DNA, 943 bp, Unknown
  Bacterial polypeptide expressing nucleotide sequence isolated from the Sargasso Sea
atgattcagttccaaaaggtgcagatgaatcatttaacaaagaagttagaacatggaggagaaattccaaaatttgattttgatgtaaaagatcacattgatttgggattagagttagatattgtagatttagagagagcatcaaaaactgcaggtgcacggttttattatctgaaagatggactagtaaaactaggacaatctctaactgcgtttgcgttagattttgtatcgagtaaaaattacaacttaattcaacctccatacatgataaacagacaatctatggaaggagctgtaatagcagatgattttgaggatgtgatttacaaagtacaagatgaagatttgtttttaattggtacgtcagaacatgccattgcatcgatgtattatgatgagattttagaaggttctaagattccattaagatatgcatcaattagtccatgcttcagaaaagaggcaggagcacatggaaaagatcaaaaagggatttttagagttcatcagtttgaaaaaattgaacaattcattttttgtagaccagaagaatcatgggaagaacatgaaaagatgattaaaagtacagaagaattctaccaacaattagaaattccatatagattgatgttactatcaagtggagatatgggcaaagtgtcagctaagacatatgatattgaagcatggatggcaggtcaaaatgcgtatagagagatcgtctcttgttctaattgtattgattatcaatcaagaagattgaaaattagatttagagaaaaaagtaacgaagatacaaagtacatacacactttgaatagtacactagtagcgatagaaagaaccatggttgcgattttagagaataaccaaaccaaagatggacatgtagaaattccaaaagttttgcagaaatattttggggacaatatgatataat

SEQ ID NO: 297315 - DNA, 1249 bp, Unknown
  Bacterial polypeptide expressing nucleotide sequence isolated from the Sargasso Sea
aatgattgatataaatttactaagagcagatcctgaaaaggtaaaaaatattctaaaaatcaaaaactatgatttagattctggcttatttaccgaaattgattctaataggaagactttacaaactgaagtagaggatttaaaaagtttaaagaacaagctatcaaaagactttggagaacttaaaaaaaataatcaggacacatctgaattatcaaatcaattagatgaaattaaaaaaaatctttcagaaaaagaggaattacttaataaaacactttctcatctaaatgatttcttattagatattccaaatattcctcatcaggatgtagagccaggaaatagcgaagaagataataaagtaattaaaacatttggagatgtgcaaaaaaatgattcaattgatcatcttgagattacatcagatattgatactgaatctgctgttaagcttgctggcactagattcgcagttttaaaagatgatatagctaaacttcatagagcgcttatttcattcatgcttgatgtcgctgaaaaaaatggttatcaagagaggtatgttccttacatggcaaattcacgaagccttactggtacaggccaacttccaaaatttgaagaagatctttttaaaataacagaagatttatttttaattcctactgcagaagtcccattaacaaatctatatgccgattcgatattggagcagggcaatcttcctattagggtaacatcacatacaccttgctttaggtcagaagcaggcagttatggaaaagatacaaaaggtctcataaggcaacatcagtttgagaaagttgaaatagttcaggttgtccatcctgataagtcagattctgctcttgaggatctattaagtaatgctgaggaaatattgcaactcttagaattaccatatcaagttgttcaactgtgtggaggtgacttaggattttcgtcagcaaaaacttatgatattgaggtctggattcctagccaaaacaaatatagagagatttcgtcatgttctaactttacagattttcaatcaagaagatcaaaaataagattaaatgaagatgggaataagatttttcctcacaccctaaacggatctgcattagcagttggcagaactcttgttgcaattattgaaaatttttatgacggaaaaaatgcaattcatgtccctaaatcactccaaaagtacctaaataaagaagtaattacctgtaattag

SEQ ID NO: 297316 - DNA, 825 bp, Unknown
  Bacterial polypeptide expressing nucleotide sequence isolated from the Sargasso Sea
ccgcggccaagctgtccggtgcccgcttcgccctgatgcgcgggccgatcgcccgcctgcatcgcgccctggcgcagttcatgatcgacctgcacacccgtgagcatggctatgaagaggcctacacgccttatcttgtgcaggctccggcgctgcagggtaccggtcagttgccgaagttcgaggaagacctgttcaagatcagccgcgaaggcgaagccgatttctacctgatcccgaccgccgaggtgtcgctgaccaacatcgttgctggcgagattctcgatgccaaagagctgccgctgaagttcgtcgctcatacgccgtgcttccgcagcgaggccggagcgtcgggacgcgatacccgcggcatgatccgtcagcaccagttcgacaaggtcgagatggtgcagatcgtcgagccgtccaggtccttcgaggcgctggaggagctgaccggtaacgccgagaaggtactgcagctgctggaactgccttaccgcgtgttgtcgctgtgcaccggcgacatgggcttcggcgcgaccaagacctatgacttggaagtctgggtgccgagccaggacaagtaccgcgagatttcttcctgctccaactgcggtgatttccaggcgcggcgcatgcaggcgcgttaccgcaatccggaaaccggcaagccggagctcgtgcacaccctcaatggctccggcctggcggtcggtcgtaccctggtcgccgtactggagaattaccagcaggctgacggaagcgttgtggtgcccgacgtactgaagccatacatgggtggtatcgaaatcatcggctgag

SEQ ID NO: 297317 - DNA, 1261 bp, Unknown
  Bacterial polypeptide expressing nucleotide sequence isolated from the Sargasso Sea
atgcataatttaaaagagataagaaaagatttttcaaaatttgaaaaagatcttgaaaaacgctcagttaaaattgatttaaacaatttaaaaaaactcgatgagttaaatagagatttaatacaaaagaaagaaaatttagaaaaagaaaaaaaagatatttcaaaatctaaagatgaaagtctattcaaaaaatctaaagaaatatccgcagaattagagaagatttctgagcaacaaaaaaacactaaaactgaattagataatattttatcaagtttaccaaatatacctcatcaagatgttccaaatggaaaagatgaaaatgataatgtggaagttttaaaagctgggaaagttcctgaatttgattttaaacccaaatctcattacgaacttggtgaaaatttaggcatgcttgattttgatcttgcaacaaaaacaacaggatcaaggtttgtatttgttaaaaaagagcttgcgttattagaaagagctttatctaactttatgctagatactcatattattcaaaatggttatcaagaaatctcaccgccattgatagcatctgataatacaatgtatggaactggccaattaccaaaatttgaaaacgatcaatttgaaataaaatttgatgaaggatctgatagaaaatttttaattccaactgccgaagtaatattaactaacattgttaaagataaaattgttgaaaaaaaagatttaccaatgagattcgttgcttcaacaccatgtttcagaaaagaagctggaagttatggaaaagacacaaaaggaatgattagacaacatcaattttataaagttgagatggtaagtattgtggaaaaagaaaattgcttagaagaattagagcgaatgaccaattgtgcgacagatatcctagataagttagaattaccttacagaaaagtaattttatgttcaggcgatatgggttttagtgctgaaaaaacgtatgatattgaagtgtggttaccatcagaaaataagtatcgtgaaatatcatcatgctcttcttgttcaacatttcaagcacaaagaatgaaatcaagatataaaaataaaaacaaggaaactatttttgtcggaactttaaatggaagtggtttagctgtgggtagaactttaattgctgtattagaaaactatcaacaaaaagatggttcgattgttgttcctaaggtactgcgaccgtatatgaataattcggaattgatttcagctaaataaa

SEQ ID NO: 297318 - DNA, 1288 bp, Unknown
  Bacterial polypeptide expressing nucleotide sequence isolated from the Sargasso Sea
atgttagatcctaaatttttgcgcaacgaattagcagtgaccgctgagcgattagctacccgtggttttattttagatgtcgctcatctcacccaattagaagaaaaacgtaagtcactgcaagtggcaacggaagagctgcaagcctcgcgtaatgctatttccaagtccatcggacaagctaaatcccgcggcgaagatgtggatgccatcatggcgcaggtaggcgatttaggtgcgcaattagatgcgaagaaagtcgagctggccgcggtacttgaagaagtgaacgcgattgctatgtcgatgccaaacctgccagacgagtctgcgcctatcggtgctgacgagactgaaaacgtcgaaatccgtcgttggggcacgccacgcagcttcgatttccctgttaaagatcatatcgatttaggtgaaggcctaaacggtttagattttaagagcgcagtgaaaatcactggctcacgctttatcgtgatgaaaggccaaattgcccgtttaaatcgtgcattagggcagttcatgctagatctacacaccactgagcatggttataccgaagcctacgtgccattactggttaacgaagcaagcttattgggtactggccaattacctaagtttggtgaggatttattccacacaaaacctgcgaccgaagaaggccaaggcttaagccttattccaaccgcagaagtgccattaaccaacttagtgcgtgataccatcgttgatgaagatgagttacccattaaattaaccgcacataccgcgtgtttccgtagtgaagcagggtcttacggtaaagatacccgtggcttaattcgtcaacatcagtttgataaagtagaattagtacagctagttaagccagaagattcaatggctgcactcgaagtgttgactggccatgcggaaacggttttacaacgcttaggcttaccatatcgtacagtggtgctttgtaccggtgatatgggctttggctcaagcaagacctacgatattgaagtgtggttacctgggcaaaacacttaccgtgagatctcttcatgctcaaatatgaaggatttccaagcgcgccgtatgcaagcccgttaccgtgttaaggctgataacaaacccgcattattacataccttaaatggctctggtcttgcggtaggtcgtaccttagttgcaattttggaaaactatcaaaatgctgatggtagcgtgactatccctgaggcgctgcgtccatacatgggcgggctcacacagatcggttaat

SEQ ID NO: 297319 - DNA, 1192 bp, Unknown
  Bacterial polypeptide expressing nucleotide sequence isolated from the Sargasso Sea
atgtttgatataaaaaaaattagagaaaaccctgaggattttgataaaattttatcaaaaagaaatcatagtccgatttctaaagaaatattagatttagataagaaaaataaagacctgatagctcaacttcaatctcttcaagaagaacgaaactctaaatcaaaaaaaattggagaactttcttctcaaggaaatagggaagaggcttcaaatttaaaagaagaagtttcagccttaaaatctaaacttcaggaacttgatgaagcacaaaaaaattcacaaaatgctttaaatgatgttttgtctcggattccgaacttgcctcatgaaagtgttccagtgggagatgagataaaaaataaagagataaaattgattggtgaaaaaaaagatttttcatttgagctgaaagaacactttgatattggtgaagatcttggaataatgagttttgaagatgcagcaagtatatctggtgcaagatttgttatacaaaagggtatgctttctagactagaaagatcaatagcaaactttatgttagaccttcatacttcagagtttggttatgaagaagttaatgtaccaattcttgttcgaggtgatgcattatatggaacaggtaatttacctaaattcgaagaagatttgtttaaaacaactaatgattattttttaattccaactgcagaggttcctctatcaaatttaaccagaggaaaaatattggatatagcagatctgcccaaaagatttgtatcccatactccttgctttagatcagaggccggtgcggcaggcaaagatactcggggaattatgagacaacatcaattttataaggttgaactcgtaagcctaacttctgaacaaaagtcagaagatgaacatgaaagaatgcttagttgcgctgaagaagttttaaaaaaattagatcttcactatagagttgtcatcctgtcttcagaagatatgggcttttctgcacaaaaaacatacgacattgaagtttggcttccaggtcagaaagcctacagagaaatatctagttgttcgaattgtggagatttccaagcaaggcgaatgaattcacgctataaggatggcaaagatataaaatttctacatactttaaatggctccggccttgcagtaggaagaactttaatagctattatgaaaattatca

SEQ ID NO: 297320 - DNA, 627 bp, Unknown
  Bacterial polypeptide expressing nucleotide sequence isolated from the Sargasso Sea
aagaagatttatttaaaacctcagataaactatatcttattcctactgctgaagttcctttgactaatttattcagggatgaatttcttaatgaaaaagatttacctatcaaagtaacatctcatactccatgtttcagatctgaggctggaagttatggcaaggatacaagaggtcttattagacaacatcaatttgaaaaaattgaacttgtacaaattactcatccaaataattcaatggattgtctagaaaatttgcttgataatgcatgcgaaattcttaataaattagaattgccataccaaatagttgaattatgtactggtgatctgggtttttcatcttctaaaacatttgatatcgaggtttggatgccaagtcaaaaaaaatatagagaaatttcatcatgctcaaactttacagatttccaagctaggcgctctaacataaaatttaaatctaaagaaggaaatatttttgcacatacaattaacggatcgggacttgcagtcggcagatgcttaattgcacttattgaaaataatttcgatggtaaagatacaattaacattccaatttgtcttgagcaatattttggttcaaacgaaataaaaataagttgat

SEQ ID NO: 297321 - DNA, 1270 bp, Unknown
  Bacterial polypeptide expressing nucleotide sequence isolated from the Sargasso Sea
atgcataatattaattttataagagataaccctataatttttgataattttatgaaacaacgaggtgaattaccttgttctaaaaatattataaaaatagatgaagataaaagaaatactcaaactattttgcaaaatttattagctgaaagaaataaactttctaaagaaataggtattttaaaatctcaaaataaagattctgaagttgaaaatattctaaaaagagttgaaaaaatcaaggaagaaacttctaatttgaaggaattagaaaagataaaagaagatgaattacatgcaattttatcaagattacctaatattccatcaagtaccactcctcagggaaaaaatgaaaatgataatattttatatagagaatggggagataaaagtgattttcaatttaaaccaaaaaaacattatgaaataggagaaaatttaaatctaatgaattttgatttagcaagtaaactatcaggatcacgatttgttgtactaaaagggatgctatctaaattagaaagagctattgctcaatttatgctagataaacatacagatgaaaacggatatacagaaatgtatgtaccttttttagtaaaaaataattccttatttggtactggacaattacctaagtttggagaagatttatttactgctggtgaaaatcattggttaattcctactgcagaagttccattaacaaatttagtcagagataaaattttacaatctaataatcttccaatgagagtcacatcttatactccttgttttagatcagaagctggtgcagcaggtcaggatactcgaggaatgttaaggcagcatcaattttcaaaagttgagttagtttctatagttgagccgcaacactctgtaaaagaattagaaagaatgttagaatcagctgagagtattttaaaagatttaaatattcattatagagttatgactttatgttcaggtgatatgggtttttctgccaataaaacatatgatattgaagtttggttaccaggtgaaaataattatagagaaatatcaagttgttctaattgtggtgagtttcaagcaagaagaatgaatgctaaatataaatcaaaagataaaaatattttcgttcatactttaaatggatctggtcttgcagttggaagaactttgatagcaatattagaaaattatcaaaccgaagatggtaacgtaataataccagaagtattaagaaaatatttaaataatcagtcatcattaatttagt

SEQ ID NO: 297322 - DNA, 793 bp, Unknown
  Bacterial polypeptide expressing nucleotide sequence isolated from the Sargasso Sea
atgttagattcaaaaacacttagaaaagaaaccaaaaaagttagtctctcactgaaaaagagaggttctgattttgatcttgattcttatttaaaaatggatcagaaaatgagagatctaatctcaactgttgaggagcttaggtcgtcaaaaaataacatcaataagagtattgccagtcctgaaatttcagaaaatgacaagtctgacctaatttctgaggttggaactatcaataaaaaactaaaagaatcagagcaatcactcaacgagctctctgagcaaaccaaaaagatgagcttagagattcctaatattcttgatgaatccgtacctgaaggatccagtgaagaagagaatatagaaataagatcatggggtaaattaccaaaatttgattttgagccaaaagatcattccgaactgggcgaaagtaacggcggtattgattttgaatctgccgcgaaattatcgggttcaagattcgtagttatgaaggatggatatgcaagacttcatagggctttgaagcaatttatgctcgatgttcaaactgaagagaacggctatactgaaatgtatgtcccaaatattgtcagatcagattgcttggagggcactggccagttaccaaagtttgcagaggatcaatataagattgaaaatgaggagggtttgtacctaattccaacagctgaagttcctcttacaaatttaatcagagaaagtattcttgaagagaatgaattgccaatcaagatgaccgcacatacaccatgtttcaggcaagaag

SEQ ID NO: 297323 - DNA, 1093 bp, Unknown
  Bacterial polypeptide expressing nucleotide sequence isolated from the Sargasso Sea
gaattatcaaagaccaaaaatgaaaaaaactttaaagattccaagttattatcagatgaaattaataaaatttctcttgagcaaaaaaaaatcaataatgaacttcataatataataaaaaacttaccaaatattgccctaaatgatgttcctattggaaatgatgaaacttcaaacaaggttattagaaaagagggaaaaataaaagaatttaattttaaaataaaatctcattttgagctgggagaaaaggaagacaaaatggattttaaaactgcttctaagttatcaggatcgagatttgttattttaaaagataaattggcccttttagaacgtgcgctcataaatttcatgttggatgtgcatactaataaattcaaatatactgaaatttctcctcccctaattgtcacagaagattcaatgtttggcactggtcaactacctaaatttgaagaagatcaatttgaaattaaacttgaaaatgctgatataaggaaatttttaatacctacagctgaagtttctttaacaaatttagttagagaaagtgtagttgacttaaaaaaattgcccataaggtatgtagcagcaactccatgttttagaaaagaagctgggtcctacggcaaagacactaagggcattatgaggcaacatcaattttataaagttgagttagtgagcatagtagaaccccagttatgtgacgatgaactaaatagaatgttgggttgtgctgaagaaattttaaaacaattaaatataccgtaccaagtagttttactatcatctggagacatgggatttagtgcagagaaaacttttgatatagaggtttggattccttatgaaaaaaaatatagagaaatatctagttgctcatcttgtggaaaatttcaagctagaagaatgagtgctaaatataaatcagacaagggattagatttcgtaggtacgttaaatggctcagggttggcagttggtagattgcttattgccctgatagaaaacaatcaaaataatgatggcacagtttctgttccagaagctctaaaaaaatacatgaataacttggaaaaaatataat

SEQ ID NO: 297324 - DNA, 786 bp, Unknown
  Bacterial polypeptide expressing nucleotide sequence isolated from the Sargasso Sea
aatgcataacataaaagatatcagaaataatattgaagaatttaaaaataaaatcaaagatagaaactttgataataatttggatcaattacttgaaattgataaagaaaatagaattctcatacaagataaagaaaaatatgaaatggaaaaaaaatccatttcgaaatcaaaagatgaaagtttatttgctaaatctaaagaaattacaattaaaattgatgaattaagcaataaacagaaagtagttaaagataaacttgataatatattgagctcaattcccaatataccattgaatgatgtaccttctggaaaaaatgaagatagtaataaagaagtaatcaaggttggcaatatacagaaatttaattttaaacctaaatctcattatgaaattggagaaaaacttaaaatgttagattttgacttagctacaaaaacaacaggtgctagatttgtttttgttatagacaaacttgctgcattagaaagagcaatttctaattatatgattgatacccatacaaagattaatggatatacagaaatttccccacctttattagctacagaaaataccatgtttggtacaggacaattacctaaatttgaaaatgaccaatttgaaataaaatttgatgataaaaatgatagaaaattcttaattccaactgctgaagttattttgactaacatggtaaaaaatcaaattattaatattaaatctttacctatgcgattggttgcatcaactccttgttttagaaaagaagctggaagcta

SEQ ID NO: 297325 - DNA, 1069 bp, Unknown
  Bacterial polypeptide expressing nucleotide sequence isolated from the Sargasso Sea
acttaaatcatccggagaagatacttctgctttaaagaaaactattgatttaacaaatgctgaattagaaccaaaggatttagactttcaagagattctaaattcattaaatgctttgcttttagatatacccaacctacctcatgaatcagtcccaaaaggaaaatctgaaaaagataacgttgtaattaaaaattatggatctatagatacctcaaataccttagaccatcttgaaatcacaaatgacatagatactgaattagctgcgaaactttcaggatctagatttgcagttttaaagggcgacttatcaaaacttcagcgatcattgattacctttatgcttgatactgcaattaagaatggctatgaagaatattatgttcctttcatggcaaatgaagaatcacttattggaacaggacagcttccaaaatttgaagaagatttattcaaagcctcagacaaactttatcttattccaacagcagaagttccattaacaaatctttacaggaatgaatttataaatgaaaaagatttacctataaaacttacatcacatacaccttgctttagatcagaagcaggtagttatggaaaagacactaagggtttaataagacagcatcaatttgaaaaaatagaattggttcaaattactcagccagagcaatctatgaaatgtcttcaagatttgctagctaatgcttgtgaaattctagataaattagaattaccatatcagattatagaattgtgcacaggcgatttaggtttctcgtctgctaaaacttttgatattgaggtttggatgcctagtcaaaataagtatcgtgaaatttcatcatgttctaattttactgattttcaagctagaagagctaacattaaatttaagaataaagatggaaaccattatgctcataccattaatggatcaggcttagctgctggaagatgtttaattgcgcttttagaaaataattataatggaagtgattcaattaaagttccatcttgcttaattcaatattttggatcagacacaataaaaattaattga

SEQ ID NO: 297326 - DNA, 1162 bp, Unknown
  Bacterial polypeptide expressing nucleotide sequence isolated from the Sargasso Sea
agagatctaatctcagcggttgaggagcttaggtcatcaaaaaataacatcaataaaagtattgccagtcctgatatttcagaaaatgacaagtctgacctaatttctgaggtaggaactatcaataaaaaactaaaagaatcagagcaatcactcaacgagctctctgagcaaaccaaaaagatgggcttagagattccgaatattcttgatgaatccgtacctgaaggttccagtgaagaagagaatatagaaataagatcatggggtaaattaccaaaatttgattttgaaccaaaagatcattccgaactgggcgaaagtaacggcggtattgattttgaatctgccgcgaaattatcgggttcaagattcgttgttatgaaggatgggtatgcaagacttcatagggctttgaagcaatttatgatcgatattcaaactgaagagaacggctatactgaaatgtatgtcccaaatattgtcagatcagattgcttggtgggcactggccagttaccaaagtttgcagaggatcaatataagattgaaaatgaggaaggtttgtacctaattccaacagctgaagttcctcttacaaatttaatcagagagagcattcttgaagagaatgaattgccaatcaagatgactgcacatacaccatgtttcaggcaagaagccggttcttatggaaaagataccaagggaatgattaggcaacatcaatttgaaaaagtagagcttgttcatatcgtcaagccggatgaatcttacaaagctcttgaggaacttacaaaaaatgcagaatccattctgcagaaacttaaattgccatatagattgatgctgttgtgctctggagatacaggcttctcagcagcaaaaacttatgatctcgaagtatggctcccctcacaggagacttatagagagatatcatcttgtagcaattgtgagtcgtttcaatcaaggcgaatgaaagctaggtataaaaattccaaatccaagcaaaccgattatcctcataccctcaatggttcagggttggctattggaagaacccttatcgctgttctagagaactatcaaaatgaggatggctccgtcaccattcctgatgttctaaggccgtatatgcaaaatcgagaaagaatctaat

SEQ ID NO: 297327 - DNA, 832 bp, Unknown
  Bacterial polypeptide expressing nucleotide sequence isolated from the Sargasso Sea
tcttgccacaaaaaccactggctcaagatttgtttttgttaaaaataaattagcattacttgaaagagctatttcaaattttatgcttgatatacatacatcaaaaaatggatatgaggaaatttcaccacctttattagcatcagaaaatacaatgttcggaactggtcaattacctaaatttgaaaatgatcaatttgaagtaaaattagaagagggaagtggtagaaaatttttaattcctacagcagaagttattttaaccaatattgtaaaagataaaattttagatcttaaaacattaccgatgagatttgttgcatctaccccatgttttagaaaagaggctggtagttatggtaaagatacaaaagggatgattagacaacatcaattttataaagttgaattagtaagtattgtggaacaaaataaatgtcttgaagaattagagagaatgacaaattgtgccacaggaattttggatttgttagagttaccatatagaaaaatgattttatgtagtggagatatgggatttagtgcagaaaaaacttacgatatagaagtatggttaccttcagaaaacaaatatagagaaatatcttcatgttcatcatgttcaacttttcaagcaacacggatgaaagctagatataaaaattcaaataaagaaacagtatttgttggaacgcttaatggaagtggtttagcagtgggtagaactcttattgctattttagaaaatttccagcaaaaggatgggtctataagtattccaaaagtgcttagaccttatatgaataatctagaaaaaattagtctgaattaa

SEQ ID NO: 297328 - DNA, 505 bp, Unknown
  Bacterial polypeptide expressing nucleotide sequence isolated from the Sargasso Sea
agtggcttctactgcttgttttagaaaagaagctggaagttatggtaaagatacgaaaggcatgttgagacaacatcagttttataaagttgaacttgttagtattgttgaacctgaaatgtgcgaaaaagaattaagcaggatgatatcttgtgccgagcatatacttaaggaactaaagctaccttatagaacagtaatgctttgctcaggcgatatgggtttcagcgcacaaaaaacaattgatttagaagtttggataccatcagaaaatacatatagagaaatttctagttgttctacttgtggtcaatttcaatcgagaagaatgaaagcaaagtacaaaaataaaaaccaaactgattttcttggtacgctaaatggttctggtcttgctgttggtagaacacttattgcaattatggaaaattatcaagattcagaaggaagagtgattattccagatgtgcttagaccatacatgagcaatatagataaaatttag

SEQ ID NO: 297329 - DNA, 662 bp, Unknown
  Bacterial polypeptide expressing nucleotide sequence isolated from the Sargasso Sea
gttaccaaaatttgaaaatgatcaatttgaaattttttttgatgataaaaatgaaaggaaatttttgatacctacagctgaagtaatacttaccaatatggttaaaaatcaaattttaaacatcaattcattaccaatgagacttgttgcttctacaccatgttttagaaaagaagctggtagttatggtaaagatactaaaggaatgatcagacagcatcaattttacaaagtagaattagttagtattgttgagaacaacaaatgtttagatgaacttgaaagaatgacaacttgtgcaacaaaaattttagatgatctaaaacttccttatagaaaaattattttaagcacaggtgatatgggctttagtgcagaaaaaacttatgatattgaagtttggcttccctctgaagaaaaatatagagaaatttcaagctgctcatcatgtggtacttttcaagcaacaagaatgaaggcaagatacaaaaataaggataataataccgaatttgttggtactttaaatggcagtggtttggctgttggaagaacattgatagcaattttagaaaattatcagactgaagatggatcaattataattccagatgtgctaaaaccatatatgggaaatatcgataaaatttctatcaattaag

SEQ ID NO: 297330 - DNA, 178 bp, Unknown
  Bacterial polypeptide expressing nucleotide sequence isolated from the Sargasso Sea
gatgagaaacaaaatttgtgaagaactcaataatacagatattggtaaattagttaatctatgcggatgggtagatagaagaagagatcatggtggtgtaatttttattgatttacgagaccatagtggattcttacaaataactattaaccccgatgatgggagcaatctatttaaa

SEQ ID NO: 297331 - DNA, 196 bp, Unknown
  Bacterial polypeptide expressing nucleotide sequence isolated from the Sargasso Sea
gttgtcccttcatggtggcatcgcatttggactagatagaattgttatgcttgtaacagatactacaaacataagagatgtgattgcattccctaaaactcaaagcgcgacatgtctattaacagatgctccaagcaaggttgataaagatcagcttgatgaacttaaaataattagtacacataaggaagaatag

SEQ ID NO: 297332 - DNA, 199 bp, Unknown
  Bacterial polypeptide expressing nucleotide sequence isolated from the Sargasso Sea
catgaaatctcattattgtggtgaaattacatcatctaatctcaaagaggaggttactatttgtggatggatacatagaagaagagatcatggaggagtaatttttttagatgtcagggatataaaaggtatatgccaagctgttgtgaatcctgataacaaagaatcattccaattagcagaatcaataagaaacgaa

SEQ ID NO: 297333 - DNA, 905 bp, Unknown
  Bacterial polypeptide expressing nucleotide sequence isolated from the Sargasso Sea
gctgcaggagatgttcggcgacctggggccgcacgggctgcaggccggcgacctctggttgacgctcgcgctctacgtggccgcgctgtggctgcgaatgttcgtccattacatgggccagtacctctacttgcaggcgaattcgatcccgctcttccgtttcgaggtgcaggcatacatggtgcagttcaagtacctcttcacctcgatgacgacgggcgtcgagatcggcgcggtgatcatgggcccgctggcgtgcgtggccaccctgctcttcctcacggccgtcgggcacagcctcgtcaagttcgtcggccacgcgccggagtggttctccaagttcgtcgccgggtggtgcttcgcgaccgtgtttgacgccgtgcttgtgctcgccgtggacttggtggcgggcaacttcgggtgctcgcggctcccgtcgtgccgcgacgactacacggccgcggcgtgcgattgcgtggttggcgacgcgttcaagttgtggagccggctcgagtcggaggatgccagcggcgtgatggggctcgtctacaccgtgatcatctactgcgcgatgggcatcgtgtcgctgggggcgtcgtatggtgggtccgatgaggggccgtacgttgcgcgcgaacctcgccccctcggtcggacgctcctcactccccaccacccctggactctcagtgtacttcttgcacgtccacatgaacgggcgcatgctggacgtgtaccggcgcgtccacagcccggcggatcgcttcttcgtgccgcacgacttcgagatgtcggggtcggagctcacggcgatcctcaccgcagcgcgggcgtggaaggggtccgccggagagaccatggtcacgaccgtctgcgattacgagttcgtcgaccccttgctcggc

SEQ ID NO: 297334 - DNA, 313 bp, Unknown
  Bacterial polypeptide expressing nucleotide sequence isolated from the Sargasso Sea
gatgagaaacaaaatttgcaaagaactcaataatacagatattggtaaattagttaatttatgcggatgggtagatagaagaagagatcatggtggtgtaatttttattgatttaagagaccatagtggatttctacaaataacaattaaccccgatgatggtgcagatctatttaaacaggcagaaactctaagaaatgaaacagtaataatggttagcggaattattaacgaaaggccaaaagattcaataaataaaaatgtaagtactggagagttagagcttaaagttaaagatttgcaaattctcaac

SEQ ID NO: 297335 - DNA, 466 bp, Unknown
  Bacterial polypeptide expressing nucleotide sequence isolated from the Sargasso Sea
aatgaacatatatcgatcccattattgctcagacctaaatatcaaaaatcttgatcaagaagtaaaattaagtggttggattgacacaattagagatcatggcaacttaatttttatcgatctaagagataattatggaatcactcaatgtgtcgtagatgcacaacacaatttatttagtgaaatatcaaaattaagtaatgaaagtgtaattacagtaagtggaagtgttgtagaaagatccaatgagactattaataaaagtatatctacgggcgaaatagaggtgaaaatcgacaactataaacttttatctgagtctgaagttttgccattaccagttaattcagatattgaatatggagaagaggtaagacttaaaaaccgctttcttgatttaagaagaaataaacttcacaaaaacatattattaagaagtaaaataatttcttcaattaggaaaaaa

SEQ ID NO: 297336 - DNA, 496 bp, Unknown
  Bacterial polypeptide expressing nucleotide sequence isolated from the Sargasso Sea
tatgcaaaatagatatcggaatattttggccaaggatttgaataaagataaggtaggccagtctgtgcgtttgagtggatgggtacatcgttttcgtgatcatggaggcgttatttttattgacttgcgtgatcatactggattgactcaagtggtatgtaatccagaagacaaagcagtgtttgaacttgcagaacgtttgcgttttgaatatgtggtctctgttgaaggtgtcattcgtttgcgtcctgaaggaactgaaaatactgatctttcttcaggttctattgagcttgtctgtaaagatttgatcattttaaattcaagcttgccattgccttttccgattgatcaacatgttgatggcgatgtgggtgaggaagtccgggttaagtaccgtttttttgatttaagacggcatgagatggcgactgctttgccagccaggtcaacgcttttaaattgtgtacgtagtgtgttgcaagaagcaggtttt

SEQ ID NO: 297337 - DNA, 378 bp, Unknown
  Bacterial polypeptide expressing nucleotide sequence isolated from the Sargasso Sea
aatgaaaagaacgcataaatgtaaccaagttactgcagccttaataggtcaagagattactatctctggttggattcataggaggcgggatcatggcggtgtaatcttttttgatgtaagagatgaggacggattggttcaagttgtctataacccagaatctaaagatatattttccttggcagagacttgtagaaatgaatttgtaatattctcaaaaggggttgtaagtgagagaccagtcggcacagctaatgataatttagtaacgggagaggttgagatcattgcttctgatcttcaaatcctaaatccatctttaccaattccttttcaattagatgaatattcatctgttggagaggagactcgtttgaa

SEQ ID NO: 297338 - DNA, 235 bp, Unknown
  Bacterial polypeptide expressing nucleotide sequence isolated from the Sargasso Sea
atgaacaaaagaacgcacaaatgtaatgaggtcacaaaagacctaataggtaaggacatatctattacgggatggattcgcagaaggagagatcatggtggtgtaattttctttgatattagagatgagactggacttgttcaggttgtttataatcctgaacttaaagagatctttggtcttgcagaaagctgtagaaatgaatttgttatttattcaaaaaggcaaaagtaag

SEQ ID NO: 297339 - DNA, 307 bp, Unknown
  Bacterial polypeptide expressing nucleotide sequence isolated from the Sargasso Sea
attgagtaaatatagaacacacacttgtggagaactaactttaaataacaaagatcaaacaataaagttatcaggctggataaataagaaaagggatcatggaaatctattatttttagatttaagagatcactatggactaactcagtgtgtgattgatgagggtaaaaaaattttcaaagaaatagaaaaacttccattagaaactgttttacaagttgaaggtaaagttttagttagagaaaaagatacaattaacaaaaatttaaataccggagaaattgaggtaggaattgaaaaaatttaa

SEQ ID NO: 297340 - DNA, 130 bp, Unknown
  Bacterial polypeptide expressing nucleotide sequence isolated from the Sargasso Sea
cgatatgcgccccctccccatgctggatggggcctgggagtggcgagattgctcatggtcctcaccggagcaggcaatgttcgcgaagtagtactgttcccaagagacaggggtcgtgttactccataat

SEQ ID NO: 297341 - DNA, 469 bp, Unknown
  Bacterial polypeptide expressing nucleotide sequence isolated from the Sargasso Sea
tatgaataattatcgcacacatatgtgttctgagctcacattaaaagatcttgatttaagtgtaactttatctggatgggtagatacaattagggatcatggtaatttattatttatagatttaagggacaactatggaataactcaatgtgtagtagatggaaaacataatttatttggagaaattagtaaaataaataatgaaagtgttatcaaaattattggtacagttgtcaaaagatcagatgaaactattaatatgaatttaaatactggagaaattgaagttcaaattgaaaaatttgaattattatcaaaatcaaacgtgctcccattgcctgtaaattcagatatagattatggtgaagaaattagattaaaatatagatttctcgatttaagaagaaataaattacattcaaatatattacttagaaataaagttatatcagacataagaaaaaaatga

SEQ ID NO: 297342 - DNA, 432 bp, Unknown
  Bacterial polypeptide expressing nucleotide sequence isolated from the Sargasso Sea
tatgaataaatatcgttcgcatttatgctcagatctatcaataagtaatttaagtgataaggtcaccttatctggttgggctgacaccattagagaccatggaaacttgttattcattgatctaagagataattatggcataacacaatgcgtaatagacggaactcactctctttttaatgaaattagcaaactgagtaatgaaagtgttataacgattgctggtgttgtagtaaaaagatccgaagaaactataaataaaaatctgctaactggtgaaattgaagttaagattgatgattataaattgctatcaaaatctgaaattcttccattacccgtcaattcagatattgaatatggtgaagagattagacttaaatacagattcttagacttaagaagaaataaacttcataaaaatatcttgct

SEQ ID NO: 297343 - DNA, 178 bp, Unknown
  Bacterial polypeptide expressing nucleotide sequence isolated from the Sargasso Sea
ggtagcgccccaggaattgatagaatagttatgttattagctgatgagccaaatatacgtgaagtaattgcttttcctatgaatcaacaagcaatggatttaatgatggaagctccagcagaaattaataaagaaagattagaagaattaggcttaaaactaatagagaaaaattaat

SEQ ID NO: 297344 - DNA, 436 bp, Unknown
  Bacterial polypeptide expressing nucleotide sequence isolated from the Sargasso Sea
atgaaatattctagctgcggtcatgtaaatcttgccaacgttgaagagccaacacgacttaggggttggattgatagcgtaagagatcatggcggtgtaatttttatagatttaagagatgaaacaggcataacccaggtagttgtagagcctgaaaataaagagttcttctctatggctgaaagatgtagatcagaatttgtgctatcagtggttggaaaaattagaagaagacctgacggaactattaataaacaaataccttcaggagaagttgaattattagtttcttcacttgaaattttatcagaatcatatcctctgccatttcagcttgatgactattcttcagcaggagaggaggtaagattaaaatatagatttttagatcttagacgatctgaaatgcaaaataacattagagcaagatcaaaag

SEQ ID NO: 297345 - DNA, 943 bp, Unknown
  Bacterial polypeptide expressing nucleotide sequence isolated from the Sargasso Sea
gtgacccgtgatggcgaaaagctggtgggaacgaaagtcactgtagcgggttacgctgaaaccgtaaggggcagaggagccatttgctttcttatgttaagggatggaacgggcaagattcaagcgttcctaaagaaggataacatggatgaggggtctttcgattcgattcagtcggcgaccagggagtcgacaattcaagtcactggtaaggtcgctatgaagagatcacccaaggtggcagaaggcgaaccagtccccccgccggagtttgaggttaacgtcgagtctggagatatcctggcccatgcagacacacccctcccacttggcgttactgatgacgtaagagtagggctagacgttcggctagacaaccgccacctggatgtaagaaggtcccacgtcaacgctatgttccaactaaggagcaaagtcctccagtacggtagggagcacttgatttccgagggcttccaagaaataaattctcccaagattatagcagctgctgcggaaggggggaccaacctatttccaatgaaatacttcgaaacggatgcctacctatcccaaagccctcagctgtacaaacaacttgcagttctcggcggacttgaaagggtgttcgaaattggtcctgcctttagggcagagaagcacgatacttacaggcatctcaacgagttcgtatcattcgatattgaaggagcatggatggatgatgaggatgtaatgggggtccaggaaaggatgatccaccacatctggaccagagtattagagaacgatcagacgcttatcgatgcagtgaacgattacagggcctcccagggaaatgagtcgattcaggtgactgttcccgagctaccatttcctcgaattccttattgcgaagcaatagagatagtaaaatcgggaggtggagaaatcccaatgggga

SEQ ID NO: 297346 - DNA, 908 bp, Unknown
  Bacterial polypeptide expressing nucleotide sequence isolated from the Sargasso Sea
ttctataatagcacatattgatcatggaaaatctaccttggctgacaggttgatacaggaatgtggtgctttggaagatagagagatgaaagaacaaatactagataacatggaaattgaacgagaaagaggtataactataaaggcacaaacggttagacttaaatataagcataaagacggaaatgtatttatattaaatctaatggatactccagggcatgttgattttgcttatgaagtatcaagatcattgtctgcatgcgaaggatcgttgttagttgtagactcctctcaaggcgtagaagcacagactctggctaatgtttatcaagcaattgaggtaaatcatgaaattattacggtattaaataaaattgacttaccagcatctgaacctaatcgtattagaaaacaaattgatgaagtaataggtttgcctggaaatgatgctatagaaacttctgctaaaacaggtcaaggtattaaagatgttctttcaaatttagtcgaaaaacttcctcccccaaaaggggacataaataaaactttaaaagccatgctggttgatagttggtatgatccttatctaggtatattaactttaattagagtagtagatggcaaaatcagtaaggggcagaaaattcgatttatgtctactggtgcaagttatactgtagaaggactaggtgtatttacacctaaaattgttcaggttaatcaactcggaccaggagaaattgggtttattactgcttcagtgaaaactgttgctgattgtaaagttggagatactgttacggatgacaaaaaccctgtttcaaaaatgctagagggctttaaaccatctgttccagtagttttttgtggcttgtttcccactgattatgctaatttttcagatt

SEQ ID NO: 297347 - DNA, 262 bp, Unknown
  Bacterial polypeptide expressing nucleotide sequence isolated from the Sargasso Sea
ttggataaaggcactgtaataaaaaaatataatcttagcagaaagcaaattgatttaattgataactacatactgaaattaacaaaaagcaaccaaatacataacttagtagggctttctacaattgatgttgcgtgggatagacatattaatgattcattacaattatctgaatttatttcgaaaaaaaatgcttcaataatagaccttggtactggtgcggggttaccaggagtgatcctacatatttttgggtatcaaa

SEQ ID NO: 297348 - DNA, 970 bp, Unknown
  Bacterial polypeptide expressing nucleotide sequence isolated from the Sargasso Sea
gatacacgacattctatagtagcaaatatacgaaaaaatgtatctaaacaattagaagctatagaaatttatccaaaaatgatcccagctttgaaaagaaatataaactatcaatataataagtcaaaaattagccctggagaatcagttggagttttaactgcacaaagtattggagaacgtcaaacgcaaatgactcttgatacatttcattcagcgggtgttgctattaaaactgttattacaggagttccaagattttcagaacttcttaatgctacaaaagatcctaaatctcgagtatgtaatgtttactttaataaaggtaatgatacaatatctaatcttagagatactattggtaatagtattgtacaatataaatttcaagatttatataaatcttatacaattaatacacagattacagaaaaaacatggtataaatcattcgaaatactatattcagacgattttagatcatacaataacaatatttcatttaaaatagacattcaaaagattcatgaatattctatagatataaaattaatagctgaaaaaatagaagaagaatatgatgatatttactgtgtattttctccaaattatatcggcgaattagatatttttatcaatacatctgaacttgagatcccaaacgataacgaatatatcaaaaaaaattacctaaacatctatattgatgaagttatcataaataatataaactcattactaatttgtggtataaaagatatagaagatatcttttataaaagagatgattcaaaatggatgattgaaacatatggttctaactttcaacgtctcatgtcacatccagatgttgataagtatagattaatatctaatgacatgtgggagatatataataatcttggaatagaagcagctcgtgagtttttaatagaagaattcaaaaatgttatttcatctgacggaactt

SEQ ID NO: 297349 - DNA, 184 bp, Unknown
  Bacterial polypeptide expressing nucleotide sequence isolated from the Sargasso Sea
catgggaggaagtgcaccaggtatagacaggatagtaatgttacttgcagacgaacctaacattagagaagttatagcttttccaatgaatcaacaagctatggatttaatgatggaagctccagctgaagttgatagtttaagattagaagaattaggtattaaattaatagataaaaattaa

SEQ ID NO: 297350 - DNA, 727 bp, Unknown
  Bacterial polypeptide expressing nucleotide sequence isolated from the Sargasso Sea
tatgagtaatataaaatatataagaaacttttctataatcgcacatatagaccatggcaaatcaactcttgcagataggctgattcaggtatgtggaggcttagaagatagagagatgaaagatcaaattctggataacatggacattgaaagagaaagaggtattacgattaaggctcaaacagtaagactgaaatataagcatgatgatggttttatttatacactgaatttgatggacaccccaggacacgttgatttttcatatgaagtttctagatccttatcagcttgtgagggatctctgttagttgtagatgcttctcaaggagttgaagcgcagacattagcaaacgtttatcaggcaattgatgctaatcacgagattgtaacagtacttaataaaatagatttgccagcatctgaaccggaacgagttagaaagcagatcgatgaagttattggattacctggtgcagatgcgattgaagtctcagctaaaactggtaagggtattaaaaatgttttaagtgatttagttaacactttgccatgtccagcaggagatgaaggtaaaccattaaaagcaatgcttgttgatagttggtatgatccttatttaggcattttaaccttaatacgaattgtagatggaaaaatcttcaaaggacaaaagataagatttatgtctacaaatgcaaattatactgtagaaagtttaggtgtg

SEQ ID NO: 297351 - DNA, 271 bp, Unknown
  Bacterial polypeptide expressing nucleotide sequence isolated from the Sargasso Sea
atgaataaatatagatctcatttatgtaatcagcttaatgaagatgactctggttcatctgtattaatttcaggctgggttcatagaaaaagagatcatggaaatcttctgtttattgatctaagagatcattatggaataacccaatgcgttattgataaaagtaatgaagatttactatttattgcggaaaaacttaaaagcgaaacagttatttctatatctggaaatgttgtgttaagagataatgaaaccataaatgaaaatcttg

SEQ ID NO: 297352 - DNA, 198 bp, Unknown
  Bacterial polypeptide expressing nucleotide sequence isolated from the Sargasso Sea
catatacctgacttaatgtataagcttttttctattgcaggatatgaaagaaaagatgtccatgaaaaattcagtggaatgattaatgccctaagttatggtgctcccccacatggtggaagtgccccaggtattgatggaatagttatgttacttgcaaatgaaaaaaatattatagaagtaacaatgtttccaatg

SEQ ID NO: 297353 - DNA, 583 bp, Unknown
  Bacterial polypeptide expressing nucleotide sequence isolated from the Sargasso Sea
tctggctatactcggtcaagcactcaaacattcaaataagccaaaaccttttgttgactctagatcactactaactaggaagcaaatcgatgaagccaaagtaccagtactttttgttgaacttcaatcaggacagaatggcactctgactccttacccgggggaaggtattggacaaacatggttgggggccgatggcgcgaccattactttggataggggcgtcttgaaagcgtccagaggcatgggggatgatttaatgggatcttcatcgtttatgccaccctggtcaaacatagacaaaaaaagtgaaaactatagtcgcgaacttaaccatattactgggaacaacgaaatttctaagcgtgtttttagctgtgatatcagaaaaaccaatgacgaagaaattataaaaatttggggcgtaaattttaaagtagaaaagtttgaagagagttgctcaaatggcagccttgcgttcaaaaacatctatcaaattgattcacaatggattgttcgcaggtctacacaataccacagcgaaacacttgggtccatgttaatagaaagacttgatcgatag

SEQ ID NO: 297354 - DNA, 765 bp, Unknown
  Bacterial polypeptide expressing nucleotide sequence isolated from the Sargasso Sea
tttgaatataaaaatgttagataaagaactctcagaaactgaatttaatgtttttaataactcattaaaagatggaggaactataagagggctatctgtcccaaaaaatgaatccatgacaagaaaattttatgacaaattaaatgaattcgttagatctattggtggcgacggaattatacctatatcaattgataaagacctttctggaattgaatttgaagatattaaaagcccaataagtaaatttttaagtgtagaacatgttgaaaaaatatttaatatttttaactcagattcagatgacgttattttaatttgtgcaggcaaaaaaaatattgttttagattgcctaggccaagtacgaaataagttggctaaagattttgaattaattgatgacgaaaaattaaactttttgtttgtaactgactttccattatttgaaaaagatttggaatctggcaattggacagctatgcatcatgttttctcatctccaaatgatgaaacaattaattaccttgatagtgacccgagtaaagttattggaaaccttttcgacttggtatgtaatggtgttgaacttggttctggcagtatcagaattcatgataaaaaaactcaggaaaaagtattttctattattggttataaagatgatcagatccaagatagatttggacctttgctagaatcatttgactatggcgctcctcctcatggagggatgggtttaggcattgataggttagttgcaacatt

SEQ ID NO: 297355 - DNA, 469 bp, Unknown
  Bacterial polypeptide expressing nucleotide sequence isolated from the Sargasso Sea
aatgaataaatatagaacacatctttgcaatcaacttagagaatcagatgctggtaagaatgtatctatttctggttggatacatagaaaaagagatcatggaaatcttgtatttgtagatttgagagatcattacggtattacacaatgcgtagttgataaaactaatgaagaacttttaaacactatagataatttacgttcagagtcagtcattaagatttctggtaaagttgttgagagagataaagaaacaataaatgtgtccatagatacgggaaaaattgaaatttcaatcgaacaactaaatgttttatcttcagcagatgaattgcctatgcctgtttttggtgatcaagaataccctgaagatataagattaaaatatagatttttagatattagaagagaggggttacataaaaaccttattttaagatcttcagtaatttcttatataaaagaacaa

SEQ ID NO: 297356 - DNA, 481 bp, Unknown
  Bacterial polypeptide expressing nucleotide sequence isolated from the Sargasso Sea
aatgattaaaagaacacatacttgcggagaacttaatatttctaatgaaggagatcaagtttctttaaatggctggatttcaaaacgaagagatttaggtggtttaatattttttgatcttagggatcgttatggtattacacaaattgtttttgacgataaaaaaaatgcagaatcatttaatgctgcaaaaaaattagggtttgaagatgttataggtatttctggtacagttataaaaagacccgatgaggctataaatgataaaatgaatactggtttaattgatattgctgtagataaaattattatttataatgaatctgaacctcccccctttgatattaatgatagatcttctgcttcagaagaacatcgcttaaaatttagatatttagaacttcgtacaaaagaacttcaacactatatgaaaacaagacacagggcaactcttgaagttagaaaatttttatcagaacaa

SEQ ID NO: 297357 - DNA, 145 bp, Unknown
  Bacterial polypeptide expressing nucleotide sequence isolated from the Sargasso Sea
ggttgcttggctgggacagataatatcagagacgtgattgcatttccaaagactacttctgcgacctctctaatggatgaaagtccgagccgagtagatttaaatcagcttaaagaccttgggttgaaaatagaagataattaag

SEQ ID NO: 297358 - DNA, 147 bp, Unknown
  Bacterial polypeptide expressing nucleotide sequence isolated from the Sargasso Sea
tacttgcaaaggaatctgatattcgtgaagttattgcttttccaaaaactaaaactgcttcagacttgttaacaggagcaccaagtgaaattgataaagaaagtttagatgaattacacttgaatatagatcgttcaagtagttaat

SEQ ID NO: 297359 - DNA, 499 bp, Unknown
  Bacterial polypeptide expressing nucleotide sequence isolated from the Sargasso Sea
gatgcacccataccggacccatacctgcggcgaattgcgcgaaacacacatcgatcaaaacgtacggatatcaggttgggttcacagcaaaagggatcacggtaatttggtgttcatcgatttacgcgatcactttgggttagctcagtgtgtaattgatgtctcaagtgaattgttctctgtagtcgaaacaacaaggccggagagcgtgctcactataaccggcgttgttgtacctaggaccgaagataccattaatcagactatcgagacggggagagtagaattacggatagaggaaatcgtggtggaaaaccagtctgaggtgctaccaatgcaggtagctggagaacaagagtttggagaagatgtgcgcctcaaatacagatttctagatctccggcgtgataaagttcacaaaaacattatactcagatccgaagttatctcgtctattcgtcgacgcatgactgaacagggctttctcgaaattcaaaca

SEQ ID NO: 297360 - DNA, 628 bp, Unknown
  Bacterial polypeptide expressing nucleotide sequence isolated from the Sargasso Sea
catgttacatactcgaaaatgcggtgaaataagcgaagaagattttggttctgagcaaaccctttgcggttggttgcaagatactagaaatttgggaggcatagccttccttcaactaagagatattactggtgtaattcagttgactcttttaaaaaagaaattaggagataatttcaaaccttgggcaagcataaacagagaatcaattgttcaagtaaccggaacagtcaaggaaaataaagaagcccccggcggtgttgagatgctaccagaaaagttggaagttttgaataacgcagaagccccattacctttaggagttattgataagattgatagtgagattgaaacaagattaaacgctagatatctagatttaaggaagaaagaaatatctgctaatttccagattagagcagcagtttccggtgcagtacatgatcatctacgcaaagaaaaatttctagaagttcatacgcctaaaattattgcctctgcaacagaaggtggaacgtccttgtttgaaatgaaatatttcgataaagtagcttatttagctcaatctccacaactttacaagcaaatgctcatgagtggtggtttggaaagagtttacgaagtagga

SEQ ID NO: 297361 - DNA, 820 bp, Unknown
  Bacterial polypeptide expressing nucleotide sequence isolated from the Sargasso Sea
ttgaaagaacattcttcaattgcagtagttggaaaaactagaaaaaatgaaaaatccccaaccggaatagaagtagttccaagtgagatgcgagttttctctgaggttgaaaaaattcctccatttgaaccatatgcaaaaactgtaaaaaatattgatactagattagaagtacgtgcaattgatttacgacgaaatgttttacaaaaaatatttcttgcaagaagtgtcacattaaaagcattaagagattatttgggaaaagaagattttgttgaagttaatactccaaaaatgattgctactgcaactgaaggtggtgccgcattatttccaatattttactacaacaaagaagcatttttggctcagagtccgcaactttacaaagaacaattaacaatgagttttgaaaaagtttttgaaattgctccgatatttcgagcagaaccttctagaacaaaccgtcatttgtctgaagcaatttcaatagattttgaggaggcatatgttgattacaatgatataatggatagaattgaagaactaatcaaaagctgcatttcaactgttcaaaactttgtaaaagaacatcctgatgttgagtttactgtacctgaggtacctgataaaatacctcgttacaaatatgcagaactaattgaaaaaatgcaagctgcaggagtaaaggcacaatggggtgatgatttgtatccaaaaaatctacaaaaaattggtttgagtggtttttactttattgttgattggcctatgggccaaaagccattttatgtaaaagtaaagaaggatgatccaaaaa

SEQ ID NO: 297362 - DNA, 218 bp, Unknown
  Bacterial polypeptide expressing nucleotide sequence isolated from the Sargasso Sea
aagaattgaaaagaaatctgaattagaagataggatgaaaaataaaggaatgaaaaccgaagcatttggttatcatttgaacatatttgatttcggtgtacctcctcatgccggatgtggtattggtcttgaacgactaatgatggcgttaaccggaactgaaaatattcgagatactacattttatccaagagatgtagaccgtcttacgccttaat

SEQ ID NO: 297363 - DNA, 157 bp, Unknown
  Bacterial polypeptide expressing nucleotide sequence isolated from the Sargasso Sea
gatgagaaacaaaatttgcaaagaactcataaacacagatattggtaaattagttaatttatgcggatgggtagatagaagaagagatcatggtggtgtaatttttattgatttaagagaccatagtggatttctacaaataacaattaaccccgat

SEQ ID NO: 297364 - DNA, 483 bp, Unknown
  Bacterial polypeptide expressing nucleotide sequence isolated from the Sargasso Sea
ctgtacctgaggtacctgataaaatacctcgttacaaatatgcagaactaattgaaaaaatgcaggctgcggaggtaaaggcacaatggggtgatgatttgtatccaaaaaatttacaaaaaattggtttgagtggtttttactttattgttgattggcctatgggcccaaagccattttatgtaaaagtaaagaaggatgatccaaaaatatctgaatcctttgatttgatgtggggggatttggaactatcatctggcagtacaagaattgaaaagaaatctgaattagaagataggatgaagaataaaggcatgaacaccgaagcatttgattaccatcttaacatatttgattttggcgtgcctccacatgctggttgtggtattggtcttgaaagattaatgatggcgctaaccggaactgaaaatattagagacacaacattttatcctagagatgtggatagactaacaccataag

SEQ ID NO: 297365 - DNA, 702 bp, Unknown
  Bacterial polypeptide expressing nucleotide sequence isolated from the Sargasso Sea
catgagggacagtacaaactgggagccaactgcttatcgcacgcataccattggtcaagtcgtcgaggcaggggagtccctagtcggttcggaggtaactgtagcgggatatgctgagacggtcagggggaggggtgcaatttgcttcctcatgcttcgtgacgggactggaaggattcaggcctttctcaagaaagataacatggatggtgatttgttcgactctatacaatcctcgacaagggagtcgacgattcaaattaccggaaaggtagcaaagaagaggcctccgaaggttcccgatggagagccattgccaccgcccgagtacgaagttaatgtcgaggatgggatgattcttgcagtctcggaaactcccctccctgtgggggtgactgacgatgttaacgtaggtcttgacgttaggctagacaacaggcacttggacctcaggagggcccatgtgaatgcgatgttccaactcagaagcaaggttcttcagtatggaagggagcatctaatcaaagagggattccaagagattaactctccaaagattattgctgcagcagcagaaggcgggactaatcttttcccaatgaaatacttcgagactgatgcatatctctcgcagagtcctcaattgtataagcaacttgcagtactcggaggtctcgagagagtattcgagattggagctgc

SEQ ID NO: 297366 - DNA, 372 bp, Unknown
  Bacterial polypeptide expressing nucleotide sequence isolated from the Sargasso Sea
tatgcataagtatagaactcacaaatgtcacgaattaagaattgaaaacgtacaggacagtgtgaaactatcaggctgggttcacagaaaaagagaccatggtcaattaatatttatagatttaagagatcattatgggttaacacaagttgtagttgattcatcaaataaaaacttctctgttgttgaaaatgtatctctagagagcgttattacaataagtggaacagtagttgaaagatctgaggaaactataaataaaaatcttcctacaggaaatattgaagtaaatctttctgaattaaaaataatctcaaaatcaaatacattaccattacaggtaaattcagacgaagattatggagaggaaac

SEQ ID NO: 297367 - DNA, 396 bp, Unknown
  Bacterial polypeptide expressing nucleotide sequence isolated from the Sargasso Sea
tatgaaaagttatcgaactcataattgtgcggagctaaacctaacccacgtgaatgaggaagttacattatcgggctgggttcatagagttagagatcatggtggggtactattcatagatttgcgggatcattatggaataactcaagttgtaatagatccagatagtaaagatttttccactgctgaaagctataggtcagagtggtgtgtcaagatcaaaggtatagttaaagctcgtgaagcagatttaataaacaagagtttgaaaactggtgatattgaagtttttatagaaagaacagaaattatctcaactgcagaagacctgcctgttccggtctttggggaacatgattatccggaggaaacgcggctgaagtataggtttattga

SEQ ID NO: 297368 - DNA, 820 bp, Unknown
  Bacterial polypeptide expressing nucleotide sequence isolated from the Sargasso Sea
cagtcggcaacaagggagtcgacaattcaagtcactggtaaggtcgccatgaagagagcgccgaaggtggctgaaggcgagcctctcccaccgccggagtttgaggtaaacgttgagtctggtgatatcctggctcatgcaggcactccccttccactcggcgttactgatgacgtccgtgtggggctagacgttcggctggacaaccgccacctggatgtaagaaggtcgcacgttaacgctatgttccagctaagaagcaaggtcctgcagtatggtagggagcacttgatttcagagggcttccaagaaatcaattctcccaagattattgcggctgccgcggagggagggaccaacctatttccaatgaaatacttcgaaacggacgcttacctatcccaaagccctcagttatacaaacaacttgccattcttggcggactagagagagtgttcgaaattggtcctgcctttagggctgagaagcatgatacttacaggcacctcaacgagttcatatcattcgatattgaaggagcatggatggatgatgaggatgtaatgggggtccaggaaaggatgatccaccatatctggactagggtattggaaaacgatcagacacttatcgatgcagtaaacatgtacagggcctcccagggtaatgacccaatccaggtgactattcctgagctaccatttcctaggataccatattgcgaagcaatagatattgtaaagtcaggaggcggagaaatcgaatggggtgacgacatagaaagccaccattgtgacattattgcggcacagcatcccg

SEQ ID NO: 297369 - DNA, 138 bp, Unknown
  Bacterial polypeptide expressing nucleotide sequence isolated from the Sargasso Sea
atctagcccagaaggggccagagactttttagttcctagccgtcttcatcctggaaaattttatgctttaccccaggccccccaacaatttaaacaaatgattatgattgctggttttgataaatattttcagattgc

SEQ ID NO: 297370 - DNA, 706 bp, Unknown
  Bacterial polypeptide expressing nucleotide sequence isolated from the Sargasso Sea
aaaatgattggaactgaattaggagatctaaggagaactcattattctgttgaattaagttcattggaagaaggcactgaagtaattgtaatgggctgggttcttacagtacgtggtcatggaaatattgtctttggaacaattcgtgataaactaggaaatattcaaattattacaaaaagtggagaatgtgatgatgacattcgtgaaaaactttcttcattgaaagaacattcttcaattgcagtagttggcaagactagaaaaaatgaaaaatcttctactgggatagaagttgtaccttctgaactacgcgtgttttcagatgtagagaaaattccaccatttgagccatatgcaaaaactgtaaaaaatattgatactcgattagagattagagcaattgaccttagacgaaccgtattgcaaaaaatatttcttgcaagaagtttaacattaaaatctattcgagactatttgtcaaaaaaagattttgttgaaatcaataccccaaaaatgattgcgactgccactgaaggaggagccgcgttatttcctattttctattacaataaagaagcattcctagctcagagtcctcaattatacaaagaacaattgacaatgagctttgaaaaagtttttgaaattgcaccaatctttagagctgaaccatcaagaacaaaccgacatttatctgaagcta

SEQ ID NO: 297371 - DNA, 586 bp, Unknown
  Bacterial polypeptide expressing nucleotide sequence isolated from the Sargasso Sea
ttgagtaaatttagaacacatacctgtgaagagttaaataaaaagcatattgataaaaaggttttgttatctgggtgggttcataaaaagagagatcatggaaatttgttatttattgatttaagagataattttggacttactcaatgtattatagacaaagacaataaaaatttttctcaattagaaaaaatatcacttgagactgttattaaaattgaaggcagtgttctagctagaacatccgatacagttaacaaagaattatcaactggagatattgaggtaaaaatagataaattcgaagtacttggaaaaacaaaagagcttcctttgccagtattttctgatcaagaatattctgaggagataagattaaaatacagattcctagacttaaggagaaagaaaattcacaataatattgtattaagatcaaaaataatttcttttataagaaaagaaatggaaaaacttggatttaatgaattccaaactccaattctaacatcatctagcccagaaggtgctagagattttttagtacccagcagattaaatccaggaaaattttatgcattgccac

SEQ ID NO: 297372 - DNA, 172 bp, Unknown
  Bacterial polypeptide expressing nucleotide sequence isolated from the Sargasso Sea
tgcatcgataggattgtaatgcttttagctcaagaaaagaatatcagggaggtaatcttattcccaatgaatcaacaagcacaagacctcatgatgcttgcgccagcagaagttgatgataagactttggatgagctgagcctaaaagtaatacctaacgaagaagattaag

SEQ ID NO: 297373 - DNA, 454 bp, Unknown
  Bacterial polypeptide expressing nucleotide sequence isolated from the Sargasso Sea
attgaacaaatttagaactcacaaatgcaacgaattaagaaaagaaaaagttggggatgaggtaactttatcaggttggataaataaaaaaagagaccacggaaatcttttatttatagatttaagagataattatgggataacacagtgtattatagataaagaaaattctaactttaaaaggttagaaaaaatgcaattagaaaccgtaattaaaattgatggaaaagtagttgaaagatcaaaagactcaattaacaatgatatcgaaactggggaaattgaagttgcaatcaaaaattttcaagttcttggtgaatgtaaggaacttcctttaccagttttttctgatcgagagtatgcggaagaagtaagacttaagtatcgatttttagatttaagaagaaaaaaaattcatgaaaatattatattaagatcaaaaagtaatttcatt

SEQ ID NO: 297374 - DNA, 574 bp, Unknown
  Bacterial polypeptide expressing nucleotide sequence isolated from the Sargasso Sea
tatgataagatcacataattgcggagaattaaaattagctgacgtaaataaaaaagtaattttatctggttgggtccaaaaaataagaaataaaggtttcatcatatggatagatctaagagatagatatggaataacacaattggtttttgatgaaaagagatctccaaaaaaagtttttgatattgcaaaaaatattttaagagaatttgttattcaaatcagtggtcacgttatagagagagaatctaaaaatgataatataagaacaggaagtattgaggtattggttaattccattgaaattcttaacccatctaaaactcccccttttacaatagaggatatttcagatggaggagatgaattaagaatgaaatatcgatatctagatattagaagaaataaaattaaggaaaacttaatttttcgtcataaggtttcaatggaagttagaaaatatttgagtaataatggtttcattgacattgaaactccttatttaataaaatcaacccctgaaggagctagggatttgattgttccgtctagaatgaatccaggagaattttat

SEQ ID NO: 297375 - DNA, 616 bp, Unknown
  Bacterial polypeptide expressing nucleotide sequence isolated from the Sargasso Sea
aatgaataaatatcgctcacacttatgttcagatttatctattaataatctaggagaaaaagtaactttatctggatgggcagatacaattagagatcatggtaatttattatttattgatttgagagataattatggaattacacagtgtgttatcgacggaactcaatctatatttgaagaaataagtaaattaagtaatgagagcgttttaacaattagcggagaagttgttaaaagatctgatgagacaatcaacaaaaatcttaaaacaggtgaaattgaaataaagattcaagattacaaaattttatctaaatctgaaattcttcccttacctgttaattctgatatcgaatatggagaagaaataagattaaaatatagatttttagatttaagaagaaataaattacacaaaaacattattttaagaagtaaaataatttcagatattagaaaaaaaatgatagataaaaactttattgaatttcaaactcctatccttacttcatcatccccagaaggagcaagagattatttagtgccatctagaatacatcaaggtaaattttatgctctttcctcagcacctcagcaatttaacaattattaa

SEQ ID NO: 297376 - DNA, 247 bp, Unknown
  Bacterial polypeptide expressing nucleotide sequence isolated from the Sargasso Sea
aatgcatatttatagaacacataattgtagcgaattaagactaaaggataaaaataaaactgtaagactatctggatgggttcatagaaaaagagaccatggaaatctcctttttattgatttaagagaccattatggaattacacaggtcgtattagataaaaaaaataaacattttcctacagccgaaaaaacatcttcagaaagtgtaataactgtgactggtaaagtaatgccaagatctaaa

SEQ ID NO: 297377 - DNA, 487 bp, Unknown
  Bacterial polypeptide expressing nucleotide sequence isolated from the Sargasso Sea
ttgcatagatatagaactcatacttgtaacgaattaaatttaaaggataaaaatcaaaaagttattttatctggatggatcaataaaaagcgtgatcatggaaatcttctttttatagatttaagagataattatggtctaactcaatgtgtaatagataaaaatagtaaatcttttagtgaattagaaaagatacagttagaaagtgttattaaaattgagggaacggttgttgcaagaacaaaagaaactatcaacaaagaattaaaaacaggtgagattgaaattaagattttaacatttgaaatattaggacgatgcaacgaattaccgatgccagtttttactgatcaagaatatgcagaagatattagattaaaatatagatttttagatttaagaagaaaaaaaaatcatgaaaatattattttaagatctaaaataatagcattcataagatctgaaatgataaaacaaggattctaga

SEQ ID NO: 297378 - DNA, 614 bp, Unknown
  Bacterial polypeptide expressing nucleotide sequence isolated from the Sargasso Sea
attgtataaggaatggggttgcggagaaattggcatagaccaagagaagaatgagataactattgctggttgggtagattcttggagagaccacgggtcccttttatttattgatttaagagattccacaggaaccgttcaagttgtgtttgataaaagcaagagcaattctaatcatcagattgcttcatcttttcgagccgaatgggtagttcagataaagggaatggtagagaaacgaatagaaggagcagaaaatcctaatatttcaactggttacattgaagtgcatgccactgaaattaacgtgttaaatgaatcaaaaacacctccttttgaagtgaattctgagaatatagacgagaccacaagactgaggtatagatttttagatttaagatcatcaagaatgcagaataatattaggctgagaaatgatgtgattttatcaatttgcaattttttaaatgataaaaattttgtgcatattgagacaccaatactaattaagagcaccccagaaggagcgagggattatatagtgcctagcagagtgcatccaggtgaattttatgcattacctcaatctcctcaacagattaaacaaatgctta

SEQ ID NO: 297379 - DNA, 529 bp, Unknown
  Bacterial polypeptide expressing nucleotide sequence isolated from the Sargasso Sea
tgaaactgttaaaaactttgcaaaagaaaatgaaaatgtagattttcaaataccagatatgcctgataaaattcctcgctacaaatattctgaattgatagaaaagatgcaggctgcaggggttaagacacaatggggtgatgatttgtatccaaaaaacctacaaaaaattggattgactggattttatttcattattgattggccaatgggcccaaaaccgttctatgtcaaagtaaagaaagatgacccaaaaatatctgaatcctttgatttgatgtggggtgatttagaattatcttcaggaagtacccgtattgaaaaaaaatctgaattagaagatagaatgaaaaacaaaggcatgaatgtagatgcatttggatatcaccttaatgtttttgattttggtgtacctccgcatgcaggttgtggaattggtcttgaaagattgatgatggcacttactggaactgaaaatatccgagatacaacattttatccaagagatgttgatagactaacaccgtag

SEQ ID NO: 297380 - DNA, 826 bp, Unknown
  Bacterial polypeptide expressing nucleotide sequence isolated from the Sargasso Sea
atggagatttcaagaactcatcttattgaagagcttaattcatcaatggaagggcaagatgttctgtttggtggatgggtagttgatctccgaaaacttggaaagatggcatttttgacggttagagatgtaacaggaatgtgccaagtgatagtgaaaggagattcaatgaatttacttgaaggattaaacagacagagcgttgtaagaatttcaggaaaagttcaatcaagtaaagctaaagattttgattttgaaatatctgcaactgagattcaaatccttgcaaaagcagaatatccattacctatagatccaatcggaagattagaaagtgatatcgataacagattaaactcaagggctcttgatatgagaaaccagaaaactgcatcaattttcaaattgagaagtcaagttttggcatcaattagagagaccctcatcaaaagaaaattcatagaaatcaatacaccaaaaattattggaagtgcaagtgaaggaggagcagatttgtttagtctagattattttggaaaacaaggatatctagcacaaagcccgcaattatacaaggaacaaatgacaataggtctagaaagagtctttgaaatttcatcattttatagagcagaaaaatctcatacaggaagacatctcagtgaatttactagcgtagacattgaagctgcaatgatggattatacagatgtaatggatgttttagaatcaattgtagtggatgttttcaaaaatactgctgaaaattctaagacagaacaaaaagagatggacatgaaatcaaagttccaaattcaccattgag

SEQ ID NO: 297381 - DNA, 403 bp, Unknown
  Bacterial polypeptide expressing nucleotide sequence isolated from the Sargasso Sea
aatgcataaatatagaacacataaatgtaatgaattaagtattgaaaatgtgaaggaccaggtaagattatcaggttgggttcataggaaaagggaccatggacaattaatatttatagatctgagagatcattatgggttaacacaagtcgttgttgactcatcaaacaaaaatttttctatatttgaaagcttaccattagaaagtgtaataactgtgtcagggatggttgtggaaagatctaatgaaactattaatgataatttaccaacaggtaaaattgaaattaatttgtctgaattagaaattatttcccaatcaaaagcattacctttgcaagttaattcagatgaagattatggtgaagaaactagattaaaattcagaatatttagattaaga

SEQ ID NO: 297382 - DNA, 682 bp, Unknown
  Bacterial polypeptide expressing nucleotide sequence isolated from the Sargasso Sea
gaaaaagtttttgaaattgcacccatattcagagctgaaccatctagaaccaataggcatctatctgaagcaatatcgattgactttgaagaggcttatgttgattataatgatgtgatggatagaattgaagatttgattaaaacatgcgttgaaactgttcaaaattttgcaaaagaaaatgaaaatgtagattttcaaatacctgaaatccctgaaaaaatccctcgttacaaatattctgaattgatagaaatgatgcaagccgcaggggttaaggcacaatggggtgatgatctatatccaaaaaacctacaaaaaattggattgactggattttatttcattattgattggccaatgggcccaaaacctttctatgtcaaagtaaagaaagatgacccaaaaatatctgaatcctttgatttgatgtggggtgatttagaattatcgtcaggaagtacccgtattgaaaagaaatcggaattagaagatagaatgaagaataaaggtatgaatgtggacgcatttggatatcatctcaatgtttttgattttggtgttcctccacacgctggttgtggaattggtcttgaaagattgatgatggcactaactggaactgaaaatatccgagatacaacattttatccaagagatgtcgatagactaacaccgtagg

SEQ ID NO: 297383 - DNA, 959 bp, Unknown
  Bacterial polypeptide expressing nucleotide sequence isolated from the Sargasso Sea
gcaaagaatcgaactagccgataaatttgaaaatatgggcgctcagatgatcaaagaagtagctaataaaacaaacgactctgctggagatggaacaacaacatcaactgtattgtgtcaagccttagctaccgaaggaatgaaagcagtagcagctggattaaacccaatggatttaaaaagaggaatggatgccgctacagatgcaattatttctgagcttcaaaaaaactccaaaattgtaaagtctgataaggaagtccaacaagttggaactatcgcttcaaatggtgatcgtgaagttggaggaatgatatctgaggcgatgcaaaaagtaggcaaagagggtgtcatcactgttgaagaagccaaaagtttagacacagaattagacgttgtagaaggtatgatgtttgataggggctatttaagtccatattttgtgactaatgccgataaaatgaaagcagaaatggaagattgcttaattctactacacgaaaaaaagctagctagtcttcaaccaatgttaccattattagagtcagttgttcagtcaacaaagccattacttattatatctgaagatgttgaaggtgaagcgctcgctactttagttgtaaacaaactacgtggtggtttaaaaattgccgctgtgaaagctcctggatttggtgatcgaagaaaagcgatgctagaagacattgcaattctaactggtggacaggtcataagtgaagatttaggtatcaagcttgagtcagtcaccatggatatgcttggaaaagcaaagagagttgtcgtagataaagagaactcaacaattgttggtggcgcgggtaagaaaaaagatatcgaagcgcgttgtgatcaaataagaaaacaaatcgatgagacaacctctgattacgatagagaaaagttacaaagaaagattagcaaaactcgctggcggtgta

SEQ ID NO: 297384 - DNA, 762 bp, Unknown
  Bacterial polypeptide expressing nucleotide sequence isolated from the Sargasso Sea
ataatacttcaagcaagaataacctcaagtagattaaaaaacaaagttttaaaaaaaattaacggtaaaacaattattgaaattatgattagtagattaaaattttcaagattttataattcaattatagttgcaatcccaaataataaaaaaaatttacatctctatgagtttttaaaaaagaaaggcattaatgttcaaaaaggtagtgaaaataatgttttggataggtattatcaaatagcaaaaaaaaataaaattaagaatataataagattaacaagcgactgtccattagtagattataaaatagtagaaagattatcacagagtttttttaaaaaaaaactaaaccatataacaacctcaagtaattttgctgagggactagactgtgaaatgtttgattttaatactttaaaaaaaattcataaaaaagcaaaacttaaatccgaaaaagaacatgtcactttattcattaaaaacaataaaaaaatttttaaaacagataaaatcgaacctaaatttaatcaatcaaaatataggtttactctagacgagagtaatgactttattgtaattaaaaaaattattaaaaagtttccacaaataactaaaaatgaatatatttcatctgaaaagattgttaattttttagagaaaaataaaaaaataaatcaaattaattcaaatatcataaggaatgagggtttattaaaatcttataaaaaagatggaatcaaaattttattcttatctcaa

SEQ ID NO: 297385 - DNA, 760 bp, Unknown
  Bacterial polypeptide expressing nucleotide sequence isolated from the Sargasso Sea
ttattttgggaaaaaagcatacttagctcagagcccacaattatacaaagaacaaatgacaattggattagaaagagtgtttgaaatttcatcattttttagatctgaaaaatcacatacaggaagacatctaagtgaatttacaagtgtggatattgaagccgcaatgatggattatacagatgtcatggatatcttagaatcaattatcgttgatgtattcaaaaatacatctgagagttgtaaaaccgagcaaaaagaaattgggcatgaaattaaagttccgagttcaccatttgaaagaatcacatacacacaagcattaaaggaattaagtagtttagatattaaattagaatttggggaagatttgcaagatgcacatctacgtaatttaggagagaaacatgcagaatttttctttctgacagactggccaatgaaactaaaacctttttacattcatgaaaaagatgatgacccaacaatatcacgctcgtttgacttacagtatggttatttagaattatcttcaggtggaagaaggctacatgacccagagcaattgaaatctagattaaaagaacagaacttagatcctgccagttttgaagaacatctaaaaacatttggatggggaatgccaccacactcaggttggggtatggggttagatagactcatgactgttttaactgcaattgataatgtaagagaagtaactttgtatccaagagacccagataggctcaaaccataa

SEQ ID NO: 297386 - DNA, 616 bp, Unknown
  Bacterial polypeptide expressing nucleotide sequence isolated from the Sargasso Sea
catggagatttcaagaacgcaccttattgaggatcttaacccatcaatggaaggacaagatgttctgtttgggggatgggtagttgatcttcgaaagctaggaaagatggcatttttgactgttagagacgtaacaggaatgtgtcaagtgatagtaaaaggagattcaatgaatttacttgaaggattaaacagacaaagcgttgtaagaattttaggaaaagtccaatcaagtaaagctaaagattttgattttgaaatttctgcaactgagatccaaattcttgcaaaagcagaatatccattacctatagatccaattggaagactagaaagcgatatcgataacagattaaactcaagagctcttgatatgagaaaccaaaaaactgcatcaattttcaaattgagaagtcaagttttagcatcaattagagaaaccctcatcaaaagaaaattcatagaaatcaatacaccaaaaattattggaagcgcaagtgagggaggtgcagatttgtttagtcttgattatttcggtaagcaaggatatctagcccagagtcctcaattatacaaagaacaaatgaccataggtcttgaaagagtatttgagatt

SEQ ID NO: 297387 - DNA, 409 bp, Unknown
  Bacterial polypeptide expressing nucleotide sequence isolated from the Sargasso Sea
catgtcagacaaaagaaaaagtctaggtaggggcttagatgccttacttgggcaatcagtcgaagccgaaccaaaaaacaataaacaaggactgacagaaattaaactagagcaaattggaccaggcccatttcaacctagaaaacagattgatgagccccaacttaaagagcttgcacaatcaatccaagcacaaggcgtgatccaaccaatcgttgttagagagagagcggtaacagactctcatacgggcgttaaatttgagatcattgctggtgagagaaggtggagggcatcacaaattgctggcttagaaaccattccagcagtggtgagagccatcgctgactcagaagcagttgctgttgccttgattgaaaacatacaaagagagaacctaaacccgctt

SEQ ID NO: 297388 - DNA, 364 bp, Unknown
  Bacterial polypeptide expressing nucleotide sequence isolated from the Sargasso Sea
tttggataaaggtactgtaataaaaaaatataatcttagcagaaagcaaattgatttaattgataattacatactaaagttaacaaaaagcaaccaaacacacaatttggtagggccttctacaattgaaattgcctgggatagacatattaatgattcattacaattgtctgattttattacgaaaaaaaatgcatcaataatagaccttggtactggtgcgggcttaccaggggtgatcttacatatttttgggtattcgaatatactattgattgactcaaaaatgaaaaaaataaactttattaaagaatttgcgcacgagcaaaatatagaaataaaaaactatttgtacaaggattga

SEQ ID NO: 297389 - DNA, 179 bp, Unknown
  Bacterial polypeptide expressing nucleotide sequence isolated from the Sargasso Sea
cattgcttttggctttgatagattaattatgattttatcaggatcgagcaatatccgagatgttattgcatttccaaaaaccacatcagcatcttcattgatggatgaatctcctagctctgtatccactgagcaattatttgatttaaacattaatataattgataaaaagaaataat

SEQ ID NO: 297390 - DNA, 502 bp, Unknown
  Bacterial polypeptide expressing nucleotide sequence isolated from the Sargasso Sea
ttgaataaatatagaactcataagtgtaatgaattaagaaaagaggatgtagataaaaaaatttccctttcaggctggataaataaaaaaagagaccatgggaatttattatttattgatttgagagataattatggaattacccaatgtataattgataaagataataaatatttttctgatttagaaaaaatgcaattagaaacagtaattaaagttgaagggaaagttgttaatagatctaaagaaacaattaattccgaaattgacactggtgaaatcgaggttgttattgagcagcatgaagttttaggcacttgtaaagagctccctatgccaatctttagtgatcaagaatatgcagaagaaataagattgaaatatagattcttagatttaagaagaaaaaaaattcatgaaaatattattttaagatctaaggttatttcatacatccgaaatgaaatgactaaattaggttttttagaatttcaaacaccaa

SEQ ID NO: 297391 - DNA, 177 bp, Unknown
  Bacterial polypeptide expressing nucleotide sequence isolated from the Sargasso Sea
ttgctccaggcattgatagaatagtgatgttgctagcagaggaacccaatattagagaagttattttatttcctatgacaggaaaagctgaagatataatgatgggagccccatccgaagtagataaaaatcaattaaatgagttaggtcttaaattagataccaaaataaaataac

SEQ ID NO: 297392 - DNA, 795 bp, Unknown
  Bacterial polypeptide expressing nucleotide sequence isolated from the Sargasso Sea
tggacttcctgggtcgtgtggacttccaggtcaagctcaatgggcagcgcatcgagacaggcgagatcgaggtggtgatgcgacaagtggaggcagtgcaggatgcactggtgattctggtcggtggagggagctcaggctcccctgcattcctggtcggatatgcagtgggtgcggatgcgacagaggcatcgctgcgcgaggcatgtgagaaggcactgccagggtacatggtgccatcggctttcgtggtgctggaggcatggccactgaatgccaatggcaaggtcgatcgcaaggctctgcctgctcctgagggggtatccgaggaggtggtggcaccacgcaccgcagcagagcagagtgtggctgatgcagttgcacaggtgctaggcacagcctctgtgagtgtcgtggcgcagctgacacgtgcagggctgacatcgctgatggcggtgcggctgtcgtcgctgctgagcaggcgagatggtgcagcagtgacgacagcatcgatcctgcagcatgggacgatcgcagcgatcgcgcagaccatgcaggacgacgatgcaggtgggcagatggctctggtgcgacacgagcgatcggaggagggcgagcggctgcctctgtctcacgagcaggagcagatgtgggtgctgtaccagctcgatcgtgagtcgggagtgtacaatgtgcctcacgagctgcggctgcgaggcacgctgcacatggatgcactggtgggtgcagtgaaggcagctgcagggcgacacgaggtgctgcgcatgcagtagg

SEQ ID NO: 297393 - DNA, 226 bp, Unknown
  Bacterial polypeptide expressing nucleotide sequence isolated from the Sargasso Sea
catgcgcagcaacggttgcggcgacctgcgcgaacagaacatcgatcagcaggtgcaactgtgcggctgggtagaccgacgccgtgatcacggtggggtgatcttcatcgacctgcgggaccgcagcggcacggtgcagatcacggtggacccagatctgggggccgacgccttcgccgtcgccgagcatctgcgcagcgaaaccgtgctgcaggttgaaggcaaa

SEQ ID NO: 297394 - DNA, 862 bp, Unknown
  Bacterial polypeptide expressing nucleotide sequence isolated from the Sargasso Sea
acaaaaaaatataataaaaaaattaaagaattaaataaacacaataaattatattattcaaaagataaaccaataatttcagataaagaatacgatgaattaaaaaaaaaaattatagaattagagaataaatataattatttaaagaataaggattcaccttcacaaaccgtaggttttaaaccatctaaaatatttcaaaaaagaaaacacatggtacctatgttatctttatcaaacatattcgataaagatgatctggataattttgaaaaaaaaattagaaattatttagatatgaattctagccaaacatttgaatatagtgttgaacccaaaattgatggaatatcagcatctttgacatacaaagatggaaatttagtactaggcatgtccagaggtgatggttatgagggggaagtaattacagaaaatataaaaactataagcgaaataccaaaaaaaattaattcatctgattttcctacacaaattgaaattagaggagaggtatatataaaaaaaaatgattttattaaaattaaagaaaaatttgctaatccaagaaatgctgcctctggctcattaagacaaaaatattcttcagaaactaaaaaaataccattaaaatttattgcttatacatttggattatttgaaaataataaatataataaacaatctgactttttaacatcattaaaaaaatgggggtttgaaacaagtaaatttaacgttgttaaatccaatattaatgacttaattaaataccatagtgaatttgaaaaaaaaagatatgaattagaatatgatgtagatggattagtttataaaataaatgatttaaagctccaacaaa

SEQ ID NO: 297395 - DNA, 285 bp, Unknown
  Bacterial polypeptide expressing nucleotide sequence isolated from the Sargasso Sea
agattaaattcaagagcgctggatatgagaaaccaaaagacagcatcaattttcaaattaagaagtcaagttttggcatcaattacagagacgctgattaaaagaaaattcattgaaataaacacaccaaagattatcggaagtgcaagtgaaggaggtgctgatttattcagtctcgattattttggaaaacaagcatacttggctcaaagcccacaattatacaaagaacagatgaccataggtcttgaaagagtgtttgagatatcgtcattttaccgagca

SEQ ID NO: 297396 - DNA, 160 bp, Unknown
  Bacterial polypeptide expressing nucleotide sequence isolated from the Sargasso Sea
atgagaaacaaaatttgtgaagaactcaataatacagatattggtaaattagttaatttatgcggatgggtagatagaagaagagatcatggtggtgtaatttttattgatttaagagaccatagtggattcctacaaataacaattaaccccgatgatg

SEQ ID NO: 297397 - DNA, 499 bp, Unknown
  Bacterial polypeptide expressing nucleotide sequence isolated from the Sargasso Sea
atgaaaaaaatattttttatcatcattagcagcagtattattctatcatcatgtaatgctgtaagagatagcgcaggagtaaatagaaagcaaattgatgaatattcagtgattgaaaacccaccacttgttattcctccaaattttaatcttttacctcctgatcaaatgaattctaaagatataattgacgctgatagtgatcttgcaaaagaaattctttttggtttagaggatatagaaacaaaaactaataataatcaatcgttgatcaatcaaattttaatagaaactgaagcaaatgaagtgaatgataatataagaaattctataaatgaagaatttgcaaatgaaaaatcaacaattaatgatgaaactacatttaataatgaagaagagatagataatgcaattcaagagactgaaattaatataaataaaaaagaaaatgaaaaaacagctaaagaaaaaaagaaaaaaagattttctttttttaatt

SEQ ID NO: 297398 - DNA, 869 bp, Unknown
  Bacterial polypeptide expressing nucleotide sequence isolated from the Sargasso Sea
gtctagatctttatctgcatgcgaaggatctttattagttgtagattcctctcaaggtgtagaagcacagactttggctaatgtttaccaagcgattgaggtaaatcatgaaattgttactgttttaaataaaattgacttaccagcttctgagcctgaccgtattagaaaacaaattgatgaagttataggtctccctggaaatgatgctatagaaatttctgctaaaactggacaaggaattaaagaggttctttcaaatttagttgaaaaacttcctgctccaaaaggagatataaataaaaccttaaaagcaatgctcgttgatagttggtatgacccttacttaggcatattaactttaattcgagtagtagatggaaaaattaataagggacagaaaattagatttatgtccaccggtgcaagttatactgtggaggggttaggtgtgttcactcctaaaattgttcatgttaatgaattaggtccaggagaaattggttttattaccgcttctgtaaaaacagttgctgattgcaaagtgggagacactgttacagatgataagaatcctgtttcaaaaatgttagatggttttaaaccatctgtcccagttgtattttgtggattgtttccaacagataatgctaactttacagatttaagagaagcgttagaaaaattgtcattaaacgattcttcttttagttatgacgctgaaacctctgcagctttaggttttggatttaggtgcggttttttagggttgctgcatatggaaattattagggaaagactcgcccgagaattcagtttggatttaatttcaactgctccatcagtagtatacaatgttaaaaaaaata

SEQ ID NO: 297399 - DNA, 485 bp, Unknown
  Bacterial polypeptide expressing nucleotide sequence isolated from the Sargasso Sea
tttgaataaatatagaactcatacctgtggtgaactaacaattaaagaaaaggataagaatatttctttaagcggttggattaataaaaaaagagatcatggaaatttactttttttagacctaagagataattatggaataactcaatgtgttattgaaaataatcacagttcttttaaagaaattgaaaagttatcattagaaactgttataaaagtaagtggaaaagttttaaaaagaagtgaagaaacgattaataaagaacttaaaactggtgaaattgaagtttcaataatttcttttgaaattcttggaaatacaaaagaactacccatgccagttttttctgatcaagaatattccgaagagataagattaaaatatagatttttagatttaagaagaaaaaaaatacatcaaaatataattttaagatctaaggtaatttcttttattagagaagaaatgaaaaaatttggtttct

SEQ ID NO: 297400 - DNA, 546 bp, Unknown
  Bacterial polypeptide expressing nucleotide sequence isolated from the Sargasso Sea
attgaacaaatatagaactcatacctgcggagaattgactaagtcgcataaagaaaaagaaatttctttatctggttggattaacaaaaagagagatcatggaaatcttttattcatagatttaagagataactatggaataactcaatgtgttatagacaaaagtaacgaaatatttaagaaagttgaaaaaatttctttggaaactgtaattaaaattacaggaaaagttatagagagatcagatgaaacgataaatgaaaatatttccactggagaaatagaagtcaaaatcaataatattgatgttataggtgaaactaaagaattgccaatgccagttttttctgatcaagaatatgctgaggaaataagacttaagtatagatttttagatttaagaagaaaaaaaatacataacaatattattttaagatcaaaagtaatctcctttataagaaatgaaatgcaaaaacttggttttttggaatttcaaactcccatattaacctcttcaagtcccgaaggtgcaagagattttcttgt

SEQ ID NO: 297401 - DNA, 574 bp, Unknown
  Bacterial polypeptide expressing nucleotide sequence isolated from the Sargasso Sea
atgaaaaatatcagttatttgttaagtttattgttagttttttcctatgtttcttttgcagacgaagaagtcaaggaagctcctaaagagtcagaagaagttgcagaagaagcaatcgatgaggaagctgaagaagataaagatccaactattagtgaattcattgaagaaggtgagtttgaagtcattgaaggaatgctcgatatttactatgaaacagaagaagatacttattacacaattgttgaagaagaaaatctttcaaaagaatttatctatttctactacatcataagtggagctcaggctggtggagcgagcggtggagatatgggagatagttctgtattagagtttagaaaatttaaggacgatatagcgctctataaaaagaatacagtttttaactatgatgactcaaacaatatttcaaaatctactttaacgaatatacttgaatcatttgttggcaggtttgaggtaaagatagaagaggaaggtagatatctaattaatatcgataagttatttctaggtgaaatgcttgttgggctcaccccgcctaaggaatatg

SEQ ID NO: 297402 - DNA, 838 bp, Unknown
  Bacterial polypeptide expressing nucleotide sequence isolated from the Sargasso Sea
taaattaattgattatgctgaacaagaaattgttttaaaatctagaaaaggagcatttcaaagaactcttaaatacgatcctatgaaaagtagattaggtgaaataagattaagaacaaataaaaatagagacgattttatatatgctagagatgaagagggtaattatattgataaagtaaataaatcaaatatagatatagtacatatgaacaagtcttttagaaatttttacagtgaagagacggttggtaattttatgttaaggcttgaacaaagagcaaataaattattaggaagattaactgacaataaaatacaaattatgaaagatttaccagcagatccaagtgcgagacatagagctatgctatcgaagttaaattggatatctgatatggaaggtaagtttgaaatgatgtcattgttagcacaccctaaatctgctattgctaacttgtatggtggtactacaaatttaattactgatgtaggttttgattattggtttaaatctttcgatgaagcatatttagtaaatgatgtttttgctaataaaacatataaaagatttagtgcaaaagaaggaaaatttatagatgagcctattaaaactattaatgatgttcacagatattttgaacaatttggattcttagatgctaatattcaatcagaattagtacagatgaaaccacctggtgatacaagttggaaagaatttagtaatgaagttggtaaaatattagaaagaaaatttaaagaattaccaatatatactaaagacaaaaaattaaataagaaaaataaaaaattaagagatgaagaagttcgtctc

SEQ ID NO: 297403 - DNA, 1235 bp, Unknown
  Bacterial polypeptide expressing nucleotide sequence isolated from the Sargasso Sea
catggagatttcaagaacacatcttattgaagatcttagttcatcaatggaaggacaggacgttctgtttggtggatgggtagttgatcttcgaaaacttggaaagatggcatttttgactatcagagatgtaactggaatgtgtcaagttatagtaaaaggagattcaatgaatttacttgaagggttaaacagacaaagtgttgtaagaattttaggaaaagttcaatcaagtaaagctaaagattttgattttgaaatttctgcaactgagattcaagttcttgcaaaagcagaatacccattacccatagatccaattggaagactagagagtgatatcgataatagattaaactcaagagccctggatatgagaaaccaaaaaacagcatcaattttcaaattgagaagtcaggttttggcatcaattagagagacactaatcaagagaaaattcatagagattaacacaccaaaaattattggaagtgcaagtgaaggcggtgcagatttgtttagtctggattatttcggtaagcaagggtatctagcccaaagtcctcaattatacaaagaacaaatgaccataggtcttgaaagagtatttgagatttcacaattttacagagcagaaaaatctcatacaggaagacatctcagtgaatttaccagtgtagacattgaagctgcaatgatggattacacagatgtcatggatgttttagagtcaattgtagtcgatgttttcaaaaacactgcagaaaattccaaaacagaacaaaaagaaattgggcatgagatcaaagttccaaattcaccatttgaaagagtgacatacatacaagcacttgaagagttaggaggaatggatattaaattagaatttggagaagatttacaagattcacaccttcgtagtttaggagagaaacatccaggtttcttctttttaacggactggcctatgaaattaaaaccattttacattcatgaaaaagatgatgaccctacactttcacgttcatttgatttacagtatggatatctagaattatcttccggaggaagaaggttacatgatccagaacaattgaaaactagactaaaagaacagaatttggatccaacaagtttcgaagaacatttgaaaacatttggatggggaatgccgccacattcaggttggggattgggattagatagattaatgacagttttaattggaattgaca

SEQ ID NO: 297404 - DNA, 436 bp, Unknown
  Bacterial polypeptide expressing nucleotide sequence isolated from the Sargasso Sea
aatgcaccaatatagaacacataattgtaatggcttgcgagctgaagatattaatcaagaagttagattatcaggctgggttcacagaaaaagagatcatggcggtcttttgtttattgatttgagagatcattttggtctaacacagttagtttttgatccagatagcagtgctttccaagaagcagaaaaagtaagaaatgagtctgtaataacaattaatggaaaagttgtacaaagatcagatgacacgattaataaagtattaccaactggaaaaattgaggtttatgtcgatacacttgaagtaattgggagttcagatgatattccattaccagtttttggtgaacctgattatccagaagaaataagactaaaatataggtttttagatttaagaagagaaactcttcataagaatataatattaaga

SEQ ID NO: 297405 - DNA, 679 bp, Unknown
  Bacterial polypeptide expressing nucleotide sequence isolated from the Sargasso Sea
atggacatttcaagaacgcatctaatcgaagatctaaattcatccatggaaggtcaagacgttctttttggaggatgggttgttgatcttcgaaagcttggaaagatggcatttttgactgtaagagatgttacaggaatgtgtcaagttatagtaaaaggagatgcaatgagtttacttgaaggattaaacagacaaagtgttgttcgaattttaggcaaagtgcaagctagtaaagcaaaagattttgattttgaggtttctgccatagaactccaggttcttgcaaaagcagaatatccattacctatagatccaattggaagattagaaagtgacatagataatagattaaattcaagagcgctggatatgagaaaccaaaagacagcatcaattttcaaattaagaagtcaagttttggcatcaattagagagacgctgattaaaagaaaattcattgaaataaacacaccaaagattatcggaagtgcaagtgaaggaggtgctgatttattcagtctcgattattttggaaaacaagcatacttggctcaaagcccacaattatacaaagaacagatgaccataggtcttgaaagagtgtttgagatatcgtcattttaccgagcagaaaaatcacatacaggaagacatctgagtgaattcacaagcgaaa

SEQ ID NO: 297406 - DNA, 361 bp, Unknown
  Bacterial polypeptide expressing nucleotide sequence isolated from the Sargasso Sea
tatgtcagacaaaagaaaaagtctaggtaagggcttagatgccttgcttgggcaatcggtcgaagtcgaatcaaaaaacaataaacaaggactgacagaaattaagctagagcaaattgggccaggcccatttcaacctagaaaacagattgatgagcaccaacttaaagagcttgcacaatcaatccaagcgcaaggcgtgatccaaccaatcgttgtcagagagagagcggtgagagactctcatacgggagttaaattcgagatcattgcgggcgagagaaggtggagggcatcacaaattgctggcttagaaactataccagcagtagtgagagccatcgctgactcagaagcagtt

SEQ ID NO: 297407 - DNA, 238 bp, Unknown
  Bacterial polypeptide expressing nucleotide sequence isolated from the Sargasso Sea
catggtagagaaaaacttttctggtatgataaaagcactttcatatggagcaccacctcacggcggcatggcaccaggtattgatagaatattgatgcttttagccgatgaaaaaaatattagagaagttaccctatttcctttgaaccaaaatgggcaagatcttttaatgaatgccccttcggagataagcgaagaacaattaaaagaattaaatattaaaaatttaaaaaaataa

SEQ ID NO: 297408 - DNA, 1120 bp, Unknown
  Bacterial polypeptide expressing nucleotide sequence isolated from the Sargasso Sea
aatgaatttacttgaaggattaaacagacagagtgttgtaagaatttcaggaaaagttcaatcaagtaaagctaaagattttgattttgaaatatctgcaactgaaattcaaatccttgcaaaagcagaatatccattacctatagatccaattggaagattagaaagcgacatcgataacagattaaactcaagggctcttgatatgagaaaccagaaaactgcatcaattttcaaattgagaagtcaagttttggcatcaattagagagaccctcatcaaaagaaaattcatagaaatcaatacaccaaaaattattggaagtgcaagtgaaggaggagcagatttgtttagtctagattattttggaaaacaaggatatctagcacaaagcccgcagttatacaaagaacaaatgacaataggtctagaaagagtgtttgaaatttcatcattttatagagcagaaaaatctcatacaggaagacatctcagtgaatttactagcgtagacattgaagctgcgatgatggattatacagatgtaatggatgttttagaatcaattgtagttgatgttttcaaaaatactgctgaaaattctaagacagaacaaaaagaaattgggtatgaaatcaaagttccaaattcaccatttgagagagtaacgtacacgcaagcacttgaagagttaggagatatggatattaaattagagtttggagaggatttgcaagattcacacctacgtagtttaggagacaaacatccaggtttcttctttttaactgactggcctatgaaattaaaaccattttacatacatgaaaaagatgatgaccctacactttcacgttcatttgatttacagtatggatatttggaattatcttccggaggaagaagattacatgatccggaacaattgagatctagattaaaagaacaagatttggatccaacaagttttgaagaacacttgaaaacattcggatggggaatgccaccacattcaggttggggaatgggattagacagactgatgacagttttaattggaattgacaatgttagagaggtagttttgtatccaagagatccagataggctcaaaccataa

SEQ ID NO: 297409 - DNA, 271 bp, Unknown
  Bacterial polypeptide expressing nucleotide sequence isolated from the Sargasso Sea
atgaaatctaattattgtggtgaaattacatcatcaaatttaaatgaagaggttactatttgtggctggatccacagaagaagggatcatggtggagtaatatttcttgatgtaagagacataaaaggtatatgccaagcagttgtcaatcctgataatcaacaatcttttcaattagctgaaaccataagaaatgaatttgttgttcagatcagtgaaattgttcgaagtaggcttgaaggaacagttaacaaaaacatgcacacaggga

SEQ ID NO: 297410 - DNA, 977 bp, Unknown
  Bacterial polypeptide expressing nucleotide sequence isolated from the Sargasso Sea
tatgattggaaatgatttaggagatttacggagaagtcattattcagttgaacttagttccttacaggaaggtacagaagtagttgtaatgggttgggttctaactgttcgtggtcacggtaatatcgtatttgcaacaatcagagataaggtaggtaatattcagattatcacaaaaagtggagagtgtgacgatgacatacgtgaaaaaatttcatccttgaaacagcattcatcaattgcagttataggcaaaacaagaaaaaatgaaaaatcacccactggcattgaggtagttcctagtgagcttagagtcttttctgaagtagaaaaaataccaccttttgaaccatatgcaaaaagtgtaaaaaatattgatacacgattagaagttagggcacttgatcttaggagaactgtcttacaaaaaatatttcttgcgcgaagtctaacgttaagagcaatacgtgattatctttcaacaaaggactttgttgaaattaatactccaaaaatgattgcaactgcaactgaaggtggtgctgcattgtttccaatattttattataataaggaagcattcttggctcagagccctcagttgtataaagagcagctgacaatgagttttgaaaaagtatttgagattgcaccaatatttcgtgccgaaccatcaagaacaaatcgtcacttgtctgaagcaatttcaatagattttgaagaagcatatgttgattataatgatgtaatggatagaatagaagatcttgtaaaggcatgtattactactgtacaacaatttgtaaaggaaaatcctgaaactgatttcaaagttccagacatgccagacaaaattccacgttacaagtattcagaattaattgaaaaaatgcaaaatgctggactcaaaactcaatggggtgatgatttgtatccaaaaaatctacaaaagatttgtcttacaggattctacttta

SEQ ID NO: 297411 - DNA, 479 bp, Unknown
  Bacterial polypeptide expressing nucleotide sequence isolated from the Sargasso Sea
tatgtatagaacaaacaattgtggtgagttaaactcaagttttgttgatcaagaagttaagctttcaggatgggtcaataaaattcgaacaaaaggattcattatatggattgacctaagagatagatatggagtgactcaactagtttttgataaagaaagaacggatgcatcagtttttgaagcagcaaataatttgggaagagagtttgttattgaaattgatggaacagttataaagagaaaagatgttaaccaaaatataagcacaggagaaattgaagtattagtgtcaaacttcaaaattttgaatacttctattacacccccctttaccatagagaatcagacagatggaggagatgaattaagaatgaagtttagatatcttgatctgaggagagagccaattaaagaaaatttaatctttagaaataagctttcattagatgttagaaactatttatctgataatggtt

SEQ ID NO: 297412 - DNA, 607 bp, Unknown
  Bacterial polypeptide expressing nucleotide sequence isolated from the Sargasso Sea
tttggataaaatctctgtaataaaaaattataatctcagcagaaagcaaatagatttaatagataattacatattaaagttaaaaaaaagcaaccaaatacacaatttggttgggccttctacaattgatgttgcatgggatagacatattaatgattcattacagttgtctgaatttattttgaaaaaaaatgcatcaataatagatttcggcactggtgcggggttaccaggagtaatattaaatatttttgggtattcaaatatattattgattgactctaagatgaaaaaaataaactttattaaagagtttgcattcgagcagaatttagaaataaaaactatttgcacaagggttgagaaaatcaaaaatcaaaaatttgactttattatttgccgagcttttgccccattatctaaattattagattattcacggttttttactaaaaaaaatacatcactactttttctaaaaggaagaagtgttaagaaagaaatacatgaagcaaaaaaatcctttaactttgaatacgatctttatccaagtaaaagtgagggcgatggatatgtgttaaaaataaacaaatataaaaaactgtga

SEQ ID NO: 297413 - DNA, 1132 bp, Unknown
  Bacterial polypeptide expressing nucleotide sequence isolated from the Sargasso Sea
taaaggcttacaaactgaacttgatgttgtagaaggaatgcaatttgatagaggatttttatcaccatacttcataacaaatgcagataaaatgactgctgagttagataatcccttggtattactttgtgataaaaagctttcaaatttacaatctattgttcctctattagaatctgtggttcaatcctcaagacctttattaataattgctgaagaagttgaaggagaggcattagcgacactggttgtaaacaaactaaggggtggtttaaaagttgttgcagttaaagctccaggttttggagatcgaagaaaggcaatgttagaagatattgcaatattgactggcggccaagtgatctctgaagatcttggtatcaaactagaaaatgtaaaaataaatgatctaggttcttgtaaaaaaattaaagttgataaagataacacaactgtagtagatggtgcgggtaaaaaaagcgatattgaagctagatgtgcatcaattagaaaacaaattgatgagtctacatcagattacgataaagaaaaactacaggagagattagcaaaattagctggtggtgtagctgtaattaaagttggtggtgccactgaagttgaagttaaagagagaaaggatcgtgtcgatgatgcacttaactccacgagagcagcagttgaagaaggagttgtaactggtggtggatgtgctctactttacgcatcggaagttttaaaatctgtcaaagttaaaggtgatgatcaaaaagctggcgtagaaataatcagaaaagctctacaggcacctattagacaaataactgctaacgctggagtcgacagttctgttgtagttggaaaacttctagaaggcaaaaaaggttctcacggttatgatgctcaaggagctgagttttgtgacatgattgcaaaaggaattatagatcctacaaaagttgtaagaacagctttgcaagacgctgcttcaatatctagtttactgattactactgaagctatgatcggtgataaacctgaggataaagactcaggcggtgccggtggtggaatgcctccaatgggaggtggaatgcctggcatgggcggcatgggcggaatgggaatgtaa

SEQ ID NO: 297414 - DNA, 436 bp, Unknown
  Bacterial polypeptide expressing nucleotide sequence isolated from the Sargasso Sea
aatgaacatttacagatcccactattgctctgaacttaatatttcaaatcttaatcaagaagttgttttaagtggctgggttgataccataagagatcatggcaatttaatttttattgatttaagagataattatggaattactcaatgtgttgttgatgcaaaacacaaaatttttgatgaaataactaaattaagtaatgaaagtgttattactatcaaaggtcttgttctgcaaagatcagatgagaccgttaataaaaatatttccactggagaaattgaagtaaaaatcgattcctatactctattgtctatttcagaagtattacctctgcctgtaaattcagacattgagtatggtgaagaagtaagattaaaaaatcgttttcttgatttaagaaggaataaacttcataaaaatattttttattga

SEQ ID NO: 297415 - DNA, 880 bp, Unknown
  Bacterial polypeptide expressing nucleotide sequence isolated from the Sargasso Sea
catgtcagacaaaagaaaaagtctaggtaggggcttagatgctttgcttgggcaatcagtcgaagccgaaccaaaaaacaataaacaaggactgacagaaattaagctagagcaaattggaccaggcccatttcaacctagaaaacagattgatgagcctcaactcaaagagcttgcacaatcaatccaagcacaaggggtgatccagccgatcgttgtcagagagagagcggtaacagactctcatacgggcgttaaattcgagatcattgcgggcgagagaaggtggagggcatcacaaattgctggcttagaaaccattccagcagttgtgagaaccatcgctgactcagaagcagttgccgttgctttgattgaaaacatacaaagagagaacctaaacccgctcgaggaagcgaacgcgttccaacgtctgataatagagtatgaaatgagccaccaagaagtcgcaaacgctgtgggaagagctcgagcaagcgtcagcaatgcccttaggcttcttgatttaccaggcggtgtccaggagcttgttaataaaaaagaactaacaatggggcacgctagagccttgctttctattcaaaacaaaagcatgcaactagagttggcaaaccttattgtcgagaaagggctttccgtcagagaggcagagaacctggtgagaaaaattgttgataagaaaaaagcgatcaaaccaaaaacaagctcggacccagacattcaaagacttgaaaatgacctaaccaaccaacttggagcaaaggttacaatcaaacataaaaagtctggagcaggaatattaagcattaagtactcaagcacagatgagctcgaaggcatactctccaaaatcaaataa

SEQ ID NO: 297416 - DNA, 373 bp, Unknown
  Bacterial polypeptide expressing nucleotide sequence isolated from the Sargasso Sea
catgaagtctcattattgcggtgaaataacatcttcaaatcttaaagaagaggtaacaatctgtggctggattcatagaagaagagatcatggcggtgtaatttttcttgatgtaagagatataaaaggtatttgccaagctgtagtaaatcctgacaatgaaaagtcttttaaattagctgagtcaattagaaatgaatacgttgttaaaattaaaggtgatgtaagaaaaaggttagaaggaacaataaataaaaatatgcataccggagagatagaaattgaggttaaggacttaatcattctcagtaaagcaaatacacctgtcttttccattgatgagtatcaagaaataaatgaggatgttaggtta

SEQ ID NO: 297417 - DNA, 230 bp, Unknown
  Bacterial polypeptide expressing nucleotide sequence isolated from the Sargasso Sea
taaatttagcggaatgataaatgctttgagttatgagcccccgcctcatggaggaattgcaccaggtattgacagaattgttatgctcttagcaaatgaaaaaaatattagagaagtcacaatgtttcctatgaaccaaaatgcacaggatttaatgatgaatgctccatctgcagtttctgatgaacaattaaaagagcttaatttattaattaaaaagaaaaattaat

SEQ ID NO: 297418 - DNA, 814 bp, Unknown
  Bacterial polypeptide expressing nucleotide sequence isolated from the Sargasso Sea
cgaaccaaaaaacaataaacaaggactgacagaaattaaactagagcaaattggaccaggcccatttcaacctagaaaacagattgatgagccccaacttaaagagcttgcacaatcaatccaagcacaaggcgtgatccaaccaatcgttgttagagagagagcggtaacagactctcatacgggcgttaaatttgagatcattgctggtgagagaaggtggagggcatcacaaattgctggcttagaaaccattccagcagtggtgagagccatcgctgactcagaagcagttgctgttgccttgattgaaaacatacaaagagagaacctaaacccgctcgaggaggcgaacgcattccaacgcctgataatagagtatgaaatgagccaccaagaagttgcaaatgctgtgggaagagctcgagcaagcgtcagcaatgccctcagacttcttgatttaccaggcggtgtccaggaacttgttaataagaaagagctaacaatggggcacgctagagccttgctttctattcaaaacaaaagcatgcaactagagttggcaaaccttattgtcgagaaagggctttccgtcagagaggcagagaacctggtgagaaaaattgttgataagaaaaaagcgatcaaatcaaaaacaagctcagacccagacattcaaagacttgaaaatgacctaaccaaccaacttggagcaaaggttacaatcaaacataaaaaatctggggcaggaacattaagtattaagtacacaagcacagatgagctcgaaggcatactctccaaaattaaataa

SEQ ID NO: 297419 - DNA, 886 bp, Unknown
  Bacterial polypeptide expressing nucleotide sequence isolated from the Sargasso Sea
catgaaaatattaattgcaattagcagcaaggaatactcgggacctacccttgatgttggtatgaatattgcccgtgctcttaaatcttcaactacaattgtggatgtaggacaaaagataagtgagtttagcctgaaagatgtaagtatggcgaatgaggtgatggaatcttgggatatggatagacctggtgttgatgttttagaatgggcgtataactacctttctaaaaaccaattcattgaagagcaatcaatgaaagacggctttcccaaaaatcttttaattgagcgtggctctggtcgagctgaagtactcttaaagggatcagctcttgaaaatctatctttgatcttaagaaatggtgacattattaaagaactaagagatgaggtccataattattcatacgacctaacaattattggcggtagtggaaagcgtgatatggcccacgatatgatccagtatattgatagctcgatctttgtggtaaataatttcaataaaaatgaaaattacaagatactactagctgtggatgattctcctggcactgcaaaagctgtaaaatatggtgtcagggttgcccaggcatttaatatcaaagttaacattgtaactatcagcaaggatgaacactttagtgaaccggataaaaaggcttcagccaaggcagcaaaaatgatgagaaggagcggcgtggatgcagagacaatatttaaaattggagacccagcagaaacgatcatagaaacttcaggtgctaaccatatcataattatgggagcatcgagtcaatcacctatagctaaattttttatgggaagtaagcctttgaacgttatgagtaagtgtggttgcccaattttaatagttaagtga

SEQ ID NO: 297420 - DNA, 2326 bp, Unknown
  Bacterial polypeptide expressing nucleotide sequence isolated from the Sargasso Sea
atgcatcttaaacctttcaagcttgttctattctttttctcatcaatactttttgctcagatttctggtactgttacagattctgttagtggaaagccaattgaaaatgttaacataacaaatggtgttattggaactacaacaaactcatctggtaattttttaattaatgtgcccatagatacagaattagaattttcccatatagcatataagtctaaattaatgattacaaaagaagttatatcagtgaagctagttgcaactgttattgaatcagatcaaataactgtaagggcaggactttcagatgaatcactacaaaattcagttactagtgttcatattattaccgatgaagaaattcgtgattctggatctgatcattttcaaacattaacagatcaaattccaaatgttaattggtctggggggacaagtagaccaagatactttcagataagaggagttggagaaagaagtcattattttggtgaaggcccgccaaacttttcagtggggtttgttatcgatgatatggattttagtggattaggaatgataggccatttatatgatctgaatcagatagaaattttcagaggacctcaatcatctgtttatggggctaatgctttggcaggattgatttcaattaaatctaaagatcctattgatcaatttgaaatggaggcatcaacaagcttaggatcggataatctttatggtataaatagcttaatcaatctagaatctatatatggtctaaaaattagagtatcgggaagttataattatagtgatggatttagagaaaatttatctaaaaatgtttccaatacaaataagcgagaagaattgttttctagaatgaaattgaattttaaatccaataataaattaaatcttctcgcaacatttatttattctgaattaaataacggatacgatacctgggcacctgataataataaagatttcaaaacttatagtgatgatgttggccaagatagtcaaacatcttacggctattctttacgtgttgattttaatggatattataacactacgcttataacatcatttactaatactgatttagtacattcttatgatagtgattggggagatagcctttattgggcaataaatcataattggagtccagagtcttttccagattcttattatacatacaaatattttgatcaaaataataaaagtcgttcaaatttcactcacgaattacgatcttcatttggccctgttttatttggaatttattataaagatttaaatgaaaaagatacggccatcggttggctattcaatggagctgctactgacgcaacaagtgattttcaatttaggactatggctgcctactcacaatttagacataaattttcatcttcatttaattttaaggctaactatcgaattgaaaatagtcaatatgattataatggcacttcacaaggttacaatgaatattgggagaaagtatttttagattcagttacatttaacacgaatgaaagaatgatcggttttcgtggtgcatttacctatgtaaaaaacctttcaacaagttattatacttcgttttctcaaggatataaatctggaggtataaaccaacaaccttatttagctgattctagccgaccttataagcctgaatttattcaaagtcttgaatttggttttaagcgaaagtcagatacatatagatcaaattttaccttcttctttagcagacgaatagatcaacaggtttcagtatcaagccaacaagatgaaggaaatccaaatagttttctattttatacaggaaatgcaggctcaggaaaaaatagcggagttgaatttgattatgcgcaagatattctgaattctttatcatttaatgcaagaattggaatactaaatacatgggtagataaatttgcttataaaacagaaaatggagaagcttatggtggagatagagaggcttctatggcccccaagtttatgggatcattgggtttccatttttcaatattaaactatgatattatcacaaatactacttttaaagacgaatattatttttcagatagtcataatagcaaatcgaaaccatactcattaacaaatatatcaatcagaaaatcatttaacaaaatagatgtaagattttgggttagaaatattttagataaacgatatgcaatcagagggttttattttggcttaattcctccagaatttgaaaataagctttggttaagttatggagaccctagacaatttggtttaaccgtagattataacttttaag

SEQ ID NO: 297421 - DNA, 1306 bp, Unknown
  Bacterial polypeptide expressing nucleotide sequence isolated from the Sargasso Sea
ggagtcacagttgcaaaagaaatcgaactagccgataaatttgaaaatatgggcgctcaaatgataaaagaagtagctaataaaacaaatgactctgctggtgatggaacgacaacatcaactgttttatgtcaagccctagctaccgaaggaatgaaggcagtagctgctggattaaacccaatggatttaaagagaggaatggaagctgctacagatgctattatttctgagcttcaaaaaaactctaaaatagttaagtcagataaagaagtccaacaagttggaactatcgcttcaaatggtgatggtgaagttggaggtatgatatctgaggcaatgcaaaaagtaggcaaagagggtgttattacagttgaagaagccaaaagcttagacacagaattagacgttgtagaaggtatgatgtttgatagaggctatttaagcccatattttgtgactaatgcagacaaaatgaaagcagaaatggaagactgtttaattcttttacatgaaaaaaaactagctagtcttcagccgatgttaccactattagagtcagttgttcagtcaacaaagccgttactcattatatctgaagatgttgagggtgaagctcttgctactttagttgtcaataaactaagaggtggattaaaaattgctgcagtaaaagccccgggctttggcgatagaagaaaagcaatgttagaagacatcgctatattgacaggtggccaagttattagtgaagatttaggtattaaactagagacagtgactatggaaatgttaggtaaagcaaaaagagttgttgtagacaaagaaaactcaacaatcgttggtggagctggcaagaaaaaagatattgaggcgagatgtgatcaaattagaaaacaaattgatgaaactacatctgattacgataaagaaaagcttcaagagagactagctaagcttgctggtggtgtagctgtaattaaagttggtggagcatcggaggttgaggttaaagaaaaaaaagacagagttgaagatgctatgcacgcaaccagagctgccgtagaagaaggaatattacctggcggtggtacagcccttctctacgctacaagtgtcctaaaaaacttgaaagtcggtaatgatgatcaaagatatggtgtagacattgtcaggaaagctctttcagcccctttaaagcaaatagcccaaaactctggatttgatggtgctgttattgctggaaaaatacttgagagtaaagagaattctcatggttttgatgcacaatctggaaagttttgtg

SEQ ID NO: 297422 - DNA, 418 bp, Unknown
  Bacterial polypeptide expressing nucleotide sequence isolated from the Sargasso Sea
gctgcgggggtaaaggcacaatggggtgatgatttgtatccaaaaaatctacaaaaaattggtttgagtggtttttactttattgttgattggcctatgggtccaaagccattttatgtaaaagtaaagaaagatgatccaaaaatatctgaatcctttgatttgatgtggggagatttagaattatcatctggcagtacaagaattgaaaagaaatctgaattagaagataggatgaaaaataagggcatgaagactgaagcgtttgattaccatcttaacatatttgattttggcgtgcctccacatgctggttgtggtattggtcttgaaagattaatgatggcgctaaccggaactgaaaatattagagataccacattttatccaagagatgtagaccgtctaacgccctaaa

SEQ ID NO: 297423 - DNA, 886 bp, Unknown
  Bacterial polypeptide expressing nucleotide sequence isolated from the Sargasso Sea
atgattggaacagaactaggagatcttcgacgaactcactactcaactgaactaaattctttgaatgaaggtactgatgtggttgttatgggatgggttgttaccgtccgaggtcatggaaatattgtttttgcaacaattcgcgataaattaggaaacattcaggttataacaaaaagtggtgaatgcgaagatgacatacgtgaaaaattatcacatttgaaagaacattcttcaattgcagtagttggaaaaactagaaaaaatgaaaaatctccaaccggaatagaagtagttccaagtgagatgcgagttttctcagaggttgaaaaaattcctccatttgaaccatatgcaaaaactgtaaaaaatattgatactaggttagaggtaagagcaattgatttacgacgaaatgttttacaaaaaatctttcttgcaagaagtgtcacattaagagcacttcgagattatctaagcaaagaagattttgttgaaattaatactccaaaaatgattgccactgcaactgaaggtggtgcagcattatttccaatattttactacaacaaagaagcattcttggctcagagtccgcaactttacaaagaacaactaacaatgagttttgaaaaagtttttgaaattgccccgatatttagggctgaaccttctagaacgaatcgtcatttatctgaagcaatttcaatagattttgaggaggcatatgttgactacaatgatgtcatggatagaattgaagaattaatcaaaagctgcatttcaacggttcaaaattttgtaaaagaaaatactgatgttgagtttactgtacctgaggtacctgataaaatacctcgttacaaatatgcagaactaatgaaaa

SEQ ID NO: 297424 - DNA, 1168 bp, Unknown
  Bacterial polypeptide expressing nucleotide sequence isolated from the Sargasso Sea
gtaagagatgttacaggaatgtgtcaagttatagtaaaaggagatgcaatgagtttacttgaaggattaaacagacaaagtgttgttcgaattttaggcaaagtgcaagctagtaaagcaaaagattttgattttgaggtttctgctatagaactccaggttcttgcaaaagcagaatatccattacctatagatccaattggaagattagaaagtgacatagataatagattaaattcaagagcgctagatatgagaaaccaaaagacagcatcaattttcaaattaagaagtcaagttttggcatcaattagagagacgctcattaaaagaaaattcattgaaataaacacaccaaagattatcggaagtgcaagtgaaggaggtgctgatttattcagtctcgattattttggaaaacaagcatacttggctcaaagcccacaattatacaaagaacagatgaccataggtcttgaaagagtgtttgagatatcgtcattttatcgagcagaaaaatcacatacaggaagacatctgagtgaattcacaagcgtggatattgaagctgcaatgatggattatacagacgtcatggatgttttagaatcaatcgtggtagatgttttcaagaataccgctgaaaattctaaaacagaacaacaagatattggtcatgaaatcaaaattccagattcaccgtttgaaagagtatcatatactcaagcattggaagaattaggaaatttggatatcaaattagagtttggagaagatttgcaagactcacaccttcgtagtttaggagacaaacacccaggatttttctttttgacagattggcctatgaaactaaaaccattctatatccatgagaaagatgacgacccaacactttcacgttcttttgatttacagtatggatatcttgaattgtcatcaggaggacgtcgattacatgacccagaacagctaaaatctcgactaaaagaacaaaatttggatccagcaagctttgaagaacatttgaaaactttcggatggggaatgccaccacattcaggttggggcatgggattagatagattgatgacagttttgattggaattgacaatgtaagagaggtaactttgtatccaagagatccagacaggctcaaaccataga

SEQ ID NO: 297425 - DNA, 1098 bp, Unknown
  Bacterial polypeptide expressing nucleotide sequence isolated from the Sargasso Sea
gcatctaatcgaagacctaaattcatcaatggaaggtcaagatgttctttttggcggatgggtagttgatcttcgaaagcttggaaagatggcatttttgacagttagagatgttacaggaatgtgtcaggtaatagtaaaaggcgatgcaatgagtttgcttgaaggattaaacagacaaagtgttgttcgaattttaggcaaagtacaagcaagtaaagcaaaagattttgattttgagatttctgccacagaacttcaagttcttgcaaaagcagaatatcctttacctattgatcctattggaaggttagaaagtgatatcgataatagattaaattcaagagctctagatatgagaaatcaaaagacagcatcaattttcaaattgagaagtcaagttttggcatcaattagagagacgctaattaaaagaaaattcattgagattaacactccaaagattattggaagtgcaagtgaagggggtgctgatttgttcagtctcgattattttggaaaacaaggatacttggctcaaagcccacaattatacaaagaacagatgaccataggactagaaagagtatttgagatatcatcattttacagagcagaaaaatcacatacaggaagacacctaagcgaattcacaagcgtggatatcgaagctgcgatgatggactatacagatgtcatggatgttttagaatcaatcgtggtagatgttttcaaaaatactgctgaaaattcaaaaacagaacaaaaagaaattggacatgaaattaaaattccagattctccatttgaaagagtatcatatacacaagcattagaagaattaggaggcatggacatcaaattagagtttggtgaagatttacaagattcacaccttcgtagtttagaggagaaacatccaggatttttctttttgacagattggccaatgaaactaaaaccattctacattcatgaaaaagatgacgaccctacactttcacgttcttttgatttgcagtatggatatctagaactatcctcaggaggaagaagattgcataatcccgagcagttaaaaaccagattaaaagaaca

SEQ ID NO: 297426 - DNA, 1255 bp, Unknown
  Bacterial polypeptide expressing nucleotide sequence isolated from the Sargasso Sea
tttgcctacttttctttgcggccggcaaagaaaagtaggtgcccccccgcacaggggcaacgctaatagaccactaccaaagcaaggaaaggccaaagagcgaaatcaacaacactccgccgaacaggcaaaaaacctaaaccgccataacagccctcttcctctcagcccgctgcataaaatagttagccaaaaccaccccaacagtaacaacagcaataaacaacgtagccaacgcattcatctccggattcaaaccaagccgaacgcgagagaacacaaccagcggcagcgtcgtcgacccaggccccgacaaaaacgccgacagaaccagatcgtcaatcgacaaagtgaacgacaacagccacccagaaaccagagcctgcgaaatcaacggcaacgtaatgaagaaaaacaccttgagcggcgtcgccccaagatcaagcgcggcttcttcaagagaaggattcaactccttcacacgcgactgcacgatgatggccacataggaaatacacaacatcacgtgcccgatccagatcgtgaaaatgccgcgcccggcaggccaccccaaccacttggccatttcgatgaacagcagcaacaacgaaatcccctgaatcacctcgggaatcaccagcggcgcattgatcattccggtataaagcgtaaacccgcgaaaccgccccatgcgggccagaacaaacccggcccacgtaccgataatcaccgacgcaaacgccgtcagcaacgccacacgcaacgacaaccacgccgccgcaatcaactcgtcgtcctgcaacagcgccgcataccagcgcgtggaaaaccgcgtccacaccgtgaccagttgcgattcgttgaacgaatacacaatcagactcacgatcggaatgtagagaaacagaaacccgatccccaaggcaatgaactgcaaaatccggttcggcttcatcagcgcctttcctccatcgccttcgcctgcgcgtactggaaaaacgccatcggcaccaataacaacaacaccatcgcgcacgtcacggcagacgccatcggccaatcggcattgtcgaagaactcattccacatcacgcggccaatcatcaacgtgttggcgccgcccagcaattccggaatcacatactcgccgaccgccggaatgaacaccagcaaacaaccggcaataatgccgttcttcgacaacggcaaggtgatctgccagaacgcgcgccatggcttcgcgccgagatcgtag

SEQ ID NO: 297427 - DNA, 724 bp, Unknown
  Bacterial polypeptide expressing nucleotide sequence isolated from the Sargasso Sea
atggaaacctgggatatcgataggcctggtgttgatgtccttgagtgggcatttggatatctttcaaaaaataaatttatagaagagcgaacaacaagtgatgggtttccaaaaaatctcctaattgaaaatgattctcgtcgtgcagaggtattgcttaaaggatcggctgttgaaaatttatctttgatacttagaaatggagatataataaaagaactaagagatgaggtcgatgcatatgaatacaaccttacaattattggaggcagtgccaaacgcagtatgtctcatgatatgattcaatatataaacagctcaatttttgtggtgaataattttaataaaaccattaactataaaattcttttagcggttgataattctccaggtaccaaaaaagctgtaaagtatggagtcagagttgcacaagcatttgggatcaaggttcaaatcattaccgtaagtgaatccgaaaatgttaacgagttagatttaaaatcatcagaaagtgcatccaaaatgatgcgaagatgcggagtggaggctgaaacaaaatttgagatcggtaaacctgaagaaaaaataatagaaatggctggagaggatcatattataattatgggggcatctacacagtcgccaattgcaaaattctttgttggcagtaagccacttaatgtgatgcaaaattcgaactgcccgatattgattgtaaaatagt

SEQ ID NO: 297428 - DNA, 277 bp, Unknown
  Bacterial polypeptide expressing nucleotide sequence isolated from the Sargasso Sea
aacaagctgttttttcatactgggcataaatgaagaagaagcagatgaaaaatttggttttttccttgaggcactaaagtatggatgcccaccacatggtggaattgcatttggaattgaccgaattgtcatgctgatgacaggatcttccagtatcagggatgtgattgcattccctaagacacaaactgcgagttgtctactcactgatgcgccaagccctgctggtaaagcgcaattaaatgaattgggtgtctcagtcaaaaagaaaagctaa

SEQ ID NO: 297429 - DNA, 166 bp, Unknown
  Bacterial polypeptide expressing nucleotide sequence isolated from the Sargasso Sea
ttgcaggttattcaaaaaaatgatgttaataataaatttagtggaatgataaatgctttgagttatggggctccgcctcatggaggtatagccccaggaattgataggatcgttatgcttttagcaaatgaaaagaatattagagagattactatgtttccaatga

SEQ ID NO: 297430 - DNA, 196 bp, Unknown
  Bacterial polypeptide expressing nucleotide sequence isolated from the Sargasso Sea
tttgggagctccacctcacggaggtatagcaccaggtattgataggataattatgcttttagctgatgaaaaaaatatcagagaagtgactatgtttccaatgaatcaaaatgcgcaagatttgatgatgaacgcaccttctcaagtggaagaagctcagttgaaagagttaagtttagaaattaaaaaaaaatag

SEQ ID NO: 297431 - DNA, 343 bp, Unknown
  Bacterial polypeptide expressing nucleotide sequence isolated from the Sargasso Sea
tacgatctttgtttgtaacggatacgagctatcgtcaggggctataagaaatcatattactgagtatctatttaaagtttttgacaaagttggttatacaaaagatatggtcaaaaaaaacttttcaggaatgatcaaggcactttcttatggcgcgccaccccatggcggcatggcacccggaatcgatagaatcgtaatgcttttagccggccaagaaaacataagggaagttactttatttcctttgaatcaaaacgctgaagatttattaatggaggctccatccaaagtttctgataagcaactgaaagagttaaatattaaaacaataaaaaagtaa

SEQ ID NO: 297432 - DNA, 591 bp, Unknown
  Bacterial polypeptide expressing nucleotide sequence isolated from the Sargasso Sea
atatagctgaaattgtagtgaatgaagaattcaaagtctttgctgacccagctaaagataaaggatcgcgcatagttgcattaaatgttccaaatggtgcttcattgtcaagagctcaaatagataattacactaagtttgtcgctaaattgggtgctaagggattggcttacatcaaagttaattctaaaaaaattgacgacatgcagtcacccatattgaagtttttatcagatgaggcaatcacaaacattgttgatacagttaagtctgaagctggagatttaattttcttcggtgctggcccaaaagatgtggttaatctatctatgagctcattaataaaagagctgggtcaggacctagatttatacacctcaaaatgggctcctttatggataaaggattttccaatgtttgaaagaaataaggatggcaatctcacttcattacatcatcctttcacactgcctaagtgtgatgttcaggaacttattgaggatcctgaaacggcgcatgcctatgcttacgacatagtattaaatggttacgaaataggcggaggatcacttaagggtatattcaagtaag

SEQ ID NO: 297433 - DNA, 133 bp, Unknown
  Bacterial polypeptide expressing nucleotide sequence isolated from the Sargasso Sea
ttgaatccaggtaagttttatgctttgccgcaagcacctcaacaatttaagcaacttataatggtttcaggttttgataaatattttcaaatcgccccatgttttagagatgaagatgctcgtgctgatcgaa

SEQ ID NO: 297434 - DNA, 142 bp, Unknown
  Bacterial polypeptide expressing nucleotide sequence isolated from the Sargasso Sea
catgacaggatcttctagtatcagggatgtgattgcattccctaagacacaaactgcgagttgtctactcactgatgcaccaagccttgctggcaaagcgcaattaaatgaattgggtgtctcagtcaaaaagaaaagctaa

SEQ ID NO: 297435 - DNA, 289 bp, Unknown
  Bacterial polypeptide expressing nucleotide sequence isolated from the Sargasso Sea
tcctgaattaatgtataaattatttgaaattgcaggttattctaagtcagatgtagatcaaaaatttagcggcatgataaacgcattaagttatggagcgccaccacatggaggtattgcacctggaattgatagaatagtgatgcttttagctgatgaaaaaaatataagagaggttaccatgtttccaatgaatcaaaatgctcaagatttaatgatgaatgccccttcgaaagtttctgacgaacaattaaaagagctaggtataaatataaagaaaaaaaactag

SEQ ID NO: 297436 - DNA, 583 bp, Unknown
  Bacterial polypeptide expressing nucleotide sequence isolated from the Sargasso Sea
ttgtacaaagaaaacgaagctataagtttttctggaattgttagacaaaaaatagccaatgaactaaagatgatcgataataacgtatttaatttttgctggatcactgattacccaatgtatgaatatgatgaaaaagaaaaaaaattagattttagccacaatccattttctatgccccaagtacaaatgagggattttgataagactgatcctctaaaaatcttagcttatcaatatgatttagtttgtaatggttatgaactttcttctggtgcaatcagaaatcatattccagagtatttgtttaaagttttttctaaagttggatacactaaggaaatggtagaaaaaaacttttcaggcatgataaaagctctttcttatggagctccgcctcacggtggtatggctcctggtatagatagaattgttatgcttttagcaaatcaaaagaatattcgagaagttactttgtttccactaaatcagaatgctgaagatttgttaatggaggcaccatctgaggcttcagaaaaacaacttaaagaattaaatattaaaactgttaaaaaaaactaat

SEQ ID NO: 297437 - DNA, 382 bp, Unknown
  Bacterial polypeptide expressing nucleotide sequence isolated from the Sargasso Sea
agatttttcaaaaccacttgaaataaaagcttatcagtatgatattgtttgtaatggtgttgagttatcttctggtgcaattagaaatcatatacctgaattgatgtataaattattttcaatagctggatatgataaaaaattagtagatgaaaaatttagtggaatgataaatgccctaagctatggtgccccacctcatggtggaatagcccctggaattgataggataataatgttattagcaggagaaaaaaatataagagaagttacaatgtttccaatgaatcaaaatgctcaagatttgatgatgggtgcaccatcggagattgatgaaaaacttctaaaagaattaaatttgtctgttaaaaaaaataaataa

SEQ ID NO: 297438 - DNA, 310 bp, Unknown
  Bacterial polypeptide expressing nucleotide sequence isolated from the Sargasso Sea
gcaattataaatcatataccagaacttatgtataaactattttctatagctggatattccgaaaaagaagtaaacgaaaaattcagcggaatgataaatgctttaagctatggagcacctcctcatggtggaatagctcctggtattgatagaattgtaatgcttttagcaggtaaagaaaatattatagaagtaactctatttccaatgaatcaaaatgctcaagatttaatgatgcaagctccttgtgaggtagatgaaaaacagctgaaagagctaggtataaaaaaagatattaaaaaaaattaat

SEQ ID NO: 297439 - DNA, 253 bp, Unknown
  Bacterial polypeptide expressing nucleotide sequence isolated from the Sargasso Sea
ttataaaaatgaagatgtggacaaaaaatttagtgggatgataaatgccttgagctatggggccccacctcatggaggtatagcgccaggtatagatagaattataatgctattggcaaatgaaaaaaatattagggaagtaactatgtttcccatgaaccaaaacgcccaagatttgatgatgaacgctccttctgaagtgaacaaaagcctgcttaaagaattaaatttagaaataaaaaaaaataaataa

SEQ ID NO: 297440 - DNA, 229 bp, Unknown
  Bacterial polypeptide expressing nucleotide sequence isolated from the Sargasso Sea
tttggattcttagtggaagccttgacctatggcgcatcaccccatggtggcatcgcttttgggtttgataggttagttatgattctagctggaactgaaaatattcgtgatgtaattgctttccccaaaactacatcagcgacatctctcatggatgaaagtccaaacaatgtgagtgccacccagttggatgagttggggattcaaattaaagaatctaaaaaataat

SEQ ID NO: 297441 - DNA, 415 bp, Unknown
  Bacterial polypeptide expressing nucleotide sequence isolated from the Sargasso Sea
tttaatacacaagacccactagaaataaaagcatggcagtatgatttggtttgtaatgggatagagttatcaagcggagcaattagaaatcatttgccagaggtgatgtatcgcgcttttgatatcgcaggttatggtccccaagtagtggaagagaagtttccagctatgattaacgcctttaagttcggggctcctccgcacggaggtatagcgccaggcattgatagaattgtgatgcttattgcaaatgagccaaatattagggaagttattctctttccaatgaatggtaaagcagaagacctaatgatgtcttcaccatcttctgtcgaagataaacagctaaatgaattgcacattaaaaaagcaagtatccagtcaaaaaactggcagaaagacacaaaacagtaaa

SEQ ID NO: 297442 - DNA, 577 bp, Unknown
  Bacterial polypeptide expressing nucleotide sequence isolated from the Sargasso Sea
atgaataaattcagaactcatacttgtgcagaattgagcgataaagatattggtaaaaatatttttttatcaggttggatacacagaaaacgagatcatggtaatttattatttattgatttaagagatcattatggggtcacacaatgtgttgttgaaaataatgataagagttttcctatacttgaaaaaatgcgtccagaatccgtggtaaaaatttcaggaaaagtagttaaaagatctgtagggactgaaaatttagatttgaaaactgggaaggtggaggtcagtattaaagaagtagaaatactctcagaagcaaacgagttaccaataccagtttttggtgagcaagattatccagaggatttaagacttaagttcagatttttagatctgaggcgttttgaaatgcaaaaaaatattattttaagatcaaaagttatttcattcataagaaatgaaatgcttaaacttgggtttcttgagtatcaaacacctatcttaacttcttcaagcccagagggcgcaagagatttcttagtgccaagtagattgagtccaggaaaattttatg

SEQ ID NO: 297443 - DNA, 367 bp, Unknown
  Bacterial polypeptide expressing nucleotide sequence isolated from the Sargasso Sea
ttgaagattttagcatatcaatatgatctagtatgtaacggttatgaactttcatcaggtgccataagaaaccatattcctgaatatttattcaaagttttttctaaagtaggatattcaaaagaagctgtagaaaaaaacttttcaggaatgataaaggcattatcttatggtgctccaccccatggaggcatggcacctggaattgatagaattgttatgcttttggcaaaccaaaaaaatattagagaagtaaccttattccctctaaatcagaatgctgaagatcttttaatggaggcaccatcagaggcaactgataaacaacttaaagaattaaacatcaaaactgttaaaaagatttaat

SEQ ID NO: 297444 - DNA, 271 bp, Unknown
  Bacterial polypeptide expressing nucleotide sequence isolated from the Sargasso Sea
ttttctgttgcaggatacaataaaagtcaggtgaggataaaatttagtggaatgttaagtgctttgagttatggcgcacctcctcatggaggtattgctcctgggattgatagaatagtaatgctcctagctaatgagaaaaatataagagaagttacattatttcctatgaatcaaaatgctcaagatttaatgatgaaagctccatcagaagtaagtaataatcaacttaaagaattagggataaaggttgataacaaaaaaaattaat

SEQ ID NO: 297445 - DNA, 383 bp, Unknown
  Bacterial polypeptide expressing nucleotide sequence isolated from the Sargasso Sea
attgggaagagatccaaaggatatattgggattacagtacgatctaagctgtaatggaaatgaggtactttctggagctatccggaaccacaagttagagataatgtataaggcttttagtatcgcaggttataaagaaaaagaagttgagcaacgctttggtggtatggttaacgcttttaagtatggctcccctccacacggaggttgtgctgcaggtattgatcggattgtgatgcttttagcggacgagtcaaatataagagaagtcataatgtttcctatgacacagagggcagaagattcattgatgggcgctccctcagcaatatcaaacgaacaattgcgagagctaggtttgaaatttattcctaaatcctaat

SEQ ID NO: 297446 - DNA, 611 bp, Unknown
  Bacterial polypeptide expressing nucleotide sequence isolated from the Sargasso Sea
attgaaaaaatttagaactcataaatgtaatgaattaagaaaagaaaaagttggagccgaagtaactctatctggctggataaataaaaaaagggaccacggaaatcttttgttcatagatttaagagataattacggaataactcagtgtatcatagataaagaaaattctaattttaaaaaattggaaaaaacgcaattagagaccgtaattaaaattgatggaaaagttgttgaaagatcaaaggagtcaatcaataaggatattgaaactggtgaaattgaaatagtaatcaaaaatttccaagttctcggtgaatgtaaagaacttcctttaccagtttttactgaccaagagtatgctgaagaaataagactgaaatatcgttttttagatttaagaagaaaaaaaattcatgaaaatattatattaagatcaaaagtaatttcgtttattagaaacgaaatgaataagttaggatttttagaatttcaaacaccaattttgacttcatcaagtcctgaaggagcaagagattttttagtaccaagtagattaaatcctggaaaattttatgctcttccacaagcacctcaacaattcaaacaat

SEQ ID NO: 297447 - DNA, 487 bp, Unknown
  Bacterial polypeptide expressing nucleotide sequence isolated from the Sargasso Sea
attgagtaaatataggacacatacttgcggagaactgaatttaaatagtaaagatcaaacagtaaaattatcaggctggatcaataagaaaagagatcacggaaatctattatttttagatttaagagatcactatggactaactcaatgtgtaattgatgagagtaaaaaaatttttaaagaaatagaaaaacttccattggaaaccgtactacaagttgaaggtaaagttttagtaagggaaaaagatacaattaacaaaaatttaaatactggagaaattgaagtaggaattgagaagtataaaatacttgcaagaactaaagaattaccattacctgtgttttcagatcaagaatattctgaagaaatcagattaaagtacagatttttagatttaagaagaaataaaattcataataacattattttgagatctaaaatatttcatttattagatctgaaatgcaaaaatatggttttctag

SEQ ID NO: 297448 - DNA, 568 bp, Unknown
  Bacterial polypeptide expressing nucleotide sequence isolated from the Sargasso Sea
aatgcatgcttatcgttctcaccattgtgccgcattaaccgagttagatgtcggtaaagttgtcagattatctggctgggttcatcgcaaacgtgatcacggccaattggtatttattgatcttcgcgatcatttcggtttgacacaatgtgttgtcgactcatcggatgccagttttgccgtggttgaggcaacacggcttgagtccgttgtgacgattaccggtacggtattgcggcgcagtgatgataccattaacaccagcttgccaaccggacatattgaggtacgcattgaggattttgccgtacaatcggccgctgatactctcccgcttcaagtcaattctgatgaagattcaggcgaagaaacccgcttgcgctatcgctatcttgacttgcgccgcacccggccacatcacaacgtcatactacgtgcgaaaattattcaatcgatacgcaaccgaatggtggcgcaagattttaccgaattccaaactcccattctgacagcatcgtcacctgaaggtgcgcgagattttctggtgccagcacgattgcacccaggg

SEQ ID NO: 297449 - DNA, 616 bp, Unknown
  Bacterial polypeptide expressing nucleotide sequence isolated from the Sargasso Sea
catggtaaaatacagaacacataattgtaacgagttaaaggaaagtgatgaaaataaagacgtcatactcgctggatggattaatcgtgagcgagatcatggtaatgtcttgtttattgatttgcgagatcattatggcgtaactcagtgtgtcattgaaaaaacaaatacaaagctattaaaagaatttgaaaacctaagggctgaatctgttgttaaaatacatggtaaagttattaaacgtgataaagaaaccattaatgagtccctagtaactggtaaaattgagatttctgttgatgcgttagaagttctttctgctgcaaatgaattgcctatgcctgtattcggtgaaaatgattatcctgaagaaataagactaaagtataggtttttagacattagaagagaagaattgcatagtaacattgtattaagatcatctattatttcctatataagaaagttaatgtccgaggccggttttcttgaaatgcagacacccattttaactgcgtcaagtcccgaaggtgctagagattatcttgttccaagcagaattcatcctggaaaattttacgccttacctcaagcgcctcacaatttaaacaattaa

SEQ ID NO: 297450 - DNA, 228 bp, Unknown
  Bacterial polypeptide expressing nucleotide sequence isolated from the Sargasso Sea
aagaacaatttggattcttaatgaatgcttttgaatatggtgcaccaccacatggagggttagcatttggttttgatcgtctttgtgcaatgttaggaggtcaagatagcattagagacttcattgcatttcctaaaaataattcaggaagagatgttatgataaattctccatcggaaattaatattgaacaacttaatgagctgaacatttcattgaaaaaataaa

SEQ ID NO: 297451 - DNA, 286 bp, Unknown
  Bacterial polypeptide expressing nucleotide sequence isolated from the Sargasso Sea
ttaatgtataaacttttttcaattgccggttatgataagaaacaagttgaagaaaaatttagtggaatgctaaatgcattaagttatggagctccacctcacggaggaatagccccaggaatagacagaatagtaatgcttttagcagatgaaaaaaatataagggaagtaaccttatttcccatgaatcaaaatgctcaagatcttatgatgaaagctccttctaaaattgaagaaaagcagcttaaagagttgggattaaagattgatattaaaaaaaattaat

SEQ ID NO: 297452 - DNA, 583 bp, Unknown
  Bacterial polypeptide expressing nucleotide sequence isolated from the Sargasso Sea
atgcataaatatagaactcataaatgtgatgaattaagaattgaaaacgtgaacgatcaggtaaagttatcaggctgggttcatagaaaaagggatcatggacagttaatatttttagatttaagagatcattatggattaacacaagtggttgttgattcatcaaacaaaaatttttctatatttgaaagtttacctttagaaagtgtaatatctgttttaggaatagttgtggaaaggtctgatgaaactattaatgataatttaccaacaggtagaatagaaattaatttgtctgaattagatattatttcccaatccaaagcattacctttgcaagttaattcagatgaagattatggtgaagaaactagattaaaatttagatatttagatttaagaagaagcaggccacatgagaatattgtcttaagatctaacgtcattcaaactattagaaataaaatgttacagttgggatttttagaatttcaaacaccaattttaacagcttctagtccagaaggagctagagattttttagtcccctctagactaaacaaagggaaattttatgcttgcc

SEQ ID NO: 297453 - DNA, 253 bp, Unknown
  Bacterial polypeptide expressing nucleotide sequence isolated from the Sargasso Sea
aatgcctgaatcattggacggctggaaaaggacccaccacaacaacgagctgaggatcgaggacatcggcaaggaggtcctcctgatgggctgggtcgccaaacgccgcgaccacggtggtgtcatctttgtcgatctgagagaccgtgaaggcctgactcagatcgttttccggccggacatcgaagctgagatgcacgccaaagcggagacgatccggaacgaattcgtcctagccgtgcggggcaaggtc

SEQ ID NO: 297454 - DNA, 735 bp, Unknown
  Bacterial polypeptide expressing nucleotide sequence isolated from the Sargasso Sea
tgagccaattttttatgaactttttactgaatttggaaaaggaaagacagtttctaaaaatccatttaaaaaaattacatacaaaaattcgatgttaaaatatggaactgataagcccgatttaagaaatccaatagaaatatctgacgttacagaaatcatgaaaagagatgatgtaaaattagatattttcaaaaaaataattaaaaataatggagttgttagggctatacctgctcccaattcttcttctaaacccagaagtttttttgatggatataataactgggccaaagaagaaggagccaaaggattaggttatattttatttgaaaaagaaaaaggaaaattaagagcaaaaggacctataggaaaatttttttctgaggaggctgttgctgaattagtaaaaatctgcaaattaaaggaaaatgattctatatttttttcttctgataaaattaaagaagcagaaagaatttccggcatagtaaggcaaaagctaggtaaggatcttaatcttatagacagtacgaaatttgagttttgttggataacagattatcccatgtatgaatatgatgagaaagaaaaaaaaattgattttagtcataatcctttttcaatgccacaaattgatttaaaagattttgataaaactgatcctttgtccataatcgcctatcaatatgatctactatgcaatggatacgaaatatcctcaggagcaataag

SEQ ID NO: 297455 - DNA, 408 bp, Unknown
  Bacterial polypeptide expressing nucleotide sequence isolated from the Sargasso Sea
aatgagaactaatttttgcggtgaattaaataaaaaatttattggaaaagaggtaactatctgtggttggattcatagaagaagagatcatggaggagtaatattccttgatataagagatacgacaggtattgttcaagtcgttattagaccagaaactgaagaaacctttaaaattgctgagcaggtaagatctgaatttgtattaaaagctactggaaatgtagaagaaagacctgaagactctgaaaatacttcattaaccacaggtgaaatagaaattgattgtattctaatagaagttcttaatactgctgaaacgccagcatttcctttagatcaatcatctgatgtaggagaagatgtaaggttaaagcatcgtacgttagatcttagaaggccaaaaat

SEQ ID NO: 297456 - DNA, 586 bp, Unknown
  Bacterial polypeptide expressing nucleotide sequence isolated from the Sargasso Sea
aatgaataaatttagaacacataattgttttgaacttacagagaaagatgaaaataaaaaagttattttatctggttggttacatagaaagagagatcatggaaatttactttttatagatctaagggatcattttggaataactcaatgtgttatagaaaacaacaataaattttttaaaactttagaaaaaataaagccagagtcggttcttcaaattactggaacagtagtgaaaagggagaaaggaaccgagaatttagatcttagcacaggtaaaatagaaattaatattttaaacttaaatattttatctgaggcaaaagatttgcctatgccggtatttggtgagcaagattatccagaagacatacgacttaaatatagatttttggatttaagaagagagcaaatgcacaaaaacataatactcagatctaaagtaatttcttttattagatctgaaatgattaattttggttttttagaatatcaaacgcctattttaacatcatctagccctgagggagcaagagatttcctcgtgcctagcagacttaacccaggaaaattttatgctttacct

SEQ ID NO: 297457 - DNA, 673 bp, Unknown
  Bacterial polypeptide expressing nucleotide sequence isolated from the Sargasso Sea
atgaataaatatagatctcacaactgttctgaattaagaaatactgatataggaaaaaatgtaaaaatatcaggctggcttcatagaaaaagagatcatggtaatttattatttctagacataagagatcattttggaatcacacaatgcgttattgagaataaagataaaaattttaaaactttggaaagactaaaaccagagtcagtgattttaataaagggtgatgttgtcaagagaacaaaagatactgaaaataaagatttagagacaggtttaatcgaaattaaaataaaagattttgaagtcctttcatcggccaatgagttaccgatgccagtttttggtgaacaggaatatcctgaggagactaggttaaagtataggtttattgatttaagacgaaaagagatgcatcacaatattcaacttcgttccaaaataatttcttttttaagaaataagatgctcgaaaataattttttagaatttcaaacaccaattttgacagcatctagccctgaaggagcaagagattttttagtgccaagccgtacacaccagggaaaattttatgctcttccacaagcacctcaacaatttaaacaaatgataatgatagctggatttgataggtattttcaaatagctccatgcttagagacgaagatga

SEQ ID NO: 297458 - DNA, 607 bp, Unknown
  Bacterial polypeptide expressing nucleotide sequence isolated from the Sargasso Sea
atgaataaatatagaacacacaattgctcagaattagatgaaaataatattggaaaaagaattaagctttcaggttggattcatagaaaaagggaccacggcaatttactttttattgatttaagagatcattttggaataacacagtgcgttattgaaaataaagataaagattttaaaactttagagaaaatcaaacccgagtccgtgctaatggttgacgggctagtagttaaaagatctaaagaaactcaaaataaagatttaaaaactggtctaatagaagtcaaaattaaaagtattaaaattttatcagaagcaaaagatttaccaatgcctgttttcggtgaacaagattaccccgaagatataagacttaaatttagattcattgatctaaggagaaatgaaatgcatgaaaatattaaattaagatctagagttttatcttttataagatctaaaatgatccagagtaattttttagaatttcaaactcctatacttacagcatcaagtccagaaggagctagagattttttagttccaagcagagtccatccgggtaaattttatgctttacctcaagcacctcagcagttaaaca

SEQ ID NO: 297459 - DNA, 559 bp, Unknown
  Bacterial polypeptide expressing nucleotide sequence isolated from the Sargasso Sea
atgaataaatatagatctcataattgttctgagttgagcgaaaaagatatcaataagacagtacgtttatcaggatggatacatagaaaaagggatcacggaaatttgttgtttattgatttgagagatcattatggtcttacgcaatgtgtaattgaaaacaataataataatttttctcttcttgaaaaagcaaaaccggaaacagttattcaaattgatggtaaaatagtaatgagagagaaagggactgaaaacaacgacttgaaaaccggaaaaatagaggtgcaaattaaatctgtcgaggttttatcttttgcgaaagagctacctattccagtttttggtgaacaagattatccggaggaaattagactgaagtatagatttttggatttaagaagagaggaaatgcataaaaatataatacttagatcaaaagtaatttcctttattaggactgagatgattaaattaggttttctagaatatcaaactccaattttaacttcctcaagtcctgagggtgctagagattttcttgttcctagcagatgaa

SEQ ID NO: 297460 - DNA, 655 bp, Unknown
  Bacterial polypeptide expressing nucleotide sequence isolated from the Sargasso Sea
ttgtggtgctcaccgcaggcggaggcgcagttcggcttcctgctctcggccttcgagtacggcacgccgccgcacggcgggctcgccttcgggctcgaccgcctcacggccatcatctgcggcgtcacctcgatccgcgacgtcatggccttccccaagatctcgagcgggcgcgacgtgatgatcgactccccgagcgaggtcgcgaccgagcagctcgacgagctcaagatcatgctctcgccctccgccggcccgccgcccgagaccctcccctcgagcgccgcgagcgccgcgcccgcgcccgcgcccgcgccggagaagaaggagggcggcgggaaccggccgccgaaggagaagaaggaggagaagaagtcgaaggaggagcgcaagaaggagagggaggaggcggagaagaacaaggcggagaagaaggaggagaagaaggaggagaagcctaagggcgagaaggccaagggcgagaaggccgacgagaagaagcccaaggaagagaagaagcccgacccggaggccgcggctaaggaggcggccaaggcggcggcgaagctgcgcgcgaagatcatcaaggagggcggcaagaagggcgtcgagatcgagggcgcgtcggacatgggcggcctcgacttttctgcac

SEQ ID NO: 297461 - DNA, 322 bp, Unknown
  Bacterial polypeptide expressing nucleotide sequence isolated from the Sargasso Sea
tattgaattatcgtcaggagctataagaaatcatatacctagtttaatgtataaattgttttctatagcaggatatgaaaaaaaattagttgatgaaaagttcagtgggatgattaatgcgttaaaatatggtgctccaccgcatggtggtatcgctcctggaattgatagaattgtaatgctattagccaatgaaaaaaatataagagaagtgacgatgtttccaatgaatcagaatgctcaggatctaatgatgaatgcaccatcaaacgtaaccgaagagcaactaaaagaattaaacttaaatataaaaaaaaaataa

SEQ ID NO: 297462 - DNA, 595 bp, Unknown
  Bacterial polypeptide expressing nucleotide sequence isolated from the Sargasso Sea
ttgaataaatatagaacacataattgtggagcattaaataaagattttattaaaaagtcagtattgctatcaggctgggttcataaaaaaagagatcatgggaatttattgttcattgatctaagagataattttggaattacacaatgtattgcagataaggataacaaaaatttcactgatttagaaaaaataccactcgaaacagtaataaaaatagaaggaacagttttgcaaagatcaagcgaaactataaataacgaaataccaactggtgaaatagaaataaaaattaattcttttgaaattttaggaaaaacgagagagctgccattgccagttttttcagatcaagaatatgctgaagaaataagattaaaatatagattcttagatttgagaagaaaaaaaatccacaacaacataatttttagatcaaaagtgatttcatttattagaaaagaaatggaaaaacttggttttaacgaatttcaaacacccatactaacatcgtctagccctgagggagcaagagattttttagttccaagcagactaaatccaggaaaattttatgcactaccacaagccccac

SEQ ID NO: 297463 - DNA, 868 bp, Unknown
  Bacterial polypeptide expressing nucleotide sequence isolated from the Sargasso Sea
tattaaaacagtttacgctaagagcaaatggcaactaaaagaattcattactatcacttatgctgaggcaatggagaagtacggttgtgaccgtccagatttgcgttttggtttgccgatgaaaacaatcactgaagtagttgccaacaccccttttcaggtatttagaaatccaattgaaaatggtggtattgttaaagctatcaaagtctccaaagaggaaatgggtgaaaaaagaatgtccaagggcgccattgaaaagcttacgtctttagcccaaagtaacggactaggtgggcttgcttatattattgtaaatgaggatgatttacaatctccaataataaaattcttaggagaagacattggcgaaaaaatcattgaaatcatggacgcaaaagttggcgatattgttttcttttccgctgccgattataaaaccgccaacaaagcattggattccgttcgacaagaattaggctctatgcttagccttgttcctaaaaacgtattgcaaccagcttgggtcattgacttcccgcaatttgaagaaaaagaagaaggcggatggacattctcacataacccgttctctatgccaaaaccggaatatattgaacaacatatgaatggagaaaatcccggagaaatcttagctcagcaatacgacttaatcttaaatggttatgaaattggtggcggttctgttcgggcacatcgtggagatatcttggaagcaaccttcaaaattatgggatataatcatgaggaaatgctagcatctgttggaaatatatataaagccttccagtacggagcgcctcctcacggtggtatagcctggggattagaccgattgttaatgatt

SEQ ID NO: 297464 - DNA, 304 bp, Unknown
  Bacterial polypeptide expressing nucleotide sequence isolated from the Sargasso Sea
catggagggttggcgtgtatgtgcatatgtatgtgcatatgtatgtgcatatgtgtgtgcatatgtatgtgcatatgtatgcatatggaggggtcccccccctccacctcatggagggttggcgtgtatgtgcatatgtatgcatatggagccccccccccctccacctcatgcagggttggcgtgtatgtgcatatgtatgcatatggagcccccccccccccctccacctcatggagggttggcgagtatgtgcatatgtatgcatatggagccccccccccctccacctcatggagggttg

SEQ ID NO: 297465 - DNA, 265 bp, Unknown
  Bacterial polypeptide expressing nucleotide sequence isolated from the Sargasso Sea
tcgaatcgcaggttattcaaaaacgaatgttgacgaaaagtttagcggaatgattaatgccttaagttttggcgctccacctcacggaggtttggcaccaggaattgacagaatagttatgttacttgctaatgaaaagaatattagagaagttactatgtttccaatgaatcaaaatgcccaagatttaatgatgaatgccccatcaaacgtaaatgatgaacaattaaaagagttaaatttaaaaattaaaaaaaaaaattaa

SEQ ID NO: 297466 - DNA, 316 bp, Unknown
  Bacterial polypeptide expressing nucleotide sequence isolated from the Sargasso Sea
atctggcgctattagaaatcatattcctgaattaatgtataaacttttttcaattgcaggttatgacaaaaaaaatgttgaagaaaaatttagtggaatgttgaatgcactaagttacggagctcctccgcatggaggtatagcaccaggaatagatagaattgtaatgttactcgcaaatgaaaaaaatattagagaaataactttattcccaatgaaccaaaatgctcaggatttaatgatgaaagctccttcagaggttgatttaaaacaacttaaagagttaggaataaagattgatactaaaaaaaattaa

SEQ ID NO: 297467 - DNA, 298 bp, Unknown
  Bacterial polypeptide expressing nucleotide sequence isolated from the Sargasso Sea
aaaccacattccagagttgatgtataaactatttgctgtcgctggttattcaaaaaaagatgttgacgaaaaatttagtggaatgataaatgctttaagctacggtgcccctcctcatggtggtattgctcctggtattgataggattattatgttaattgcaaatgaaaaaaatatcagagaagttactatgtttccaatgaaccagaacgcacaagacctaatgatgaatgctccatcaaaagtaaataataatcaattaaaagaactcaatttatctttaaagattaataaataa

SEQ ID NO: 297468 - DNA, 622 bp, Unknown
  Bacterial polypeptide expressing nucleotide sequence isolated from the Sargasso Sea
ttgaacaaatatagaagccataattgtggagaactaactattaaggataaaaataaaaatatttccttgagtggatggattaataaaaaaagagaccatggaaatttactttttttagatttaagagacaattatggtgtaactcaatgtgtaatagaaaatagccatgaaaaatttaaggaattagaaaaactatctttagaaacagtaattaaaattgatggaaaagttttggaaagaagcaaagatacaattaataaagacctaaatactggagaaatagaaatatcaataatttcatatgaagtattaggtaaaacaaaggaattaccattgcctgttttctctgatcaagaatatgctgaagaaattagattaaaatatagatttttagatttaagaagaaaaaaaattcatcaaaatataattttgagatcaaaagttattgctttcattagatctgagatgcaaaaactaggttttttagaatttcaaactcctattttaacttcatcaagcccagaaggagctagagattttttagttcctagtagattaaatccaggaaaattttatgcattaccacaggcacctcaacaatttaaacaacttataatggttt

SEQ ID NO: 297469 - DNA, 214 bp, Unknown
  Bacterial polypeptide expressing nucleotide sequence isolated from the Sargasso Sea
tctttcttttggagctccacctcatggcggtatggcaccaggaatagatagaattgttatgttgctggctgaaaaaagtaatattagagaagtcactttatttccaatgaaccagaatgctcaagatttactcatgggagcacccacaaaagctagtgaaactcagttaaaagaattaaatattaaaattgtagaaaaaaataagaaaaaataa

SEQ ID NO: 297470 - DNA, 559 bp, Unknown
  Bacterial polypeptide expressing nucleotide sequence isolated from the Sargasso Sea
atgaataaatatagatcaaataattgctcagagctaactgaaaaagatgaaaataaaaaagtcattttatctggatgggtacatagaaaaagagaccatggaaatttactatttatcgatttaagagatcattttggtttaacccaatgcgttattgaaaacaaaaataaatatttttctattttagaaaaaataaaaccagaatcagttatattaattaaaggcaaagtagtattgcgagcctctggaactgaaaatacagaattaatgactggtaaaatagaaataaatattgagtctgttaaagttttatctaacgctaaagaattacccatgcctgttttcggcgagcaagagtatcctgaagaaattagattgaaatatagattccttgacttaagaagagatgaaatgcaccacaatattattctacgatcaaaagtaatttcttttataagaactgagatgactaaacttggttttttagaatttcaaacacctattttgacatcatccagcccagagggcgcaagagattttctagttccaagtagataaa

SEQ ID NO: 297471 - DNA, 624 bp, Unknown
  Bacterial polypeptide expressing nucleotide sequence isolated from the Sargasso Sea
tatgaacaaatatagagattattatttaaaagatattaatagagaattagttaataagaagattactgtctctggttgggttaatagatctagagaccatggtaacttattatttatagacttaagggactcttcttctctattacaatgtgtcgtagataatacatctaaaaattttaatgaattatcaaaaataaaaaatgaagatgtaatcaaaatatatgggcaaattactaaaagaagtgtagagacaataaattcaaacttaggctcaggagaagttgaactaaaaattgaaaattttgaaatattaagtcaatgctccaaaactcttccacttgaggtaaattctgataatgattatggagaagaggtaagattaaaatatagatatttagatctaagaagatctaagatgcaacacaatattaagctaagaaataatattataaattttgtaagagagtttatgaataatgagggatttatggaattagctacaccaatattaacagctccctctccagaaggtgcaagagactacctcgtaccttcaagaatacataaaggctctttttatgctttacctcaagctccccagcaatttaagcagctttatatggc

SEQ ID NO: 297472 - DNA, 292 bp, Unknown
  Bacterial polypeptide expressing nucleotide sequence isolated from the Sargasso Sea
cataaaccagatctaatgtataaattattttctatagcaggctatactaagaaagaagttgataataagtttagaggaatgataaatgcattaagttatggagctcctcctcatggaggtatagcaccaggagtggatagaattgttatgttgttatcaaacgaaaaaaatataagagaagttacattatttcccatgaatcaaaatgcccaagatttaatgatgaattcaccttctgaggtaagtgaagagcaacttaaggaattgaatctatctttaaaaaaaaaataat

SEQ ID NO: 297473 - DNA, 595 bp, Unknown
  Bacterial polypeptide expressing nucleotide sequence isolated from the Sargasso Sea
cttgtggagaataaccaagtcgcataaagataaagagatttccttatctggatggattaataaaaaaagagaccatggaaatttattgtttatggatttaagagataattatggaattactcagtgtgtaatagataaaagcaatgaaatatttaagaaaattgaaaaattatctctagagacagttgtaaaagtattaggtgtagttattgaaagatcaaatgaaacaataaataaaaatatacctaccggagaaattgaagttaaaataattaatatagatattttaggagcgaccaaagagttacctatgccagttttttctgatcaagaatatgctgaagagataagactgaaatatagatttctagatctaagaagaaaaaaaatacaccaaaatattattctaagatcaaaaataatttcatttataaggaatgagatgcaaaagcttggctttttagaatttcaaacacctatattgacctcatctagcccagagggagcaagagactttcttgttccaagtagattaaatcctgggaaagttttatggctttacctcaggcaccacaacaatttaagcaacttataa

SEQ ID NO: 297474 - DNA, 148 bp, Unknown
  Bacterial polypeptide expressing nucleotide sequence isolated from the Sargasso Sea
atgagaagtgattattgcggagaaataaatgacaagtttattggcaaggaagtcaaggtttgtggttgggttcatagaaggcgagatcatggtggactgattttcttggatcttagagatgtaagcgggattgtacaactagttataa

SEQ ID NO: 297475 - DNA, 525 bp, Unknown
  Bacterial polypeptide expressing nucleotide sequence isolated from the Sargasso Sea
gtcaaggtcaggagccggtgactgtggaagttcccgaactgccattcccacgcattccatactgtgacgcgattgaaatcgtacagaaaggaggtggagagattgaatggggtgatgatatcgaaagtcatcactgtgatatcattgctgcggaatacccaggattccacttcctaccacgatggccaatgtcgatgaagccattctatatcttccataatgagaatgagaaaggctctactggtggccagttgagtcgtggattcgatctcaattatggccgtgatgagatgacctctggaggacagcgagagcatcgtgtcgatgttttggaacagaatctaagaaacatggatttggacccagcagacttcaccttctacaccgatggattccgttatggcgcaccacctcatgcaggatggggactaggtgtagcgcggctactaatgatcctcactggagccggtaatgtccgagaagttgtcttgttcccgcgagatcgttctcgagtcactccctaat

SEQ ID NO: 297476 - DNA, 159 bp, Unknown
  Bacterial polypeptide expressing nucleotide sequence isolated from the Sargasso Sea
ggttggatcgcttagtgatggtaatgagcaatgctgactcaataagggatgtgattgctttccctaaaactcaatcggctcaatgcgtcatgactgatgctccaggcatcgttagcctgaatcaagtcagcgagctaggtattcgaattaaaatttaat

SEQ ID NO: 297477 - DNA, 510 bp, Unknown
  Bacterial polypeptide expressing nucleotide sequence isolated from the Sargasso Sea
attgaataaatatagaacacatacttgtggtgaactcacaaaaaaatttacaaaaaaagatgtaatattatctggctggataaataaaaaaagagatcatggaaatcttctttttgtcgatcttagagaccactatggtattacacaatgtgtaattgataaagagaataaattttttaaagaattagaaaaacttcaacttgaaacagttatcaaagtaaatggaaaagtaattgaaagaactaaagaaacaattaataaagatcttttaacaggggagattgaagttgctattgaaaaattcgaaattattggaaaaacaaaagagttgcctctcccagtttttagtgatcaagaatattctgaggagataagacttaagtatagatttctagatttaagaagaaaacaaatccataataatattatcttaagatcaaaagtaatttcttttataagaaaagaaatggagaagatggattttttagagtttcagacccccattttaac

SEQ ID NO: 297478 - DNA, 184 bp, Unknown
  Bacterial polypeptide expressing nucleotide sequence isolated from the Sargasso Sea
ttgtgtgaagacataggtgcttcacatattgggaaacaggtaatggtttcaggatgggtccatcgaagaagagatcatggcggcgtaatattcattgatctcagagatgtttctggaatacttcaattggttttcgatccagaaaatcaagatctctttgcaactgcagaaaaaataaggagtg

SEQ ID NO: 297479 - DNA, 282 bp, Unknown
  Bacterial polypeptide expressing nucleotide sequence isolated from the Sargasso Sea
aatgagaacaaattattgcggtgaattaggaaaagattttgcaggaaaatcagtgacagtatgcggttgggtgcacagaagaagagaccatggcggcgttatatttcttgatttaagagatacaacgggcatggttcaaattgttgtaaatcctgaacaggctgattcttttacaatagctgacaacgtcagatcagaatacgtccttaaagtcacgggcctagttgaagaaagaccccaagattcagaaaacttaacattagcaactggcgaaattgaatt

SEQ ID NO: 297480 - DNA, 298 bp, Unknown
  Bacterial polypeptide expressing nucleotide sequence isolated from the Sargasso Sea
atgcgcacagattactgtgggaacatcgattcaacttacattgggcaagaagtcacgctttgtggctgggttaacaaacgtcgtgacttaggtggcgtaatctttatcgaccttcgcgacagagaagggattgtacaggttgttttcgaccctgatttacctgatgtactttctgttgctaacacccttcgcggtgagttttgtgtaaagctaaccggtaaagttcgcgctcgtccagaaggacagattaataaagaaatgcgcacaggtgagattgagatcttaggcacaggccttg

SEQ ID NO: 297481 - DNA, 445 bp, Unknown
  Bacterial polypeptide expressing nucleotide sequence isolated from the Sargasso Sea
aagaaagaaatagactttagtcataatcctttttcaatgccgcaaatagaaatgaaagaatttgataagattgatcctttaaaaatattagcctatcaatatgacttagtatgtaatggatacgaactatcttctggtgcaattagaaatcatataccagattatttgtataaggtttttgaaaaggtaggatattcaaaaaaaatggttgaaaaaaatttttctggcatgatcaaggctctttcttacggcgcacctcctcacggaggtatggcacctggaattgataggatagtgatgcttttagccgaccaaaagaatataagagaggttactttatttccactaaatcagaacgctgaagatctcttaatgcaggctccatcagaagctactgaaaaacaattaaaagaattaagtatcaaaactgttaaaaagaattaat

SEQ ID NO: 297482 - DNA, 472 bp, Unknown
  Bacterial polypeptide expressing nucleotide sequence isolated from the Sargasso Sea
atgaataaatatagaactcataactgttcagaattgagtgaaaacgagataaataaaaatgttcatctttctggatggcttcatagaaagcgagaccacggaaatcttttatttatagatttaagagatcattatggaatcactcagtgtgtaattgaaaataaaaataagttttttccagttctagaaaaatcgaaacctgagtctgttttaaaaatatctgggaaagtagtcaaaagatctagtgaaactgaaaatttggatttaaaaactggaaaaattgaaatatcaattatgtcagtaaaagttttgtctgatgcaaaagaacttccgttaccagtttttggtgaacaagattaccctgaagaggtaagactcaaatacagatttttagatctaagaagggaagagatgcacaaaaatataattttaagatcaaaagtaatttcttttataagatctgaaatgctta

SEQ ID NO: 297483 - DNA, 303 bp, Unknown
  Bacterial polypeptide expressing nucleotide sequence isolated from the Sargasso Sea
caatcagaaatcatataccacagctaatgtacaaattattttctttagtaggttatgataaaaaccaagttgatgaaaaatttagtggaatgataaacgcgcttagttatggagctccacctcatggaggtattgcgccaggtattgatagaatagtcatgctgctagcaaatgaaaaaaatattagagaagttacaatgtttccaatgaatcagaatgctcaggatttaatgatggatgctccatcagaggtatctccagatcaactgaaggagctaaatttaagtttgaaaaaaaaataat

SEQ ID NO: 297484 - DNA, 403 bp, Unknown
  Bacterial polypeptide expressing nucleotide sequence isolated from the Sargasso Sea
gatgagaaacaaaatttgtgaagaactcaataatacagatattggtaaattagttaatttatgcggatgggtagatagaagaagagatcatggtggtgtaatttttattgatttaagagaccatagtggattcctacaaataacaattaaccccgatgatggtgcagatctatttaaacaggcagaaactttaagaaatgaaacagtaataatggtcagcggaattattaatgaaaggcccaaagattccataaatacaaatttaagtactggagagttagagcttaaggttaaagatttacaaattctcaaccaaattaaaaacaacttaccttttccagtatctatacatgattatgaaaatacaaaagaggaactcagattaaaatatagataccttgat

SEQ ID NO: 297485 - DNA, 163 bp, Unknown
  Bacterial polypeptide expressing nucleotide sequence isolated from the Sargasso Sea
gatagaatagttatgttgttgtctgatacaactaatattcgagacgttattgcttttcccaaaacacaaagtgcttcatgtttgttaacagaagcaccaagtgtagtgtctgatgatcaacttgacgagctcaatatctcatcaacttctaataaggagtagt

SEQ ID NO: 297486 - DNA, 346 bp, Unknown
  Bacterial polypeptide expressing nucleotide sequence isolated from the Sargasso Sea
gtttgcaatggttatgaattatcatcaggtgctataagaaaccatattccagagtacttatttaaagtttttaaaaaagttggctattcaaaagatatggttgaaaaaaactttaaaggaatgatcaaagcactttcttatggtgctcctccacatggaggtatggctccaggcatagatagaatagttatgcttttagccaatgaaaagaacataagagaagtgacgctctttcctttaaatcaaaatgctcaagacttgttaatgggtgctccctcagaagtaagccaaaaccaactaaaagagttaaatataaaacttggtaataagaaatctaattcttagt

SEQ ID NO: 297487 - DNA, 406 bp, Unknown
  Bacterial polypeptide expressing nucleotide sequence isolated from the Sargasso Sea
tatggaagtttatagaactcataactgtaatgaactaacacttaatgacgttgataagaatgtaacactttcggggtgggttcatataatcagagatcatggtggtgtattatttattgatctccgtgatcattatggaattacacaagtagtagtagatcctgatagtaaagattttgggacagcagaaaattttagatcagagtggtgtattcaaattattgggaaagttaaatcaagagatactgatttgataaatagaaatttaaatactggtgaaattgaagtatttattgaatctgccaaaatcattacaaaatcttatgacttaccattaccagtatttggtgagttggaatatcctgaggaaactagattaaagtatagatttttggacttaagaaga

SEQ ID NO: 297488 - DNA, 187 bp, Unknown
  Bacterial polypeptide expressing nucleotide sequence isolated from the Sargasso Sea
catggcggtatagctcttggtcttgatagaattgtcatgctccttactcaaactgaaaatataagagatgtaattgcattccccaagactcagagcgcatcatgtcttcttaccgatgcaccaaatattgttgatgagtctcaacttaatgaactgcatattaaaaaagatcttaatgaggaataaa

SEQ ID NO: 297489 - DNA, 601 bp, Unknown
  Bacterial polypeptide expressing nucleotide sequence isolated from the Sargasso Sea
tagaacacataattgcggcgaattaaataagtcaaatgtagaccaaaatattattttgtctggatggataaataaaaaaagagatcatgggaatttgttgtttatagatttaagagacaattatggaataacacagtgtgtgatagataaaaaaaataattattttaaggaattagaaaaaattcagcttgaaagtgtaattaaagttttaggaaaggttattgagagatcaaaggagacaataaatcaagatataaactctggagagatagaaataaaaatcgacacttttgaagtgcttggcacatgtaaagaattacccatgccaatatttagtgatcaagaatattctgaggaaataagattgaaatatagatttctcgatttaaggagaaaaaaaatacacgaaaatataattttacgatcaaaaataatttcttttataagagaaaaaatgggtaaattaggttttttagaatttcaaacaccgatattgacttcatcaagcccagaaggtgcaagggattttttagttccaagcagattaaataaaggtaaattttatgcattacctcaagcacctcaacaatttaagcaactt

SEQ ID NO: 297490 - DNA, 574 bp, Unknown
  Bacterial polypeptide expressing nucleotide sequence isolated from the Sargasso Sea
aaaagaagcagaaaaaatatctggtcttgttaggcaaaaattaggaaaagatcttaatctaataaataataaaaattttgaattttgttggattactgactatcccatgtatcaatatgatgaaaaagaaaaaaaaatagactttagtcataaccctttttctatgccacaaactgatattaaaaatttcgataaagcggaccctttatcaatacttgcttaccaatacgacttagtttgtaatggttatgaaatatcatctggagcaataagaaatcatttacctgaattaatgtataaagttttttctaaagttggttattccaaagaagatgttaataaaaaatttgaaggtatgataaaagctctttcatacggagctccacctcacggtggaatggctccaggaatagatcggattgttatgcttttagcaaacaaatctaatatccgcgaagttactctttttcctatgaatcaaaatgcgcaagacttattgatgggagctccctccgaagtaagcaaaaatcagcttattgaattaagtttaaaaacaattgaaaaaaaggaataa

SEQ ID NO: 297491 - DNA, 814 bp, Unknown
  Bacterial polypeptide expressing nucleotide sequence isolated from the Sargasso Sea
ttattaaatgaaaaatttttgaaaatcaaatatgaagatgctctaattaattatggcacagataaacctgaccttagaaatccattaataattaatgatgttacaaatatatttaagagagatgatgtaaaatttgatatatttaaaaaacttgtaaaaaaaggctctatcgtaagatgtatccttacaaaaaatacaattgataagcctagaagtttttttgataatattgacaaatgggcaaaaagtgagggctcttcaggccttgcatatctttcattatcatctgagaatcaactatctgcgaagggtcccgtaggtaaattttttagtaaagactcgcttgaagatttaatgaaaataacaaatgcaaatttaggtgatagtattttttttgcatgcggaaaaaaagaagaagttgaaaagttgttaggtatagctagaaataaattagcaactgacttaaatataattaataaagattcattcgcattttgttggattattgattatccaatgtttgagttagacgaaattactaataagattaagtttagtcataatcctttttctatgccacagggagacgttagcaaactagattttaataatccattaaaaataaaagcatttcaatatgatattgtttgtaatggtattgaattatcctcgggcgcaataagaaatcatatacctagtctgatgtataaattgttttctattgcgggatatgagaaacaatttgtagatgataagttcagtggcatgattaatgcattgaaatatggcgcacctcccccatggtggaattgct

SEQ ID NO: 297492 - DNA, 305 bp, Unknown
  Bacterial polypeptide expressing nucleotide sequence isolated from the Sargasso Sea
aattagaaatcatataccagaacttatgtataaattatttgatattgcaggttattctaaatctgacgttgatcaaaaatttagcgggatgattaatgcattaagttatggtgcacctccacatggcggaattgctccaggtattgatagaataataatgttactagcaaatgaaaaaaatattcgggaggttacaatgtttcctatgaatcaaaatgcacaagatttaatgatgaatgcaccctctaatgttagtgaaaatcaactcaaggaattaaacttattaataaaaaataaaaagtaat

SEQ ID NO: 297493 - DNA, 253 bp, Unknown
  Bacterial polypeptide expressing nucleotide sequence isolated from the Sargasso Sea
tgctttagggttttcaaaggaagaggcacaagcgcaatttgggtttttgatgggtgcttttgagtacggagcgcctcctcatggagggattgcttttggttttgatcgtctgtgtgccctttttgcaggtcaagatagcatcagagactttatcgcgttcccgaaaaacacttcaggaagagacgtgatgattgattcgccctcagaggtttcagaggcccaattgcaggagttgagcataaaaaccaaatag

SEQ ID NO: 297494 - DNA, 142 bp, Unknown
  Bacterial polypeptide expressing nucleotide sequence isolated from the Sargasso Sea
aatgaatgcatttaggtctcataattgtgacgaactcaacgcgagtaaccaaggcgatatggttagattatctggttgggttcaccgtgtccgggaccatggtggaattttatttgtagatttgagagatcattatggattt

SEQ ID NO: 297495 - DNA, 319 bp, Unknown
  Bacterial polypeptide expressing nucleotide sequence isolated from the Sargasso Sea
atcatctggagcaattagaaatcacataccagaccttatgtataaacttttttcaatagctggttacagcaaagaagacgttgatgtaaaatttagcggaatgattaatgctttaagttatggtgctcctccacatggaggaatagctccaggtattgataggatagtgatgttattggcaaacaaaaaaaatataagagaggtcacattattcccgatgaatcaaaatgctgaagacctattaatgcaagctccatcagaagtagatattttgcaattaaaagagttgggaataaaagttgatattaaaaaaaattaa

SEQ ID NO: 297496 - DNA, 172 bp, Unknown
  Bacterial polypeptide expressing nucleotide sequence isolated from the Sargasso Sea
aggattagatccagaaggatttaaccattatttggatccatttagatatggtatgcctcctcatgcaggatggggattaggattagatagattatctatgatttttgcaggtgctaaaaatgttagagaatgtgttttattcccaagagatagaacacgaatgacaccataa

SEQ ID NO: 297497 - DNA, 219 bp, Unknown
  Bacterial polypeptide expressing nucleotide sequence isolated from the Sargasso Sea
tgttaaatgctttaagctatggagcaccacctcatggcggaatagcaccaggtgtagacagaatagttatgttacttgcaaatgaaaaaaatataagagaggtaactttatttcccatgaaccaaaatgctcaagatttaatgatgaaagctccctcagaagttgatgctaaacaattaaaagaacttggaataaagaccgatattaaaaaaaattaat

SEQ ID NO: 297498 - DNA, 234 bp, Unknown
  Bacterial polypeptide expressing nucleotide sequence isolated from the Sargasso Sea
accaaaaatttagtggtatgataaatgctttgagttatggtgctccacctcatggaggtatagctcctgggatagatagaattgtgatgttattagctaatgaaaaaaatattagagaagtaacaatgttcccaatgaatcaaaatgcacaagatctaatgatgaatgcaccctcagaagttaatgaaaatcaacttaaagaacttggtctatcttataagacaaaaaaataaa

SEQ ID NO: 297499 - DNA, 244 bp, Unknown
  Bacterial polypeptide expressing nucleotide sequence isolated from the Sargasso Sea
gttgaagataaatttagtggtatgttaaatgccctaagttatggtgctccacctcatggagggatagctccgggtattgacaggatagttatgctcttagctggtgaaaaaaatattagagaagttacgctttttccaatgaatcaaaatgctcaagatttaatgatgaatgcaccctccgaagtaggtgcagatcaacttaaagaaataggtattaaaacagatctaaagaaaaaaaattaat

SEQ ID NO: 297500 - DNA, 541 bp, Unknown
  Bacterial polypeptide expressing nucleotide sequence isolated from the Sargasso Sea
aatgaataaatataaaactcataattgttcccaactaagagaaaatgatatcaacaaaaatgttattctctcaggttggttgcacagaaaaagagatcacggaaatttattatttatagatttaagagatcattatggaattactcaatgcgttatagaaaataataatagtttttttccaatcttagaaaaagcaagatcagagtctgtaattaaaatttctggcaaagtagtaaacagaagcaagggatctgaaaatacagacttagataccggaaaagttgaagtaaatattaaagctgttgaaatattatccagcgccagagaacttccaatacctgtttttggagaacaagactatcctgaggatataaggcttaagtataggtttttagatttaagaagagaggaaatgcataaaaatataattcttagatcaaaagtaatatcatttattagagaggaaatgttaaaacttggctttcttgaatttcaaacgccaattttgacctcatcaagcccagagggtgctagagatttt

SEQ ID NO: 297501 - DNA, 241 bp, Unknown
  Bacterial polypeptide expressing nucleotide sequence isolated from the Sargasso Sea
gtcgatgaaaagtttagtggaatgatcaatgcatttaatttcggcgccccaccgcatgggggaatagccccaggaattgatagaatagtaatgttgttagctgataaagaaaacataagagaggtaacgctttttcctatgaatcaaaatgctcaagatttaatgatgcaagcaccctcagagattaatgataaacagttaaaggaacttggtcttaaaaaagaaattaaaaaaaattagt

SEQ ID NO: 297502 - DNA, 196 bp, Unknown
  Bacterial polypeptide expressing nucleotide sequence isolated from the Sargasso Sea
tggggctccccctcatggaggaatagctccaggaattgataggattgttatgcttttagcaaatgaaaaaaatattagagaggttactatgtttccaatgaatcaaaatgcacaagatttaatgatgaatgcaccatctgaaatttctgaggatcaattaaaagaactgaatttatccttaaaaaagaaaagttaa

SEQ ID NO: 297503 - DNA, 289 bp, Unknown
  Bacterial polypeptide expressing nucleotide sequence isolated from the Sargasso Sea
tcctgaatatttatttaaagttttttctaaagtaggatattctaaagaagctgttgaaaaaaacttttcaggcatgataaaggcattatcttacggtgctccaccccatggaggcatggcacctggaattgatagaattgtaatgcttttagcaaaccaaaaaaatattagagaagtaaccttattccctctaaatcagaatgctgaagatcttttaatggaggcaccatcggaagcaactgataaacaacttaaagaattaaacattaaaattgttaaaaagatttaa

SEQ ID NO: 297504 - DNA, 205 bp, Unknown
  Bacterial polypeptide expressing nucleotide sequence isolated from the Sargasso Sea
gcattaagttatggtgcacctcctcatgggggtattgctccaggaatagatagaatcgtgatgttattggcagaagaaaaaaatattagagaggtaacaatgtttccaatgaaccaaaatgcacaagatcttatgatgaatgcaccgtctgaagtaggcgaaaatcaactgaaagaacttaatatttcaaaaagaaaaaaataat

SEQ ID NO: 297505 - DNA, 217 bp, Unknown
  Bacterial polypeptide expressing nucleotide sequence isolated from the Sargasso Sea
catgataaatgctttaagttatggtgctccaccacatggtggtatagctcctgggattgatagaattgtcatgttacttgcaaatgaaaaaaatattagagaagtaacaatgtttccaatgaatcagaatgctcaagacctcatgatgaatgctccatcagatgtaagtgaaaatcaacttaaagagctttctattaaattaaaatcaaaaaaataa

SEQ ID NO: 297506 - DNA, 259 bp, Unknown
  Bacterial polypeptide expressing nucleotide sequence isolated from the Sargasso Sea
ggttatagtgaaaaagatgtcaacgaaaaatttagcgtaatgataaatgctttaagttacggagcaccacctcatggaggtattgcgcctggtattgacagaatagtaatgttgttggctgataaaaacaacataagagaagtaactttatttcctatgaatcaaaatgcacaagatttaatgatgtctgctccttctgatgttgaagacaaacaattaaaagaacttaatattaaattggatataaagaaaaattagt

SEQ ID NO: 297507 - DNA, 793 bp, Unknown
  Bacterial polypeptide expressing nucleotide sequence isolated from the Sargasso Sea
tgctactgctactgaaggaggtgccgcattgttccctatcttttattacaataaagaagcatttctagcacaaagtccgcaattatacaaagaacaattgacaatgagttttgaaaaagtttttgaaattgcaccaatatttagagcagaaccatctcgtacaaatcgacatctatctgaagcgatatcaattgactttgaagaggcatatgttgattataatgatgtaatggatagaattgaagatttgattaaaacatgtgtagaaactgttcaaaactttgtaaaagaaaatgaaaatgttgattttcaaattcctgaaattcctgataaaatacctcgttacaaatattccgaactaattgaaaagatgcaatctgcaggtgtaaaagctcaatggggtgatgatttgtatccaaaaaacctacaaaaaattggattgaccggattttatttcattattgattggccaatgggtccaaaacctttctatgtcaaagtaaaaaaagatgacccaaaaatatcagaatcctttgatttgatgtggggcgatttggaattatcttccggcagtacccgtattgaaaagaaatctgaattagaaaatagaatgaaaaacaaaggcatgaatgtagatgcatttggatatcatctcaatgtttttgattttggtgtacctccacatgcaggttgtggaattggtcttgaaagattaatgatggcactaactggaactgaaaacattagagatacaacattttatccaagagatgttgatagactaacaccgtag

SEQ ID NO: 297508 - DNA, 469 bp, Unknown
  Bacterial polypeptide expressing nucleotide sequence isolated from the Sargasso Sea
atgtatcattatgacgaaaaagaaaaaaaattagacttcagtcataatcttttttctatgccacaaatagatattaaagattttgataaatctgatcctcttgagattttggctcaacaatatgaccttgtttgtaacgggtacgagctatcatcaggtgctataagaaaccatatacccgaatatttattcaaagtttttagtaaagttggatattctaaagaaatggttgaaaaaaatttttcaggaatgataaaggcactttcatatggtgcacctccacacggcggtatggcacctggaatagataggattgtgatgcttttagcagatcagaaaaatattagagaggttactttatttccattaaatcaaaacgcagaagaccttttgatgaatgcaccttcagaagtaagtgaaaaacaattaaaagagttaagcattaaaacagttaaaaaaaataattaac

SEQ ID NO: 297509 - DNA, 271 bp, Unknown
  Bacterial polypeptide expressing nucleotide sequence isolated from the Sargasso Sea
acttttctcgattgcaggatatgataaaaatcaagtagatgaaaaatttagtggtatgattaatgcacttagttatggcgcacctccacatggaggaatagcacctggtattgataggattgtaatgttactagctaatgagaaaaatattagggaagttactatgtttccaatgaaccaaaacgcacaagatttgatgatgaatgcaccatctgaggtaaatccagatcaattgaaagaattaaatttagctttaaaaacaaaaaaataa

SEQ ID NO: 297510 - DNA, 298 bp, Unknown
  Bacterial polypeptide expressing nucleotide sequence isolated from the Sargasso Sea
cctacctgatttaatgtttaaagcatttgaaatagcaggacattcaaaagaacatgtaatgaaaaattttggtggaatggtaaatgcatttaaatatggagttcctcctcatggaggtatagcgcctggcatagatagaatagtaatgcttttagcagaagaaaagaatattagggaggtaatactctttcctatgaatcaacaggctcaagatttaatgatgaatgcacctgcagatgttccatcgactaatctaaaggatttaaacatacagactttagagccagaagaagattag

SEQ ID NO: 297511 - DNA, 532 bp, Unknown
  Bacterial polypeptide expressing nucleotide sequence isolated from the Sargasso Sea
atgaagttttctgatggaatattaactggaggtatctccaagtttttttcggatgatttacattctaaaataacaaaaaagcttaatatggataatggtgatatcatttttattattggtgacgatataaaaacaacgcaattatcattaggtgcgctacgtattgcaattgctaaaaaagaagagtatacaaaatcaaatgattttaaacctgtatggattacagattttcctatgtttgagtataaccaagaagacaaacgttatcattcgctacaacatccttttacacaaccaaaatcaaatgacctagagaaactaaaatcttcaccggagtctataccatcaaaacaatatgatttaataattaatggctatgaggtggctggtggttctgttaggattcataattctaatatgcagaaagtaatttttgatatacttggtattgatcgtaaagaagccaatgaaagattcggtttttttatagatgcgctcaaatatggaacacccccgcatggtggtatagcat

SEQ ID NO: 297512 - DNA, 583 bp, Unknown
  Bacterial polypeptide expressing nucleotide sequence isolated from the Sargasso Sea
aatgctatttcaatctggcaaacaggctgaatcttctcagtatttagacaccttaagacgtaaaatatatactattccaaatgaaaatacctatgagtttgtatggattgatgattttccatatttcgaaatagaaaacggagaattgcaaccttcacatcatccatttacttcgccaaaagatacttcagaatttctctctaatccaaatgatgctaaagctttacattatgatttagtcttaaatggcatagaattaggatctggatctcaaagaattaatgatcctaaattacaaaaagaagtactatccaaatggggattatcagaatctgaaataaatgatcgttttgggtggtttattgaagctttatcatatgggtcaccacaacatgctggatttgcagttggtattgatagatttatagctgaaatgatgaatgcagattcaataagagacgttatcccttttcctaagacgcagtctggtctagacccattaactaatgcaccatcaaatttgtcaatattagaattacaagaatacaatatttcaattgaaagtatagaaaatgaagagtga

SEQ ID NO: 297513 - DNA, 286 bp, Unknown
  Bacterial polypeptide expressing nucleotide sequence isolated from the Sargasso Sea
actgggaggacaattatcacgtggattcgatttgaattacggtcgcgatgagatgaccagcggtggtcagcgtgaacatcgtgttgaagtgcttgagcaaaatttgcgcgacatggatttggacccctccgatttcacattctataccgatggattccgctacggcgccccccctcatgcaggttggggacttggagtggctcgacttctgatggtgttgacgggtgcaggcaacgtgcgcgaagtcgttctcttcccaagggatcgaagtcgcgtcacaccctaa

SEQ ID NO: 297514 - DNA, 289 bp, Unknown
  Bacterial polypeptide expressing nucleotide sequence isolated from the Sargasso Sea
acctgaattaatgtataagctatttaatatagctggttactcaaagaaagatgttgaagaaaaatttagtggaatgataaatgcattgagttatggcgcaccacctcatggaggtattgcaccaggtatagatagaatagtgatgcttttagctgacgaaaaaaatattcgagaagttacaatgttcccgatgaatcaaaatgctcaagatttaatgatgaatgcaccatctacaattagtgaagatcaattgaaagaattaaatcttactgttaagaaaaaaacttga

SEQ ID NO: 297515 - DNA, 748 bp, Unknown
  Bacterial polypeptide expressing nucleotide sequence isolated from the Sargasso Sea
ctgggcctcgcgcgcttccccgcgccccgcccctcggctcgcagcggcgtcgtcgtccccgcggtgcacaggcgtcggttcaccgccgccgtcgtccccccgcgcgcggtcgccgccgacgccgacgtcgagaccgccaacctcctccccgacgcgctccagtggcccgcgcgcgaccagacctgcggcacgctgcgcgagcaggacgagggcaggaccgtgaccctgtgcggatgggtggacaagcagagggacatgggcggcatcgtcttcgccgacgtcagggatcacaccgggttcgtgcaggttttctccgacgcggacaccccgaaggaagccaccgacgccctagccgcgatgcgagccgagtgggtcgtgtgcgtcaccggtcgcgtcaagaagaggaccgcgccgaacgataaggtcccgaccggcatggtggaggtggccgcggacaaggtcacggtgctgaacacggtggccaagtcgctcccgttttcaatcagcggcgcccccgagggcgacgacgacgagctgcgcgaggaggttcgactcaagaaccgcgtcttggaccttcgcagaccgcagatggtccgcaacctgcgcctcagggccaagaccatccgcgcgcttcgtaaggtgctggaggatacgcacgatttcctggaggttgagacgccgatcctgacgaggtctacacccgagggagctcgtgattacctcgtcccttcgaggctccagcccggcg

SEQ ID NO: 297516 - DNA, 217 bp, Unknown
  Bacterial polypeptide expressing nucleotide sequence isolated from the Sargasso Sea
agtcagtttggttttttaattgaggccctgaagtatggtgctccacctcatggaggtattgcctttggacttgacagactcgctgcagttctcaaaggaaaagatgtaattagagactttattgctttccctaaaaataatagtggaaaagacttaatgatagatgctccatcaaaattaactaaagatcagttaaaagatttatcacaaaaataga

SEQ ID NO: 297517 - DNA, 616 bp, Unknown
  Bacterial polypeptide expressing nucleotide sequence isolated from the Sargasso Sea
ttgagtaaatacagaacccatacctgtggcgaattaaatataaaaaataacggtgaaaatgttttattatctggctgggttaacaaaaagagagaccacggaaatcttttatttattgatttaagagataattacggaattactcaatgtgtaattgataacgaaaacaatttattcaataaaattgagaaaactcctttagaaacagttattcagtttgaaggcaaagttgtaaaaagagaagaagatacaataaatagacaattgaatacaggtgaaattgaaataaaaatttcaaattttaaaattttaggcaaaactaaagagttaccgctacctgtattttcagatcaggaatattcagaggagattagacttaaatacagatttttagatttaagaagaaataaaatccataaaaatattaatttaagatcaaaagtaatatcatatattcgaaaagaaatggagaattttggatttttagaataccaaactcctatattaacatcatcaagtcctgaaggtgcaagagattttttggttcccagtagacttaatcccggaaagttctatgctttaccgcaagcaccacaacaatttaaacaacttataa

SEQ ID NO: 297518 - DNA, 715 bp, Unknown
  Bacterial polypeptide expressing nucleotide sequence isolated from the Sargasso Sea
agagatcatgaaacaaaagttcaaatagtaacggataaacctgataaattcgataatgtaaaaaacgaatactatgtatcagtaaatggagttttagttaaaagaaaaaaagaaaatattaacaaagaagtgttgtttggtgatatagaaatagaattatcaaatctagaaataatttctgaaagtaaaacattaccatttcaaattgaagatgatattgatacagatgaacagattagattaaaacacagatatttagatataagaagaagtgaaatgaataagaatatcattgcacgatctaaaacattcaaaagcattagggaatcaatgaacaagttaggtataaatgaattagatacgccaacattaataaaatcaacacctgaaggtgctaaagattttatagttccttcaagaaaatcaccaggtaacttttatgctttacctcaatcgcctcaaatgtataagcaactatttatgttatccggattgaaaaactactatcagatagctaagtgctatagagatgaagactctcgcaaagatagacagcctgaatttactcaattagatatagaaatatcaaacggaaatcctgaaattgttcaaaaaataattgaatcaacaatgaaacatgtacttaaaaatgtttattcaattcaagtaaaaactccctttaaaaaaatgacttatgatgaagcaatgaacatgt

SEQ ID NO: 297519 - DNA, 471 bp, Unknown
  Bacterial polypeptide expressing nucleotide sequence isolated from the Sargasso Sea
aatgagaagtgattattgcggagaaataaatgacaagtttattggcaaggaagtcaaggtttgtggttgggttcatagaaggcgagatcatggtggactgattttcttggatcttagagatgtaagcgggattgtacaactagttataaatcctgaaatcggcgaatcatttaaaaaagctgaacaagtcagaagcgaatatgtgctccaagcagtaggaaaagttaatgatagaccggatgatgctgaaaatcatgctctaacaactggcagtatcgaaattattgtcgatgagctaaatgttttaaatgcagccgagacaccagcattccccttggataattacactgaagtgggagaggaggtaagattaaaaaaccgtacccttgaccttaggcgtgagacaatgcaacaaaatattaaaacaagatcgaaacttacaaataacattagaaactatcttgaggaaaa

SEQ ID NO: 297520 - DNA, 508 bp, Unknown
  Bacterial polypeptide expressing nucleotide sequence isolated from the Sargasso Sea
aatgaataaatacagaacacataattgctccgaattaagcgagaaagaaataaataaaaatgtttgtctctctggatggttgcatagaaaaagagaccatggaaatttattatttatagatttaagagatcattatggaatgacacaatgtgttatagaaaataataataaattttttccaattttagaaaaatcaaaacctgagagtgtgattaaaataattggtaaagtcgttaaaagatcaagtggaacagagaatctagatttaaaaactggtaaaattgaaatttcaatagagtcagctgaaattttatccaatgctaaagaattacctatgcctgtttttggtgaacaggattaccctgaagacataaggttaaaatatagatttttagatttaagaagagatgaaatgcataataatataatcttaagatctaaagtgatatcttttattagatcagagatgttgaaattaggttttttagaatatcaaactccaatttta

SEQ ID NO: 297521 - DNA, 556 bp, Unknown
  Bacterial polypeptide expressing nucleotide sequence isolated from the Sargasso Sea
ttgaataaatatcgtacacataactgtggtgaattaaatttaaaaaataatgatcaagaagtattattatcgggttggataaataaaaaaagagatcatggtaatttaatttttatagatttaagagataattatggattaacccaatgtgttattgataaaaaaaataaacaatttaacgagttagaaaaaactcaattagaaacagtaataagaatttcaggaaaagttgtaaaaagaaattctgaaacaattaataaagatatagaaacaggcgagatagaggtaacgattttttcttttgatgttcttgggacatgtaaagaacttccaataccagtttttactgatcaagaatactcagaggaaattagattaaagtataggtttttagatctaagaagaaaaaaagtacacgaaaatattaatcttagatctaaggttatttcatttataagaaatgaaatggaaaaaatgggatttaatgaatttcaaacaccaatcctaacatcttccagtccagaaggtgctagagattttttagtgcccaagtaga

SEQ ID NO: 297522 - DNA, 572 bp, Unknown
  Bacterial polypeptide expressing nucleotide sequence isolated from the Sargasso Sea
taattctctttcgtttctaagaaattatattgctaaagaaaatggattaattgatgataatataatgaaatttctttgggtcacggactttcctttattcgagaaagatgatgagaataaatggcaacccgctcaccatgttttttcttctccaaaacttgaagatataaaatttcttgatactgatccaggaaaagttaatgcagatctttttgatcttgtttgtaatggtgttgaacttggctcaggttcgattagaatacacgatagagatttacaagaaaaagtatttgatgtgattggttattcatccagtgaggtaagtaatttatttggtcatttgcttgattcatttgaatttggggtccctccgcatggcggaatgggtcttggtcttgatagattagtagcaatgcttgcaaaagaagattcaataagagaagtcattgcttttccaaaaacccaaactgcatcagatttactatttggttctccagacatgataactgatgaacaattgagtgaacttagtatagaaattattgaagaagaggaaaaatctaagaaatgaa

SEQ ID NO: 297523 - DNA, 469 bp, Unknown
  Bacterial polypeptide expressing nucleotide sequence isolated from the Sargasso Sea
aatgtatgagtatgatgaaaaagaaaaaaaaatagattttagtcacaaccctttttctatgccacaaatagatataaaagactttgataacgcagatccattaaaaattcttgcttatcagtatgatttggtttgtaatggttacgaactttcctcaggagcaataagaaatcatattccggaatacttatttaaagttttttcaaaagttggttacccaagagaaatggtagaaaaaaatttttcaggaatgatcaaagcactttcttacggagcacctcctcacggaggaatggcaccaggaattgataggatagtaatgcttttagcaggtcagaaaaatatcagagaggttactttattcccattaaatcaaaatgcccaagatctcctaatgaacgctccatcagaagtttcagaaaagcaattaaaagagttaagtattaaaatattaaaaaaatcaaattaa

SEQ ID NO: 297524 - DNA, 583 bp, Unknown
  Bacterial polypeptide expressing nucleotide sequence isolated from the Sargasso Sea
tatgaaaatagacgatttaataaaatcaaaagttaatagtgaagtttctgacttaagaggttgggtaagtagtattcgagaccacggaggtttagttttcattgaactaagagactcaagttcaaaaatacaaatcgttttagattctgaaaatgtcgatatcgataccttcaaatcagaatattacataagtgttaacggaacatatataaaaagagataaatcaatgattaataaatctcaacaattcggtgagtatgagattagtgctgacagttactcaattatctcaaaaagcaaacctctaccgtttcaaatagaggactctatcgatactgatgaaaatataagattaaaatacagatatttggatttaagacgagaagatatgaaaagaaatatccttgctcgttcaaacacatttaaatccattagaaattcaatggatagtttatcttttttagaattagatacaccaacgttaacaaaatctactcctgaaggtgcgaaagacttttttagtccatcaagaaaacaaagtggttcattttatgctttaccccaatcacccccagatgtataa

SEQ ID NO: 297525 - DNA, 733 bp, Unknown
  Bacterial polypeptide expressing nucleotide sequence isolated from the Sargasso Sea
aatgactagatcagagatagatgctttagatgagttagttaaagattacggaagtaacggtcttggatggtttaaaattgaaaactccacagtatcgggaccattatctaaaattacaactgacaaagagaatgaagaaatactaaaactaggtgatggaatgctcttatttcaatctggaaatatggagatatatcaagtattagatattattcgtagagaaatttttagtccggtagatacttacagtttcgcttggatttatgattttccttattttgaagttgaaaatggagaaatacaaccctctcatcatcctttcacatcaccaaaagatactgagaattttattgaagatcctaataatgcaacagctctacattatgatttagttcttaatgggtcagagttgggttcaggatcacaaagaattaattctccagatatccaaagaaaagtattagaaatgtggggtctttcagatgatgacattgaaaatcgttttggatggtttattgaagctttgtcttatggaacaccgcaacatgcaggaatagctttaggtattgataggattattgctgtaatgctcaatgttgattcaataagagatgttataccttttcctaaaacacaatctggacttgaccctttaacaaacgcaccaactattattgatgaaaatgaattagaggattataaccttaaatacattgaggtaactgatgaatag

SEQ ID NO: 297526 - DNA, 430 bp, Unknown
  Bacterial polypeptide expressing nucleotide sequence isolated from the Sargasso Sea
atgaatcactacagaactcataattgctcagagttaagagccaaggatgtcggagaaacagtcaaaatatcaggttgggttcatcgaaaaagagaccatggaggtcttctgtttattgatttaagggatcattatgggattatgcaatgtgtaactgacatggaatctgatgtctttaaattagttgaacccctaaaagttgagtctgtaataaaagtttcaggaaaattagtaaaaagaagtgatgatactatcaatgaaaaacttccaactggagaaattgagatacaaattagtgaattagaaattttatctacttctgaaactcttcctttacaagtgaattctgatgatgatgctggagaagaaataaggctaagatacagatatttagatctcagaagagaaagacttcataaaaacataattt

SEQ ID NO: 297527 - DNA, 174 bp, Unknown
  Bacterial polypeptide expressing nucleotide sequence isolated from the Sargasso Sea
ttggtcttgaccgtactgtaatgctaatggctgattgtgaatctattcgcgatgtaattgcatttccaaaaactcaaactgctagctgtctacttactacagcacctgccagtgcaagttcaaaacaattgcatgaattaggtattaagctgtccaaaccaaaatctgaataaa

SEQ ID NO: 297528 - DNA, 307 bp, Unknown
  Bacterial polypeptide expressing nucleotide sequence isolated from the Sargasso Sea
gctataagaaatcatattcccgaactaatgtataagttattttcagttgcaggatatgataaaaaaacagtagatgataagtttagtggtatgataaatgccctaagttatggtgctccaccacatgggggaatagcaccaggtattgatagaataatcatgttattggctggagaaaaaaatataagagaagttacaatgtttccaatgaatcaaaatgcagaagatttaatgatgtgtgcgccatctgaagtaagtaatgaacaattaaaagaacttaatttatcaatcaaaaaaaataaataat

SEQ ID NO: 297529 - DNA, 302 bp, Unknown
  Bacterial polypeptide expressing nucleotide sequence isolated from the Sargasso Sea
aagaaatcataaacctgatcttatgtataaattgttttcaattgcaggttacaataaagcagaggtagatgaaaaatttagtgggatgattaacgcattaagttatggtgcaccaccacatggtggaattgcacctggaatagatagaattgtcatgcttttagcaaatgaaaaaaatataagagaagttactatgttcccaatgaaccaaaacgctcaagatttaatgatgaacgcaccatcagagattaatcaagaccaattaaaagaattaaatctttcaataaaaactaaaaattaaa

SEQ ID NO: 297530 - DNA, 211 bp, Unknown
  Bacterial polypeptide expressing nucleotide sequence isolated from the Sargasso Sea
aatgcactttagttatggagctccacctcatgggggaattgcacctggtatagatcgtatagtgatgttattagcgaacgagaaaaatatcagagaagtgacaatgtttccaatgaatcagaatgcccaagatttaatgatgaatgctccatcacaggtaagtgaaaatcaattaaaagagcttaatattgcattaaaaaaaaataagtaa

SEQ ID NO: 297531 - DNA, 235 bp, Unknown
  Bacterial polypeptide expressing nucleotide sequence isolated from the Sargasso Sea
aatgaaaaattttggatttttaatagaagccttagaaatgggtgctcctcctcatggtggaatagcgtttggattagatcgtattaccatgctgatcataggtgcagattcaatcagagaaacaatagcgtttccaaaaaatcaacaagcaaaatgtcttctcacaaatgcgccttcaaatgtctcagaatcacaattaaaagaattagatattgaaataacaattgatgaataa

SEQ ID NO: 297532 - DNA, 541 bp, Unknown
  Bacterial polypeptide expressing nucleotide sequence isolated from the Sargasso Sea
attgaataaatttagaacacatacttgtggtgaacttacaaaaaaatttactaaaaaaaatgtaatattatctggctggataaataaaaaaagagatcatggaaatcttctttttgtcgaccttagagatcattatggcataacacaatgtgtaattgataaagaaaataaattttttaaagaattagaaaagcttcaacttgaaacagttatcaaagtaaatggaaaagttattgaaagaagcaaagagacaattaataaagatcttttaacaggggaaattgaagttgctattgaaaaatttgaaataattggaaaaacaaaagaactaccccttcctgtttttagtgatcaagaatactctgaggagataagacttaagtacagatttctagatttaagaagaaaacaaattcataataatattatcttaagatcaaaagtaatttcttttattagaaaggaaatggagaagatggattttttagagtttcaaacccccatattaacttcatcaagtcctgagggagcaagagacttt

SEQ ID NO: 297533 - DNA, 364 bp, Unknown
  Bacterial polypeptide expressing nucleotide sequence isolated from the Sargasso Sea
ttgaatgttttagcatatcaatatgacatcgtatgtaacggaatagaattgtcatctggagcaataagaaaccatagaccagatatcatgaaaaaagcttttgaaatagcaggatatggcgaaagtgagattaaatcaaaatttagtgctttgtttgatgcttttcattatggagttccccctcacggaggatgtgcaccaggtctagacagaataattatgttactcagtgaaaatgaaaatatcagagaagtaatagctttcccttttaaccaaagagctcaagacttaatgatgaacgcaccagttaaaataaaggataaacaattaaaagagttaaatttaaaaaaagttagcgattagc

SEQ ID NO: 297534 - DNA, 148 bp, Unknown
  Bacterial polypeptide expressing nucleotide sequence isolated from the Sargasso Sea
atgagaactgaatactgtgggaatgtaactaaagaacatttaggaaaagatgtttcaatatgtggttgggtccatcgaaggcgagaccatggtggcgttatttttcttgatataagagatcttgagggtatttgtcaggcagttatcg

SEQ ID NO: 297535 - DNA, 502 bp, Unknown
  Bacterial polypeptide expressing nucleotide sequence isolated from the Sargasso Sea
atgagaactaatttttgcggtgaattaaataaaaaatttattggaaaagaggtaactatctgtggttggattcacagaagaagagaccatggaggagtaatattcctagatataagagatacaacgggcatcgtccaaattgttatccgaccagaaaccaaagaaacttttaaaattgcagaacaagtaagatctgaatttgtattaaaagccactggtaatgtagaagaaaggccagaagattctgaaaatacaacacttacaacaggagagatagaaattgattgcagttcaatagaagttcttaatactgcagaaactccagcctttcctttggatcaatcatcagaagttggcgaagatgtaagattaaaacatcgcacacttgatctcagaagaccagttatgcaagaaaatctgagaataaaatctaaacttacaaaatctattagagattatttagaaaaacattcattcgttgatattgaaactcctatactaa

SEQ ID NO: 297536 - DNA, 764 bp, Unknown
  Bacterial polypeptide expressing nucleotide sequence isolated from the Sargasso Sea
atttcccattttctattataataaagaagcatttctagctcagagtcctcaattgtacaaagaacaattgacaatgagttttgaaaaagtttttgaaattgcaccaatatttcgagctgaaccatcaagaacaaaccgacacttatctgaggcaatatcaattgactttgaagaggcatatgttgattataatgatgtcatggaccgaatcgaagatttaattaaaacatgtgttgaaactgttcgaaactttgcaaaagaaaatgaaaatatagattttcaaatacctgaaattcctgataaaattcctcgttacaaatattctgaattaatagaaaagatgcaggctacaggtgttaaggcacaatggggtgacgatttgtatccaaaaaacctacaaaaaattggattgaccggattttatttcatcattgattggccaatgggtccaaaacctttctatgtaaaagtaaagaaagatgatccgaaaatatctgaatcttttgatttgatgtggggcgatttagaattatcttcaggaagtactcgtattgaaaagaaatctgaattagaagatagaatgaagaataaaggaatgaatgtagatgcatttggatatcacctcaatgtttttgatttcggtgtacctccacacgcaggttgtggcattggtcttgaaagattgatgatggcactaactggaactgaaaacattagagatacgacattttatccaagagatgtggatagattaacaccttgat

SEQ ID NO: 297537 - DNA, 343 bp, Unknown
  Bacterial polypeptide expressing nucleotide sequence isolated from the Sargasso Sea
tgacttagttcttaatggattggagttgggaggtggctctttacgtattcatgaagccagcttacaaagagaggttctgaaaacagtaggacttactgataaagagattgatgaaaaatttggatttttaatagaagcactggaaatgggtgctcctcctcatggtggaatagcgtttggtttggatcgtattaccatgcttatcattggtgcagattcaatcagagaaaccattgcttttccaaaaaatcaacaagcaaaatgtcttctcacaaatgcaccttcaaatgtctctgaatctcaattaaaagaattagatattgaaataacaattgatgaataa

SEQ ID NO: 297538 - DNA, 538 bp, Unknown
  Bacterial polypeptide expressing nucleotide sequence isolated from the Sargasso Sea
aatgagaacagatttttgtggaagaatcactgaagaatatcttgatcaagaagtgacagtatgtggatggattcaccgtcgacgagatcatggaggagtaatctttttggatgtgagagatttaaaaggtatttgtcaggcagttattagtccggataacaaagatgcatttgccctcgcagatagttgcagaagtgaatatgtaattcaggtaacaggtaaagtaagaccgcgacccgaaggaaccgttaataacaagatgtttaccggtaaagttgaaattgatgttcaaaacatcaacctattaaataaagcagaaactccagcatttcctttggatgattatcaagacgttaatgaagatgttcgcttaaaacatagagtccttgatttacgaagaccagaaatgaatgcaagaatattgaaaaggtcacaaattgttgaatatattcgaaaattccttgagaaaaataacttcaatgaaatcgaaaccccaatactaactcgtgcaactccagagggggcgcgtgattatgtt

SEQ ID NO: 297539 - DNA, 789 bp, Unknown
  Bacterial polypeptide expressing nucleotide sequence isolated from the Sargasso Sea
aaattttatttctaaaattatttaaatcattcagtaataaaaaaattcttcatgaaaagtttccaagaattacttataaagatgcaatgcttaaatacgggtcagataaaccagatttaagaaatcccttagaaatttcagatttaacaattatttttgaaagagaagatgtgaaatttgatatttttaaaaaattagttaaaagtggatcactagttagagcgttagttaccaaaaatacaaaggataaacctagaagtttctttgatagtattgatagatgggcaaaagagcaaggttcctctggtctagcttattttacattagaaaaagatgataaaataaatgccaaaggaccaattggaaaatttttttcagagaatgcactattagaaatcatgaaactaacaaatgcgaatataggtgatacgctatttctttcttgtggaaagaaaaatgatgtagagaaaatattaagtgttgcaagaaataagatagctgaagatttaaatttaattgataatgaaatattctcattttgttggattattgactatccaatgtatgagattgatgaaattacaaaaaaaataaaatttagtcataatccgttctcaatgcctcaaggcgaaataaataaattagacttatctaatcctttaaatattaaagcctatcaatatgatattgtttgtaatggaattgagttatcatctggtgctattagaaaccatgttcctgaattaatgtataaattatttgaaattgcaggttattcaaaaaaatgat

SEQ ID NO: 297540 - DNA, 850 bp, Unknown
  Bacterial polypeptide expressing nucleotide sequence isolated from the Sargasso Sea
actccaatattaataaaaagtacaccagagggagctagagattatgtcgtaccttctagaataaagcatggtgggttttatgcattgcctcagtctcctcaacaaatgaaacaaattttaatggtttctggattcgatagatattttcaaattgcgagatgttttagagatgaagatcttagggcagatcgtcaaccggaacatactcaacttgatttagaaatgagtttcgtccaccaaaatgacgttatgaatttggtagaaagtctatatattaaactaatcaaaaagattgatgaaactatcaagatagataataaatttatagtaatgacttacgatgaagctatgaaaaaatatggctcagataagcctgacttacgttattcgctagagatgactgatttatcagatattgctaccaaaattgaatctaatgttattcaaaattccttgaaaaatagttcaatattaaaaggtttagttgcaaaaaattggcataatcttggaagaaaagattttgatagactgacagatttggtgaaaaagcaaggcgcagggggtttaatttatatatccattcctgagaatatagagggaaaaataaacttagagcaaaccgctggtccattgaataaattttatactcaagaaaatttagatgaaataatatctaaaactaatgcacagcctggagatgtaatttttatgataataggtcaagaaaatatagtaaattcgtcactttcttatctccgaactcatatagctaaagaacaaaacttaattgatgataaagagatgaaatttttgtgggttacagatttccctttattgagaaagatgacaa

SEQ ID NO: 297541 - DNA, 1012 bp, Unknown
  Bacterial polypeptide expressing nucleotide sequence isolated from the Sargasso Sea
tttaatgaatttcaaacaccaatattaacttcgtcaagccccgaaggagcaagagattttttagttcctagcagattaaatccaggtaaattttatgcactgccacaagctcctcaacaatttaagcaactaataatggtatcaggttttgataagtattttcaaattgctccatgttttagagatgaagacgcaagggcagacagaagccctggagaattttatcaattagatattgagatgtcatttgtagaacaagaagatgtatttgaggtagttgaaaaattaatggttaatctttttactaatttttcaaaaaaaaaaatgatctataaaaaatttcctagaattccattcaaagtcgctatggataagtatggcactgacaaaccagacttaagaaatcccttaataattttcgatatatcaaagatatttaatagagatgatgtaaagtttgaaatttttaaaaaattactcaagtcaggatcattaattaaagcaattataacaaaaaaaactaataccaaaccaagaagcttttttgataacattgataaatgggcaaaagaacaagggtggagtggattagcatatttttcaatcgaaaaagatgaaaataataaaattcttggcaagggaccagttgggaaatttttttcagaagatgcaattaaagaaataatgaaaattacctctgcagaaataggtgatagtatttttatgtcttgtagtaaagagaatgaaatttttgaaataatgtcaaaatctcgaagcaaaatagctgaagatctaaatattataaatgaaaactcttttgctttttgttggattacagactttccaatctttgaaatggatcaggaaacaaaaaaaataaattttagccacaatcctttttctatgcctcaaggagatttaaataatctagatttttctaatcctctagaccttaaagcatatcagtatgacattgtttgcaatggtattgagctatcttctggtgcaataa

SEQ ID NO: 297542 - DNA, 908 bp, Unknown
  Bacterial polypeptide expressing nucleotide sequence isolated from the Sargasso Sea
tggcaggcagcaatggataattacggcactgatagaccagatactagatatcaaatgttattaaaagatttaggaggagtattaggtgatattggatttaatattttcaccaaagcaattaagtctggcggtaatataaaatccataacagtcaaaggaggtaattcaagtattagcaacgtaagaattaaaccaggaggtgatatcttccaagtagcgcaagatgcaggagctggtggtttggcgtttataagggtcaagggagatgagcttgagactattggggcaattaaaaataatttaagtgaagagcatatagctgatattttaaaaatcacagaagcaaaagatggagacttaatcctcttaggagctggagataaacaaattgtcaatcagtcattagatagggttagacaatatatcgcaaaagacttaaatctcattgacaaaagtaaatggaatttcttatgggtaactgacttcccgatgtttgagagaaatgaagaggaaaatagatatgaagctttacatcatcctttttgttctccaaaaaatatcaaatctaaaaatcttgaaaacttgaaaaaagaaattgagagctcaacagcaaatgcttacgacctagttctcaatggattggagttaggaggtggctctttacgtattcatgaagcgaacttacaaagagaggttctgaaaacggtaggacttactgataaagagattgatgaaaaatttggatttttaatagaagccttagaaatgggtgctcctcctcatggtggaatagcttttggattggatcgtattaccatgctgatcattggtgcagattcaatcagagaaaccattgcttttccaaaaaatcaacaagctaaatgtcttcttacaaatgcaccttcaaa

SEQ ID NO: 297543 - DNA, 845 bp, Unknown
  Bacterial polypeptide expressing nucleotide sequence isolated from the Sargasso Sea
tatgatacgtcactattgtaatcaagttaacgataaagatatcgataaaaaaatcaagatatatggctgggtcgcaaaaagacgtgaccacggaggtattatttttgtggatctaagagatcatacaggaatcctacaattagtatttaatcctgatgacaaaaatctttttagaaatgctgagtctattcgatcagagtatgttctttgtgtagagggacatgtcaataaaagactagatggtgctattaataaagaaatagcaacagggtcgattgaaattatagtgtctaaactagacatacttaataagtcagacaatcctccatttaaagttaatgatccagatattaatgaagatatgagactacaatatagatacctggatattcgaaatgacgcgatgcaaaaaaatatcagatttcgatctaaactagtagcaattattagagaatatttttactcaaaagatttcgtcgacatagaaacacctatactaactaagactacaccagagggagcaagggattatttagttccgagtagagtacatgaaagacgattctttgctttacctcaatctcctcaactatttaaacaaacattgatgatgggagctatagataaatatttccaaatagctaaatgttttagagatgaagacttaagatctgatagacaaccagagtttacacaattagatgtagaattatcttttgttgaacaaaatgatattattagccttgtcgaggatttatgtaagaaaatctttaaagatttaatggattatgaggataaattagtttttgaaagaatgtcttatgatgaagccatgcaaacttatg

SEQ ID NO: 297544 - DNA, 853 bp, Unknown
  Bacterial polypeptide expressing nucleotide sequence isolated from the Sargasso Sea
tcaaaaattgagaatttatcaaatgaaagaaaattactaattcaaagaattgaagaaataaattcaatcagaaaaactacaagcaaagaaattggtgaatcaaagggtcagccttcagatagtttgattaaacaaatgaaatcatttggattagaactttccaaaaaatctcaaaaattaaaagacatcgaagagaatttagaaaacattcttctaaggttgcctaacttgccactagattccactcttatcggtgagaatgataatgataataaagttttagaaacatttaatgaaaaagataagattaattcatctatacctcattgggatcttggagaaaaatataaaatcattgatttagaaaaaggagtcaaattaactggagctagatggtatctattagctggaaaaggtgcaatgctccaaagggcacttgttcaatggatgctaaatgagcacgtatttaataatggttataaagaaatagctcctccctatatggtaaataaaaatacaatgactggctctggtaaccttccaaaatttgaagaaactttatttagcgataaaaataatgatttatggttaattcctacaggagaagtatcattaaataatatgtttgggggcgagattataaagcatgagcttccattaaaatatgtaactcatacaccctgttttagagatgaaaaaagttcagctggtagagatactagaggcataaagagggttcatcaatttgaaaaagttgaattatacagatttgaacacccttcaaattcgatgaatgcatttaatgaaatggtctctgaagtatctaaattatgcgaggcattaaattttacct

SEQ ID NO: 297545 - DNA, 856 bp, Unknown
  Bacterial polypeptide expressing nucleotide sequence isolated from the Sargasso Sea
attgtctgaggcaaaggagttgcctatgccagtttttggcgaaaacgactatccagaagaaattagattgaagtatagatttcttgatattcgaagagaggaattgcataaaaatattgttctaagatcctcaattatttcccatattagaaagctcatgtctgacgctggttttttagaaatgcaaacaccaatacttacagcttctagtccagaaggggctagagattacttggtaccaagcaggattcatccaggaaaattttatgctcttcctcaggccccacagcaatttaagcaattaattatggcgggaggattcgataaatattttcaaatagccccttgttttagagatgaagatgcaagagcagatagaagtcctggcgaattttatcaattagatatggaaatggcatttgttgagcaagacgatgtgtttaacgccattgaacccattttacattctgtatttacaactttttctgattttaacgttacagaaacaccttttccaagaattacatatgccgatgctatgagcaggtatggaacagacaaacctgaccttagaaatccaataaatatttctaatttaactaaggaatttaatgatgacaaagttgaatttagtgcatttaaaaaaattatagaagaggggggcgaggttattggaataccagcacctgactcgagtcaaaaacctagaagtttttttgataatcttaataattgggcaagaaaagaaatgaatgctgctggtttaggttatattgtttttgataaaagctcttctggcgtagaaggaaagggacctattgcaaaatttattccctctgaaattcaagaaatgata

SEQ ID NO: 297546 - DNA, 752 bp, Unknown
  Bacterial polypeptide expressing nucleotide sequence isolated from the Sargasso Sea
aatgaaccgatatggatcggacaaaccagacgttcggtttgatctggaattagttgaactcaccgaagtcttctcaggcactgatttcaacgcgtttaaggcaccgactatcaaaggaatcaaagttgaaggcggtgccgagatgggtcgtaaccaactggatcaattgactgacaaagccaaaagttggggcgccaaggggctggtgtggatcaaagtcggaccatcgggcgaagtgaactcgccagtagccaaattcatgagcgaagccgaaatatccggattgctgtcagcgatgaatgcgaaagagggagatatctgttacctcgttgctgataattggcgacgagtggtgcacgtgctgggtcttcttcggctcgaattggggagaccaccggttaacgagggaggcctgcgatttctttgggttgtggatttcccgcttttcgaagatgtcgatgacgaaggaaatccgcttcccgcacaccaccccttcactatgccccatgcggatgatctagagcttctatcgaatagcaacacccctgacgatttactcaaagtgagatcccaggcgtacgaccttgttctcaatggatgggagctagggtctggcagcgttcgtatccaccgacgagacatccaacaacaaatctttaacttgctgggcataaacgaagaagagtcacagcagaagttcgggtttcttatggacgccttccggtacggagcgccacctcacgcaggctttg

SEQ ID NO: 297547 - DNA, 757 bp, Unknown
  Bacterial polypeptide expressing nucleotide sequence isolated from the Sargasso Sea
ccaaggattaaatattctgaggcaatgcttaagtatggaacagacaagcctgatttacgaaatcctttaattatcaaagatgtaacagaaatttttactcgagatgatgtaaaatttgaaatttttaaaaaattagttaaagctggatccagtgttagagcaattgtaacaaaacagacaaaaaacaaacctagaagcttttttgataacatagataactgggctaaagagcaagggtcttctgggttagcgtattttactattgaaaaaaataaagatattcaaggaaaaggacctattggtaaattttttaacacggactccataaacagaatcatgaagataacatcagcagaagttggagatacagtttttttatcttgtggaaaaattagtgaagtagaaaaaattttatcattagctagggaaaaaattgcaaatgatttaaatttaattgaaaaaaataaatttgcattttgctggattgttgattatccaatgtttgaaaaagacgaagaatcaaatcaaataaaatttagtcacaatcctttttccatgccgcaaggagatcttaataatattaattttacaaaacctctagacttaaaagcatatcaatatgatattgtttgtaatggaattgaattatcatcaggagctataagaaaccatatcccagaacttatgtacaaactctttgaaattgcaggatatgataaaaatattgttaatgaaaaatttagcggaatgataaatg

SEQ ID NO: 297548 - DNA, 793 bp, Unknown
  Bacterial polypeptide expressing nucleotide sequence isolated from the Sargasso Sea
atgaataaatatagaactcataattgttccgaactaacagaaaatgaaaataataaagttgtaactttatctggatgggtacatcgaaagagagaccatgggaatttattatttatagatttaagagaccattttggattaacccaatgcgttgttgaaaatagtaataaattttttaaaatgcttgaaaaaatcaaaccagagtccgtaataagtgtcactggcaaagtcttaaaaagagaaaagggaactgagaatttagaattatctacaggaaagattgaagtaagtattcaatctattaaaattttggcagaagctaatgacttaccaatgcctgtttttggcgaacaagactatccagaagatattagattaaagtatagatttttagatttaagaagagattcaatgcataagaatattatattaagatcaaaagttatatcatttataagatctgaaatgttaaaattaggttttttggaatttcaaacaccaattttgacttcttcaagtcctgagggcgctagagatttcttagtaccaagccgtttaaatcctggaaaattttatgcattaccgcaagcaccacaacaatttaaacaattaattatggtttcagggttcgataaatatttccagatagctccttgtttcagagacgaagacgcaagggcagatagaagtccgggcgagttttatcaattagacatggagatgtcttttgtagaacaggaggatgtatttgaggttatcgaaaccttaatggttaacttatttaaaaaatatt

SEQ ID NO: 297549 - DNA, 386 bp, Unknown
  Bacterial polypeptide expressing nucleotide sequence isolated from the Sargasso Sea
aaagatcaaatttagtcataaccctttttctatgccgcaaggtgatactgaaaatttagatctttctgatcccctcaaactaaaagctttccaatatgatattgtctgtaacggcattgaactgtcttctggagcaataagaaaccataaacctgacttaatgtataaattatttcaaattgccggctactctaaagaaacagtgaacgataaatttagtggtatgattaatgctttaagttatggagcaccacctcatggtggtattgcgcccggaatagataggattgtaatgttattagcagaagaaaaaaatattagagaggtaacgatgtttccaatgaaatcaaaatgcccaagatttaatgatgaacgcaccatctgaa

SEQ ID NO: 297550 - DNA, 412 bp, Unknown
  Bacterial polypeptide expressing nucleotide sequence isolated from the Sargasso Sea
tactttacctaaagcatcaaagaaagaacttatagaaaatccaaacgatgttcttgcatatgcatatgatgttgttttgaacggatatgaaataggtggaggatctttaagaatttatgataaaaatatgcaagaagcaatttttgaaattcttaacatttcaaagaaagaagctgagagtaagtttggtttccttttaaaggctttgtcttcaggttgtccacctcatggtggcatcgcatttggactagatagaattgttatgcttgtaacagatactgcaaacataagagatgtgattgcattccctaaaactcaaagcgcgacatgtctattaacagatgctccaagcaaggttgataaagatcagcttgatgaacttaaaataattagtacacataaggaagaatag

SEQ ID NO: 297551 - DNA, 865 bp, Unknown
  Bacterial polypeptide expressing nucleotide sequence isolated from the Sargasso Sea
catggaaacttactgtttttagacctaagagataattatggagtaactcaatgtgtaatagaaaacagtcataagaattttaatgaattagaaaaattatctttagaaacagttataaaagttgaaggaaaggttttggaaagaagcaaagagacaataaataatgaattaaatactggtgaaatagaaatatcaattacttcataccagttattaggcacaacaaaagaattacctttaccagttttctctgatcaagagtactccgaagaaataagattaaaatacagatttttagatttgagaagaaaaaaaattcatcaaaatataatattaagatcaaaagttatttcatttataagatcagaaatggaaaaatttggatttttagagttccaaacaccaattttaacttcatcaagtcctgaaggagctagagattttttagttcctagcagactaaatccaggaaagttttatgcacttccacaagctcctcaacaatttaaacaattaattatggtatcgggttttgataaatattttcaaattgctccttgctttagagatgaagacgctagagcagacagaagtccaggtgaattttatcaattagatctagaaatgtcatttgttgaacaagaagatgtattcgaagtagttgagaaattaatgataaatatttttaaaaaattctctaaaaaaaaattacttaatcagaaattcccaagaataacctattcagatgcaatgttaaagtatggtactgataaacctgatttgcgcaatcctttaattattaatgatttaactgagatatttaagagagaagatgtaagttttgaaatttttaaaaaacttgtac

SEQ ID NO: 297552 - DNA, 1039 bp, Unknown
  Bacterial polypeptide expressing nucleotide sequence isolated from the Sargasso Sea
atatgcagaagaaataagacttaaatatagatttttagacttaagaagaaaaaaaattcatgaaaatattattttaagatcaaaagttatttcttacataagaaatgaaatgacaaaattaggctttttagaatttcaaactccaattttgacctcttctagccctgaaggagccagagattttcttgtaccaagtcgtttaaacccaggaaaattttatgctttaccacaagcgcctcaacaatttaagcaattaataatggtatcgggttttgataaatattttcaaatagctccttgctttagagatgaggatgctagagctgatagaagtcctggtgaattttatcaactcgacttagaaatgtcttttgttgagcaagaggatgtattcaatattgtagaaaaactaatggttaatacttttaaaaatttttctgataaaaaattgatgtatgatatttttccaaagataccctactctgaagcaatgcttaaattcgggactgacaaacctgatttaagaaaccctcttattataaatgatattacagaaatatttagtagagaggatgtttcattcgatatttttaaaaaattagtacgatcaggatctaaagttcgatctatcactacaaaaaatacaaaagataaacctagaagtttttttgataatattgataaatgggctaaagaacaaggtgcttctggattagcatactttacatttgaaaaagataataaaatttcagctaaaggaccagtgggaaaatttttttccgaagaggcacttttagaaataatgaaattcactaattctgaggtaggggacagtatttttttagcatgtggaaagcaaaatgaattagaaaaaataacagctctagctagagataaaattgcgcaagatttagacctaattgatgatgatacttttgctttctgttggatagttaactaccctatgtttgaaaaagatgagttgacagataagataaaatttagtcataacccattttcaatgccacaagggaattaa

SEQ ID NO: 297553 - DNA, 1025 bp, Unknown
  Bacterial polypeptide expressing nucleotide sequence isolated from the Sargasso Sea
gggttggattcatagaaaaagagatcatggtaatttattatttttagacataagggataattttggaataacccaatgtgttattgagaataaagataaaaattttaaaattttggaaaaattaaaaccagagtctgttatttctttaaagggcgatgttgttaaacgctcaaaagaaaccgaaaatgaagaattaaaaactgggatgatagaaataaaaattaaaaatataaatgttttatcagaagcaaaagaattacctatgcctgtgtttggagaacaggagtatccagaagaaataagattaaaatatagatttattgatcttagaagaagtgaaatgcataaaaatattcaattaaggtcaaagattttgtcatttataagatcaaagatgacagagaacaactttttagaatttcaaactccaatacttactgcatcgagtcctgagggtgctagagattttttagttccaagtcgtgtacaccccggcaagttttatgcattaccacaagcaccacagcagtttaaacagatgataatgatttccggttttgatagatattttcaaattgctccatgttttagagacgaagatggtagggcagacagaagccccggagagcattatcagttagatatggaaatgtcctttgtggagcaagaagatgttttaaaaaccgttgaaccaattttttatgacttatttataaaattcggtaatggtaaaaaagtaaataaagctccttttccaagattaaaatataaagaagctttaagtaagtatgggactgacaaaccagatttgagaaatcctattgaaataactgatgctacagaaatatttaaatcaaaagaagtaaatttaaaaatttttaaagaaataatatcaaaaggaggaatagtaaaagcaatacctgttccaaatacaatctcaaaacccagaagttttttcgatggattaaataattgggctataagcgagggtgctagtggactagcatatattaactttgaaaatc

SEQ ID NO: 297554 - DNA, 986 bp, Unknown
  Bacterial polypeptide expressing nucleotide sequence isolated from the Sargasso Sea
aatggtatcaggatttgatagatattttcaaattgctccatgctttagagatgaagacgcaagagcagacagaagtcctggagaattttatcaattagatattgaaatgtcatttgtagaacaagaagatgtttttgaagttgtagaaaagttaatggtaagtttatttaaaaatttttctaaaaaaaaaatgatgtttgaaaaatttcctagaattccatttaaagagacaatgagcaaatatggtaccgacaaaccagatttaagaaatccattattagtttatgatatttcaaaagtatttaaaagagatgacgtaaaatttgaaatttttaaaaaattattcaaatctggttctttaattaaatcaattgttacaaagaaaactaatactaaacctagaagcttttttgataatattgacaaatgggcaaaggagcagggatggaatgggttagcatatttttctattgaaaaagatgaaaaaggtaaaatatttggaaaaggaccagttggtaaatttttttcggaagattctttaaaagaaataataaaaataacttccgctgaagtaggtgatagtatttttatgtcgtgtagtaaagagaacgaagttaacgatattatgtctaagtctagaaataaaataggagaagaattaggtattattgatcaaaactcttttgctttttgttggataacggattttccaatatttgaattagataaagaaacatcaaaaataaattttagccacaatcctttttcaatgccccaaggagatttgaaaaatcttgatttatcaaaaccattagagttaaaggcttatcaatatgatatagtttgtaatggggtagaactatcatctggagctatcagaaaccatatacctgaattaatgtataaacttttttctatagctggttacgataaaattacagttgatgaaaaatttagtggaatgattaatgctttaagttatggag

SEQ ID NO: 297555 - DNA, 229 bp, Unknown
  Bacterial polypeptide expressing nucleotide sequence isolated from the Sargasso Sea
tttctaatttcagcattacagcatggctgtccgccgcatgcaggattggcaataggttttgatagaatgattatgttaatgactggttcagattctataagggatgtaatcgcctttcctaaaactcaaacagcatcttgtttacttactgaggcaccaggacaagctgctcaggaacaacttgaagaattacacattaggttccatggactagaaaaggaggattaag

SEQ ID NO: 297556 - DNA, 687 bp, Unknown
  Bacterial polypeptide expressing nucleotide sequence isolated from the Sargasso Sea
aatgagaactaatttttgcggtgaattaaataaaaaatttattggaaaagaggtaactatctgtggttggattcacagaagaagagaccatgggggggtaatattcctagatataagagatacaacgggcatcgtccaaattgttattcgaccagaaactaaagaaacttttaaaattgcagaacaagtaagatctgaatttgtattaaaagctactggtaatgtagaagaaagaccagaagattctgaaaacacaacacttacaacaggagagatagaaattgattgtagttcaatagaagttcttaatactgcagaaactccagcctttcctttagaccaatcatcagaagttggtgaagatgtaagattaaaacatcgtacacttgatctcagaagaccaattatgcaagaaaatctgcgattaaagtctaaacttacaaaatctattagagactatttagagaaacattcattcgttgatattgaaactcctattctgactaaagccactccagaaggagctcgtgactatttagttccaagcagaacaaatcctggcaatttttttgctttgccacagtctccacaattatttaaacagatgctaatgatttctggatttgataggtattatcaaattgcaagatgttttagagatgaagatctaagagctgatcgacaacc

SEQ ID NO: 297557 - DNA, 289 bp, Unknown
  Bacterial polypeptide expressing nucleotide sequence isolated from the Sargasso Sea
aaggtggttcttagcttattaggtataaacgaagaacaagctgaagaaaagtttggatttttaacttcagctctacagcatggttgtcctcctcatgcaggattagccatcggttttgataggatgattatgttgatgaccaattctgaatctataagagatgttatcgctttccctaaaacacaaaccgcctcttgtttgttaacagatgctccaggagaagcttcaaatgaacagcttgatgaattgcatattaaatttcacggcctagagaaggagaaaaaatagt

SEQ ID NO: 297558 - DNA, 688 bp, Unknown
  Bacterial polypeptide expressing nucleotide sequence isolated from the Sargasso Sea
gggggtgggagtagaaatttttgtgatagaatgaattcttttgctcaaaaagaaggattacctggcatggggtatattttttggagagaaatagatggaaaaatagatgctgcaggtccgttggcaaaaaacataggtgaagaaaaatcagagcttattaggcagcgtttaaatttaaatattggtgattcagctttttttcttggaggaaaaccctctaattttgaaggattttctgcaagagctagaaatcatattgggaatgagcttaaacttataaaagagaatgttttcgcatttgcttggattattgattttcctatgtatgagaaagattctgataaagatactattgatttttcgcataatcctttttccatgcctcagggaggaattaaatctctaatgggagacccgcttgaagttaaaggttaccaatatgaccttgcatgcaatggttatgaattattatctggagcaattagaaatcatgagttggaaactatgtttaaggcctttgagatagcagggtattcaaaagatgaagtttcttcaaaatttcaaggtataattgaaggattaaagtatggtcctccacctcatggtggatgcgcattaggtattgacaggatgataatgttattagctgatgaagaaaacataagagaagtcattattttccaatgaa

SEQ ID NO: 297559 - DNA, 1006 bp, Unknown
  Bacterial polypeptide expressing nucleotide sequence isolated from the Sargasso Sea
gaattcacccaaatagatatagagatgtcttttgtagatgaggaagatatattcagccatatggagggattaacgcggcatatatttgagactgtttcaaagataaatctacctgattcttttccaagaattacttatcaagaagcaatggaaatatatggttctgacaaacccgatttaaggtatggccttaaactagttgatcttaaacattatacggatgtttcagattttaaagcatttagtactgttgagagagtcaaaggaatcatcgtaaacgatggtggaaaatattcaaggaagatgattgatgagttaactgattttatcaaaaaatataaggctaagggattggcgtggatgaagttgaaagatagttcatttgatggtggtatatcaaaattcttttccgttgaattgcaagaaaagatgcaaaacgaactggatattgaaaacggtgacattctttttatggttggagatgactcaaaaattgttctaaatgccctggggcatttaagaattgaaattgctaaaagagaagatttaatcaacaagaataaatactgcccaatttgggtgacagaattccctatgtttgaatatgatgatgaaaatgagcgctatgtagcaatgcaccatccatttactgctccaaggatagaggatattaatctactagatactgaaccttcacgagcgcttagtaggggttatgatttaacaatgaatggatatgaaattgccggtgggtctatcagaatacattcaacagaggttcaggaaaaagtattttcattacttggctttagtaaaaaagaagcagtagataaatttggatttttagtcgaagcacttacttatggtgcgcctccacatggaggaattgcgtttggatttgataggcttgtgatgctacttgcgggtacagaaaatatcagagatgtgatagcttttccaaaaactacttccgcagcatcactaatggatgaaagtccaagttcag

SEQ ID NO: 297560 - DNA, 921 bp, Unknown
  Bacterial polypeptide expressing nucleotide sequence isolated from the Sargasso Sea
tgttttagagatgaagatgctcgagctgatagaagtccaggagaattttaccaacttgatttggagatgtcatttgtagaacaagaggatgtatttcaggtagttgaaaaattattaattaatacctttaagaaattttcaaacaaaaaattggtttctgataaatttccaaagatatcttatgctgatgctatagcaaattatggaagtgataagcctgatcttaggaaccctttaattataaatgatattacagatattttttctagagaggatgtatcgtttgatatatttaaaaaacgtgtaaaattaggtaataacgtaaaatgtattgtaactaaaaacacaaaaaataaaccaagaagtttttttgacaatattgacaagtgggctaaagatcaaggtgcttctggtttagcttatttcacccttgaaaaagataaagaaatttctggcaagggacctattgggaagtttttttcttcagaatctttagaatatattatgaaaataacaggagctaaaattggtgatagtatctttttagcttgtgataaaaaaaaagaattagaaaaaattacatctttagctagagataaaatagctagagaactagatttaattgatgataatactttttcattttgctggattgtggattacccaatgtttgaaaaagatgatcaaacaaataaaattaattttagtcataatcctttttcaatgcctcagggtgatataaacaaaattaattttgaaaaacctttagatatccttgcttttcaatatgatattgtatgtaatggtatagaactttcatcaggtgctattagaaatcatatacccgaattgatgtataaacttttttctattgctgggtatggtaaaaagcaagttgatgaaaagtttagtgggatgatc

SEQ ID NO: 297561 - DNA, 730 bp, Unknown
  Bacterial polypeptide expressing nucleotide sequence isolated from the Sargasso Sea
taaacctagaagtttttttgataatattgataaatgggccaaagaccaaggtgcgtccggactagcatactttacatttgaaaaagataataaaatttcagctaaaggaccagtgggaaaatttttttccgaagaggcacttttagaaataatgaaattcactaattccgaggtaggggacagtatttttttagcatgtggaaagcaaaatgaattagaaaaaataacagctctagctagagataaaattgctaaagatttagatcttattgatgacgatacttttgctttctgctggatagttgactatcctatgtttgaaaaagatgaattaacaaataagattaaatttagtcataacccattttcaatgccacaaggtgaattaaaagataaagattttgaaaatcctctagatattcttgcttaccaatatgatatagtttgtaatggaatagagttatcttctggtgcaataagaaatcataaacctgatcttatgtataaactcttttcaattgcaggttacaataaaggagaggtagatgaaaaatttagtgggatgattaacgcattaagatatggtgcaccaccacatggtggaattgcacccggaatagatagaattgtcatgcttttagcaaatgaaaaaaatattagagaagttactatgtttccaatgaaccaaaacgctcaagatttaatgatgaacgcaccatcagagattaat

SEQ ID NO: 297562 - DNA, 916 bp, Unknown
  Bacterial polypeptide expressing nucleotide sequence isolated from the Sargasso Sea
aatctttagtgaccaagaatacgctgaagaaataagattgaaatatagatttttagatttaagaagaaaaaaaattcatgaaaatattattttaagatctaaagttatttcatacatcagaaatgaaatgactaaattaggttttttagaatttcaaacaccaattttaacctcatctagtccagagggcgctagagattttttagtgcctagtcgtttaaatccaggaaaattttatgcattacctcaagctcctcaacaatttaaacaattaataatggtgtcaggatttgacagatattttcaaattgcaccttgttttagagatgaagatgcaagagcagacagaagtcctggagaattttatcaactagatttagaaatgtcatttgttgagcaggaagatgtatttagtgtagttgagaaattaatggtgaatacatttaaaaatttttcaactaaaaaactgatgtttgataaatttccaaagatttcatacaaggaagcaatgcttaaatatggtactgataaaccagatttaagaaacccgctcattataaatgatattactgaaatttttacaagagaagatgtttcatttgaaatatttaaaaaattagtaaaatctggatctaaagtaagatgtataattacaaaaaatacgaaagataagccaagaagtttttttgataatattgataaatgggcaaaagaagaaggtgcttctggtttagcttattttacttttgaaaaagataaagatatttcagcaaaaggccctataggaaaatttttttctcaagatgcattggctgaaatcatgaaaaaaacaaactgtgaaataggggatagtattttcatggcttgtggaaaacaagacgaattagaaaaaattactgcactagcaagagataga

SEQ ID NO: 297563 - DNA, 661 bp, Unknown
  Bacterial polypeptide expressing nucleotide sequence isolated from the Sargasso Sea
gatgagaaacaaaatttgcgaagaactcaataatacagatattggtaaattagttaatttatgcggatgggtagatagaagaagagatcatggtggtgtaatttttattgatttaagagaccatagtggatttctacaaataacaattaaccccgatgatggtgcagatctatttaaacaggcagaaactctaagaaatgagacagtaataatggttagcggaattattaatgaaaggccaaaagattccataaatgcaaatttaagtactggagagctagagcttaaggttaaagatttgcaagttctcaaccaaattaaaaacaacttaccttttccagtgtctatacatgattatgaaaatacaaaagaggaactcagattaaaatatagataccttgatttaagaaggggaaaattactagaaaatttaaaaacaagacataagattattaaagttgctagagaatttcttgataattttggatttacagaagtagagaccccattacttacaaagtcaactccagaaggcgctcgcgattttcttgttcctgcacgtctttcaaatggagaattttttgctttacctcaatccccacaactatttaaacaacttttaatggttggaggcctggacaagtattatcaaatcgcaaaa

SEQ ID NO: 297564 - DNA, 811 bp, Unknown
  Bacterial polypeptide expressing nucleotide sequence isolated from the Sargasso Sea
tgaaaagtttccaaggattacctatgaagatgcaatgcttaaatatgggtcagataaaccagatttaagaaatcctttagaaatttcagatttaacaattatttttgaaagagaagatgtgaaatttgatatttttaaaaagttagtcaaaagtggtttcctggtaagggctttagttaccaaaaatacaaaggataaaccaagaagtttctttgatggtattgatagatgggcaaaagagcaaggttcctctggtctagcttattttacattagaaaaagatgataaaattaatgccaaaggaccaattggaaaatttttttcagagaatgcattattagaaatcatgaaactaacaaatgcgaacattggcgatacgatatttctttcttgtggaaaaaaaaatgatgtagaaaaaatattaagtgttgcaagaaacaaaatagctgaagatttaaatttaattgataataaaatattctcattttgttggattattgactatccaatgtatgagattgatgaaactactaaaaaaataaaatttagtcataatccattctcaatgcctcaaggtgaaataaataaattagacttatctaatcctttaaatataaaagcctatcaatatgatatcgtttgtaatggaattgagttatcatccggtgcaattaggaaccatgttcctgaactaatgtataaattatttgaaattgctgggtactcaaaaaatgatgttaatagtaaatttagtggaatgataaatgctttgagctatggagctccgcctcatggaggtatagccccaggc

SEQ ID NO: 297565 - DNA, 433 bp, Unknown
  Bacterial polypeptide expressing nucleotide sequence isolated from the Sargasso Sea
atcctttcaccatgcccacctggaagaccttgaagcatatggacaggatcagcctgagcgtattcgctccagggcttatgatatcaccctcaatggagttgaaatcggcggaggcagtatccgtattcatcggggggatattcaggaccaggtttttaaattgttgaagcttgaagcggatgaaattgaaagcaaattcggttttctgatgaaagctctctcctacggagcaccaccccatggcggaattgcccttggcttcgaccggatcatgatgtttttactgaataccgaatcgatccgggatgtcatagcctttcccaaaacccaaagggcttcctgcctgatgaccgaggcgccctcggatgtttctgaggaccagctcgaggaacttcagctcagaatccgtgcttctgcggcaaagcagaactaa

SEQ ID NO: 297566 - DNA, 1027 bp, Unknown
  Bacterial polypeptide expressing nucleotide sequence isolated from the Sargasso Sea
agacagttaataaaaatatttatactgggagaaattgaagttaaaatagactcatatactctattatctatttctgaagtattaccattacctgtaaattcagatattgaatatggtgaagaggtaagactaaaaaacagatttcttgatttaagaagaaataagctccataaaaatattttattgagaagtaaaataatttcctcaattagaaagaagatgaactcaagaggatttatagaatttcaaactccaattttgacatccacttcgcctgaaggtgcgagagattatttagttccttctagaattcatcatggtcaattttatgcgctaccacaagctccacaacaatttaaacaattattaatgatggcaggctttgataaatattttcaaatcgctccatgttttagagatgaagacagtagagcagacagatcacctggagaattttatcaattagattttgaaatgagttttgttactcaagatgatgtgtttaatgcaattgaacctgtattgtatgaagtttttgatgaaaataaaaattatcatactaatgtcaatgtaacagtaagtagttatccatttaggagaataccatatgaagagtctcttgaaatctatggtactgataaacctgatttaagaaatcctttatcaataagagattgcacagaaatttttaaaggttcagactttaaaatatttagtagcttaattgaaaaaaattataaagttaaaggtattgtagttaataatacatctaataaaccacgaagtttttttgataaattaaataattgggcaagagaagagggtgctgcgggacttggatatattagctatactgataatgagcacaaaggaccaattgccaaaaatttagatactaacagattaaatcaatttaaattaaaagatagtgagtctattttttttatttgcgataatcaaaaagaagctcaattatttgctgggaaggttcgtgataaattatgtttagatttaaatttacttaata

SEQ ID NO: 297567 - DNA, 777 bp, Unknown
  Bacterial polypeptide expressing nucleotide sequence isolated from the Sargasso Sea
catggtgtcagggtttgataaatactttcaaattgctccctgttttagggatgaggatagtagagctgataggtctccaggcgagttttatcaattggatgtagaaatgtcatttgtagagcaagaagatgtttttgaagctgttcaaccagtaatttataatgtttttaaaaaatttaccaaaaaagaagtagtcaaagattttgttaaaattacttttaatgacgcaatgttaaaatatggaactgacaaacctgacattagatatgatgtatttatacaagatgtaacagatatttttcaaaattctaattttaaaatttttgcaagtaatattgaaaagggatcggtagtcagaggtgttccaggtgtagattgtggtagtcgagcttttgcagataaaatgaatagttgggctcaatcgcagggagctccaggtatggggtatataattttctctgataacgaagcaagaggtccaatagcaaatgcactcggtcttgaaaaagttcaaatattaaaagaaaaatttaatttgagtgatggagatgctttatttttctcatgtgcaatagaaaaagaagctgcagatttagcaggtaaggcaagaacaaaaatcgcaactgaaaaaaaaatgattgatgaaaatcaatttaagttttgttggattgttgattacccaatgtttgaaaaaaatgaaattactggagagatagacttttctcataaccccttttcaatgccacagggtgggatgaagtcacttattgaaaaaaa

SEQ ID NO: 297568 - DNA, 836 bp, Unknown
  Bacterial polypeptide expressing nucleotide sequence isolated from the Sargasso Sea
ttcactatttgcaagcttaattgctagtaaaaattcagttgtaagagctgttccaggaccaaaatgtgggagcaggtctgttgctgacagaatgaatagttgggctcaaggagagggtgctccgggaatggggtatataatctatggtgatggcgaggctaaaggaccagtagcaggtgctcttggaaaagaaaaatgtgatgaaataaaaaacaggttagggcttcaagatggagatgcggcatttttttcttgttcaaatgtaaaggatgcagctgatttagctggaaaagcaagaattaaaattggcatagatcaaggtatatctgacaaggatggttataaattttgttggataattgattttcctatgtatgagttagatgaaaaaggtaaaatcgaattttcacacaacccattttctatgccccaagggggcttagaggcactcaataaccaaaatccattagatatcaaagcttggcagtatgatttagtatgtaatggtgtagagctttcgtctggtgcaataagaaatcatttaccagaagtaatgtataaagcatttgaaatagcaggttattcaaaggaaatagtcgatgctaatttttcaggtatgattagtgcttttaaatttggtgcccctcctcatggaggttttgcacctggcattgaccgaatagttatgcttattgctaatgagcctaacattagagaagtcattttatttccaatgaatggtaaggcagaagatctaatgatgggtgcaccatctgaagtatcagatgatcaattaaaagagttgaatattaaaaaaaataaaattattaaataaa

SEQ ID NO: 297569 - DNA, 398 bp, Unknown
  Bacterial polypeptide expressing nucleotide sequence isolated from the Sargasso Sea
attagttaatttatgcggatgggtagatagaagaagagatcatggtggtgtaatttttattgatttaagagaccatagtggattcctacaaataacaattaaccccgatgatggtgcagatctatttaaacaggcagaaactttaagaaatgaaacagtaataatggtcagcggaattattaatgaaaggcccaaagattccataaatacaaatttaagtactggagagttagagcttaaggttaaagatttacaaattctcaaccaaattaaaaacaacttaccttttccagtatctatacatgattatgaaaatacaaaagaggaactcagattaaaatatagataccttgatttaagaaggggaaaattactaaaaaatttaaaaacaagacata

SEQ ID NO: 297570 - DNA, 739 bp, Unknown
  Bacterial polypeptide expressing nucleotide sequence isolated from the Sargasso Sea
aaaatgtctgacttaggttttttagaatttcaaactccaatattaacatcttcgagccccgaaggtgcaagagattttttagttcccagtagattaaatccgggaaagttttatgcacttcctcaagcacctcaacaatttaagcaacttattatggtttctggatttgataaatattttcaaattgcaccttgttttagagatgaagatgcaagagctgatcgtagcccaggtgaattttaccaactagatttagaaatgtcatttgttgaacaagaagatgtatttcaagtcgtcgagaaactaatgattagtttattcaaaaatttttcatcaaaaaaattactttatgaaaaattcccaagaatttcgtatgaagaagccatgcttaaatatggaaccgataaaccggatttgagaaatccattattaataaacgacataacaaatatttttactagagaagatgttaaatttgatatttttaaaaaattagtaaaatcaggctcaagtgtaaaagcaattttaactaaaaaaactaaagataaacctcgcagtttttttgataacgttgacaaatgggctaaagatcaaggagcttcaggcttagcttattttacaatagagaaagatcaaaatctttcagcaaaaggacctgtggggaaatttttctcagaggattcaattaaagatattatgaaaattaaaaatgctgaagtaggcgatagtctatttcttg

SEQ ID NO: 297571 - DNA, 556 bp, Unknown
  Bacterial polypeptide expressing nucleotide sequence isolated from the Sargasso Sea
aattacgtctttagcaagagaaaaaattgccaaagatctgggcttaattgatgaaaatatttttgcattctgttggattgttaattatccaatgtttgaaaaggatgaacaaactaaaaagataaagtttagtcataaccctttttctatgccccaaggagatctgaacaagttagattttgaaaaacctttagatatacttgcataccaatatgacattgtatgtaatggaattgaactttcttcaggggctataagaaatcatattccagaattaatgtataagcttttttctattgctggttacaataaaaaagatgtagacactaaatttagtggtatgataaatgctttaagttatggtgctcctccacacggtggtattgcacctggtattgacagaattgtaatgctgcttgctaatgaaaagaatattagagaagtaacaatgtttccaatgaaccaaaatgctcaagatttgatgatgaatgcgccttctaaaattgatgaagaccaattgaaagaattaaatctatatataaagttaaaaaagtaa

SEQ ID NO: 297572 - DNA, 331 bp, Unknown
  Bacterial polypeptide expressing nucleotide sequence isolated from the Sargasso Sea
ttatggcgttgagttatcttctggagctattagaaatcataaaccagaaataatgtataaagcatttgaaattgccggttataaaaaagatgaagttgaagaaaaattttcaggaatgcttaatgctttaaaatttggtgcaccccctcatggaggtagtgcaccaggaattgatagaatagttatgttgttagctgatgaaccaaatatccgtgaagtgatagcttttcctatgaatcaacaagcaatggatttaatgatggaagctccagcagaaatcaataaagaaagacttgaagaattaggattaagactaatagagaaaaattaa

SEQ ID NO: 297573 - DNA, 901 bp, Unknown
  Bacterial polypeptide expressing nucleotide sequence isolated from the Sargasso Sea
gctgcctcagtctccacaattattcaaacagattttaatggtttcgggaatggataaatatttccaaatcgttaaatgttttcgcgatgaagacttaaggcaagatcgtcaacctgagttcacccagatcgatatcgaaatgtcttttggaaatgaaaaaatactgtttcaaatgatcgaagaaatgatggcaacaattttcaaagaagtgctgaatgaaaaaattccaactccatttcctgtcttgaaataccaagatgcaatagaccggtttggaacggataagcctgacatgcgaattgatatggaaattgtagatctggcaaaaattgtccaggggactaaatttaaagtttttgcgcaggttttggaatcgggtggacagattcgtgccttgaacattaaaaatagtgccgatgctttatctcgaaaagcactcgatgatttaacagaaattgccaaaacatacggcgcaaaagggatggcctggatcaaagtgcaggaaaatgaattacaatcccccattatcaagttttttgagcaggaaatgctcgaccgtatgttggagaaactagaaagcaagccaggtgacaccatcgtattcatcgctgacacacccaaaattgttgctgatgcattggcccatttgcgtctagctatcgcaaagctattaaaccttgtcgatgaatcgaagaacgccttcatctggattactgaattcccactggtagaatatgacgaaatagaaaaaagacataatgcgatgcaccatccatttaccgctcctcgcgaagaagatttagacaaatttgaatcggacccaagatccatcaaggcccgtgcctatgatttagtgttaaacggtaacgagatcggtgggggtagtattcgatccaccaaa

SEQ ID NO: 297574 - DNA, 925 bp, Unknown
  Bacterial polypeptide expressing nucleotide sequence isolated from the Sargasso Sea
ttttatgcattgcctcaagctcctcaacaattcaaacaattattgatgatggctggttttgataaatattttcaaattgccccttgttttagagatgaagatagtagagcagatagatcccctggagaattttatcaattggactttgaaatgagttttgttactcaagaggatgtatttaatgcaatagaaccagttttatatgaagtttttgatgaaaataaaaactatcatactgatgaaaaagtaaccgtaagtagttatcctttcaaaagaatagcttatgatgaagctcttgaattatatggaactgataagccagatttgagaaatccattattaataaaagattgtacagatgtttttcaaggatcagactttaaaatattcagtaacttaattgaaaaaaaatataaagttaaaggaattgttgttagcaatacagctaataaaccaagaagtttttttgataaattaaataattgggcaagagaagagggcgctgctggacttggatatattagctattctgaagatgaacataaaggacctattgcaaaaaatttagataatgaaagattaaaacaacttaaattaaaagataatgaatctattttctttgtttgtgataatcaaaaagatgctcaattatttgctggcaaagtgagagataaattgtgtttagatttaaatttacttaataaaaatgcatttgaattttgttggatagtagatttcccaatgtatgaaatagatgaaaagactaataagattgaatttagtcataatcctttttctatgcctcaaggtgagatggattcacttctgaataaagatccattagatattaaagcttatcaatatgatatagtttgtaatggagtagagttatcttctggtgctatccgaaaccatagacctgata

SEQ ID NO: 297575 - DNA, 763 bp, Unknown
  Bacterial polypeptide expressing nucleotide sequence isolated from the Sargasso Sea
gaaaaagtaaggaatgagtctgtaataacaattaatggaaaagttgtacaaagatcagatgacacgattaataaagtattaccaactggaaaaattgaggtttatgtcgatacacttgaagtaattgggagttcagatgatattccattaccagtttttggtgaacctgattatccagaagaaataagactaaaatataggtttttagatttaagaagagaaactcttcataagaatataatattaagatctgaaattattaattttattagaagtaagatgattgaaaatgactttcttgagattcaaacaccaataatgaccgcatctagccctgaaggagcaagagattatttggttccttcaagagtacatcaaggtaaattttatgctcttcctcaagctccacaacagtttaaacaactccttatgacttcaggttttgataagtattttcagattgctccatgttttagagatgaggatgctagagctgacaggtctcccggagaattctatcaattagatattgaaatgagttttgttaatcaagaggatatttttgaatcagttgaacctttgctaagagatgtatttgaaaaattttctgaaaatatgtctgttaacaaaaaatttccgaggatttcttatgcagaatcaattcaaaaatatggaacagataaaccagatctacgagtagaaattgaacttgatgatattaccgaagtatttgttgattctggttttaaaatttttgctaacc

SEQ ID NO: 297576 - DNA, 714 bp, Unknown
  Bacterial polypeptide expressing nucleotide sequence isolated from the Sargasso Sea
aatgaatacctatagaacccatttctgttctgatctaactattaataaccttaatcaagaagttaaattaagtggttggattgatacaataagagatcatggaaatttaattttcattgatttaagagataattatgggattacacagtgcgtaattgattcacaaaaaaaattttttgaagaaatttctaaattaaataatgaatgtgtcattaccatcgaaggtcaagtaataaaaagatcagatgaaacagttaatcaaattttacctacaggagaaattgaaattcagattaattcttataaattgttatcaaattcagaaattttaccactaccggttaattctgatattgactatggtgaagaagtaagattaaaaaatcgttttcttgacttaagaagaaataaactccacaaaaatattttgctaagaagtaaaattatatcctcaattagagaaaagatgacatctagaggttttatagaatttcagactcctatattaacttccacttcacctgagggggctagagattatttagtaccatccaggatccatcatggtcaattttatgcacttccacaagctccacaacaatttaaacaactattaatgatggcaggttttgataaatattttcaaattgctccttgttttagagatgaagatagtagagccgataggtcaccaggagaattttatcaattaga

SEQ ID NO: 297577 - DNA, 506 bp, Unknown
  Bacterial polypeptide expressing nucleotide sequence isolated from the Sargasso Sea
ccaaaacttatttgcgttttgctgggtagtagattacccaatgtatgagattgatgataaatctggtaaaattaaatttagtcacaaccctttttctatgccacaaggtgatttgagtaaactaaacttagataaacccttagatattatagcgtatcaatatgatatagtttgcaatgggattgagttatcctcaggagcaattagaaatcatatacctgatttgatgtataaactttttgcggttgcaggctatgataaaaaaagtgttgacgaaaaatttagcggcatgattaatgcattaggttatggggctccgcctcatggtggtatagcaccgggaattgaccggataataatgttactggcaaatgaaaaaaatattagagaaattaccatgtttccattaaaccagaatgctcaggatttaatgatgaatgcaccatcaaatgtagatgaaggtcaattgaaagatttaaatattgaaataattaaaaaaaaataat

SEQ ID NO: 297578 - DNA, 910 bp, Unknown
  Bacterial polypeptide expressing nucleotide sequence isolated from the Sargasso Sea
ttaaaaaataatattttattgaggagtgaaataattcagtttataagaaatgaaatgatcagactaaattttaaagagtttcaaactccaatacttacagcatcatctcctgaaggtgcaagagattatttagttgcgtcaaggttacataaaggaaagttttatgctttacctcaggcaccacagcaattcaaacaactagctatggtttcaggttttgataaatattttcaaatagcaccttgctttagagatgaggacgcaagagcagacagaagcccaggagagttttatcaattggatatcgaaatggcattttgtaatcaagaagatatttttaaaatagtcgaagaggtaatttataacacttttacaaacttttcgaaaaaaaaaataacgactttaggattcccacgtatcccatatcaggatgctattgataagtatggtactgataagcctgatctgagaaaccctttgtatttaagagatgctacaggaatttttaaggaccaaaggtctaattttaatatttttaagaacattattaataaaggtggagtagtgaaagcaatagtagcaccggtaggagcagaaaaaccaagatctttttttgataaacttaataattgggctaaagagcaagggtcttctggcttaggctacattaattttgagaaaaatgataatgatgaattgattggaaaaggccctatagcaaataacctaaaagatgatttgctcaaatctttaataaaagatttacatattaattatgacgatgctgttttttttatatgtgacgagtacgataaagccacaagatttggaagtattgtcattaataagattggatcagatttaaaattaataaatcaaaatgagtttaatttttgttggatagtagatt

SEQ ID NO: 297579 - DNA, 738 bp, Unknown
  Bacterial polypeptide expressing nucleotide sequence isolated from the Sargasso Sea
aatgaataaatttagatcacataactgttctgagttaagagaaaaagatattgggaaaaaagtcaaattatcaggttggttacacaggaaaagagatcacggtaatttactttttttagatttaagagatcactatggaataacgcaatgtgtaattgaaaataaagaaaaaaattttcaaactttagagaaattaaagccagagtcagtaattttgatcgaaggcgacgtagtaaaaagaacaaaagaaactgaaaacaaagatttggaaacaggattgatagagattaagataaaaaattttgaaattctttcgactgccgaagaattacctatgccagtttttggagagcaagactaccctgaggaaattagactgaaatataggtttatcgatttaaggcgtaaagaaatgcacaacaacatagaattaagatctaaaataatctcttttttaagaaataaaatgatcgaaaataattttctagaatttcaaactcctattttgacagcatctagtcctgaaggagctagagattttttagtaccaagtcgaactcatcaaggcaaattttatgctttaccacaagcacctcaacagtttaaacaaatggtaatgatttctggatttgacagatattttcaaatagcaccttgttttagagatgaggacggaagagccgatagaagtcctggagaacattatcaacttgatatggaaatgtcctttgtagagaa

SEQ ID NO: 297580 - DNA, 390 bp, Unknown
  Bacterial polypeptide expressing nucleotide sequence isolated from the Sargasso Sea
ataaattagacttatcaaatcctttaaatattaaagcttatcaatatgatattgtgtgtaacggcattgagttatcatcaggggcaattagaaatcatattcctgaattaatgtataaattatttgaaattgcaggttattcaaaaaatgatgtaaatagtaaatttagtggaatgataaatgcgttgagttatggagcaccacctcatggtggaatagctccaggaattgatagaattgttatgcttttggcaaatgaaaaaaatataagagaagttactatgtttccaatgaaccaaaatgcacaagatttgatgatgaatgcaccatctgaaatttcagacaatcaacttaaagaattaaatttaaacattaaaaaaaaaaaataat

SEQ ID NO: 297581 - DNA, 757 bp, Unknown
  Bacterial polypeptide expressing nucleotide sequence isolated from the Sargasso Sea
attgaataaatatagaactcataattgtaatgaattaagaaaatcttctgttggtcaaaaagtaattgtttcaggctggatcaacaaaaaaagagatcatggaaatttgttgtttattgatttaagagataattatggaatcactcaatgcataatagatagagataatcttaaattcaatgaattagaaaaaattcaactcgaaacagttgtaaaaattgaaggagaggtagtcaacagatctactgagactatcaataaagaaattgaaacaggagaggtagaggtttcaattaaaaattttgaggttattggaacttgtaaagagttaccactaccagtatttagtgaccaagaatattcagaggagataagattaaaatataggtttttagatttaagaagaaaaaaaattcaccaaaatattattttaagatcaaaagtaatttcatttattagatcagaaatgaataaattaggatttttagaatttcaaactccaattttaacatcttcaagtccagaaggtgctagagattttttagttcctagtagattaaatccaggtaaattttatgctcttcctcaagcacctcaacaatttaaacaattaataatggtatcagggtttgacaagtattttcaaatagctccatgttttagagatgaagatgctagagcggataggagtccaggagaattttatcaattagatttagaaatgtcttttgttgacaagaagacatatttgatgtag

SEQ ID NO: 297582 - DNA, 895 bp, Unknown
  Bacterial polypeptide expressing nucleotide sequence isolated from the Sargasso Sea
aataatacagatattggtaaattagttaatttatgcggatgggtagatagaagaagagatcatggtggtgtaatttttattgatttaagagaccatagtggattcctacaaataacaattaaccccgatgatggtgcagatctatttaaacaggcagaaactctaagaaatgaaacagtaataatggtcagcggaattattaatgaaaggcccaaagattccataaatacaaatttaagtactggagagttagagcttaaggttaaagatttacaaattctcaaccaaattaaaaacaacttaccttttccagtatctatacatgattatgaaaatacaaaagaggaactcagattaaaatatagataccttgatttaagaaggggaaaattactaaaaaatttaaaaacaagacataagattattaaagttgctagagaatttcttgataattttggatttacagaagtagagaccccattacttacaaagtcaactcctgaaggggctcgtgattttcttgttcctgcacgtctttcaaatggagaattttttgctttacctcaatccccacaactctttaaacaacttttaatggttgggggcttagataagtattatcaaatcgcaaaatgtttccgtgatgaagacttaagggcagatagacagccagagtttactcaattagatattgagatgagctttattagtgaagaagaaataatttcttttaatgaaagtctcataaaaaaaatatggaaagaagtgttaaatattaattttaataatgcttttccaagaatgacatggcatgcagcaatggataattacggcactgatagaccagatactagatatcaaatgttattgaaagatttaggaggagtattaggta

SEQ ID NO: 297583 - DNA, 793 bp, Unknown
  Bacterial polypeptide expressing nucleotide sequence isolated from the Sargasso Sea
gtttcatttgaaatatttaaaaaattggtaaaatctggatctagagtaagatgtattgttacaaaaaatacaaaagataaacctagaagcttctttgataatattgataaatgggcaaaaggagaaggtgcctcaggtttagcatatttttctattgataaagataaagatatttcagcaaaaggccctataggtaaattcttttctcaagatgcattacttgaaataatgaaaaaaacaaactgtgaaattggagacagtatttttatggcttgtggaaaactgggtgaattagaaaaaattactgctttagcaagagataaaattgcaaaagatcttgatttaatagatgaaaatattttcgcattttgttggattgtagattatccaatgtttgaaaaagatgaaataactaataaaattaagtttagtcataatcctttttcaatgccacaaggtaatttaagcgaaaaagattttgaaagcccattagagatacttgcatatcaatacgacatagtttgtaatggtatcgaactatcatctggagctattagaaaccataaaccaaaacttatgtataaacttttctcaattgcaggatatgacaaaaagcaggtagatgaaaaatttagtggaatgattaacgcacttagttatggtgcaccaccacatggaggaatagcacctggcattgatagaatagttatgttactagctaatgagaaaaatattagggaagtaacaatgtttccgatgaaccaaaatgcacaagatttaatgatgaatgcac

SEQ ID NO: 297584 - DNA, 862 bp, Unknown
  Bacterial polypeptide expressing nucleotide sequence isolated from the Sargasso Sea
agtatttagcgatcaagagtatgcagaagaaatcagattaaaatatagatttttggatttaagaagaaaaaaagttcatgaaaatattttattaagatccaaagtaatttcatatattagaaaagaaatgacaaacttaggattttcagaatttcaaactccaattttaacatcttcaagtcctgaaggagctagagattttttagttccaagcagattaaatcctggaaaattttatgcattacctcaagcacctcaacaatttaaacaattaataatggtatcaggttttgacaaatattttcaaatagctccatgttttagagacgaagatgcaagagcagatagaagtccaggagaattttatcaattagatcttgaaatgtcctttgtagaacaagaagatatttttgaagtagttgaaaaattaatgttaaatttatttaaaaaattttctaataaaaaaatgttatttgaaaaatttccaaaaatttctttttacgatacaatgttgaaatatggaactgataagccagacttaagaaatccacttgtcataagtgatttaacttcaatttttgaaaggcaagatgtaaaatttgatatttttaaaaaattagttaaatcaggctctattgtaagggcaataataacaaaaaatacaaaagataaaccgagaagtttttttgatggtattgataaatgggctaaagaacaaggtgcatcaggacttgcatattttacttttgaagaagataaaaatatttcagctaaaggccctgtaggtaaatttttttctgaagaatctttaaaagaaataatgaaaattactggagcaaaactgggagatagtatatttttt

SEQ ID NO: 297585 - DNA, 746 bp, Unknown
  Bacterial polypeptide expressing nucleotide sequence isolated from the Sargasso Sea
tgatttaactgataaagctaaaaagtatggagccaaaggattagcctggatgaaatttcaagatggaaattttaatggtggaatttcaaagtttttttctcaaagcttgcaaaaaaatatctctgataaacttaaagtagagaatgatgatatattactgcttattggagatgataagaatattgtaactaagtcacttggtaaacttagaacaataatagccttaaaagaaaacttagcaaatgaaaatgaattcaaacctttgtgggtcactgaatttccaatgtttgattttgatgatgagaataatcgttatgttgccatgcaccacccttttaccgctccaagagaatctgatatagaaaagctagatagcgatccaaaaagagctttgagtcgcggttatgatttaacgatgaacggccatgaaattgctggtggttcaattcgaattcattctccagaggttcaagaaaaagtattctctctattagggcttactcaagaagaagcagttgataaatttggatttttagtagaagcactacgatatggagctccgccacatggaggtattgcttttggatttgatagattagtaatgcttttagcaggtacagaaaacattagagatgtcattgccttcccgaaaactacatctgccacctctctaatggacgacagcccaagtaatgttgataatcaccaattacaagatctcgggttagaaataaaaaaagactaat

SEQ ID NO: 297586 - DNA, 817 bp, Unknown
  Bacterial polypeptide expressing nucleotide sequence isolated from the Sargasso Sea
ttggaaatggcttttgttgaaaaagaggatatttttgatgtaacagagcctatattttatgatttatttgtaaaatttggcaaagggaaaaaagttaataaaacaccatttcctaaaattacttacaaggaatctttaaataaatacggaacagacaagccagatcttagaaatcctatagaattggctgatgttactaatctattttcttctgaccaaacaacattaaaaatttttaaggaaaatattaagaaaggaggaatagttaaagctattcctgtccctaataccaatgcaaaaccaagaagtttttttgataatttgaataattgggcaatctctgaaggagctagtggtatggcttatattacgtttgaaaaaaatggaaataaggttgttggaaaagggcctatagcaaaatttttctcggaaaaagctatatctgaattaatgaaacaatgtaaattaacagaaaaagattctgttttctttgtatgcaaccaaccttcagaagcaataaaattttcaggtatcgctagacaaaaaatcggaaatgaacttaaattaattgatgaaaaaaaatttattttttgttggatagtagattatcctatgtacagttatgacgaaaaagagaaaaagttggattttagtcacaatccattttctatgcctaaagaaaaaatgagtgaatttgataaaaaagagccattagatattttagcccaccaatatgatcttgtttgtaatggctacgaattatcatcaggcgcgattagaaatcatgttccagaatacttatttaaagtttttgaaa

SEQ ID NO: 297587 - DNA, 319 bp, Unknown
  Bacterial polypeptide expressing nucleotide sequence isolated from the Sargasso Sea
cggagttccgtatactagaaaggatattcagcaaaaagtgttcagtttgctgaatctgtcaaatcaggagattgaaagcaaattcggtttcttgatggaagcccttacttatggtgctcctccacatggtggaattgctcttggatttgacaggataatgatgttcctgcttaaaaccgattctattcgagacgtgatcgcttttccaaaaacacagaaagcaggctgtttaatgacagacgctccctcagcggttgatgctgaacagctcgatgacctgcatatcagagttaaggcctcggctcagcaggcagagtga

SEQ ID NO: 297588 - DNA, 745 bp, Unknown
  Bacterial polypeptide expressing nucleotide sequence isolated from the Sargasso Sea
atgctacgatcacatacttgcggagaacttaacctaagcgatttagataaagaagtcacactcagtggctgggtacaaaaatcacgtgacctcggagggatgacctttgtagatttaagagaccgatatggaattacgcaattggttttcaatatggaaactaatgaatctttatgccttgaggcgcgaaaattaggtcgcgagtttgttattcaagttaaaggaaaagtgatagaacgcagttcaaaaaataaaaacattcctacaggtgaggttgaaattgaaattttagacttggttattttaaatgctgcgaaaacaccaccatttacaatagaaaatgacacagatggcggtgatgacctaagaatgaaataccgctatttggatttgcgtagaaatcctattcgcgaaaacatgattcttagatctaaggttgccatagagactagaaaataccttgcagatcaaaattttattgaagtagaaacacctgttttaattaaatcaacaccagaaggtgctcgggattttgtggtgccaagcagaatgaacgagggtcaattttatgcattacctcaatcacctcaaacctttaagcaacttctaatggtttctggttttgacaaatacttccaaattgtaaaatgctttcgtgacgaagaccttcgtgcggaccgtcagccagaatttactcaaatagactgcgaaatgtcttttgttgaacaaggaagacatcttaaat

SEQ ID NO: 297589 - DNA, 817 bp, Unknown
  Bacterial polypeptide expressing nucleotide sequence isolated from the Sargasso Sea
atgaataaatatagatcacataattgttctgaattaaatgaaaaagataatttaaaaattgtttctttatcgggctggctacacagaaaaagagaccatgggaatttactttttatagatcttagagatcattatggacttactcaatgcgtaatagaaaataacaacaaattttttaatctattggagaaagcaaaacctgagacaattcttaatatcaaaggtaaagttgttaaacgagagaaaggcactgaaaatcttgaactcggtactggaaaaattgaagtcaacattcaagaggccaaaattttatcgcattcaaaagatttgccaatgcctgtatttggagaacaagactaccctgaagacataaggttaaaatatagatttcttgatttaagaagagaagaaatgcacagaaatatcattcttagatctaaagttatttcctatatcagagaggaaatgcttaaattaggttttttagaatttcaaaccccaattttaacttcctcaagtcctgaaggcgcaagagattttttagtccctagtagattaaatccaggtgaattttatgcgttaccacaagcgccacaacaatttaaacaattaattatggtttcaggatttgataaatattttcaaattgcgccgtgttttagagacgaagatgctagagctgacaggagtccaggagaattttatcaactcgatttagaaatgtcttttgtagaacaagaagatgtatttgaagttgtagaaaaattaatgaagaatgtttttaaaaaattttcctcaaaaaagattaatgagtgaa

SEQ ID NO: 297590 - DNA, 523 bp, Unknown
  Bacterial polypeptide expressing nucleotide sequence isolated from the Sargasso Sea
aatttagtagataaaaatcaatttgctttttgctggattgttgattacccaatgtatgaaatagactcacttactaaaaaaattaagtttagccacaaccctttttcaatgcctcaaggaaatatagaaaaattagactttaacaatccacttaaaataaaagcatttcaatatgatattgtatgtaatggagttgaactatcttccggtgctatcagaaatcatataccttcactgatgtataaacttttttcaatagcaggttacaataaaaagcaagtcgaagaaaagtttagtggaatgctcaatgctttaagttacggagctccacctcatggtggaatagctcctggtatagacagaattgttatgttacttgcaaatgaaaaaaatataagagaagtgactttatttccaatgaaccaaaatgcccaagatttaatgatgcaagccccatctgaagttgaaaataagcagcttaaagaactaggtataaaaacagatattaaaaagaaagattagt

SEQ ID NO: 297591 - DNA, 606 bp, Unknown
  Bacterial polypeptide expressing nucleotide sequence isolated from the Sargasso Sea
aaaatgactcaatatttttcatttgtgacaaattaaatgaggctcaattattttctggtaaagtaagggaaaaaatttgtaatgatttaaatttacttaataaaaattcttttgaattttgttggatagttgattttccgatgtatgaaattgatgaaaaaactaacaaaatacaatttagtcataatcctttttcaatgcctcaaggtgagatggaagctttagaaaaaaaagatcctttagatataaaagcatatcaatatgatattgtatgtaatggtgtagagttatcttccggcgcaattagaaatcataaaccagaaattatgtataaagcttttgatattgctggatattcgaaagaagatttagaagaaaaattttcaggaatgcttaatgccctaaagtttggagcacctcctcatggaggcagcgcaccaggtattgatagaattgttatgttactagctgatgaaccaaacataagagaagtaatagcttttccaatgaatcaacaagctatggatttaatgatggatgcacctgcaagtattgataaagatagattagaagaattaggtattaaattaatagataaaaattaat

SEQ ID NO: 297592 - DNA, 643 bp, Unknown
  Bacterial polypeptide expressing nucleotide sequence isolated from the Sargasso Sea
gaaaggaccgaggcaattcgagagcaattgggcttgagtgtaggagatgctgcattttttctaggtggaacgccaaaatcttttgaaagagttgctgggaaagcgcgcaatgtaattggtgatgagctaaatttaatagataaaaatagatttgcattcgcctggatagttgatttcccaatctttgagaaagatgatgaaacaggaaaaattgattttgaacataacccattttcaatgccacaaggtggattagacgccttaaatggtgatcctttaagtgttttaggatatcaatatgatttggcttgtaacggttttgaacttgtatctggggctattagaaatcatcagctagacttaatgttcaaggcttttgaaatcgctggctatggagaagatgaggtaaggagaagatttggtggaatggtcaatgcttttcaatttggagcaccgccccatggagggtgcgctgcaggtattgatagaatagtaatgcttttggcaaatcaagaaaacattagagaagtaattatgtttccaatgaatcagcgcgctgaagatttaatgatgggagctccgtcggagcctacatccgagcagctgatggaattaaatttacggacgatgcccaatagttgaa

SEQ ID NO: 297593 - DNA, 885 bp, Unknown
  Bacterial polypeptide expressing nucleotide sequence isolated from the Sargasso Sea
tttagaatttcagactcctatacttacatcttcaagtccagagggagcaagagattttttagttccaagtagattaaatccaggaaaattttatgcgttacctcaggcaccacaacagtttaaacaattaattatgatatcaggctttgataaatactttcagattgcaccatgctttagagatgaagacgcaagagcagatagaagtccaggagaattttatcagcttgatattgaaatgtcttttgtggaacaggaagatgtttttcttgtagttgagaaactaatgttacttctatttaaaaaattttcctcaaaaaaaatattatatgaaaaatttccaagaataacatttaaagatgcattgctaaaatatgggactgacaaaccagatttaagaaatccattagaaatatgcgatcttacttcaatatttacaagagaggatgtaaaatttgaaatttttaaaaagttagtaaaatctggatcaatcgtacgagcaataaaaactacaaatacaaaagataaacctagaagtttttttgatggaattgataagtgggcaaaagatcaaggtgcatcaggtatggcttactttactattgaaaatgataaagagctttcagccaaaggaccagttggaaagtttttttcaggagattctcttaaagagattatgaaaatcatgaacgcaaatattggagatagtattttctttttatgcaataaagagaaagaggtattaaaattaatttcatcagcaagagaaaaaattgcacaagatttaaatttaattaatgaggatagctttgctttttgttggattattgactatccaatgttcgaaattgacgaaaattcaaaaaaaattcaatttagccataa

SEQ ID NO: 297594 - DNA, 520 bp, Unknown
  Bacterial polypeptide expressing nucleotide sequence isolated from the Sargasso Sea
attggatttaattgataatgaaacattttcattttgttggattgttgattatccgatgtatgaaattgacgaaacaacaaaaaaaattaaatttagtcacaatccattttctatgcctcaaggagaaattaatcaattagacctatctaatcctttaaatgttaaagcttatcaatatgatattgtgtgcaacggaattgagttatcatcaggggcaattagaaatcatatccctgaattaatgtataaattatttgaaattgctgggtattcaaaaaatgatgttaacatcaaatttagtggaatgataaatgcattgagttatggagcaccaccccatggaggaatagccccaggaattgatagaattgttatgcttttggcaaatgaaaaaaatataagagaagttactatgtttccaatgaaccaaaatgcgcaagatttgatgatgaatgcaccatctgaaatttcagatgaacaattaaaagaattaaatttaattattaagaaaaaaaaataa

SEQ ID NO: 297595 - DNA, 460 bp, Unknown
  Bacterial polypeptide expressing nucleotide sequence isolated from the Sargasso Sea
tctcgaggcgctgcaccatcccttctgcgccgcgaaccgcgacgaccttggcaacgatccacagcgatgggctgaaaccctccctgctgcccgggcccaggcctatgacctggtgctcaacggcctggagctggggggaggctctttgcgcattcacgacgccgctctgcaacagcaggtgctcagaaccatcggcttgcccgagcaggaggcccaagagcagttcggtttcctgctggaggccttggagatgggtgcacctccccacggtggcatcgccttcggattggatcggatggtgatgctgctagcgggggaagactccatccgcgacacgatcgccttccccaaaacccagcaggcacgctgcctgatgactgcagcgcctggtggagccagcgaacgccagctggaggaactgcacgtggcgagcacctgggaggaaccggaagaaaactga

SEQ ID NO: 297596 - DNA, 829 bp, Unknown
  Bacterial polypeptide expressing nucleotide sequence isolated from the Sargasso Sea
tatgaataaatacagaacacataattgctcagagttgaatgagaagaacataggaaaaaaaattaagttatcaggttgggttcatagaaaaagggatcatggtaatttactttttgtagatttacgagaccattttggaataacacagtgcgttattgaaaataaagataaggattttaaaattttagaaaaaattaaaccagagtcagtaattatggttgagggtagcgtggttaaaagatctaatgaaacacaaaacaaagaattagaaactggtttgatagaagttaaaattaataatgttaaaattctttctgaagcgcaagagttacccctacctgtatttggtgagcaagaatatcctgaagatataaggttaaaatatagatttatcgaccttagaagaaatgaaatgcatgaaaatataaaactcaggtcaaatattttatcattcataagatcaaaaatgattgaaaataattttcttgaattccaaactccaatccttaccgcatcaagtcctgaaggtgctcgagactttctggttccaagtcgaacacatcctggtaaattttatgctttgccccaagctccacaacaatttaagcaaatgattatgatatcaggctttgatagatactttcaaatagcgccatgctttagagacgaagatggaagagctgacagaagtccaggagaacattatcaattagatatggaaatgtcatttgtagagcaagaggatattttaaaggttgttgaaccgatcttctatgatttatttaaagaatttggaaatggaaaaaaaataaataaatttccttttcaa

SEQ ID NO: 297597 - DNA, 753 bp, Unknown
  Bacterial polypeptide expressing nucleotide sequence isolated from the Sargasso Sea
aaaaaatgaacaatctaaccgatattgcaaaaacgtatggagccataggactggcttggtttaaggttggtgataatgaattatcaggtggaatatcaaaattctttgataatgacttagctttagaaatgatcgagaccttaaatctttcagaaaatgacattttgtttattgtggctgattctcacaaagtagcatgtactgcattgggagcaataaggattgaaatagcaaaacatttaaatttaattgatgtagatgtttttaaacctgtttggataacagattttcctatgtttgattatgatgatatggatcaattgacaccaatgcatcacccttttaccgcacctaagattgataatattaatgatcttaacttagatcaaaagaacatattatcaagagcatatgacttgacaataaatggcaatgaggtagcaggagggtccattcgtaattatgatcctaaaatccaatctaaaatctttgaattgttaaaaatgaataaagatgaaattgattctaagtttggatttttcattgaagctttaaaatatggtactccccctcacggaggaatagcttttgggtttgacagattggtgatgctattatcaggatctgataatattagagatgttattgcctttcctaaaaccacttctgctaattctttaatggataactctcctagcaatgtttcaaatcttcaacttgaagaactaaatataaagatcaatgagagttagt

SEQ ID NO: 297598 - DNA, 359 bp, Unknown
  Bacterial polypeptide expressing nucleotide sequence isolated from the Sargasso Sea
tatgtctaaagataattttattgaggttgaaacaccaattcttatgaaatctacccctgagggagcaagagactttttggttccaagtaggattcatcaaggaagattttatgcattgccacaatcacctcaaacctacaaacaacttctaatggtttcaggttttgatcgatattttcaaatatgtaagtgttttacagatgaagattttcgtgcggataggcaaccggaatttactcaagttgatattgaaatgtcatttgtagatcaaaatgatataattcatatggctacagaactaataaccaacatatggaaagatacaataggggtggatttacctgaggagtttcctatta

SEQ ID NO: 297599 - DNA, 871 bp, Unknown
  Bacterial polypeptide expressing nucleotide sequence isolated from the Sargasso Sea
aaagttttcgaaaagttttctgctaaaaaagttcctaaaagtccattccctcgtattacctatgcagactccatgaaaatgtatggaaccgataaaccagacctgagaaatccaattgttttatcaaatttaactagtatatttagctccccagaagtttcttttgaggctttcaaaaaacttattaaagatggtgctgaggtcatcggtattccttgcccaaaaggatcaagtcaagctagaaaattttttgactccatgaataactgggcaataaaagaaatgaatgcaccgggtcttgggtatataatttttgaagaaactaatggcactttagttgccaaaggcccgatcgctaaatttatccccgaaaaacatctaaaagaaatatttgaattatcaaatttatcttatggcgatgcaattttcttttcatgctcacagcccaaatctgcttatgaactagcttcagcctctagagatagaataggtttagagttgaacataattgaaaaagatgtttttagattttgctggattgttgattttccgatgtatgaatttgatgaacaagctaagaagattgactttagtcacaatccattttcaatgcctcagggtgggttgaaatctctagaatctatgaaccctctagatattcttgggtatcaatacgatattgtttgtaacggcatagagttatcatcgggcgctatccgtaatcatgttcctgaaattatgtataaggcttttgaaattgcgggttatagtaaagaagaggtagttgagaagtttggtggaatgattaatgcttttagttacggagttcctcctcatggtggaattgctcctggaattgatagaattataa

SEQ ID NO: 297600 - DNA, 959 bp, Unknown
  Bacterial polypeptide expressing nucleotide sequence isolated from the Sargasso Sea
tggaaaaaaagtaaataaaaccccatttataagattaaagtacaaagagtcattagaaaaatatggtacagacaaaccagatctaagaaatcccatagagctaaaagatgttaccgaaatctttaagtctgaagacgttaagcttaaaatatttaaggaaataatatctaaaggaggaatagttaaagctattccagtaccaaacaccaataaacaaccaagaagcttttttgataatttaaatgattgggctataagtgaaggagcaagtggattagcatatataacttttgaaaaatctcaaaatagggtaattggaaaaggtccaatagcaaaatttttctctgaagaatctatatcaaatttaatttcaaagtgtaaaattagtgatcaggactcaatattttttgtttgcaacaaagaaaaagaagctattaaattttcaggtgtcgcaagagaaaaaatagctactgaactaaaattaattgatgaaaacaaatttcatttttgttggattacagattatcctatgtatgaatttgatgaaaatgaaaaaaaaatagatttcagtcacaatccattttcaatgccacaaacgaaattagaagaatttgataaagccgaccctttaaaaattttggcatatcagtatgatttagtttgtaatggttatgaactatcatctggtgcaattaggaatcatattccagaatttttatttaaagtttttgaaaaggtaggatattcaaagaaagatgttgaaaaaaatttttcaggaatgattaaagcattgtcttatggtgcacctcctcacggaggaatggcaccaggtattgatagaatagttatgttattagctaatcaaaaaaatataagagaaattactttatttcccttaaatcaaaacgccgaagaccttttaatggaagctccatctgaagtaagcgataaacagtaaa

SEQ ID NO: 297601 - DNA, 819 bp, Unknown
  Bacterial polypeptide expressing nucleotide sequence isolated from the Sargasso Sea
atcttttttaagaaacaaaatgattgaaaataattttttagagtttcaaacgcctattctaactgcatctagtcccgaaggagctagagattttttagttccaagcagaactcatcaaggtaaattttacgccttacctcaggcacctcaacagtttaaacaaatggttatgatagctggatttgacagatattttcagatagctccctgctttagggatgaagacggaagggcggataggagtcctggcgaacattaccagcttgatatggaaatgtctttcgttgaacaggaggatatatttaaaattgttgaaccaattttttatgaattgtttaaaaaatttggaaaaaatagaacagtaaacaagcatccttttccaagaattacttataaagatgcattaaacaaatatggtactgataaaccagatttaagaaatccaatagagctagttgatttgactagtttattctcttctgaggaagttactttaaaaatatttaaagaaaatataaaaaaagggaatattgttaaagcaataccagtaaaaaacacagactcaaaaccaagaagtttttttgataatttaaacaattgggcaatttctgaaggagctagtggaatggcttatataacatttgaaaaaaaagcaggaaagatttttggtaaaggacctattgctaaattcttttctgaaaatgccattaaaaaattattgcaaacctgtaaattgtctgaaaaagacagtgtattctttgtgtgtaataatccattagaagcttttaaattttctggcatagcaagacaaaaaatagg

SEQ ID NO: 297602 - DNA, 312 bp, Unknown
  Bacterial polypeptide expressing nucleotide sequence isolated from the Sargasso Sea
cccgttttcagtgatcaagaatattctgaagaaatcagattaaaatatagatatttagatttaagacgaaaaaaaattcacgaaaatattattttgagatcaaaagttatttcgtttatcagaaatgaaatgaataaatttggttttttagagttccaaacaccaatattaacttcatcaagtcctgaaggagcaagagattttcttgtgccaagtagattgaatccaggtaagttttatgctttgccgcaagcacctcaacaatttaagcaacttataatggtttcaggttttgataaatattttcaaatc

SEQ ID NO: 297603 - DNA, 841 bp, Unknown
  Bacterial polypeptide expressing nucleotide sequence isolated from the Sargasso Sea
attaaaaatcttacagagtgttttattgattcaggttttaagatttttgaaaacaatataagaaatggttgcgttgtcaaaggaattagagcacctaattcagcagaaaaaccgaggacatggtttgataaacttaataattgggcaagggaaaatggtcaaaaaggtttggggtatgttatttatagtgagaatgaatttaaaggtccaattgccaacaatctgaaagagaaaaatcttaaacttatctctaaattaactgctttagaaaatggcgattcggttttctttatctctgacaaagaagatcatgcaaataaatttgcatcaattgtaaggaatgaattatgtaatcaacttgatcttctaaagacaaacgagtttaaattttgctggattgttgattatccaatgtatgaaatcaacccaacaaccaataaaatagactttagtcataatcctttctcaatgccacaaggaggtctagaatcactcaaaaataaaaatccattagatgttttagcatggcaatttgacatagtttgtaacggaattgaattatcttctggagcaataagaaatcataaacctgaaataatggtcaaagcatttgagatagctggatatgatattgatcaacttaaaaaaaaatttggattcctattcaacgcttttaagtttggagcgcctccccatggaggttcggctccaggtattgatcgaatgataatgcttctggcagatgaggagaatttgagagaggttgttgcatttccaatgaaccaacaagcagaagatttaatgctctgctcacctactgaaattccagaaaaacatctga

SEQ ID NO: 297604 - DNA, 626 bp, Unknown
  Bacterial polypeptide expressing nucleotide sequence isolated from the Sargasso Sea
aatgataaaaagaactcatacatgcgcggacctatctaaggataatttaaaacaggaaattagcctgaatggctggatatctaaatctagagatcttggaggattaatatttattgacttgaaagatcgttatggtattactcaaattgtttttaatgaagaaaccaataaagatgcgtttgataaagttaagccattaggccttcaagatgttataggagttactggagttgttgtcccaaggcctgaagatgcggttaacaaagatatgaaaacaggcgcaattgatgtagaggttagtcagattgaaatttataatgaagcggaccctatgccatttgatgttaatgatagatattcagcaatggaagaaaatagattaaagtttagatatcttgagcttaggactgacgaaatgcaaaataatcttaaggtaagacatcaaactgcactaagtgttcgtaattttttatctagtgaaaactttttagaaattgaaacgccgattcttatgaagtctactcctgaaggagcgcgtgattttttagttcctagtcgtattcataaggggaagttctatgctctgcctcaatccccacaaacatataagcaactattaatggttt

SEQ ID NO: 297605 - DNA, 589 bp, Unknown
  Bacterial polypeptide expressing nucleotide sequence isolated from the Sargasso Sea
atgcgcagcaacggttgcggcgacctgcgcgagcagaacatcgacaacgaggtgcagctgtgcggctgggtggaccggcgccgcgaccatgggggtgtgatctttatcgacctgcgggatcgctccggcacggtgcagatcacggtggatcccgatctgggggctgaggccttcaccgtggccgagcacctgcgcagcgaaactgtgctgcaggtgggtggaaaggtgcgggcccgtccggctgaatcgttgaacgacaagctggccaccggtgccgtggaagtactggccagcggcatcaccgtgcttaacagcgtcaaaggcaccctgcccttcccagtgtcggtgcacgacgaggagaacacccgcgaagagctgcggctgcgccaccgctacctggatctgcgccgcaagcgcatgaacgacaacctgcgcctgcgggccaagaccatccaggccgcccgtcgatttttggaggacgaaggcttcatcgaagtggagaccccagtgctgactcgctccaccccggagggcgcccgcgactacgtgctgcccagccgcgtctgcggtggtgaatggtttgccctgc

SEQ ID NO: 297606 - DNA, 523 bp, Unknown
  Bacterial polypeptide expressing nucleotide sequence isolated from the Sargasso Sea
ggcattagatttatcaattactaacagttttgaattttgttggattgttgactttcctttatttgaagaagatgaagaaacaggcggtctccagtttagccataatcctttttcaatgccacaaggaggcattgattctcttaataaagacgatcctttggaggttctgggctttcaatatgatatagtttgtaatggcgtagaattaagttcaggagctgtgagaaatcatatccccgaaataatgtacaaagctttcgaaatagtgggaaagaataaagagtttgtagatgaaaattttggtgggatgataaatgcatttaaatttggagcacctcctcatgctggaattgctccaggtattgataggatagtaatgttgttagctaatgctcaaaacattagggaggtaattctttttcctatgaatcagggtgctgaagatttaatgatggaagcgccttctactgtttcaaacgaacaactacgggagctgggattgcgaataattcctaatgagtaa

SEQ ID NO: 297607 - DNA, 877 bp, Unknown
  Bacterial polypeptide expressing nucleotide sequence isolated from the Sargasso Sea
aaagaattctgtgatgaaaccttagataaattcgaagtattaaattggcatgatgctatggaagaatatggttgtgataagcctgatttaagaatacctcttaaacttattgaaatatctgatttagtaaaagatgaagaatttaaagtatttgctgagcctgctaaagaccaaaattccagagtagttgcaatgagggtttcaaatggaaactccttatcaagaggacaaatcgatgattacacaaaatttgtttcaaaacttggagctaaaggcctggcgtatataaaaataaatgatgttaaagatttagagaatggtattcagtcacctattctcaagtttttaaaaagtgagacaatctcaaatattgtagatgttttaaaagttaaaactgatgatctaattttctttggtgctggacctcaatcagtagtaaatttgtcaatgagcagtttaataaagaagttaggagaagatcttaatctttatagctcaaaatgggctccttgttggattgttaattttcctatgtttgaggaaaatgctgaaggagacttaactccactccatcatccgtttactttacctcaatgttctaaaaaagaattattagaagatccaaaaaaatctattgctcatgcttatgatgttgttctgaatggatatgagataggaggaggttcgctaaggatttttgataaagatatgcagcaaagtatatttagtattttaaatatttctaaagaagaagctgataaaaaatttggctttttattaaaagccctttcttcaggatgtcctcctcatggaggtattgcatttggtttagataggataataatgctagtaacaaatacaactaatataagggatg

SEQ ID NO: 297608 - DNA, 898 bp, Unknown
  Bacterial polypeptide expressing nucleotide sequence isolated from the Sargasso Sea
gatttaggagaggtattaggtgatattggatttaatattttcaccaaggcaattaagtctggaggttatataaaatccataacagtcaaaggaggtaatttaagtattagcaacgtaagaattaaaccaggaggtgacatcttccaagtagcccaagattctggagctggtggattggcctttattagagtcaaaggagatgagcttgagactattggggcaattaaaaataatttaagtgaagagcatatagctgatattttaaagatcactgaagcaaaagatggagacttaatcctcttaggagctggagataaacaaattgtcaatcagtcattagatagagttagacaatatatcgcaaaagacttaaatctcattgataaaagtaaatggaatttcttatgggttactgacttcccgatgtttgagagaaatgaagaggaaaatagatatgaagctttacatcatcctttttgttctccaaaaaatataaaatctaaagattctgaaaacttgaaaaaagaaattgagaactctacagcagatgcttatgacttagttcttaatggattggagttaggaggtggctctttacgtattcatgaagcaaacctacaaagagaggttctgaaaacggtaggacttactgataaagagattgatgaaaaatttggatttttaatagaagcactagaaatgggtgctcctcctcatggtggaattgcgtttggattggatcgtattaccatgcttatcattggtgcagattcaatcagagaaaccatggcatttccaaaaaatcaacaagcaaaatgtcttctcacaaatgcaccttcaaatgtctccgaatcacaattaaaagaattagatattgaaataacaattgatgaataag

SEQ ID NO: 297609 - DNA, 817 bp, Unknown
  Bacterial polypeptide expressing nucleotide sequence isolated from the Sargasso Sea
acaaaattttctaaatttaaaattcaaaatgaaaaattcccaaaaataacatttgcggaagcaatgttgaaatatggaacagataaacctgatcttagaaatccattgctaatttatgaagtttccgatgtttttaaaagagatgatgttaaatttgatattttcaaaaatttggttgataaaggaaatgtagttagagcaattatagcaccacaaacatcagacaaaccaagaagtttttttgataatattgataaatggtccaaagaccaaggtgcatcaggcttagcttattttacgcttgaacaaaaaaatgatttatctgccaaaggtccaatcggaaaattttttagcagcgattctttgaaagaaataattaaaataactggagctaaagtaaaagatacaatttttttctcttgtggaaagaaaaaggaagtagaaaatattttatctttagcaagaaataaaattgcagaagagttaaaactaattaaccataatcaattttctttttgttggattattgattatccaatgtatgagattaatgaagagactaaaaaaattcaatttagccataatcctttttctatgccacaaggaccaatagaaaaattagatttcaaaaatccacttaatattaaagcttatcaatatgatattgtttgtaatggtattgaactttcatctggcgccataagaaatcatgtgccagatttaatgtataaactttttaatttagctggctatgataaaaatgctgtagatgaaaaatttagtggcatgattaatgctttaagttatggtgcaccac

SEQ ID NO: 297610 - DNA, 437 bp, Unknown
  Bacterial polypeptide expressing nucleotide sequence isolated from the Sargasso Sea
gattgaatttagtcataatcctttttctatgcctcaaggtgaaatggactcacttttaaataaacaccccttggatattaaagcttatcaatacgatatagtttgtaatggtgttgagttatcttcaggagctataagaaaccatagaccagatattatgtataaagcttttgaaattgcaggatataaaaaagaagaattagaaagtaaattttctggaatgttgaatgcaatgaaatttggagctcctcctcatggtggtagtgcacctgggattgatagaatagtaatgttgttagcaaatgaaccaaatattagagaagtaattgctttcccaatgaatcaacaagcaattgatcttatgatgaatgctccagctcctgttgataaagagagactagaagaattaggacttaagttagtagataaaaattaat

SEQ ID NO: 297611 - DNA, 852 bp, Unknown
  Bacterial polypeptide expressing nucleotide sequence isolated from the Sargasso Sea
gttatcaggctgggttcacagaaaaagagatcatggcggtcttttgtttattgatttgagagaccattttggcataacacagttagtttttgatccagatagcagtgctttccaagaagcagaaaaagtaaggaatgagtctgtaataacaattaatggaaaagttgtacaaagatcagatgacacgattaataaagtattaccaactggaaaaattgaggtttatgtcgatacacttgaagtaattgggagttcagatgatattccattaccagtttttggtgaacctgattatccagaagaaataagactaaaatataggtttttagatttaagaagagaaactcttcataagaatataatattaagatctgaaattattaattttattagaagtaagatgattgaaaatgactttcttgagattcaaacaccaataatgaccgcatctagccctgaaggagcaagagattatttggttccttcaagagtacatcaaggtaaattttatgctcttcctcaagctccacaacagtttaaacaactccttatgacttcaggttttgataagtattttcagattgctccatgttttagagatgaggatgctagagctgacaggtctcccggagaattctatcaattagatattgaaatgagttttgttaatcaagaggatatttttgaatcagttgaacctttgctaagagatgtatttgaaaaattttctgaaaatatgtctgttaacaaaaaatttccgaggatttcttatgcagaatcaattcaaaaatatggaacagataaaccagatctacgagtagaaattgaacttgatgatattaccgaagtatt

SEQ ID NO: 297612 - DNA, 784 bp, Unknown
  Bacterial polypeptide expressing nucleotide sequence isolated from the Sargasso Sea
aatatttaaaaaattagtaaaatcgggttcaattgtaagaggaataatcacaaaaaacacaaaagaaaaaccgcgtagtttttttgataacattgataaatgggcaaaagatcaaggtgcttccggattagcttattttactattgaaaaagataaagaaataaaaggtaaaggaccagtaggcaaattttttagtgaagattcattaaaagaattaatgcaaaattgtaatgcagaagtaggagatagtgtttttttagcttgtggtaaaaaaaaagaagtagaaaaaattttatctgtagctagaaataagattgcaaatgatttgagtattatcgataaaaatcaattttctttttgttggattgttgattacccgatgtttgagtatgatgaaaatttaaaaaaaattatatttagccacaacccattttctatgcctcagggtaagataaatgaattaaaatttgacaaccctctagatataaaagcctatcaatacgatatagtttgtaatggaatagaactatcatccggggcaattagaaatcacatgccagatcttatgtataaattattttcagttgctggttacagtaaaaaagatgtaaatgataaatttagtggcatgattaacgcgttaagctatggagccccacctcatggtggaatagcaccaggtatagatagaattgtcatgatgttagcagataaagaaaacatcagggaggtgacgctttttccaatgaatcaaaatgctcaagatttaatgatgggggcccct

SEQ ID NO: 297613 - DNA, 907 bp, Unknown
  Bacterial polypeptide expressing nucleotide sequence isolated from the Sargasso Sea
tactttttttagacatcagggatcattttggaataaccagtgtgtcattgataacaaaaataaaaatttcaaagttttagaaaaacttagaccagagtctgttttatcaatagctggaaaagttgtcagaaggtcaaaggaaactgaaaataaagaattaaaaacaggtttaattgaaataaaaatcgaaaatatagaggttctttctgaagctaaagaattacccttaccagtatttggagaacaagattatcctgaggacataagactgaagtatagatttatagaccttagaagagaagagatgcacagtaatattgaacttagatcaaaaataatatcttttttaagaactaagatgattgaaaataattttttagaatttcagactccaattttaacagcatctagtccagaaggcgccagagattttttagttcctagccggcttcatcctggaaaattttatgctttacctcaggctccccaacaatttaaacaaatgataatgattgctggttttgataaatattttcagatcgccccttgtttcagagatgaagatggcagggcagatagaagtccaggtgagcactatcaattagatatggagatgtcttttgttgaacaggaggatatttttaagatagtggaaccaattttttatgaattattcaaaaattttggaaatggtaaagaagtgaataaacaccctttcccaaaaattaaatatacagactcaatggaaagatatggcacggacaaacctgatttgagaaatccaattgaactagtagatgtcacagaaatttttaaatctgaagaagtcaatctgaagatttttaaacaaataattagcaaaggaggggttgtaaaggctattccggttaataacacgtcctcaaaa

SEQ ID NO: 297614 - DNA, 912 bp, Unknown
  Bacterial polypeptide expressing nucleotide sequence isolated from the Sargasso Sea
gaagttttaattaagtctgtggagattttatcaagcgccaaagaactacctatccctgtttttggagaacaagattatccagaggaaataagatttaagtatagatttttagatttgagacgagacgaaatgcataaaaatataattttaaggtcaaacatcatttcatttataagatctgaaatgataaaattaggttttctagagtatcaaactccaattttaacttcttcaagccctgaaggtgctagagattttttagtgccaagtagattaaatcctggtaaattttatgctttacctcaagcaccacaacaatttaaacaattaattatggtctccggatttgacaaatattttcaaattgccccatgtttcagagacgaagacgctagagctgatagaagtcccggagaattttatcagctggatttagaaatgtcatttgttgagcaagagaatgtattcgaagttgttgaaaaattaatggtaaacctgtttaagaaattttctacaaaaaaaattgaatttgaaaagtttccaagaattactttcaaagaatcaatgcttaaatatggaactgataaacctgatttaagaaatcctttactaattaatgatataacaaaaatttttttaagggaggatgtaaaatttgaaatgtttaaaaaacttgttaaagcaggatctttggtaagagcaataattactaaaaatactaaagataaacctagaagtttttttgataatattgataaatgggcaaaagaacagggtgcctctggcttagcatactttactatagaaaaagataagaagattaatggcaaaggacctgtaggtaaattttttagtgaagactctattctagaaattatggaaataactaaagctgagataggagatagtatt

SEQ ID NO: 297615 - DNA, 694 bp, Unknown
  Bacterial polypeptide expressing nucleotide sequence isolated from the Sargasso Sea
ggataaaaaaatcacagcaaaggggccagtaggaaaatttttttccgaagaatcattaaaagaaataatgaaaattacttcagcagaaataggcgatagtatattttttgcttgtggaaaaataaatgaagttgaaaaaatttgttctttagcaagagataaaattggcaaagatttgaatctgattaatgaaaatgagttcactttttgttggataattgattatccaatgtttgaaaaagatcaaacaactaataaaattaaatttagtcataacccattttctatgcctcaaggagatattaaaaatatagatttaaaaaatcctttgaaaattaaagcctatcaatacgatatagtatgtaatggtattgaattgtcatctggagctataagaaatcatattcctgagcttatgtacaaattattttcagtagcagggtatgataaaaatgaggttgatgaaaaatttagaggaatgataaatgctcttagttatggtgcgccacctcatggtggtatcgctcctggtatagatagaatagttatgcttttagcaaatgaaaaaaatattagagaagtaacaatgttcccaatgaatcaaaatgcacaagatctaatgatgaatgctccctcagaaatttctgaagatcagttgaaagagctaaatttatccttaaagaagaaaaaataa

SEQ ID NO: 297616 - DNA, 739 bp, Unknown
  Bacterial polypeptide expressing nucleotide sequence isolated from the Sargasso Sea
aatgaataaatatagaagtcataattgctcagaactaagagataaagatatagatcagcatgtaaccttatctggttggttacatagaaagagggatcatggtaacctgttatttctagatttgagagatcatttcggtgttactcaatgtgtaatagaaaacagaaataaattctttccaatattagaaaaaacaaaaccagaaagcgttttaaaaataaacggtaaagtcgtagagagggcaaagggaactgagaatttagaattaaaaactggaaaagttgaggtatcaattcaatctgttgaaattctatcgaatgctaaagaactaccaattcctgtatttggtgaacagaattatccagaagaattaagattaaaatataggtttttagatttaagaagagaggaaatgcacaataatattattttgagatcaaaaataattacttttataagatctgaaatgttaaagttgggtttccttgaatatcaaactccgattttaacatcttctagtccagagggagcaagagattttttagtgccaagcagattaaatccgggtaaattctatgccttaccacaagcccctcaacaatttaaacaattaataatggtctctggttttgacagatattttcaaattgctccatgttttagagatgaagatgcaagagcagacagaagcccaggagagttttaccaagtagatattgaaatgtcttttgtagagcaa

SEQ ID NO: 297617 - DNA, 856 bp, Unknown
  Bacterial polypeptide expressing nucleotide sequence isolated from the Sargasso Sea
aaattaaaaattttcaaagatataatcgcaaaaggaggagttgtaaaagccattccggttcctaatacctttttaaaaccgagaagcttcttcgatggtctcaataattgggctattagcgagggtgcaagcggtttagcttatattacatttgaaagtgttaaaaacaaaatagttggaaaaggacccatagccaaatttttttctgaaagcgccattttagaaataataaaaaattgtaaaattaccgaaaaagactccatattttttgtgtgcaacaaagaaaaagaggcggtaaaattttctggtatagcaaggcaaaaaatagcagaggaattaaaactaatcgacgaaaaaagctttcatttttgttggataaccgattatccaatgtacgagtacgatgaaaaggagaaaaaaatagactttagtcacaatcctttttcaatgcctcaagttgaaatgaaagaatttgacaaaacagatcctctaaaaattttggcttaccaatatgatttggtgtgtaatgggtatgaattatcttctggtgctatcagaaatcacatacctgaatacttgtttaaggtttttgataaagtggggtattcaaaaaacatggttgaaaaaaacttttcaggtatgattaaagcactttcgtatggagcaccacctcatggaggcatggcaccagggatcgacagaattgtgatgcttttagctaaccaaaaaaacataagagaggttaccctgtttcctcttaaccagaatgcacaagatcttttgatggaggctccttcagagataactgaaaaacaattaaaagagctgaatattaaaactattaaaaaaaattagt

SEQ ID NO: 297618 - DNA, 769 bp, Unknown
  Bacterial polypeptide expressing nucleotide sequence isolated from the Sargasso Sea
agccttagttaccaaaaatacaagggataaacctagaagtttctttgatagtattgatagatgggcaaaagagcaaggttcatctggtctagcctattttacattagaaaaagatgataaaattaatgccaaaggaccaattggaaaatttttttcagagaatgcattattagaaatcatgaaactaacaaatgcgagtataggtgatacggtatttctttcttgcggaaagaaaaatgatgtagagaaaatattaagtgttgcaagaaataaaatagctgaagatttaaatttaattgataatgaaatgttttcattttgttggattattgattatccaatgtatgaaattgatgaaactactaaaaaaataaaatttagtcataatccattttcaatgcctcaaggtgaaataaataaattagacttatctaatcctttaaatattaaagcctatcaatatgatattgtttgtaatggaattgagttatcatcaggtgccattagaaaccatgttcctgaattaatgtataaattatttgaaattgtagggtattcaaaaaatgatgttaatagtaaatttagtggaatgataaatgccttaagttatggtgcaccaccccatggaggaatagctccaggaattgatagaattgttatgcttttggcaaatgaaaaaaacataagagaagttaccatgttcccaatgaaccaaaatgctcaagatttaatgatgaatgctccatctgaaattttagatgatcaactg

SEQ ID NO: 297619 - DNA, 790 bp, Unknown
  Bacterial polypeptide expressing nucleotide sequence isolated from the Sargasso Sea
aacgccgattctgacccgagcgacgccggaaggtgcacgggattacttggtgcccagccgaacgcatccgggtagcttttttgcgttgccgcagtctccgcagttgttcaaacagctattgatggtggcgggctttgatcgctactaccagattgctaagtgtttccgtgacgaagacctgcgagccgatcgccagccagaatttacccagattgatttggaagcttcctttgtagaggaagaagacattatgggcattaccgaacggatggtgcgttcggtgtttaaagaattgctcagtgtagacttaccggatttcccgcgcatgccattctccgaggccatgcagcgtttcgggtccgacaagcctgacctgcgtattgcattggagctgattgatattgccgacctgcttgctggcgtggactttaaagtgttctccggcccggccaacgacccgaaaggtcgtgtggcagccatgcgagtgcccggtggatgcagcctgtcgcgcaaggatatcgatggctacaccaagtttgtcagcatctatggtgccaagggtttggcttacatcaaagtcaacgacttggcagccggcgctgaaggtctgcagtctccgatcctgaagttcctgaccgaagatgccattaaaggcatccttgagcgcactggcgccgagaccggcgatctgattttcttcggtgctgataaggccaagatcgttaacgaagcgctgggtgctctgcgcgtcaaagtgggccatgacttgaatttggtcgagggagaatgg

SEQ ID NO: 297620 - DNA, 353 bp, Unknown
  Bacterial polypeptide expressing nucleotide sequence isolated from the Sargasso Sea
tcaatatgatatcgtttgtaatggtgttgaattgtcatctggcgcaataagaaatcatagacaagatattcttttaaaggcttttgaaatcgctggatataacattgatgaaattaagaaacggtttggagcgatgtacgatgcttttggctatggcgcaccccctcatggtggcattgctcctggtattgacagaattgtaatgcttattgctggtgtagaaaatatacgagaagtcattgctttccctatgaatcaacaagcgcaagatcttatgatgaatgcaccatccgaaatatcctcagatcagcttaaagaaatcggtattaaaattatcgagaagaaagaataga

SEQ ID NO: 297621 - DNA, 897 bp, Unknown
  Bacterial polypeptide expressing nucleotide sequence isolated from the Sargasso Sea
acagataaaccttgacttaagaaatcctctaattatatctgattatacagatgtatttaaacattcaaattttaaaattttcagtaatcaaattgaaaaaggatcagttgtaaagggtattacagtatcaaaaacagctgatcaaccaagaagtttctttgataaacttaataattgggctagagatgagggtgcagctggattaggatacatatcatatagtgaaagtaattttaaaggccctatagctaaaaatttaaatgaagatcaattattatctttaaaacttaatgataaagactcaatattttttgtatgtgataaattaaatcaagcacaattattttctggaaaagtaagagataaaatttgtaacgatttgaatttattaaataaaaactcttttgaattctgctggattgttgattttccaatgtatgaaattgatgaaaaaacaaataaaatacaatttagtcataatccattttctatgcctcaaggtgaaatggactctttattaaataaagatccactagaaattaaagcctatcaatatgatattgtttgtaatggtgtagaattatcctcaggggcaataaggaatcataaaccagaaattatgtttaaagcttttgaaatagcaggatactcaaaaaaagatcttgaaaataagttttcaggaatgcttaatgcacttaaatttggagcaccacctcatggtggtagtgcaccaggtattgatagaatagtaatgttacttgctgatgaaccaaatattcgtgaagtaatagcttttccaatgaatcaacaagcaatggatttaatgatggacgcacctgcaagtattgataaagaaagattagaagaattaggtataaaattaatagacaaaaatta

SEQ ID NO: 297622 - DNA, 934 bp, Unknown
  Bacterial polypeptide expressing nucleotide sequence isolated from the Sargasso Sea
actcagtgcgttatagacaaaagtaatgaattttttaagaaactcgaaaaactttctttggaaacagtaattaaaattacgggaatggtcattgatagatcaaatgaaacaataaataaaaatatttctactggcgaaatagaagttaaaattaataatattgatattcttggggaaactaaagaattaccaatgcctgttttttcagatcaagaatatgctgaggaaataagacttaagtatagatttttagatttaagaagaaaaaaaatacatcaaaacattatcttaagatcaaaagtaatctcatttattagaaatgagatgcaaaaacttggttttttagaatttcaaactcctattttaacctcatctagcccagaaggagcaagagattttcttgtacctagtagattaaatcctggaaaattttatgctttaccacaagctcctcaacaatttaagcaactaataatggtttctgggttcgacaaatattttcaaatagcgccttgtttcagagacgaggacgccagagcagatagaagtcctggagaattttatcaattagatgttgaaatgtcttttgttgaacaagatgatgtctttggagtaattgaaactttatttctaaaattgtttaaaacatttagtaataaaaaaattcttcatgaaaagtttccaagaattacctatgaagattcaatgcttaaatatgggtctgataaaccagatttgagaaatcctttagaaatttcagatttaacaattatttttgaaagagaagatgttaaatttgatatttttaaaaaattagttaaagctggctcaatagttagagcgctagtaaccaaaaatacaaataataaacccagaagtttctttgacggtattgataaatggggcaaaagagcaaggttccctctggtctagc

SEQ ID NO: 297623 - DNA, 883 bp, Unknown
  Bacterial polypeptide expressing nucleotide sequence isolated from the Sargasso Sea
agatctgcagacacaataaataaagatttatcaacaggagaagttgaaataaaagtttcctcattcgaaattttatcggaatctaaagatttgcctatgcctgtttttggtgaacaagaatatcctgaagaaactagattaaaatatagatttatagatttgcgacgacatgaaatgcatgaaaatatagttttaagatcaaaaataatttcatttttaagaaatgaaatgctacatagtggttttttagaatttcaaacaccaatactaactgcctcaagtcctgaaggggcaagagattttttagttcctagcagaatacacccaggaaaattttatgctttaccacaagcaccgcaacaatttaaacaaatgataatgatttcgggttttgataaatattttcaaattgctccatgctttagagatgaagatggaagagctgatagaagtccaggggaacattatcaattagatatggaaatgtcatttgttgagcaagaagatatatttaaaacagtagagcctattttttttaaactttttacagaatttggaaaaggaaaagaaatttctaaaaatccatttaaaaaaattacttacaaagactcaatgttaaaatatggtactgataaacccgacctaagaaatcctttagaaatatttgatgtaacttcaattatgaatagagatgatgttaaattagatatttttaaaagcataataaaaaaagggggggttgtaagagctatacccgctccaaaaacatcatcgaaagcaagaagtttttttgatggatacaataattgggcaaaggaagaaggagctaaaggtttaggttacattatattagaaaaaagtaatggaaaatttatcggaaaag

SEQ ID NO: 297624 - DNA, 781 bp, Unknown
  Bacterial polypeptide expressing nucleotide sequence isolated from the Sargasso Sea
aaactcagacctgagtctgtaattttaatcaatggctcagttattaaaagatcaaaggaaacccaaaatatagaattaaaaacaggtttgattgaagtaaaaatttcaagttttcaaattttatccgaagcaaaagaacttcctctaccagtatttggtgaacaagattacccagaagaaataagattaaaatatagatttatcgatcttagacgaaaagaaatgcatgacaatataaaactaagatctgaagttatttcttttataagatctaaaatgattgaaaataattttttagaatttcaaaccccaatacttaccgcttctagccctgagggagctagggactttttagttccaagtagacttcatcctggcaagttctatgcactaccacaagccccacagcaatttaagcaaatggtgatgatcgcaggttttgatagatattttcagatagctccatgttttagggatgaagacggaagggcagatagaagtccaggagaacattatcaattagatatggaaatgtcttttgttgaacaagaggatgtttttaaaataatcgaacctatattttatgatcttttttcaaaatttggattaggaaaaaaaattaacaaatttccatttccaagaatttcatacaaaacatcaatggaaaaatacggaaccgataaaccagatttaagaaatccaattgaacttttaaatgttacaaagatttttgaatcagacgaagttaagttaaaaatatttaaacaaataatcaaaaaag

SEQ ID NO: 297625 - DNA, 856 bp, Unknown
  Bacterial polypeptide expressing nucleotide sequence isolated from the Sargasso Sea
ggcgacctgcgcgagcagaacatcgacgacgctgtgcagctctgcggctgggtggaccggcgtcgagaccacggcggggtgatcttcatcgatctgcgcgatcgcagcggcaccgtccagatcacagtggaccctgacctcggagccgaggcttttgccgttgcggaacacctgcgcagcgaaaccgtgctgcaagtgaacggcaaggtgcgggcccgaccagcggaatccctgaacgacaagctggccacaggggccgtagaagtgctggccagcggcatcaccgtgctgaacagcgtgaagggcaatctgcccttccccgtgtcggtgcacgacgaggagaacacccgcgaagagctgcggctgcgccaccgctatctcgatctgcgccgcaagcgcatgaacgacaacctgcggatgcgggcccagacgatccaggcggcccgccgctttctcgagagcgagggcttcattgaggtggaaaccccggtgctcacacgctccaccccggaaggcgcccgcgattacgtgctgcccagccgcgtctgcggtggcgaatggttcgctctgccccagtcaccccagctgttcaagcagctgctgatggtgggcggcatcgagcggtactaccaggtggctcgctgcttccgcgacgaagacctgcgcgccgatcgccagccggaattcacccagctggacatcgagatgagcttcatggaccaggagcagatcctggagctgaacgaatccctgatctgctccatctggaagggtgtgaagggcatcgaactgccgaggccattcccgcgcatgacctggcatgacgccatggagcgctacggcaccgaccgacccg

SEQ ID NO: 297626 - DNA, 940 bp, Unknown
  Bacterial polypeptide expressing nucleotide sequence isolated from the Sargasso Sea
attgtttatttaataaaaaaaattaataacaaaaatgttacatcttttccgagaattaaatatgaagaagcaattttaaattatggaacagataaaccggatataagatttgatatgaaaatacatgagctaaattctttagccaaaaacaaaggttttaatgtatttgataaagaagaattaattgttgctatttctgttcctaatgcagcttcatactctagaaagcaaatagacaatctaacagattgggttaaaaagcctcagattggagcaaatggattagtctgggttaaatatgaatctgaaaataatataaaatcatcagttgataagttttttaatttgtctgaaataaaaaaatggataaaaaaatgtaattctaccccaggggacttaatattaattatttcaggtaaaaaaaaggaatctagagttcaaattggaaatcttcgattaaaaatggcagaagatttagggttaagaaatcctcaagattttgcgccagtatggataaccgattttccgcttttttattgggatgaggaattgaaaaaatataattctatgcatcatccattcacttctccaaaagctgatgatataaaatttctagatagcaatcctgaaaaagttaaagcaaatgcatatgatttggttattaatggaaatgaaattggtggaggatcgattagaattcacgacacagaacttcagagaaaaattttaaaaattcttgggttttcagataaagaagctgaaagacagtttgggtttttaatgaaatcttttcaatacggagctccccctcatggaggaatagcctttggtctggatagacttgttgcaatcttaaaagggaaagaaacaatcagaaattttattgcttttccaaaaaataataatgggaagagatgtaatgatagatgctccctctgaa

SEQ ID NO: 297627 - DNA, 466 bp, Unknown
  Bacterial polypeptide expressing nucleotide sequence isolated from the Sargasso Sea
tcccatgttgaaagaaataaagataataatctgacttcattacatcatccatttactttgccagctgtaacagttgatgaacttaaaaatgatccagaaagcgcgttggcatgcgcttatgattttgttttaaacggttacgagctcggaggagggtctttgagagtttatgaaacgtctatgcaaaaagaaatatttaaaattttgggaatttcaaatgaagaagctaatgaaaaatttggattcttgctatcagctttgtcatctggatgtcctcctcacggcggtattgcatttggcttagatagaataattatgttgttgtctgatacaactaatattcgagacgttattgcttttcccaagacacaaagtgcatcatgtttgttaacagaggcaccaagtatggtgtctgatgatcagcttgacgagcttaatatctcatcaactcataatacggagtagt

SEQ ID NO: 297628 - DNA, 948 bp, Unknown
  Bacterial polypeptide expressing nucleotide sequence isolated from the Sargasso Sea
atgattgcagggtttgataggtattttcaaattgcaccttgcttcagggacgaagatggaagagcagacagaagtcctggggaacactatcaactggatatggaaatgtcttttgttgaacaagaagatatttttaaaattgttgaaccgattttttatgatttatttttaaaatttggaaaaggaaaaaaaataaataagtttccttttcctagaatttcatacaaaacagcaatggaaaaatatggtactgataaaccagatttaagaaatcctattgaaataattaacgtcactaatatttttaaatctgaggaagtaaaacttaagatttttaaggaaataattaaaaagggcggaattgtaaaagcaattcctgctaaaaatactgaaacaaaaccaagaagtttttttgataatttgaacaattgggctattacggagggagcaagtggtttagcttatataacctttgaaaaaagtaatggaaaaattattggtaaaggccctgtagctaagtttttttctgacaaaagtattttagagttgttgaaagagtgtaatattgatgaaaaaggatctgttttttttgtgtgtaataaagaacccgaagccagtaagtttgctggtatagcaagacaaaaaatcggtgaggaattaaaactagttgataattcatcattcaaattttgttggatagttgattttccaatgtttcactatgatgaaaaagaaaaaaagattgattttagtcataatcctttttccatgccacaaattaaaattgaaaattttgataaaaaaaatccattagaaattttagcctttcagtatgatttagtttgtaatggatatgaattatcatctggagctataagaaatcatatcaccgaatatttatttaaagtatttagcaaaggttgggtattcaaaagaaatggtagaaaa

SEQ ID NO: 297629 - DNA, 910 bp, Unknown
  Bacterial polypeptide expressing nucleotide sequence isolated from the Sargasso Sea
attgaataaatacagaacgcataagtgtaatgaactaagaaaagaggatgtagataaaaaaatttccctttcaggttggataaataaaaaaagagaccatggtaacttattgtttattgatttgagagataattatggaattacgcaatgtataattgataaagataataaatatttttctgttttagaaaaaatgcaattagaaacagtaattaaagttgagggtaaagttgttaatagatctaaagaaacaattaattctgaaattgacacaggtgaaatagaggtagttattgagaatcatgaagttttaggcacctgtaaagaactacctatgccaatctttagcgatcaagagtatgctgaagaaataagattgaaatatagatttttagatctaagaagaaaaaaaattcatgaaaatattattttaagatctaaagttatttcatatatacgaaatgaaatgactaaattaggttttttagaatttcaaacaccaattttaacttcatctagtccagagggtgctagagattttttagtacctagccgtttaaatccaggaaaattttatgcattacctcaagctcctcagcaatttaaacaattaataatggtttcaggctttgatagatactttcaaattgcaccatgtttcagagatgaagacgcaagagcagacagaagtcctggggagttttatcaattagatttggaaatgtcatttgttgaacaagaagatgtatttaacgttgttgaaaagttaatggttaatacatttaaatatttttctaccaaaaaactgatgtttgataaatttccaaagatatcatttaaggaagcaatgcttaaatatggtactgataaacctgatctaaggaacccgctcatcataaatgatataact

SEQ ID NO: 297630 - DNA, 310 bp, Unknown
  Bacterial polypeptide expressing nucleotide sequence isolated from the Sargasso Sea
gaaccatctgcccgacgtaatgtataaggcatttgagatcgctggctatccaaaaagcgtcgtggacgaaaaattccctgcgatgatcaatgcgttccgttttggggcgccgccgcatggtgggattgccccaggcattgaccgcatggtgatgctgattgctgatgaaccgaatatccgcgaagttattttgttcccgatgaatggcagagctgaggatctgatgatggcggcgccatctgaggttgttgaaacagctcttgctgatttgcatattcggcccgttccacaaataaaaaaagtggattaa

SEQ ID NO: 297631 - DNA, 677 bp, Unknown
  Bacterial polypeptide expressing nucleotide sequence isolated from the Sargasso Sea
aggaggtatttcaaaattcatcaatatcgacatacaaaaggaaataattgaatctgcaaaaattgaaaacggtgacatcatatttttaattggagatcaaaaagaaacggtactaactgcacttggagctttaaggttgcatattggaatggaagagggtttgtgcgactcaaataaattcaatccggtatgggtgacagacttcccaatgtttgagtatgatggtgactccaaaagatatatagcaatgcaccacccatttaccgctcctcaaaccaaaaatttagaagatctcgaatctgaaccttctctgctcaagtctcgaggatacgatcttactattaatggttatgaaattgcaggtgggtcgatacgaaatcataagcccgattttcaatcaaagatttttgaattattaggaatggataaagaagagattgattcacgatttggatttttagttgaagctcttaaatacggcacgcccccacatggtggcattgcttttggttttgatagattaattatgcttttatcgggttcaaggaacattcgtgatgttatcgcctttccaaaaaccacatcggcatcttccttaatggatgagtcaccaagcaaagtatcaaaagatcagctatcggatttaaatattaaagtagtaaacaaaaataaataat

SEQ ID NO: 297632 - DNA, 422 bp, Unknown
  Bacterial polypeptide expressing nucleotide sequence isolated from the Sargasso Sea
aatgcgtactcattattgtggcgaattaaatagcagtcatatcgatcaagaaatcgagctttgcggctgggttcaccgtcgtcgtgatcatggcggtgttatttttcttgaccttcgtgatcgtaccgggctagctcaaattgtatttgacccagatcgcgcagaacctttttcaattgctgatttaattagaaacgaatttgttataaaaattaccgggaaggttcgcaatcgtccagaaggaacaatcaacactgatttaacaacaggtgaaattgaagttttaggttacagtattgaggtcttaaacaaatctaaaacacccccgatacaaatagatgatgagcatgtccatgacgacataaaacttcggtatcgctatattgatttacgtcgtcctttaatgcaaaaaaatctccaac

SEQ ID NO: 297633 - DNA, 159 bp, Unknown
  Bacterial polypeptide expressing nucleotide sequence isolated from the Sargasso Sea
gtttaaacagttgttaatggtgtcgggttttgatcgttattatcagatcgctaaatgtttccgtgatgaagatttacgtgcggatcgtcagcctgaatttacccaaattgatattgaaacatcctttatggatgaagaatcaatcatgggcctaacata

SEQ ID NO: 297634 - DNA, 880 bp, Unknown
  Bacterial polypeptide expressing nucleotide sequence isolated from the Sargasso Sea
acctcactattacaatgtgttgtagataatacatctgctaattttactgaattatcaaaaataaaaaacgaggatgtaattaaaattactggtctaataaccaaaagaagtgaggaaactattaatacaaatttagagtcaggtgaagttgaattgaaaatcgaaagttttgaaatattaagccgatgctctaaaaccctcccacttgaggtaaattctgatagtgattatggtgaagaggtaagattaaaatatagatatttagaccttagaagatccaaaatgcaacgtaacattaggctaagaaatcaaattataaattatgtaagagattttatgaataatgagggtttcatggaattagcaactccaattctaacagctccttctccagagggtgcaagagattacctagtaccttccagattacataaaggatccttttatgctttgcctcaagcacctcagcaatttaagcaactttatatggcctctggtgttgataaatattttcaaatagctccatgtttcagagatgaagatagtagggctgatagatcccctggtgaattttatcaaattgatatggaaatgagttttgccacacaagaggatgttttagatatcatcagtcgcttactatttaatacttttgatagatttaaacctaaagataaattaataaataaacttccattcccaacttttacttacaaagatagtttagaaagttttggatgcgataaaccagatttaagaaatcctctgagattagctaatgtaacaaattattttgagggctcaggtcttcaaatttttgaaaatttaattaaaaagggcgctattgttaattgtattcaagctctcaattctgaggggt

SEQ ID NO: 297635 - DNA, 913 bp, Unknown
  Bacterial polypeptide expressing nucleotide sequence isolated from the Sargasso Sea
gattcttaaaagatctaagattgtatcgaaaataagaaatttcttagaagaaagaaactttaatgaaatagaaactccaatactcacaagagctactcctgaaggagcaagggactatattttaccaagccgaattcatcctggaagtttttatgctcttcctcagtctcctcagcttttcaagcaaatgctcatgatgggtggaatggataggtattatcaggttgcaaggtgctttagggatgaggatttaagagcagataggcagccagaatttactcagattgatatagaagcatcttttgttgaagagaaagatatcattgagcttggctcaagcttactaaaggttctgcttaaagattttgcaaatcataacttagatcatattgatgaaattgactatgcgcatgctattaataaatacggctccgataaacctgatttaagaatacctctggagctattagagatttctgatgaagctaaaaatgaggaatttaaagttttctctgatccagcaaaaaatgatggatcaagagttgtcgctttaaaagtagatggaggaaataaacttacaagatctcaaatagatgaatatacgaatttcgtaggaaaattaggagcaaaaggacttgcttatataaaaataaatgatgtttctgatatcgaaaatggactccaatctcctattcttaagttcctttcgaaaaagttcataactgcactttttagtaagttaaatcctacaaatgatgacttaattttctttggtgcaggttcttctgaaatagttaatttaagtatgagttctttaataaaaagacttggaaaagatttagatttatataaaaaagattgggcgccttgttggataactaatttccccaatgttcgaaagtggatgctgata

SEQ ID NO: 297636 - DNA, 715 bp, Unknown
  Bacterial polypeptide expressing nucleotide sequence isolated from the Sargasso Sea
gtacgcctgcgtccggccggtgccgtgaacaagaacatggcgtccggcggcatcgaagtgctgggctatgagctggaagtgctgaacgagtcggaaaccccgccgttcccgctcaacgaatactccgacgtgggcgaagaaactcgcctgcgctaccgtttcctggacctgcgtcgtccggaaatggccgagaagctgcgcctgcgctcgcgcatgaccaccagcatccgccgcttcctggatgaaaacggcttcctcgacgtcgaaaccccgatcctcacccgggccaccccggaaggcgcgcgcgactacctggtaccgagccgtacccatgccggcagcttcttcgccttgccgcaatcgccgcagctgttcaagcaactgctgatggtggctggtttcgaccgctactaccagatcgccaagtgcttccgtgacgaagacctgcgtgccgatcgccagccggaattcacccagatcgacatcgagaccagcttcctcgatgaaaaagagatcatgggcctgaccgagcagatgatccgcaacctgttcaaggaagtcctggacctggagttcggcgagttcccgcacatgaccttcgaagaagccatgcgccgctacggttccgacaagccagacctgcgtaacccgctggagctggtggacgtggccgaccagctcaaggacgtcgacttcaaggtgttcagcggcccgg

SEQ ID NO: 297637 - DNA, 868 bp, Unknown
  Bacterial polypeptide expressing nucleotide sequence isolated from the Sargasso Sea
ttctggttttgataagtattttcaaattgcaccatgtttcagagatgaagatgcaagagcagatagaagtcctggggagttctatcaattagatttagaaatgtcttttgttgagcaagaagatgtatttaatgtagtagagaagttatttgttaatacatttaaaaagttttcaaataaaaaattattgtttaatcagtttccaagaatttcatttaaagaatcaatgattaaatatggaacagataaaccagatttaagaaatccattaattattagtgacattactgaaattttcttgagagaagatgtatcttttgaaatatttaaaaaattagttaaatctggatcaaaagtcagatgcattgttacaaaaaatacaaaagataaaccgcgaagttttttcgataatattgataaatgggctaaagaagaaggcgcttcaggacttgcttactttactatcgaaaaagagaaagaaatttcagcgaaaggaccagtaggcaaatttttttcaaaagactctctaaatgagataatgattaaaactgaagcaaaagtaggtgacagtatttttcttgcttgcggtaaattagaggaggtagaaaagataactgcattagctagagataaaattggaaaagatttaggtttaattgatgaaaacgttttcgcattctgctggattgtagattatccaatgtatgaaatagataatcaaacaaaaagaattaaattcagtcataatcctttttctatgccccaaggagatataaataaaattaattttgaaaaaccattagagatactcgcatatcaatatgatattgtgtgtaatggaatagaattatcttcggggtgcaattag

SEQ ID NO: 297638 - DNA, 898 bp, Unknown
  Bacterial polypeptide expressing nucleotide sequence isolated from the Sargasso Sea
tctacacccgaaggggctagggattattttagtacctagcagaatacacgaaggaaagttttatgctttgcctcagtctccacaactatataagcaaattttgatgatttcaggctttgatcgatattttcaaattgtaaaatgttttagggatgaagatcttagatcggatagacagcctgaatttacccaaatcgatattgaaatgtcatttgttgatgaagaccaagtaatggattatatggaaaaattaacaaaacacgttttcaaaactgtaaaaaatatcgaattagatacccctttcaaaaaattgacatggtcaaaagcaatggactcctacggttcggataagccagatttaagatttgatcttgagcttatagatattaaggaatatgctttaaaatctagttttaaaaatttttttgaagctgatacaatcaagactgttatcataaacaatgcaaatcttttcacaagaaaaaaaattgacaatctaaccgatattgctaaaacgtatggagctaaaggattggcttggtttaaagttggtaataatgaattatcaggaggaatatcaaaattctttaatgaagacttagctttagaaatgatagagactttaaatctctctgaaaataacattttatttattgttgctgattctcacaaagtagcatgcactgcattgggagcaataaggattgaaatagcaaaaaatttaaatttaatcgatgttgatgcttttaaaccagtttggataacagattttcctatgtttgatcatgatgatatggaccaactgacaccaatgcaccacccttttaccgcacctaaaattaatcatattaatgatcttaatttggacccaaacgaaatattttatcgagagcatatg

SEQ ID NO: 297639 - DNA, 712 bp, Unknown
  Bacterial polypeptide expressing nucleotide sequence isolated from the Sargasso Sea
cgattgaaccctggaaaattttatgccttacctcaagcaccacaacaatttaaacaactaattatgatttcaggttttgataagtattttcagatcgctccatgttttagagatgaagatgcaagatctgatagaagtcctggagaattttatcaacttgatattgaaatgtcatttgttacacaagaagatgtatttgatgttgttgaaaaactgcttacaaaaatttttaccaaattttcatccaaatctttagttaatgaaaaatttccgagaattccatatgaagaagctatgttgaagtatggttcagataaacctgacctgagaaatcctttggtaattaaagatgttactgagatttttttaagagacgatgtaaaattcgaaatatttaaaaaatttgtaaaatctggatcatttgtaagatgtattgttacaaaaaatactaaagataaaccaagaagcttttttgacagtttagacaaatgggctaaagatgaaggttcaggtggtttagcctactttacttttgaaaaaaatgaaaaaattagtggtaagggaccagttggtaagttcttttcagaggaatctttacttgcaattatgaaattaacaaatgcggaagtaggggatagtatattttttgcttgtggaaaaaaaaatgaagttgaaaaaattacctctttagctcgagataaaatttgtgatg

SEQ ID NO: 297640 - DNA, 892 bp, Unknown
  Bacterial polypeptide expressing nucleotide sequence isolated from the Sargasso Sea
tgataaagataataaatatttttctgatttagaaaaaatgcaattagaaacagtaattaaagttgaagggaaagttgttaacagatcaaaagaaacaattaattctgaaattgacactggtgaaattgaggtttttattgagcagcatgaagttttaggcacttgtaaagagcttcctatgccaatctttagtgatcaagaatatgcagaagaaataagattgaagtatagatttttagatttaagaagaaaaaaaattcatgaaaatattattttaagatccaaagttatttcatatatccgaaatgaaatgactaaattaggttttttagaatttcaaacaccaattttaacctcatctagtccagaaggtgctagagattttttagttcctagtcgtttaaatccaggaaaattttatgcattacctcaagctcctcaacaatttaaacaattaataatggtttcgggctttgatagatactttcaaatagcaccttgtttcagagatgaagatgcaagagcagacagaagtcctggggaattttatcaattagatttagaaatgtcatttgttgaacaagaggatgtatttaatgttgttgaaaagttaatggttaatacatttaaaaatttttctactaaaaaactgttgtttgataaatttccaaagatttcatacaaggaagcaatgcttaaatacggtactgataaaccagatttaagaaacccactcgttgtaaatgatataactgaaatttttacaagagaagatgtatcatttgaaatatttaaaaaattagtaaaatctgaatctaaggtaagatgtattattacaaaaaatacaaaagataagccaagaagtttttttgataatattgataaatgggca

SEQ ID NO: 297641 - DNA, 394 bp, Unknown
  Bacterial polypeptide expressing nucleotide sequence isolated from the Sargasso Sea
atctgatatagacaagttagataatgatccaagaaaagctttgagtcgcggctatgatttaaccatgaacggccatgaaattgccggcggctcaattcgaattcattctccggaggttcaagaaaaagtgttttctttattaggacttactcaagaagaagctgttgataaatttggatttttagtagaggcacttcgatatggagctccgccacatggaggtatcgcttttggatttgatagattagtaatgcttttagctgggacagaaaatattagagatgtcattgcctttccaaaaactacatctgctacttctttaatggatgatagtcctagcgatgtcgacgatcaccagttacgagatctcgggttagagataaaaaaagactaa

SEQ ID NO: 297642 - DNA, 834 bp, Unknown
  Bacterial polypeptide expressing nucleotide sequence isolated from the Sargasso Sea
ttttagatttaagaagaataaactgcataacaatattttattaagaaataaggttatatcctctataagaaaaaaaatggttgatagaggtttttatgaatttcaaacacctattttaacatctgcttctccagaaggtgcgagagattatttggttccctcaagattacatcatggaaagttttatgcactacctcaagcacctcaacaatttaaacaattgctaatgatagctggctttgataaatattttcaaatcgccccatgtttcagagacgaagatagtcgagctgatagatcacctggtgaattttatcaattagattttgaaatgagttttgttacacaagaggatgtttttagcgcattagaacctgttttatatgaaatatttgaagaaaataagaattatagtaaaaaaaattctgttgaagtaagcaatttcccctttccacgtattccttacgaagtatcattagagaaatatggaaccgataaaccagatttaaggaatcctttaattattgaagattatacgaatatttttaaagattctaattttaaaatttttagtgaacaaattaaaaaacatgcaatagtaaagggaataaaagttaaaaatgttgcagacagaccaagaagtttttttgataaattaaatgattgggcaagagaagaaggtgcgcaaggcttaggttatataaattttatcgaaaataattttaaaggaccaattgctaagaatttaaatcaagcacaattatcaggcttcaaattaaccgaaaatgaatctgtattttttgtatgtgataatattaaaaatgctcaatcttt

SEQ ID NO: 297643 - DNA, 712 bp, Unknown
  Bacterial polypeptide expressing nucleotide sequence isolated from the Sargasso Sea
tatgaaatttacttggaaccaacgtcaatcatgccatgacattaccgaagcgcatgtaaatcaaacggtaacactcgccggctgggtcgatacaacgcgcgatcatggccatttattatttattcatttacgggaccgatccggtaccatgcaggtggtttgtgatgaaaacttaaatcaaggcatctaccagcaatccaaaacattgcgatcagaatatgtgattaagattacaggcaccgtgcaaatgcgatccaaagaaaccatcaatagtgatatggtgtccgggaccattgaagtcattgctacagacattgatattttaagtaaggcaaaaacaccgccattcatggtatccgaaaaatcgactgaaaaattggacatgtcggttgatgaagacttgcgattgcagtaccgctatttggacttgcgtcgccaacccatgcaaaaaaacattattggccgtgccaacattgtgcaagcgttgcgagataccttaaaccaagccgaatttttagacatcgaaaccccatttctaaccaaaagtactcccgaaggtgcacgagattacttggtgccatcacgaacccacaaaaacacgttctttgccctgccccaatcaccgcagttgtttaagcaattgttaatgatgagtggcttggagcgctactaccaagtggtcaaatgcttccgagatgaagacttgcgcccc

SEQ ID NO: 297644 - DNA, 902 bp, Unknown
  Bacterial polypeptide expressing nucleotide sequence isolated from the Sargasso Sea
tgttgagacattactaataaatacctttaaaagtttttctaataaaaaattaatgtttaataagtttccaaaaattccatattcagattcaattttaaaatatggcactgacaaacctgatttgagaaatccgttattaattaacgatattactgaaatttttaaaagagatgacatttcatttgaaatttttaaaaaattagtaaaatcaggttctaaagtaagatgtattgttactaaaaatacaaaagataagccaagaagtttctttgataatattgataaatgggcaaaagaacaaggagcttctggtttagcctattttacttttgaaaaagataaagctattactgcaaaaggccctataggaaaatttttttctaatgacgctttagtagaaattatgaacataacaaaagcggaggttggagatagtatatttttggcatgtgataaagagaaggaagttcagaaaattacttcacaagcaagagataaaattgctcaagatttaaaattgatagatgaaaatacttttgctttttgttggatagttgattatccaatgtttgaaaaagatgaaattacaaaaaaaattcaatttagtcacaatccattttctatgccccagggatctattaaagaaattaattttgaaaaaccattagatattcttgcttatcaatatgatattgtttgtaatggaattgaactatcttcaggagcaattagaaatcatatacctgaattgatgtataaacttttctcaatcgctggatacaataaaaaacaagttgatgagaagtttagtggaatgataaatgcacttagttatggagctccacctcatggggggattgcccctggtatagacagaatagttatgcttctagcaaatgaaa

SEQ ID NO: 297645 - DNA, 598 bp, Unknown
  Bacterial polypeptide expressing nucleotide sequence isolated from the Sargasso Sea
tgatactattttcatgtcttgtggaaaaaaatctgaagtagaaaaattattatataaagctagaaataaaatagcgaacgaactaaatttaattgatgataacgttttttcattttgttgggtagtagattatccaatgttcgaatttgatgaaaatacaaaaaaaattgaatttagtcataatcctttttcgatgccgcaaggtgatactaataatttagatctatcagagccattaaaattgaaagcatttcaatatgatattgtttgtaatggaattgaattatcatcaggggcaattagaaatcataaacctaatttgatgtacaaacttttcgaaatagcagggtactcaaaagaaactgtaaatgacaaatttagtggaatgattaatgctttaagttacggagcacctccacatggtggtattgctcctggtatagatagaattgttatgttgttagcagatgaaaaaaatattagagaagttacaatgtttccaatgaaccaaaatgcacaagatctaatgatgaacgcaccgtctgaagttgatgataatcaattaaaagaattaaatatttcaaaaaggaaaaattaa

SEQ ID NO: 297646 - DNA, 394 bp, Unknown
  Bacterial polypeptide expressing nucleotide sequence isolated from the Sargasso Sea
attagaaaagaaatggaaaaactttggttttaacgaatttcaaacgcctatactaacatcatcaagtccagaaggagcacgagattttctagttccgagcagattaaacccgggtaaattttatgcattgccacaagctccacaacaattcaaacaattaataatggtatcaggatttgatagatattttcaaattgctccatgttttagagacgaagacgcaagagcagatagaagtccaggagaattttatcaattggatattgagatgtcatttgtagagcaagaagatgtatttaaggtagtcgaaaatttaatggtaagtctgtttagtaatttttctaaaaaaaaattgatctataaaaaatttcctcgaattccgtttaaagaagca

SEQ ID NO: 297647 - DNA, 736 bp, Unknown
  Bacterial polypeptide expressing nucleotide sequence isolated from the Sargasso Sea
aatgcatcaatatagaacacataattgtaatggcttgcgagctgaagatattaatcaagaagttagattatcaggctgggttcacagaaaaagagatcatggcggtcttttgtttattgatttaagagatcattttggtttaacacagttagtttttgatccagatagcagtgctttcaaagaagcagaaaaagtaagaaatgaatctgtaataacaattaatggaaaagttgtacaaagatcagatgacactattaataaagtattaccaactggaaaaattgaggtttatgtcgatacacttgaagtaattgggagttcagatgatattccattaccagtttttggtgaacctgattatccagaagaaataagactaaaatataggtttttagatttaagaagagaaactcttcataagaatataatattaagatctgaaattattaattttattagaaataagatgattaaaaatgactttcttgagattcaaacaccaataatgaccgcatctagccctgaaggagcaagagattatttggttccttcaagggtacatcaaggtaaattttatgctcttcctcaagctccacaacagtttaaacaactccttatgacttcaggttttgataagtattttcagattgctccatgttttagagatgaggatgctagagctgacaggtctcccggagaattctatcaattagatattgaaatgagctttgttaat

SEQ ID NO: 297648 - DNA, 697 bp, Unknown
  Bacterial polypeptide expressing nucleotide sequence isolated from the Sargasso Sea
gttgaggaagctagtatatgctggactaaactccccgattcttaaatacctatctaaaaaatgtttagagagcattctaaataatttggaacttaaaaaggactctttagttttctttggcgctggggacaagaagatagttaacgattatatgagcaaacttatttctagaataggtttagatcttagcttgctggatgatggttatcaattttgctgggtaaccgattttccaatgtttgaaaggtcttcagatggaactttaacttctcttcaccatccatttacaagccccgaagaagatgacccaaaaaaattaataaaaattgatccaataaaaatgaattcaagagcatatgacatggttgttaatggaattgaaatagggggcgggtctattcgtattcacagaaatgatactcaaaaacaaattttttcgatacttggtttaactgaagaagaaacaaaagaaaaatttggcttttttttgaaagctttaaaaactggatgtcccccacatggaggaatagcatttggtcttgataggctcgcaatgattatgactaattctgaatctataagagatgttatagcatttccaaaaactcagtcagcactatgccttctaactgaagcgcctggatcagtccctgataagagtcttgaagagttgaaaatagaaaggaaagaagattaa

SEQ ID NO: 297649 - DNA, 871 bp, Unknown
  Bacterial polypeptide expressing nucleotide sequence isolated from the Sargasso Sea
taaagagttaccaattccagtttttggagagcaagattatcctgaggatatcagattaaaatatagatttttggatttaagacgagaagaagttcataagaatataattttaagatcaaaagttatttcttttataaggtctgaaatgcttaaattaggttttttagaatatcaaactccaatacttacatcttctagtcctgagggcgctagagattttttagtcccaagcaggttaaatcctggaaaattttatgcgcttccccaggcgccacaacaatttaaacaattaataatgattgccggtttcgataaatattttcaaatcgctccttgttttagagatgaggacgcgagagccgatagaagtccaggcgagttttatcagcttgatctggaaatgtcgtttgttgagcaagaggatgtttttaaggtaattgaaaaattaatggttaatgtattcaaacagttttcatctaaaaaaattttatctactacttttcctcgtattactttcagtgatgcaatggataaatatggtacagataaaccagacttaagaaatccacttattataaaagatataacaaaaatatttatgagaactgatgtcaagtttgaaatatttaaaaatttagtaaaaaaaggtgctaaggtgaaagcaatagtaacaaaaaatacaaaagacaaacctagaagttttttcgatagtattgataggtgggcgaaagaacaaggatctgcagggttagcatactttacttttgaaaagaaagaaaatctttcaggcaaagggccagtaggaaaattttttgagactgaggcaattaaagagataatgaatatttctgatgcaaaaatcggggatagt

SEQ ID NO: 297650 - DNA, 631 bp, Unknown
  Bacterial polypeptide expressing nucleotide sequence isolated from the Sargasso Sea
tatgaaaatatgtaatgcacaggttggggatagtatttttatggcttgtggcaaaattaacgaggtagaaagaatattgtctatatcaagagataaaatagcaaacgatttaaaattaataaaaaatgaccaatttaatttttgttggataattgattaccctatgtttgaattagacgagcagacaaaaaaaattaaattcagtcataatcctttttcaatgccacaaggagatctcattaaattagactttagtaaacctctggatataaaagcttaccaatatgatattgtatgtaatggagttgagctatcttcaggagctattagaaatcatataccagacttaatgtataaattattctctatagctgggtatgataaattccaagtcgagagtaaatttagcggaatgataaatgccttaagttatggagctccaccacatggaggtatagctcctggtatagatagaatcgtaatgcttcttgctaatgaaaaaaacattagagaagttactctttttcctatgaatcaaaatgctcaagacttaatgatgaacgccccatctgaagtagatagcaaacaattaaaagaacttagtattaaaactgaaattaaaaaaaattaa

SEQ ID NO: 297651 - DNA, 928 bp, Unknown
  Bacterial polypeptide expressing nucleotide sequence isolated from the Sargasso Sea
tattttaagatctaaggttatttcatacatccgaaatgaaatgactaaattaggttttttagaatttcaaacaccaattttaacctcatctagcccagagggtgctagggattttttagtacctagtcgtttaaatccaggaaaattttatgcactaccacaagctcctcagcaatttaaacaattaataatggtttcgggctttgatagatactttcaaattgcaccttgtttcagagatgaagatgcaagagcagacagaagtccaggggagttttatcaattagatttggaaatgtcatttgttgaacaagaggatgtatttaatgttgttgaaaagttaatggttaatacatttaaaaatttttcaactaaaaaactgatgtatgataaatttcctaagatttcatacaaggaatcaatacttaaatatggttctgataaaccagatttaagaaacccactcattataaatgatataactgaaatttttacaagagaagatgtttcatttgaaatatttaaaaaattagtaaaatctggatctaaagtaagatgtattgttactaaaaatacaaaagataagcctagaagtttttttgataatattgataaatgggctaaagaagaaggtgcttctggtttagcttattttacttttgaaaaagataaagatatttcagcaaaaggccctataggaaaattcttttctaaagatgcattggccgaaattatgaaaaaaacaaactgtgaaataggggatagtattttcatggcttgtggaaaacaaaatgaattagaaaaaattactgcactagcaagagataaaatcgcaaaagatctagatttaattgacgaaaatgttttcgcattttgctggattgtagactatccaatgtttgaaaagatgaaacaacaacaagattga

SEQ ID NO: 297652 - DNA, 752 bp, Unknown
  Bacterial polypeptide expressing nucleotide sequence isolated from the Sargasso Sea
aatattattttaagatcaaatgtaatttcttttatcagagaacaaatgaatgaattaggttttttagagtttcaaactccaattttaacttcatcaagtcctgaaggtgcaagagattttttggttccaagtagattgaatcctggaaagttttatgcgcttccacaagctcctcagcaatttaaacaattgataatggtctcaggttttgacaagtattttcaaatagctccttgttttagagatgaagatgcaagagccgacagaagtccaggtgaattctatcaacttgatttagaaatgtcattcgtagaacaagaagatgttttcagtgtagtggaaaaattgatgatgaaattgtttaaaaatttttcttcaaaaaaacttataaataataaattccctagaattccttatgaggaagcaatgttaaaatatggaacagacaaacctgatttaagaaatccattattgatatatgatttgacaaatatttttaccagagaagatgtaaaatttgatatttttaaaaaattagtaaaatctggatcaaaagtaagggcaattgttacaaaaaatacaaaagacaaaccaagaagtttttttgataatatagataaatgggcaaaagatgaaggagcctcaggtcttgcatattttacaattgaaaatcaaaatgaaatttcggcaaaaggaccagtaggaaaatttttttcaaaaaattcattagaagaaattatgaaaattacagg

SEQ ID NO: 297653 - DNA, 977 bp, Unknown
  Bacterial polypeptide expressing nucleotide sequence isolated from the Sargasso Sea
agcaagagattttgttgttccatccaggataaacaaaggtgaattttatgccctacctcaatctcctcaaacattcaaacaacttttaatggttggtggaattgataaatattgccaggtggttaaatgctttagagatgaagatttgagatcagatcgccaacctgaatttactcaaatcgattgtgaaatgtcttttgttaatcaagatgatgttttattggtgtttgaaaacctaattaaaaatattttcaaaaaatgcattggtgtagagttggataattttcccaaaatttcatactgggaagcaattgaaaattatggttctgataagcccgacacgaggtttgatatgaaaatttttgattgtactaaaagcagcaaaggaaaaggttttaaaatattggatgatagtgaatatgtttgcggaattacagttgattcggctgaacccctatccagaaaacaaatcgatcaatacacggatttggttaaacaacctcaaattggtgcaaaaggattaatatggatcaagcacaataatgatggcagttttaaatcctccattgataagttttacaatcacgatgaacttttaaagattgttggaaatttttcagaagactccactacatttttaatttccggaaataaaatgaagtctttgactcagcttggacagcttagattaaaaattgcggatgatttaaaattaatcaatccaaaaaaattctgtcctctatgggttaatgacttccccctttttgattgggatgaagacgataaaaaatatcattccattcatcatccatttacctcgccaaaagacaaaaacatccatgagattaaagaaccttctaatgtcgttgcagatgcttatgacctagttattaatggaaatgaaattggtggtggatctattaggattcacaacagagatttacaaaatcaaatttttttcatattaggatttagtg

SEQ ID NO: 297654 - DNA, 657 bp, Unknown
  Bacterial polypeptide expressing nucleotide sequence isolated from the Sargasso Sea
tcagtgaagagtctattgaggaaataatgaaaatttgtaatgcaagcccaggagatagtatttttttttcatgtggtaaacaaagtgaaatcgagaagattttatctcttgcaagaaataaaataggtcaagaattaaacttaatagatgataatcaattcgcattttgttggattgtagactatccaatgtacgaattagatgtcaaaactaataaaattaagtttagtcataatcctttttcaatgccccaaggtgatattaataatcttgattttaaaaacccacttaaaataaaagcttttcaatatgatattgtatgtaatggtgttgagctatcctctggggctataagaaatcacataccagatcttatgtataaattgttttcaattgttggatattcagaaaaagatgttaatgagaaatttagcgggatgataaatgctttaagttatggagctcctccacacggaggtattgcaccaggtatagacagaatagtaatgttgttggctaacaaacaaaatataagagaaataacccttttcccaatgaatcaaaatgctcaagatttgatgatgagagctccgtcaaaagtaaatgatgatcaattaaaagaacttggtatcaaattagatattaagaaaaattagt

SEQ ID NO: 297655 - DNA, 818 bp, Unknown
  Bacterial polypeptide expressing nucleotide sequence isolated from the Sargasso Sea
atctaaagttagatctattactactaaaaatacaaaagataaacctagaagtttttttgataatattgataaatgggccaaagaccaaggtgcgtccggactagcatactttacctttgaaaaagataataaaatttcagctaaaggaccggtgggaaaatttttttctgaagatgcactcttagaaataatgaaaatcactaaatctgagttaggtgatagtatttttttagcatgtggaaaacaaaatgaattagaaaaaataacagccctagctagagataaaattgctaaagatttagatctaattgatgatgatacttttgctttctgctggatagttgactatcctatgtttgaaaaagatgaattaacaaataagattaaatttagtcataacccattttcaatgccacagggtgaattaaaagataaagattttgaaaatcctctagatattcttgcttaccaatatgatatagtttgtaatggaatagagttatcttctggtgcaataagaaatcataaacctggactcatgtataaactcttttcaattgcaggttacaataaagcagaggtagatgaaaaatttagtgggatgattaacgcattaagatatggtgcaccaccacatggcggaattgcacccggaatagatagaattgtcatgcttttagcaaatgaaaaaaatataagagaagttactatgtttccaatgaaccaaaacgctcaagatttaatgatgaacgcaccatcagagattaatcaagaccaattgaaagaattaaatctaacaataaaaactaagaattaaa

SEQ ID NO: 297656 - DNA, 863 bp, Unknown
  Bacterial polypeptide expressing nucleotide sequence isolated from the Sargasso Sea
tcaaatcacagttgatccagatcaaggtcaggatctttttagcatcgctgaaagtcttagaaatgagactgttcttctgatcaatggattagtaagagcgagacctgacgaagctattaatacaaaaatcccaacgggtgaagtagaagtcttagctaaaaatataaaaattctcaataatgtaactagtacacttcctttctcagtgtcaattcatgatgaggagagtgttaaagaagagatcaggctaaggcatagatatttagatcttagaagagagagaatgaataataatcttcgattgagacataacactgtcaaagcggctagaagttttcttgaaaacgaaggatttatagaagttgaaacaccaattttaactcgctcaactcctgaaggagccagagattacttagtcccctcacgtgtatgtggtggcgagttttttgctttaccgcaatccccacaattatttaaacaattgttgatggttggtggagttgaacgttattaccaaatcgctcgttgttttcgtgatgaagatttacgcgcagacaggcaaccagaatttactcaattagatattgaaatgagttttatggaggaaaaagagatcattgaattaaatgaaaaattaattgtaaatatttggaaaaaaatcaaagggattgatctccaaactccgtttccaagaatgacttggcaagaagctatggatcgttttggaactgacagacctgatactcgatatggaatggaacttgtcaacacaagtgatttattttccaaaagtggatttaaagttttttcaaatgctatttcttcaggtggatgcgttaaatgcatcacaattgatgatggaa

SEQ ID NO: 297657 - DNA, 541 bp, Unknown
  Bacterial polypeptide expressing nucleotide sequence isolated from the Sargasso Sea
agagataaactttgtttagaaatgaacttacttgatatgaattcatttaaattctgctggattgttgattttcctatgtatgaattagatgaaaaaacaaataaaattcaatttagtcataatcctttttctatgcctcaaggtgaattagaatctttagaaacaaaaaatcctttagatattaaagcttttcaatatgatattgtttgtaatggagtagaattatcttctggagctatcagaaatcacaaaccagaaattatgtacaaagcttttgaaattgcggggtataaaaaagaagaagttgaaaaaaaattttcaggaatgcttaatgcactaaaatttggtgcaccaccccatggaggtagtgccccaggaattgatagaatagttatgttattagctgacgaaccaaatatccgtgaggtaatagcctttcctatgaatcaacaagcaatggatttaatgatggaagctccagcagaaattaataaagaacgattagaagaattgggattaaaactaatagagaaaaattaat

SEQ ID NO: 297658 - DNA, 905 bp, Unknown
  Bacterial polypeptide expressing nucleotide sequence isolated from the Sargasso Sea
aggagaggagttgagaatggaatatcgttatcttgatttgagaagatctgttgttaaaaacaaccttcttcttaggaataaagtttctctagaaacaagaaaatatatggattcacaagggtttatggatgttgaaacccctgttttgataaagtcaacacctgaaggagcacgagattttgttgttccaagtagaatgaacgaaggtcagttttatgccttgcctcagtctcctcaaacatttaaacaattgttaatggtatcaggaattgacaggtattatcaaattgtaaaatgttttagagatgaagatttgagagccgatagacaacctgaatttacacaaattgattgcgaaatgtcttttgtagaacaggaagatgttcttcaaacttttgagggaatgattaagcatctatttgcctcaattttaaacgtttcttttaccgatgaattcccaagaatcacatatagtgatgctatgaaactatacggatctgataaacccgatattcgatttgggatgaagtttgttgacatttcagatgaagctaagggtaaaggctttggaatttttgacaattctgaagcgattttatcaataaatgtaagcgaagcagcatcttttactcgtaaacaactcgataaattgatcgattgggttaaaagacctcaaattggagcaaaaggaatgatttatctaaaatataatgaagatggcacttttaaatcttcagttgataaattttacaattcagatgatttaaagaaatgggctgacaaagctgaaatgcaaaaaggagatttattattggttctttcaggggagaaacaacaaacccaaaagcaattaagcgagctaagactgcatgttgcagatgaaagaggtttgagaaaccctaagg

SEQ ID NO: 297659 - DNA, 853 bp, Unknown
  Bacterial polypeptide expressing nucleotide sequence isolated from the Sargasso Sea
gaatttacccaattagatattgaaatgtcttttgtgaccgagaatgacttgattgcgcttatggaaaaaatgataaaacaactttttagttctgttttggaagtttctctggtggagcccttccataggatgtcttataaagatgctatggaaaaatatggtactgaccgacctgatttaagaaaccctttagagctcgttgagctttcagagactgtgaggggttgcgagtttcaagtattcgctgaaccagcggctgcagataatggaagagttgcgctcctaaaagtgcctgaggctcgtagtattaccaggagccaaattgacagttatactgatcttgtttgtcagcatggagccaaaggattagcttatataaaggttaatgaccttgaaaaaggcatagaaggtcttcaatctcctattttgaaatttttgtcggagccgattgtaaacgctatattagaagctgcagatgcccgaaatggagaccttatattttttggggcagggaaaagtaaaattgtgaatgagtctttgggggtcttacgattgaagcttggcgaagacttaggtctgacagaagatcagtggcgattttgttgggtgcaagattttccaatgtttgaaaagaacgatagcggtgctttgacgcctcttcatcatccttttacagcttcctatcaggatgtggaggtcttgcagcaaaaaccggaaagtgcaatatcaagagcatatgatcttgtcttaaatgggctcgaaattggagggggatctataagaatcgacgatatcaaaactcaattggcagtccttaaagttcttgggataaatcaggggaagcacaagaaaa

SEQ ID NO: 297660 - DNA, 687 bp, Unknown
  Bacterial polypeptide expressing nucleotide sequence isolated from the Sargasso Sea
ttaaaagtagaggacctgtaggaaaattctttagtgaagattcacttaaagaaatgatgaaaaactttaatgcagagattggtgatagtgtttttcttgctgcgggtcaagaaaaggaaatggaaaaaattctttctttagctagagaaaagattgctacagatttacatattattgacaaggaaaaattcgctttttgttggattgttgattatccaatgtatgagtatgatgaaaatttaaaaaaaattacttttagtcataatccattttcaatgccacaaggtaaaataaacgaattaaattttgacgaaccactggatattaaagcttatcaatatgatattgtatgtaatggtatagagttatcatctggggcaattagaaatcatataccagaactcatgtataaattattttccatagctggttattctaaaaaactagttaatgaaaaatttagcggaatgataaatgcatttagttatggcgcaccaccacatggaggtatagctcctggtattgatagaattgtaatgttattagcgggaaaagaaaacataagagaggttactttatttccaatgaatcaaaatgctcaagatttaatgatgcaagctccctctgaagtagatgataatcaattaaaagaattaaatataaaaaaaaatattaagaaaatttaat

SEQ ID NO: 297661 - DNA, 580 bp, Unknown
  Bacterial polypeptide expressing nucleotide sequence isolated from the Sargasso Sea
gcagataagagagaaattgtgaatgcttctctaggtgctcttcgagtaaaaatggcagaggatttcggtttaatcaaagacgggtggtttcctctttggataactgactttcctatgtttcattgggatgagaaagaaaaaagatggtcctctgaacatcatccattcacatcaccagtaaatccagatccagaggaactaaaaaataatccaaaggattcgttatcaaaaggttatgacatggtactcaatggacatgaaatagggggtggatccattcgtattcattctgaagaaatgcaacaagctgttttttcaatacttggtataaatgaagaagaagcagatgaaaaatttggttttttccttgaggcactaaagtatggatgtccaccgcatggtggaattgcatttggaattgaccggattgtcatgctcatgacaggatcatccagtatcagggatgtcattgcattccctaagacacaaactgcaagctgcctactcactgatgcgccaagccttgctggtaaatcacaattaaatgaattgggtatctctgtcaaaaagaaaagctaaa

SEQ ID NO: 297662 - DNA, 892 bp, Unknown
  Bacterial polypeptide expressing nucleotide sequence isolated from the Sargasso Sea
tggaatagcagatattactgaaatttttaaaagagatgatgttaattttgaaatatttaaaagattagtgatcaaaggatcgattgttagaggaattgttacaaaaaatacatctgaaaaaccaagaagtttttttgatggtatcgataaatgggcaaaagatgaaggatcttcaggccttgcgtatttttccatagaaaattctgataaattgagtgccaaaggacctgtgggtaaatttttttctgacgaatccttgaaagagataatgacaaaaatgaatgccgaggtaggtgatacaatatttatgtcttgtggaaataaatctgaagttgaaaaattattaagtaatgctagaaataaaatagcaaatgaattaaacttaattgacgaaaatgttttttcattttgttgggtagttgattatccaatgtttgaaatagatgaaaatacaaaaaagatcgaatttagtcacaaccctttttctatgccgcaaggtgatattggcaatttagatatttcagaacccctgaaattaaaagcttttcaatatgatattgtatgtaacggaattgaattgtcttctggagcaatcaggaaccataatcctgatttaatgtataaattatttgaaatcgctggctactctaaggacacagtgaatgagaaatttaaaggcatgataaatgctttaagctatggtgcacctccacatggtggtattgcccccggtatagataggattgtgatgttattagcagaagaaaaaaatattagagaagtaacgatgtttccaatgaaccaaaatgctcaagatttaatgatgaatgcaccttcagaagtagacgaaaatcaattaaaagaacttaatatttcaaaaagaaataaataa

SEQ ID NO: 297663 - DNA, 507 bp, Unknown
  Bacterial polypeptide expressing nucleotide sequence isolated from the Sargasso Sea
atcaagactcttttgctttttgttggataattgattatcctatgtttgagacaaatgatcaaacaggaaaaattgagtttagtcataatcctttttcaatgccacagggaaatttaaaaaagatcaattttcaaaaaccacttgatatacttgcttatcagtatgatattgtttgtaacggagtagaactttcttccggagcaataagaaatcatattcccgaacttatgtataaacttttcttaattgccggttatgataaaaaacaagtagatgaaaaatttagtggtatgattaatgctttaagttatggagctcctccgcatggtggtatagctccaggtatcgacaggatagtaatgttattagctaacgaaaaaaatattagagaggtgacgatgtttccaatgaatcaaaatgctcaggatttaatgatgaaagcgccatcagaaataaatgaaaaacaattaaaagaacttaacttgtctttaaaagtaaaaaagtaat
